United States Patent Application Publication US 2023/0127948 A1 - sequence listing, part 2

SEQ ID NO: 8806 - DNA, 16 bp, Artificial Sequence
  Synthetic
gggcagggctcgcata

SEQ ID NO: 8807 - DNA, 21 bp, Artificial Sequence
  Synthetic
tggcacatgaaatactgattg

SEQ ID NO: 8808 - DNA, 19 bp, Artificial Sequence
  Synthetic
gcgacatgctgaataaagc

SEQ ID NO: 8809 - DNA, 20 bp, Artificial Sequence
  Synthetic
atacaggcagcaatttcaac

SEQ ID NO: 8810 - DNA, 20 bp, Artificial Sequence
  Synthetic
aattggattgtgttctggag

SEQ ID NO: 8811 - DNA, 25 bp, Artificial Sequence
  Synthetic
tcagaggatttgtattagtagttga

SEQ ID NO: 8812 - DNA, 25 bp, Artificial Sequence
  Synthetic
ggatttgtatctaattttgcaatgg

SEQ ID NO: 8813 - DNA, 22 bp, Artificial Sequence
  Synthetic
gctatgggaaaacactaaagga

SEQ ID NO: 8814 - DNA, 21 bp, Artificial Sequence
  Synthetic
ggaactcatagttggagaacc

SEQ ID NO: 8815 - DNA, 21 bp, Artificial Sequence
  Synthetic
caggggttataccatagacaa

SEQ ID NO: 8816 - DNA, 18 bp, Artificial Sequence
  Synthetic
ggatggctccttggaaat

SEQ ID NO: 8817 - DNA, 22 bp, Artificial Sequence
  Synthetic
gtaaaccatcattcttcaggaa

SEQ ID NO: 8818 - DNA, 21 bp, Artificial Sequence
  Synthetic
gaatggaattctcttggaccc

SEQ ID NO: 8819 - DNA, 21 bp, Artificial Sequence
  Synthetic
atcggagaaattggtcttagc

SEQ ID NO: 8820 - DNA, 25 bp, Artificial Sequence
  Synthetic
aaacttgacagaagataaaaatggg

SEQ ID NO: 8821 - DNA, 20 bp, Artificial Sequence
  Synthetic
catagttcaaatggagcctg

SEQ ID NO: 8822 - DNA, 23 bp, Artificial Sequence
  Synthetic
tatagcggcattagtaataacca

SEQ ID NO: 8823 - DNA, 25 bp, Artificial Sequence
  Synthetic
ttctaccatatattgaacaacccaa

SEQ ID NO: 8824 - DNA, 25 bp, Artificial Sequence
  Synthetic
ttaagtgaaatactaggaatgcttc

SEQ ID NO: 8825 - DNA, 25 bp, Artificial Sequence
  Synthetic
tgatagtgacaatgatctatcactt

SEQ ID NO: 8826 - DNA, 18 bp, Artificial Sequence
  Synthetic
ggtgcccatgttccaatc

SEQ ID NO: 8827 - DNA, 25 bp, Artificial Sequence
  Synthetic
catcagtgtcagaaataaagatctg

SEQ ID NO: 8828 - DNA, 21 bp, Artificial Sequence
  Synthetic
ccatcataatcaccaaccctc

SEQ ID NO: 8829 - DNA, 23 bp, Artificial Sequence
  Synthetic
ttaagactaacaataacgttggg

SEQ ID NO: 8830 - DNA, 22 bp, Artificial Sequence
  Synthetic
caacaacaaccaaaatacaacc

SEQ ID NO: 8831 - DNA, 20 bp, Artificial Sequence
  Synthetic
tcaacaccaccaaaacaaac

SEQ ID NO: 8832 - DNA, 22 bp, Artificial Sequence
  Synthetic
cgtattattgcaaaaagccatg

SEQ ID NO: 8833 - DNA, 20 bp, Artificial Sequence
  Synthetic
ctgtatctaaggtcctgcac

SEQ ID NO: 8834 - DNA, 22 bp, Artificial Sequence
  Synthetic
ctatgtacaaccaacacaaagg

SEQ ID NO: 8835 - DNA, 22 bp, Artificial Sequence
  Synthetic
tgttatcattaattgccgttgg

SEQ ID NO: 8836 - DNA, 24 bp, Artificial Sequence
  Synthetic
taagtctatggataaaagcatcga

SEQ ID NO: 8837 - DNA, 25 bp, Artificial Sequence
  Synthetic
gaatgtgatttatacaactgtgtag

SEQ ID NO: 8838 - DNA, 23 bp, Artificial Sequence
  Synthetic
tctgagagacaagctaaaattac

SEQ ID NO: 8839 - DNA, 25 bp, Artificial Sequence
  Synthetic
ggtgtatgcatctatagataacaag

SEQ ID NO: 8840 - DNA, 18 bp, Artificial Sequence
  Synthetic
ggcgacactccaccatga

SEQ ID NO: 8841 - DNA, 19 bp, Artificial Sequence
  Synthetic
tgcaccatgagcacgaatc

SEQ ID NO: 8842 - DNA, 19 bp, Artificial Sequence
  Synthetic
cgtaggtcgcgcaatttgg

SEQ ID NO: 8843 - DNA, 20 bp, Artificial Sequence
  Synthetic
cgagtattgtgtacgaggcg

SEQ ID NO: 8844 - DNA, 19 bp, Artificial Sequence
  Synthetic
ataacgggtcatcgcatgg

SEQ ID NO: 8845 - DNA, 18 bp, Artificial Sequence
  Synthetic
gctggttagcagggctct

SEQ ID NO: 8846 - DNA, 18 bp, Artificial Sequence
  Synthetic
tacctacagctggggtgc

SEQ ID NO: 8847 - DNA, 18 bp, Artificial Sequence
  Synthetic
gtacgtgggaggggtcga

SEQ ID NO: 8848 - DNA, 20 bp, Artificial Sequence
  Synthetic
actcatatcccaagcggagg

SEQ ID NO: 8849 - DNA, 19 bp, Artificial Sequence
  Synthetic
cgcgatgccgtcatcttac

SEQ ID NO: 8850 - DNA, 20 bp, Artificial Sequence
  Synthetic
aaccatctcacccctcttcg

SEQ ID NO: 8851 - DNA, 19 bp, Artificial Sequence
  Synthetic
ggtgaggtccagatcgtgt

SEQ ID NO: 8852 - DNA, 16 bp, Artificial Sequence
  Synthetic
gggggtccgctgttgt

SEQ ID NO: 8853 - DNA, 18 bp, Artificial Sequence
  Synthetic
aaggcccatggggttgat

SEQ ID NO: 8854 - DNA, 18 bp, Artificial Sequence
  Synthetic
caaggctatccccctcga

SEQ ID NO: 8855 - DNA, 18 bp, Artificial Sequence
  Synthetic
tctccaggactcaacgcc

SEQ ID NO: 8856 - DNA, 16 bp, Artificial Sequence
  Synthetic
caagccaccgtgtgcg

SEQ ID NO: 8857 - DNA, 20 bp, Artificial Sequence
  Synthetic
tgacagggaggttctctacc

SEQ ID NO: 8858 - DNA, 19 bp, Artificial Sequence
  Synthetic
actggccaaaccctcctct

SEQ ID NO: 8859 - DNA, 16 bp, Artificial Sequence
  Synthetic
cgagggggcagtgcaa

SEQ ID NO: 8860 - DNA, 18 bp, Artificial Sequence
  Synthetic
tataggggggtctggcga

SEQ ID NO: 8861 - DNA, 20 bp, Artificial Sequence
  Synthetic
ttcacagaattggacggggt

SEQ ID NO: 8862 - DNA, 19 bp, Artificial Sequence
  Synthetic
aggctaacctcctgtggag

SEQ ID NO: 8863 - DNA, 20 bp, Artificial Sequence
  Synthetic
gtggtcctcaccgaatcaac

SEQ ID NO: 8864 - DNA, 20 bp, Artificial Sequence
  Synthetic
aaaaactgcccatcaacgca

SEQ ID NO: 8865 - DNA, 20 bp, Artificial Sequence
  Synthetic
gacactaccatcatggccaa

SEQ ID NO: 8866 - DNA, 19 bp, Artificial Sequence
  Synthetic
gacatccgtacggaggagg

SEQ ID NO: 8867 - DNA, 18 bp, Artificial Sequence
  Synthetic
gaccccccacaaccagaa

SEQ ID NO: 8868 - DNA, 20 bp, Artificial Sequence
  Synthetic
gcctgctactccatagaacc

SEQ ID NO: 8869 - DNA, 22 bp, Artificial Sequence
  Synthetic
aggtactgatccaaaatggaag

SEQ ID NO: 8870 - DNA, 21 bp, Artificial Sequence
  Synthetic
ttgaaataatcgaagggaggg

SEQ ID NO: 8871 - DNA, 21 bp, Artificial Sequence
  Synthetic
atgaaaaaggcataaacccca

SEQ ID NO: 8872 - DNA, 19 bp, Artificial Sequence
  Synthetic
gaattcaacaaggcatgcg

SEQ ID NO: 8873 - DNA, 21 bp, Artificial Sequence
  Synthetic
aaggaagacggaaaactaacc

SEQ ID NO: 8874 - DNA, 18 bp, Artificial Sequence
  Synthetic
gcatggaaatgaggcgat

SEQ ID NO: 8875 - DNA, 21 bp, Artificial Sequence
  Synthetic
gcgatacctaactgacatgac

SEQ ID NO: 8876 - DNA, 20 bp, Artificial Sequence
  Synthetic
ttgaggatgtcaaaaatgca

SEQ ID NO: 8877 - DNA, 25 bp, Artificial Sequence
  Synthetic
catgatttataaaataagggaggga

SEQ ID NO: 8878 - DNA, 19 bp, Artificial Sequence
  Synthetic
tacattgctggaagccata

SEQ ID NO: 8879 - DNA, 18 bp, Artificial Sequence
  Synthetic
acctgtgcttcacgacta

SEQ ID NO: 8880 - DNA, 20 bp, Artificial Sequence
  Synthetic
agatgtagaggcagtgcaac

SEQ ID NO: 8881 - DNA, 22 bp, Artificial Sequence
  Synthetic
ccaaaatagctatgctagacga

SEQ ID NO: 8882 - DNA, 25 bp, Artificial Sequence
  Synthetic
ggaaatcattctttaaaaggtcatg

SEQ ID NO: 8883 - DNA, 18 bp, Artificial Sequence
  Synthetic
cacttgctgtgtcaaagg

SEQ ID NO: 8884 - DNA, 18 bp, Artificial Sequence
  Synthetic
atggggagggatggacta

SEQ ID NO: 8885 - DNA, 18 bp, Artificial Sequence
  Synthetic
cgttacagcaagtgcctg

SEQ ID NO: 8886 - DNA, 18 bp, Artificial Sequence
  Synthetic
taactgcctcatcgccat

SEQ ID NO: 8887 - DNA, 25 bp, Artificial Sequence
  Synthetic
gtgatatggtagatataggatttgg

SEQ ID NO: 8888 - DNA, 23 bp, Artificial Sequence
  Synthetic
cttgacagttctatttatgctgc

SEQ ID NO: 8889 - DNA, 23 bp, Artificial Sequence
  Synthetic
ttatgtaccataacccttacagc

SEQ ID NO: 8890 - DNA, 19 bp, Artificial Sequence
  Synthetic
ggctcgcatctctccttca

SEQ ID NO: 8891 - DNA, 17 bp, Artificial Sequence
  Synthetic
cgactgactgccggctt

SEQ ID NO: 8892 - DNA, 20 bp, Artificial Sequence
  Synthetic
agaaacaccggtctggatct

SEQ ID NO: 8893 - DNA, 20 bp, Artificial Sequence
  Synthetic
aagcaagaagtctcccaagc

SEQ ID NO: 8894 - DNA, 20 bp, Artificial Sequence
  Synthetic
tgtccaagccaacaatccac

SEQ ID NO: 8895 - DNA, 20 bp, Artificial Sequence
  Synthetic
ctaggagatatgttgcgggc

SEQ ID NO: 8896 - DNA, 20 bp, Artificial Sequence
  Synthetic
taccaaaaacaactgggcca

SEQ ID NO: 8897 - DNA, 18 bp, Artificial Sequence
  Synthetic
gcaacacttggtccggaa

SEQ ID NO: 8898 - DNA, 20 bp, Artificial Sequence
  Synthetic
cccacagcagtgtaactacg

SEQ ID NO: 8899 - DNA, 20 bp, Artificial Sequence
  Synthetic
tatgatgcagtccccaaggt

SEQ ID NO: 8900 - DNA, 20 bp, Artificial Sequence
  Synthetic
aggggctattatgctgaccc

SEQ ID NO: 8901 - DNA, 20 bp, Artificial Sequence
  Synthetic
cattaccttcggacccttgc

SEQ ID NO: 8902 - DNA, 20 bp, Artificial Sequence
  Synthetic
gctatttcctctttgctcca

SEQ ID NO: 8903 - DNA, 20 bp, Artificial Sequence
  Synthetic
tcctggtcttaatagccgcc

SEQ ID NO: 8904 - DNA, 18 bp, Artificial Sequence
  Synthetic
cttccagttctgccccct

SEQ ID NO: 8905 - DNA, 19 bp, Artificial Sequence
  Synthetic
gcggaggctattattcagc

SEQ ID NO: 8906 - DNA, 20 bp, Artificial Sequence
  Synthetic
agctatagtctcctccccct

SEQ ID NO: 8907 - DNA, 18 bp, Artificial Sequence
  Synthetic
cgcgtcagatacccccat

SEQ ID NO: 8908 - DNA, 16 bp, Artificial Sequence
  Synthetic
gcgaagtcagcggcct

SEQ ID NO: 8909 - DNA, 20 bp, Artificial Sequence
  Synthetic
agcacagtttcctcctcctc

SEQ ID NO: 8910 - DNA, 18 bp, Artificial Sequence
  Synthetic
ctactggccacctgtcca

SEQ ID NO: 8911 - DNA, 18 bp, Artificial Sequence
  Synthetic
cttccgttccactcaacc

SEQ ID NO: 8912 - DNA, 18 bp, Artificial Sequence
  Synthetic
gaaggtcagggcccagaa

SEQ ID NO: 8913 - DNA, 18 bp, Artificial Sequence
  Synthetic
catggcacgcatacggct

SEQ ID NO: 8914 - DNA, 25 bp, Artificial Sequence
  Synthetic
tatggaaagaataaaagaactacgg

SEQ ID NO: 8915 - DNA, 20 bp, Artificial Sequence
  Synthetic
gagtaaaatgagtgatgccg

SEQ ID NO: 8916 - DNA, 23 bp, Artificial Sequence
  Synthetic
gtaatcatggaagttgttttccc

SEQ ID NO: 8917 - DNA, 23 bp, Artificial Sequence
  Synthetic
aagtgaggaatgatgatgttgat

SEQ ID NO: 8918 - DNA, 20 bp, Artificial Sequence
  Synthetic
gcgggttcacatttaagaga

SEQ ID NO: 8919 - DNA, 22 bp, Artificial Sequence
  Synthetic
gcatgataaaagcagttagagg

SEQ ID NO: 8920 - DNA, 19 bp, Artificial Sequence
  Synthetic
gagagggtagtggtaagca

SEQ ID NO: 8921 - DNA, 20 bp, Artificial Sequence
  Synthetic
tggaatttgagccatttcag

SEQ ID NO: 8922 - DNA, 21 bp, Artificial Sequence
  Synthetic
caacaagaccactaagagact

SEQ ID NO: 8923 - DNA, 19 bp, Artificial Sequence
  Synthetic
cgttacctaaccgacatga

SEQ ID NO: 8924 - DNA, 21 bp, Artificial Sequence
  Synthetic
gaaatttcaccattgccttct

SEQ ID NO: 8925 - DNA, 24 bp, Artificial Sequence
  Synthetic
ccgactctacttttcctaaaaatt

SEQ ID NO: 8926 - DNA, 19 bp, Artificial Sequence
  Synthetic
cagactgtgttctagaggc

SEQ ID NO: 8927 - DNA, 22 bp, Artificial Sequence
  Synthetic
gataacaacccactttcaaaga

SEQ ID NO: 8928 - DNA, 25 bp, Artificial Sequence
  Synthetic
tcgtatactttgttgaaactttagc

SEQ ID NO: 8929 - DNA, 18 bp, Artificial Sequence
  Synthetic
aaacatcctgagcatggc

SEQ ID NO: 8930 - DNA, 22 bp, Artificial Sequence
  Synthetic
agtctcgatactgaatcttgga

SEQ ID NO: 8931 - DNA, 18 bp, Artificial Sequence
  Synthetic
ctacccagctttggagtg

SEQ ID NO: 8932 - DNA, 16 bp, Artificial Sequence
  Synthetic
gcgacttcgacgccga

SEQ ID NO: 8933 - DNA, 16 bp, Artificial Sequence
  Synthetic
ggcgtcagcacctggt

SEQ ID NO: 8934 - DNA, 16 bp, Artificial Sequence
  Synthetic
catgctacggctcggc

SEQ ID NO: 8935 - DNA, 20 bp, Artificial Sequence
  Synthetic
cccaaggataaacgtccctg

SEQ ID NO: 8936 - DNA, 19 bp, Artificial Sequence
  Synthetic
cccaggaccagcctacgag

SEQ ID NO: 8937 - DNA, 21 bp, Artificial Sequence
  Synthetic
acactacgtcttatacagctt

SEQ ID NO: 8938 - DNA, 18 bp, Artificial Sequence
  Synthetic
cgacgtccctgattccct

SEQ ID NO: 8939 - DNA, 18 bp, Artificial Sequence
  Synthetic
tcgaggaggacgagtggc

SEQ ID NO: 8940 - DNA, 18 bp, Artificial Sequence
  Synthetic
cccctccggatccaccat

SEQ ID NO: 8941 - DNA, 18 bp, Artificial Sequence
  Synthetic
ttacacaacgacgccagc

SEQ ID NO: 8942 - DNA, 16 bp, Artificial Sequence
  Synthetic
ccgacgtgcacgacct

SEQ ID NO: 8943 - DNA, 16 bp, Artificial Sequence
  Synthetic
tgcgaggaggacgagc

SEQ ID NO: 8944 - DNA, 18 bp, Artificial Sequence
  Synthetic
cctgacctccctctgcca

SEQ ID NO: 8945 - DNA, 19 bp, Artificial Sequence
  Synthetic
tgagtccttgagtgacggt

SEQ ID NO: 8946 - DNA, 16 bp, Artificial Sequence
  Synthetic
cgcagcaagtgaccgc

SEQ ID NO: 8947 - DNA, 19 bp, Artificial Sequence
  Synthetic
gcttaaccaacgacgaggt

SEQ ID NO: 8948 - DNA, 18 bp, Artificial Sequence
  Synthetic
tgtcctcggtgaagcgaa

SEQ ID NO: 8949 - DNA, 18 bp, Artificial Sequence
  Synthetic
gatgagttcgcgctcctc

SEQ ID NO: 8950 - DNA, 19 bp, Artificial Sequence
  Synthetic
attctccccctccgtctcg

SEQ ID NO: 8951 - DNA, 18 bp, Artificial Sequence
  Synthetic
agttcggcttcttgctcg

SEQ ID NO: 8952 - DNA, 17 bp, Artificial Sequence
  Synthetic
actatcgtctgccggcg

SEQ ID NO: 8953 - DNA, 16 bp, Artificial Sequence
  Synthetic
gtgctgcaaccgctca

SEQ ID NO: 8954 - DNA, 17 bp, Artificial Sequence
  Synthetic
tccttctgtcaccgcgt

SEQ ID NO: 8955 - DNA, 16 bp, Artificial Sequence
  Synthetic
gggctggccttggtca

SEQ ID NO: 8956 - DNA, 18 bp, Artificial Sequence
  Synthetic
caaaggcgatgggttccg

SEQ ID NO: 8957 - DNA, 17 bp, Artificial Sequence
  Synthetic
ctgcagacggctgtgtc

SEQ ID NO: 8958 - DNA, 19 bp, Artificial Sequence
  Synthetic
ctgctcgagatgttgaccc

SEQ ID NO: 8959 - DNA, 16 bp, Artificial Sequence
  Synthetic
gcaacagccgcgacgt

SEQ ID NO: 8960 - DNA, 17 bp, Artificial Sequence
  Synthetic
gcgaacaccctccacgt

SEQ ID NO: 8961 - DNA, 18 bp, Artificial Sequence
  Synthetic
ccgacaggctctccacgt

SEQ ID NO: 8962 - DNA, 20 bp, Artificial Sequence
  Synthetic
ggaattttcccttcgcggat

SEQ ID NO: 8963 - DNA, 16 bp, Artificial Sequence
  Synthetic
acgtgggagcgcacct

SEQ ID NO: 8964 - DNA, 19 bp, Artificial Sequence
  Synthetic
ttcatcttcgcacgcgatg

SEQ ID NO: 8965 - DNA, 20 bp, Artificial Sequence
  Synthetic
acgcgtgttgttacccactt

SEQ ID NO: 8966 - DNA, 19 bp, Artificial Sequence
  Synthetic
gcgacggcgaactaaccag

SEQ ID NO: 8967 - DNA, 15 bp, Artificial Sequence
  Synthetic
gtcgcgcgccaacat

SEQ ID NO: 8968 - DNA, 19 bp, Artificial Sequence
  Synthetic
ccacgtcgttttggatcgc

SEQ ID NO: 8969 - DNA, 16 bp, Artificial Sequence
  Synthetic
ctcgaacacggtgccg

SEQ ID NO: 8970 - DNA, 16 bp, Artificial Sequence
  Synthetic
ccgtgtgcaagccagc

SEQ ID NO: 8971 - DNA, 16 bp, Artificial Sequence
  Synthetic
cgcaaaaacacgccgc

SEQ ID NO: 8972 - DNA, 18 bp, Artificial Sequence
  Synthetic
gaatgtcgtcagccaggc

SEQ ID NO: 8973 - DNA, 18 bp, Artificial Sequence
  Synthetic
tgcacgaacagctggacc

SEQ ID NO: 8974 - DNA, 20 bp, Artificial Sequence
  Synthetic
aggtcaatacggactacgcg

SEQ ID NO: 8975 - DNA, 16 bp, Artificial Sequence
  Synthetic
cgactccgcatgacgc

SEQ ID NO: 8976 - DNA, 16 bp, Artificial Sequence
  Synthetic
tctcgcggcccttcaa

SEQ ID NO: 8977 - DNA, 17 bp, Artificial Sequence
  Synthetic
tgatccgcacagctccg

SEQ ID NO: 8978 - DNA, 18 bp, Artificial Sequence
  Synthetic
ggcctcatcaccagcatc

SEQ ID NO: 8979 - DNA, 16 bp, Artificial Sequence
  Synthetic
gctcggcgctgacact

SEQ ID NO: 8980 - DNA, 20 bp, Artificial Sequence
  Synthetic
cgagatgctctccaccatcc

SEQ ID NO: 8981 - DNA, 16 bp, Artificial Sequence
  Synthetic
caacgcgacgagcagc

SEQ ID NO: 8982 - DNA, 16 bp, Artificial Sequence
  Synthetic
gcacggtgcgctggat

SEQ ID NO: 8983 - DNA, 18 bp, Artificial Sequence
  Synthetic
cctgctgcacaatgtggc

SEQ ID NO: 8984 - DNA, 16 bp, Artificial Sequence
  Synthetic
cgaagagacggcgcag

SEQ ID NO: 8985 - DNA, 16 bp, Artificial Sequence
  Synthetic
ccaacgacgtcgacgc

SEQ ID NO: 8986 - DNA, 16 bp, Artificial Sequence
  Synthetic
accgctcgtaccagcc

SEQ ID NO: 8987 - DNA, 18 bp, Artificial Sequence
  Synthetic
cccctcctcctcgtctca

SEQ ID NO: 8988 - DNA, 19 bp, Artificial Sequence
  Synthetic
cggatcttcggctacctcg

SEQ ID NO: 8989 - DNA, 17 bp, Artificial Sequence
  Synthetic
ccacctcgggctcaaac

SEQ ID NO: 8990 - DNA, 16 bp, Artificial Sequence
  Synthetic
ggacggcgcagattgc

SEQ ID NO: 8991 - DNA, 16 bp, Artificial Sequence
  Synthetic
gcgcacgttcacctcg

SEQ ID NO: 8992 - DNA, 18 bp, Artificial Sequence
  Synthetic
tgttgatgatgcgacgcc

SEQ ID NO: 8993 - DNA, 16 bp, Artificial Sequence
  Synthetic
ctcctgcaacgcggca

SEQ ID NO: 8994 - DNA, 16 bp, Artificial Sequence
  Synthetic
cgtcgcggctgctctt

SEQ ID NO: 8995 - DNA, 16 bp, Artificial Sequence
  Synthetic
gcacaacgccgccaga

SEQ ID NO: 8996 - DNA, 17 bp, Artificial Sequence
  Synthetic
tttcgtgagcaccccgc

SEQ ID NO: 8997 - DNA, 16 bp, Artificial Sequence
  Synthetic
cggaccaccaaaggcg

SEQ ID NO: 8998 - DNA, 18 bp, Artificial Sequence
  Synthetic
acgcgttttccacccttt

SEQ ID NO: 8999 - DNA, 18 bp, Artificial Sequence
  Synthetic
gcgcattaccaccgagtc

SEQ ID NO: 9000 - DNA, 19 bp, Artificial Sequence
  Synthetic
ggttcctccagccaatcga

SEQ ID NO: 9001 - DNA, 18 bp, Artificial Sequence
  Synthetic
gctcgtcccggtaatcga

SEQ ID NO: 9002 - DNA, 16 bp, Artificial Sequence
  Synthetic
tcggtcagggcctcgt

SEQ ID NO: 9003 - DNA, 17 bp, Artificial Sequence
  Synthetic
cagctcggtggaaagcc

SEQ ID NO: 9004 - DNA, 16 bp, Artificial Sequence
  Synthetic
ccgaggaaacgggggt

SEQ ID NO: 9005 - DNA, 16 bp, Artificial Sequence
  Synthetic
gtgtggggacgacgct

SEQ ID NO: 9006 - DNA, 19 bp, Artificial Sequence
  Synthetic
tgtctgctagtcgcctacg

SEQ ID NO: 9007 - DNA, 16 bp, Artificial Sequence
  Synthetic
gcgactcgcccgatct

SEQ ID NO: 9008 - DNA, 20 bp, Artificial Sequence
  Synthetic
tgattggcgcaagtaaagga

SEQ ID NO: 9009 - DNA, 16 bp, Artificial Sequence
  Synthetic
ggctttctcgcccgct

SEQ ID NO: 9010 - DNA, 16 bp, Artificial Sequence
  Synthetic
cttccagcgtcgccgt

SEQ ID NO: 9011 - DNA, 17 bp, Artificial Sequence
  Synthetic
ggcacgtcactttgcgg

SEQ ID NO: 9012 - DNA, 18 bp, Artificial Sequence
  Synthetic
atgggagcgttacgacgg

SEQ ID NO: 9013 - DNA, 17 bp, Artificial Sequence
  Synthetic
gtgccacgaggggatga

SEQ ID NO: 9014 - DNA, 20 bp, Artificial Sequence
  Synthetic
tgagagtccaaaacccacgg

SEQ ID NO: 9015 - DNA, 16 bp, Artificial Sequence
  Synthetic
ctaacgggcacgcggt

SEQ ID NO: 9016 - DNA, 20 bp, Artificial Sequence
  Synthetic
tcgtgcggagatttgttctc

SEQ ID NO: 9017 - DNA, 18 bp, Artificial Sequence
  Synthetic
agacgtcgggctctttcc

SEQ ID NO: 9018 - DNA, 19 bp, Artificial Sequence
  Synthetic
gttcagcatcttgagcggc

SEQ ID NO: 9019 - DNA, 20 bp, Artificial Sequence
  Synthetic
aagcttacagtcttgcggtt

SEQ ID NO: 9020 - DNA, 18 bp, Artificial Sequence
  Synthetic
aaggcccgtaaaagcggc

SEQ ID NO: 9021 - DNA, 16 bp, Artificial Sequence
  Synthetic
gagaggcgcgccgaaa

SEQ ID NO: 9022 - DNA, 16 bp, Artificial Sequence
  Synthetic
ccagccgcatcagcag

SEQ ID NO: 9023 - DNA, 15 bp, Artificial Sequence
  Synthetic
aggtggcgtcgcgaa

SEQ ID NO: 9024 - DNA, 15 bp, Artificial Sequence
  Synthetic
tgacgttgcgccgct

SEQ ID NO: 9025 - DNA, 18 bp, Artificial Sequence
  Synthetic
ggccactacctgtacgcc

SEQ ID NO: 9026 - DNA, 20 bp, Artificial Sequence
  Synthetic
cgcggtaaaaatgcggtatg

SEQ ID NO: 9027 - DNA, 19 bp, Artificial Sequence
  Synthetic
ggcctcgaacatctcctcg

SEQ ID NO: 9028 - DNA, 17 bp, Artificial Sequence
  Synthetic
ttgcggctctctaccgt

SEQ ID NO: 9029 - DNA, 18 bp, Artificial Sequence
  Synthetic
cgctgctctacgtgcacc

SEQ ID NO: 9030 - DNA, 17 bp, Artificial Sequence
  Synthetic
aggacgtcgcggctatc

SEQ ID NO: 9031 - DNA, 18 bp, Artificial Sequence
  Synthetic
ggtacggggagagatggc

SEQ ID NO: 9032 - DNA, 16 bp, Artificial Sequence
  Synthetic
cgcggcccatgaggta

SEQ ID NO: 9033 - DNA, 18 bp, Artificial Sequence
  Synthetic
catgttggccgtcttgcg

SEQ ID NO: 9034 - DNA, 18 bp, Artificial Sequence
  Synthetic
cttggaactggtcgcgtc

SEQ ID NO: 9035 - DNA, 19 bp, Artificial Sequence
  Synthetic
acgaagctctctatccggt

SEQ ID NO: 9036 - DNA, 17 bp, Artificial Sequence
  Synthetic
gttgtagtcgcggtggc

SEQ ID NO: 9037 - DNA, 18 bp, Artificial Sequence
  Synthetic
cgtagcgctcctggatct

SEQ ID NO: 9038 - DNA, 16 bp, Artificial Sequence
  Synthetic
ggcgccgtcactcgtt

SEQ ID NO: 9039 - DNA, 18 bp, Artificial Sequence
  Synthetic
ttttccgcatgcgttcga

SEQ ID NO: 9040 - DNA, 16 bp, Artificial Sequence
  Synthetic
actgctcgcaccgtct

SEQ ID NO: 9041 - DNA, 16 bp, Artificial Sequence
  Synthetic
gcggtctggacgaggt

SEQ ID NO: 9042 - DNA, 15 bp, Artificial Sequence
  Synthetic
ttcggcgcaccacca

SEQ ID NO: 9043 - DNA, 16 bp, Artificial Sequence
  Synthetic
ctctgggtcgccaggt

SEQ ID NO: 9044 - DNA, 16 bp, Artificial Sequence
  Synthetic
tttggaggccgcaccg

SEQ ID NO: 9045 - DNA, 20 bp, Artificial Sequence
  Synthetic
attgcgtcgcggttactacg

SEQ ID NO: 9046 - DNA, 18 bp, Artificial Sequence
  Synthetic
cggactgtggtcgactgt

SEQ ID NO: 9047 - DNA, 20 bp, Artificial Sequence
  Synthetic
tccacgcatgaaataacggt

SEQ ID NO: 9048 - DNA, 16 bp, Artificial Sequence
  Synthetic
ctgcggtactcggcca

SEQ ID NO: 9049 - DNA, 16 bp, Artificial Sequence
  Synthetic
ttgagctcgtggcggc

SEQ ID NO: 9050 - DNA, 16 bp, Artificial Sequence
  Synthetic
gctctggcgcaacgag

SEQ ID NO: 9051 - DNA, 17 bp, Artificial Sequence
  Synthetic
gcacgaggagaccacca

SEQ ID NO: 9052 - DNA, 17 bp, Artificial Sequence
  Synthetic
gtcatcgacgagtgcgg

SEQ ID NO: 9053 - DNA, 18 bp, Artificial Sequence
  Synthetic
cggattcttctcagggcg

SEQ ID NO: 9054 - DNA, 18 bp, Artificial Sequence
  Synthetic
cgtcaagccacctagcct

SEQ ID NO: 9055 - DNA, 19 bp, Artificial Sequence
  Synthetic
tgtcagatcagctcgcaga

SEQ ID NO: 9056 - DNA, 16 bp, Artificial Sequence
  Synthetic
atgcgctcgggttcct

SEQ ID NO: 9057 - DNA, 16 bp, Artificial Sequence
  Synthetic
tcccggcgctctgaca

SEQ ID NO: 9058 - DNA, 16 bp, Artificial Sequence
  Synthetic
cggcacaggtcgtcca

SEQ ID NO: 9059 - DNA, 16 bp, Artificial Sequence
  Synthetic
gactttctcggcggcg

SEQ ID NO: 9060 - DNA, 19 bp, Artificial Sequence
  Synthetic
tgacggtgttactcgtggt

SEQ ID NO: 9061 - DNA, 17 bp, Artificial Sequence
  Synthetic
ctttcttggtggcgccc

SEQ ID NO: 9062 - DNA, 16 bp, Artificial Sequence
  Synthetic
acggcgcttgtggtgc

SEQ ID NO: 9063 - DNA, 20 bp, Artificial Sequence
  Synthetic
acgacaggatcagacagacg

SEQ ID NO: 9064 - DNA, 18 bp, Artificial Sequence
  Synthetic
ttccatctgcgtcagcgg

SEQ ID NO: 9065 - DNA, 19 bp, Artificial Sequence
  Synthetic
atactgtcccagtcgcgac

SEQ ID NO: 9066 - DNA, 21 bp, Artificial Sequence
  Synthetic
taccgtgatgtaaaaacaaca

SEQ ID NO: 9067 - DNA, 20 bp, Artificial Sequence
  Synthetic
ctttttccttgtttgacggt

SEQ ID NO: 9068 - DNA, 18 bp, Artificial Sequence
  Synthetic
cggtacatcccgcagtcg

SEQ ID NO: 9069 - DNA, 19 bp, Artificial Sequence
  Synthetic
cgtgggaacgacagaaacg

SEQ ID NO: 9070 - DNA, 18 bp, Artificial Sequence
  Synthetic
ggtgaccgtcctctgtcc

SEQ ID NO: 9071 - DNA, 17 bp, Artificial Sequence
  Synthetic
ccattctggcagcagcg

SEQ ID NO: 9072 - DNA, 20 bp, Artificial Sequence
  Synthetic
ggacacgagagtcccacctt

SEQ ID NO: 9073 - DNA, 19 bp, Artificial Sequence
  Synthetic
gccaacgtcgaatgctacg

SEQ ID NO: 9074 - DNA, 16 bp, Artificial Sequence
  Synthetic
cctgggcgctgctgtt

SEQ ID NO: 9075 - DNA, 17 bp, Artificial Sequence
  Synthetic
caagtcccaggcggcta

SEQ ID NO: 9076 - DNA, 17 bp, Artificial Sequence
  Synthetic
aggggagcaacaaccgt

SEQ ID NO: 9077 - DNA, 15 bp, Artificial Sequence
  Synthetic
tcgcgccgcagagtt

SEQ ID NO: 9078 - DNA, 18 bp, Artificial Sequence
  Synthetic
ggccgttggagaattggt

SEQ ID NO: 9079 - DNA, 19 bp, Artificial Sequence
  Synthetic
agacggtgttcgatggaga

SEQ ID NO: 9080 - DNA, 16 bp, Artificial Sequence
  Synthetic
cacacggcccggaatg

SEQ ID NO: 9081 - DNA, 18 bp, Artificial Sequence
  Synthetic
agcacagttgacgaccac

SEQ ID NO: 9082 - DNA, 20 bp, Artificial Sequence
  Synthetic
aatttgggtcttttcacgcg

SEQ ID NO: 9083 - DNA, 18 bp, Artificial Sequence
  Synthetic
gttgcccgacatcctccc

SEQ ID NO: 9084 - DNA, 20 bp, Artificial Sequence
  Synthetic
ctttccgtaccgggatttcc

SEQ ID NO: 9085 - DNA, 20 bp, Artificial Sequence
  Synthetic
aacgtcaagagtcacgtcag

SEQ ID NO: 9086 - DNA, 20 bp, Artificial Sequence
  Synthetic
cacatcaacagaaaaccgag

SEQ ID NO: 9087 - DNA, 17 bp, Artificial Sequence
  Synthetic
tcgttaccccaggtgcc

SEQ ID NO: 9088 - DNA, 19 bp, Artificial Sequence
  Synthetic
cggaatcgtataccgggca

SEQ ID NO: 9089 - DNA, 16 bp, Artificial Sequence
  Synthetic
gttcccaagccacgcc

SEQ ID NO: 9090 - DNA, 16 bp, Artificial Sequence
  Synthetic
cgcgcccagaaccaac

SEQ ID NO: 9091 - DNA, 16 bp, Artificial Sequence
  Synthetic
ccacgcggcaacagtc

SEQ ID NO: 9092 - DNA, 16 bp, Artificial Sequence
  Synthetic
gggatgtgcgccagga

SEQ ID NO: 9093 - DNA, 17 bp, Artificial Sequence
  Synthetic
tgttgccgctgtcgaac

SEQ ID NO: 9094 - DNA, 16 bp, Artificial Sequence
  Synthetic
gcgctggccacgatca

SEQ ID NO: 9095 - DNA, 16 bp, Artificial Sequence
  Synthetic
gccataccgccagcct

SEQ ID NO: 9096 - DNA, 18 bp, Artificial Sequence
  Synthetic
cgcacaacgtcaccacta

SEQ ID NO: 9097 - DNA, 18 bp, Artificial Sequence
  Synthetic
tcccatctggtcgggttc

SEQ ID NO: 9098 - DNA, 16 bp, Artificial Sequence
  Synthetic
ggcggccagagaacgt

SEQ ID NO: 9099 - DNA, 18 bp, Artificial Sequence
  Synthetic
tttagcatttcggcgcgg

SEQ ID NO: 9100 - DNA, 19 bp, Artificial Sequence
  Synthetic
atggcgtccaggtgtatga

SEQ ID NO: 9101 - DNA, 18 bp, Artificial Sequence
  Synthetic
gtccagcagttggtcgcg

SEQ ID NO: 9102 - DNA, 20 bp, Artificial Sequence
  Synthetic
aaatcccgcaacacttgtcg

SEQ ID NO: 9103 - DNA, 19 bp, Artificial Sequence
  Synthetic
cgtgaagagccctcatcca

SEQ ID NO: 9104 - DNA, 18 bp, Artificial Sequence
  Synthetic
ggtcacacgctgcagttc

SEQ ID NO: 9105 - DNA, 16 bp, Artificial Sequence
  Synthetic
ccttctcgcgggccta

SEQ ID NO: 9106 - DNA, 20 bp, Artificial Sequence
  Synthetic
ttctacgggtatctgcagct

SEQ ID NO: 9107 - DNA, 16 bp, Artificial Sequence
  Synthetic
gcagacacgcacctgg

SEQ ID NO: 9108 - DNA, 16 bp, Artificial Sequence
  Synthetic
gcgcaccctcctaggt

SEQ ID NO: 9109 - DNA, 22 bp, Artificial Sequence
  Synthetic
aggtactgatccaaaatggaag

SEQ ID NO: 9110 - DNA, 20 bp, Artificial Sequence
  Synthetic
aattgaaggaagagaccgag

SEQ ID NO: 9111 - DNA, 25 bp, Artificial Sequence
  Synthetic
aagaataaaaaccagactattcacc

SEQ ID NO: 9112 - DNA, 23 bp, Artificial Sequence
  Synthetic
cccaaaaacaaagaacatgaaga

SEQ ID NO: 9113 - DNA, 21 bp, Artificial Sequence
  Synthetic
caacaaggcatgtgaattgac

SEQ ID NO: 9114 - DNA, 21 bp, Artificial Sequence
  Synthetic
aaggaagacaaacctgtatgg

SEQ ID NO: 9115 - DNA, 18 bp, Artificial Sequence
  Synthetic
ggggatggaaatgagacg

SEQ ID NO: 9116 - DNA, 18 bp, Artificial Sequence
  Synthetic
cgtctcaaggcaccaaac

SEQ ID NO: 9117 - DNA, 21 bp, Artificial Sequence
  Synthetic
aaaggaccctaagaaaactgg

SEQ ID NO: 9118 - DNA, 18 bp, Artificial Sequence
  Synthetic
gggatagggacaatggtg

SEQ ID NO: 9119 - DNA, 20 bp, Artificial Sequence
  Synthetic
accttagggtctcaagtttc

SEQ ID NO: 9120 - DNA, 20 bp, Artificial Sequence
  Synthetic
tttagacgccattttacacg

SEQ ID NO: 9121 - DNA, 19 bp, Artificial Sequence
  Synthetic
tctgccagctcattttcac

SEQ ID NO: 9122 - DNA, 20 bp, Artificial Sequence
  Synthetic
tattgggggcgaatgtatgc

SEQ ID NO: 9123 - DNA, 18 bp, Artificial Sequence
  Synthetic
cctcacccccgaaactag

SEQ ID NO: 9124 - DNA, 21 bp, Artificial Sequence
  Synthetic
ggtgttgctttgaatagttca

SEQ ID NO: 9125 - DNA, 19 bp, Artificial Sequence
  Synthetic
gcgagaaatcccacctgag

SEQ ID NO: 9126 - DNA, 18 bp, Artificial Sequence
  Synthetic
ggttagagccatgggagg

SEQ ID NO: 9127 - DNA, 23 bp, Artificial Sequence
  Synthetic
aactgtctgtaaaaaagtgtttg

SEQ ID NO: 9128 - DNA, 18 bp, Artificial Sequence
  Synthetic
gcggggtatgtttagacc

SEQ ID NO: 9129 - DNA, 20 bp, Artificial Sequence
  Synthetic
ccaggttaccatattgggcc

SEQ ID NO: 9130 - DNA, 23 bp, Artificial Sequence
  Synthetic
tgatacttgttttttctgacatg

SEQ ID NO: 9131 - DNA, 22 bp, Artificial Sequence
  Synthetic
cgaggtgacatgatatgaagtt

SEQ ID NO: 9132 - DNA, 20 bp, Artificial Sequence
  Synthetic
agatgggggaatcatgtcca

SEQ ID NO: 9133 - DNA, 19 bp, Artificial Sequence
  Synthetic
ccataggcatgtggtccag

SEQ ID NO: 9134 - DNA, 23 bp, Artificial Sequence
  Synthetic
ggcaaggtagcattttaacataa

SEQ ID NO: 9135 - DNA, 20 bp, Artificial Sequence
  Synthetic
acaaaaagactgtcagtgtc

SEQ ID NO: 9136 - DNA, 19 bp, Artificial Sequence
  Synthetic
cacaattttctggtggtgg

SEQ ID NO: 9137 - DNA, 18 bp, Artificial Sequence
  Synthetic
tttgtccctatcggcccg

SEQ ID NO: 9138 - DNA, 20 bp, Artificial Sequence
  Synthetic
taattttccagcgccacctg

SEQ ID NO: 9139 - DNA, 25 bp, Artificial Sequence
  Synthetic
ctcctttttttttccatagttcttg

SEQ ID NO: 9140 - DNA, 19 bp, Artificial Sequence
  Synthetic
gattgggaagggcaaaagt

SEQ ID NO: 9141 - DNA, 22 bp, Artificial Sequence
  Synthetic
aagatcagtagctaaggaggtt

SEQ ID NO: 9142 - DNA, 20 bp, Artificial Sequence
  Synthetic
caccagttggaagaatggct

SEQ ID NO: 9143 - DNA, 20 bp, Artificial Sequence
  Synthetic
tcgtcctcttcctcttctgc

SEQ ID NO: 9144 - DNA, 18 bp, Artificial Sequence
  Synthetic
tgagcccggggactaacc

SEQ ID NO: 9145 - DNA, 22 bp, Artificial Sequence
  Synthetic
cctgtcttaaaatctcctgaac

SEQ ID NO: 9146 - DNA, 20 bp, Artificial Sequence
  Synthetic
tttcttcctcgaccacaggt

SEQ ID NO: 9147 - DNA, 21 bp, Artificial Sequence
  Synthetic
ctttcaagaaaggcatctagc

SEQ ID NO: 9148 - DNA, 23 bp, Artificial Sequence
  Synthetic
gttgtaataaagctaaatctgcc

SEQ ID NO: 9149 - DNA, 18 bp, Artificial Sequence
  Synthetic
cagcacctggagcgagat

SEQ ID NO: 9150 - DNA, 20 bp, Artificial Sequence
  Synthetic
aaagttggtaagcgactccc

SEQ ID NO: 9151 - DNA, 16 bp, Artificial Sequence
  Synthetic
cgattgggcgcccact

SEQ ID NO: 9152 - DNA, 23 bp, Artificial Sequence
  Synthetic
aaaaagctttaataaccatgtgc

SEQ ID NO: 9153 - DNA, 20 bp, Artificial Sequence
  Synthetic
catagcttacaaagggcgct

SEQ ID NO: 9154 - DNA, 19 bp, Artificial Sequence
  Synthetic
ttttcggccattttggaag

SEQ ID NO: 9155 - DNA, 23 bp, Artificial Sequence
  Synthetic
gtggtcaggaagattatacaaac

SEQ ID NO: 9156 - DNA, 18 bp, Artificial Sequence
  Synthetic
gtccttctacgcttccaa

SEQ ID NO: 9157 - DNA, 20 bp, Artificial Sequence
  Synthetic
aacatatgcacaagagcggc

SEQ ID NO: 9158 - DNA, 25 bp, Artificial Sequence
  Synthetic
gtagtgcaaaataatgactattccc

SEQ ID NO: 9159 - DNA, 19 bp, Artificial Sequence
  Synthetic
gtaggaagacagcatggag

SEQ ID NO: 9160 - DNA, 22 bp, Artificial Sequence
  Synthetic
aggatcaaaacactgtaagagg

SEQ ID NO: 9161 - DNA, 20 bp, Artificial Sequence
  Synthetic
tgtccattttggtttcgcca

SEQ ID NO: 9162 - DNA, 16 bp, Artificial Sequence
  Synthetic
tcgccggcgtagacca

SEQ ID NO: 9163 - DNA, 20 bp, Artificial Sequence
  Synthetic
atggcccatcggataacctt

SEQ ID NO: 9164 - DNA, 18 bp, Artificial Sequence
  Synthetic
cggaagaaaagcgtggaa

SEQ ID NO: 9165 - DNA, 20 bp, Artificial Sequence
  Synthetic
tacatccttccattgtgccc

SEQ ID NO: 9166 - DNA, 20 bp, Artificial Sequence
  Synthetic
attgccaaccgtttagagcc

SEQ ID NO: 9167 - DNA, 20 bp, Artificial Sequence
  Synthetic
tcccatctgtgtatacgcct

SEQ ID NO: 9168 - DNA, 20 bp, Artificial Sequence
  Synthetic
acctactcctacaaggctcg

SEQ ID NO: 9169 - DNA, 18 bp, Artificial Sequence
  Synthetic
caaccaacgaacacggag

SEQ ID NO: 9170 - DNA, 21 bp, Artificial Sequence
  Synthetic
tgcaagacagaaatacagagc

SEQ ID NO: 9171 - DNA, 22 bp, Artificial Sequence
  Synthetic
taatttgcaggctaatttgtgg

SEQ ID NO: 9172 - DNA, 20 bp, Artificial Sequence
  Synthetic
gccatcagaaatttgttgct

SEQ ID NO: 9173 - DNA, 25 bp, Artificial Sequence
  Synthetic
ttactcgcctaaaaactaaagaaac

SEQ ID NO: 9174 - DNA, 21 bp, Artificial Sequence
  Synthetic
ctttagaaactttcagcccat

SEQ ID NO: 9175 - DNA, 19 bp, Artificial Sequence
  Synthetic
cgggtaacgctaccaccta

SEQ ID NO: 9176 - DNA, 18 bp, Artificial Sequence
  Synthetic
cactaaagaccgatgcgt

SEQ ID NO: 9177 - DNA, 20 bp, Artificial Sequence
  Synthetic
aaatcaaatggctcttcgcg

SEQ ID NO: 9178 - DNA, 19 bp, Artificial Sequence
  Synthetic
tgtttaaacattcgcagcg

SEQ ID NO: 9179 - DNA, 20 bp, Artificial Sequence
  Synthetic
tccaccaaatgctctttgcg

SEQ ID NO: 9180 - DNA, 23 bp, Artificial Sequence
  Synthetic
tacttttccattagcatagccat

SEQ ID NO: 9181 - DNA, 18 bp, Artificial Sequence
  Synthetic
gctacggctgtcatggag

SEQ ID NO: 9182 - DNA, 20 bp, Artificial Sequence
  Synthetic
aaatcctcgccttaacttct

SEQ ID NO: 9183 - DNA, 19 bp, Artificial Sequence
  Synthetic
ccggcagtaaatcttccgc

SEQ ID NO: 9184 - DNA, 18 bp, Artificial Sequence
  Synthetic
cagagattacgtgcgaga

SEQ ID NO: 9185 - DNA, 18 bp, Artificial Sequence
  Synthetic
accgttctttggtttgca

SEQ ID NO: 9186 - DNA, 18 bp, Artificial Sequence
  Synthetic
ccttgatccccaaaccgg

SEQ ID NO: 9187 - DNA, 20 bp, Artificial Sequence
  Synthetic
aatctcagaaagccaaccgt

SEQ ID NO: 9188 - DNA, 18 bp, Artificial Sequence
  Synthetic
agcagcaacaaggaaagt

SEQ ID NO: 9189 - DNA, 20 bp, Artificial Sequence
  Synthetic
atgaattggttaagcgccgg

SEQ ID NO: 9190 - DNA, 25 bp, Artificial Sequence
  Synthetic
ggaattgatacacacctcattaaat

SEQ ID NO: 9191 - DNA, 23 bp, Artificial Sequence
  Synthetic
aaactacacaaagaaaacatcac

SEQ ID NO: 9192 - DNA, 22 bp, Artificial Sequence
  Synthetic
tcgcagctcttattttattcct

SEQ ID NO: 9193 - DNA, 24 bp, Artificial Sequence
  Synthetic
aatgcatcattacttcaaagtacc

SEQ ID NO: 9194 - DNA, 22 bp, Artificial Sequence
  Synthetic
cagcctttatttatctgtgctg

SEQ ID NO: 9195 - DNA, 23 bp, Artificial Sequence
  Synthetic
ctgggtttatggaattatgtctg

SEQ ID NO: 9196 - DNA, 24 bp, Artificial Sequence
  Synthetic
gagttaattgatttacaaaccgtg

SEQ ID NO: 9197 - DNA, 23 bp, Artificial Sequence
  Synthetic
ttaccggaaatctgaaaatacat

SEQ ID NO: 9198 - DNA, 19 bp, Artificial Sequence
  Synthetic
ttacactcaagctagggga

SEQ ID NO: 9199 - DNA, 20 bp, Artificial Sequence
  Synthetic
tctcaccactgaaactccct

SEQ ID NO: 9200 - DNA, 23 bp, Artificial Sequence
  Synthetic
gtaacaagaataggggatggttt

SEQ ID NO: 9201 - DNA, 22 bp, Artificial Sequence
  Synthetic
taagtttagtgggtgttaaggg

SEQ ID NO: 9202 - DNA, 21 bp, Artificial Sequence
  Synthetic
tttaacattcatgtggtcagg

SEQ ID NO: 9203 - DNA, 19 bp, Artificial Sequence
  Synthetic
tgatggaaacgaatccctc

SEQ ID NO: 9204 - DNA, 20 bp, Artificial Sequence
  Synthetic
gttaacaacctcccgatacc

SEQ ID NO: 9205 - DNA, 19 bp, Artificial Sequence
  Synthetic
aggaatgcctcttacctca

SEQ ID NO: 9206 - DNA, 19 bp, Artificial Sequence
  Synthetic
cgacttacaggaggaggag

SEQ ID NO: 9207 - DNA, 22 bp, Artificial Sequence
  Synthetic
aaaagtctggatcttcaaacac

SEQ ID NO: 9208 - DNA, 20 bp, Artificial Sequence
  Synthetic
cctcaaaatctaagccatgc

SEQ ID NO: 9209 - DNA, 22 bp, Artificial Sequence
  Synthetic
aggaatatcaactgctatgtgc

SEQ ID NO: 9210 - DNA, 20 bp, Artificial Sequence
  Synthetic
aacggtcaagcacttctgtt

SEQ ID NO: 9211 - DNA, 19 bp, Artificial Sequence
  Synthetic
ataaggatgcggcaagctc

SEQ ID NO: 9212 - DNA, 20 bp, Artificial Sequence
  Synthetic
tggccaaaacatgttccacc

SEQ ID NO: 9213 - DNA, 19 bp, Artificial Sequence
  Synthetic
acaaaccctaccaatcacc

SEQ ID NO: 9214 - DNA, 18 bp, Artificial Sequence
  Synthetic
acgttgtgtgggatttgg

SEQ ID NO: 9215 - DNA, 24 bp, Artificial Sequence
  Synthetic
gacattgattgaaacgagatatgt

SEQ ID NO: 9216 - DNA, 18 bp, Artificial Sequence
  Synthetic
gatggagccgagaacagt

SEQ ID NO: 9217 - DNA, 25 bp, Artificial Sequence
  Synthetic
cccaaaacatattcaatatgacatc

SEQ ID NO: 9218 - DNA, 19 bp, Artificial Sequence
  Synthetic
tagcagacaaggtgactca

SEQ ID NO: 9219 - DNA, 22 bp, Artificial Sequence
  Synthetic
cacctgatcccaaatactttga

SEQ ID NO: 9220 - DNA, 21 bp, Artificial Sequence
  Synthetic
gccaggaaaagaaaaacagaa

SEQ ID NO: 9221 - DNA, 18 bp, Artificial Sequence
  Synthetic
aatacccacacatgccca

SEQ ID NO: 9222 - DNA, 20 bp, Artificial Sequence
  Synthetic
caaggtacaagatgttggtc

SEQ ID NO: 9223 - DNA, 21 bp, Artificial Sequence
  Synthetic
agctcctgcaaaaataaaagc

SEQ ID NO: 9224 - DNA, 23 bp, Artificial Sequence
  Synthetic
ctgaaaattgtagcatatggtga

SEQ ID NO: 9225 - DNA, 24 bp, Artificial Sequence
  Synthetic
cggaagagatacatataaaaaggg

SEQ ID NO: 9226 - DNA, 20 bp, Artificial Sequence
  Synthetic
ccacggttgcagatcttaat

SEQ ID NO: 9227 - DNA, 19 bp, Artificial Sequence
  Synthetic
gaaagctgacgttttgctg

SEQ ID NO: 9228 - DNA, 21 bp, Artificial Sequence
  Synthetic
gaggattgtgacaatgcacta

SEQ ID NO: 9229 - DNA, 23 bp, Artificial Sequence
  Synthetic
aaactgtacaaaagttgatgtgt

SEQ ID NO: 9230 - DNA, 21 bp, Artificial Sequence
  Synthetic
aaaagcttggcagacaattag

SEQ ID NO: 9231 - DNA, 25 bp, Artificial Sequence
  Synthetic
tatgatggcttatactttacagacc

SEQ ID NO: 9232 - DNA, 20 bp, Artificial Sequence
  Synthetic
ggaggaaaccgaggaaatcc

SEQ ID NO: 9233 - DNA, 18 bp, Artificial Sequence
  Synthetic
agctagggatccgcctat

SEQ ID NO: 9234 - DNA, 25 bp, Artificial Sequence
  Synthetic
gttccaaatctttatgcaaaatgtc

SEQ ID NO: 9235 - DNA, 22 bp, Artificial Sequence
  Synthetic
ctagtggtactttagtaaggcc

SEQ ID NO: 9236 - DNA, 19 bp, Artificial Sequence
  Synthetic
caatcatatctggcgagga

SEQ ID NO: 9237 - DNA, 22 bp, Artificial Sequence
  Synthetic
tagaaagccctccaaaaactag

SEQ ID NO: 9238 - DNA, 18 bp, Artificial Sequence
  Synthetic
ctatagggcgtccaaggt

SEQ ID NO: 9239 - DNA, 20 bp, Artificial Sequence
  Synthetic
gtgaaagatgtacaggaacc

SEQ ID NO: 9240 - DNA, 19 bp, Artificial Sequence
  Synthetic
tagtgctcctttggatgtc

SEQ ID NO: 9241 - DNA, 21 bp, Artificial Sequence
  Synthetic
tctaactgcagatgttatggc

SEQ ID NO: 9242 - DNA, 21 bp, Artificial Sequence
  Synthetic
tgcaaacgtgtatgtatctgt

SEQ ID NO: 9243 - DNA, 17 bp, Artificial Sequence
  Synthetic
attacccaggcagccga

SEQ ID NO: 9244 - DNA, 24 bp, Artificial Sequence
  Synthetic
caagcacaaattttccttaaatcc

SEQ ID NO: 9245 - DNA, 21 bp, Artificial Sequence
  Synthetic
tgcaatatgctagaagactgc

SEQ ID NO: 9246 - DNA, 20 bp, Artificial Sequence
  Synthetic
ggatacgtacgcaacagagc

SEQ ID NO: 9247 - DNA, 22 bp, Artificial Sequence
  Synthetic
cagaagcagaggattatggaaa

SEQ ID NO: 9248 - DNA, 20 bp, Artificial Sequence
  Synthetic
ggtaaaaccaacaggaaacg

SEQ ID NO: 9249 - DNA, 23 bp, Artificial Sequence
  Synthetic
tcaaaaattgttgaaactgtagc

SEQ ID NO: 9250 - DNA, 24 bp, Artificial Sequence
  Synthetic
gtatgttctttgatggagaatttg

SEQ ID NO: 9251 - DNA, 21 bp, Artificial Sequence
  Synthetic
ttcagaactagagcaaacaga

SEQ ID NO: 9252 - DNA, 23 bp, Artificial Sequence
  Synthetic
cgaaaacggttgtatataaacca

SEQ ID NO: 9253 - DNA, 18 bp, Artificial Sequence
  Synthetic
gcggctatccatatgcag

SEQ ID NO: 9254 - DNA, 21 bp, Artificial Sequence
  Synthetic
atggaagacatgttaccctaa

SEQ ID NO: 9255 - DNA, 19 bp, Artificial Sequence
  Synthetic
aagacctaacaacgatggc

SEQ ID NO: 9256 - DNA, 18 bp, Artificial Sequence
  Synthetic
cgactgtgcaggacctaa

SEQ ID NO: 9257 - DNA, 19 bp, Artificial Sequence
  Synthetic
gtcaggaaaaggacacagg

SEQ ID NO: 9258 - DNA, 21 bp, Artificial Sequence
  Synthetic
aacagttattgaacacgggtt

SEQ ID NO: 9259 - DNA, 25 bp, Artificial Sequence
  Synthetic
agtgtatgaactgtcaaatacaaac

SEQ ID NO: 9260 - DNA, 20 bp, Artificial Sequence
  Synthetic
gtagtgccaccattaaaggt

SEQ ID NO: 9261 - DNA, 18 bp, Artificial Sequence
  Synthetic
ctaggaaacgagcacgag

SEQ ID NO: 9262 - DNA, 18 bp, Artificial Sequence
  Synthetic
tcctcaaaggcaccacat

SEQ ID NO: 9263 - DNA, 24 bp, Artificial Sequence
  Synthetic
gcatttgttgtatgttttgttagc

SEQ ID NO: 9264 - DNA, 23 bp, Artificial Sequence
  Synthetic
attcctttagatacttttgtggt

SEQ ID NO: 9265 - DNA, 25 bp, Artificial Sequence
  Synthetic
cagatacatatttaacttccacacc

SEQ ID NO: 9266 - DNA, 19 bp, Artificial Sequence
  Synthetic
gcgacagcacagtatatgt

SEQ ID NO: 9267 - DNA, 21 bp, Artificial Sequence
  Synthetic
ccgcccttagaacttattacc

SEQ ID NO: 9268 - DNA, 24 bp, Artificial Sequence
  Synthetic
gtctgtagggagtagtatatatgt

SEQ ID NO: 9269 - DNA, 18 bp, Artificial Sequence
  Synthetic
caggtacacattgccctg

SEQ ID NO: 9270 - DNA, 18 bp, Artificial Sequence
  Synthetic
aagcgtctagccatggcg

SEQ ID NO: 9271 - DNA, 19 bp, Artificial Sequence
  Synthetic
caaacgtaacaccaaccgc

SEQ ID NO: 9272 - DNA, 20 bp, Artificial Sequence
  Synthetic
catcgataccctaacctgcg

SEQ ID NO: 9273 - DNA, 20 bp, Artificial Sequence
  Synthetic
cacatcatgcaccttccagg

SEQ ID NO: 9274 - DNA, 20 bp, Artificial Sequence
  Synthetic
tgaactggagtccaacaacc

SEQ ID NO: 9275 - DNA, 20 bp, Artificial Sequence
  Synthetic
actgggttcttggctagctt

SEQ ID NO: 9276 - DNA, 18 bp, Artificial Sequence
  Synthetic
tggggggagaacgagact

SEQ ID NO: 9277 - DNA, 18 bp, Artificial Sequence
  Synthetic
cggcggtatagagcatcg

SEQ ID NO: 9278 - DNA, 18 bp, Artificial Sequence
  Synthetic
ggtgcccaaggcttctgg

SEQ ID NO: 9279 - DNA, 19 bp, Artificial Sequence
  Synthetic
ggggattgtggtggatcca

SEQ ID NO: 9280 - DNA, 18 bp, Artificial Sequence
  Synthetic
gtggccctagagccagtt

SEQ ID NO: 9281 - DNA, 18 bp, Artificial Sequence
  Synthetic
ctggcagggacaccaatg

SEQ ID NO: 9282 - DNA, 16 bp, Artificial Sequence
  Synthetic
ggaggtccgctgctgt

SEQ ID NO: 9283 - DNA, 18 bp, Artificial Sequence
  Synthetic
ggccacactgggttttgg

SEQ ID NO: 9284 - DNA, 20 bp, Artificial Sequence
  Synthetic
tccaacatagaggaggtcgc

SEQ ID NO: 9285 - DNA, 20 bp, Artificial Sequence
  Synthetic
gacttcagcttggaccccac

SEQ ID NO: 9286 - DNA, 20 bp, Artificial Sequence
  Synthetic
ttcctatcccagaccaagca

SEQ ID NO: 9287 - DNA, 19 bp, Artificial Sequence
  Synthetic
ctgtctttcagtgggcagc

SEQ ID NO: 9288 - DNA, 20 bp, Artificial Sequence
  Synthetic
atctcgctggactgtctact

SEQ ID NO: 9289 - DNA, 20 bp, Artificial Sequence
  Synthetic
ttggtaaatttgctcccggc

SEQ ID NO: 9290 - DNA, 18 bp, Artificial Sequence
  Synthetic
gggattgggtcttgcacg

SEQ ID NO: 9291 - DNA, 20 bp, Artificial Sequence
  Synthetic
ttccattatgtcaccggggt

SEQ ID NO: 9292 - DNA, 19 bp, Artificial Sequence
  Synthetic
gagattggctcgagggtca

SEQ ID NO: 9293 - DNA, 20 bp, Artificial Sequence
  Synthetic
cacctcttaccgagacgtgg

SEQ ID NO: 9294 - DNA, 18 bp, Artificial Sequence
  Synthetic
ggtgacccggacttgaca

SEQ ID NO: 9295 - DNA, 20 bp, Artificial Sequence
  Synthetic
ttaccacagaggaagcttgc

SEQ ID NO: 9296 - DNA, 20 bp, Artificial Sequence
  Synthetic
atggcttccaatactcccca

SEQ ID NO: 9297 - DNA, 20 bp, Artificial Sequence
  Synthetic
tgacgtgctatctcaaagcc

SEQ ID NO: 9298 - DNA, 19 bp, Artificial Sequence
  Synthetic
cttatcgcccagggaggta

SEQ ID NO: 9299 - DNA, 19 bp, Artificial Sequence
  Synthetic
cgatccagtggttgtaagg

SEQ ID NO: 9300 - DNA, 23 bp, Artificial Sequence
  Synthetic
tcaatggacccatctaagtttac

SEQ ID NO: 9301 - DNA, 23 bp, Artificial Sequence
  Synthetic
cttctgtctgtaggttttacaca

SEQ ID NO: 9302 - DNA, 21 bp, Artificial Sequence
  Synthetic
acgcatacaaaagatgaggtt

SEQ ID NO: 9303 - DNA, 18 bp, Artificial Sequence
  Synthetic
tccacaggacaggagaga

SEQ ID NO: 9304 - DNA, 21 bp, Artificial Sequence
  Synthetic
gtgcatgtccagattttaagc

SEQ ID NO: 9305 - DNA, 19 bp, Artificial Sequence
  Synthetic
tcaagcaatttggtggtcc

SEQ ID NO: 9306 - DNA, 22 bp, Artificial Sequence
  Synthetic
caaaactcttgtcaagatcaga

SEQ ID NO: 9307 - DNA, 24 bp, Artificial Sequence
  Synthetic
cctatccaaatagagatttagcaa

SEQ ID NO: 9308 - DNA, 18 bp, Artificial Sequence
  Synthetic
ctgcggtgggattttgag

SEQ ID NO: 9309 - DNA, 23 bp, Artificial Sequence
  Synthetic
tttcagctttagtgatcatttgc

SEQ ID NO: 9310 - DNA, 23 bp, Artificial Sequence
  Synthetic
aaaagtaaacaaagaactgaacc

SEQ ID NO: 9311 - DNA, 20 bp, Artificial Sequence
  Synthetic
tcaaatggtttcttcagtgg

SEQ ID NO: 9312 - DNA, 18 bp, Artificial Sequence
  Synthetic
tggatgccactttggtag

SEQ ID NO: 9313 - DNA, 24 bp, Artificial Sequence
  Synthetic
tagagaaacaaggccaagtaatag

SEQ ID NO: 9314 - DNA, 25 bp, Artificial Sequence
  Synthetic
taaggatgaattaagaagtgttgac

SEQ ID NO: 9315 - DNA, 22 bp, Artificial Sequence
  Synthetic
cttacggtgatgatttgattgt

SEQ ID NO: 9316 - DNA, 20 bp, Artificial Sequence
  Synthetic
aagtcaatggctgagtcacc

SEQ ID NO: 9317 - DNA, 19 bp, Artificial Sequence
  Synthetic
gccacccgaacattcaacc

SEQ ID NO: 9318 - DNA, 18 bp, Artificial Sequence
  Synthetic
gacgtcctcgaagcctga

SEQ ID NO: 9319 - DNA, 18 bp, Artificial Sequence
  Synthetic
cagtgggggcagtgtcat

SEQ ID NO: 9320 - DNA, 19 bp, Artificial Sequence
  Synthetic
tgatccaaagtgggctgtg

SEQ ID NO: 9321 - DNA, 20 bp, Artificial Sequence
  Synthetic
atggagactctcttccctac

SEQ ID NO: 9322 - DNA, 23 bp, Artificial Sequence
  Synthetic
tattgtgtgaagaatcattgtca

SEQ ID NO: 9323 - DNA, 18 bp, Artificial Sequence
  Synthetic
tgcagcacttagtccaag

SEQ ID NO: 9324 - DNA, 18 bp, Artificial Sequence
  Synthetic
gtgagccaccaaaatgca

SEQ ID NO: 9325 - DNA, 21 bp, Artificial Sequence
  Synthetic
gggaaagtcgtatttctgttt

SEQ ID NO: 9326 - DNA, 20 bp, Artificial Sequence
  Synthetic
atcttcccttctgttgccag

SEQ ID NO: 9327 - DNA, 22 bp, Artificial Sequence
  Synthetic
ccagtaagagaagaagaagagg

SEQ ID NO: 9328 - DNA, 21 bp, Artificial Sequence
  Synthetic
tgggagagtattggtagcttt

SEQ ID NO: 9329 - DNA, 20 bp, Artificial Sequence
  Synthetic
cgttgttgaaggtgtttggg

SEQ ID NO: 9330 - DNA, 23 bp, Artificial Sequence
  Synthetic
ttgtaaatccagcttttaatggt

SEQ ID NO: 9331 - DNA, 19 bp, Artificial Sequence
  Synthetic
tttacaaatcccgcctttg

SEQ ID NO: 9332 - DNA, 18 bp, Artificial Sequence
  Synthetic
ggttggcactactggtca

SEQ ID NO: 9333 - DNA, 19 bp, Artificial Sequence
  Synthetic
ggacatgtgcgatattggg

SEQ ID NO: 9334 - DNA, 24 bp, Artificial Sequence
  Synthetic
tttagaacctgataacaatacacc

SEQ ID NO: 9335 - DNA, 18 bp, Artificial Sequence
  Synthetic
tacccccctctgaaaagc

SEQ ID NO: 9336 - DNA, 24 bp, Artificial Sequence
  Synthetic
ctaggtaagtacagtaaccgttat

SEQ ID NO: 9337 - DNA, 20 bp, Artificial Sequence
  Synthetic
ttaaggctcctggcatcact

SEQ ID NO: 9338 - DNA, 20 bp, Artificial Sequence
  Synthetic
tgccttgaaattggtgccca

SEQ ID NO: 9339 - DNA, 20 bp, Artificial Sequence
  Synthetic
atgtcaccatctgatgtcgc

SEQ ID NO: 9340 - DNA, 18 bp, Artificial Sequence
  Synthetic
cctctcgtcattgagcgg

SEQ ID NO: 9341 - DNA, 18 bp, Artificial Sequence
  Synthetic
ttgctgctcccgcctaat

SEQ ID NO: 9342 - DNA, 18 bp, Artificial Sequence
  Synthetic
ggccgtcagttggagttc

SEQ ID NO: 9343 - DNA, 19 bp, Artificial Sequence
  Synthetic
gaggcctatgaggggtctg

SEQ ID NO: 9344 - DNA, 19 bp, Artificial Sequence
  Synthetic
agactaatggcccagagcg

SEQ ID NO: 9345 - DNA, 16 bp, Artificial Sequence
  Synthetic
tggtgagccggctcct

SEQ ID NO: 9346 - DNA, 18 bp, Artificial Sequence
  Synthetic
cttttgtgatgcgcgacg

SEQ ID NO: 9347 - DNA, 18 bp, Artificial Sequence
  Synthetic
gcttgctgccagatggtt

SEQ ID NO: 9348 - DNA, 17 bp, Artificial Sequence
  Synthetic
ttgcgtaatgcctggcg

SEQ ID NO: 9349 - DNA, 18 bp, Artificial Sequence
  Synthetic
atgtgacccatcgctgcc

SEQ ID NO: 9350 - DNA, 18 bp, Artificial Sequence
  Synthetic
ccgagctcatgccattgt

SEQ ID NO: 9351 - DNA, 18 bp, Artificial Sequence
  Synthetic
gccattggccacgtacag

SEQ ID NO: 9352 - DNA, 20 bp, Artificial Sequence
  Synthetic
ttgtatgcaggtgttgtggt

SEQ ID NO: 9353 - DNA, 16 bp, Artificial Sequence
  Synthetic
ccttcgcccccgatgt

SEQ ID NO: 9354 - DNA, 16 bp, Artificial Sequence
  Synthetic
ccctcgggctgttgga

SEQ ID NO: 9355 - DNA, 19 bp, Artificial Sequence
  Synthetic
ccccttttctgtcctccga

SEQ ID NO: 9356 - DNA, 20 bp, Artificial Sequence
  Synthetic
aggtactactaaagccgggt

SEQ ID NO: 9357 - DNA, 18 bp, Artificial Sequence
  Synthetic
ttcagagggtccaaatcg

SEQ ID NO: 9358 - DNA, 19 bp, Artificial Sequence
  Synthetic
catcgccggttttacaaag

SEQ ID NO: 9359 - DNA, 23 bp, Artificial Sequence
  Synthetic
ccttagcgtgtgtaaatatctca

SEQ ID NO: 9360 - DNA, 19 bp, Artificial Sequence
  Synthetic
tacattaccaagcgaaggt

SEQ ID NO: 9361 - DNA, 21 bp, Artificial Sequence
  Synthetic
cccgaattttttttattgcct

SEQ ID NO: 9362 - DNA, 19 bp, Artificial Sequence
  Synthetic
tcttacaaacaatcccccg

SEQ ID NO: 9363 - DNA, 21 bp, Artificial Sequence
  Synthetic
agttcgacatacagtagatgc

SEQ ID NO: 9364 - DNA, 21 bp, Artificial Sequence
  Synthetic
gcaaaactggtgatacttagt

SEQ ID NO: 9365 - DNA, 22 bp, Artificial Sequence
  Synthetic
gccgactaacaattatacttgt

SEQ ID NO: 9366 - DNA, 19 bp, Artificial Sequence
  Synthetic
acaacggaatctgatcgta

SEQ ID NO: 9367 - DNA, 21 bp, Artificial Sequence
  Synthetic
tgtgtaaaggtagacaactga

SEQ ID NO: 9368 - DNA, 20 bp, Artificial Sequence
  Synthetic
tcacctaaaaacctgactca

SEQ ID NO: 9369 - DNA, 16 bp, Artificial Sequence
  Synthetic
ccccgtggtgtccgaa

SEQ ID NO: 9370 - DNA, 18 bp, Artificial Sequence
  Synthetic
ctcgtccacaaagtcggc

SEQ ID NO: 9371 - DNA, 16 bp, Artificial Sequence
  Synthetic
gccgctctcacagcct

SEQ ID NO: 9372 - DNA, 17 bp, Artificial Sequence
  Synthetic
ggcagggccaaaaacgc

SEQ ID NO: 9373 - DNA, 20 bp, Artificial Sequence
  Synthetic
cgagagcgtcagtattaagc

SEQ ID NO: 9374 - DNA, 20 bp, Artificial Sequence
  Synthetic
ataaaagacaccaaggaagc

SEQ ID NO: 9375 - DNA, 22 bp, Artificial Sequence
  Synthetic
gccatgcaaatgttaaaagaga

SEQ ID NO: 9376 - DNA, 22 bp, Artificial Sequence
  Synthetic
tagaccggttctataaaactct

SEQ ID NO: 9377 - DNA, 25 bp, Artificial Sequence
  Synthetic
accatacctagtataaacaatgaga

SEQ ID NO: 9378 - DNA, 22 bp, Artificial Sequence
  Synthetic
ttcctttggatgggttatgaac

SEQ ID NO: 9379 - DNA, 25 bp, Artificial Sequence
  Synthetic
gagccatttaaaaatctgaaaacag

SEQ ID NO: 9380 - DNA, 25 bp, Artificial Sequence
  Synthetic
gaacaagtagataaattagtcagtg

SEQ ID NO: 9381 - DNA, 21 bp, Artificial Sequence
  Synthetic
tatcctggtagcagttcatgt

SEQ ID NO: 9382 - DNA, 25 bp, Artificial Sequence
  Synthetic
gtaaaacaccatatgtatgtttcag

SEQ ID NO: 9383 - DNA, 25 bp, Artificial Sequence
  Synthetic
attactttgactgtttttcagactc

SEQ ID NO: 9384 - DNA, 20 bp, Artificial Sequence
  Synthetic
ttttcctaggatttggctcc

SEQ ID NO: 9385 - DNA, 18 bp, Artificial Sequence
  Synthetic
catgctccttgggatgtt

SEQ ID NO: 9386 - DNA, 23 bp, Artificial Sequence
  Synthetic
ctggttttgcgattctaaaatgt

SEQ ID NO: 9387 - DNA, 22 bp, Artificial Sequence
  Synthetic
taaacatgtggcagaaagtagg

SEQ ID NO: 9388 - DNA, 18 bp, Artificial Sequence
  Synthetic
gcaggaagcactatgggc

SEQ ID NO: 9389 - DNA, 19 bp, Artificial Sequence
  Synthetic
aagatgggtggcaagtggt

SEQ ID NO: 9390 - DNA, 19 bp, Artificial Sequence
  Synthetic
gagtggaggtttgacagcc

SEQ ID NO: 9391 - DNA, 16 bp, Artificial Sequence
  Synthetic
acgcctgggggatgct

SEQ ID NO: 9392 - DNA, 16 bp, Artificial Sequence
  Synthetic
tggctacgtacgcgct

SEQ ID NO: 9393 - DNA, 16 bp, Artificial Sequence
  Synthetic
gcagggccacggacat

SEQ ID NO: 9394 - DNA, 16 bp, Artificial Sequence
  Synthetic
gcggtggtctcaggct

SEQ ID NO: 9395 - DNA, 17 bp, Artificial Sequence
  Synthetic
cgcgacaggaaccggta

SEQ ID NO: 9396 - DNA, 19 bp, Artificial Sequence
  Synthetic
gtgagcacggggagggtaa

SEQ ID NO: 9397 - DNA, 16 bp, Artificial Sequence
  Synthetic
tcagaaacgcccccga

SEQ ID NO: 9398 - DNA, 19 bp, Artificial Sequence
  Synthetic
gccaacagtttccagcacc

SEQ ID NO: 9399 - DNA, 18 bp, Artificial Sequence
  Synthetic
ggctctccttgtttcgcc

SEQ ID NO: 9400 - DNA, 16 bp, Artificial Sequence
  Synthetic
ctccgcagctgccact

SEQ ID NO: 9401 - DNA, 18 bp, Artificial Sequence
  Synthetic
agggtaatggcgctgacg

SEQ ID NO: 9402 - DNA, 16 bp, Artificial Sequence
  Synthetic
gtcggccacgcgctta

SEQ ID NO: 9403 - DNA, 16 bp, Artificial Sequence
  Synthetic
cggccatggtgctgca

SEQ ID NO: 9404 - DNA, 17 bp, Artificial Sequence
  Synthetic
ccacgtggttgagcagc

SEQ ID NO: 9405 - DNA, 16 bp, Artificial Sequence
  Synthetic
gtgcggcggatcgaag

SEQ ID NO: 9406 - DNA, 20 bp, Artificial Sequence
  Synthetic
tgtccacgacgtcaaattcg

SEQ ID NO: 9407 - DNA, 16 bp, Artificial Sequence
  Synthetic
ctcggggccacgtaca

SEQ ID NO: 9408 - DNA, 16 bp, Artificial Sequence
  Synthetic
tgtcgtacgcggggaa

SEQ ID NO: 9409 - DNA, 16 bp, Artificial Sequence
  Synthetic
aggtcgctcgctgtcg

SEQ ID NO: 9410 - DNA, 17 bp, Artificial Sequence
  Synthetic
cccaacgcaacgcctac

SEQ ID NO: 9411 - DNA, 17 bp, Artificial Sequence
  Synthetic
gctggtttggctcgtcc

SEQ ID NO: 9412 - DNA, 18 bp, Artificial Sequence
  Synthetic
cgcaccaaaagcagaggg

SEQ ID NO: 9413 - DNA, 20 bp, Artificial Sequence
  Synthetic
atggtaaacgcaaagcctcc

SEQ ID NO: 9414 - DNA, 16 bp, Artificial Sequence
  Synthetic
gccgggttgaacagcc

SEQ ID NO: 9415 - DNA, 17 bp, Artificial Sequence
  Synthetic
gagcggccattgggttc

SEQ ID NO: 9416 - DNA, 16 bp, Artificial Sequence
  Synthetic
gcaggtggcggtgaga

SEQ ID NO: 9417 - DNA, 16 bp, Artificial Sequence
  Synthetic
ggacgaaggcgcggat

SEQ ID NO: 9418 - DNA, 20 bp, Artificial Sequence
  Synthetic
tcaaagaacgtggtgttggg

SEQ ID NO: 9419 - DNA, 19 bp, Artificial Sequence
  Synthetic
gaccttcatgaccgcgctg

SEQ ID NO: 9420 - DNA, 19 bp, Artificial Sequence
  Synthetic
aacaccattacggccctgg

SEQ ID NO: 9421 - DNA, 17 bp, Artificial Sequence
  Synthetic
ccttgatctcgtggcgc

SEQ ID NO: 9422 - DNA, 18 bp, Artificial Sequence
  Synthetic
ttgaaactcgctgacggc

SEQ ID NO: 9423 - DNA, 16 bp, Artificial Sequence
  Synthetic
tcgcgccgtagtccag

SEQ ID NO: 9424 - DNA, 16 bp, Artificial Sequence
  Synthetic
ggcggcgtctgggttt

SEQ ID NO: 9425 - DNA, 18 bp, Artificial Sequence
  Synthetic
ggggtttgtcaccttcgg

SEQ ID NO: 9426 - DNA, 19 bp, Artificial Sequence
  Synthetic
aagtggtggtccatgacgt

SEQ ID NO: 9427 - DNA, 17 bp, Artificial Sequence
  Synthetic
gagtacgtcctgcggct

SEQ ID NO: 9428 - DNA, 18 bp, Artificial Sequence
  Synthetic
ggactgtccctcggagac

SEQ ID NO: 9429 - DNA, 16 bp, Artificial Sequence
  Synthetic
cgggcggtctgggtta

SEQ ID NO: 9430 - DNA, 16 bp, Artificial Sequence
  Synthetic
actacgcgctcgctga

SEQ ID NO: 9431 - DNA, 16 bp, Artificial Sequence
  Synthetic
ggcatcgggctgtgca

SEQ ID NO: 9432 - DNA, 19 bp, Artificial Sequence
  Synthetic
atgatcgacagcacgctac

SEQ ID NO: 9433 - DNA, 16 bp, Artificial Sequence
  Synthetic
ctgcgcgctgtaagca

SEQ ID NO: 9434 - DNA, 18 bp, Artificial Sequence
  Synthetic
ctcccagtgccccgacat

SEQ ID NO: 9435 - DNA, 20 bp, Artificial Sequence
  Synthetic
ttgacgtatctgtgctccac

SEQ ID NO: 9436 - DNA, 18 bp, Artificial Sequence
  Synthetic
ggggatcggagtggctgt

SEQ ID NO: 9437 - DNA, 18 bp, Artificial Sequence
  Synthetic
gacccacccgttgatcgc

SEQ ID NO: 9438 - DNA, 16 bp, Artificial Sequence
  Synthetic
gcccagggcgatcctt

SEQ ID NO: 9439 - DNA, 16 bp, Artificial Sequence
  Synthetic
ggcgatggggacggaa

SEQ ID NO: 9440 - DNA, 17 bp, Artificial Sequence
  Synthetic
cggactccgtcgtgtgt

SEQ ID NO: 9441 - DNA, 18 bp, Artificial Sequence
  Synthetic
ttccactttcacgccccg

SEQ ID NO: 9442 - DNA, 19 bp, Artificial Sequence
  Synthetic
gaaccaaagcctctcgtgt

SEQ ID NO: 9443 - DNA, 17 bp, Artificial Sequence
  Synthetic
tgcttggaggccctctg

SEQ ID NO: 9444 - DNA, 20 bp, Artificial Sequence
  Synthetic
cgtgttcttgcaatacccct

SEQ ID NO: 9445 - DNA, 18 bp, Artificial Sequence
  Synthetic
catgacaacgacgcccct

SEQ ID NO: 9446 - DNA, 18 bp, Artificial Sequence
  Synthetic
gtcatccctgcatgcgtg

SEQ ID NO: 9447 - DNA, 17 bp, Artificial Sequence
  Synthetic
ggggtggtggtagtggt

SEQ ID NO: 9448 - DNA, 18 bp, Artificial Sequence
  Synthetic
cggtcacgcccactatca

SEQ ID NO: 9449 - DNA, 19 bp, Artificial Sequence
  Synthetic
gggctcatcgggaatctcg

SEQ ID NO: 9450 - DNA, 16 bp, Artificial Sequence
  Synthetic
ccgggtttcgtggcct

SEQ ID NO: 9451 - DNA, 17 bp, Artificial Sequence
  Synthetic
cctgctagttgtcgcgg

SEQ ID NO: 9452 - DNA, 16 bp, Artificial Sequence
  Synthetic
ttccagccccccagca

SEQ ID NO: 9453 - DNA, 17 bp, Artificial Sequence
  Synthetic
gcaacgcgcgactatgc

SEQ ID NO: 9454 - DNA, 17 bp, Artificial Sequence
  Synthetic
ggtcacaccctaagcgc

SEQ ID NO: 9455 - DNA, 20 bp, Artificial Sequence
  Synthetic
tttacgctttcgaccagagc

SEQ ID NO: 9456 - DNA, 19 bp, Artificial Sequence
  Synthetic
tctgtgcatagaattggcg

SEQ ID NO: 9457 - DNA, 18 bp, Artificial Sequence
  Synthetic
tccccacacccaggagaa

SEQ ID NO: 9458 - DNA, 18 bp, Artificial Sequence
  Synthetic
accaggccattcaaaagc

SEQ ID NO: 9459 - DNA, 18 bp, Artificial Sequence
  Synthetic
aaggacacgaaacatgcc

SEQ ID NO: 9460 - DNA, 24 bp, Artificial Sequence
  Synthetic
gtgaagaattgtagcataatggtt

SEQ ID NO: 9461 - DNA, 22 bp, Artificial Sequence
  Synthetic
caaatcatattttgccaatggt

SEQ ID NO: 9462 - DNA, 24 bp, Artificial Sequence
  Synthetic
cgtctcggacatttaagaaattag

SEQ ID NO: 9463 - DNA, 19 bp, Artificial Sequence
  Synthetic
ctgtcacctaccggctagg

SEQ ID NO: 9464 - DNA, 23 bp, Artificial Sequence
  Synthetic
agagaaaagttcctcaaatctgt

SEQ ID NO: 9465 - DNA, 20 bp, Artificial Sequence
  Synthetic
tgtaggggttttctttggcg

SEQ ID NO: 9466 - DNA, 18 bp, Artificial Sequence
  Synthetic
ctgaaagcggtggcacat

SEQ ID NO: 9467 - DNA, 20 bp, Artificial Sequence
  Synthetic
ttgaggatgatctgcagcag

SEQ ID NO: 9468 - DNA, 23 bp, Artificial Sequence
  Synthetic
ctattgagccaattgatgcaatt

SEQ ID NO: 9469 - DNA, 22 bp, Artificial Sequence
  Synthetic
agattttacttaccccctcaac

SEQ ID NO: 9470 - DNA, 18 bp, Artificial Sequence
  Synthetic
ctggtctggggtattcgt

SEQ ID NO: 9471 - DNA, 18 bp, Artificial Sequence
  Synthetic
aaaaccctccactgacca

SEQ ID NO: 9472 - DNA, 18 bp, Artificial Sequence
  Synthetic
ttgacactaccaggggaa

SEQ ID NO: 9473 - DNA, 21 bp, Artificial Sequence
  Synthetic
gtacatactgtccattgcaac

SEQ ID NO: 9474 - DNA, 18 bp, Artificial Sequence
  Synthetic
tccccaaacccaaagcgt

SEQ ID NO: 9475 - DNA, 25 bp, Artificial Sequence
  Synthetic
cctactttaggtgacataattttgg

SEQ ID NO: 9476 - DNA, 19 bp, Artificial Sequence
  Synthetic
agaggagtgtaacagagct

SEQ ID NO: 9477 - DNA, 20 bp, Artificial Sequence
  Synthetic
ctgataccagaagaagacca

SEQ ID NO: 9478 - DNA, 24 bp, Artificial Sequence
  Synthetic
atagagctagtagaaataaacgag

SEQ ID NO: 9479 - DNA, 23 bp, Artificial Sequence
  Synthetic
aagaacacgtgacttatacagac

SEQ ID NO: 9480 - DNA, 18 bp, Artificial Sequence
  Synthetic
tgtcagcagaattggcac

SEQ ID NO: 9481 - DNA, 20 bp, Artificial Sequence
  Synthetic
tttacagatggctttctggc

SEQ ID NO: 9482 - DNA, 23 bp, Artificial Sequence
  Synthetic
ccagatccaaataagtttgcttt

SEQ ID NO: 9483 - DNA, 23 bp, Artificial Sequence
  Synthetic
attgtaaatactttcgtgtgtct

SEQ ID NO: 9484 - DNA, 20 bp, Artificial Sequence
  Synthetic
taattcgttgctatggttgc

SEQ ID NO: 9485 - DNA, 18 bp, Artificial Sequence
  Synthetic
cctgaagaggaggagcaa

SEQ ID NO: 9486 - DNA, 20 bp, Artificial Sequence
  Synthetic
tatgttgtgactgaagctga

SEQ ID NO: 9487 - DNA, 21 bp, Artificial Sequence
  Synthetic
gtgaaggaaagagcaaaagac

SEQ ID NO: 9488 - DNA, 24 bp, Artificial Sequence
  Synthetic
taaacgttcaatgtctaatgtagc

SEQ ID NO: 9489 - DNA, 22 bp, Artificial Sequence
  Synthetic
gaaacattggtgtatttgcgta

SEQ ID NO: 9490 - DNA, 20 bp, Artificial Sequence
  Synthetic
ctagctacaccaaacggacc

SEQ ID NO: 9491 - DNA, 20 bp, Artificial Sequence
  Synthetic
agacgatcagtttcccctga

SEQ ID NO: 9492 - DNA, 23 bp, Artificial Sequence
  Synthetic
agttctgttaatcaaagaaacca

SEQ ID NO: 9493 - DNA, 25 bp, Artificial Sequence
  Synthetic
agtattatatacttaggtgggttgg

SEQ ID NO: 9494 - DNA, 18 bp, Artificial Sequence
  Synthetic
ggaacccgctattgtacc

SEQ ID NO: 9495 - DNA, 21 bp, Artificial Sequence
  Synthetic
actttcataaggacttctgca

SEQ ID NO: 9496 - DNA, 18 bp, Artificial Sequence
  Synthetic
ccatcacgtgctgttcaa

SEQ ID NO: 9497 - DNA, 20 bp, Artificial Sequence
  Synthetic
tatgatttaagccccatcgc

SEQ ID NO: 9498 - DNA, 19 bp, Artificial Sequence
  Synthetic
atcatgagcgtcttgtttg

SEQ ID NO: 9499 - DNA, 18 bp, Artificial Sequence
  Synthetic
cgaggaccagcaaaatgg

SEQ ID NO: 9500 - DNA, 22 bp, Artificial Sequence
  Synthetic
ttatgagctgtttacatcttgt

SEQ ID NO: 9501 - DNA, 19 bp, Artificial Sequence
  Synthetic
ttttggtacattgttggcg

SEQ ID NO: 9502 - DNA, 23 bp, Artificial Sequence
  Synthetic
tgtcttttctattgacaatagca

SEQ ID NO: 9503 - DNA, 21 bp, Artificial Sequence
  Synthetic
gaggaccattaggaaaaactc

SEQ ID NO: 9504 - DNA, 24 bp, Artificial Sequence
  Synthetic
caaaagaaaaaattcaccttgagc

SEQ ID NO: 9505 - DNA, 24 bp, Artificial Sequence
  Synthetic
caatgtattttcttggagtaaggc

SEQ ID NO: 9506 - DNA, 18 bp, Artificial Sequence
  Synthetic
cgtgttgtgtcccttgtt

SEQ ID NO: 9507 - DNA, 18 bp, Artificial Sequence
  Synthetic
aatgattgggaaggagcc

SEQ ID NO: 9508 - DNA, 21 bp, Artificial Sequence
  Synthetic
cagaggattgtaacacagcta

SEQ ID NO: 9509 - DNA, 23 bp, Artificial Sequence
  Synthetic
atcatttctcattgcattgaaac

SEQ ID NO: 9510 - DNA, 23 bp, Artificial Sequence
  Synthetic
cagttaaacctggtcttagaaga

SEQ ID NO: 9511 - DNA, 19 bp, Artificial Sequence
  Synthetic
actacaagaggcggtcagc

SEQ ID NO: 9512 - DNA, 18 bp, Artificial Sequence
  Synthetic
taaacgtgacactgctga

SEQ ID NO: 9513 - DNA, 23 bp, Artificial Sequence
  Synthetic
aatgaaacagcaatcttagacat

SEQ ID NO: 9514 - DNA, 18 bp, Artificial Sequence
  Synthetic
aaagatttcttgggcggg

SEQ ID NO: 9515 - DNA, 18 bp, Artificial Sequence
  Synthetic
tgggaacaaaaggagcga

SEQ ID NO: 9516 - DNA, 18 bp, Artificial Sequence
  Synthetic
gcaaacgcaaacgcaata

SEQ ID NO: 9517 - DNA, 18 bp, Artificial Sequence
  Synthetic
tcctaaggtgtctgcatg

SEQ ID NO: 9518 - DNA, 18 bp, Artificial Sequence
  Synthetic
cattcctgcagatggtga

SEQ ID NO: 9519 - DNA, 23 bp, Artificial Sequence
  Synthetic
cagacttccttaaaatggacaaa

SEQ ID NO: 9520 - DNA, 23 bp, Artificial Sequence
  Synthetic
gctcacttaaatgttatgaatcc

SEQ ID NO: 9521 - DNA, 20 bp, Artificial Sequence
  Synthetic
actcgaccttataagtgtgg

SEQ ID NO: 9522 - DNA, 20 bp, Artificial Sequence
  Synthetic
gttgctgtacatgttttgct

SEQ ID NO: 9523 - DNA, 18 bp, Artificial Sequence
  Synthetic
tcgcctgatattgaagca

SEQ ID NO: 9524 - DNA, 19 bp, Artificial Sequence
  Synthetic
gaagaagcagactgtgtgg

SEQ ID NO: 9525 - DNA, 24 bp, Artificial Sequence
  Synthetic
gtccaagaaaagattatttgagga

SEQ ID NO: 9526 - DNA, 18 bp, Artificial Sequence
  Synthetic
gagagacccagagccaaa

SEQ ID NO: 9527 - DNA, 25 bp, Artificial Sequence
  Synthetic
acaaatatttgggagtatactgtac

SEQ ID NO: 9528 - DNA, 19 bp, Artificial Sequence
  Synthetic
caggtgatgttgtgggttt

SEQ ID NO: 9529 - DNA, 25 bp, Artificial Sequence
  Synthetic
cagccaactaatatatatttttgcg

SEQ ID NO: 9530 - DNA, 24 bp, Artificial Sequence
  Synthetic
tccattaggaataggtattagtgg

SEQ ID NO: 9531 - DNA, 23 bp, Artificial Sequence
  Synthetic
ggaaaccctaaatctgaaaaagc

SEQ ID NO: 9532 - DNA, 25 bp, Artificial Sequence
  Synthetic
tcttgtacttgaatatcttttaggc

SEQ ID NO: 9533 - DNA, 21 bp, Artificial Sequence
  Synthetic
aggggtacttttccaaaatgt

SEQ ID NO: 9534 - DNA, 18 bp, Artificial Sequence
  Synthetic
ctcctacaatgacgccag

SEQ ID NO: 9535 - DNA, 22 bp, Artificial Sequence
  Synthetic
gcatttgttttgtattgcagaa

SEQ ID NO: 9536 - DNA, 20 bp, Artificial Sequence
  Synthetic
gcgttcgatcaggtggattt

SEQ ID NO: 9537 - DNA, 22 bp, Artificial Sequence
  Synthetic
ctggacaatctttttcaatgga

SEQ ID NO: 9538 - DNA, 25 bp, Artificial Sequence
  Synthetic
ttacacattagatagcaaaacatgg

SEQ ID NO: 9539 - DNA, 25 bp, Artificial Sequence
  Synthetic
gtttcagttaaatacaagtacacac

SEQ ID NO: 9540 - DNA, 21 bp, Artificial Sequence
  Synthetic
tccaatagctccacttaatgc

SEQ ID NO: 9541 - DNA, 24 bp, Artificial Sequence
  Synthetic
aacacaggaacaaatgataatgtc

SEQ ID NO: 9542 - DNA, 19 bp, Artificial Sequence
  Synthetic
tttagcatacactccccct

SEQ ID NO: 9543 - DNA, 22 bp, Artificial Sequence
  Synthetic
gcatttcaatggttcagaaaca

SEQ ID NO: 9544 - DNA, 22 bp, Artificial Sequence
  Synthetic
tattccagcaatctaacagtcc

SEQ ID NO: 9545 - DNA, 22 bp, Artificial Sequence
  Synthetic
cattcagagtggttaatgaaca

SEQ ID NO: 9546 - DNA, 20 bp, Artificial Sequence
  Synthetic
ttagtagccccttacccaaa

SEQ ID NO: 9547 - DNA, 18 bp, Artificial Sequence
  Synthetic
ggagactgtggtgggata

SEQ ID NO: 9548 - DNA, 25 bp, Artificial Sequence
  Synthetic
actcatagaatggatcaaaaacaag

SEQ ID NO: 9549 - DNA, 25 bp, Artificial Sequence
  Synthetic
aattacatgcagtttaagagtaagc

SEQ ID NO: 9550 - DNA, 23 bp, Artificial Sequence
  Synthetic
tggctagtttagacaataaagga

SEQ ID NO: 9551 - DNA, 25 bp, Artificial Sequence
  Synthetic
cttactcaggaaaaatatactcaca

SEQ ID NO: 9552 - DNA, 21 bp, Artificial Sequence
  Synthetic
catatcagaggatttggaagg

SEQ ID NO: 9553 - DNA, 22 bp, Artificial Sequence
  Synthetic
agcaatactttgtggagaaaca

SEQ ID NO: 9554 - DNA, 22 bp, Artificial Sequence
  Synthetic
aggtactgatccaaaatggaag

SEQ ID NO: 9555 - DNA, 21 bp, Artificial Sequence
  Synthetic
aagctgtctcaaatgtccaaa

SEQ ID NO: 9556 - DNA, 18 bp, Artificial Sequence
  Synthetic
gcatgcgaactgacagat

SEQ ID NO: 9557 - DNA, 25 bp, Artificial Sequence
  Synthetic
tgtatggtttcatcataaaaggaag

SEQ ID NO: 9558 - DNA, 19 bp, Artificial Sequence
  Synthetic
aatggggaatggagatgag

SEQ ID NO: 9559 - DNA, 25 bp, Artificial Sequence
  Synthetic
aaagaactaagagatttgatgtcac

SEQ ID NO: 9560 - DNA, 19 bp, Artificial Sequence
  Synthetic
aacagaaatggaccaacga

SEQ ID NO: 9561 - DNA, 18 bp, Artificial Sequence
  Synthetic
acgaagttggagccagaa

SEQ ID NO: 9562 - DNA, 23 bp, Artificial Sequence
  Synthetic
agaaatgatgatgttgatcagag

SEQ ID NO: 9563 - DNA, 20 bp, Artificial Sequence
  Synthetic
aaagggaagaagaagtgctc

SEQ ID NO: 9564 - DNA, 21 bp, Artificial Sequence
  Synthetic
tttgaactttgtcaacagagc

SEQ ID NO: 9565 - DNA, 18 bp, Artificial Sequence
  Synthetic
ttcttgagggtccgagac

SEQ ID NO: 9566 - DNA, 19 bp, Artificial Sequence
  Synthetic
tattccaacagatgcgtga

SEQ ID NO: 9567 - DNA, 20 bp, Artificial Sequence
  Synthetic
ctttgcatgatcttttggga

SEQ ID NO: 9568 - DNA, 24 bp, Artificial Sequence
  Synthetic
catggtttattgtaaatgaagcag

SEQ ID NO: 9569 - DNA, 21 bp, Artificial Sequence
  Synthetic
ggaagctgttaaaatttcacc

SEQ ID NO: 9570 - DNA, 20 bp, Artificial Sequence
  Synthetic
aacaaatctcccttcctgcc

SEQ ID NO: 9571 - DNA, 18 bp, Artificial Sequence
  Synthetic
agacagcggtggaatctc

SEQ ID NO: 9572 - DNA, 25 bp, Artificial Sequence
  Synthetic
ctcttgcagatattttattaaaggc

SEQ ID NO: 9573 - DNA, 21 bp, Artificial Sequence
  Synthetic
tgctgtaatagatgttcctgg

SEQ ID NO: 9574 - DNA, 23 bp, Artificial Sequence
  Synthetic
ctactataatagataacggggct

SEQ ID NO: 9575 - DNA, 24 bp, Artificial Sequence
  Synthetic
tgatgattatattgtaccgacgaa

SEQ ID NO: 9576 - DNA, 20 bp, Artificial Sequence
  Synthetic
tacagattgacagaggtggt

SEQ ID NO: 9577 - DNA, 18 bp, Artificial Sequence
  Synthetic
ggcgacactccaccatga

SEQ ID NO: 9578 - DNA, 20 bp, Artificial Sequence
  Synthetic
tgcaacatgagcacacttcc

SEQ ID NO: 9579 - DNA, 16 bp, Artificial Sequence
  Synthetic
tgtccacgctccagca

SEQ ID NO: 9580 - DNA, 18 bp, Artificial Sequence
  Synthetic
cacagaatggcgtgggac

SEQ ID NO: 9581 - DNA, 20 bp, Artificial Sequence
  Synthetic
caaactgggtttcttagcgc

SEQ ID NO: 9582 - DNA, 20 bp, Artificial Sequence
  Synthetic
acaactggggagaaaacgag

SEQ ID NO: 9583 - DNA, 20 bp, Artificial Sequence
  Synthetic
gaccgttgcgacttgtatga

SEQ ID NO: 9584 - DNA, 19 bp, Artificial Sequence
  Synthetic
tttggttgatgctgctcgt

SEQ ID NO: 9585 - DNA, 19 bp, Artificial Sequence
  Synthetic
cctctcagtgagtgggcga

SEQ ID NO: 9586 - DNA, 18 bp, Artificial Sequence
  Synthetic
gagggggaagtgcaggtt

SEQ ID NO: 9587 - DNA, 18 bp, Artificial Sequence
  Synthetic
ctcttcaggaggccccct

SEQ ID NO: 9588 - DNA, 19 bp, Artificial Sequence
  Synthetic
caggaccatcaccacaggg

SEQ ID NO: 9589 - DNA, 20 bp, Artificial Sequence
  Synthetic
agaaatgcgacgaactgtct

SEQ ID NO: 9590 - DNA, 18 bp, Artificial Sequence
  Synthetic
gtctcgagaagccaacgg

SEQ ID NO: 9591 - DNA, 18 bp, Artificial Sequence
  Synthetic
gtgtgtgccagagccaaa

SEQ ID NO: 9592 - DNA, 20 bp, Artificial Sequence
  Synthetic
ggtcctgtaccagcagtttg

SEQ ID NO: 9593 - DNA, 18 bp, Artificial Sequence
  Synthetic
cctcccagaccctgttgc

SEQ ID NO: 9594 - DNA, 19 bp, Artificial Sequence
  Synthetic
ctctgaaggcgctaaccag

SEQ ID NO: 9595 - DNA, 19 bp, Artificial Sequence
  Synthetic
ataggggagtttgggctgg

SEQ ID NO: 9596 - DNA, 18 bp, Artificial Sequence
  Synthetic
tcactgaggtggatggcg

SEQ ID NO: 9597 - DNA, 19 bp, Artificial Sequence
  Synthetic
caacatcacccgggttgag

SEQ ID NO: 9598 - DNA, 20 bp, Artificial Sequence
  Synthetic
cgagtctgctgtatcgcaag

SEQ ID NO: 9599 - DNA, 20 bp, Artificial Sequence
  Synthetic
atgccaccccaatacctacc

SEQ ID NO: 9600 - DNA, 20 bp, Artificial Sequence
  Synthetic
ttgccaactagaccctaccg

SEQ ID NO: 9601 - DNA, 18 bp, Artificial Sequence
  Synthetic
ccacagcccacatacgac

SEQ ID NO: 9602 - DNA, 19 bp, Artificial Sequence
  Synthetic
cactccactcgatctccct

SEQ ID NO: 9603 - DNA, 23 bp, Artificial Sequence
  Synthetic
tgattttcaaaaatgtctgacag

SEQ ID NO: 9604 - DNA, 19 bp, Artificial Sequence
  Synthetic
ggacagcaacttcaatgca

SEQ ID NO: 9605 - DNA, 18 bp, Artificial Sequence
  Synthetic
gcagcaagaagaaacggt

SEQ ID NO: 9606 - DNA, 22 bp, Artificial Sequence
  Synthetic
ttaagagcactagcaagaagag

SEQ ID NO: 9607 - DNA, 20 bp, Artificial Sequence
  Synthetic
caatagaggacaaggctcaa

SEQ ID NO: 9608 - DNA, 21 bp, Artificial Sequence
  Synthetic
aataaatttcaggtctggagc

SEQ ID NO: 9609 - DNA, 21 bp, Artificial Sequence
  Synthetic
atggatcctcagtttcctact

SEQ ID NO: 9610 - DNA, 25 bp, Artificial Sequence
  Synthetic
tgagtaatgaggaatcattagaaga

SEQ ID NO: 9611 - DNA, 18 bp, Artificial Sequence
  Synthetic
tgttgccgctttaagtcc

SEQ ID NO: 9612 - DNA, 25 bp, Artificial Sequence
  Synthetic
aatgtatgattatatctgaacctcc

SEQ ID NO: 9613 - DNA, 18 bp, Artificial Sequence
  Synthetic
gagagcagctctagatgg

SEQ ID NO: 9614 - DNA, 24 bp, Artificial Sequence
  Synthetic
gggaaactattagaaaagaaagtg

SEQ ID NO: 9615 - DNA, 21 bp, Artificial Sequence
  Synthetic
aagtggactataatgggctct

SEQ ID NO: 9616 - DNA, 22 bp, Artificial Sequence
  Synthetic
ccaaagacatagatcagttgaa

SEQ ID NO: 9617 - DNA, 18 bp, Artificial Sequence
  Synthetic
tgggtattggaaccggaa

SEQ ID NO: 9618 - DNA, 24 bp, Artificial Sequence
  Synthetic
tataggttcttttgaagagatacc

SEQ ID NO: 9619 - DNA, 21 bp, Artificial Sequence
  Synthetic
attaatgccacttggacagac

SEQ ID NO: 9620 - DNA, 25 bp, Artificial Sequence
  Synthetic
gagtttacaatacggatgaatatgt

SEQ ID NO: 9621 - DNA, 20 bp, Artificial Sequence
  Synthetic
gtgcaccactggatatcaat

SEQ ID NO: 9622 - DNA, 25 bp, Artificial Sequence
  Synthetic
accaggattataagtataaagctac

SEQ ID NO: 9623 - DNA, 21 bp, Artificial Sequence
  Synthetic
tggaacatagtactgtgaaca

SEQ ID NO: 9624 - DNA, 19 bp, Artificial Sequence
  Synthetic
gacgctttgtccaaaatgc

SEQ ID NO: 9625 - DNA, 19 bp, Artificial Sequence
  Synthetic
gcagatgcaacgattcaag

SEQ ID NO: 9626 - DNA, 19 bp, Artificial Sequence
  Synthetic
aggtaccaatggggaagag

SEQ ID NO: 9627 - DNA, 22 bp, Artificial Sequence
  Synthetic
tagaaaaacaaagtagagctgc

SEQ ID NO: 9628 - DNA, 20 bp, Artificial Sequence
  Synthetic
cgtggtccagattaagtttg

SEQ ID NO: 9629 - DNA, 25 bp, Artificial Sequence
  Synthetic
ctcacaatatagtaatgaaaagtgg

SEQ ID NO: 9630 - DNA, 25 bp, Artificial Sequence
  Synthetic
gtggaagaaactagttttattgatg

SEQ ID NO: 9631 - DNA, 19 bp, Artificial Sequence
  Synthetic
tacgaaaacgacgtaaacg

SEQ ID NO: 9632 - DNA, 20 bp, Artificial Sequence
  Synthetic
tacatttacctgaccccaat

SEQ ID NO: 9633 - DNA, 19 bp, Artificial Sequence
  Synthetic
ccacctataggggaacact

SEQ ID NO: 9634 - DNA, 20 bp, Artificial Sequence
  Synthetic
acgaagggaacaaatgtttg

SEQ ID NO: 9635 - DNA, 19 bp, Artificial Sequence
  Synthetic
ctccagcacctaaagaaga

SEQ ID NO: 9636 - DNA, 21 bp, Artificial Sequence
  Synthetic
ttttgtagcttcaaccgaatt

SEQ ID NO: 9637 - DNA, 23 bp, Artificial Sequence
  Synthetic
ataaaagcagacattttatgcac

SEQ ID NO: 9638 - DNA, 24 bp, Artificial Sequence
  Synthetic
accgttgtgtgatttgttaattag

SEQ ID NO: 9639 - DNA, 21 bp, Artificial Sequence
  Synthetic
caaccagagacaactgatctc

SEQ ID NO: 9640 - DNA, 19 bp, Artificial Sequence
  Synthetic
gaagactttgtgcgacagt

SEQ ID NO: 9641 - DNA, 18 bp, Artificial Sequence
  Synthetic
aacaatggcctggacagt

SEQ ID NO: 9642 - DNA, 19 bp, Artificial Sequence
  Synthetic
atctcctgacttggaagca

SEQ ID NO: 9643 - DNA, 18 bp, Artificial Sequence
  Synthetic
gactgactcaagctgggt

SEQ ID NO: 9644 - DNA, 25 bp, Artificial Sequence
  Synthetic
ggattcattataaaaggaagatctc

SEQ ID NO: 9645 - DNA, 19 bp, Artificial Sequence
  Synthetic
gccttcttcaatctctcca

SEQ ID NO: 9646 - DNA, 25 bp, Artificial Sequence
  Synthetic
gattcaatggataaggaagaaatgg

SEQ ID NO: 9647 - DNA, 21 bp, Artificial Sequence
  Synthetic
ttcgtgtattttgtagaagca

SEQ ID NO: 9648 - DNA, 21 bp, Artificial Sequence
  Synthetic
gaaatgtcttaagcattgctc

SEQ ID NO: 9649 - DNA, 23 bp, Artificial Sequence
  Synthetic
agtcttaggagtttcaattctga

SEQ ID NO: 9650 - DNA, 22 bp, Artificial Sequence
  Synthetic
ttcgtagctaacttcagtatgg

SEQ ID NO: 9651 - DNA, 19 bp, Artificial Sequence
  Synthetic
caggactgttggtttcaga

SEQ ID NO: 9652 - DNA, 21 bp, Artificial Sequence
  Synthetic
gttaacaactatcaggcgatt

SEQ ID NO: 9653 - DNA, 19 bp, Artificial Sequence
  Synthetic
ctggcgagataatttcgtg

SEQ ID NO: 9654 - DNA, 25 bp, Artificial Sequence
  Synthetic
gcagactctatataattaacaatgg

SEQ ID NO: 9655 - DNA, 18 bp, Artificial Sequence
  Synthetic
ctgctgttaggctcactg

SEQ ID NO: 9656 - DNA, 19 bp, Artificial Sequence
  Synthetic
ctgttccacttacaggagc

SEQ ID NO: 9657 - DNA, 18 bp, Artificial Sequence
  Synthetic
caggagcaggtagacatc

SEQ ID NO: 9658 - DNA, 22 bp, Artificial Sequence
  Synthetic
atttgatgaaaatggtcaaccg

SEQ ID NO: 9659 - DNA, 21 bp, Artificial Sequence
  Synthetic
ccgaaaaaagggaataatgcg

SEQ ID NO: 9660 - DNA, 16 bp, Artificial Sequence
  Synthetic
ccaacccagccaccca

SEQ ID NO: 9661 - DNA, 20 bp, Artificial Sequence
  Synthetic
tttagataaggtggtggtgc

SEQ ID NO: 9662 - DNA, 18 bp, Artificial Sequence
  Synthetic
cggcacctactactgatg

SEQ ID NO: 9663 - DNA, 19 bp, Artificial Sequence
  Synthetic
ctactgaaggtgagcttga

SEQ ID NO: 9664 - DNA, 20 bp, Artificial Sequence
  Synthetic
cagagccactataagtacca

SEQ ID NO: 9665 - DNA, 22 bp, Artificial Sequence
  Synthetic
atcctactgatcttgacattcc

SEQ ID NO: 9666 - DNA, 18 bp, Artificial Sequence
  Synthetic
cacccgctctatgaggtt

SEQ ID NO: 9667 - DNA, 22 bp, Artificial Sequence
  Synthetic
taataatacacatgcaactggt

SEQ ID NO: 9668 - DNA, 18 bp, Artificial Sequence
  Synthetic
cggagcagcttgatcaat

SEQ ID NO: 9669 - DNA, 19 bp, Artificial Sequence
  Synthetic
ggttacacacctgtacagt

SEQ ID NO: 9670 - DNA, 18 bp, Artificial Sequence
  Synthetic
cgtctcaaggcaccaaac

SEQ ID NO: 9671 - DNA, 18 bp, Artificial Sequence
  Synthetic
ctgcggtgaaaggagttg

SEQ ID NO: 9672 - DNA, 19 bp, Artificial Sequence
  Synthetic
cattttcctggcacggtca

SEQ ID NO: 9673 - DNA, 23 bp, Artificial Sequence
  Synthetic
gctgcatttgaagatttaagagt

SEQ ID NO: 9674 - DNA, 19 bp, Artificial Sequence
  Synthetic
tgggtgggctatatacagc

SEQ ID NO: 9675 - DNA, 18 bp, Artificial Sequence
  Synthetic
cttggtcagcaagtgcat

SEQ ID NO: 9676 - DNA, 21 bp, Artificial Sequence
  Synthetic
tcaatagagttgaatgcacct

SEQ ID NO: 9677 - DNA, 25 bp, Artificial Sequence
  Synthetic
agggattttcatataggtatggtaa

SEQ ID NO: 9678 - DNA, 18 bp, Artificial Sequence
  Synthetic
cgagtgggtatgcacaaa

SEQ ID NO: 9679 - DNA, 20 bp, Artificial Sequence
  Synthetic
tgcaaatcagaggattcgtg

SEQ ID NO: 9680 - DNA, 19 bp, Artificial Sequence
  Synthetic
caaggaaccaacctgaatg

SEQ ID NO: 9681 - DNA, 22 bp, Artificial Sequence
  Synthetic
gcatgttcaatatgctgagtac

SEQ ID NO: 9682 - DNA, 20 bp, Artificial Sequence
  Synthetic
gcttcttctaccgctatggg

SEQ ID NO: 9683 - DNA, 25 bp, Artificial Sequence
  Synthetic
tagtatataaaaaagggagtaaccg

SEQ ID NO: 9684 - DNA, 22 bp, Artificial Sequence
  Synthetic
ggtgtatagagacagtataccc

SEQ ID NO: 9685 - DNA, 18 bp, Artificial Sequence
  Synthetic
caacgacgcagagaaaca

SEQ ID NO: 9686 - DNA, 25 bp, Artificial Sequence
  Synthetic
tggtagattttattgatacacaagg

SEQ ID NO: 9687 - DNA, 21 bp, Artificial Sequence
  Synthetic
atatcagatagtggctatggc

SEQ ID NO: 9688 - DNA, 23 bp, Artificial Sequence
  Synthetic
cctttttaaaaagcaattgccaa

SEQ ID NO: 9689 - DNA, 23 bp, Artificial Sequence
  Synthetic
atagaccactatgaaaatgacag

SEQ ID NO: 9690 - DNA, 21 bp, Artificial Sequence
  Synthetic
ttaaaaaaggtggccaaacag

SEQ ID NO: 9691 - DNA, 19 bp, Artificial Sequence
  Synthetic
atgtgcagtaccagtgacg

SEQ ID NO: 9692 - DNA, 25 bp, Artificial Sequence
  Synthetic
ctacgcctataatacatttaaaagg

SEQ ID NO: 9693 - DNA, 23 bp, Artificial Sequence
  Synthetic
tattttgcttttgtgtatgcatg

SEQ ID NO: 9694 - DNA, 19 bp, Artificial Sequence
  Synthetic
tgagtttcttacacgtcca

SEQ ID NO: 9695 - DNA, 23 bp, Artificial Sequence
  Synthetic
accttccccagaatatattgaac

SEQ ID NO: 9696 - DNA, 18 bp, Artificial Sequence
  Synthetic
cgccacgtctaatgtttc

SEQ ID NO: 9697 - DNA, 25 bp, Artificial Sequence
  Synthetic
atcctgattatttacaaatgtctgc

SEQ ID NO: 9698 - DNA, 22 bp, Artificial Sequence
  Synthetic
tattggttacataaggcacagg

SEQ ID NO: 9699 - DNA, 19 bp, Artificial Sequence
  Synthetic
cgccctagtgagtaacaac

SEQ ID NO: 9700 - DNA, 18 bp, Artificial Sequence
  Synthetic
cgaaagcaggcaaaccat

SEQ ID NO: 9701 - DNA, 18 bp, Artificial Sequence
  Synthetic
ccaagtggttatgcccaa

SEQ ID NO: 9702 - DNA, 24 bp, Artificial Sequence
  Synthetic
aaataagggggtttgtatactttg

SEQ ID NO: 9703 - DNA, 25 bp, Artificial Sequence
  Synthetic
catgttcaatatgttaagcactgta

SEQ ID NO: 9704 - DNA, 24 bp, Artificial Sequence
  Synthetic
acaagttttttctatcgttatggg

SEQ ID NO: 9705 - DNA, 18 bp, Artificial Sequence
  Synthetic
cactcctggatccccaaa

SEQ ID NO: 9706 - DNA, 16 bp, Artificial Sequence
  Synthetic
ggtggaaggcccggaa

SEQ ID NO: 9707 - DNA, 19 bp, Artificial Sequence
  Synthetic
caacgccgcttaaaaccct

SEQ ID NO: 9708 - DNA, 20 bp, Artificial Sequence
  Synthetic
tgctggactctctacagacc

SEQ ID NO: 9709 - DNA, 19 bp, Artificial Sequence
  Synthetic
caacgcctcaatgttggct

SEQ ID NO: 9710 - DNA, 16 bp, Artificial Sequence
  Synthetic
ctgtggcgtgacggtg

SEQ ID NO: 9711 - DNA, 18 bp, Artificial Sequence
  Synthetic
ggggtggaaagcaaggtg

SEQ ID NO: 9712 - DNA, 20 bp, Artificial Sequence
  Synthetic
gtgtaattggccaacagtgc

SEQ ID NO: 9713 - DNA, 18 bp, Artificial Sequence
  Synthetic
atcatggggttggaccgt

SEQ ID NO: 9714 - DNA, 19 bp, Artificial Sequence
  Synthetic
gcacaggagtcttggttcg

SEQ ID NO: 9715 - DNA, 20 bp, Artificial Sequence
  Synthetic
aagcttaggtggtatcgcac

SEQ ID NO: 9716 - DNA, 19 bp, Artificial Sequence
  Synthetic
tttgagcacgctggacatg

SEQ ID NO: 9717 - DNA, 20 bp, Artificial Sequence
  Synthetic
ccatgggcacttgtgtgaat

SEQ ID NO: 9718 - DNA, 18 bp, Artificial Sequence
  Synthetic
ggtcgtctggctctccga

SEQ ID NO: 9719 - DNA, 20 bp, Artificial Sequence
  Synthetic
atcccagaaagtacctccgc

SEQ ID NO: 9720 - DNA, 20 bp, Artificial Sequence
  Synthetic
ttatggacacaggttgccag

SEQ ID NO: 9721 - DNA, 17 bp, Artificial Sequence
  Synthetic
gccagcaccagcagagt

SEQ ID NO: 9722 - DNA, 16 bp, Artificial Sequence
  Synthetic
ggtgtccagcggcaga

SEQ ID NO: 9723 - DNA, 19 bp, Artificial Sequence
  Synthetic
caaccccctgttgtaccag

SEQ ID NO: 9724 - DNA, 18 bp, Artificial Sequence
  Synthetic
ccagacgtgggaggccat

SEQ ID NO: 9725 - DNA, 18 bp, Artificial Sequence
  Synthetic
taacgcggcctctctcac

SEQ ID NO: 9726 - DNA, 20 bp, Artificial Sequence
  Synthetic
gtactgtgggacctccttga

SEQ ID NO: 9727 - DNA, 18 bp, Artificial Sequence
  Synthetic
ctcctcggggtcccaaga

SEQ ID NO: 9728 - DNA, 18 bp, Artificial Sequence
  Synthetic
gctgagcttcagtgtgcg

SEQ ID NO: 9729 - DNA, 20 bp, Artificial Sequence
  Synthetic
tatgacccagaagaccacct

SEQ ID NO: 9730 - DNA, 18 bp, Artificial Sequence
  Synthetic
tgggcagcgcttatctgt

SEQ ID NO: 9731 - DNA, 20 bp, Artificial Sequence
  Synthetic
catctatgagaacgacggca

SEQ ID NO: 9732 - DNA, 19 bp, Artificial Sequence
  Synthetic
gctctcgggaccatcttga

SEQ ID NO: 9733 - DNA, 20 bp, Artificial Sequence
  Synthetic
caccaacagaaactgacaga

SEQ ID NO: 9734 - DNA, 24 bp, Artificial Sequence
  Synthetic
tattgatatcaggtgtcaaacttg

SEQ ID NO: 9735 - DNA, 25 bp, Artificial Sequence
  Synthetic
tgtagtgatgtagaaaatgatttgg

SEQ ID NO: 9736 - DNA, 21 bp, Artificial Sequence
  Synthetic
gctgaagatgttactcctgag

SEQ ID NO: 9737 - DNA, 21 bp, Artificial Sequence
  Synthetic
gttgtctctgtatatgcagtg

SEQ ID NO: 9738 - DNA, 22 bp, Artificial Sequence
  Synthetic
gcccaacaaactatattaggtc

SEQ ID NO: 9739 - DNA, 24 bp, Artificial Sequence
  Synthetic
gcattaaaagaattcctacactca

SEQ ID NO: 9740 - DNA, 23 bp, Artificial Sequence
  Synthetic
tttgaatttccaaatccttttcc

SEQ ID NO: 9741 - DNA, 20 bp, Artificial Sequence
  Synthetic
actgtgtttgctcctgtcac

SEQ ID NO: 9742 - DNA, 18 bp, Artificial Sequence
  Synthetic
cacgtcgctcaccaagac

SEQ ID NO: 9743 - DNA, 18 bp, Artificial Sequence
  Synthetic
tctctcctggtgaagtgg

SEQ ID NO: 9744 - DNA, 25 bp, Artificial Sequence
  Synthetic
cattagcttttcttcctatactcaa

SEQ ID NO: 9745 - DNA, 19 bp, Artificial Sequence
  Synthetic
agttaaccccgtggaacct

SEQ ID NO: 9746 - DNA, 23 bp, Artificial Sequence
  Synthetic
caatccattgtttctaactcaac

SEQ ID NO: 9747 - DNA, 24 bp, Artificial Sequence
  Synthetic
ggtttgaaactacaagaaatggtt

SEQ ID NO: 9748 - DNA, 18 bp, Artificial Sequence
  Synthetic
tacggagtactggtcacc

SEQ ID NO: 9749 - DNA, 18 bp, Artificial Sequence
  Synthetic
gatgacattccacgtgca

SEQ ID NO: 9750 - DNA, 25 bp, Artificial Sequence
  Synthetic
tttagatcaatattccttaggcaga

SEQ ID NO: 9751 - DNA, 23 bp, Artificial Sequence
  Synthetic
ggctctgtttctataactattgc

SEQ ID NO: 9752 - DNA, 18 bp, Artificial Sequence
  Synthetic
ggtcaaaaccgcaatgtc

SEQ ID NO: 9753 - DNA, 18 bp, Artificial Sequence
  Synthetic
ggaaccaaacaagtgtgc

SEQ ID NO: 9754 - DNA, 25 bp, Artificial Sequence
  Synthetic
attcattagagaagggaaaattgtc

SEQ ID NO: 9755 - DNA, 19 bp, Artificial Sequence
  Synthetic
taataacgagagagggggc

SEQ ID NO: 9756 - DNA, 18 bp, Artificial Sequence
  Synthetic
ggcagaagcacagcattt

SEQ ID NO: 9757 - DNA, 21 bp, Artificial Sequence
  Synthetic
ccaaaagaaacaaaccccaac

SEQ ID NO: 9758 - DNA, 20 bp, Artificial Sequence
  Synthetic
gtgatgcagatgtcaaagga

SEQ ID NO: 9759 - DNA, 21 bp, Artificial Sequence
  Synthetic
caggtgagtacaagttcaaac

SEQ ID NO: 9760 - DNA, 23 bp, Artificial Sequence
  Synthetic
aaacgtttggactttatagagaa

SEQ ID NO: 9761 - DNA, 23 bp, Artificial Sequence
  Synthetic
ggagcaagtaccttataaagttg

SEQ ID NO: 9762 - DNA, 23 bp, Artificial Sequence
  Synthetic
tagatgaactatttgaaggcagt

SEQ ID NO: 9763 - DNA, 25 bp, Artificial Sequence
  Synthetic
ttaccagattggataaaaagacaga

SEQ ID NO: 9764 - DNA, 25 bp, Artificial Sequence
  Synthetic
catggcaaagttatttctatgatga

SEQ ID NO: 9765 - DNA, 18 bp, Artificial Sequence
  Synthetic
ctctaaaggaggacggct

SEQ ID NO: 9766 - DNA, 20 bp, Artificial Sequence
  Synthetic
agcacctcacaagacacctt

SEQ ID NO: 9767 - DNA, 22 bp, Artificial Sequence
  Synthetic
attgtaacactcactgaaacag

SEQ ID NO: 9768 - DNA, 20 bp, Artificial Sequence
  Synthetic
tccttttgcaacagtggaaa

SEQ ID NO: 9769 - DNA, 25 bp, Artificial Sequence
  Synthetic
tctagtaattctgatattccttcag

SEQ ID NO: 9770 - DNA, 25 bp, Artificial Sequence
  Synthetic
catccttattttgatgttatggatg

SEQ ID NO: 9771 - DNA, 18 bp, Artificial Sequence
  Synthetic
taggagcaacaggccatc

SEQ ID NO: 9772 - DNA, 24 bp, Artificial Sequence
  Synthetic
tggtgatatgtgtgaaataggatt

SEQ ID NO: 9773 - DNA, 24 bp, Artificial Sequence
  Synthetic
tattggaccgtattgttactacac

SEQ ID NO: 9774 - DNA, 24 bp, Artificial Sequence
  Synthetic
ccatacgaacagtatacattttgg

SEQ ID NO: 9775 - DNA, 18 bp, Artificial Sequence
  Synthetic
caaaagcaggcaaaccat

SEQ ID NO: 9776 - DNA, 21 bp, Artificial Sequence
  Synthetic
taatgagccaagtggatatgc

SEQ ID NO: 9777 - DNA, 23 bp, Artificial Sequence
  Synthetic
atcaggaaggctaatagatttcc

SEQ ID NO: 9778 - DNA, 21 bp, Artificial Sequence
  Synthetic
caaattagagggttcgtgtac

SEQ ID NO: 9779 - DNA, 20 bp, Artificial Sequence
  Synthetic
tggttcagaaacatcctgag

SEQ ID NO: 9780 - DNA, 22 bp, Artificial Sequence
  Synthetic
acatgctaagtacggttttagg

SEQ ID NO: 9781 - DNA, 18 bp, Artificial Sequence
  Synthetic
catggagcttcccagttt

SEQ ID NO: 9782 - DNA, 20 bp, Artificial Sequence
  Synthetic
aagaagctgtgggatcaaac

SEQ ID NO: 9783 - DNA, 21 bp, Artificial Sequence
  Synthetic
gaaccgctctattctaaacac

SEQ ID NO: 9784 - DNA, 23 bp, Artificial Sequence
  Synthetic
agttgccaacaattattagacat

SEQ ID NO: 9785 - DNA, 18 bp, Artificial Sequence
  Synthetic
gttacgaacatgaggggt

SEQ ID NO: 9786 - DNA, 21 bp, Artificial Sequence
  Synthetic
gacctggttacagtaaaacga

SEQ ID NO: 9787 - DNA, 25 bp, Artificial Sequence
  Synthetic
actggtgattcagtatactttaaac

SEQ ID NO: 9788 - DNA, 25 bp, Artificial Sequence
  Synthetic
caaaaatatgcagatctctatgagt

SEQ ID NO: 9789 - DNA, 18 bp, Artificial Sequence
  Synthetic
caagggggggattgcata

SEQ ID NO: 9790 - DNA, 18 bp, Artificial Sequence
  Synthetic
gtagatccctctgcagct

SEQ ID NO: 9791 - DNA, 24 bp, Artificial Sequence
  Synthetic
tttgaaacacagattaatcccttc

SEQ ID NO: 9792 - DNA, 22 bp, Artificial Sequence
  Synthetic
agattttttgagtcaaccttcc

SEQ ID NO: 9793 - DNA, 22 bp, Artificial Sequence
  Synthetic
ctggaaagttataccttccacc

SEQ ID NO: 9794 - DNA, 21 bp, Artificial Sequence
  Synthetic
ctcagatacagaacgtttggt

SEQ ID NO: 9795 - DNA, 24 bp, Artificial Sequence
  Synthetic
gacaaaaacagcttaaataatggc

SEQ ID NO: 9796 - DNA, 20 bp, Artificial Sequence
  Synthetic
actcaggatgcatggtaatc

SEQ ID NO: 9797 - DNA, 19 bp, Artificial Sequence
  Synthetic
tattttagccctgcgaagg

SEQ ID NO: 9798 - DNA, 18 bp, Artificial Sequence
  Synthetic
aaccgaaatcgcaccaca

SEQ ID NO: 9799 - DNA, 19 bp, Artificial Sequence
  Synthetic
tctctcaagacttggacga

SEQ ID NO: 9800 - DNA, 19 bp, Artificial Sequence
  Synthetic
tacaggttatcggcctttg

SEQ ID NO: 9801 - DNA, 24 bp, Artificial Sequence
  Synthetic
attatagatgtaactggtcctaga

SEQ ID NO: 9802 - DNA, 20 bp, Artificial Sequence
  Synthetic
ggacacttttaatgagccag

SEQ ID NO: 9803 - DNA, 23 bp, Artificial Sequence
  Synthetic
cagaaagtacatttgtagatgca

SEQ ID NO: 9804 - DNA, 25 bp, Artificial Sequence
  Synthetic
gtaggaccaagtattttaatcaatg

SEQ ID NO: 9805 - DNA, 25 bp, Artificial Sequence
  Synthetic
tgatttaactcaaacatctttaggc

SEQ ID NO: 9806 - DNA, 25 bp, Artificial Sequence
  Synthetic
aataaaggtctgatgaatacttgtg

SEQ ID NO: 9807 - DNA, 19 bp, Artificial Sequence
  Synthetic
atggacttgcagcaatcac

SEQ ID NO: 9808 - DNA, 19 bp, Artificial Sequence
  Synthetic
tcatgcctgctgatctact

SEQ ID NO: 9809 - DNA, 18 bp, Artificial Sequence
  Synthetic
tatgccactccaagtcca

SEQ ID NO: 9810 - DNA, 23 bp, Artificial Sequence
  Synthetic
tgttcaatactaactgtcaatga

SEQ ID NO: 9811 - DNA, 23 bp, Artificial Sequence
  Synthetic
aatactggaaaatcctactttgt

SEQ ID NO: 9812 - DNA, 18 bp, Artificial Sequence
  Synthetic
tgccaggcagttagaact

SEQ ID NO: 9813 - DNA, 25 bp, Artificial Sequence
  Synthetic
tgtattatatagatgactatgggga

SEQ ID NO: 9814 - DNA, 21 bp, Artificial Sequence
  Synthetic
atttgaacaggcatctacagt

SEQ ID NO: 9815 - DNA, 20 bp, Artificial Sequence
  Synthetic
tggtacgacctacaatacca

SEQ ID NO: 9816 - DNA, 23 bp, Artificial Sequence
  Synthetic
ctctgctcctaaacatagtactc

SEQ ID NO: 9817 - DNA, 22 bp, Artificial Sequence
  Synthetic
ttaacatctaatacacgcactc

SEQ ID NO: 9818 - DNA, 23 bp, Artificial Sequence
  Synthetic
ctgttggtcatccatatttcaat

SEQ ID NO: 9819 - DNA, 23 bp, Artificial Sequence
  Synthetic
taattttaaaaagttccagcagg

SEQ ID NO: 9820 - DNA, 22 bp, Artificial Sequence
  Synthetic
tggaagaaatagagtttgagct

SEQ ID NO: 9821 - DNA, 23 bp, Artificial Sequence
  Synthetic
tacctcagtgttacatgtttcag

SEQ ID NO: 9822 - DNA, 22 bp, Artificial Sequence
  Synthetic
aagtacagacaaactttgactc

SEQ ID NO: 9823 - DNA, 16 bp, Artificial Sequence
  Synthetic
ctcacgcgctacctgc

SEQ ID NO: 9824 - DNA, 16 bp, Artificial Sequence
  Synthetic
ccccggcctggtgttt

SEQ ID NO: 9825 - DNA, 19 bp, Artificial Sequence
  Synthetic
gcttgcgattctagcctcg

SEQ ID NO: 9826 - DNA, 16 bp, Artificial Sequence
  Synthetic
gaggtggtgcgggaca

SEQ ID NO: 9827 - DNA, 19 bp, Artificial Sequence
  Synthetic
gactcgacaaactcgctga

SEQ ID NO: 9828 - DNA, 19 bp, Artificial Sequence
  Synthetic
gtaagtgacgtcgttgcgg

SEQ ID NO: 9829 - DNA, 19 bp, Artificial Sequence
  Synthetic
aactccttgaccgacacga

SEQ ID NO: 9830 - DNA, 17 bp, Artificial Sequence
  Synthetic
cgtgagcacgttctcgc

SEQ ID NO: 9831 - DNA, 16 bp, Artificial Sequence
  Synthetic
cgttctgctgcaccgg

SEQ ID NO: 9832 - DNA, 19 bp, Artificial Sequence
  Synthetic
gttcgctgccttttcctcc

SEQ ID NO: 9833 - DNA, 16 bp, Artificial Sequence
  Synthetic
ccgggaaacgtctgcg

SEQ ID NO: 9834 - DNA, 19 bp, Artificial Sequence
  Synthetic
tacgttacagtggcccagt

SEQ ID NO: 9835 - DNA, 18 bp, Artificial Sequence
  Synthetic
aaccacgcggtattggcc

SEQ ID NO: 9836 - DNA, 18 bp, Artificial Sequence
  Synthetic
cgacaggagacgacgagc

SEQ ID NO: 9837 - DNA, 18 bp, Artificial Sequence
  Synthetic
cgtctgctcttggttgct

SEQ ID NO: 9838 - DNA, 18 bp, Artificial Sequence
  Synthetic
cgtcgtcggtgatgagga

SEQ ID NO: 9839 - DNA, 18 bp, Artificial Sequence
  Synthetic
ttcgggagaatggacgcc

SEQ ID NO: 9840 - DNA, 18 bp, Artificial Sequence
  Synthetic
tgaggcgtcagaaagtgc

SEQ ID NO: 9841 - DNA, 16 bp, Artificial Sequence
  Synthetic
gcgcacgggttggtgt

SEQ ID NO: 9842 - DNA, 20 bp, Artificial Sequence
  Synthetic
gttggacgtcaccgtatccc

SEQ ID NO: 9843 - DNA, 18 bp, Artificial Sequence
  Synthetic
cccacagagaagcgttgg

SEQ ID NO: 9844 - DNA, 20 bp, Artificial Sequence
  Synthetic
tgtcgcatcatctctaagcg

SEQ ID NO: 9845 - DNA, 17 bp, Artificial Sequence
  Synthetic
gctgttcggtggttggg

SEQ ID NO: 9846 - DNA, 15 bp, Artificial Sequence
  Synthetic
caaccgcagcgcctt

SEQ ID NO: 9847 - DNA, 18 bp, Artificial Sequence
  Synthetic
gaaccaaagacgagggcc

SEQ ID NO: 9848 - DNA, 19 bp, Artificial Sequence
  Synthetic
ggaccgccgatttgtttct

SEQ ID NO: 9849 - DNA, 20 bp, Artificial Sequence
  Synthetic
ataacctcaccgaaaccgtc

SEQ ID NO: 9850 - DNA, 16 bp, Artificial Sequence
  Synthetic
gagccagggccaaggt

SEQ ID NO: 9851 - DNA, 16 bp, Artificial Sequence
  Synthetic
aggtctggcagccctc

SEQ ID NO: 9852 - DNA, 16 bp, Artificial Sequence
  Synthetic
ccggggggcgcttaaa

SEQ ID NO: 9853 - DNA, 15 bp, Artificial Sequence
  Synthetic
tttcgtgccgggcca

SEQ ID NO: 9854 - DNA, 20 bp, Artificial Sequence
  Synthetic
gtcacgacgtacgagaccag

SEQ ID NO: 9855 - DNA, 16 bp, Artificial Sequence
  Synthetic
aggcggccgttgtcca

SEQ ID NO: 9856 - DNA, 19 bp, Artificial Sequence
  Synthetic
cccctcgttcatgtaggcc

SEQ ID NO: 9857 - DNA, 16 bp, Artificial Sequence
  Synthetic
cgtgtgcgcaggggat

SEQ ID NO: 9858 - DNA, 17 bp, Artificial Sequence
  Synthetic
tgtcggtgttcccccat

SEQ ID NO: 9859 - DNA, 16 bp, Artificial Sequence
  Synthetic
cgaaggcgcggatcag

SEQ ID NO: 9860 - DNA, 18 bp, Artificial Sequence
  Synthetic
aaagcctagcaggtcgga

SEQ ID NO: 9861 - DNA, 19 bp, Artificial Sequence
  Synthetic
gcaagcagcccataaacgc

SEQ ID NO: 9862 - DNA, 18 bp, Artificial Sequence
  Synthetic
cgtgttgatggcaggggt

SEQ ID NO: 9863 - DNA, 17 bp, Artificial Sequence
  Synthetic
taagaggatcgcggcgc

SEQ ID NO: 9864 - DNA, 18 bp, Artificial Sequence
  Synthetic
tgcccatttgacgctctg

SEQ ID NO: 9865 - DNA, 18 bp, Artificial Sequence
  Synthetic
cgcactatccaggaccgc

SEQ ID NO: 9866 - DNA, 20 bp, Artificial Sequence
  Synthetic
cttcttggccttgtgttccg

SEQ ID NO: 9867 - DNA, 19 bp, Artificial Sequence
  Synthetic
gtgtacacctccaggggga

SEQ ID NO: 9868 - DNA, 18 bp, Artificial Sequence
  Synthetic
cacgtggagacggccatc

SEQ ID NO: 9869 - DNA, 19 bp, Artificial Sequence
  Synthetic
ctgagaaggggctggtacg

SEQ ID NO: 9870 - DNA, 18 bp, Artificial Sequence
  Synthetic
ggttggtggtgaaggtgg

SEQ ID NO: 9871 - DNA, 17 bp, Artificial Sequence
  Synthetic
gctggttgcgttggagg

SEQ ID NO: 9872 - DNA, 18 bp, Artificial Sequence
  Synthetic
cgaccgtcagcgttttgg

SEQ ID NO: 9873 - DNA, 19 bp, Artificial Sequence
  Synthetic
gttcaccaccgtatgcagg

SEQ ID NO: 9874 - DNA, 20 bp, Artificial Sequence
  Synthetic
gacacggctaaaatccggca

SEQ ID NO: 9875 - DNA, 17 bp, Artificial Sequence
  Synthetic
gccagaagctcgatgcc

SEQ ID NO: 9876 - DNA, 16 bp, Artificial Sequence
  Synthetic
gcatctccgcggacca

SEQ ID NO: 9877 - DNA, 17 bp, Artificial Sequence
  Synthetic
caaggctcacgtgcgag

SEQ ID NO: 9878 - DNA, 18 bp, Artificial Sequence
  Synthetic
tcatctacggggacacgg

SEQ ID NO: 9879 - DNA, 19 bp, Artificial Sequence
  Synthetic
agcatccggtctatgagcc

SEQ ID NO: 9880 - DNA, 16 bp, Artificial Sequence
  Synthetic
acgtcctcgtcgagcg

SEQ ID NO: 9881 - DNA, 16 bp, Artificial Sequence
  Synthetic
gagacgacggggctgt

SEQ ID NO: 9882 - DNA, 16 bp, Artificial Sequence
  Synthetic
cgcgcctgttggtcgt

SEQ ID NO: 9883 - DNA, 17 bp, Artificial Sequence
  Synthetic
gtccctgaacagcccca

SEQ ID NO: 9884 - DNA, 19 bp, Artificial Sequence
  Synthetic
agaaaggacagcgacgagc

SEQ ID NO: 9885 - DNA, 16 bp, Artificial Sequence
  Synthetic
tggccctcaaccgtgg

SEQ ID NO: 9886 - DNA, 16 bp, Artificial Sequence
  Synthetic
agtgagggtcgcgtcg

SEQ ID NO: 9887 - DNA, 20 bp, Artificial Sequence
  Synthetic
cccaaatggccctttaaacg

SEQ ID NO: 9888 - DNA, 17 bp, Artificial Sequence
  Synthetic
aggaacacacccccgtg

SEQ ID NO: 9889 - DNA, 16 bp, Artificial Sequence
  Synthetic
ccccaggccaccacaa

SEQ ID NO: 9890 - DNA, 16 bp, Artificial Sequence
  Synthetic
gggagccccttcgtca

SEQ ID NO: 9891 - DNA, 19 bp, Artificial Sequence
  Synthetic
ccagaatttggccaggacg

SEQ ID NO: 9892 - DNA, 18 bp, Artificial Sequence
  Synthetic
gcgcatgttggaaaaggc

SEQ ID NO: 9893 - DNA, 19 bp, Artificial Sequence
  Synthetic
cgcttctggttatgggcga

SEQ ID NO: 9894 - DNA, 18 bp, Artificial Sequence
  Synthetic
gaacccccgacgttcagt

SEQ ID NO: 9895 - DNA, 16 bp, Artificial Sequence
  Synthetic
agtcccgaagaccgcc

SEQ ID NO: 9896 - DNA, 16 bp, Artificial Sequence
  Synthetic
agccccacgcggtgat

SEQ ID NO: 9897 - DNA, 16 bp, Artificial Sequence
  Synthetic
acttggcgggggtggt

SEQ ID NO: 9898 - DNA, 16 bp, Artificial Sequence
  Synthetic
gccatcgccacgtcct

SEQ ID NO: 9899 - DNA, 19 bp, Artificial Sequence
  Synthetic
gaaaacccccaaacgcgtt

SEQ ID NO: 9900 - DNA, 16 bp, Artificial Sequence
  Synthetic
ctcgaggtcgctcggt

SEQ ID NO: 9901 - DNA, 18 bp, Artificial Sequence
  Synthetic
gaacacgctagggtcgga

SEQ ID NO: 9902 - DNA, 16 bp, Artificial Sequence
  Synthetic
caggcgccgcatcttg

SEQ ID NO: 9903 - DNA, 16 bp, Artificial Sequence
  Synthetic
gcccgtgtgttcctgc

SEQ ID NO: 9904 - DNA, 17 bp, Artificial Sequence
  Synthetic
agcctgtcgtgtctgcg

SEQ ID NO: 9905 - DNA, 16 bp, Artificial Sequence
  Synthetic
catgctcgccgtccgt

SEQ ID NO: 9906 - DNA, 20 bp, Artificial Sequence
  Synthetic
agaccctatggtacacacgg

SEQ ID NO: 9907 - DNA, 20 bp, Artificial Sequence
  Synthetic
tatgctaattgacctcggcc

SEQ ID NO: 9908 - DNA, 16 bp, Artificial Sequence
  Synthetic
cgacccccctcaccaa

SEQ ID NO: 9909 - DNA, 20 bp, Artificial Sequence
  Synthetic
gaattgaccctaggaggccg

SEQ ID NO: 9910 - DNA, 16 bp, Artificial Sequence
  Synthetic
ggaggaggttggcgga

SEQ ID NO: 9911 - DNA, 16 bp, Artificial Sequence
  Synthetic
ccgcctccgaagccat

SEQ ID NO: 9912 - DNA, 16 bp, Artificial Sequence
  Synthetic
ttctcccccccccctt

SEQ ID NO: 9913 - DNA, 19 bp, Artificial Sequence
  Synthetic
ttcgaccgagtctggggac

SEQ ID NO: 9914 - DNA, 17 bp, Artificial Sequence
  Synthetic
gggggctaaagggtggt

SEQ ID NO: 9915 - DNA, 16 bp, Artificial Sequence
  Synthetic
ggggctgggttggtct

SEQ ID NO: 9916 - DNA, 17 bp, Artificial Sequence
  Synthetic
ggccaaccgtcgaaggt

SEQ ID NO: 9917 - DNA, 18 bp, Artificial Sequence
  Synthetic
ggggaggggagggtgatt

SEQ ID NO: 9918 - DNA, 16 bp, Artificial Sequence
  Synthetic
gtcccgccggagacaa

SEQ ID NO: 9919 - DNA, 16 bp, Artificial Sequence
  Synthetic
cccgtgtggcgcatct

SEQ ID NO: 9920 - DNA, 16 bp, Artificial Sequence
  Synthetic
agcgctcaccccagga

SEQ ID NO: 9921 - DNA, 16 bp, Artificial Sequence
  Synthetic
tctccggggtcacgtg

SEQ ID NO: 9922 - DNA, 19 bp, Artificial Sequence
  Synthetic
gccggtctggtgatcttcg

SEQ ID NO: 9923 - DNA, 18 bp, Artificial Sequence
  Synthetic
ccaactccagaccaccgg

SEQ ID NO: 9924 - DNA, 18 bp, Artificial Sequence
  Synthetic
gtttttggggtgtggcgg

SEQ ID NO: 9925 - DNA, 18 bp, Artificial Sequence
  Synthetic
gtgtcgcgatgtctctgc

SEQ ID NO: 9926 - DNA, 20 bp, Artificial Sequence
  Synthetic
tggtataaatcaccggtgcg

SEQ ID NO: 9927 - DNA, 17 bp, Artificial Sequence
  Synthetic
cctctgggtctgtgcca

SEQ ID NO: 9928 - DNA, 18 bp, Artificial Sequence
  Synthetic
gcttttgcgggtccagag

SEQ ID NO: 9929 - DNA, 17 bp, Artificial Sequence
  Synthetic
cggacttcgtgtggcag

SEQ ID NO: 9930 - DNA, 19 bp, Artificial Sequence
  Synthetic
gctctccgatcccaactcc

SEQ ID NO: 9931 - DNA, 16 bp, Artificial Sequence
  Synthetic
gctgcgtcggcatggt

SEQ ID NO: 9932 - DNA, 24 bp, Artificial Sequence
  Synthetic
aaagcaggagattaaaatgaatcc

SEQ ID NO: 9933 - DNA, 20 bp, Artificial Sequence
  Synthetic
ctccctccccatataactca

SEQ ID NO: 9934 - DNA, 21 bp, Artificial Sequence
  Synthetic
gcaggcctcatataagatctt

SEQ ID NO: 9935 - DNA, 18 bp, Artificial Sequence
  Synthetic
ctaacggggcatatggag

SEQ ID NO: 9936 - DNA, 19 bp, Artificial Sequence
  Synthetic
cggacctgcatgactactg

SEQ ID NO: 9937 - DNA, 19 bp, Artificial Sequence
  Synthetic
cctttttaccgctgttacc

SEQ ID NO: 9938 - DNA, 19 bp, Artificial Sequence
  Synthetic
tctctttacgcggactccc

SEQ ID NO: 9939 - DNA, 18 bp, Artificial Sequence
  Synthetic
tcagctctgtatcgggaa

SEQ ID NO: 9940 - DNA, 19 bp, Artificial Sequence
  Synthetic
cacactctatggaaggcgg

SEQ ID NO: 9941 - DNA, 25 bp, Artificial Sequence
  Synthetic
caggtcaattatattcagtatggaa

SEQ ID NO: 9942 - DNA, 21 bp, Artificial Sequence
  Synthetic
ggagtaaaatgagtgatgctg

SEQ ID NO: 9943 - DNA, 20 bp, Artificial Sequence
  Synthetic
aatgacgatgttgaccaaag

SEQ ID NO: 9944 - DNA, 24 bp, Artificial Sequence
  Synthetic
tggtgggtttacatttaaaagaac

SEQ ID NO: 9945 - DNA, 22 bp, Artificial Sequence
  Synthetic
catgataaaagcagttagaggt

SEQ ID NO: 9946 - DNA, 18 bp, Artificial Sequence
  Synthetic
gagggtggtggttagcat

SEQ ID NO: 9947 - DNA, 23 bp, Artificial Sequence
  Synthetic
tgaaccatttcaatctttagtcc

SEQ ID NO: 9948 - DNA, 24 bp, Artificial Sequence
  Synthetic
ccactaaaagactaacaattctcg

SEQ ID NO: 9949 - DNA, 20 bp, Artificial Sequence
  Synthetic
gaacctcttgcttccagttt

SEQ ID NO: 9950 - DNA, 24 bp, Artificial Sequence
  Synthetic
agtattttactcaaactccattgc

SEQ ID NO: 9951 - DNA, 21 bp, Artificial Sequence
  Synthetic
gagtttgtcaccagattcaga

SEQ ID NO: 9952 - DNA, 20 bp, Artificial Sequence
  Synthetic
actttgtaactgaagcagac

SEQ ID NO: 9953 - DNA, 23 bp, Artificial Sequence
  Synthetic
aagaaaaacaaagtaaaagacgc

SEQ ID NO: 9954 - DNA, 22 bp, Artificial Sequence
  Synthetic
tcttgaatctaattgagcaggg

SEQ ID NO: 9955 - DNA, 20 bp, Artificial Sequence
  Synthetic
aaaactctttccgcccctag

SEQ ID NO: 9956 - DNA, 23 bp, Artificial Sequence
  Synthetic
tgtaataaacaaagtagaaggca

SEQ ID NO: 9957 - DNA, 20 bp, Artificial Sequence
  Synthetic
agaagctggaattcctgatg

SEQ ID NO: 9958 - DNA, 23 bp, Artificial Sequence
  Synthetic
caatttgattttgaaaatcccgc

SEQ ID NO: 9959 - DNA, 22 bp, Artificial Sequence
  Synthetic
acacttctattttgacctcagt

SEQ ID NO: 9960 - DNA, 22 bp, Artificial Sequence
  Synthetic
cagaatggtaaactgtatctgc

SEQ ID NO: 9961 - DNA, 23 bp, Artificial Sequence
  Synthetic
tctttaacatggatagagaacga

SEQ ID NO: 9962 - DNA, 18 bp, Artificial Sequence
  Synthetic
acctcaggctggagaatg

SEQ ID NO: 9963 - DNA, 25 bp, Artificial Sequence
  Synthetic
tgaggatcaatatagatttttgcag

SEQ ID NO: 9964 - DNA, 24 bp, Artificial Sequence
  Synthetic
cctcaaaataagcaatgtatccaa

SEQ ID NO: 9965 - DNA, 19 bp, Artificial Sequence
  Synthetic
ctgacaagcacgaatctgt

SEQ ID NO: 9966 - DNA, 21 bp, Artificial Sequence
  Synthetic
agaaattgtatcagccatgag

SEQ ID NO: 9967 - DNA, 23 bp, Artificial Sequence
  Synthetic
agaaagttaaatgttactcctga

SEQ ID NO: 9968 - DNA, 18 bp, Artificial Sequence
  Synthetic
gagcgacgacgacgagaa

SEQ ID NO: 9969 - DNA, 25 bp, Artificial Sequence
  Synthetic
tgaaaattctactattgcagattgg

SEQ ID NO: 9970 - DNA, 19 bp, Artificial Sequence
  Synthetic
gcgtcatctatagtccctc

SEQ ID NO: 9971 - DNA, 18 bp, Artificial Sequence
  Synthetic
gcaaacacaggtaaaccc

SEQ ID NO: 9972 - DNA, 18 bp, Artificial Sequence
  Synthetic
ccttctcgattggtgcag

SEQ ID NO: 9973 - DNA, 22 bp, Artificial Sequence
  Synthetic
caaatccatggctactaaatgc

SEQ ID NO: 9974 - DNA, 24 bp, Artificial Sequence
  Synthetic
acaaactgtgatcaataaacactg

SEQ ID NO: 9975 - DNA, 20 bp, Artificial Sequence
  Synthetic
tgcaagggatgttttacagt

SEQ ID NO: 9976 - DNA, 20 bp, Artificial Sequence
  Synthetic
ccatacttggtcaaggcagg

SEQ ID NO: 9977 - DNA, 20 bp, Artificial Sequence
  Synthetic
cctggtcattcggtgttcat

SEQ ID NO: 9978 - DNA, 23 bp, Artificial Sequence
  Synthetic
cctttagacaggtagaagattgt

SEQ ID NO: 9979 - DNA, 20 bp, Artificial Sequence
  Synthetic
agtggcagaaactggaactg

SEQ ID NO: 9980 - DNA, 18 bp, Artificial Sequence
  Synthetic
ttaccagcaggacagctc

SEQ ID NO: 9981 - DNA, 20 bp, Artificial Sequence
  Synthetic
gctgaagccctaaaagaggc

SEQ ID NO: 9982 - DNA, 25 bp, Artificial Sequence
  Synthetic
agtactaaataaaagagtaagagcc

SEQ ID NO: 9983 - DNA, 25 bp, Artificial Sequence
  Synthetic
gaggatgctgatagattttagagaa

SEQ ID NO: 9984 - DNA, 25 bp, Artificial Sequence
  Synthetic
gtacatggatgatatcttaatagct

SEQ ID NO: 9985 - DNA, 23 bp, Artificial Sequence
  Synthetic
aattagaggaaaaatgacactca

SEQ ID NO: 9986 - DNA, 19 bp, Artificial Sequence
  Synthetic
aactactggcaagtgacat

SEQ ID NO: 9987 - DNA, 25 bp, Artificial Sequence
  Synthetic
tagaagaaatgataaagaaggaagc

SEQ ID NO: 9988 - DNA, 20 bp, Artificial Sequence
  Synthetic
gcagtacatgttgcaagtgg

SEQ ID NO: 9989 - DNA, 18 bp, Artificial Sequence
  Synthetic
ctgatggcagttcattgc

SEQ ID NO: 9990 - DNA, 25 bp, Artificial Sequence
  Synthetic
ggaaaaagtcatctagaaatacagg

SEQ ID NO: 9991 - DNA, 18 bp, Artificial Sequence
  Synthetic
ttcgagtggctagagagg

SEQ ID NO: 9992 - DNA, 21 bp, Artificial Sequence
  Synthetic
ggtaatagaaactctgaggga

SEQ ID NO: 9993 - DNA, 21 bp, Artificial Sequence
  Synthetic
atatcatatgagcgaaagggc

SEQ ID NO: 9994 - DNA, 18 bp, Artificial Sequence
  Synthetic
acagaggcttttgatgca

SEQ ID NO: 9995 - DNA, 25 bp, Artificial Sequence
  Synthetic
gataagaaaaggaggtataaggaca

SEQ ID NO: 9996 - DNA, 24 bp, Artificial Sequence
  Synthetic
caagtattataatctcacaatgcg

SEQ ID NO: 9997 - DNA, 20 bp, Artificial Sequence
  Synthetic
ctgtaacatgacttggttcc

SEQ ID NO: 9998 - DNA, 19 bp, Artificial Sequence
  Synthetic
gtctggggaacgaaaaacc

SEQ ID NO: 9999 - DNA, 18 bp, Artificial Sequence
  Synthetic
cgcctcttgatcgggcta

SEQ ID NO: 10000 - DNA, 18 bp, Artificial Sequence
  Synthetic
acagcagtatcagcaggg

SEQ ID NO: 10001 - DNA, 19 bp, Artificial Sequence
  Synthetic
aactgcttagtacacccag

SEQ ID NO: 10002 - DNA, 20 bp, Artificial Sequence
  Synthetic
aaatgtacccgcttcttgca

SEQ ID NO: 10003 - DNA, 22 bp, Artificial Sequence
  Synthetic
cgttgcattttctaatatccac

SEQ ID NO: 10004 - DNA, 20 bp, Artificial Sequence
  Synthetic
ttaactgcacagatctggac

SEQ ID NO: 10005 - DNA, 18 bp, Artificial Sequence
  Synthetic
atcttgccctaacgttgc

SEQ ID NO: 10006 - DNA, 18 bp, Artificial Sequence
  Synthetic
tctcagattggtggcttc

SEQ ID NO: 10007 - DNA, 19 bp, Artificial Sequence
  Synthetic
aaaggccataggaaattgc

SEQ ID NO: 10008 - DNA, 25 bp, Artificial Sequence
  Synthetic
ttaagtgagctagaagtaaaaaacc

SEQ ID NO: 10009 - DNA, 22 bp, Artificial Sequence
  Synthetic
ctgctgtagaaatagggaatgg

SEQ ID NO: 10010 - DNA, 21 bp, Artificial Sequence
  Synthetic
ctttgtccagaatgccttaaa

SEQ ID NO: 10011 - DNA, 20 bp, Artificial Sequence
  Synthetic
gacagatggcaactaccacc

SEQ ID NO: 10012 - DNA, 18 bp, Artificial Sequence
  Synthetic
acgaatgggagtgcaaat

SEQ ID NO: 10013 - DNA, 20 bp, Artificial Sequence
  Synthetic
gagtagactccctttgttct

SEQ ID NO: 10014 - DNA, 23 bp, Artificial Sequence
  Synthetic
atttgatgaaagtacagattgct

SEQ ID NO: 10015 - DNA, 22 bp, Artificial Sequence
  Synthetic
aaaatgccttttactgaaagtg

SEQ ID NO: 10016 - DNA, 22 bp, Artificial Sequence
  Synthetic
taaagcccttccatatcctaac

SEQ ID NO: 10017 - DNA, 23 bp, Artificial Sequence
  Synthetic
ctgtaaatgttcctaaaggctct

SEQ ID NO: 10018 - DNA, 21 bp, Artificial Sequence
  Synthetic
gcactggctatagacctatag

SEQ ID NO: 10019 - DNA, 25 bp, Artificial Sequence
  Synthetic
gggtaatcctacagttataacatca

SEQ ID NO: 10020 - DNA, 22 bp, Artificial Sequence
  Synthetic
cctttaacaacgttttctgaaa

SEQ ID NO: 10021 - DNA, 22 bp, Artificial Sequence
  Synthetic
cctgatagtgatttcagagatg

SEQ ID NO: 10022 - DNA, 20 bp, Artificial Sequence
  Synthetic
cctagcacagacaatacacc

SEQ ID NO: 10023 - DNA, 23 bp, Artificial Sequence
  Synthetic
taggacatccattttttcctgtt

SEQ ID NO: 10024 - DNA, 22 bp, Artificial Sequence
  Synthetic
tagaaaatcccactctttaccc

SEQ ID NO: 10025 - DNA, 23 bp, Artificial Sequence
  Synthetic
ataacagaacattttttgctgac

SEQ ID NO: 10026 - DNA, 23 bp, Artificial Sequence
  Synthetic
tgatattgaaattgtaatgcagc

SEQ ID NO: 10027 - DNA, 20 bp, Artificial Sequence
  Synthetic
tttacctcagagctttctca

SEQ ID NO: 10028 - DNA, 23 bp, Artificial Sequence
  Synthetic
aagaattagcatccttttttgag

SEQ ID NO: 10029 - DNA, 19 bp, Artificial Sequence
  Synthetic
tggaagatctagtgatgcc

SEQ ID NO: 10030 - DNA, 18 bp, Artificial Sequence
  Synthetic
ttgcggctcttagtccaa

SEQ ID NO: 10031 - DNA, 19 bp, Artificial Sequence
  Synthetic
cagccgcattgtactttta

SEQ ID NO: 10032 - DNA, 23 bp, Artificial Sequence
  Synthetic
ctgcaaaagcatttagatcttca

SEQ ID NO: 10033 - DNA, 20 bp, Artificial Sequence
  Synthetic
ctccctctgttaccagctct

SEQ ID NO: 10034 - DNA, 25 bp, Artificial Sequence
  Synthetic
gaaaaattgtaattatgtacccagc

SEQ ID NO: 10035 - DNA, 21 bp, Artificial Sequence
  Synthetic
acaaacaccaaatacaggaac

SEQ ID NO: 10036 - DNA, 23 bp, Artificial Sequence
  Synthetic
ttagagaggagtttgatattgac

SEQ ID NO: 10037 - DNA, 23 bp, Artificial Sequence
  Synthetic
tttttctcaaactcatttggttg

SEQ ID NO: 10038 - DNA, 22 bp, Artificial Sequence
  Synthetic
tattttgatgtagtaggaggcg

SEQ ID NO: 10039 - DNA, 19 bp, Artificial Sequence
  Synthetic
ccgatgctcctttagaagt

SEQ ID NO: 10040 - DNA, 24 bp, Artificial Sequence
  Synthetic
agtagaaataacaatgcaactgtg

SEQ ID NO: 10041 - DNA, 23 bp, Artificial Sequence
  Synthetic
tattgactcatgagtttgttgat

SEQ ID NO: 10042 - DNA, 23 bp, Artificial Sequence
  Synthetic
aagaactaagaaatttgatgtcg

SEQ ID NO: 10043 - DNA, 22 bp, Artificial Sequence
  Synthetic
tctttggagcaaaacaaatgac

SEQ ID NO: 10044 - DNA, 20 bp, Artificial Sequence
  Synthetic
agcacaagatgtcatcatgg

SEQ ID NO: 10045 - DNA, 19 bp, Artificial Sequence
  Synthetic
cagatgtacacaccaggag

SEQ ID NO: 10046 - DNA, 22 bp, Artificial Sequence
  Synthetic
gagggttcactttcaaaagaac

SEQ ID NO: 10047 - DNA, 18 bp, Artificial Sequence
  Synthetic
ttgcatggtaaaggcagt

SEQ ID NO: 10048 - DNA, 18 bp, Artificial Sequence
  Synthetic
gtggtcgtgagcattgac

SEQ ID NO: 10049 - DNA, 24 bp, Artificial Sequence
  Synthetic
tgaaccatttcaatctttagtacc

SEQ ID NO: 10050 - DNA, 20 bp, Artificial Sequence
  Synthetic
caacaagacaactaagaggc

SEQ ID NO: 10051 - DNA, 20 bp, Artificial Sequence
  Synthetic
aaatcctggtattcgctctg

SEQ ID NO: 10052 - DNA, 24 bp, Artificial Sequence
  Synthetic
gtgaccaattcctagaattttcag

SEQ ID NO: 10053 - DNA, 20 bp, Artificial Sequence
  Synthetic
gcccagctctaatagtatgg

SEQ ID NO: 10054 - DNA, 18 bp, Artificial Sequence
  Synthetic
gtgcaagcttcctgagag

SEQ ID NO: 10055 - DNA, 20 bp, Artificial Sequence
  Synthetic
agattccaaaaggaagaggc

SEQ ID NO: 10056 - DNA, 21 bp, Artificial Sequence
  Synthetic
cagaagtgtggtcatacaatg

SEQ ID NO: 10057 - DNA, 25 bp, Artificial Sequence
  Synthetic
gaattataaaaaagtagggaggaac

SEQ ID NO: 10058 - DNA, 19 bp, Artificial Sequence
  Synthetic
gacactacgacagatcagc

SEQ ID NO: 10059 - DNA, 23 bp, Artificial Sequence
  Synthetic
ggttgacctgtattgttatgaac

SEQ ID NO: 10060 - DNA, 20 bp, Artificial Sequence
  Synthetic
caggaacaggtagaaaatgg

SEQ ID NO: 10061 - DNA, 20 bp, Artificial Sequence
  Synthetic
gcagaggcgttatatacaca

SEQ ID NO: 10062 - DNA, 21 bp, Artificial Sequence
  Synthetic
ttaacagaaatggtgcaatgg

SEQ ID NO: 10063 - DNA, 19 bp, Artificial Sequence
  Synthetic
aaggttgtggtccagctta

SEQ ID NO: 10064 - DNA, 20 bp, Artificial Sequence
  Synthetic
agtccacatttggtacagaa

SEQ ID NO: 10065 - DNA, 20 bp, Artificial Sequence
  Synthetic
ccaccgacctatacaacacc

SEQ ID NO: 10066 - DNA, 25 bp, Artificial Sequence
  Synthetic
atgtacaaacatatataggggaaca

SEQ ID NO: 10067 - DNA, 18 bp, Artificial Sequence
  Synthetic
tgtgtggtgtgcatggta

SEQ ID NO: 10068 - DNA, 20 bp, Artificial Sequence
  Synthetic
tattggaagagtctgcagtt

SEQ ID NO: 10069 - DNA, 19 bp, Artificial Sequence
  Synthetic
cttccttgcaaacacgtag

SEQ ID NO: 10070 - DNA, 18 bp, Artificial Sequence
  Synthetic
gtaagcgccgtaaacctg

SEQ ID NO: 10071 - DNA, 18 bp, Artificial Sequence
  Synthetic
gagcattggggtaagggt

SEQ ID NO: 10072 - DNA, 25 bp, Artificial Sequence
  Synthetic
atgcagaggaatatgatatacagtt

SEQ ID NO: 10073 - DNA, 23 bp, Artificial Sequence
  Synthetic
tgattgtgttcattgtatgttgt

SEQ ID NO: 10074 - DNA, 22 bp, Artificial Sequence
  Synthetic
attacaggaaaagcatttgtct

SEQ ID NO: 10075 - DNA, 22 bp, Artificial Sequence
  Synthetic
ctgcgttcttaaacagtaattc

SEQ ID NO: 10076 - DNA, 20 bp, Artificial Sequence
  Synthetic
ttcctccctctgttggtagc

SEQ ID NO: 10077 - DNA, 18 bp, Artificial Sequence
  Synthetic
ctgaaggacgtggaggaa

SEQ ID NO: 10078 - DNA, 20 bp, Artificial Sequence
  Synthetic
ggttaattgacactcctggt

SEQ ID NO: 10079 - DNA, 22 bp, Artificial Sequence
  Synthetic
ggagatatgtgcgatataggtc

SEQ ID NO: 10080 - DNA, 20 bp, Artificial Sequence
  Synthetic
gcaggttctttttatcacct

SEQ ID NO: 10081 - DNA, 23 bp, Artificial Sequence
  Synthetic
attatatgagacataccgaggag

SEQ ID NO: 10082 - DNA, 25 bp, Artificial Sequence
  Synthetic
tacaaggatttaacattttggaagg

SEQ ID NO: 10083 - DNA, 22 bp, Artificial Sequence
  Synthetic
tgtactgtgaaaataagctgtg

SEQ ID NO: 10084 - DNA, 25 bp, Artificial Sequence
  Synthetic
gctttctagtttaaaccacctttta

SEQ ID NO: 10085 - DNA, 18 bp, Artificial Sequence
  Synthetic
cccaacatcggtcccaca

SEQ ID NO: 10086 - DNA, 18 bp, Artificial Sequence
  Synthetic
accagaaacggatgggag

SEQ ID NO: 10087 - DNA, 25 bp, Artificial Sequence
  Synthetic
gctcttctttttttatctcattcac

SEQ ID NO: 10088 - DNA, 22 bp, Artificial Sequence
  Synthetic
atcaggaaactatgttgcagaa

SEQ ID NO: 10089 - DNA, 22 bp, Artificial Sequence
  Synthetic
ctgtatcctcagagatcccata

SEQ ID NO: 10090 - DNA, 25 bp, Artificial Sequence
  Synthetic
atcctattataccagaatatagggt

SEQ ID NO: 10091 - DNA, 25 bp, Artificial Sequence
  Synthetic
agcaaaagatagaactattgatcag

SEQ ID NO: 10092 - DNA, 19 bp, Artificial Sequence
  Synthetic
ccacatcaaaagggcagaa

SEQ ID NO: 10093 - DNA, 22 bp, Artificial Sequence
  Synthetic
tccaatgagagagtatccatga

SEQ ID NO: 10094 - DNA, 25 bp, Artificial Sequence
  Synthetic
tccaaaatgagtataactaactctg

SEQ ID NO: 10095 - DNA, 23 bp, Artificial Sequence
  Synthetic
aaagagatggttgtgtatacagt

SEQ ID NO: 10096 - DNA, 21 bp, Artificial Sequence
  Synthetic
cttaatctggttatctgggct

SEQ ID NO: 10097 - DNA, 22 bp, Artificial Sequence
  Synthetic
taattttgagcctcataccaaa

SEQ ID NO: 10098 - DNA, 25 bp, Artificial Sequence
  Synthetic
tttacagaatcaataaaggtgagag

SEQ ID NO: 10099 - DNA, 19 bp, Artificial Sequence
  Synthetic
ttgtcaatggaggagtggt

SEQ ID NO: 10100 - DNA, 24 bp, Artificial Sequence
  Synthetic
aaaaacttaggagtaaagttacgc

SEQ ID NO: 10101 - DNA, 18 bp, Artificial Sequence
  Synthetic
gaagtgccgcaacaaaga

SEQ ID NO: 10102 - DNA, 22 bp, Artificial Sequence
  Synthetic
taacataagctttgatcaaccc

SEQ ID NO: 10103 - DNA, 21 bp, Artificial Sequence
  Synthetic
tgatgcgtatccactaaatcc

SEQ ID NO: 10104 - DNA, 24 bp, Artificial Sequence
  Synthetic
taattaacggatatagagagaggc

SEQ ID NO: 10105 - DNA, 23 bp, Artificial Sequence
  Synthetic
tgaaacgattataagtagcaaga

SEQ ID NO: 10106 - DNA, 23 bp, Artificial Sequence
  Synthetic
caactatatattgcccttgggat

SEQ ID NO: 10107 - DNA, 21 bp, Artificial Sequence
  Synthetic
aacactaagtaggactttgcg

SEQ ID NO: 10108 - DNA, 21 bp, Artificial Sequence
  Synthetic
ccgcaataagaatagcaatga

SEQ ID NO: 10109 - DNA, 23 bp, Artificial Sequence
  Synthetic
atctacagatagaaaagttgctt

SEQ ID NO: 10110 - DNA, 19 bp, Artificial Sequence
  Synthetic
ccgtagcaagtgattctga

SEQ ID NO: 10111 - DNA, 21 bp, Artificial Sequence
  Synthetic
gatggcaaacctgttatgagt

SEQ ID NO: 10112 - DNA, 23 bp, Artificial Sequence
  Synthetic
tgctcttgacaaactttacaaag

SEQ ID NO: 10113 - DNA, 19 bp, Artificial Sequence
  Synthetic
tgaaggtgtctctgtttgg

SEQ ID NO: 10114 - DNA, 22 bp, Artificial Sequence
  Synthetic
gtggtactatacaaattctcgc

SEQ ID NO: 10115 - DNA, 18 bp, Artificial Sequence
  Synthetic
cgtgaacgtggccttaat

SEQ ID NO: 10116 - DNA, 23 bp, Artificial Sequence
  Synthetic
aattgtcaaacctaatatcagcc

SEQ ID NO: 10117 - DNA, 18 bp, Artificial Sequence
  Synthetic
cacacaacagggtttgct

SEQ ID NO: 10118 - DNA, 20 bp, Artificial Sequence
  Synthetic
atggattgagctttttccac

SEQ ID NO: 10119 - DNA, 21 bp, Artificial Sequence
  Synthetic
tgtttacagagtcaagctttg

SEQ ID NO: 10120 - DNA, 22 bp, Artificial Sequence
  Synthetic
ccttttgaaatgccatttgaag

SEQ ID NO: 10121 - DNA, 22 bp, Artificial Sequence
  Synthetic
actggttttatggttatggatt

SEQ ID NO: 10122 - DNA, 25 bp, Artificial Sequence
  Synthetic
gtattaaggatgcagattataatgc

SEQ ID NO: 10123 - DNA, 20 bp, Artificial Sequence
  Synthetic
atacagacacagaggtttgt

SEQ ID NO: 10124 - DNA, 25 bp, Artificial Sequence
  Synthetic
ccttctggtaatcttattaagtttg

SEQ ID NO: 10125 - DNA, 22 bp, Artificial Sequence
  Synthetic
aagtcatttgaacaacaagttg

SEQ ID NO: 10126 - DNA, 23 bp, Artificial Sequence
  Synthetic
aaaactctgttgcatctatcaat

SEQ ID NO: 10127 - DNA, 24 bp, Artificial Sequence
  Synthetic
tttgtgtaaaactgcagtaactac

SEQ ID NO: 10128 - DNA, 22 bp, Artificial Sequence
  Synthetic
ggttatgctaagtcaaactttg

SEQ ID NO: 10129 - DNA, 23 bp, Artificial Sequence
  Synthetic
aaggttatttcttttgtcagaca

SEQ ID NO: 10130 - DNA, 25 bp, Artificial Sequence
  Synthetic
gatgtactacgtaatagctttggta

SEQ ID NO: 10131 - DNA, 19 bp, Artificial Sequence
  Synthetic
cagtctttctgctgaaggt

SEQ ID NO: 10132 - DNA, 23 bp, Artificial Sequence
  Synthetic
tttttgaaaactttgaggactgg

SEQ ID NO: 10133 - DNA, 22 bp, Artificial Sequence
  Synthetic
ttaagttgccagaagttattgc

SEQ ID NO: 10134 - DNA, 23 bp, Artificial Sequence
  Synthetic
ttagtaacaatgattgcttatgc

SEQ ID NO: 10135 - DNA, 20 bp, Artificial Sequence
  Synthetic
ttagcaaaagcaatgttgga

SEQ ID NO: 10136 - DNA, 19 bp, Artificial Sequence
  Synthetic
ttggtgttgtaggtgctac

SEQ ID NO: 10137 - DNA, 22 bp, Artificial Sequence
  Synthetic
ctttgatggtgttatgtatggt

SEQ ID NO: 10138 - DNA, 19 bp, Artificial Sequence
  Synthetic
cctgcaaagtggtaaaacc

SEQ ID NO: 10139 - DNA, 21 bp, Artificial Sequence
  Synthetic
ctgttatgcaaatggacatcc

SEQ ID NO: 10140 - DNA, 23 bp, Artificial Sequence
  Synthetic
gttttacatgttgttaggctttg

SEQ ID NO: 10141 - DNA, 25 bp, Artificial Sequence
  Synthetic
gtctaaattgactgatcttaagtgc

SEQ ID NO: 10142 - DNA, 23 bp, Artificial Sequence
  Synthetic
ttcctcaccacaaataatcaaac

SEQ ID NO: 10143 - DNA, 23 bp, Artificial Sequence
  Synthetic
taccagatcatgattcatttgtg

SEQ ID NO: 10144 - DNA, 25 bp, Artificial Sequence
  Synthetic
gaaggtaatgctctatacaacaatg

SEQ ID NO: 10145 - DNA, 21 bp, Artificial Sequence
  Synthetic
cattgttcttttgctgttgac

SEQ ID NO: 10146 - DNA, 21 bp, Artificial Sequence
  Synthetic
tgtaaagtttgtggttgttgg

SEQ ID NO: 10147 - DNA, 22 bp, Artificial Sequence
  Synthetic
gcatgatttctttacttggcat

SEQ ID NO: 10148 - DNA, 22 bp, Artificial Sequence
  Synthetic
gttttgaccttagacaaccaag

SEQ ID NO: 10149 - DNA, 23 bp, Artificial Sequence
  Synthetic
gcattgttcaaattttaacacac

SEQ ID NO: 10150 - DNA, 20 bp, Artificial Sequence
  Synthetic
acgcactgtttgtttttctg

SEQ ID NO: 10151 - DNA, 25 bp, Artificial Sequence
  Synthetic
tcattaacaaagcgtaatattctcc

SEQ ID NO: 10152 - DNA, 23 bp, Artificial Sequence
  Synthetic
ttgatgaatcttttgtggatgac

SEQ ID NO: 10153 - DNA, 19 bp, Artificial Sequence
  Synthetic
tctgctggtgtttttgtgg

SEQ ID NO: 10154 - DNA, 23 bp, Artificial Sequence
  Synthetic
tggaggtttgaattattactgtg

SEQ ID NO: 10155 - DNA, 20 bp, Artificial Sequence
  Synthetic
ccaccgttaaaccgtaattc

SEQ ID NO: 10156 - DNA, 19 bp, Artificial Sequence
  Synthetic
gcaaacagcgtataaccac

SEQ ID NO: 10157 - DNA, 19 bp, Artificial Sequence
  Synthetic
gacattgttgtcgtggatg

SEQ ID NO: 10158 - DNA, 22 bp, Artificial Sequence
  Synthetic
ctccagtataaataggcgtcaa

SEQ ID NO: 10159 - DNA, 22 bp, Artificial Sequence
  Synthetic
agtctgaaagtagttgtggttt

SEQ ID NO: 10160 - DNA, 19 bp, Artificial Sequence
  Synthetic
ctagagactttgccatgcg

SEQ ID NO: 10161 - DNA, 19 bp, Artificial Sequence
  Synthetic
ctggctcatctgatgtact

SEQ ID NO: 10162 - DNA, 19 bp, Artificial Sequence
  Synthetic
tgactagatgtttggctgt

SEQ ID NO: 10163 - DNA, 24 bp, Artificial Sequence
  Synthetic
gaattgtaatgtggatatgtaccc

SEQ ID NO: 10164 - DNA, 23 bp, Artificial Sequence
  Synthetic
tctctatagagcatatgttgagt

SEQ ID NO: 10165 - DNA, 22 bp, Artificial Sequence
  Synthetic
agtattctcaaaaaccttggtg

SEQ ID NO: 10166 - DNA, 21 bp, Artificial Sequence
  Synthetic
actgtcaaatcagaagatggt

SEQ ID NO: 10167 - DNA, 23 bp, Artificial Sequence
  Synthetic
ctgacataacactcaaatgttgt

SEQ ID NO: 10168 - DNA, 20 bp, Artificial Sequence
  Synthetic
cccagtggcattatgttcaa

SEQ ID NO: 10169 - DNA, 24 bp, Artificial Sequence
  Synthetic
acttctgttaatacgtcatcatca

SEQ ID NO: 10170 - DNA, 22 bp, Artificial Sequence
  Synthetic
aaatgtttgttttgcttgttgc

SEQ ID NO: 10171 - DNA, 22 bp, Artificial Sequence
  Synthetic
caacaacactttagtttcaggt

SEQ ID NO: 10172 - DNA, 20 bp, Artificial Sequence
  Synthetic
cagttgtcctttgatgtacc

SEQ ID NO: 10173 - DNA, 24 bp, Artificial Sequence
  Synthetic
gttcctttatgaatgttacattgg

SEQ ID NO: 10174 - DNA, 22 bp, Artificial Sequence
  Synthetic
gtccaatggcacttataattgc

SEQ ID NO: 10175 - DNA, 19 bp, Artificial Sequence
  Synthetic
ttaagaaatagcgccaggc

SEQ ID NO: 10176 - DNA, 20 bp, Artificial Sequence
  Synthetic
cgaatggccatgtatacagg

SEQ ID NO: 10177 - DNA, 22 bp, Artificial Sequence
  Synthetic
ctatctctagctctattcaggc

SEQ ID NO: 10178 - DNA, 20 bp, Artificial Sequence
  Synthetic
ataaggatgttgaagcgtgg

SEQ ID NO: 10179 - DNA, 23 bp, Artificial Sequence
  Synthetic
tattgatgttaataagacgctgc

SEQ ID NO: 10180 - DNA, 23 bp, Artificial Sequence
  Synthetic
gctattatgttgttgttctactg

SEQ ID NO: 10181 - DNA, 21 bp, Artificial Sequence
  Synthetic
cagagctgctcttatagtgtt

SEQ ID NO: 10182 - DNA, 25 bp, Artificial Sequence
  Synthetic
aattagaaatccactaagatgttcc

SEQ ID NO: 10183 - DNA, 23 bp, Artificial Sequence
  Synthetic
aatactccagattgttttatggt

SEQ ID NO: 10184 - DNA, 22 bp, Artificial Sequence
  Synthetic
acctacctgaatacatgacagt

SEQ ID NO: 10185 - DNA, 20 bp, Artificial Sequence
  Synthetic
ggtgatacctcgtaatttgg

SEQ ID NO: 10186 - DNA, 21 bp, Artificial Sequence
  Synthetic
gtgaatccaaacctcaatctc

SEQ ID NO: 10187 - DNA, 22 bp, Artificial Sequence
  Synthetic
gaaacaaaagaacaaaagcatg

SEQ ID NO: 10188 - DNA, 23 bp, Artificial Sequence
  Synthetic
aagtttcttgaggagttaaatgc

SEQ ID NO: 10189 - DNA, 22 bp, Artificial Sequence
  Synthetic
tgatctatgtatgatggtacga

SEQ ID NO: 10190 - DNA, 21 bp, Artificial Sequence
  Synthetic
actgtttggcatgtttacagt

SEQ ID NO: 10191 - DNA, 23 bp, Artificial Sequence
  Synthetic
tacaatttatagagactgaagcc

SEQ ID NO: 10192 - DNA, 18 bp, Artificial Sequence
  Synthetic
atcgttgtgtgtgtcgcc

SEQ ID NO: 10193 - DNA, 25 bp, Artificial Sequence
  Synthetic
tgtagaagagtatcaaatacttgca

SEQ ID NO: 10194 - DNA, 21 bp, Artificial Sequence
  Synthetic
gcagatgtagaacctaatgct

SEQ ID NO: 10195 - DNA, 20 bp, Artificial Sequence
  Synthetic
catggggactaacagatacc

SEQ ID NO: 10196 - DNA, 18 bp, Artificial Sequence
  Synthetic
caatcgacgaaggaagcg

SEQ ID NO: 10197 - DNA, 18 bp, Artificial Sequence
  Synthetic
cgcaaaagggacactgta

SEQ ID NO: 10198 - DNA, 18 bp, Artificial Sequence
  Synthetic
cgtgtaacatcccagggc

SEQ ID NO: 10199 - DNA, 18 bp, Artificial Sequence
  Synthetic
cagtgctgtcctagaggt

SEQ ID NO: 10200 - DNA, 18 bp, Artificial Sequence
  Synthetic
ccccagggctttccaaag

SEQ ID NO: 10201 - DNA, 21 bp, Artificial Sequence
  Synthetic
gagcctttactaaatgctgac

SEQ ID NO: 10202 - DNA, 25 bp, Artificial Sequence
  Synthetic
ctgatacattttatttgcatccttc

SEQ ID NO: 10203 - DNA, 23 bp, Artificial Sequence
  Synthetic
aaaactgttgttattcctaaggt

SEQ ID NO: 10204 - DNA, 23 bp, Artificial Sequence
  Synthetic
atgtctaatgatccatatggcag

SEQ ID NO: 10205 - DNA, 20 bp, Artificial Sequence
  Synthetic
ctcttactgctgatgtgttg

SEQ ID NO: 10206 - DNA, 18 bp, Artificial Sequence
  Synthetic
ggcaaggccttccacatg

SEQ ID NO: 10207 - DNA, 20 bp, Artificial Sequence
  Synthetic
acccttagatgtggacgaga

SEQ ID NO: 10208 - DNA, 20 bp, Artificial Sequence
  Synthetic
cattgggagaacaggggtac

SEQ ID NO: 10209 - DNA, 18 bp, Artificial Sequence
  Synthetic
gggcatgacatcagcgac

SEQ ID NO: 10210 - DNA, 17 bp, Artificial Sequence
  Synthetic
agaccctgcgctccatg

SEQ ID NO: 10211 - DNA, 16 bp, Artificial Sequence
  Synthetic
tgagtcccgctggctg

SEQ ID NO: 10212 - DNA, 23 bp, Artificial Sequence
  Synthetic
cacaaaacaaactatctccccta

SEQ ID NO: 10213 - DNA, 18 bp, Artificial Sequence
  Synthetic
tgtgtccaccccagtccc

SEQ ID NO: 10214 - DNA, 17 bp, Artificial Sequence
  Synthetic
cggggccaccttcatca

SEQ ID NO: 10215 - DNA, 16 bp, Artificial Sequence
  Synthetic
tcagggtcccctcgga

SEQ ID NO: 10216 - DNA, 18 bp, Artificial Sequence
  Synthetic
cccaggatgtcccccaga

SEQ ID NO: 10217 - DNA, 18 bp, Artificial Sequence
  Synthetic
acacccaggcacacacta

SEQ ID NO: 10218 - DNA, 20 bp, Artificial Sequence
  Synthetic
ggcttgtttgtgacttcacc

SEQ ID NO: 10219 - DNA, 19 bp, Artificial Sequence
  Synthetic
ctaagcccaacactccacc

SEQ ID NO: 10220 - DNA, 19 bp, Artificial Sequence
  Synthetic
caacacgaccccaaggaag

SEQ ID NO: 10221 - DNA, 17 bp, Artificial Sequence
  Synthetic
ggggtgtcttggggact

SEQ ID NO: 10222 - DNA, 17 bp, Artificial Sequence
  Synthetic
actcgtccgcctactgg

SEQ ID NO: 10223 - DNA, 17 bp, Artificial Sequence
  Synthetic
ccccccttgttgaggca

SEQ ID NO: 10224 - DNA, 17 bp, Artificial Sequence
  Synthetic
tgctggttggggaagga

SEQ ID NO: 10225 - DNA, 19 bp, Artificial Sequence
  Synthetic
atctgctgactgaaacccg

SEQ ID NO: 10226 - DNA, 16 bp, Artificial Sequence
  Synthetic
gccgaggcatagcgca

SEQ ID NO: 10227 - DNA, 18 bp, Artificial Sequence
  Synthetic
gggcctcctggatgatgg

SEQ ID NO: 10228 - DNA, 17 bp, Artificial Sequence
  Synthetic
aagcgtccagtctggcc

SEQ ID NO: 10229 - DNA, 20 bp, Artificial Sequence
  Synthetic
aggagagataatcggaggcc

SEQ ID NO: 10230 - DNA, 20 bp, Artificial Sequence
  Synthetic
gtcctcctcatctaccccag

SEQ ID NO: 10231 - DNA, 20 bp, Artificial Sequence
  Synthetic
cggacatggataggaaaggc

SEQ ID NO: 10232 - DNA, 18 bp, Artificial Sequence
  Synthetic
gttcctgccgttacccag

SEQ ID NO: 10233 - DNA, 16 bp, Artificial Sequence
  Synthetic
gcgtcccggcacacat

SEQ ID NO: 10234 - DNA, 16 bp, Artificial Sequence
  Synthetic
gggagcacagcctcca

SEQ ID NO: 10235 - DNA, 17 bp, Artificial Sequence
  Synthetic
gagagcgggttttgggc

SEQ ID NO: 10236 - DNA, 17 bp, Artificial Sequence
  Synthetic
tggaaacgaagctgccg

SEQ ID NO: 10237 - DNA, 19 bp, Artificial Sequence
  Synthetic
gcgagtactatcggctggt

SEQ ID NO: 10238 - DNA, 16 bp, Artificial Sequence
  Synthetic
caacctgtgcgccgag

SEQ ID NO: 10239 - DNA, 18 bp, Artificial Sequence
  Synthetic
tgagtgtggggccatacg

SEQ ID NO: 10240 - DNA, 19 bp, Artificial Sequence
  Synthetic
acggtcagtccatctcctt

SEQ ID NO: 10241 - DNA, 18 bp, Artificial Sequence
  Synthetic
aagtttggcccggtttgc

SEQ ID NO: 10242 - DNA, 16 bp, Artificial Sequence
  Synthetic
tccacactgagcccgg

SEQ ID NO: 10243 - DNA, 17 bp, Artificial Sequence
  Synthetic
cagcggctctgtgaggt

SEQ ID NO: 10244 - DNA, 17 bp, Artificial Sequence
  Synthetic
agagacgtccaggccca

SEQ ID NO: 10245 - DNA, 19 bp, Artificial Sequence
  Synthetic
tagccgggatcgatgatgc

SEQ ID NO: 10246 - DNA, 16 bp, Artificial Sequence
  Synthetic
tgctcttcctcgccgc

SEQ ID NO: 10247 - DNA, 19 bp, Artificial Sequence
  Synthetic
ttctgacgcttgtcttagt

SEQ ID NO: 10248 - DNA, 18 bp, Artificial Sequence
  Synthetic
acccccaaccattcacct

SEQ ID NO: 10249 - DNA, 17 bp, Artificial Sequence
  Synthetic
gccccggggaaacttct

SEQ ID NO: 10250 - DNA, 18 bp, Artificial Sequence
  Synthetic
gccgtgtgaagctcttga

SEQ ID NO: 10251 - DNA, 20 bp, Artificial Sequence
  Synthetic
gtcatcttgcagatcctggc

SEQ ID NO: 10252 - DNA, 16 bp, Artificial Sequence
  Synthetic
gtcccccaccacgtct

SEQ ID NO: 10253 - DNA, 18 bp, Artificial Sequence
  Synthetic
ctcggtgtcactgttgcc

SEQ ID NO: 10254 - DNA, 19 bp, Artificial Sequence
  Synthetic
attaggcgactctgcatca

SEQ ID NO: 10255 - DNA, 20 bp, Artificial Sequence
  Synthetic
tgctctcagttaacgagcag

SEQ ID NO: 10256 - DNA, 19 bp, Artificial Sequence
  Synthetic
ccagtgacgaagacccatc

SEQ ID NO: 10257 - DNA, 18 bp, Artificial Sequence
  Synthetic
catcccaggcaacctcca

SEQ ID NO: 10258 - DNA, 20 bp, Artificial Sequence
  Synthetic
ccacggctgttagaatgtgc

SEQ ID NO: 10259 - DNA, 19 bp, Artificial Sequence
  Synthetic
ccagtatttggccaggtcc

SEQ ID NO: 10260 - DNA, 20 bp, Artificial Sequence
  Synthetic
tgaccatcgagtaccttccg

SEQ ID NO: 10261 - DNA, 20 bp, Artificial Sequence
  Synthetic
tctacatcgaggacctcggt

SEQ ID NO: 10262 - DNA, 16 bp, Artificial Sequence
  Synthetic
cgtggccaccaacgtc

SEQ ID NO: 10263 - DNA, 18 bp, Artificial Sequence
  Synthetic
agttcggggtccaggagg

SEQ ID NO: 10264 - DNA, 19 bp, Artificial Sequence
  Synthetic
agagtgcctctgagcatgg

SEQ ID NO: 10265 - DNA, 19 bp, Artificial Sequence
  Synthetic
tgtttgagatctgaggagg

SEQ ID NO: 10266 - DNA, 16 bp, Artificial Sequence
  Synthetic
ccatggcgcggtgtca

SEQ ID NO: 10267 - DNA, 20 bp, Artificial Sequence
  Synthetic
agttcaggttccacatctgc

SEQ ID NO: 10268 - DNA, 17 bp, Artificial Sequence
  Synthetic
cctggtgaggtgtgcca

SEQ ID NO: 10269 - DNA, 18 bp, Artificial Sequence
  Synthetic
cctctttctggacggggc

SEQ ID NO: 10270 - DNA, 18 bp, Artificial Sequence
  Synthetic
catagctcgagggcccca

SEQ ID NO: 10271 - DNA, 18 bp, Artificial Sequence
  Synthetic
tccagaagccagggaggg

SEQ ID NO: 10272 - DNA, 18 bp, Artificial Sequence
  Synthetic
ccatccactgccgtgatg

SEQ ID NO: 10273 - DNA, 18 bp, Artificial Sequence
  Synthetic
ctggagatccccgtgact

SEQ ID NO: 10274 - DNA, 23 bp, Artificial Sequence
  Synthetic
aggaaaaacataacaatcttgtg

SEQ ID NO: 10275 - DNA, 17 bp, Artificial Sequence
  Synthetic
tgtaggcggggagatgc

SEQ ID NO: 10276 - DNA, 16 bp, Artificial Sequence
  Synthetic
agcccgctctctgtcc

SEQ ID NO: 10277 - DNA, 17 bp, Artificial Sequence
  Synthetic
acggtatgcaggggctg

SEQ ID NO: 10278 - DNA, 20 bp, Artificial Sequence
  Synthetic
atgctctccttcctctgagc

SEQ ID NO: 10279 - DNA, 17 bp, Artificial Sequence
  Synthetic
acacaggccccgaactc

SEQ ID NO: 10280 - DNA, 17 bp, Artificial Sequence
  Synthetic
tcgtctgcaccccagtg

SEQ ID NO: 10281 - DNA, 18 bp, Artificial Sequence
  Synthetic
atagcgggcacaatggtg

SEQ ID NO: 10282 - DNA, 20 bp, Artificial Sequence
  Synthetic
taatgatgaggagcaccgga

SEQ ID NO: 10283 - DNA, 18 bp, Artificial Sequence
  Synthetic
tggcgtttaccggacaca

SEQ ID NO: 10284 - DNA, 17 bp, Artificial Sequence
  Synthetic
ctcaaggcgaggctcct

SEQ ID NO: 10285 - DNA, 18 bp, Artificial Sequence
  Synthetic
tggatctggggcagttcc

SEQ ID NO: 10286 - DNA, 18 bp, Artificial Sequence
  Synthetic
catcagggtcttgccgtc

SEQ ID NO: 10287 - DNA, 16 bp, Artificial Sequence
  Synthetic
cggcgatggagaggca

SEQ ID NO: 10288 - DNA, 19 bp, Artificial Sequence
  Synthetic
cacatcctccttcttggcc

SEQ ID NO: 10289 - DNA, 20 bp, Artificial Sequence
  Synthetic
atgggaactcgtagacctca

SEQ ID NO: 10290 - DNA, 16 bp, Artificial Sequence
  Synthetic
tcccagggacccgaga

SEQ ID NO: 10291 - DNA, 19 bp, Artificial Sequence
  Synthetic
gccaggtggttacaggaga

SEQ ID NO: 10292 - DNA, 18 bp, Artificial Sequence
  Synthetic
aaactggaccacttcggc

SEQ ID NO: 10293 - DNA, 20 bp, Artificial Sequence
  Synthetic
cgtagaggacggaattggtg

SEQ ID NO: 10294 - DNA, 15 bp, Artificial Sequence
  Synthetic
aaggagcggcaccgt

SEQ ID NO: 10295 - DNA, 18 bp, Artificial Sequence
  Synthetic
tacgtgcgtgtctttgcc

SEQ ID NO: 10296 - DNA, 16 bp, Artificial Sequence
  Synthetic
gaggtcgttggcggca

SEQ ID NO: 10297 - DNA, 22 bp, Artificial Sequence
  Synthetic
caacaataatttcctgtgcaca

SEQ ID NO: 10298 - DNA, 19 bp, Artificial Sequence
  Synthetic
ttggagaaactgttgcaga

SEQ ID NO: 10299 - DNA, 21 bp, Artificial Sequence
  Synthetic
ccctggcattgtttaatgaac

SEQ ID NO: 10300 - DNA, 23 bp, Artificial Sequence
  Synthetic
caaaagctgttttgtaacatgtt

SEQ ID NO: 10301 - DNA, 25 bp, Artificial Sequence
  Synthetic
cctaacaaattaccatttaatgagg

SEQ ID NO: 10302 - DNA, 18 bp, Artificial Sequence
  Synthetic
gcatagagcagctggaaa

SEQ ID NO: 10303 - DNA, 19 bp, Artificial Sequence
  Synthetic
gttcacgacctattcctga

SEQ ID NO: 10304 - DNA, 23 bp, Artificial Sequence
  Synthetic
taggttttgcagaaaatattgtg

SEQ ID NO: 10305 - DNA, 19 bp, Artificial Sequence
  Synthetic
gcagaccactggaaaactg

SEQ ID NO: 10306 - DNA, 24 bp, Artificial Sequence
  Synthetic
ttacaaaaccatgtaaagataggc

SEQ ID NO: 10307 - DNA, 25 bp, Artificial Sequence
  Synthetic
gctcatattaatgtaatgaatccac

SEQ ID NO: 10308 - DNA, 25 bp, Artificial Sequence
  Synthetic
ctctacaaataaatctgcaaacttg

SEQ ID NO: 10309 - DNA, 22 bp, Artificial Sequence
  Synthetic
agcaggggaaaataaaaacaac

SEQ ID NO: 10310 - DNA, 18 bp, Artificial Sequence
  Synthetic
ggatggctcttgggaaac

SEQ ID NO: 10311 - DNA, 22 bp, Artificial Sequence
  Synthetic
gggaaaagcagtttttacagaa

SEQ ID NO: 10312 - DNA, 22 bp, Artificial Sequence
  Synthetic
gaggatgaactattactggacc

SEQ ID NO: 10313 - DNA, 19 bp, Artificial Sequence
  Synthetic
gagtgccaaattgaggatg

SEQ ID NO: 10314 - DNA, 22 bp, Artificial Sequence
  Synthetic
gcatggaaagtgtaagaaatgg

SEQ ID NO: 10315 - DNA, 18 bp, Artificial Sequence
  Synthetic
caaccgccaatttcactg

SEQ ID NO: 10316 - DNA, 23 bp, Artificial Sequence
  Synthetic
tgttgataccttgtaaattttgc

SEQ ID NO: 10317 - DNA, 24 bp, Artificial Sequence
  Synthetic
ggaaatatttgtattaggtgtcgc

SEQ ID NO: 10318 - DNA, 18 bp, Artificial Sequence
  Synthetic
cggtgcaagacttcgttt

SEQ ID NO: 10319 - DNA, 22 bp, Artificial Sequence
  Synthetic
agtttagatggtgatttggaaa

SEQ ID NO: 10320 - DNA, 20 bp, Artificial Sequence
  Synthetic
acagcggactagaatgttct

SEQ ID NO: 10321 - DNA, 20 bp, Artificial Sequence
  Synthetic
ggtaattgctgtgtatgctg

SEQ ID NO: 10322 - DNA, 23 bp, Artificial Sequence
  Synthetic
agtatgaaccctaatgtatacgc

SEQ ID NO: 10323 - DNA, 23 bp, Artificial Sequence
  Synthetic
gaccaaaagtacaaatatttgca

SEQ ID NO: 10324 - DNA, 18 bp, Artificial Sequence
  Synthetic
gtcagattgaccactggc

SEQ ID NO: 10325 - DNA, 20 bp, Artificial Sequence
  Synthetic
tgtttgcccctgttactagc

SEQ ID NO: 10326 - DNA, 20 bp, Artificial Sequence
  Synthetic
caagggtcgaacagaaaccg

SEQ ID NO: 10327 - DNA, 18 bp, Artificial Sequence
  Synthetic
gacatcacgggagacttg

SEQ ID NO: 10328 - DNA, 23 bp, Artificial Sequence
  Synthetic
cctacagtagattggtctttagg

SEQ ID NO: 10329 - DNA, 18 bp, Artificial Sequence
  Synthetic
tgtttttcgggggcttgg

SEQ ID NO: 10330 - DNA, 19 bp, Artificial Sequence
  Synthetic
gttgaccttttacctggtg

SEQ ID NO: 10331 - DNA, 23 bp, Artificial Sequence
  Synthetic
ttcagtttgataatccagcattt

SEQ ID NO: 10332 - DNA, 24 bp, Artificial Sequence
  Synthetic
accattaacacagaagaacctata

SEQ ID NO: 10333 - DNA, 19 bp, Artificial Sequence
  Synthetic
ccagcaagtggtaaggtat

SEQ ID NO: 10334 - DNA, 25 bp, Artificial Sequence
  Synthetic
ttataatcctgataaggaacgtcta

SEQ ID NO: 10335 - DNA, 21 bp, Artificial Sequence
  Synthetic
agagaacaatgttatgccagg

SEQ ID NO: 10336 - DNA, 19 bp, Artificial Sequence
  Synthetic
aaaatgcggacgtaagaga

SEQ ID NO: 10337 - DNA, 20 bp, Artificial Sequence
  Synthetic
gctttgcaagacaatcaagg

SEQ ID NO: 10338 - DNA, 18 bp, Artificial Sequence
  Synthetic
tttacgaggtagccaggt

SEQ ID NO: 10339 - DNA, 18 bp, Artificial Sequence
  Synthetic
catccgttcttcacagga

SEQ ID NO: 10340 - DNA, 21 bp, Artificial Sequence
  Synthetic
cttagaaaaatcttcgcagcg

SEQ ID NO: 10341 - DNA, 22 bp, Artificial Sequence
  Synthetic
atcagaggatatagcttgcaaa

SEQ ID NO: 10342 - DNA, 18 bp, Artificial Sequence
  Synthetic
ccccttgaggcatttgtg

SEQ ID NO: 10343 - DNA, 19 bp, Artificial Sequence
  Synthetic
aacatactgcagcttgtgg

SEQ ID NO: 10344 - DNA, 20 bp, Artificial Sequence
  Synthetic
attcgtggaactttcagtca

SEQ ID NO: 10345 - DNA, 22 bp, Artificial Sequence
  Synthetic
atagggatgttttgatcgaatc

SEQ ID NO: 10346 - DNA, 20 bp, Artificial Sequence
  Synthetic
ctgtggctccaaatacagat

SEQ ID NO: 10347 - DNA, 18 bp, Artificial Sequence
  Synthetic
caaactagacgctcgcat

SEQ ID NO: 10348 - DNA, 19 bp, Artificial Sequence
  Synthetic
ctctggaagcaaaggtttc

SEQ ID NO: 10349 - DNA, 18 bp, Artificial Sequence
  Synthetic
atcgcccaacaattttcc

SEQ ID NO: 10350 - DNA, 23 bp, Artificial Sequence
  Synthetic
gagcaagaatttgtaagaaacag

SEQ ID NO: 10351 - DNA, 20 bp, Artificial Sequence
  Synthetic
tagactagttctgcgccttt

SEQ ID NO: 10352 - DNA, 18 bp, Artificial Sequence
  Synthetic
tctcgaagccgtagaagc

SEQ ID NO: 10353 - DNA, 21 bp, Artificial Sequence
  Synthetic
agttcattcgttttgtatcgt

SEQ ID NO: 10354 - DNA, 20 bp, Artificial Sequence
  Synthetic
ccctgttttcttctcggaaa

SEQ ID NO: 10355 - DNA, 22 bp, Artificial Sequence
  Synthetic
ctattcaactaaatggagcact

SEQ ID NO: 10356 - DNA, 18 bp, Artificial Sequence
  Synthetic
ctagacgggcgatttctg

SEQ ID NO: 10357 - DNA, 21 bp, Artificial Sequence
  Synthetic
ggtatcgtaacgaatagccaa

SEQ ID NO: 10358 - DNA, 18 bp, Artificial Sequence
  Synthetic
ccaacacttccgcgattt

SEQ ID NO: 10359 - DNA, 21 bp, Artificial Sequence
  Synthetic
tggcagattctttttcgtgaa

SEQ ID NO: 10360 - DNA, 21 bp, Artificial Sequence
  Synthetic
aaagccttttagtcattccaa

SEQ ID NO: 10361 - DNA, 18 bp, Artificial Sequence
  Synthetic
atgacagagacacgacga

SEQ ID NO: 10362 - DNA, 20 bp, Artificial Sequence
  Synthetic
agcaatagtcctttccatcg

SEQ ID NO: 10363 - DNA, 21 bp, Artificial Sequence
  Synthetic
atctctagaaacttgtgcaga

SEQ ID NO: 10364 - DNA, 23 bp, Artificial Sequence
  Synthetic
tgcagaagctaagtttatcaaac

SEQ ID NO: 10365 - DNA, 20 bp, Artificial Sequence
  Synthetic
acgaataacaccacgatagc

SEQ ID NO: 10366 - DNA, 19 bp, Artificial Sequence
  Synthetic
tgggcagaatcttatccag

SEQ ID NO: 10367 - DNA, 21 bp, Artificial Sequence
  Synthetic
ccaactcctgtaatacatggt

SEQ ID NO: 10368 - DNA, 18 bp, Artificial Sequence
  Synthetic
ggagagtctcatgaccac

SEQ ID NO: 10369 - DNA, 21 bp, Artificial Sequence
  Synthetic
atttccttcattacgacagga

SEQ ID NO: 10370 - DNA, 19 bp, Artificial Sequence
  Synthetic
gatctcgcatagctgaagg

SEQ ID NO: 10371 - DNA, 21 bp, Artificial Sequence
  Synthetic
ccccaatttttcatgaagagc

SEQ ID NO: 10372 - DNA, 19 bp, Artificial Sequence
  Synthetic
gtgaactcaagctcttcac

SEQ ID NO: 10373 - DNA, 21 bp, Artificial Sequence
  Synthetic
taagacgttgctcttatcacc

SEQ ID NO: 10374 - DNA, 20 bp, Artificial Sequence
  Synthetic
taatttcgccacaagaccac

SEQ ID NO: 10375 - DNA, 18 bp, Artificial Sequence
  Synthetic
gaagtcaacccatccacc

SEQ ID NO: 10376 - DNA, 21 bp, Artificial Sequence
  Synthetic
caattgcacttcaaactcaac

SEQ ID NO: 10377 - DNA, 23 bp, Artificial Sequence
  Synthetic
aactgtgtatgaggtttaacact

SEQ ID NO: 10378 - DNA, 22 bp, Artificial Sequence
  Synthetic
atcacaaaccataacaatacga

SEQ ID NO: 10379 - DNA, 21 bp, Artificial Sequence
  Synthetic
catgctttctgtagaaaaacg

SEQ ID NO: 10380 - DNA, 18 bp, Artificial Sequence
  Synthetic
tagcttcaacacgcctct

SEQ ID NO: 10381 - DNA, 18 bp, Artificial Sequence
  Synthetic
ctcctcttcctgctgttg

SEQ ID NO: 10382 - DNA, 20 bp, Artificial Sequence
  Synthetic
agcgctcttaaacaatctca

SEQ ID NO: 10383 - DNA, 23 bp, Artificial Sequence
  Synthetic
caagcatcacaagatttatagcc

SEQ ID NO: 10384 - DNA, 18 bp, Artificial Sequence
  Synthetic
aactgctccaaaacctga

SEQ ID NO: 10385 - DNA, 23 bp, Artificial Sequence
  Synthetic
agtttgaaactccaatactcttc

SEQ ID NO: 10386 - DNA, 22 bp, Artificial Sequence
  Synthetic
taataaccgtatccgtttgact

SEQ ID NO: 10387 - DNA, 20 bp, Artificial Sequence
  Synthetic
tcaggagacgagaaatcaac

SEQ ID NO: 10388 - DNA, 18 bp, Artificial Sequence
  Synthetic
tgtcattctcggagcaac

SEQ ID NO: 10389 - DNA, 21 bp, Artificial Sequence
  Synthetic
tttccatatttcgtgattgca

SEQ ID NO: 10390 - DNA, 21 bp, Artificial Sequence
  Synthetic
gtggaaaagctttgttagagg

SEQ ID NO: 10391 - DNA, 18 bp, Artificial Sequence
  Synthetic
gctgttgtgttcaaagct

SEQ ID NO: 10392 - DNA, 19 bp, Artificial Sequence
  Synthetic
aaaatcctcgctatcccct

SEQ ID NO: 10393 - DNA, 18 bp, Artificial Sequence
  Synthetic
attgatccgagcaaggga

SEQ ID NO: 10394 - DNA, 18 bp, Artificial Sequence
  Synthetic
gcccggaattggatttgg

SEQ ID NO: 10395 - DNA, 20 bp, Artificial Sequence
  Synthetic
ctttggatagagaagctgct

SEQ ID NO: 10396 - DNA, 18 bp, Artificial Sequence
  Synthetic
ctcaagcgtacgtccttc

SEQ ID NO: 10397 - DNA, 18 bp, Artificial Sequence
  Synthetic
acaagaagcggtgtgaag

SEQ ID NO: 10398 - DNA, 18 bp, Artificial Sequence
  Synthetic
cgttcgttgcagacttac

SEQ ID NO: 10399 - DNA, 19 bp, Artificial Sequence
  Synthetic
gacgttactgcatcttctg

SEQ ID NO: 10400 - DNA, 21 bp, Artificial Sequence
  Synthetic
ttaaatcccttcccattcagg

SEQ ID NO: 10401 - DNA, 22 bp, Artificial Sequence
  Synthetic
gactctgaaggtaatatcgagt

SEQ ID NO: 10402 - DNA, 21 bp, Artificial Sequence
  Synthetic
gaatttaatccctcttcgacc

SEQ ID NO: 10403 - DNA, 19 bp, Artificial Sequence
  Synthetic
ttcaggaacagcttgtgtg

SEQ ID NO: 10404 - DNA, 20 bp, Artificial Sequence
  Synthetic
gcctagtcctggtaaaactg

SEQ ID NO: 10405 - DNA, 19 bp, Artificial Sequence
  Synthetic
aaaggagtcggaccatgaa

SEQ ID NO: 10406 - DNA, 22 bp, Artificial Sequence
  Synthetic
ccagctttctgtaaaaagacaa

SEQ ID NO: 10407 - DNA, 19 bp, Artificial Sequence
  Synthetic
agaaaattgcggaggaacc

SEQ ID NO: 10408 - DNA, 18 bp, Artificial Sequence
  Synthetic
gcatcttcaggaaccgta

SEQ ID NO: 10409 - DNA, 25 bp, Artificial Sequence
  Synthetic
atctactaagccctatattaaagtc

SEQ ID NO: 10410 - DNA, 21 bp, Artificial Sequence
  Synthetic
caaaaccgatacagaacatct

SEQ ID NO: 10411 - DNA, 19 bp, Artificial Sequence
  Synthetic
ctgtccatacactaagcca

SEQ ID NO: 10412 - DNA, 18 bp, Artificial Sequence
  Synthetic
ccattccaccatctgagc

SEQ ID NO: 10413 - DNA, 20 bp, Artificial Sequence
  Synthetic
taaaaagtgagcaacgaacc

SEQ ID NO: 10414 - DNA, 22 bp, Artificial Sequence
  Synthetic
ttttcgttacactcttatctgg

SEQ ID NO: 10415 - DNA, 23 bp, Artificial Sequence
  Synthetic
taattccataagtagtttctgca

SEQ ID NO: 10416 - DNA, 19 bp, Artificial Sequence
  Synthetic
gacatcaacccgaacttct

SEQ ID NO: 10417 - DNA, 19 bp, Artificial Sequence
  Synthetic
tacggccattatgaacctc

SEQ ID NO: 10418 - DNA, 23 bp, Artificial Sequence
  Synthetic
ttctctcttttttgttgatacga

SEQ ID NO: 10419 - DNA, 22 bp, Artificial Sequence
  Synthetic
gcttacattcaagatgagagaa

SEQ ID NO: 10420 - DNA, 20 bp, Artificial Sequence
  Synthetic
ttagaagaactttgcgagca

SEQ ID NO: 10421 - DNA, 22 bp, Artificial Sequence
  Synthetic
ccttctgacttcatgatcatca

SEQ ID NO: 10422 - DNA, 19 bp, Artificial Sequence
  Synthetic
aactattcccgtcaccaat

SEQ ID NO: 10423 - DNA, 18 bp, Artificial Sequence
  Synthetic
agaacaaacgaaggagct

SEQ ID NO: 10424 - DNA, 18 bp, Artificial Sequence
  Synthetic
ccgcttttggtttcttcc

SEQ ID NO: 10425 - DNA, 20 bp, Artificial Sequence
  Synthetic
tagaagctatggccaaaacg

SEQ ID NO: 10426 - DNA, 18 bp, Artificial Sequence
  Synthetic
ttcgataacagaccgctc

SEQ ID NO: 10427 - DNA, 18 bp, Artificial Sequence
  Synthetic
gctggaaactcctatccg

SEQ ID NO: 10428 - DNA, 18 bp, Artificial Sequence
  Synthetic
atcgatggagctgtaggc

SEQ ID NO: 10429 - DNA, 18 bp, Artificial Sequence
  Synthetic
taacgcacgggaaaaagt

SEQ ID NO: 10430 - DNA, 22 bp, Artificial Sequence
  Synthetic
tttcgaaaccataccattactc

SEQ ID NO: 10431 - DNA, 19 bp, Artificial Sequence
  Synthetic
tctttatcagggagagggc

SEQ ID NO: 10432 - DNA, 19 bp, Artificial Sequence
  Synthetic
gaaacgcaaacatggggta

SEQ ID NO: 10433 - DNA, 21 bp, Artificial Sequence
  Synthetic
tttgtaattgctggttttcct

SEQ ID NO: 10434 - DNA, 20 bp, Artificial Sequence
  Synthetic
atggcacgtcttaaaagagc

SEQ ID NO: 10435 - DNA, 18 bp, Artificial Sequence
  Synthetic
acaagatcagtggcaagc

SEQ ID NO: 10436 - DNA, 18 bp, Artificial Sequence
  Synthetic
aatgcgcacagagaactc

SEQ ID NO: 10437 - DNA, 24 bp, Artificial Sequence
  Synthetic
aatacttccactatatccccttag

SEQ ID NO: 10438 - DNA, 23 bp, Artificial Sequence
  Synthetic
catatccttgttgatgttcttga

SEQ ID NO: 10439 - DNA, 21 bp, Artificial Sequence
  Synthetic
cgcctatggattaaaaatggg

SEQ ID NO: 10440 - DNA, 23 bp, Artificial Sequence
  Synthetic
atctggattattagcaaagactt

SEQ ID NO: 10441 - DNA, 19 bp, Artificial Sequence
  Synthetic
acgggatcaccttttctca

SEQ ID NO: 10442 - DNA, 18 bp, Artificial Sequence
  Synthetic
ctcttgtgcatgcgacat

SEQ ID NO: 10443 - DNA, 20 bp, Artificial Sequence
  Synthetic
atcagaaggtagggggattc

SEQ ID NO: 10444 - DNA, 20 bp, Artificial Sequence
  Synthetic
gggacaataatgaaggcctt

SEQ ID NO: 10445 - DNA, 18 bp, Artificial Sequence
  Synthetic
cggacgttatggaccagt

SEQ ID NO: 10446 - DNA, 18 bp, Artificial Sequence
  Synthetic
tcgaagacaacagggaac

SEQ ID NO: 10447 - DNA, 22 bp, Artificial Sequence
  Synthetic
caggagcttttaaaattacagg

SEQ ID NO: 10448 - DNA, 18 bp, Artificial Sequence
  Synthetic
agctcgtggtcaagaaga

SEQ ID NO: 10449 - DNA, 20 bp, Artificial Sequence
  Synthetic
aaaaccccctctttagaaga

SEQ ID NO: 10450 - DNA, 20 bp, Artificial Sequence
  Synthetic
aaactttggaagatgctgga

SEQ ID NO: 10451 - DNA, 23 bp, Artificial Sequence
  Synthetic
gaaagggatttgttctgttttac

SEQ ID NO: 10452 - DNA, 18 bp, Artificial Sequence
  Synthetic
ctttgccggaaattgctc

SEQ ID NO: 10453 - DNA, 22 bp, Artificial Sequence
  Synthetic
taatgggagtggaaatggatac

SEQ ID NO: 10454 - DNA, 18 bp, Artificial Sequence
  Synthetic
cttttgcgtatggctacc

SEQ ID NO: 10455 - DNA, 22 bp, Artificial Sequence
  Synthetic
tagtgacaatagtaggagaagc

SEQ ID NO: 10456 - DNA, 20 bp, Artificial Sequence
  Synthetic
cgtgatatagctatcccgga

SEQ ID NO: 10457 - DNA, 22 bp, Artificial Sequence
  Synthetic
gtggagaagtagactttgagtt

SEQ ID NO: 10458 - DNA, 23 bp, Artificial Sequence
  Synthetic
cttttactgctaagattggatcg

SEQ ID NO: 10459 - DNA, 18 bp, Artificial Sequence
  Synthetic
aggaaacgccatctttcc

SEQ ID NO: 10460 - DNA, 19 bp, Artificial Sequence
  Synthetic
tgttgtttcggagagaagg

SEQ ID NO: 10461 - DNA, 19 bp, Artificial Sequence
  Synthetic
aacttgcttctcagtgagg

SEQ ID NO: 10462 - DNA, 20 bp, Artificial Sequence
  Synthetic
catctctctcgctatctgat

SEQ ID NO: 10463 - DNA, 18 bp, Artificial Sequence
  Synthetic
cgaatcgcccttattggt

SEQ ID NO: 10464 - DNA, 22 bp, Artificial Sequence
  Synthetic
agagatacaaagtgtcttgagt

SEQ ID NO: 10465 - DNA, 21 bp, Artificial Sequence
  Synthetic
gagatcctttttgcaagagaa

SEQ ID NO: 10466 - DNA, 21 bp, Artificial Sequence
  Synthetic
ataacgattacttgcttgtgc

SEQ ID NO: 10467 - DNA, 19 bp, Artificial Sequence
  Synthetic
gactacagtctctcctggg

SEQ ID NO: 10468 - DNA, 23 bp, Artificial Sequence
  Synthetic
ccctaattttatgctaagtgggt

SEQ ID NO: 10469 - DNA, 20 bp, Artificial Sequence
  Synthetic
gcagagaatcctttctgttt

SEQ ID NO: 10470 - DNA, 20 bp, Artificial Sequence
  Synthetic
ttggcttggattacgaatgt

SEQ ID NO: 10471 - DNA, 18 bp, Artificial Sequence
  Synthetic
tattgtctccggcttgtg

SEQ ID NO: 10472 - DNA, 18 bp, Artificial Sequence
  Synthetic
caactgtttccgcagctt

SEQ ID NO: 10473 - DNA, 19 bp, Artificial Sequence
  Synthetic
agttcgttgctatccacat

SEQ ID NO: 10474 - DNA, 20 bp, Artificial Sequence
  Synthetic
aacacttttgagctgctatc

SEQ ID NO: 10475 - DNA, 18 bp, Artificial Sequence
  Synthetic
caccccagagttgtcttt

SEQ ID NO: 10476 - DNA, 21 bp, Artificial Sequence
  Synthetic
atgcttttttggttatgcatg

SEQ ID NO: 10477 - DNA, 22 bp, Artificial Sequence
  Synthetic
aaaatttccaggggatagagaa

SEQ ID NO: 10478 - DNA, 18 bp, Artificial Sequence
  Synthetic
agaagtttgatgcggagg

SEQ ID NO: 10479 - DNA, 23 bp, Artificial Sequence
  Synthetic
gtttgtttttggccttatctttg

SEQ ID NO: 10480 - DNA, 18 bp, Artificial Sequence
  Synthetic
cgaacaatggaaagctgg

SEQ ID NO: 10481 - DNA, 20 bp, Artificial Sequence
  Synthetic
agatgccaaaatgacgattg

SEQ ID NO: 10482 - DNA, 18 bp, Artificial Sequence
  Synthetic
gctgggagagaaactgtg

SEQ ID NO: 10483 - DNA, 19 bp, Artificial Sequence
  Synthetic
aggctttttgggagttacc

SEQ ID NO: 10484 - DNA, 24 bp, Artificial Sequence
  Synthetic
ctttttattgctatagctaccgag

SEQ ID NO: 10485 - DNA, 20 bp, Artificial Sequence
  Synthetic
acaattgttaagcgcaatgg

SEQ ID NO: 10486 - DNA, 21 bp, Artificial Sequence
  Synthetic
ccaatattgaaaaggagcctg

SEQ ID NO: 10487 - DNA, 21 bp, Artificial Sequence
  Synthetic
caatcttggttttgttgatgc

SEQ ID NO: 10488 - DNA, 18 bp, Artificial Sequence
  Synthetic
ggatgaacggttctgcta

SEQ ID NO: 10489 - DNA, 19 bp, Artificial Sequence
  Synthetic
aagactaatcttccagcgt

SEQ ID NO: 10490 - DNA, 19 bp, Artificial Sequence
  Synthetic
acgctcgataatttgacgg

SEQ ID NO: 10491 - DNA, 22 bp, Artificial Sequence
  Synthetic
cagcagcagaatatctagagaa

SEQ ID NO: 10492 - DNA, 20 bp, Artificial Sequence
  Synthetic
agagatagggaaaagaggga

SEQ ID NO: 10493 - DNA, 19 bp, Artificial Sequence
  Synthetic
aagctacctgttccgagtt

SEQ ID NO: 10494 - DNA, 21 bp, Artificial Sequence
  Synthetic
gatcattgactgtgttagctt

SEQ ID NO: 10495 - DNA, 19 bp, Artificial Sequence
  Synthetic
attcccgtagttagtccgg

SEQ ID NO: 10496 - DNA, 23 bp, Artificial Sequence
  Synthetic
tatttttatcgcgaatagaaacg

SEQ ID NO: 10497 - DNA, 19 bp, Artificial Sequence
  Synthetic
gctttattgggactgggtt

SEQ ID NO: 10498 - DNA, 21 bp, Artificial Sequence
  Synthetic
gtactacgagagaagttcgtg

SEQ ID NO: 10499 - DNA, 23 bp, Artificial Sequence
  Synthetic
aaccatcaaaagcttctaaaagg

SEQ ID NO: 10500 - DNA, 20 bp, Artificial Sequence
  Synthetic
ttcgtctacaattgagaggc

SEQ ID NO: 10501 - DNA, 18 bp, Artificial Sequence
  Synthetic
caagcagcaggatccaat

SEQ ID NO: 10502 - DNA, 18 bp, Artificial Sequence
  Synthetic
tgggtataatcctgggcc

SEQ ID NO: 10503 - DNA, 21 bp, Artificial Sequence
  Synthetic
aacaagctttatgtggatcct

SEQ ID NO: 10504 - DNA, 24 bp, Artificial Sequence
  Synthetic
gatggaacgactgtttctttaaat

SEQ ID NO: 10505 - DNA, 20 bp, Artificial Sequence
  Synthetic
atacgccctaattcagctaa

SEQ ID NO: 10506 - DNA, 18 bp, Artificial Sequence
  Synthetic
acggagattctcgcctag

SEQ ID NO: 10507 - DNA, 20 bp, Artificial Sequence
  Synthetic
caccaaacggtcttatgaac

SEQ ID NO: 10508 - DNA, 22 bp, Artificial Sequence
  Synthetic
ggaaggatcctaagaaaactgg

SEQ ID NO: 10509 - DNA, 19 bp, Artificial Sequence
  Synthetic
ctgcagtcaaaggagttgg

SEQ ID NO: 10510 - DNA, 22 bp, Artificial Sequence
  Synthetic
actagaggagtacaaattgctt

SEQ ID NO: 10511 - DNA, 18 bp, Artificial Sequence
  Synthetic
ttagcgggcaattcctct

SEQ ID NO: 10512 - DNA, 20 bp, Artificial Sequence
  Synthetic
tcaagatttgagtcagtcgc

SEQ ID NO: 10513 - DNA, 21 bp, Artificial Sequence
  Synthetic
gcctcatacaagatcttcaga

SEQ ID NO: 10514 - DNA, 20 bp, Artificial Sequence
  Synthetic
cagtatcgtctaatggagca

SEQ ID NO: 10515 - DNA, 21 bp, Artificial Sequence
  Synthetic
atcattgggatcttgcacttt

SEQ ID NO: 10516 - DNA, 25 bp, Artificial Sequence
  Synthetic
gtttttctcattactcttgatgttg

SEQ ID NO: 10517 - DNA, 23 bp, Artificial Sequence
  Synthetic
caaaaactgctgataagtttcgt

SEQ ID NO: 10518 - DNA, 20 bp, Artificial Sequence
  Synthetic
ttcacaatcacattgcatga

SEQ ID NO: 10519 - DNA, 23 bp, Artificial Sequence
  Synthetic
aagaagtgtacaataaaagagga

SEQ ID NO: 10520 - DNA, 18 bp, Artificial Sequence
  Synthetic
agggtgcatgttgatcca

SEQ ID NO: 10521 - DNA, 18 bp, Artificial Sequence
  Synthetic
ccttggctgcaaaggaag

SEQ ID NO: 10522 - DNA, 24 bp, Artificial Sequence
  Synthetic
cctaagatcttctacaaatatcgc

SEQ ID NO: 10523 - DNA, 24 bp, Artificial Sequence
  Synthetic
gggtaattgacaataacatttgtg

SEQ ID NO: 10524 - DNA, 22 bp, Artificial Sequence
  Synthetic
aacatggatagagcagttaaac

SEQ ID NO: 10525 - DNA, 20 bp, Artificial Sequence
  Synthetic
gaaaacagaatggtgctggc

SEQ ID NO: 10526 - DNA, 19 bp, Artificial Sequence
  Synthetic
tgttgccaacaatcatcac

SEQ ID NO: 10527 - DNA, 25 bp, Artificial Sequence
  Synthetic
taggttttgtacagagatatgattg

SEQ ID NO: 10528 - DNA, 19 bp, Artificial Sequence
  Synthetic
aagaaatagcgttgctgtg

SEQ ID NO: 10529 - DNA, 18 bp, Artificial Sequence
  Synthetic
gctgcagcagttaaaacg

SEQ ID NO: 10530 - DNA, 23 bp, Artificial Sequence
  Synthetic
aaagaacttgttgatgtccattt

SEQ ID NO: 10531 - DNA, 23 bp, Artificial Sequence
  Synthetic
aatctttttttcaaaggctttgg

SEQ ID NO: 10532 - DNA, 21 bp, Artificial Sequence
  Synthetic
aaaagactgagggacatttgg

SEQ ID NO: 10533 - DNA, 19 bp, Artificial Sequence
  Synthetic
gtacccactcaacggaagc

SEQ ID NO: 10534 - DNA, 17 bp, Artificial Sequence
  Synthetic
cgggagcagaagcagga

SEQ ID NO: 10535 - DNA, 21 bp, Artificial Sequence
  Synthetic
attttgttgaaaggacaagcc

SEQ ID NO: 10536 - DNA, 18 bp, Artificial Sequence
  Synthetic
cactggatatgggccatt

SEQ ID NO: 10537 - DNA, 25 bp, Artificial Sequence
  Synthetic
ctcctgatagacaatttttagatgt

SEQ ID NO: 10538 - DNA, 22 bp, Artificial Sequence
  Synthetic
tccagaagttattcctacagaa

SEQ ID NO: 10539 - DNA, 18 bp, Artificial Sequence
  Synthetic
aatagtgatcgcctgctg

SEQ ID NO: 10540 - DNA, 22 bp, Artificial Sequence
  Synthetic
aggtattggacactgaaaatcc

SEQ ID NO: 10541 - DNA, 23 bp, Artificial Sequence
  Synthetic
atgaattttaaggccttatcagt

SEQ ID NO: 10542 - DNA, 20 bp, Artificial Sequence
  Synthetic
ccagtgaccagtctagaagt

SEQ ID NO: 10543 - DNA, 18 bp, Artificial Sequence
  Synthetic
ccgcttcactgatctctt

SEQ ID NO: 10544 - DNA, 20 bp, Artificial Sequence
  Synthetic
aacagacggaatttgtcctg

SEQ ID NO: 10545 - DNA, 25 bp, Artificial Sequence
  Synthetic
atcagttatatatgattgatcctgc

SEQ ID NO: 10546 - DNA, 23 bp, Artificial Sequence
  Synthetic
taagacattgcaagaaatgaagg

SEQ ID NO: 10547 - DNA, 20 bp, Artificial Sequence
  Synthetic
gtgttgctttgaaagattgc

SEQ ID NO: 10548 - DNA, 25 bp, Artificial Sequence
  Synthetic
atatgacagtttggtttatactgga

SEQ ID NO: 10549 - DNA, 23 bp, Artificial Sequence
  Synthetic
gttaaaaacattcctcgttatgc

SEQ ID NO: 10550 - DNA, 22 bp, Artificial Sequence
  Synthetic
ttgttacaacttcacttacacc

SEQ ID NO: 10551 - DNA, 23 bp, Artificial Sequence
  Synthetic
aaattgtattgtgcctttacagc

SEQ ID NO: 10552 - DNA, 18 bp, Artificial Sequence
  Synthetic
tttggcagtgatgcagaa

SEQ ID NO: 10553 - DNA, 21 bp, Artificial Sequence
  Synthetic
gacagcagtttgttaaagaga

SEQ ID NO: 10554 - DNA, 21 bp, Artificial Sequence
  Synthetic
gtgtcagataactgctgttga

SEQ ID NO: 10555 - DNA, 24 bp, Artificial Sequence
  Synthetic
gcagggtatttttaataaggctac

SEQ ID NO: 10556 - DNA, 22 bp, Artificial Sequence
  Synthetic
attgcttgcctattacaacatg

SEQ ID NO: 10557 - DNA, 23 bp, Artificial Sequence
  Synthetic
gcaatatgtgattttgaaattgc

SEQ ID NO: 10558 - DNA, 25 bp, Artificial Sequence
  Synthetic
gaaaattgagtataaacctgacttg

SEQ ID NO: 10559 - DNA, 21 bp, Artificial Sequence
  Synthetic
ttaagccatgagaaagcttcc

SEQ ID NO: 10560 - DNA, 21 bp, Artificial Sequence
  Synthetic
tacggcatggttttatccatt

SEQ ID NO: 10561 - DNA, 23 bp, Artificial Sequence
  Synthetic
attacgatgttatggctaatggt

SEQ ID NO: 10562 - DNA, 22 bp, Artificial Sequence
  Synthetic
gtgttctgattcaaaattctgc

SEQ ID NO: 10563 - DNA, 19 bp, Artificial Sequence
  Synthetic
ggcttgtcccattgttgtt

SEQ ID NO: 10564 - DNA, 20 bp, Artificial Sequence
  Synthetic
cgtgcggtataatcttgcta

SEQ ID NO: 10565 - DNA, 25 bp, Artificial Sequence
  Synthetic
tatcagctatttaaaggtttagcac

SEQ ID NO: 10566 - DNA, 23 bp, Artificial Sequence
  Synthetic
taggtattacagcggtaaaatgg

SEQ ID NO: 10567 - DNA, 19 bp, Artificial Sequence
  Synthetic
gtggttaaacctggtgaga

SEQ ID NO: 10568 - DNA, 23 bp, Artificial Sequence
  Synthetic
ttgtaattggtttgtacaaagtg

SEQ ID NO: 10569 - DNA, 23 bp, Artificial Sequence
  Synthetic
atgtttagtattacgttttgtgc

SEQ ID NO: 10570 - DNA, 24 bp, Artificial Sequence
  Synthetic
atttctgttttctctttgtggtac

SEQ ID NO: 10571 - DNA, 24 bp, Artificial Sequence
  Synthetic
atatatgaatgctaatggattgcg

SEQ ID NO: 10572 - DNA, 22 bp, Artificial Sequence
  Synthetic
aagtgcctgactagtattgaag

SEQ ID NO: 10573 - DNA, 22 bp, Artificial Sequence
  Synthetic
gttgtgtaccattgaatgcaat

SEQ ID NO: 10574 - DNA, 23 bp, Artificial Sequence
  Synthetic
ttactgttcaagatgctaaaggt

SEQ ID NO: 10575 - DNA, 19 bp, Artificial Sequence
  Synthetic
ggattcatatggtggtgcg

SEQ ID NO: 10576 - DNA, 19 bp, Artificial Sequence
  Synthetic
cgccagtggtttatctact

SEQ ID NO: 10577 - DNA, 24 bp, Artificial Sequence
  Synthetic
taatgtgtataaaaagctaggacc

SEQ ID NO: 10578 - DNA, 23 bp, Artificial Sequence
  Synthetic
gctaccattataaagaacttggt

SEQ ID NO: 10579 - DNA, 21 bp, Artificial Sequence
  Synthetic
ggacattaagcagttgttgtt

SEQ ID NO: 10580 - DNA, 20 bp, Artificial Sequence
  Synthetic
actatgactggcagaatgtt

SEQ ID NO: 10581 - DNA, 24 bp, Artificial Sequence
  Synthetic
ttcagtctttaacatatgtcaagc

SEQ ID NO: 10582 - DNA, 23 bp, Artificial Sequence
  Synthetic
cgtttttatgtcagaatccaaat

SEQ ID NO: 10583 - DNA, 21 bp, Artificial Sequence
  Synthetic
tacaatgacctgggtaatcag

SEQ ID NO: 10584 - DNA, 19 bp, Artificial Sequence
  Synthetic
tcttgtacaggatctccgt

SEQ ID NO: 10585 - DNA, 25 bp, Artificial Sequence
  Synthetic
tgtaggagatgtttttgttttaacc

SEQ ID NO: 10586 - DNA, 23 bp, Artificial Sequence
  Synthetic
ttgaatataaatgattgcactcg

SEQ ID NO: 10587 - DNA, 24 bp, Artificial Sequence
  Synthetic
aaagttctagtgctgtaaatatgc

SEQ ID NO: 10588 - DNA, 23 bp, Artificial Sequence
  Synthetic
agcattacagtttactacattga

SEQ ID NO: 10589 - DNA, 18 bp, Artificial Sequence
  Synthetic
cctgggttggctttgatg

SEQ ID NO: 10590 - DNA, 20 bp, Artificial Sequence
  Synthetic
tctgtctgattgtgttgtgc

SEQ ID NO: 10591 - DNA, 19 bp, Artificial Sequence
  Synthetic
cttaaagctgccatgctct

SEQ ID NO: 10592 - DNA, 21 bp, Artificial Sequence
  Synthetic
aataaacatgcattccacact

SEQ ID NO: 10593 - DNA, 21 bp, Artificial Sequence
  Synthetic
tacaaagcttggagaatgttg

SEQ ID NO: 10594 - DNA, 21 bp, Artificial Sequence
  Synthetic
ggtgtctgcatgtatacagat

SEQ ID NO: 10595 - DNA, 23 bp, Artificial Sequence
  Synthetic
atagctttagatcaagatgtgtt

SEQ ID NO: 10596 - DNA, 23 bp, Artificial Sequence
  Synthetic
agattttcagtttatgctttggt

SEQ ID NO: 10597 - DNA, 23 bp, Artificial Sequence
  Synthetic
gagtacaatgtgagtaaagatgg

SEQ ID NO: 10598 - DNA, 23 bp, Artificial Sequence
  Synthetic
attttccacttacccattttcag

SEQ ID NO: 10599 - DNA, 18 bp, Artificial Sequence
  Synthetic
gattggccattgcaccat

SEQ ID NO: 10600 - DNA, 22 bp, Artificial Sequence
  Synthetic
tatcatctaaagctggcaactc

SEQ ID NO: 10601 - DNA, 25 bp, Artificial Sequence
  Synthetic
cattaccactggttttgatcttaat

SEQ ID NO: 10602 - DNA, 24 bp, Artificial Sequence
  Synthetic
taccaaggttattaaagatcgtgt

SEQ ID NO: 10603 - DNA, 24 bp, Artificial Sequence
  Synthetic
ttatgcatattttacagacactgg

SEQ ID NO: 10604 - DNA, 18 bp, Artificial Sequence
  Synthetic
ctgttcagccaatcgcag

SEQ ID NO: 10605 - DNA, 21 bp, Artificial Sequence
  Synthetic
tactactgcaacaagttgtca

SEQ ID NO: 10606 - DNA, 24 bp, Artificial Sequence
  Synthetic
tcctgatcctattacatttacagg

SEQ ID NO: 10607 - DNA, 25 bp, Artificial Sequence
  Synthetic
ctctacggttttagagactacataa

SEQ ID NO: 10608 - DNA, 20 bp, Artificial Sequence
  Synthetic
cctgtaggtggtttgtatga

SEQ ID NO: 10609 - DNA, 24 bp, Artificial Sequence
  Synthetic
taaagtaaagttatctgatgtcgg

SEQ ID NO: 10610 - DNA, 25 bp, Artificial Sequence
  Synthetic
caacaactctctaatagatttggtg

SEQ ID NO: 10611 - DNA, 24 bp, Artificial Sequence
  Synthetic
cactttagttatgtccctactaag

SEQ ID NO: 10612 - DNA, 19 bp, Artificial Sequence
  Synthetic
gcaccagatttgtcacttg

SEQ ID NO: 10613 - DNA, 21 bp, Artificial Sequence
  Synthetic
gttaaagttcttaaggccacg

SEQ ID NO: 10614 - DNA, 23 bp, Artificial Sequence
  Synthetic
ttttgtgaatagtatcaggttgt

SEQ ID NO: 10615 - DNA, 22 bp, Artificial Sequence
  Synthetic
ttatgttaagtccaaagtcggt

SEQ ID NO: 10616 - DNA, 18 bp, Artificial Sequence
  Synthetic
gtcaactgctgccacgat

SEQ ID NO: 10617 - DNA, 18 bp, Artificial Sequence
  Synthetic
gagcctctagtgcaggat

SEQ ID NO: 10618 - DNA, 18 bp, Artificial Sequence
  Synthetic
gttggccaaagtgcagaa

SEQ ID NO: 10619 - DNA, 22 bp, Artificial Sequence
  Synthetic
ttcttaagaagatggatgagcc

SEQ ID NO: 10620 - DNA, 18 bp, Artificial Sequence
  Synthetic
acctgcttcgcgatacat

SEQ ID NO: 10621 - DNA, 20 bp, Artificial Sequence
  Synthetic
gaaatctcaccattgccttc

SEQ ID NO: 10622 - DNA, 20 bp, Artificial Sequence
  Synthetic
ttccaacactgtgtcaagct

SEQ ID NO: 10623 - DNA, 18 bp, Artificial Sequence
  Synthetic
cttcagtgcctgcttcac

SEQ ID NO: 10624 - DNA, 21 bp, Artificial Sequence
  Synthetic
gaaatctcaccattaccttcc

SEQ ID NO: 10625 - DNA, 19 bp, Artificial Sequence
  Synthetic
gaggcgacactccaccatg

SEQ ID NO: 10626 - DNA, 20 bp, Artificial Sequence
  Synthetic
tgcaacatgagcacacttcc

SEQ ID NO: 10627 - DNA, 18 bp, Artificial Sequence
  Synthetic
gtccatcctggggcccaa

SEQ ID NO: 10628 - DNA, 20 bp, Artificial Sequence
  Synthetic
gtgtatgaggccgatgatgt

SEQ ID NO: 10629 - DNA, 20 bp, Artificial Sequence
  Synthetic
tgtacccaggccatctttca

SEQ ID NO: 10630 - DNA, 20 bp, Artificial Sequence
  Synthetic
actggatgtcctcaaaggct

SEQ ID NO: 10631 - DNA, 19 bp, Artificial Sequence
  Synthetic
ggcactactgatgccaggg

SEQ ID NO: 10632 - DNA, 20 bp, Artificial Sequence
  Synthetic
aaggtgaggatgtttgtggg

SEQ ID NO: 10633 - DNA, 19 bp, Artificial Sequence
  Synthetic
gttttcctccttctggcgg

SEQ ID NO: 10634 - DNA, 20 bp, Artificial Sequence
  Synthetic
tactgagcattggcagatgg

SEQ ID NO: 10635 - DNA, 20 bp, Artificial Sequence
  Synthetic
ttgtgactagcttgactggc

SEQ ID NO: 10636 - DNA, 18 bp, Artificial Sequence
  Synthetic
ggactccacagcgagctt

SEQ ID NO: 10637 - DNA, 20 bp, Artificial Sequence
  Synthetic
tactaaatccatcggtggcg

SEQ ID NO: 10638 - DNA, 20 bp, Artificial Sequence
  Synthetic
acagtacgttgacttcagcc

SEQ ID NO: 10639 - DNA, 20 bp, Artificial Sequence
  Synthetic
agatgcccactttctgtcac

SEQ ID NO: 10640 - DNA, 18 bp, Artificial Sequence
  Synthetic
cggcctactgcttgtcag

SEQ ID NO: 10641 - DNA, 18 bp, Artificial Sequence
  Synthetic
cctagcaggcctctccac

SEQ ID NO: 10642 - DNA, 20 bp, Artificial Sequence
  Synthetic
gaggacatggtcaacctgtt

SEQ ID NO: 10643 - DNA, 18 bp, Artificial Sequence
  Synthetic
gactgggtttgctcggtg

SEQ ID NO: 10644 - DNA, 19 bp, Artificial Sequence
  Synthetic
gccaacagctacgttgagg

SEQ ID NO: 10645 - DNA, 19 bp, Artificial Sequence
  Synthetic
ctccatcagaggcaagctc

SEQ ID NO: 10646 - DNA, 18 bp, Artificial Sequence
  Synthetic
ctgttggaccgctggaaa

SEQ ID NO: 10647 - DNA, 18 bp, Artificial Sequence
  Synthetic
gacccggacttgagttgc

SEQ ID NO: 10648 - DNA, 19 bp, Artificial Sequence
  Synthetic
ctcaccatcgaggaagcgt

SEQ ID NO: 10649 - DNA, 20 bp, Artificial Sequence
  Synthetic
gggttctcatatgacacccg

SEQ ID NO: 10650 - DNA, 20 bp, Artificial Sequence
  Synthetic
tgttacatcaaggccacagc

SEQ ID NO: 10651 - DNA, 25 bp, Artificial Sequence
  Synthetic
cgaaagcaggtcaattatattcaat

SEQ ID NO: 10652 - DNA, 24 bp, Artificial Sequence
  Synthetic
ttatggagtaaaatgaatgatgcc

SEQ ID NO: 10653 - DNA, 20 bp, Artificial Sequence
  Synthetic
ggcacaggatgtaatcatgg

SEQ ID NO: 10654 - DNA, 18 bp, Artificial Sequence
  Synthetic
ccaggaggggaagtgaag

SEQ ID NO: 10655 - DNA, 23 bp, Artificial Sequence
  Synthetic
ttggtggattcacatttaagaga

SEQ ID NO: 10656 - DNA, 24 bp, Artificial Sequence
  Synthetic
ttgtatgataaaagcagttagagg

SEQ ID NO: 10657 - DNA, 18 bp, Artificial Sequence
  Synthetic
gagagggtagtggtgagc

SEQ ID NO: 10658 - DNA, 21 bp, Artificial Sequence
  Synthetic
tggaatttgaaccatttcagt

SEQ ID NO: 10659 - DNA, 20 bp, Artificial Sequence
  Synthetic
cagttctcggaaaggatgct

SEQ ID NO: 10660 - DNA, 20 bp, Artificial Sequence
  Synthetic
tcaatagcacggccttgaac

SEQ ID NO: 10661 - DNA, 19 bp, Artificial Sequence
  Synthetic
ggggtgcaaatgatacgga

SEQ ID NO: 10662 - DNA, 16 bp, Artificial Sequence
  Synthetic
gcacaggctggaagcg

SEQ ID NO: 10663 - DNA, 15 bp, Artificial Sequence
  Synthetic
aagcggaggcggctt

SEQ ID NO: 10664 - DNA, 19 bp, Artificial Sequence
  Synthetic
cgcgatgccgtcatcttac

SEQ ID NO: 10665 - DNA, 17 bp, Artificial Sequence
  Synthetic
gagactgggcgcacaac

SEQ ID NO: 10666 - DNA, 20 bp, Artificial Sequence
  Synthetic
ctgctacccaaaccttcctg

SEQ ID NO: 10667 - DNA, 16 bp, Artificial Sequence
  Synthetic
acacgccgtgggccta

SEQ ID NO: 10668 - DNA, 18 bp, Artificial Sequence
  Synthetic
ggaccggggtgagaacaa

SEQ ID NO: 10669 - DNA, 20 bp, Artificial Sequence
  Synthetic
tcaaggggggaagacatctc

SEQ ID NO: 10670 - DNA, 16 bp, Artificial Sequence
  Synthetic
agggggaagccaggca

SEQ ID NO: 10671 - DNA, 20 bp, Artificial Sequence
  Synthetic
tgtggaagtgtttgatccgc

SEQ ID NO: 10672 - DNA, 20 bp, Artificial Sequence
  Synthetic
gatggaagagtgctctcagc

SEQ ID NO: 10673 - DNA, 17 bp, Artificial Sequence
  Synthetic
gtgccgctaccgccttt

SEQ ID NO: 10674 - DNA, 16 bp, Artificial Sequence
  Synthetic
tagccttcgcctcccg

SEQ ID NO: 10675 - DNA, 18 bp, Artificial Sequence
  Synthetic
ctgccactgtggagctga

SEQ ID NO: 10676 - DNA, 16 bp, Artificial Sequence
  Synthetic
cccccttgcaagccct

SEQ ID NO: 10677 - DNA, 20 bp, Artificial Sequence
  Synthetic
agtggtgattctggactcct

SEQ ID NO: 10678 - DNA, 20 bp, Artificial Sequence
  Synthetic
aaagttttggcagctcctca

SEQ ID NO: 10679 - DNA, 20 bp, Artificial Sequence
  Synthetic
tgacagactgcaagttctgg

SEQ ID NO: 10680 - DNA, 19 bp, Artificial Sequence
  Synthetic
acgaggttttctgcgttca

SEQ ID NO: 10681 - DNA, 16 bp, Artificial Sequence
  Synthetic
cccgcgtggccatcaa

SEQ ID NO: 10682 - DNA, 20 bp, Artificial Sequence
  Synthetic
aacatcatgctcctccaacg

SEQ ID NO: 10683 - DNA, 18 bp, Artificial Sequence
  Synthetic
gcctcagcgcattttcac

SEQ ID NO: 10684 - DNA, 25 bp, Artificial Sequence
  Synthetic
atctagacaataataaatagggagg

SEQ ID NO: 10685 - DNA, 21 bp, Artificial Sequence
  Synthetic
tacgacgcctaaaatattggg

SEQ ID NO: 10686 - DNA, 25 bp, Artificial Sequence
  Synthetic
gtaaaagatatcgaattgagtcttg

SEQ ID NO: 10687 - DNA, 20 bp, Artificial Sequence
  Synthetic
gaaagtttgcacccagtcct

SEQ ID NO: 10688 - DNA, 18 bp, Artificial Sequence
  Synthetic
tgttttgcacagtggcag

SEQ ID NO: 10689 - DNA, 22 bp, Artificial Sequence
  Synthetic
gtgcctttaaaacattcctaca

SEQ ID NO: 10690 - DNA, 22 bp, Artificial Sequence
  Synthetic
cagctcttcacatttaaaaacc

SEQ ID NO: 10691 - DNA, 20 bp, Artificial Sequence
  Synthetic
tgtgctatgtacaatggagg

SEQ ID NO: 10692 - DNA, 18 bp, Artificial Sequence
  Synthetic
gtccgagggaccggaaca

SEQ ID NO: 10693 - DNA, 25 bp, Artificial Sequence
  Synthetic
agatctatagggtgattgtacattc

SEQ ID NO: 10694 - DNA, 18 bp, Artificial Sequence
  Synthetic
catccgccacacagcttt

SEQ ID NO: 10695 - DNA, 22 bp, Artificial Sequence
  Synthetic
aggactccagcattattaattc

SEQ ID NO: 10696 - DNA, 18 bp, Artificial Sequence
  Synthetic
agtggcaagggtattgga

SEQ ID NO: 10697 - DNA, 22 bp, Artificial Sequence
  Synthetic
aacgtgtctcatatttttttgc

SEQ ID NO: 10698 - DNA, 20 bp, Artificial Sequence
  Synthetic
cccctggagcttataacttc

SEQ ID NO: 10699 - DNA, 21 bp, Artificial Sequence
  Synthetic
aagaatatttgaggcacggag

SEQ ID NO: 10700 - DNA, 25 bp, Artificial Sequence
  Synthetic
gtttgtaatgtctatgtatgtgtgt

SEQ ID NO: 10701 - DNA, 19 bp, Artificial Sequence
  Synthetic
gtttgtcgcctgattctga

SEQ ID NO: 10702 - DNA, 18 bp, Artificial Sequence
  Synthetic
atgtgtgggtagcttgga

SEQ ID NO: 10703 - DNA, 20 bp, Artificial Sequence
  Synthetic
cacacacagccaaaaaactg

SEQ ID NO: 10704 - DNA, 19 bp, Artificial Sequence
  Synthetic
ttttaccctccgcctctgt

SEQ ID NO: 10705 - DNA, 20 bp, Artificial Sequence
  Synthetic
gaatcgccaaccaaaagacg

SEQ ID NO: 10706 - DNA, 23 bp, Artificial Sequence
  Synthetic
attacaaatttttggtagtgctg

SEQ ID NO: 10707 - DNA, 23 bp, Artificial Sequence
  Synthetic
cctactgatattattgacccttt

SEQ ID NO: 10708 - DNA, 20 bp, Artificial Sequence
  Synthetic
attacaaacgagaaacccag

SEQ ID NO: 10709 - DNA, 24 bp, Artificial Sequence
  Synthetic
gaaaatgagcaactttttattccc

SEQ ID NO: 10710 - DNA, 18 bp, Artificial Sequence
  Synthetic
atggctttgtggatgcaa

SEQ ID NO: 10711 - DNA, 24 bp, Artificial Sequence
  Synthetic
aaatctctgtataatccagacagg

SEQ ID NO: 10712 - DNA, 19 bp, Artificial Sequence
  Synthetic
caccagtgggagaacattg

SEQ ID NO: 10713 - DNA, 23 bp, Artificial Sequence
  Synthetic
tgttcttttttggaagaaaggaa

SEQ ID NO: 10714 - DNA, 24 bp, Artificial Sequence
  Synthetic
atactcggaacatactattgaact

SEQ ID NO: 10715 - DNA, 21 bp, Artificial Sequence
  Synthetic
gacgttggctaaaattgaact

SEQ ID NO: 10716 - DNA, 22 bp, Artificial Sequence
  Synthetic
taggaactaaaggacaaatgtg

SEQ ID NO: 10717 - DNA, 24 bp, Artificial Sequence
  Synthetic
aatattattccctaaagaagcagg

SEQ ID NO: 10718 - DNA, 25 bp, Artificial Sequence
  Synthetic
actaactgaatctagatctcaatca

SEQ ID NO: 10719 - DNA, 23 bp, Artificial Sequence
  Synthetic
cggaacaatacaaaagattggaa

SEQ ID NO: 10720 - DNA, 25 bp, Artificial Sequence
  Synthetic
ggagagataaattttcttaatcgag

SEQ ID NO: 10721 - DNA, 25 bp, Artificial Sequence
  Synthetic
tcttagtttaataaaaaggactggg

SEQ ID NO: 10722 - DNA, 19 bp, Artificial Sequence
  Synthetic
taatccctcagaagatggc

SEQ ID NO: 10723 - DNA, 25 bp, Artificial Sequence
  Synthetic
tgaggatgaagaaagaaatagatca

SEQ ID NO: 10724 - DNA, 19 bp, Artificial Sequence
  Synthetic
gagtttgagcgattgacgt

SEQ ID NO: 10725 - DNA, 18 bp, Artificial Sequence
  Synthetic
gaagtcagatgagggtgg

SEQ ID NO: 10726 - DNA, 22 bp, Artificial Sequence
  Synthetic
gtggttttgttatgcagtatgg

SEQ ID NO: 10727 - DNA, 25 bp, Artificial Sequence
  Synthetic
gttaaagaaactgctcttattactc

SEQ ID NO: 10728 - DNA, 25 bp, Artificial Sequence
  Synthetic
agaagatgatgttattgagaatgtc

SEQ ID NO: 10729 - DNA, 25 bp, Artificial Sequence
  Synthetic
atggaatgtcatttagtatgtcttc

SEQ ID NO: 10730 - DNA, 23 bp, Artificial Sequence
  Synthetic
ttaacagtatgtaaatggtctgt

SEQ ID NO: 10731 - DNA, 22 bp, Artificial Sequence
  Synthetic
ttaaacaagaaagtcgtgttgg

SEQ ID NO: 10732 - DNA, 25 bp, Artificial Sequence
  Synthetic
tacaaaacctattataaaggctcag

SEQ ID NO: 10733 - DNA, 24 bp, Artificial Sequence
  Synthetic
atttgtagctaatatgttacctgc

SEQ ID NO: 10734 - DNA, 22 bp, Artificial Sequence
  Synthetic
ttttgttaacattgctcatgct

SEQ ID NO: 10735 - DNA, 23 bp, Artificial Sequence
  Synthetic
aatgatttttatgctagtggttg

SEQ ID NO: 10736 - DNA, 23 bp, Artificial Sequence
  Synthetic
attctgccttattgtgtagagtt

SEQ ID NO: 10737 - DNA, 20 bp, Artificial Sequence
  Synthetic
cacactggcactgattttac

SEQ ID NO: 10738 - DNA, 25 bp, Artificial Sequence
  Synthetic
aaagcatgtaatatagctaagtctg

SEQ ID NO: 10739 - DNA, 22 bp, Artificial Sequence
  Synthetic
aattgtgttaaaatgctctgtg

SEQ ID NO: 10740 - DNA, 25 bp, Artificial Sequence
  Synthetic
aattaggccctatttttaatagagc

SEQ ID NO: 10741 - DNA, 20 bp, Artificial Sequence
  Synthetic
ttggtccccttgttagacaa

SEQ ID NO: 10742 - DNA, 23 bp, Artificial Sequence
  Synthetic
tgataaaagtgctggttatccat

SEQ ID NO: 10743 - DNA, 24 bp, Artificial Sequence
  Synthetic
cgtcatcttataaaggatgttgac

SEQ ID NO: 10744 - DNA, 25 bp, Artificial Sequence
  Synthetic
actatgttagttaagatagatggtg

SEQ ID NO: 10745 - DNA, 23 bp, Artificial Sequence
  Synthetic
ttatgaatggtatggtctttggt

SEQ ID NO: 10746 - DNA, 23 bp, Artificial Sequence
  Synthetic
gttttaacatcacattctgtagc

SEQ ID NO: 10747 - DNA, 24 bp, Artificial Sequence
  Synthetic
tactaaagatgaagccattaaacg

SEQ ID NO: 10748 - DNA, 25 bp, Artificial Sequence
  Synthetic
gtatccaataatttctaatgaggtc

SEQ ID NO: 10749 - DNA, 25 bp, Artificial Sequence
  Synthetic
gaactgtttttgaaaatcttaagcc

SEQ ID NO: 10750 - DNA, 23 bp, Artificial Sequence
  Synthetic
tagaaaagcaagaaatggtgttt

SEQ ID NO: 10751 - DNA, 23 bp, Artificial Sequence
  Synthetic
atggtaaacctattaatttgcct

SEQ ID NO: 10752 - DNA, 22 bp, Artificial Sequence
  Synthetic
aatactttttgtccttgtgcta

SEQ ID NO: 10753 - DNA, 21 bp, Artificial Sequence
  Synthetic
tgatagttatcttggttgcgt

SEQ ID NO: 10754 - DNA, 23 bp, Artificial Sequence
  Synthetic
aatttggtgcaattagttcttct

SEQ ID NO: 10755 - DNA, 24 bp, Artificial Sequence
  Synthetic
ccagagaccaataatcttatgtgt

SEQ ID NO: 10756 - DNA, 25 bp, Artificial Sequence
  Synthetic
aaactattaggatgtcttatactcc

SEQ ID NO: 10757 - DNA, 22 bp, Artificial Sequence
  Synthetic
cgctaatcttgttttagccaag

SEQ ID NO: 10758 - DNA, 25 bp, Artificial Sequence
  Synthetic
cttgaagagaatttaaatgcttacg

SEQ ID NO: 10759 - DNA, 20 bp, Artificial Sequence
  Synthetic
aggtactgattcgaaatgga

SEQ ID NO: 10760 - DNA, 18 bp, Artificial Sequence
  Synthetic
agactacactctcgacga

SEQ ID NO: 10761 - DNA, 18 bp, Artificial Sequence
  Synthetic
gagggcaagctttctcaa

SEQ ID NO: 10762 - DNA, 22 bp, Artificial Sequence
  Synthetic
aaattcaaattacctgctgtca

SEQ ID NO: 10763 - DNA, 20 bp, Artificial Sequence
  Synthetic
tgcgagctaactgattcaat

SEQ ID NO: 10764 - DNA, 24 bp, Artificial Sequence
  Synthetic
atatggattcatcataaagggaag

SEQ ID NO: 10765 - DNA, 18 bp, Artificial Sequence
  Synthetic
ttcagtcactccagcaga

SEQ ID NO: 10766 - DNA, 21 bp, Artificial Sequence
  Synthetic
aaacgatcctatgaacagatg

SEQ ID NO: 10767 - DNA, 19 bp, Artificial Sequence
  Synthetic
tgcagcaataaagggagtc

SEQ ID NO: 10768 - DNA, 20 bp, Artificial Sequence
  Synthetic
atgatggatcaggtgcgaga

SEQ ID NO: 10769 - DNA, 21 bp, Artificial Sequence
  Synthetic
atccagcacataaaagtcaat

SEQ ID NO: 10770 - DNA, 21 bp, Artificial Sequence
  Synthetic
gaggaggagcgctataaaatt

SEQ ID NO: 10771 - DNA, 20 bp, Artificial Sequence
  Synthetic
ttctgcctctgtgtctagct

SEQ ID NO: 10772 - DNA, 19 bp, Artificial Sequence
  Synthetic
ccaactcctgaagaagtgg

SEQ ID NO: 10773 - DNA, 20 bp, Artificial Sequence
  Synthetic
gcgactgtatgtgaaagaca

SEQ ID NO: 10774 - DNA, 20 bp, Artificial Sequence
  Synthetic
gtattggtacaggaaggggt

SEQ ID NO: 10775 - DNA, 20 bp, Artificial Sequence
  Synthetic
cacaataacagacaccactg

SEQ ID NO: 10776 - DNA, 23 bp, Artificial Sequence
  Synthetic
gtgtatgaagatattcctttgga

SEQ ID NO: 10777 - DNA, 18 bp, Artificial Sequence
  Synthetic
catcagtagaggctgcac

SEQ ID NO: 10778 - DNA, 25 bp, Artificial Sequence
  Synthetic
attagagatacagaaaatcccaatc

SEQ ID NO: 10779 - DNA, 23 bp, Artificial Sequence
  Synthetic
ttttggagctgctaatttcaaag

SEQ ID NO: 10780 - DNA, 25 bp, Artificial Sequence
  Synthetic
actagacatactgaagaatatgaac

SEQ ID NO: 10781 - DNA, 18 bp, Artificial Sequence
  Synthetic
ttggactgttgatctgca

SEQ ID NO: 10782 - DNA, 18 bp, Artificial Sequence
  Synthetic
gcagcatagtttacccca

SEQ ID NO: 10783 - DNA, 21 bp, Artificial Sequence
  Synthetic
cgacaatgcttcaatccaatg

SEQ ID NO: 10784 - DNA, 18 bp, Artificial Sequence
  Synthetic
gaatcatggcctggacag

SEQ ID NO: 10785 - DNA, 21 bp, Artificial Sequence
  Synthetic
cagggcaagaatcaaaactag

SEQ ID NO: 10786 - DNA, 24 bp, Artificial Sequence
  Synthetic
tacaggacattgaaaatgaagaga

SEQ ID NO: 10787 - DNA, 22 bp, Artificial Sequence
  Synthetic
ctgattcaagctggatagaact

SEQ ID NO: 10788 - DNA, 24 bp, Artificial Sequence
  Synthetic
atttgagaaatgatactgatgtgg

SEQ ID NO: 10789 - DNA, 20 bp, Artificial Sequence
  Synthetic
ttcttcagtctcttcagcag

SEQ ID NO: 10790 - DNA, 23 bp, Artificial Sequence
  Synthetic
tgacaaagacataatggattcca

SEQ ID NO: 10791 - DNA, 18 bp, Artificial Sequence
  Synthetic
ccattgcttccagtcctg

SEQ ID NO: 10792 - DNA, 18 bp, Artificial Sequence
  Synthetic
cctccgtaccaggacatt

SEQ ID NO: 10793 - DNA, 24 bp, Artificial Sequence
  Synthetic
gaaggttaatagatttcctcaagg

SEQ ID NO: 10794 - DNA, 18 bp, Artificial Sequence
  Synthetic
acccggaatgcaaatcag

SEQ ID NO: 10795 - DNA, 24 bp, Artificial Sequence
  Synthetic
gcatgtttaatatgctaagtacgg

SEQ ID NO: 10796 - DNA, 21 bp, Artificial Sequence
  Synthetic
ttttctaccgctatgggtttg

SEQ ID NO: 10797 - DNA, 20 bp, Artificial Sequence
  Synthetic
ttgcaactacacattcatgg

SEQ ID NO: 10798 - DNA, 21 bp, Artificial Sequence
  Synthetic
attactgaaaagggtgtaacc

SEQ ID NO: 10799 - DNA, 18 bp, Artificial Sequence
  Synthetic
gtgcacaagaacagcaag

SEQ ID NO: 10800 - DNA, 21 bp, Artificial Sequence
  Synthetic
cagatacaggttcagacttgg

SEQ ID NO: 10801 - DNA, 18 bp, Artificial Sequence
  Synthetic
ttgagccaccaaaactgc

SEQ ID NO: 10802 - DNA, 22 bp, Artificial Sequence
  Synthetic
atacaaatcctgcaacagatga

SEQ ID NO: 10803 - DNA, 25 bp, Artificial Sequence
  Synthetic
gatcaaatagactattggaagtgtg

SEQ ID NO: 10804 - DNA, 23 bp, Artificial Sequence
  Synthetic
attgaatgtgtaaatacctgtga

SEQ ID NO: 10805 - DNA, 19 bp, Artificial Sequence
  Synthetic
cgtaccggctatattccat

SEQ ID NO: 10806 - DNA, 23 bp, Artificial Sequence
  Synthetic
aagtagcactagttttaccaatc

SEQ ID NO: 10807 - DNA, 21 bp, Artificial Sequence
  Synthetic
ttaccaatcctgcatatgagc

SEQ ID NO: 10808 - DNA, 25 bp, Artificial Sequence
  Synthetic
tggacatccatactataaagttacc

SEQ ID NO: 10809 - DNA, 23 bp, Artificial Sequence
  Synthetic
caaattggatgacacagaaaatt

SEQ ID NO: 10810 - DNA, 24 bp, Artificial Sequence
  Synthetic
gtactttgcaggataataaaagtg

SEQ ID NO: 10811 - DNA, 25 bp, Artificial Sequence
  Synthetic
aaagggctctgtactataaattcat

SEQ ID NO: 10812 - DNA, 18 bp, Artificial Sequence
  Synthetic
cagggtggaatgcattgg

SEQ ID NO: 10813 - DNA, 23 bp, Artificial Sequence
  Synthetic
ggaaaatattgaaatgggagtct

SEQ ID NO: 10814 - DNA, 25 bp, Artificial Sequence
  Synthetic
ccttatccaggtaataataacaatg

SEQ ID NO: 10815 - DNA, 23 bp, Artificial Sequence
  Synthetic
atggagagaataaaagaactgag

SEQ ID NO: 10816 - DNA, 18 bp, Artificial Sequence
  Synthetic
ctggatcagaccgagtga

SEQ ID NO: 10817 - DNA, 18 bp, Artificial Sequence
  Synthetic
tgacatcagagtcacagc

SEQ ID NO: 10818 - DNA, 21 bp, Artificial Sequence
  Synthetic
agaaatgatgatgttgaccaa

SEQ ID NO: 10819 - DNA, 18 bp, Artificial Sequence
  Synthetic
gcggatcatcagtcaaga

SEQ ID NO: 10820 - DNA, 23 bp, Artificial Sequence
  Synthetic
ttaagggttagagatcaaagagg

SEQ ID NO: 10821 - DNA, 19 bp, Artificial Sequence
  Synthetic
cggtacagtggattcgtaa

SEQ ID NO: 10822 - DNA, 19 bp, Artificial Sequence
  Synthetic
tgcattgactgaagatcca

SEQ ID NO: 10823 - DNA, 22 bp, Artificial Sequence
  Synthetic
caacaatcatctgactagctat

SEQ ID NO: 10824 - DNA, 21 bp, Artificial Sequence
  Synthetic
agaatctttggtgttacctgc

SEQ ID NO: 10825 - DNA, 20 bp, Artificial Sequence
  Synthetic
cgaaagtttatagctagccc

SEQ ID NO: 10826 - DNA, 18 bp, Artificial Sequence
  Synthetic
tcgactacgaggaggaga

SEQ ID NO: 10827 - DNA, 22 bp, Artificial Sequence
  Synthetic
gcagtttagtttactttggtgg

SEQ ID NO: 10828 - DNA, 18 bp, Artificial Sequence
  Synthetic
tgtaccattggcagaagg

SEQ ID NO: 10829 - DNA, 20 bp, Artificial Sequence
  Synthetic
ttcccgcctagttcaatttg

SEQ ID NO: 10830 - DNA, 23 bp, Artificial Sequence
  Synthetic
agtgaaataccaccaatagaaga

SEQ ID NO: 10831 - DNA, 21 bp, Artificial Sequence
  Synthetic
cacaacgtttagtttggagac

SEQ ID NO: 10832 - DNA, 19 bp, Artificial Sequence
  Synthetic
tgcccgccaattcaattag

SEQ ID NO: 10833 - DNA, 25 bp, Artificial Sequence
  Synthetic
catttcaatgtctttatctgtttgg

SEQ ID NO: 10834 - DNA, 18 bp, Artificial Sequence
  Synthetic
gagcaggaagagcaggat

SEQ ID NO: 10835 - DNA, 19 bp, Artificial Sequence
  Synthetic
acagtggcttaggacatga

SEQ ID NO: 10836 - DNA, 23 bp, Artificial Sequence
  Synthetic
ttatgcttgtttgagttttcaag

SEQ ID NO: 10837 - DNA, 24 bp, Artificial Sequence
  Synthetic
gctaatagtaaaagtcagttttgg

SEQ ID NO: 10838 - DNA, 18 bp, Artificial Sequence
  Synthetic
acgctcagacctggaatc

SEQ ID NO: 10839 - DNA, 20 bp, Artificial Sequence
  Synthetic
cgaggaagaaaaagctatgc

SEQ ID NO: 10840 - DNA, 24 bp, Artificial Sequence
  Synthetic
cccccaatattattagttaaaggg

SEQ ID NO: 10841 - DNA, 19 bp, Artificial Sequence
  Synthetic
tggattgccagtgtggttt

SEQ ID NO: 10842 - DNA, 18 bp, Artificial Sequence
  Synthetic
ccactgcatcaacaccta

SEQ ID NO: 10843 - DNA, 22 bp, Artificial Sequence
  Synthetic
gtaggcctactttatctgaaac

SEQ ID NO: 10844 - DNA, 21 bp, Artificial Sequence
  Synthetic
ccttctgtggtagtagattcc

SEQ ID NO: 10845 - DNA, 23 bp, Artificial Sequence
  Synthetic
agttatgttaaaacaggaaagga

SEQ ID NO: 10846 - DNA, 21 bp, Artificial Sequence
  Synthetic
agggccctaataatagtgtgt

SEQ ID NO: 10847 - DNA, 21 bp, Artificial Sequence
  Synthetic
atctttttggaaggtggatct

SEQ ID NO: 10848 - DNA, 23 bp, Artificial Sequence
  Synthetic
ccaactttcaggtatgtactttg

SEQ ID NO: 10849 - DNA, 21 bp, Artificial Sequence
  Synthetic
tgtaaatttggaggagttggt

SEQ ID NO: 10850 - DNA, 19 bp, Artificial Sequence
  Synthetic
gcttcaagaagtgttcctg

SEQ ID NO: 10851 - DNA, 21 bp, Artificial Sequence
  Synthetic
gctattttagcgctaaaacga

SEQ ID NO: 10852 - DNA, 24 bp, Artificial Sequence
  Synthetic
atttcgcagtactaatagaaaagc

SEQ ID NO: 10853 - DNA, 25 bp, Artificial Sequence
  Synthetic
tggactataatggactttatttcac

SEQ ID NO: 10854 - DNA, 19 bp, Artificial Sequence
  Synthetic
cgactactaccgacggagg

SEQ ID NO: 10855 - DNA, 25 bp, Artificial Sequence
  Synthetic
gcaagtgaaattgatatagtttcag

SEQ ID NO: 10856 - DNA, 23 bp, Artificial Sequence
  Synthetic
agttttggagaagaaatagagtt

SEQ ID NO: 10857 - DNA, 19 bp, Artificial Sequence
  Synthetic
caagatttgcaagaggtgg

SEQ ID NO: 10858 - DNA, 24 bp, Artificial Sequence
  Synthetic
ttaactgaaactacaaatgaaggc

SEQ ID NO: 10859 - DNA, 25 bp, Artificial Sequence
  Synthetic
attttgattcctaatgttccagatg

SEQ ID NO: 10860 - DNA, 25 bp, Artificial Sequence
  Synthetic
gtggttcaaataatattactgtacc

SEQ ID NO: 10861 - DNA, 23 bp, Artificial Sequence
  Synthetic
atatggagatacagaaaatcctg

SEQ ID NO: 10862 - DNA, 18 bp, Artificial Sequence
  Synthetic
tgcacatcagcaagtgtc

SEQ ID NO: 10863 - DNA, 18 bp, Artificial Sequence
  Synthetic
ggcaaggccttccacatg

SEQ ID NO: 10864 - DNA, 17 bp, Artificial Sequence
  Synthetic
agaccctgcgctccatg

SEQ ID NO: 10865 - DNA, 21 bp, Artificial Sequence
  Synthetic
ccctacaacacaaaacaaact

SEQ ID NO: 10866 - DNA, 16 bp, Artificial Sequence
  Synthetic
accccagtcccgtcca

SEQ ID NO: 10867 - DNA, 17 bp, Artificial Sequence
  Synthetic
tggggccaccttcatca

SEQ ID NO: 10868 - DNA, 20 bp, Artificial Sequence
  Synthetic
cttctacctctccctagccc

SEQ ID NO: 10869 - DNA, 18 bp, Artificial Sequence
  Synthetic
gtcagctgaccgatgctc

SEQ ID NO: 10870 - DNA, 18 bp, Artificial Sequence
  Synthetic
acccaatagcatgacagc

SEQ ID NO: 10871 - DNA, 17 bp, Artificial Sequence
  Synthetic
ggacaccgacttcacgc

SEQ ID NO: 10872 - DNA, 20 bp, Artificial Sequence
  Synthetic
tcagaagctgagaccgaaga

SEQ ID NO: 10873 - DNA, 16 bp, Artificial Sequence
  Synthetic
cgggcctggactcaca

SEQ ID NO: 10874 - DNA, 18 bp, Artificial Sequence
  Synthetic
gccgggatgttttcgtgg

SEQ ID NO: 10875 - DNA, 20 bp, Artificial Sequence
  Synthetic
agaatggccatagggtgggt

SEQ ID NO: 10876 - DNA, 18 bp, Artificial Sequence
  Synthetic
cggtctgggctctcggaa

SEQ ID NO: 10877 - DNA, 18 bp, Artificial Sequence
  Synthetic
agcctgtaggtgaggacc

SEQ ID NO: 10878 - DNA, 20 bp, Artificial Sequence
  Synthetic
aaagttgtggtagacgggga

SEQ ID NO: 10879 - DNA, 18 bp, Artificial Sequence
  Synthetic
gagttcatcgtcgggggc

SEQ ID NO: 10880 - DNA, 16 bp, Artificial Sequence
  Synthetic
agcagggaggccagca

SEQ ID NO: 10881 - DNA, 16 bp, Artificial Sequence
  Synthetic
tcggccagctggggaa

SEQ ID NO: 10882 - DNA, 20 bp, Artificial Sequence
  Synthetic
agctcttgaccaggtagagg

SEQ ID NO: 10883 - DNA, 17 bp, Artificial Sequence
  Synthetic
ggaggatgcggaatggc

SEQ ID NO: 10884 - DNA, 18 bp, Artificial Sequence
  Synthetic
cgtctggaggtccgtgga

SEQ ID NO: 10885 - DNA, 16 bp, Artificial Sequence
  Synthetic
gtgtgctgctccacgc

SEQ ID NO: 10886 - DNA, 19 bp, Artificial Sequence
  Synthetic
cgggtctccatcaagtccc

SEQ ID NO: 10887 - DNA, 18 bp, Artificial Sequence
  Synthetic
tggccacctgcaatctgg

SEQ ID NO: 10888 - DNA, 19 bp, Artificial Sequence
  Synthetic
gggaggaacagaatgagcg

SEQ ID NO: 10889 - DNA, 17 bp, Artificial Sequence
  Synthetic
aaggctcaggacgtggg

SEQ ID NO: 10890 - DNA, 19 bp, Artificial Sequence
  Synthetic
cctacttgggagagtccgg

SEQ ID NO: 10891 - DNA, 17 bp, Artificial Sequence
  Synthetic
agagggccctggtgaga

SEQ ID NO: 10892 - DNA, 18 bp, Artificial Sequence
  Synthetic
ctcgtgtgcaaagtgggc

SEQ ID NO: 10893 - DNA, 19 bp, Artificial Sequence
  Synthetic
taagcagccgtgactagca

SEQ ID NO: 10894 - DNA, 19 bp, Artificial Sequence
  Synthetic
caggtgaagctgcagttcc

SEQ ID NO: 10895 - DNA, 16 bp, Artificial Sequence
  Synthetic
gtgcctgggcgcaaga

SEQ ID NO: 10896 - DNA, 18 bp, Artificial Sequence
  Synthetic
gacccttgtcctcctcca

SEQ ID NO: 10897 - DNA, 17 bp, Artificial Sequence
  Synthetic
tggaagacatggccgcc

SEQ ID NO: 10898 - DNA, 16 bp, Artificial Sequence
  Synthetic
tgctgaggtggggctg

SEQ ID NO: 10899 - DNA, 22 bp, Artificial Sequence
  Synthetic
tggccagtcttaatttattgtc

SEQ ID NO: 10900 - DNA, 19 bp, Artificial Sequence
  Synthetic
ttgtgcttcgtgatggcag

SEQ ID NO: 10901 - DNA, 16 bp, Artificial Sequence
  Synthetic
gcagtcggcgctttgg

SEQ ID NO: 10902 - DNA, 18 bp, Artificial Sequence
  Synthetic
gaagcgactacacagccg

SEQ ID NO: 10903 - DNA, 20 bp, Artificial Sequence
  Synthetic
ataaccatggacgaggacgg

SEQ ID NO: 10904 - DNA, 18 bp, Artificial Sequence
  Synthetic
ggtcgaggaggcagtgga

SEQ ID NO: 10905 - DNA, 19 bp, Artificial Sequence
  Synthetic
catagtcacggatgctgca

SEQ ID NO: 10906 - DNA, 19 bp, Artificial Sequence
  Synthetic
ccacgatcacattggtggt

SEQ ID NO: 10907 - DNA, 16 bp, Artificial Sequence
  Synthetic
ggcgtccgtagagcga

SEQ ID NO: 10908 - DNA, 18 bp, Artificial Sequence
  Synthetic
gaccgggggagatcatgg

SEQ ID NO: 10909 - DNA, 17 bp, Artificial Sequence
  Synthetic
ttggtccagggtccagg

SEQ ID NO: 10910 - DNA, 19 bp, Artificial Sequence
  Synthetic
tctcacctgtgctagtggc

SEQ ID NO: 10911 - DNA, 18 bp, Artificial Sequence
  Synthetic
catctcggacccgaagcc

SEQ ID NO: 10912 - DNA, 20 bp, Artificial Sequence
  Synthetic
tggtgtataaaccgcagtgg

SEQ ID NO: 10913 - DNA, 19 bp, Artificial Sequence
  Synthetic
cagtgccagttccagacac

SEQ ID NO: 10914 - DNA, 16 bp, Artificial Sequence
  Synthetic
tgcccgtccgatgtgg

SEQ ID NO: 10915 - DNA, 16 bp, Artificial Sequence
  Synthetic
gcagcaaacacgcggc

SEQ ID NO: 10916 - DNA, 18 bp, Artificial Sequence
  Synthetic
cgctggtcctgtgtgtct

SEQ ID NO: 10917 - DNA, 16 bp, Artificial Sequence
  Synthetic
tcctcgctgagccagg

SEQ ID NO: 10918 - DNA, 16 bp, Artificial Sequence
  Synthetic
tcgccgccgtgactca

SEQ ID NO: 10919 - DNA, 18 bp, Artificial Sequence
  Synthetic
atgcagggaatgagcggt

SEQ ID NO: 10920 - DNA, 18 bp, Artificial Sequence
  Synthetic
ctcggagaaggcaaaggc

SEQ ID NO: 10921 - DNA, 18 bp, Artificial Sequence
  Synthetic
ggaaggtcaagagctggc

SEQ ID NO: 10922 - DNA, 20 bp, Artificial Sequence
  Synthetic
agcctagtcagagagaaccg

SEQ ID NO: 10923 - DNA, 16 bp, Artificial Sequence
  Synthetic
gccgtgcacctgccat

SEQ ID NO: 10924 - DNA, 20 bp, Artificial Sequence
  Synthetic
agactcctgcctgaatcaga

SEQ ID NO: 10925 - DNA, 23 bp, Artificial Sequence
  Synthetic
caaaagcaataaagtacaggatt

SEQ ID NO: 10926 - DNA, 17 bp, Artificial Sequence
  Synthetic
ctctagggccgagcaca

SEQ ID NO: 10927 - DNA, 18 bp, Artificial Sequence
  Synthetic
gagtttccagccctgggc

SEQ ID NO: 10928 - DNA, 17 bp, Artificial Sequence
  Synthetic
cgatggacgctcacacc

SEQ ID NO: 10929 - DNA, 16 bp, Artificial Sequence
  Synthetic
ggagcagccgggaact

SEQ ID NO: 10930 - DNA, 19 bp, Artificial Sequence
  Synthetic
gtggcatcctaaggaggga

SEQ ID NO: 10931 - DNA, 17 bp, Artificial Sequence
  Synthetic
ggcttgtcatgccgctg

SEQ ID NO: 10932 - DNA, 18 bp, Artificial Sequence
  Synthetic
tcctcggccatctccgtc

SEQ ID NO: 10933 - DNA, 20 bp, Artificial Sequence
  Synthetic
atgtctatggggatgaggcc

SEQ ID NO: 10934 - DNA, 16 bp, Artificial Sequence
  Synthetic
gggcttccgtgggtgt

SEQ ID NO: 10935 - DNA, 16 bp, Artificial Sequence
  Synthetic
tcgctcggctcgatgc

SEQ ID NO: 10936 - DNA, 16 bp, Artificial Sequence
  Synthetic
gcaggtgctccgagct

SEQ ID NO: 10937 - DNA, 18 bp, Artificial Sequence
  Synthetic
tcagcctccaacaggtgc

SEQ ID NO: 10938 - DNA, 17 bp, Artificial Sequence
  Synthetic
gcctctggaccctcaca

SEQ ID NO: 10939 - DNA, 16 bp, Artificial Sequence
  Synthetic
gcacgccctctgggaa

SEQ ID NO: 10940 - DNA, 16 bp, Artificial Sequence
  Synthetic
agttggggtcgggcct

SEQ ID NO: 10941 - DNA, 16 bp, Artificial Sequence
  Synthetic
agtcaggctggccagg

SEQ ID NO: 10942 - DNA, 19 bp, Artificial Sequence
  Synthetic
tgtgtagcacagcaccacc

SEQ ID NO: 10943 - DNA, 16 bp, Artificial Sequence
  Synthetic
gcagaggaccagggct

SEQ ID NO: 10944 - DNA, 16 bp, Artificial Sequence
  Synthetic
gtgacgaagggcccca

SEQ ID NO: 10945 - DNA, 20 bp, Artificial Sequence
  Synthetic
tgaaagttgtgtggagaagt

SEQ ID NO: 10946 - DNA, 18 bp, Artificial Sequence
  Synthetic
ttggaaaccatgcgaggc

SEQ ID NO: 10947 - DNA, 18 bp, Artificial Sequence
  Synthetic
cagcacacacaggaacaa

SEQ ID NO: 10948 - DNA, 22 bp, Artificial Sequence
  Synthetic
tggggagtggttatattaatgc

SEQ ID NO: 10949 - DNA, 23 bp, Artificial Sequence
  Synthetic
acagatgaaagtatattggcata

SEQ ID NO: 10950 - DNA, 23 bp, Artificial Sequence
  Synthetic
taaagggtataccaaagaaaagc

SEQ ID NO: 10951 - DNA, 18 bp, Artificial Sequence
  Synthetic
tttagatgcgtgccagga

SEQ ID NO: 10952 - DNA, 23 bp, Artificial Sequence
  Synthetic
taaagacattacttaacagtccc

SEQ ID NO: 10953 - DNA, 20 bp, Artificial Sequence
  Synthetic
atatggggacacaggcatct

SEQ ID NO: 10954 - DNA, 21 bp, Artificial Sequence
  Synthetic
caacatttgtaacattgtggc

SEQ ID NO: 10955 - DNA, 22 bp, Artificial Sequence
  Synthetic
tttttgttactgtgtttcttgg

SEQ ID NO: 10956 - DNA, 20 bp, Artificial Sequence
  Synthetic
gcacacaaaatgttacagca

SEQ ID NO: 10957 - DNA, 19 bp, Artificial Sequence
  Synthetic
caccgacgactatgttacc

SEQ ID NO: 10958 - DNA, 18 bp, Artificial Sequence
  Synthetic
aagggtcttgaggtaggc

SEQ ID NO: 10959 - DNA, 22 bp, Artificial Sequence
  Synthetic
atacaggatggtgatatggtag

SEQ ID NO: 10960 - DNA, 18 bp, Artificial Sequence
  Synthetic
tgcttcccctacaagctc

SEQ ID NO: 10961 - DNA, 22 bp, Artificial Sequence
  Synthetic
tttaacagctgaaattatggcc

SEQ ID NO: 10962 - DNA, 19 bp, Artificial Sequence
  Synthetic
ccctggcttcctgtatgca

SEQ ID NO: 10963 - DNA, 21 bp, Artificial Sequence
  Synthetic
catatcctttccaacacaggt

SEQ ID NO: 10964 - DNA, 20 bp, Artificial Sequence
  Synthetic
gccacaagctacattagacc

SEQ ID NO: 10965 - DNA, 24 bp, Artificial Sequence
  Synthetic
gaaagcttattgtagaaagtgtgt

SEQ ID NO: 10966 - DNA, 25 bp, Artificial Sequence
  Synthetic
gtatcagatttaattgatgatgtgg

SEQ ID NO: 10967 - DNA, 23 bp, Artificial Sequence
  Synthetic
caaaacattactacaaacgcatg

SEQ ID NO: 10968 - DNA, 19 bp, Artificial Sequence
  Synthetic
actgaaaatgcaaacgcag

SEQ ID NO: 10969 - DNA, 25 bp, Artificial Sequence
  Synthetic
agctatacaaatacaacttttggtc

SEQ ID NO: 10970 - DNA, 19 bp, Artificial Sequence
  Synthetic
gccgaagaatcacacagga

SEQ ID NO: 10971 - DNA, 23 bp, Artificial Sequence
  Synthetic
actcttgcagatattttactgaa

SEQ ID NO: 10972 - DNA, 24 bp, Artificial Sequence
  Synthetic
actatgagatattgacaaccacag

SEQ ID NO: 10973 - DNA, 25 bp, Artificial Sequence
  Synthetic
ctagatcgcccaatatatagtgaaa

SEQ ID NO: 10974 - DNA, 25 bp, Artificial Sequence
  Synthetic
aactactacatatccagatattcca

SEQ ID NO: 10975 - DNA, 22 bp, Artificial Sequence
  Synthetic
ccatccgttgtttaataaagtg

SEQ ID NO: 10976 - DNA, 24 bp, Artificial Sequence
  Synthetic
ctcagagtattgaggataactaca

SEQ ID NO: 10977 - DNA, 18 bp, Artificial Sequence
  Synthetic
ggagactactgcccaaga

SEQ ID NO: 10978 - DNA, 20 bp, Artificial Sequence
  Synthetic
gctacctgtgccataaacca

SEQ ID NO: 10979 - DNA, 18 bp, Artificial Sequence
  Synthetic
gaggacggtgagcaacct

SEQ ID NO: 10980 - DNA, 18 bp, Artificial Sequence
  Synthetic
gccacagtggacagaacc

SEQ ID NO: 10981 - DNA, 20 bp, Artificial Sequence
  Synthetic
ggcagaagctcacaaaaagc

SEQ ID NO: 10982 - DNA, 19 bp, Artificial Sequence
  Synthetic
tggagctagcaagacagtt

SEQ ID NO: 10983 - DNA, 22 bp, Artificial Sequence
  Synthetic
caacatatgctcatagaacctc

SEQ ID NO: 10984 - DNA, 18 bp, Artificial Sequence
  Synthetic
ggcattcctagcaagcaa

SEQ ID NO: 10985 - DNA, 20 bp, Artificial Sequence
  Synthetic
atatatggacctgcagacac

SEQ ID NO: 10986 - DNA, 22 bp, Artificial Sequence
  Synthetic
atgacaacaaataccaatccct

SEQ ID NO: 10987 - DNA, 19 bp, Artificial Sequence
  Synthetic
aaaaagggctacaccgtag

SEQ ID NO: 10988 - DNA, 20 bp, Artificial Sequence
  Synthetic
tactgaccccccatacaccg

SEQ ID NO: 10989 - DNA, 23 bp, Artificial Sequence
  Synthetic
ggtgatccaaacaaattaaagtg

SEQ ID NO: 10990 - DNA, 20 bp, Artificial Sequence
  Synthetic
ggaacgttaagggacatctg

SEQ ID NO: 10991 - DNA, 24 bp, Artificial Sequence
  Synthetic
tgctgctcaattgtatatattcct

SEQ ID NO: 10992 - DNA, 18 bp, Artificial Sequence
  Synthetic
tggggtagcttgggtgtc

SEQ ID NO: 10993 - DNA, 18 bp, Artificial Sequence
  Synthetic
gttgtacagcagggcata

SEQ ID NO: 10994 - DNA, 25 bp, Artificial Sequence
  Synthetic
caaacatatattattatgcaggcag

SEQ ID NO: 10995 - DNA, 18 bp, Artificial Sequence
  Synthetic
gttgtacaaccgcctgta

SEQ ID NO: 10996 - DNA, 20 bp, Artificial Sequence
  Synthetic
cgttgcaaaccaataagtct

SEQ ID NO: 10997 - DNA, 18 bp, Artificial Sequence
  Synthetic
cctagtgggtccatggtt

SEQ ID NO: 10998 - DNA, 21 bp, Artificial Sequence
  Synthetic
cctctacaaaacgtaaacggt

SEQ ID NO: 10999 - DNA, 18 bp, Artificial Sequence
  Synthetic
ggttgcgccttgtgagtc

SEQ ID NO: 11000 - DNA, 20 bp, Artificial Sequence
  Synthetic
ccctaataggggcgacactc

SEQ ID NO: 11001 - DNA, 20 bp, Artificial Sequence
  Synthetic
gcaccatgagcacaaatcct

SEQ ID NO: 11002 - DNA, 19 bp, Artificial Sequence
  Synthetic
caatgacccccggcatagg

SEQ ID NO: 11003 - DNA, 19 bp, Artificial Sequence
  Synthetic
gcattacctggcagctcca

SEQ ID NO: 11004 - DNA, 20 bp, Artificial Sequence
  Synthetic
atgatgatgaactggtcgcc

SEQ ID NO: 11005 - DNA, 19 bp, Artificial Sequence
  Synthetic
gccctgaactgcaatgact

SEQ ID NO: 11006 - DNA, 20 bp, Artificial Sequence
  Synthetic
attgaacagcactcgaccac

SEQ ID NO: 11007 - DNA, 18 bp, Artificial Sequence
  Synthetic
ctcacggctgcatgcaat

SEQ ID NO: 11008 - DNA, 20 bp, Artificial Sequence
  Synthetic
cagcactagagaagctggtc

SEQ ID NO: 11009 - DNA, 20 bp, Artificial Sequence
  Synthetic
ccgtgatggcatcatatggg

SEQ ID NO: 11010 - DNA, 19 bp, Artificial Sequence
  Synthetic
gtcattgtctggggagcgg

SEQ ID NO: 11011 - DNA, 19 bp, Artificial Sequence
  Synthetic
tccttcctcggaacatcca

SEQ ID NO: 11012 - DNA, 18 bp, Artificial Sequence
  Synthetic
gggcgtggctaagtccat

SEQ ID NO: 11013 - DNA, 18 bp, Artificial Sequence
  Synthetic
cgcccatcacgtactcca

SEQ ID NO: 11014 - DNA, 20 bp, Artificial Sequence
  Synthetic
aaaaagtgtgacgagctcgc

SEQ ID NO: 11015 - DNA, 20 bp, Artificial Sequence
  Synthetic
tatgtttccactggtgagcg

SEQ ID NO: 11016 - DNA, 20 bp, Artificial Sequence
  Synthetic
tgtttgactcgactcaagcc

SEQ ID NO: 11017 - DNA, 18 bp, Artificial Sequence
  Synthetic
gggcggctctcattgaag

SEQ ID NO: 11018 - DNA, 19 bp, Artificial Sequence
  Synthetic
cagtggcctagtgggagct

SEQ ID NO: 11019 - DNA, 18 bp, Artificial Sequence
  Synthetic
caatgtccgcttgggctc

SEQ ID NO: 11020 - DNA, 19 bp, Artificial Sequence
  Synthetic
tcgttctgcgttgggctta

SEQ ID NO: 11021 - DNA, 20 bp, Artificial Sequence
  Synthetic
acccaatggtcgaagaaagg

SEQ ID NO: 11022 - DNA, 16 bp, Artificial Sequence
  Synthetic
cggcagtcagacgcct

SEQ ID NO: 11023 - DNA, 20 bp, Artificial Sequence
  Synthetic
acaaagagcgcctcactaag

SEQ ID NO: 11024 - DNA, 18 bp, Artificial Sequence
  Synthetic
caaggggggcaagaaagc

SEQ ID NO: 11025 - DNA, 18 bp, Artificial Sequence
  Synthetic
ggccaaacctgcgggtac

SEQ ID NO: 11026 - DNA, 20 bp, Artificial Sequence
  Synthetic
ccccagaccggagtatgatc

SEQ ID NO: 11027 - DNA, 20 bp, Artificial Sequence
  Synthetic
aaggttacatgggcttgacg

SEQ ID NO: 11028 - DNA, 19 bp, Artificial Sequence
  Synthetic
ctcaacggtctgctgatgc

SEQ ID NO: 11029 - DNA, 19 bp, Artificial Sequence
  Synthetic
ggcggtgatttgttcgtcg

SEQ ID NO: 11030 - DNA, 18 bp, Artificial Sequence
  Synthetic
gcgcggaggttttgtacg

SEQ ID NO: 11031 - DNA, 17 bp, Artificial Sequence
  Synthetic
ccagcaggctcagttcg

SEQ ID NO: 11032 - DNA, 18 bp, Artificial Sequence
  Synthetic
gattccaaacgcggtgca

SEQ ID NO: 11033 - DNA, 16 bp, Artificial Sequence
  Synthetic
ggtcaacagcggcgac

SEQ ID NO: 11034 - DNA, 19 bp, Artificial Sequence
  Synthetic
cgagctggtacttcttccg

SEQ ID NO: 11035 - DNA, 16 bp, Artificial Sequence
  Synthetic
caggctggccgacagt

SEQ ID NO: 11036 - DNA, 18 bp, Artificial Sequence
  Synthetic
ccaagtcggctacgcaat

SEQ ID NO: 11037 - DNA, 17 bp, Artificial Sequence
  Synthetic
gttcgggtacgctgtcg

SEQ ID NO: 11038 - DNA, 19 bp, Artificial Sequence
  Synthetic
cgattaaatcgtgctcgcg

SEQ ID NO: 11039 - DNA, 20 bp, Artificial Sequence
  Synthetic
ttttgatgttttggtcgcgc

SEQ ID NO: 11040 - DNA, 20 bp, Artificial Sequence
  Synthetic
aataaaactactgcgccgca

SEQ ID NO: 11041 - DNA, 15 bp, Artificial Sequence
  Synthetic
gcgattgcgtgccga

SEQ ID NO: 11042 - DNA, 17 bp, Artificial Sequence
  Synthetic
ggaacgggtgcgtttcc

SEQ ID NO: 11043 - DNA, 20 bp, Artificial Sequence
  Synthetic
tcatatcggtcagcggtact

SEQ ID NO: 11044 - DNA, 17 bp, Artificial Sequence
  Synthetic
tggtgaaatcgctggcg

SEQ ID NO: 11045 - DNA, 18 bp, Artificial Sequence
  Synthetic
cttggtcgtttccacgct

SEQ ID NO: 11046 - DNA, 17 bp, Artificial Sequence
  Synthetic
cggcaggctttcctcga

SEQ ID NO: 11047 - DNA, 16 bp, Artificial Sequence
  Synthetic
tctgcggcggctttcc

SEQ ID NO: 11048 - DNA, 16 bp, Artificial Sequence
  Synthetic
cctgtccgagcgaggt

SEQ ID NO: 11049 - DNA, 16 bp, Artificial Sequence
  Synthetic
cggcggcggttttcac

SEQ ID NO: 11050 - DNA, 16 bp, Artificial Sequence
  Synthetic
ggggttgcgggtgtgt

SEQ ID NO: 11051 - DNA, 16 bp, Artificial Sequence
  Synthetic
gtgaggctgggcggat

SEQ ID NO: 11052 - DNA, 16 bp, Artificial Sequence
  Synthetic
gcctgagaagggcgga

SEQ ID NO: 11053 - DNA, 16 bp, Artificial Sequence
  Synthetic
gttgccgagccagcga

SEQ ID NO: 11054 - DNA, 20 bp, Artificial Sequence
  Synthetic
gaaaaactatctgccgctgc

SEQ ID NO: 11055 - DNA, 17 bp, Artificial Sequence
  Synthetic
agtcgtcgaagccgtgc

SEQ ID NO: 11056 - DNA, 19 bp, Artificial Sequence
  Synthetic
gccagatttgttcggtggg

SEQ ID NO: 11057 - DNA, 16 bp, Artificial Sequence
  Synthetic
atgcgccgtcagagcc

SEQ ID NO: 11058 - DNA, 16 bp, Artificial Sequence
  Synthetic
cgtccgcgcaggttac

SEQ ID NO: 11059 - DNA, 20 bp, Artificial Sequence
  Synthetic
ggggacgacttctttttcca

SEQ ID NO: 11060 - DNA, 18 bp, Artificial Sequence
  Synthetic
ccaatgcgttggcgagtt

SEQ ID NO: 11061 - DNA, 20 bp, Artificial Sequence
  Synthetic
cgctttttcaacggtggcat

SEQ ID NO: 11062 - DNA, 18 bp, Artificial Sequence
  Synthetic
gtgccgatttccgtgtct

SEQ ID NO: 11063 - DNA, 17 bp, Artificial Sequence
  Synthetic
tgttcgggcgttcgtct

SEQ ID NO: 11064 - DNA, 17 bp, Artificial Sequence
  Synthetic
ttcctcgccgcattgtg

SEQ ID NO: 11065 - DNA, 18 bp, Artificial Sequence
  Synthetic
gcgccgtttaccgctatg

SEQ ID NO: 11066 - DNA, 18 bp, Artificial Sequence
  Synthetic
cctgctgcccgtattggc

SEQ ID NO: 11067 - DNA, 20 bp, Artificial Sequence
  Synthetic
taccgagttcgcctattccc

SEQ ID NO: 11068 - DNA, 16 bp, Artificial Sequence
  Synthetic
gattgcccgtcgtggc

SEQ ID NO: 11069 - DNA, 18 bp, Artificial Sequence
  Synthetic
cctcttggcaagcagcaa

SEQ ID NO: 11070 - DNA, 17 bp, Artificial Sequence
  Synthetic
gttcccggccatcaacg

SEQ ID NO: 11071 - DNA, 16 bp, Artificial Sequence
  Synthetic
ggctggacggcatcga

SEQ ID NO: 11072 - DNA, 18 bp, Artificial Sequence
  Synthetic
agcacttggtcggctttg

SEQ ID NO: 11073 - DNA, 16 bp, Artificial Sequence
  Synthetic
aaacagcccgccctga

SEQ ID NO: 11074 - DNA, 17 bp, Artificial Sequence
  Synthetic
gcgcaggcccaaaaagt

SEQ ID NO: 11075 - DNA, 20 bp, Artificial Sequence
  Synthetic
ctgaagcataaagccgaagc

SEQ ID NO: 11076 - DNA, 17 bp, Artificial Sequence
  Synthetic
gcgttacgccgctgtca

SEQ ID NO: 11077 - DNA, 16 bp, Artificial Sequence
  Synthetic
ggcgttgacgagcagg

SEQ ID NO: 11078 - DNA, 19 bp, Artificial Sequence
  Synthetic
aacgcgatttcgtcgtcgg

SEQ ID NO: 11079 - DNA, 20 bp, Artificial Sequence
  Synthetic
gttggacagcaggactttgg

SEQ ID NO: 11080 - DNA, 18 bp, Artificial Sequence
  Synthetic
aggccaggcagaacaatg

SEQ ID NO: 11081 - DNA, 16 bp, Artificial Sequence
  Synthetic
gcgcccaaggtggcaa

SEQ ID NO: 11082 - DNA, 18 bp, Artificial Sequence
  Synthetic
aaacagcaaaaaggcggc

SEQ ID NO: 11083 - DNA, 18 bp, Artificial Sequence
  Synthetic
aagtgtctttgtcggcgg

SEQ ID NO: 11084 - DNA, 19 bp, Artificial Sequence
  Synthetic
ggcgcaaagttggaaaagc

SEQ ID NO: 11085 - DNA, 17 bp, Artificial Sequence
  Synthetic
tcaggcggacggtttcg

SEQ ID NO: 11086 - DNA, 17 bp, Artificial Sequence
  Synthetic
tcgccagcgaggtttga

SEQ ID NO: 11087 - DNA, 17 bp, Artificial Sequence
  Synthetic
tgcggcggaggttttgc

SEQ ID NO: 11088 - DNA, 18 bp, Artificial Sequence
  Synthetic
ggcgatcatgtggcagtg

SEQ ID NO: 11089 - DNA, 18 bp, Artificial Sequence
  Synthetic
ggtcaggggcataggcga

SEQ ID NO: 11090 - DNA, 15 bp, Artificial Sequence
  Synthetic
ggcgcggttttgcct

SEQ ID NO: 11091 - DNA, 15 bp, Artificial Sequence
  Synthetic
cggcggcattgcgtt

SEQ ID NO: 11092 - DNA, 19 bp, Artificial Sequence
  Synthetic
cgtagcatacggtttgcgg

SEQ ID NO: 11093 - DNA, 20 bp, Artificial Sequence
  Synthetic
gtcaggtagtcgatgtcgga

SEQ ID NO: 11094 - DNA, 16 bp, Artificial Sequence
  Synthetic
cggcaggtgtcggaca

SEQ ID NO: 11095 - DNA, 17 bp, Artificial Sequence
  Synthetic
cggcgttggacgttacg

SEQ ID NO: 11096 - DNA, 16 bp, Artificial Sequence
  Synthetic
gcatgaaggccgccga

SEQ ID NO: 11097 - DNA, 18 bp, Artificial Sequence
  Synthetic
gtgcctatgctgcgcttc

SEQ ID NO: 11098 - DNA, 18 bp, Artificial Sequence
  Synthetic
acccacacatcggattgc

SEQ ID NO: 11099 - DNA, 16 bp, Artificial Sequence
  Synthetic
cggtggcgtgcatacc

SEQ ID NO: 11100 - DNA, 18 bp, Artificial Sequence
  Synthetic
cgtacacggcttgggaaa

SEQ ID NO: 11101 - DNA, 20 bp, Artificial Sequence
  Synthetic
agacgatgtcgcattgttcc

SEQ ID NO: 11102 - DNA, 19 bp, Artificial Sequence
  Synthetic
aagccttcagtgaagactt

SEQ ID NO: 11103 - DNA, 20 bp, Artificial Sequence
  Synthetic
atgaacgaaatgaccgctgt

SEQ ID NO: 11104 - DNA, 20 bp, Artificial Sequence
  Synthetic
cgcaagtttacgggaattgc

SEQ ID NO: 11105 - DNA, 16 bp, Artificial Sequence
  Synthetic
cgatatcgcggcgcaa

SEQ ID NO: 11106 - DNA, 20 bp, Artificial Sequence
  Synthetic
ccaacagcgcggattttgtc

SEQ ID NO: 11107 - DNA, 16 bp, Artificial Sequence
  Synthetic
ccccgccattactgcg

SEQ ID NO: 11108 - DNA, 20 bp, Artificial Sequence
  Synthetic
gtaggtaacgagcaatccgg

SEQ ID NO: 11109 - DNA, 16 bp, Artificial Sequence
  Synthetic
ggtttgcccagcgacc

SEQ ID NO: 11110 - DNA, 19 bp, Artificial Sequence
  Synthetic
gtttttcagctgttcggcg

SEQ ID NO: 11111 - DNA, 18 bp, Artificial Sequence
  Synthetic
acagcccgatggttttcg

SEQ ID NO: 11112 - DNA, 15 bp, Artificial Sequence
  Synthetic
tgcttctgccgcgca

SEQ ID NO: 11113 - DNA, 16 bp, Artificial Sequence
  Synthetic
ttccgccgcctctgtc

SEQ ID NO: 11114 - DNA, 19 bp, Artificial Sequence
  Synthetic
cgttacaacgtcggactcg

SEQ ID NO: 11115 - DNA, 18 bp, Artificial Sequence
  Synthetic
aacggcgacatcacttcg

SEQ ID NO: 11116 - DNA, 18 bp, Artificial Sequence
  Synthetic
tcttgaaaggcttgccgg

SEQ ID NO: 11117 - DNA, 19 bp, Artificial Sequence
  Synthetic
acaggtgttcgtcaacgtc

SEQ ID NO: 11118 - DNA, 20 bp, Artificial Sequence
  Synthetic
gatttgctcgcgctttacca

SEQ ID NO: 11119 - DNA, 17 bp, Artificial Sequence
  Synthetic
cgaagccgtcgttccct

SEQ ID NO: 11120 - DNA, 16 bp, Artificial Sequence
  Synthetic
cggcgtggctcaatgc

SEQ ID NO: 11121 - DNA, 18 bp, Artificial Sequence
  Synthetic
ccgctggagattttgcgg

SEQ ID NO: 11122 - DNA, 17 bp, Artificial Sequence
  Synthetic
ggcgacgatgttgctgt

SEQ ID NO: 11123 - DNA, 20 bp, Artificial Sequence
  Synthetic
tttgtgttccaggtatgcgg

SEQ ID NO: 11124 - DNA, 18 bp, Artificial Sequence
  Synthetic
tgtgttggcggtattcgg

SEQ ID NO: 11125 - DNA, 18 bp, Artificial Sequence
  Synthetic
gtggctgccgaattggaa

SEQ ID NO: 11126 - DNA, 17 bp, Artificial Sequence
  Synthetic
aggatggtcaggacggc

SEQ ID NO: 11127 - DNA, 19 bp, Artificial Sequence
  Synthetic
tgtcggacaggatgtcgag

SEQ ID NO: 11128 - DNA, 20 bp, Artificial Sequence
  Synthetic
cgtatggcgggtaaattggc

SEQ ID NO: 11129 - DNA, 18 bp, Artificial Sequence
  Synthetic
gtcagttcgagcggcatg

SEQ ID NO: 11130 - DNA, 19 bp, Artificial Sequence
  Synthetic
ttttggcactgtcgtcagc

SEQ ID NO: 11131 - DNA, 20 bp, Artificial Sequence
  Synthetic
tatagctgacttcgacggcc

SEQ ID NO: 11132 - DNA, 18 bp, Artificial Sequence
  Synthetic
cggtagcggcataaggtg

SEQ ID NO: 11133 - DNA, 18 bp, Artificial Sequence
  Synthetic
cggcggtctctgaggtaa

SEQ ID NO: 11134 - DNA, 19 bp, Artificial Sequence
  Synthetic
aatgcgtttcaggcggtat

SEQ ID NO: 11135 - DNA, 16 bp, Artificial Sequence
  Synthetic
gccaaataccggcgcg

SEQ ID NO: 11136 - DNA, 20 bp, Artificial Sequence
  Synthetic
ttgctgaaaaaagacagtcc

SEQ ID NO: 11137 - DNA, 19 bp, Artificial Sequence
  Synthetic
ccttgccctgaccgacttt

SEQ ID NO: 11138 - DNA, 18 bp, Artificial Sequence
  Synthetic
gtcgccgacgtagagggt

SEQ ID NO: 11139 - DNA, 15 bp, Artificial Sequence
  Synthetic
gcgccgcgtttttgc

SEQ ID NO: 11140 - DNA, 16 bp, Artificial Sequence
  Synthetic
gtaacggcggcggtgt

SEQ ID NO: 11141 - DNA, 19 bp, Artificial Sequence
  Synthetic
gtcgagggaatctgccagt

SEQ ID NO: 11142 - DNA, 20 bp, Artificial Sequence
  Synthetic
tggtgaacacgatgtcttcc

SEQ ID NO: 11143 - DNA, 16 bp, Artificial Sequence
  Synthetic
cgcaccgtccacgaca

SEQ ID NO: 11144 - DNA, 19 bp, Artificial Sequence
  Synthetic
agattttgtcggcatcggg

SEQ ID NO: 11145 - DNA, 19 bp, Artificial Sequence
  Synthetic
gttgtccgcccgaaagttc

SEQ ID NO: 11146 - DNA, 16 bp, Artificial Sequence
  Synthetic
gcggcggcgtattgtg

SEQ ID NO: 11147 - DNA, 18 bp, Artificial Sequence
  Synthetic
tcagacagtttgcgggtg

SEQ ID NO: 11148 - DNA, 19 bp, Artificial Sequence
  Synthetic
caattcggcggtgatttcg

SEQ ID NO: 11149 - DNA, 20 bp, Artificial Sequence
  Synthetic
caggccggttaaaagatcga

SEQ ID NO: 11150 - DNA, 20 bp, Artificial Sequence
  Synthetic
ctgcccagttccaaaatcgc

SEQ ID NO: 11151 - DNA, 18 bp, Artificial Sequence
  Synthetic
gacgcaaggagtaggcga

SEQ ID NO: 11152 - DNA, 17 bp, Artificial Sequence
  Synthetic
gatgctggcatcgtggg

SEQ ID NO: 11153 - DNA, 20 bp, Artificial Sequence
  Synthetic
ctttctttgtcaatgccggg

SEQ ID NO: 11154 - DNA, 16 bp, Artificial Sequence
  Synthetic
cggacgatgcacgagc

SEQ ID NO: 11155 - DNA, 17 bp, Artificial Sequence
  Synthetic
gccgcggttgacgatgt

SEQ ID NO: 11156 - DNA, 19 bp, Artificial Sequence
  Synthetic
cttcgctgaggacggaaac

SEQ ID NO: 11157 - DNA, 17 bp, Artificial Sequence
  Synthetic
cgacggcttcgccttct

SEQ ID NO: 11158 - DNA, 17 bp, Artificial Sequence
  Synthetic
ctgtcgggcagcttgag

SEQ ID NO: 11159 - DNA, 18 bp, Artificial Sequence
  Synthetic
ttctacgccgctgatgct

SEQ ID NO: 11160 - DNA, 18 bp, Artificial Sequence
  Synthetic
cttcctgcgaggcaagtc

SEQ ID NO: 11161 - DNA, 18 bp, Artificial Sequence
  Synthetic
tgccaacagcgtttcgag

SEQ ID NO: 11162 - DNA, 19 bp, Artificial Sequence
  Synthetic
cgtgcaatcaggaaatggc

SEQ ID NO: 11163 - DNA, 17 bp, Artificial Sequence
  Synthetic
aacattgggtgcagggc

SEQ ID NO: 11164 - DNA, 15 bp, Artificial Sequence
  Synthetic
aggctacgggcgcaa

SEQ ID NO: 11165 - DNA, 16 bp, Artificial Sequence
  Synthetic
cgccggcttcctgcaa

SEQ ID NO: 11166 - DNA, 16 bp, Artificial Sequence
  Synthetic
gtcgtcgttgccgcgt

SEQ ID NO: 11167 - DNA, 16 bp, Artificial Sequence
  Synthetic
cgcgccgtcatcatgc

SEQ ID NO: 11168 - DNA, 18 bp, Artificial Sequence
  Synthetic
ttatcgggcgcgtgatga

SEQ ID NO: 11169 - DNA, 16 bp, Artificial Sequence
  Synthetic
gtgtgcgcccccatca

SEQ ID NO: 11170 - DNA, 19 bp, Artificial Sequence
  Synthetic
ggcgacggtctgtatttgg

SEQ ID NO: 11171 - DNA, 16 bp, Artificial Sequence
  Synthetic
gtcgatacgccgggct

SEQ ID NO: 11172 - DNA, 18 bp, Artificial Sequence
  Synthetic
cgataaaggcggcgactt

SEQ ID NO: 11173 - DNA, 17 bp, Artificial Sequence
  Synthetic
ggccggatatcgcgttc

SEQ ID NO: 11174 - DNA, 18 bp, Artificial Sequence
  Synthetic
gctcgctgatttcgctgt

SEQ ID NO: 11175 - DNA, 16 bp, Artificial Sequence
  Synthetic
ccgggcaggacttgga

SEQ ID NO: 11176 - DNA, 18 bp, Artificial Sequence
  Synthetic
tggatacgcctgaccacg

SEQ ID NO: 11177 - DNA, 20 bp, Artificial Sequence
  Synthetic
ttcacaaaatctcttgcgtg

SEQ ID NO: 11178 - DNA, 21 bp, Artificial Sequence
  Synthetic
ctacatcattatgaccgttgt

SEQ ID NO: 11179 - DNA, 18 bp, Artificial Sequence
  Synthetic
ggactggtggtgcatccg

SEQ ID NO: 11180 - DNA, 19 bp, Artificial Sequence
  Synthetic
acgctatcttgcccacagc

SEQ ID NO: 11181 - DNA, 18 bp, Artificial Sequence
  Synthetic
tgtgggaagccaaaccgg

SEQ ID NO: 11182 - DNA, 20 bp, Artificial Sequence
  Synthetic
gggcatgccgtcaatatcga

SEQ ID NO: 11183 - DNA, 18 bp, Artificial Sequence
  Synthetic
gaagacgtgcggacgctg

SEQ ID NO: 11184 - DNA, 16 bp, Artificial Sequence
  Synthetic
aatctggcggatgcgc

SEQ ID NO: 11185 - DNA, 17 bp, Artificial Sequence
  Synthetic
gcgtttgaccgccttca

SEQ ID NO: 11186 - DNA, 16 bp, Artificial Sequence
  Synthetic
tcggggcgggtgaagt

SEQ ID NO: 11187 - DNA, 19 bp, Artificial Sequence
  Synthetic
cacagtgccggataaaggg

SEQ ID NO: 11188 - DNA, 16 bp, Artificial Sequence
  Synthetic
aggccgaggttgtggg

SEQ ID NO: 11189 - DNA, 19 bp, Artificial Sequence
  Synthetic
ctgtcgctgctgattcagg

SEQ ID NO: 11190 - DNA, 20 bp, Artificial Sequence
  Synthetic
tcgccgaaacgggtaaacag

SEQ ID NO: 11191 - DNA, 22 bp, Artificial Sequence
  Synthetic
cgtcaagcaactctatcctaat

SEQ ID NO: 11192 - DNA, 18 bp, Artificial Sequence
  Synthetic
gcaacttttggaacgtgt

SEQ ID NO: 11193 - DNA, 19 bp, Artificial Sequence
  Synthetic
cggtaaggattgggaacag

SEQ ID NO: 11194 - DNA, 18 bp, Artificial Sequence
  Synthetic
cgaacccggcattaccaa

SEQ ID NO: 11195 - DNA, 19 bp, Artificial Sequence
  Synthetic
tagctttcgcctgaaacgg

SEQ ID NO: 11196 - DNA, 19 bp, Artificial Sequence
  Synthetic
gggcaggatgtgttcgatg

SEQ ID NO: 11197 - DNA, 17 bp, Artificial Sequence
  Synthetic
gctttgggctttgcggt

SEQ ID NO: 11198 - DNA, 18 bp, Artificial Sequence
  Synthetic
ttggatgaggacaggttg

SEQ ID NO: 11199 - DNA, 18 bp, Artificial Sequence
  Synthetic
ttacccccgaggacgtgc

SEQ ID NO: 11200 - DNA, 19 bp, Artificial Sequence
  Synthetic
ctgccttcttatggcgaac

SEQ ID NO: 11201 - DNA, 18 bp, Artificial Sequence
  Synthetic
cttgtcggcaatcggtgt

SEQ ID NO: 11202 - DNA, 16 bp, Artificial Sequence
  Synthetic
caccacgtcgccgact

SEQ ID NO: 11203 - DNA, 19 bp, Artificial Sequence
  Synthetic
tgccggaagaaggttttgc

SEQ ID NO: 11204 - DNA, 19 bp, Artificial Sequence
  Synthetic
cagctcaaaatgttgctgt

SEQ ID NO: 11205 - DNA, 15 bp, Artificial Sequence
  Synthetic
gcgggcgtgtttgca

SEQ ID NO: 11206 - DNA, 17 bp, Artificial Sequence
  Synthetic
ttaaatgccgtccgcgc

SEQ ID NO: 11207 - DNA, 18 bp, Artificial Sequence
  Synthetic
acagcagctttcccgcta

SEQ ID NO: 11208 - DNA, 18 bp, Artificial Sequence
  Synthetic
cgataacgcgcttctgct

SEQ ID NO: 11209 - DNA, 18 bp, Artificial Sequence
  Synthetic
aggtcgcacgtatcctga

SEQ ID NO: 11210 - DNA, 20 bp, Artificial Sequence
  Synthetic
aatcgggaatagttggatca

SEQ ID NO: 11211 - DNA, 17 bp, Artificial Sequence
  Synthetic
attgcggcgagtggaac

SEQ ID NO: 11212 - DNA, 16 bp, Artificial Sequence
  Synthetic
ccgccgcctttgccat

SEQ ID NO: 11213 - DNA, 16 bp, Artificial Sequence
  Synthetic
gaaatccgtgccggcc

SEQ ID NO: 11214 - DNA, 16 bp, Artificial Sequence
  Synthetic
tgcatcgggcagccct

SEQ ID NO: 11215 - DNA, 18 bp, Artificial Sequence
  Synthetic
accgttgtaatcgggcgg

SEQ ID NO: 11216 - DNA, 17 bp, Artificial Sequence
  Synthetic
taagcccgtgccgaaca

SEQ ID NO: 11217 - DNA, 19 bp, Artificial Sequence
  Synthetic
gggcgacttccttccattg

SEQ ID NO: 11218 - DNA, 20 bp, Artificial Sequence
  Synthetic
ggtcggcattaaagacctgc

SEQ ID NO: 11219 - DNA, 20 bp, Artificial Sequence
  Synthetic
tttgtttgatgccgtgtccg

SEQ ID NO: 11220 - DNA, 16 bp, Artificial Sequence
  Synthetic
aggcggctgacgggat

SEQ ID NO: 11221 - DNA, 18 bp, Artificial Sequence
  Synthetic
cggttgaggtcgaaggtg

SEQ ID NO: 11222 - DNA, 18 bp, Artificial Sequence
  Synthetic
caccgccgatttggaagc

SEQ ID NO: 11223 - DNA, 19 bp, Artificial Sequence
  Synthetic
caaaaggatgttgctgccg

SEQ ID NO: 11224 - DNA, 17 bp, Artificial Sequence
  Synthetic
gcgggcgttatgacgga

SEQ ID NO: 11225 - DNA, 18 bp, Artificial Sequence
  Synthetic
gtcggcggcaaaaaaacc

SEQ ID NO: 11226 - DNA, 16 bp, Artificial Sequence
  Synthetic
cctgcccgctgatcct

SEQ ID NO: 11227 - DNA, 20 bp, Artificial Sequence
  Synthetic
ttgaccacgccttgaatcag

SEQ ID NO: 11228 - DNA, 18 bp, Artificial Sequence
  Synthetic
cgggtatccgcttggacg

SEQ ID NO: 11229 - DNA, 18 bp, Artificial Sequence
  Synthetic
ggactggtgtcaggacga

SEQ ID NO: 11230 - DNA, 18 bp, Artificial Sequence
  Synthetic
gctttgtcgggcaggaag

SEQ ID NO: 11231 - DNA, 19 bp, Artificial Sequence
  Synthetic
caaaacgtccaaaggctcg

SEQ ID NO: 11232 - DNA, 18 bp, Artificial Sequence
  Synthetic
aacaacccggtcagccaa

SEQ ID NO: 11233 - DNA, 18 bp, Artificial Sequence
  Synthetic
cgatgtcgtccccctcga

SEQ ID NO: 11234 - DNA, 19 bp, Artificial Sequence
  Synthetic
tcagacgactttggtggcg

SEQ ID NO: 11235 - DNA, 16 bp, Artificial Sequence
  Synthetic
cccgcctgcgacatca

SEQ ID NO: 11236 - DNA, 18 bp, Artificial Sequence
  Synthetic
atcgggtatgcgcacttg

SEQ ID NO: 11237 - DNA, 18 bp, Artificial Sequence
  Synthetic
tttccgccctcgaaaggc

SEQ ID NO: 11238 - DNA, 16 bp, Artificial Sequence
  Synthetic
ctgccggcgcgcatat

SEQ ID NO: 11239 - DNA, 16 bp, Artificial Sequence
  Synthetic
cgaacgcgcacggctt

SEQ ID NO: 11240 - DNA, 16 bp, Artificial Sequence
  Synthetic
caatgacggcggcgat

SEQ ID NO: 11241 - DNA, 18 bp, Artificial Sequence
  Synthetic
atgatgggaagaaggacg

SEQ ID NO: 11242 - DNA, 17 bp, Artificial Sequence
  Synthetic
gctggttacgccgaggt

SEQ ID NO: 11243 - DNA, 17 bp, Artificial Sequence
  Synthetic
tattcccccgttgcccg

SEQ ID NO: 11244 - DNA, 16 bp, Artificial Sequence
  Synthetic
gcggctgttgcggtag

SEQ ID NO: 11245 - DNA, 18 bp, Artificial Sequence
  Synthetic
cgacaaccaatgcgactt

SEQ ID NO: 11246 - DNA, 17 bp, Artificial Sequence
  Synthetic
cacgtcagggcttcgtc

SEQ ID NO: 11247 - DNA, 20 bp, Artificial Sequence
  Synthetic
cgttcaggaggccgtaattc

SEQ ID NO: 11248 - DNA, 17 bp, Artificial Sequence
  Synthetic
gtttctctgccgccgtt

SEQ ID NO: 11249 - DNA, 16 bp, Artificial Sequence
  Synthetic
caccgcgtccgctaag

SEQ ID NO: 11250 - DNA, 17 bp, Artificial Sequence
  Synthetic
acgaagttttgggcggc

SEQ ID NO: 11251 - DNA, 18 bp, Artificial Sequence
  Synthetic
cggtttccaaagacggcg

SEQ ID NO: 11252 - DNA, 16 bp, Artificial Sequence
  Synthetic
ccgatattgggcgccg

SEQ ID NO: 11253 - DNA, 16 bp, Artificial Sequence
  Synthetic
cgcgatgccgtccgaa

SEQ ID NO: 11254 - DNA, 18 bp, Artificial Sequence
  Synthetic
catgggcgaaggtggatg

SEQ ID NO: 11255 - DNA, 16 bp, Artificial Sequence
  Synthetic
gggcttgacgggcgaa

SEQ ID NO: 11256 - DNA, 20 bp, Artificial Sequence
  Synthetic
ttttgcgtagggtttagcat

SEQ ID NO: 11257 - DNA, 16 bp, Artificial Sequence
  Synthetic
caggtttcggtgcggg

SEQ ID NO: 11258 - DNA, 16 bp, Artificial Sequence
  Synthetic
gggatttggcggcgga

SEQ ID NO: 11259 - DNA, 18 bp, Artificial Sequence
  Synthetic
tgtgcaggaattggcagg

SEQ ID NO: 11260 - DNA, 18 bp, Artificial Sequence
  Synthetic
atatgaagttcggcgcgg

SEQ ID NO: 11261 - DNA, 16 bp, Artificial Sequence
  Synthetic
cgatacgttcggcggc

SEQ ID NO: 11262 - DNA, 17 bp, Artificial Sequence
  Synthetic
ctaaaaccgggcagccg

SEQ ID NO: 11263 - DNA, 18 bp, Artificial Sequence
  Synthetic
gttgaacatgaccggcgg

SEQ ID NO: 11264 - DNA, 17 bp, Artificial Sequence
  Synthetic
tgtcgtttcgggcgaag

SEQ ID NO: 11265 - DNA, 16 bp, Artificial Sequence
  Synthetic
gcgaagaagcggccga

SEQ ID NO: 11266 - DNA, 18 bp, Artificial Sequence
  Synthetic
ccctgcagatttcagccg

SEQ ID NO: 11267 - DNA, 18 bp, Artificial Sequence
  Synthetic
caggtcgtccgtgaaggt

SEQ ID NO: 11268 - DNA, 20 bp, Artificial Sequence
  Synthetic
tgctgaagcacaatctgacg

SEQ ID NO: 11269 - DNA, 20 bp, Artificial Sequence
  Synthetic
tttcgaccgcacaaatacgt

SEQ ID NO: 11270 - DNA, 16 bp, Artificial Sequence
  Synthetic
cgggcagcgtcaacga

SEQ ID NO: 11271 - DNA, 16 bp, Artificial Sequence
  Synthetic
ggcacgcccgaaagca

SEQ ID NO: 11272 - DNA, 16 bp, Artificial Sequence
  Synthetic
ccggtggcagtggaca

SEQ ID NO: 11273 - DNA, 17 bp, Artificial Sequence
  Synthetic
atttccgtaccggcggc

SEQ ID NO: 11274 - DNA, 16 bp, Artificial Sequence
  Synthetic
ggacgcgcggtcatca

SEQ ID NO: 11275 - DNA, 16 bp, Artificial Sequence
  Synthetic
tgtcggtttgcgccgt

SEQ ID NO: 11276 - DNA, 17 bp, Artificial Sequence
  Synthetic
gatgttttcggcggcgg

SEQ ID NO: 11277 - DNA, 16 bp, Artificial Sequence
  Synthetic
gaacgggccgccgata

SEQ ID NO: 11278 - DNA, 20 bp, Artificial Sequence
  Synthetic
gcctatgacgcattgcagga

SEQ ID NO: 11279 - DNA, 20 bp, Artificial Sequence
  Synthetic
gcgcatatcccatatgtcgg

SEQ ID NO: 11280 - DNA, 19 bp, Artificial Sequence
  Synthetic
agccgttgacgatggtttc

SEQ ID NO: 11281 - DNA, 20 bp, Artificial Sequence
  Synthetic
gaacaccaacgcgtaaatgg

SEQ ID NO: 11282 - DNA, 16 bp, Artificial Sequence
  Synthetic
cgcggcaggcttttgg

SEQ ID NO: 11283 - DNA, 20 bp, Artificial Sequence
  Synthetic
ttatcgttggtgaaggaaga

SEQ ID NO: 11284 - DNA, 22 bp, Artificial Sequence
  Synthetic
ctttgcctatatcgtgaaaacc

SEQ ID NO: 11285 - DNA, 17 bp, Artificial Sequence
  Synthetic
ggctgccgaatttcccg

SEQ ID NO: 11286 - DNA, 17 bp, Artificial Sequence
  Synthetic
cgctgcggatttcgtgc

SEQ ID NO: 11287 - DNA, 20 bp, Artificial Sequence
  Synthetic
gatgaccgcatccaaaacgt

SEQ ID NO: 11288 - DNA, 16 bp, Artificial Sequence
  Synthetic
tcgaccccgccctgtt

SEQ ID NO: 11289 - DNA, 17 bp, Artificial Sequence
  Synthetic
ggtcgatctgcaggcca

SEQ ID NO: 11290 - DNA, 16 bp, Artificial Sequence
  Synthetic
ccctcaatgcgcggca

SEQ ID NO: 11291 - DNA, 18 bp, Artificial Sequence
  Synthetic
tcgttggtggattggctg

SEQ ID NO: 11292 - DNA, 19 bp, Artificial Sequence
  Synthetic
aacgccctgaagttaaacg

SEQ ID NO: 11293 - DNA, 17 bp, Artificial Sequence
  Synthetic
tgaggaggcaggtcggt

SEQ ID NO: 11294 - DNA, 20 bp, Artificial Sequence
  Synthetic
atacgcagttcggaatcagg

SEQ ID NO: 11295 - DNA, 16 bp, Artificial Sequence
  Synthetic
ggctgcgcgtgttacg

SEQ ID NO: 11296 - DNA, 20 bp, Artificial Sequence
  Synthetic
tgttttcaagcacatcgcgg

SEQ ID NO: 11297 - DNA, 18 bp, Artificial Sequence
  Synthetic
ccgaagcctatgtgccca

SEQ ID NO: 11298 - DNA, 20 bp, Artificial Sequence
  Synthetic
tgctgtccgtaaaagaaggc

SEQ ID NO: 11299 - DNA, 16 bp, Artificial Sequence
  Synthetic
gcctcgacatccccga

SEQ ID NO: 11300 - DNA, 16 bp, Artificial Sequence
  Synthetic
ggcatcggcgagctga

SEQ ID NO: 11301 - DNA, 19 bp, Artificial Sequence
  Synthetic
cagcgtaccggttttgtcc

SEQ ID NO: 11302 - DNA, 17 bp, Artificial Sequence
  Synthetic
tttggctgccgagctgc

SEQ ID NO: 11303 - DNA, 19 bp, Artificial Sequence
  Synthetic
gtcaaaccgttaccgttgc

SEQ ID NO: 11304 - DNA, 20 bp, Artificial Sequence
  Synthetic
cagaccgttgaccagatacg

SEQ ID NO: 11305 - DNA, 18 bp, Artificial Sequence
  Synthetic
cgaactgccaaagctgcc

SEQ ID NO: 11306 - DNA, 17 bp, Artificial Sequence
  Synthetic
gatgacagggccggtga

SEQ ID NO: 11307 - DNA, 16 bp, Artificial Sequence
  Synthetic
ccgccgcgctgtttgt

SEQ ID NO: 11308 - DNA, 22 bp, Artificial Sequence
  Synthetic
acgggattaaattgaatttgca

SEQ ID NO: 11309 - DNA, 21 bp, Artificial Sequence
  Synthetic
ccgactttaacttcaatttcg

SEQ ID NO: 11310 - DNA, 19 bp, Artificial Sequence
  Synthetic
catgtcgtttggggggatg

SEQ ID NO: 11311 - DNA, 18 bp, Artificial Sequence
  Synthetic
tgcgttgacaaggttgcc

SEQ ID NO: 11312 - DNA, 19 bp, Artificial Sequence
  Synthetic
aaaaccggcaaaaacctgc

SEQ ID NO: 11313 - DNA, 19 bp, Artificial Sequence
  Synthetic
tcggtgtagagcgtgaagc

SEQ ID NO: 11314 - DNA, 19 bp, Artificial Sequence
  Synthetic
aaggctggcgacttttacg

SEQ ID NO: 11315 - DNA, 16 bp, Artificial Sequence
  Synthetic
cggtatcgcgcgcttt

SEQ ID NO: 11316 - DNA, 20 bp, Artificial Sequence
  Synthetic
gttttcagccaaaacgtgcg

SEQ ID NO: 11317 - DNA, 20 bp, Artificial Sequence
  Synthetic
atagccggtcatacccaaga

SEQ ID NO: 11318 - DNA, 16 bp, Artificial Sequence
  Synthetic
gtgttcgccgtggtgg

SEQ ID NO: 11319 - DNA, 17 bp, Artificial Sequence
  Synthetic
cgaccagtttggcggtt

SEQ ID NO: 11320 - DNA, 20 bp, Artificial Sequence
  Synthetic
gtccaaaagacgcagacagg

SEQ ID NO: 11321 - DNA, 18 bp, Artificial Sequence
  Synthetic
gccgcgaattgcacttct

SEQ ID NO: 11322 - DNA, 16 bp, Artificial Sequence
  Synthetic
cccgtgctgctggctt

SEQ ID NO: 11323 - DNA, 20 bp, Artificial Sequence
  Synthetic
caatccatcaaaaggctctc

SEQ ID NO: 11324 - DNA, 19 bp, Artificial Sequence
  Synthetic
aggggagccggaagaatcc

SEQ ID NO: 11325 - DNA, 16 bp, Artificial Sequence
  Synthetic
cccatcccgcgaacct

SEQ ID NO: 11326 - DNA, 15 bp, Artificial Sequence
  Synthetic
gcaacgcgctggcaa

SEQ ID NO: 11327 - DNA, 17 bp, Artificial Sequence
  Synthetic
ccggcggcttttcgatt

SEQ ID NO: 11328 - DNA, 16 bp, Artificial Sequence
  Synthetic
cccgtccgtccgcaat

SEQ ID NO: 11329 - DNA, 17 bp, Artificial Sequence
  Synthetic
gccgaatgcgatgtgct

SEQ ID NO: 11330 - DNA, 18 bp, Artificial Sequence
  Synthetic
ggcagcaaagccctgttc

SEQ ID NO: 11331 - DNA, 18 bp, Artificial Sequence
  Synthetic
caaccccgacgacgaaac

SEQ ID NO: 11332 - DNA, 20 bp, Artificial Sequence
  Synthetic
gtcgaagataccgatgcgat

SEQ ID NO: 11333 - DNA, 17 bp, Artificial Sequence
  Synthetic
ggttcacgggcaggttg

SEQ ID NO: 11334 - DNA, 17 bp, Artificial Sequence
  Synthetic
gcagtgtgcctaagccg

SEQ ID NO: 11335 - DNA, 19 bp, Artificial Sequence
  Synthetic
ggaaaaaatccgatgccgc

SEQ ID NO: 11336 - DNA, 16 bp, Artificial Sequence
  Synthetic
cactttctcgccgcgg

SEQ ID NO: 11337 - DNA, 18 bp, Artificial Sequence
  Synthetic
aattgccgggaatggaaa

SEQ ID NO: 11338 - DNA, 20 bp, Artificial Sequence
  Synthetic
taattttgtcggcgtgttgc

SEQ ID NO: 11339 - DNA, 19 bp, Artificial Sequence
  Synthetic
gaaaagccggtcgacttgt

SEQ ID NO: 11340 - DNA, 18 bp, Artificial Sequence
  Synthetic
gcgtaccggccttcaaac

SEQ ID NO: 11341 - DNA, 18 bp, Artificial Sequence
  Synthetic
tcgcggtaatgcactggg

SEQ ID NO: 11342 - DNA, 17 bp, Artificial Sequence
  Synthetic
ggctttgagcgatgccg

SEQ ID NO: 11343 - DNA, 20 bp, Artificial Sequence
  Synthetic
tttggctgcttctattgggc

SEQ ID NO: 11344 - DNA, 18 bp, Artificial Sequence
  Synthetic
ccgccccaagaaatcctc

SEQ ID NO: 11345 - DNA, 18 bp, Artificial Sequence
  Synthetic
gcgcgacctgaaaaaccg

SEQ ID NO: 11346 - DNA, 16 bp, Artificial Sequence
  Synthetic
gcgaaggcaagccgct

SEQ ID NO: 11347 - DNA, 16 bp, Artificial Sequence
  Synthetic
ttacgtgccgccgaca

SEQ ID NO: 11348 - DNA, 18 bp, Artificial Sequence
  Synthetic
gcaagccgtgctgtacct

SEQ ID NO: 11349 - DNA, 16 bp, Artificial Sequence
  Synthetic
gggatgcgccgtcttc

SEQ ID NO: 11350 - DNA, 20 bp, Artificial Sequence
  Synthetic
cggcgaatttcatcagttcg

SEQ ID NO: 11351 - DNA, 20 bp, Artificial Sequence
  Synthetic
ggcactcaaattcacagtca

SEQ ID NO: 11352 - DNA, 21 bp, Artificial Sequence
  Synthetic
caatcatgttcgcattggtac

SEQ ID NO: 11353 - DNA, 17 bp, Artificial Sequence
  Synthetic
ccgcagcatgaggcaac

SEQ ID NO: 11354 - DNA, 19 bp, Artificial Sequence
  Synthetic
tgtccgacgatttgttgcg

SEQ ID NO: 11355 - DNA, 19 bp, Artificial Sequence
  Synthetic
gaagaaatcgccctgctgt

SEQ ID NO: 11356 - DNA, 17 bp, Artificial Sequence
  Synthetic
gtcggcgtaaggtccgt

SEQ ID NO: 11357 - DNA, 19 bp, Artificial Sequence
  Synthetic
gcactgctggtcatactgc

SEQ ID NO: 11358 - DNA, 16 bp, Artificial Sequence
  Synthetic
gcgatgttgccgccca

SEQ ID NO: 11359 - DNA, 16 bp, Artificial Sequence
  Synthetic
gggccttggtagcgga

SEQ ID NO: 11360 - DNA, 16 bp, Artificial Sequence
  Synthetic
gcacggttacggcgca

SEQ ID NO: 11361 - DNA, 18 bp, Artificial Sequence
  Synthetic
cccgctgacgatgtgtac

SEQ ID NO: 11362 - DNA, 18 bp, Artificial Sequence
  Synthetic
gcatcaaggcacgcacat

SEQ ID NO: 11363 - DNA, 16 bp, Artificial Sequence
  Synthetic
cgggaatgacggcggt

SEQ ID NO: 11364 - DNA, 18 bp, Artificial Sequence
  Synthetic
gtggtgtgggtgtggtcg

SEQ ID NO: 11365 - DNA, 19 bp, Artificial Sequence
  Synthetic
agccgcgttcctattcttg

SEQ ID NO: 11366 - DNA, 17 bp, Artificial Sequence
  Synthetic
ccggcgaacaggctttg

SEQ ID NO: 11367 - DNA, 18 bp, Artificial Sequence
  Synthetic
tctagattcccgcctgcg

SEQ ID NO: 11368 - DNA, 20 bp, Artificial Sequence
  Synthetic
ttcgcagttgaggcttttgg

SEQ ID NO: 11369 - DNA, 17 bp, Artificial Sequence
  Synthetic
gcaacacttcgcctgcg

SEQ ID NO: 11370 - DNA, 20 bp, Artificial Sequence
  Synthetic
tcgaggaaaaggacgaaagc

SEQ ID NO: 11371 - DNA, 17 bp, Artificial Sequence
  Synthetic
ggaagaatacgcccgcc

SEQ ID NO: 11372 - DNA, 17 bp, Artificial Sequence
  Synthetic
cgacggcggcatcgatt

SEQ ID NO: 11373 - DNA, 20 bp, Artificial Sequence
  Synthetic
tttctttttcctacgcgccc

SEQ ID NO: 11374 - DNA, 18 bp, Artificial Sequence
  Synthetic
cctttcgccaactcctgc

SEQ ID NO: 11375 - DNA, 18 bp, Artificial Sequence
  Synthetic
gcccatctgtcgttcagc

SEQ ID NO: 11376 - DNA, 18 bp, Artificial Sequence
  Synthetic
aataggcagaatgaccgc

SEQ ID NO: 11377 - DNA, 20 bp, Artificial Sequence
  Synthetic
cctacatgactacttgggcg

SEQ ID NO: 11378 - DNA, 20 bp, Artificial Sequence
  Synthetic
attttctgttttgcctgcgg

SEQ ID NO: 11379 - DNA, 24 bp, Artificial Sequence
  Synthetic
ctgtctcagtttgatttttttcag

SEQ ID NO: 11380 - DNA, 19 bp, Artificial Sequence
  Synthetic
atgctgaaatggactcctc

SEQ ID NO: 11381 - DNA, 23 bp, Artificial Sequence
  Synthetic
tttcccactcagataatttctca

SEQ ID NO: 11382 - DNA, 24 bp, Artificial Sequence
  Synthetic
gtaaagttacccgagttaaaaacc

SEQ ID NO: 11383 - DNA, 22 bp, Artificial Sequence
  Synthetic
gaagataaggctttttttaccg

SEQ ID NO: 11384 - DNA, 18 bp, Artificial Sequence
  Synthetic
cgcaagaaatccactccg

SEQ ID NO: 11385 - DNA, 24 bp, Artificial Sequence
  Synthetic
atatcaaccaacttattgagatcc

SEQ ID NO: 11386 - DNA, 21 bp, Artificial Sequence
  Synthetic
aaacagttttttgctggtttg

SEQ ID NO: 11387 - DNA, 19 bp, Artificial Sequence
  Synthetic
ggtggagatggaacaccgc

SEQ ID NO: 11388 - DNA, 18 bp, Artificial Sequence
  Synthetic
gccatgagctgccctacg

SEQ ID NO: 11389 - DNA, 19 bp, Artificial Sequence
  Synthetic
atagccaaggcgtgatcga

SEQ ID NO: 11390 - DNA, 16 bp, Artificial Sequence
  Synthetic
cgtgggtgtgccgcaa

SEQ ID NO: 11391 - DNA, 18 bp, Artificial Sequence
  Synthetic
ccgggcgaaatcgaactc

SEQ ID NO: 11392 - DNA, 19 bp, Artificial Sequence
  Synthetic
atttccccgtccaactggt

SEQ ID NO: 11393 - DNA, 18 bp, Artificial Sequence
  Synthetic
cctgatcggcaaatgggc

SEQ ID NO: 11394 - DNA, 17 bp, Artificial Sequence
  Synthetic
gctgattgccgccatgc

SEQ ID NO: 11395 - DNA, 18 bp, Artificial Sequence
  Synthetic
gtcgaacaaaacgcctgc

SEQ ID NO: 11396 - DNA, 17 bp, Artificial Sequence
  Synthetic
gcaagacggcggtttgg

SEQ ID NO: 11397 - DNA, 16 bp, Artificial Sequence
  Synthetic
ttgaggcttgcgggca

SEQ ID NO: 11398 - DNA, 16 bp, Artificial Sequence
  Synthetic
gcgtttgcggtaggcg

SEQ ID NO: 11399 - DNA, 16 bp, Artificial Sequence
  Synthetic
cggtctgatgccggca

SEQ ID NO: 11400 - DNA, 17 bp, Artificial Sequence
  Synthetic
tccaaatccgcctgcga

SEQ ID NO: 11401 - DNA, 20 bp, Artificial Sequence
  Synthetic
atcgtcaatacagttccggc

SEQ ID NO: 11402 - DNA, 18 bp, Artificial Sequence
  Synthetic
cggcatccagcaaatcgc

SEQ ID NO: 11403 - DNA, 19 bp, Artificial Sequence
  Synthetic
ccttgcacgacgtgtatcg

SEQ ID NO: 11404 - DNA, 17 bp, Artificial Sequence
  Synthetic
cgccgcccaaatcgtac

SEQ ID NO: 11405 - DNA, 19 bp, Artificial Sequence
  Synthetic
ttttgccgaattgatggcg

SEQ ID NO: 11406 - DNA, 18 bp, Artificial Sequence
  Synthetic
ctcgaaacgcgcgtatgc

SEQ ID NO: 11407 - DNA, 15 bp, Artificial Sequence
  Synthetic
aaccgtttccgccgc

SEQ ID NO: 11408 - DNA, 19 bp, Artificial Sequence
  Synthetic
ttgtatttcctgccgctgc

SEQ ID NO: 11409 - DNA, 18 bp, Artificial Sequence
  Synthetic
gcccaagctcaatcggtt

SEQ ID NO: 11410 - DNA, 16 bp, Artificial Sequence
  Synthetic
gcgttttttcggcgcg

SEQ ID NO: 11411 - DNA, 18 bp, Artificial Sequence
  Synthetic
gttacttccgatgcggcg

SEQ ID NO: 11412 - DNA, 20 bp, Artificial Sequence
  Synthetic
cagttcttcttcggtttgcg

SEQ ID NO: 11413 - DNA, 19 bp, Artificial Sequence
  Synthetic
acactttcgacgacaaccg

SEQ ID NO: 11414 - DNA, 20 bp, Artificial Sequence
  Synthetic
ttcattgcaaaaaccgaccg

SEQ ID NO: 11415 - DNA, 17 bp, Artificial Sequence
  Synthetic
gccgcaccaaaacgacc

SEQ ID NO: 11416 - DNA, 20 bp, Artificial Sequence
  Synthetic
tttcaaccgcaaagacaagc

SEQ ID NO: 11417 - DNA, 19 bp, Artificial Sequence
  Synthetic
acacactgacccgattcct

SEQ ID NO: 11418 - DNA, 19 bp, Artificial Sequence
  Synthetic
aaaaacgccatcccgaacg

SEQ ID NO: 11419 - DNA, 18 bp, Artificial Sequence
  Synthetic
gacaagtgactgccttgt

SEQ ID NO: 11420 - DNA, 19 bp, Artificial Sequence
  Synthetic
ttgagcggcaaaatccacc

SEQ ID NO: 11421 - DNA, 18 bp, Artificial Sequence
  Synthetic
gggagcaatacccgaagt

SEQ ID NO: 11422 - DNA, 20 bp, Artificial Sequence
  Synthetic
cataccaacgtttcccccag

SEQ ID NO: 11423 - DNA, 17 bp, Artificial Sequence
  Synthetic
cgaaagccctgttgccg

SEQ ID NO: 11424 - DNA, 16 bp, Artificial Sequence
  Synthetic
cgcaagccgcctgaca

SEQ ID NO: 11425 - DNA, 18 bp, Artificial Sequence
  Synthetic
tgaagcctttcagacggc

SEQ ID NO: 11426 - DNA, 20 bp, Artificial Sequence
  Synthetic
atccatttcatcaaccgccc

SEQ ID NO: 11427 - DNA, 20 bp, Artificial Sequence
  Synthetic
gccctcgataaaaccttggc

SEQ ID NO: 11428 - DNA, 16 bp, Artificial Sequence
  Synthetic
gcgctggccgttttgg

SEQ ID NO: 11429 - DNA, 15 bp, Artificial Sequence
  Synthetic
tgcccgcgaactgga

SEQ ID NO: 11430 - DNA, 17 bp, Artificial Sequence
  Synthetic
atttgtagggcgtgccg

SEQ ID NO: 11431 - DNA, 16 bp, Artificial Sequence
  Synthetic
ttcgggtggcgggatc

SEQ ID NO: 11432 - DNA, 19 bp, Artificial Sequence
  Synthetic
tccgagtgcttgaagaccc

SEQ ID NO: 11433 - DNA, 19 bp, Artificial Sequence
  Synthetic
tcgtcgccgatattgcgtc

SEQ ID NO: 11434 - DNA, 17 bp, Artificial Sequence
  Synthetic
tgatgaaggcggcaagc

SEQ ID NO: 11435 - DNA, 20 bp, Artificial Sequence
  Synthetic
actggtggaaaacggtatgc

SEQ ID NO: 11436 - DNA, 19 bp, Artificial Sequence
  Synthetic
tcgataacggttttctcgc

SEQ ID NO: 11437 - DNA, 18 bp, Artificial Sequence
  Synthetic
gtcgcgctcggatttgac

SEQ ID NO: 11438 - DNA, 17 bp, Artificial Sequence
  Synthetic
taatttgcgcccctgcc

SEQ ID NO: 11439 - DNA, 18 bp, Artificial Sequence
  Synthetic
tgccgtctgaaaccgaac

SEQ ID NO: 11440 - DNA, 19 bp, Artificial Sequence
  Synthetic
ctactcgtcatcctcgccc

SEQ ID NO: 11441 - DNA, 20 bp, Artificial Sequence
  Synthetic
gcatttggatcatcggcacc

SEQ ID NO: 11442 - DNA, 16 bp, Artificial Sequence
  Synthetic
cgtcatcgccggcaca

SEQ ID NO: 11443 - DNA, 16 bp, Artificial Sequence
  Synthetic
accgccctgccgttca

SEQ ID NO: 11444 - DNA, 22 bp, Artificial Sequence
  Synthetic
tcaattcaattacggtttgtct

SEQ ID NO: 11445 - DNA, 20 bp, Artificial Sequence
  Synthetic
gccgatggttacttgttcgc

SEQ ID NO: 11446 - DNA, 19 bp, Artificial Sequence
  Synthetic
aatcgaccaaatcctgcgc

SEQ ID NO: 11447 - DNA, 19 bp, Artificial Sequence
  Synthetic
catgtccgacaacgctttg

SEQ ID NO: 11448 - DNA, 16 bp, Artificial Sequence
  Synthetic
ggtgcgccgtctgctt

SEQ ID NO: 11449 - DNA, 20 bp, Artificial Sequence
  Synthetic
gcttgccaaagaaggattgg

SEQ ID NO: 11450 - DNA, 16 bp, Artificial Sequence
  Synthetic
gccgccgctacaagct

SEQ ID NO: 11451 - DNA, 17 bp, Artificial Sequence
  Synthetic
gcgcctgcggaatttcc

SEQ ID NO: 11452 - DNA, 20 bp, Artificial Sequence
  Synthetic
acgcccttgaatatcgtgtt

SEQ ID NO: 11453 - DNA, 20 bp, Artificial Sequence
  Synthetic
acattcatgcggctttgaac

SEQ ID NO: 11454 - DNA, 16 bp, Artificial Sequence
  Synthetic
tgctgcaaagcgtggc

SEQ ID NO: 11455 - DNA, 16 bp, Artificial Sequence
  Synthetic
ccgccattcctgccga

SEQ ID NO: 11456 - DNA, 20 bp, Artificial Sequence
  Synthetic
ccttggcagggatagatgac

SEQ ID NO: 11457 - DNA, 22 bp, Artificial Sequence
  Synthetic
ttgatttttttaccgcttttgc

SEQ ID NO: 11458 - DNA, 16 bp, Artificial Sequence
  Synthetic
caaccgcgccagagct

SEQ ID NO: 11459 - DNA, 21 bp, Artificial Sequence
  Synthetic
ttaaacataccgagtgaatgg

SEQ ID NO: 11460 - DNA, 21 bp, Artificial Sequence
  Synthetic
aaaacgacttttaccaaagcg

SEQ ID NO: 11461 - DNA, 20 bp, Artificial Sequence
  Synthetic
accgcatttttttgacggag

SEQ ID NO: 11462 - DNA, 19 bp, Artificial Sequence
  Synthetic
attctgaataccgtccgtt

SEQ ID NO: 11463 - DNA, 19 bp, Artificial Sequence
  Synthetic
ccgcattcaaatcatgggc

SEQ ID NO: 11464 - DNA, 18 bp, Artificial Sequence
  Synthetic
ctgacggaaaagcagctt

SEQ ID NO: 11465 - DNA, 18 bp, Artificial Sequence
  Synthetic
acgcgaagaactactgaa

SEQ ID NO: 11466 - DNA, 20 bp, Artificial Sequence
  Synthetic
gcaaaaattccaaaggcatg

SEQ ID NO: 11467 - DNA, 18 bp, Artificial Sequence
  Synthetic
tgcaaacccgcatcctct

SEQ ID NO: 11468 - DNA, 19 bp, Artificial Sequence
  Synthetic
aagcgaaattcacggtcga

SEQ ID NO: 11469 - DNA, 21 bp, Artificial Sequence
  Synthetic
taaaacgtggcagatacagac

SEQ ID NO: 11470 - DNA, 18 bp, Artificial Sequence
  Synthetic
gctgtatcaactgctgcc

SEQ ID NO: 11471 - DNA, 19 bp, Artificial Sequence
  Synthetic
ctgcacgacggcaaaatcg

SEQ ID NO: 11472 - DNA, 16 bp, Artificial Sequence
  Synthetic
cacgcccttgtgcgtt

SEQ ID NO: 11473 - DNA, 19 bp, Artificial Sequence
  Synthetic
ttgcaagccttcatcttcg

SEQ ID NO: 11474 - DNA, 18 bp, Artificial Sequence
  Synthetic
cgttactttggccgggtc

SEQ ID NO: 11475 - DNA, 18 bp, Artificial Sequence
  Synthetic
ccggcaatgattgagcgt

SEQ ID NO: 11476 - DNA, 19 bp, Artificial Sequence
  Synthetic
cgccgagcaggtattgagc

SEQ ID NO: 11477 - DNA, 18 bp, Artificial Sequence
  Synthetic
gttcagacggcatcggtg

SEQ ID NO: 11478 - DNA, 16 bp, Artificial Sequence
  Synthetic
gactggccgcacgaca

SEQ ID NO: 11479 - DNA, 21 bp, Artificial Sequence
  Synthetic
attgatttgattgacgaagct

SEQ ID NO: 11480 - DNA, 18 bp, Artificial Sequence
  Synthetic
tgtacccgaaacggcagg

SEQ ID NO: 11481 - DNA, 18 bp, Artificial Sequence
  Synthetic
gcgcaatgccgtctgaat

SEQ ID NO: 11482 - DNA, 18 bp, Artificial Sequence
  Synthetic
ccatatccgtccgggcaa

SEQ ID NO: 11483 - DNA, 18 bp, Artificial Sequence
  Synthetic
cgtggatgagcaacgaca

SEQ ID NO: 11484 - DNA, 17 bp, Artificial Sequence
  Synthetic
gcagtgaaggcgacacg

SEQ ID NO: 11485 - DNA, 16 bp, Artificial Sequence
  Synthetic
agggacgccgcctgaa

SEQ ID NO: 11486 - DNA, 19 bp, Artificial Sequence
  Synthetic
cagagtttcttaccgccgc

SEQ ID NO: 11487 - DNA, 19 bp, Artificial Sequence
  Synthetic
taccgctaccacaactggg

SEQ ID NO: 11488 - DNA, 20 bp, Artificial Sequence
  Synthetic
cgtcattcccgacaataccg

SEQ ID NO: 11489 - DNA, 17 bp, Artificial Sequence
  Synthetic
caactcgccgtcaaccg

SEQ ID NO: 11490 - DNA, 20 bp, Artificial Sequence
  Synthetic
aaacacgtccaacagttcct

SEQ ID NO: 11491 - DNA, 20 bp, Artificial Sequence
  Synthetic
atccatcgaagacctccctg

SEQ ID NO: 11492 - DNA, 16 bp, Artificial Sequence
  Synthetic
cacatcctgcaccgcg

SEQ ID NO: 11493 - DNA, 16 bp, Artificial Sequence
  Synthetic
cggataccgccgtgca

SEQ ID NO: 11494 - DNA, 16 bp, Artificial Sequence
  Synthetic
cgccggacgaatcagc

SEQ ID NO: 11495 - DNA, 16 bp, Artificial Sequence
  Synthetic
aaacccaaacgccccg

SEQ ID NO: 11496 - DNA, 16 bp, Artificial Sequence
  Synthetic
gcgcggacggttttgc

SEQ ID NO: 11497 - DNA, 20 bp, Artificial Sequence
  Synthetic
agcccgatctgtttagaagc

SEQ ID NO: 11498 - DNA, 16 bp, Artificial Sequence
  Synthetic
acagcctcgcccagct

SEQ ID NO: 11499 - DNA, 17 bp, Artificial Sequence
  Synthetic
attcccgtccgcatcct

SEQ ID NO: 11500 - DNA, 17 bp, Artificial Sequence
  Synthetic
cagatccgcaagcgctt

SEQ ID NO: 11501 - DNA, 19 bp, Artificial Sequence
  Synthetic
ttcgggcgtaaggttttcc

SEQ ID NO: 11502 - DNA, 15 bp, Artificial Sequence
  Synthetic
ccaaacggcgcgtga

SEQ ID NO: 11503 - DNA, 19 bp, Artificial Sequence
  Synthetic
ggtaaccgtaaaccgcacg

SEQ ID NO: 11504 - DNA, 19 bp, Artificial Sequence
  Synthetic
gcataagccttcgttccgg

SEQ ID NO: 11505 - DNA, 18 bp, Artificial Sequence
  Synthetic
ccgccgcctgatattcgg

SEQ ID NO: 11506 - DNA, 16 bp, Artificial Sequence
  Synthetic
gggtttgcgccgtcaa

SEQ ID NO: 11507 - DNA, 16 bp, Artificial Sequence
  Synthetic
cgtctcgcccgggaaa

SEQ ID NO: 11508 - DNA, 20 bp, Artificial Sequence
  Synthetic
ggggtaaggcaggataaggc

SEQ ID NO: 11509 - DNA, 16 bp, Artificial Sequence
  Synthetic
tggccatccccgggat

SEQ ID NO: 11510 - DNA, 16 bp, Artificial Sequence
  Synthetic
gcggtcggcaaagtcg

SEQ ID NO: 11511 - DNA, 18 bp, Artificial Sequence
  Synthetic
cccccgacggataagcga

SEQ ID NO: 11512 - DNA, 18 bp, Artificial Sequence
  Synthetic
caatccggtgttgacgcg

SEQ ID NO: 11513 - DNA, 18 bp, Artificial Sequence
  Synthetic
gtcgggttcgggattggg

SEQ ID NO: 11514 - DNA, 18 bp, Artificial Sequence
  Synthetic
gctttctgttcttcgtgg

SEQ ID NO: 11515 - DNA, 18 bp, Artificial Sequence
  Synthetic
cccgtgtccgtctatggc

SEQ ID NO: 11516 - DNA, 19 bp, Artificial Sequence
  Synthetic
ttgtcccacatgaagctgc

SEQ ID NO: 11517 - DNA, 18 bp, Artificial Sequence
  Synthetic
gactacatcgacgcgctt

SEQ ID NO: 11518 - DNA, 17 bp, Artificial Sequence
  Synthetic
atgcggacatgagcgtg

SEQ ID NO: 11519 - DNA, 20 bp, Artificial Sequence
  Synthetic
ggcgaaagaatccctgatga

SEQ ID NO: 11520 - DNA, 18 bp, Artificial Sequence
  Synthetic
aaaccatcagccccgaac

SEQ ID NO: 11521 - DNA, 18 bp, Artificial Sequence
  Synthetic
gccgactgccaaatctgc

SEQ ID NO: 11522 - DNA, 20 bp, Artificial Sequence
  Synthetic
ttctgccgccgatattttgg

SEQ ID NO: 11523 - DNA, 19 bp, Artificial Sequence
  Synthetic
acgatatggacacacccgt

SEQ ID NO: 11524 - DNA, 18 bp, Artificial Sequence
  Synthetic
gcgaatgctgcaaatttg

SEQ ID NO: 11525 - DNA, 20 bp, Artificial Sequence
  Synthetic
gcgcttatctcttccgaact

SEQ ID NO: 11526 - DNA, 19 bp, Artificial Sequence
  Synthetic
ggaatgccgaagacaaccg

SEQ ID NO: 11527 - DNA, 20 bp, Artificial Sequence
  Synthetic
cagacggcatttccattcca

SEQ ID NO: 11528 - DNA, 20 bp, Artificial Sequence
  Synthetic
gaaagtggaaacgcacaacc

SEQ ID NO: 11529 - DNA, 16 bp, Artificial Sequence
  Synthetic
ccgtacaacgcggcaa

SEQ ID NO: 11530 - DNA, 16 bp, Artificial Sequence
  Synthetic
ctgccgtagccgccaa

SEQ ID NO: 11531 - DNA, 17 bp, Artificial Sequence
  Synthetic
catcgccgcgccgttta

SEQ ID NO: 11532 - DNA, 16 bp, Artificial Sequence
  Synthetic
aaaatgctggcggcgt

SEQ ID NO: 11533 - DNA, 18 bp, Artificial Sequence
  Synthetic
cgtcatcgtttcgcagct

SEQ ID NO: 11534 - DNA, 18 bp, Artificial Sequence
  Synthetic
gccaccgtcatcattgcc

SEQ ID NO: 11535 - DNA, 17 bp, Artificial Sequence
  Synthetic
catcgacggcattgccc

SEQ ID NO: 11536 - DNA, 16 bp, Artificial Sequence
  Synthetic
atggggctgctgctcg

SEQ ID NO: 11537 - DNA, 16 bp, Artificial Sequence
  Synthetic
gcaacgcccccatcct

SEQ ID NO: 11538 - DNA, 16 bp, Artificial Sequence
  Synthetic
acaccctgcgcgacga

SEQ ID NO: 11539 - DNA, 19 bp, Artificial Sequence
  Synthetic
ccgaactgaacggcaaact

SEQ ID NO: 11540 - DNA, 21 bp, Artificial Sequence
  Synthetic
gcttattttcagcggattcac

SEQ ID NO: 11541 - DNA, 18 bp, Artificial Sequence
  Synthetic
gcgcgtacatctgaaccg

SEQ ID NO: 11542 - DNA, 20 bp, Artificial Sequence
  Synthetic
ccatatgctcaacctcggtg

SEQ ID NO: 11543 - DNA, 17 bp, Artificial Sequence
  Synthetic
cgccgaaaccctttccg

SEQ ID NO: 11544 - DNA, 16 bp, Artificial Sequence
  Synthetic
tacccctctcgcgcga

SEQ ID NO: 11545 - DNA, 18 bp, Artificial Sequence
  Synthetic
ggcaacggtataggcccg

SEQ ID NO: 11546 - DNA, 18 bp, Artificial Sequence
  Synthetic
gcgttcgcgaatgtgtcc

SEQ ID NO: 11547 - DNA, 18 bp, Artificial Sequence
  Synthetic
cgcgattttgacggtgtg

SEQ ID NO: 11548 - DNA, 19 bp, Artificial Sequence
  Synthetic
gatgccgctccgtttaagc

SEQ ID NO: 11549 - DNA, 20 bp, Artificial Sequence
  Synthetic
tgtcaccgtgtacgatttcg

SEQ ID NO: 11550 - DNA, 17 bp, Artificial Sequence
  Synthetic
cccatttggcggcttcg

SEQ ID NO: 11551 - DNA, 16 bp, Artificial Sequence
  Synthetic
caacctgcttggccgc

SEQ ID NO: 11552 - DNA, 17 bp, Artificial Sequence
  Synthetic
attcccgccctcccttt

SEQ ID NO: 11553 - DNA, 16 bp, Artificial Sequence
  Synthetic
gctcaaccgcctgctg

SEQ ID NO: 11554 - DNA, 16 bp, Artificial Sequence
  Synthetic
gcgccgcctccaaact

SEQ ID NO: 11555 - DNA, 17 bp, Artificial Sequence
  Synthetic
tttcgtacttgccgcgc

SEQ ID NO: 11556 - DNA, 16 bp, Artificial Sequence
  Synthetic
aacgccttcgtcgccg

SEQ ID NO: 11557 - DNA, 19 bp, Artificial Sequence
  Synthetic
tccgtccgctccttcatcc

SEQ ID NO: 11558 - DNA, 18 bp, Artificial Sequence
  Synthetic
tcatgtaccgccacaacg

SEQ ID NO: 11559 - DNA, 17 bp, Artificial Sequence
  Synthetic
gcaaaggcgacctgcac

SEQ ID NO: 11560 - DNA, 19 bp, Artificial Sequence
  Synthetic
cacaaatcggctgggtagg

SEQ ID NO: 11561 - DNA, 18 bp, Artificial Sequence
  Synthetic
ggcaggtagaaaaggaca

SEQ ID NO: 11562 - DNA, 16 bp, Artificial Sequence
  Synthetic
gtccggctgggcgtat

SEQ ID NO: 11563 - DNA, 20 bp, Artificial Sequence
  Synthetic
tggaaaaagaattggcacgc

SEQ ID NO: 11564 - DNA, 15 bp, Artificial Sequence
  Synthetic
acgcaaccgcacgct

SEQ ID NO: 11565 - DNA, 18 bp, Artificial Sequence
  Synthetic
gaacctgcacgcctcatg

SEQ ID NO: 11566 - DNA, 20 bp, Artificial Sequence
  Synthetic
gtcaccaataccttcgtcgt

SEQ ID NO: 11567 - DNA, 20 bp, Artificial Sequence
  Synthetic
gtcatcctccttcataccgc

SEQ ID NO: 11568 - DNA, 23 bp, Artificial Sequence
  Synthetic
gtttactaaaacttcatcgtcct

SEQ ID NO: 11569 - DNA, 18 bp, Artificial Sequence
  Synthetic
ctgaccgaatcccgaaat

SEQ ID NO: 11570 - DNA, 17 bp, Artificial Sequence
  Synthetic
ttttcggcgggcgatac

SEQ ID NO: 11571 - DNA, 21 bp, Artificial Sequence
  Synthetic
tctaaataacgctgctcttcc

SEQ ID NO: 11572 - DNA, 17 bp, Artificial Sequence
  Synthetic
gctgcttcaggcttgcg

SEQ ID NO: 11573 - DNA, 18 bp, Artificial Sequence
  Synthetic
cctgaatcacgccgacag

SEQ ID NO: 11574 - DNA, 18 bp, Artificial Sequence
  Synthetic
accagtgctcgtatgcct

SEQ ID NO: 11575 - DNA, 19 bp, Artificial Sequence
  Synthetic
tatcctcgcaaccgaaagc

SEQ ID NO: 11576 - DNA, 16 bp, Artificial Sequence
  Synthetic
gcgcatcgatccgcaa

SEQ ID NO: 11577 - DNA, 19 bp, Artificial Sequence
  Synthetic
gcacaagtaaaagccgccc

SEQ ID NO: 11578 - DNA, 19 bp, Artificial Sequence
  Synthetic
cgcagaaacctaccgaagc

SEQ ID NO: 11579 - DNA, 19 bp, Artificial Sequence
  Synthetic
caatgactgcgggctttgt

SEQ ID NO: 11580 - DNA, 16 bp, Artificial Sequence
  Synthetic
agtccgggcgtgtcat

SEQ ID NO: 11581 - DNA, 16 bp, Artificial Sequence
  Synthetic
tgtctccagcgcggca

SEQ ID NO: 11582 - DNA, 17 bp, Artificial Sequence
  Synthetic
ccgacaccagcattccg

SEQ ID NO: 11583 - DNA, 18 bp, Artificial Sequence
  Synthetic
gggtacgaaagggctgga

SEQ ID NO: 11584 - DNA, 18 bp, Artificial Sequence
  Synthetic
ccattgcccgaacggaaa

SEQ ID NO: 11585 - DNA, 18 bp, Artificial Sequence
  Synthetic
acggtgcgttgacgatac

SEQ ID NO: 11586 - DNA, 17 bp, Artificial Sequence
  Synthetic
agctgtttcggcggacg

SEQ ID NO: 11587 - DNA, 19 bp, Artificial Sequence
  Synthetic
actggcgttacaaccggta

SEQ ID NO: 11588 - DNA, 18 bp, Artificial Sequence
  Synthetic
tctttccccgaaacaagt

SEQ ID NO: 11589 - DNA, 18 bp, Artificial Sequence
  Synthetic
cgaacgccatcacgtctg

SEQ ID NO: 11590 - DNA, 18 bp, Artificial Sequence
  Synthetic
aacccgacgcgctgatta

SEQ ID NO: 11591 - DNA, 19 bp, Artificial Sequence
  Synthetic
cactttcccgatgaagccg

SEQ ID NO: 11592 - DNA, 16 bp, Artificial Sequence
  Synthetic
aacctgttgcagccgc

SEQ ID NO: 11593 - DNA, 18 bp, Artificial Sequence
  Synthetic
gcgtggaagttactgccc

SEQ ID NO: 11594 - DNA, 18 bp, Artificial Sequence
  Synthetic
cccctaccgcatcaacac

SEQ ID NO: 11595 - DNA, 20 bp, Artificial Sequence
  Synthetic
tcaaccccaacgaatttgcc

SEQ ID NO: 11596 - DNA, 20 bp, Artificial Sequence
  Synthetic
tgttgaacttccagcaggtg

SEQ ID NO: 11597 - DNA, 17 bp, Artificial Sequence
  Synthetic
gggcatgggtccgattg

SEQ ID NO: 11598 - DNA, 17 bp, Artificial Sequence
  Synthetic
tcgccaaacgcctgatg

SEQ ID NO: 11599 - DNA, 20 bp, Artificial Sequence
  Synthetic
gaaagacgacaacccactgg

SEQ ID NO: 11600 - DNA, 17 bp, Artificial Sequence
  Synthetic
accgggaatcgaaccgc

SEQ ID NO: 11601 - DNA, 17 bp, Artificial Sequence
  Synthetic
cggtgcaggaaatccgc

SEQ ID NO: 11602 - DNA, 17 bp, Artificial Sequence
  Synthetic
gcgttgccgaaaagctg

SEQ ID NO: 11603 - DNA, 16 bp, Artificial Sequence
  Synthetic
cttcctgtgcgtcggc

SEQ ID NO: 11604 - DNA, 20 bp, Artificial Sequence
  Synthetic
aagcgaaccgtcttcatgaa

SEQ ID NO: 11605 - DNA, 20 bp, Artificial Sequence
  Synthetic
tcaaagtcagcatcagaccg

SEQ ID NO: 11606 - DNA, 17 bp, Artificial Sequence
  Synthetic
tatcggtgcgcaggtcg

SEQ ID NO: 11607 - DNA, 19 bp, Artificial Sequence
  Synthetic
gcgtaaagtcttgcacggc

SEQ ID NO: 11608 - DNA, 17 bp, Artificial Sequence
  Synthetic
cggatttcgaggccgtc

SEQ ID NO: 11609 - DNA, 20 bp, Artificial Sequence
  Synthetic
cttttcagacggcattcggc

SEQ ID NO: 11610 - DNA, 19 bp, Artificial Sequence
  Synthetic
acactgcatccgcattgct

SEQ ID NO: 11611 - DNA, 16 bp, Artificial Sequence
  Synthetic
cccaaccgggccaaca

SEQ ID NO: 11612 - DNA, 19 bp, Artificial Sequence
  Synthetic
caataccgcctgtaccacg

SEQ ID NO: 11613 - DNA, 19 bp, Artificial Sequence
  Synthetic
atcgaaactacgcgccatt

SEQ ID NO: 11614 - DNA, 16 bp, Artificial Sequence
  Synthetic
cgcgacgaagccgaag

SEQ ID NO: 11615 - DNA, 18 bp, Artificial Sequence
  Synthetic
tcctcgcctttcagacgg

SEQ ID NO: 11616 - DNA, 16 bp, Artificial Sequence
  Synthetic
ggcgggcgcaatcgaa

SEQ ID NO: 11617 - DNA, 16 bp, Artificial Sequence
  Synthetic
gccggcggcaaaagga

SEQ ID NO: 11618 - DNA, 18 bp, Artificial Sequence
  Synthetic
ccgcccaattcgacagaa

SEQ ID NO: 11619 - DNA, 17 bp, Artificial Sequence
  Synthetic
cagtgctgcttcgctgc

SEQ ID NO: 11620 - DNA, 16 bp, Artificial Sequence
  Synthetic
cggctgcaaccgccaa

SEQ ID NO: 11621 - DNA, 17 bp, Artificial Sequence
  Synthetic
cgttgcagacggccttg

SEQ ID NO: 11622 - DNA, 19 bp, Artificial Sequence
  Synthetic
gggtaacttgtgctagcgt

SEQ ID NO: 11623 - DNA, 16 bp, Artificial Sequence
  Synthetic
ggcagcaggctttccg

SEQ ID NO: 11624 - DNA, 16 bp, Artificial Sequence
  Synthetic
caggatttcgcgcgcg

SEQ ID NO: 11625 - DNA, 16 bp, Artificial Sequence
  Synthetic
ctccgcatcggcacca

SEQ ID NO: 11626 - DNA, 20 bp, Artificial Sequence
  Synthetic
gactgccttttggtcatcgg

SEQ ID NO: 11627 - DNA, 18 bp, Artificial Sequence
  Synthetic
taccacgcgctgacatcc

SEQ ID NO: 11628 - DNA, 18 bp, Artificial Sequence
  Synthetic
ccaatgaggcaagcagcg

SEQ ID NO: 11629 - DNA, 18 bp, Artificial Sequence
  Synthetic
cacgactgaaacggggtt

SEQ ID NO: 11630 - DNA, 19 bp, Artificial Sequence
  Synthetic
ggaatgccggcatattgga

SEQ ID NO: 11631 - DNA, 18 bp, Artificial Sequence
  Synthetic
atgcctacaccacattgc

SEQ ID NO: 11632 - DNA, 20 bp, Artificial Sequence
  Synthetic
ttccgtcaactggctttacg

SEQ ID NO: 11633 - DNA, 16 bp, Artificial Sequence
  Synthetic
ggcggcgttgcaggaa

SEQ ID NO: 11634 - DNA, 20 bp, Artificial Sequence
  Synthetic
gttgtagaggtgcagttcgg

SEQ ID NO: 11635 - DNA, 16 bp, Artificial Sequence
  Synthetic
tggcgctgtcggggtt

SEQ ID NO: 11636 - DNA, 16 bp, Artificial Sequence
  Synthetic
gccgccgaagtgctgt

SEQ ID NO: 11637 - DNA, 18 bp, Artificial Sequence
  Synthetic
aagggtttccaaacggcg

SEQ ID NO: 11638 - DNA, 20 bp, Artificial Sequence
  Synthetic
tttggcaagctgtttcatcg

SEQ ID NO: 11639 - DNA, 17 bp, Artificial Sequence
  Synthetic
tggctcgccgttgaaga

SEQ ID NO: 11640 - DNA, 17 bp, Artificial Sequence
  Synthetic
cgacttcgcccgcaatc

SEQ ID NO: 11641 - DNA, 18 bp, Artificial Sequence
  Synthetic
gattcagacggcatcggc

SEQ ID NO: 11642 - DNA, 17 bp, Artificial Sequence
  Synthetic
ggcggcaaactcttggg

SEQ ID NO: 11643 - DNA, 17 bp, Artificial Sequence
  Synthetic
gtccggcgaacttgtgc

SEQ ID NO: 11644 - DNA, 17 bp, Artificial Sequence
  Synthetic
acggcgtgatgatcggc

SEQ ID NO: 11645 - DNA, 19 bp, Artificial Sequence
  Synthetic
ctgcaccatcacgaactct

SEQ ID NO: 11646 - DNA, 18 bp, Artificial Sequence
  Synthetic
tgcacccacaaactcacg

SEQ ID NO: 11647 - DNA, 17 bp, Artificial Sequence
  Synthetic
tcaccagcttcgcctgc

SEQ ID NO: 11648 - DNA, 16 bp, Artificial Sequence
  Synthetic
gcggtatcgagtgcgc

SEQ ID NO: 11649 - DNA, 20 bp, Artificial Sequence
  Synthetic
gacggcatttttgacatccc

SEQ ID NO: 11650 - DNA, 20 bp, Artificial Sequence
  Synthetic
gcaccgacatttctttgacc

SEQ ID NO: 11651 - DNA, 19 bp, Artificial Sequence
  Synthetic
gccgattctttcgccaacg

SEQ ID NO: 11652 - DNA, 16 bp, Artificial Sequence
  Synthetic
cggcggcttcctgcaa

SEQ ID NO: 11653 - DNA, 19 bp, Artificial Sequence
  Synthetic
tgcgcttggatttggttca

SEQ ID NO: 11654 - DNA, 16 bp, Artificial Sequence
  Synthetic
gggcgcggtgatgtgt

SEQ ID NO: 11655 - DNA, 18 bp, Artificial Sequence
  Synthetic
tgcttggcaacggtttgt

SEQ ID NO: 11656 - DNA, 17 bp, Artificial Sequence
  Synthetic
aatgcccaagcggtggc

SEQ ID NO: 11657 - DNA, 16 bp, Artificial Sequence
  Synthetic
ccgtatctgggcgcga

SEQ ID NO: 11658 - DNA, 18 bp, Artificial Sequence
  Synthetic
ggcgacgaatccctctcc

SEQ ID NO: 11659 - DNA, 20 bp, Artificial Sequence
  Synthetic
ggcatccgtgttttggaaac

SEQ ID NO: 11660 - DNA, 17 bp, Artificial Sequence
  Synthetic
atgggtggacagccgct

SEQ ID NO: 11661 - DNA, 20 bp, Artificial Sequence
  Synthetic
cccacagcagaacaaaaacg

SEQ ID NO: 11662 - DNA, 17 bp, Artificial Sequence
  Synthetic
cgagttcggcagcttcc

SEQ ID NO: 11663 - DNA, 18 bp, Artificial Sequence
  Synthetic
tccccagttgtggtagcg

SEQ ID NO: 11664 - DNA, 16 bp, Artificial Sequence
  Synthetic
gtccgccgcgtcgaaa

SEQ ID NO: 11665 - DNA, 19 bp, Artificial Sequence
  Synthetic
ttgatgcggttgatgtcgg

SEQ ID NO: 11666 - DNA, 20 bp, Artificial Sequence
  Synthetic
atctgtttgacggtttcgcc

SEQ ID NO: 11667 - DNA, 16 bp, Artificial Sequence
  Synthetic
cttcgagttcggcggc

SEQ ID NO: 11668 - DNA, 16 bp, Artificial Sequence
  Synthetic
agcagcagggacagcg

SEQ ID NO: 11669 - DNA, 20 bp, Artificial Sequence
  Synthetic
gggatgatactgctgcacgt

SEQ ID NO: 11670 - DNA, 18 bp, Artificial Sequence
  Synthetic
cgcctatccgaacaggcc

SEQ ID NO: 11671 - DNA, 22 bp, Artificial Sequence
  Synthetic
aaatcatgagcaattacgaaga

SEQ ID NO: 11672 - DNA, 18 bp, Artificial Sequence
  Synthetic
agtcaatacgatgcagcc

SEQ ID NO: 11673 - DNA, 20 bp, Artificial Sequence
  Synthetic
agaacgccctgatactaact

SEQ ID NO: 11674 - DNA, 20 bp, Artificial Sequence
  Synthetic
tgatgcaaatgaccgtgatt

SEQ ID NO: 11675 - DNA, 19 bp, Artificial Sequence
  Synthetic
ataacgaagaacctcagcc

SEQ ID NO: 11676 - DNA, 20 bp, Artificial Sequence
  Synthetic
cgaacttgaccctaagcagc

SEQ ID NO: 11677 - DNA, 20 bp, Artificial Sequence
  Synthetic
gaaacgcatcactttatcgg

SEQ ID NO: 11678 - DNA, 18 bp, Artificial Sequence
  Synthetic
ctgtttagggctgcgttc

SEQ ID NO: 11679 - DNA, 21 bp, Artificial Sequence
  Synthetic
aaccagtttgcatcaaaacac

SEQ ID NO: 11680 - DNA, 20 bp, Artificial Sequence
  Synthetic
caccgtattcaaaggtatgg

SEQ ID NO: 11681 - DNA, 19 bp, Artificial Sequence
  Synthetic
tccaaatggaaaactgcca

SEQ ID NO: 11682 - DNA, 20 bp, Artificial Sequence
  Synthetic
caattccaacacgttttcca

SEQ ID NO: 11683 - DNA, 22 bp, Artificial Sequence
  Synthetic
tctgccaaaatcaaacttttcg

SEQ ID NO: 11684 - DNA, 17 bp, Artificial Sequence
  Synthetic
tactgcgaccaacccga

SEQ ID NO: 11685 - DNA, 16 bp, Artificial Sequence
  Synthetic
tgaagccttgcgcgtc

SEQ ID NO: 11686 - DNA, 21 bp, Artificial Sequence
  Synthetic
ttttgatggtttgatggtttg

SEQ ID NO: 11687 - DNA, 18 bp, Artificial Sequence
  Synthetic
ttgccgcaaacagcatct

SEQ ID NO: 11688 - DNA, 18 bp, Artificial Sequence
  Synthetic
caaatcatccgccgcacc

SEQ ID NO: 11689 - DNA, 20 bp, Artificial Sequence
  Synthetic
acgtgttcatcccattgagc

SEQ ID NO: 11690 - DNA, 19 bp, Artificial Sequence
  Synthetic
gccaatttcgccgtattgc

SEQ ID NO: 11691 - DNA, 16 bp, Artificial Sequence
  Synthetic
cggcgaggatgcggat

SEQ ID NO: 11692 - DNA, 16 bp, Artificial Sequence
  Synthetic
tcaggctgacgcggct

SEQ ID NO: 11693 - DNA, 16 bp, Artificial Sequence
  Synthetic
ccgtgtccggcgttga

SEQ ID NO: 11694 - DNA, 16 bp, Artificial Sequence
  Synthetic
cgcgcgcggtcagttt

SEQ ID NO: 11695 - DNA, 18 bp, Artificial Sequence
  Synthetic
ctgacgggtttcgacctg

SEQ ID NO: 11696 - DNA, 16 bp, Artificial Sequence
  Synthetic
gcatgcctgcgtgtcc

SEQ ID NO: 11697 - DNA, 19 bp, Artificial Sequence
  Synthetic
acggtataactttgcgcca

SEQ ID NO: 11698 - DNA, 18 bp, Artificial Sequence
  Synthetic
gagtttcttaccgccgcc

SEQ ID NO: 11699 - DNA, 17 bp, Artificial Sequence
  Synthetic
aactggggacgcctgga

SEQ ID NO: 11700 - DNA, 16 bp, Artificial Sequence
  Synthetic
ccgtcattcccgcgca

SEQ ID NO: 11701 - DNA, 20 bp, Artificial Sequence
  Synthetic
agtgccggaagaaaatacgg

SEQ ID NO: 11702 - DNA, 16 bp, Artificial Sequence
  Synthetic
cagttccgtgccgtcg

SEQ ID NO: 11703 - DNA, 19 bp, Artificial Sequence
  Synthetic
ggcacggcataagtgtagg

SEQ ID NO: 11704 - DNA, 17 bp, Artificial Sequence
  Synthetic
ggccgtccattgtccgt

SEQ ID NO: 11705 - DNA, 18 bp, Artificial Sequence
  Synthetic
agtttgcccatgctcagg

SEQ ID NO: 11706 - DNA, 18 bp, Artificial Sequence
  Synthetic
cactgccggccaaaatcg

SEQ ID NO: 11707 - DNA, 16 bp, Artificial Sequence
  Synthetic
ggcggcgacaacgttg

SEQ ID NO: 11708 - DNA, 16 bp, Artificial Sequence
  Synthetic
gcagtcgcgccgaact

SEQ ID NO: 11709 - DNA, 16 bp, Artificial Sequence
  Synthetic
gtcagctccacgccga

SEQ ID NO: 11710 - DNA, 20 bp, Artificial Sequence
  Synthetic
tcaaaaacattgccttcgcc

SEQ ID NO: 11711 - DNA, 17 bp, Artificial Sequence
  Synthetic
gggttgccgccatttcg

SEQ ID NO: 11712 - DNA, 17 bp, Artificial Sequence
  Synthetic
tcggtatgcgcttccgg

SEQ ID NO: 11713 - DNA, 16 bp, Artificial Sequence
  Synthetic
gccgtctgaaccgcct

SEQ ID NO: 11714 - DNA, 18 bp, Artificial Sequence
  Synthetic
cgcaatcaccttgtcgcc

SEQ ID NO: 11715 - DNA, 18 bp, Artificial Sequence
  Synthetic
caacagggtggacacggt

SEQ ID NO: 11716 - DNA, 17 bp, Artificial Sequence
  Synthetic
ggttgcgcccttgatgc

SEQ ID NO: 11717 - DNA, 16 bp, Artificial Sequence
  Synthetic
acggcgggcaggatgt

SEQ ID NO: 11718 - DNA, 16 bp, Artificial Sequence
  Synthetic
ggcacgccgttgactc

SEQ ID NO: 11719 - DNA, 19 bp, Artificial Sequence
  Synthetic
tgccttcgcaatcacgaac

SEQ ID NO: 11720 - DNA, 18 bp, Artificial Sequence
  Synthetic
ccatacaggctgtcttca

SEQ ID NO: 11721 - DNA, 19 bp, Artificial Sequence
  Synthetic
cgtatagaggcgcgacaga

SEQ ID NO: 11722 - DNA, 20 bp, Artificial Sequence
  Synthetic
cggtttgttcacgctcttcc

SEQ ID NO: 11723 - DNA, 19 bp, Artificial Sequence
  Synthetic
aaaccgaagaagaaaccgg

SEQ ID NO: 11724 - DNA, 18 bp, Artificial Sequence
  Synthetic
ttcgctgacgctcaaagc

SEQ ID NO: 11725 - DNA, 19 bp, Artificial Sequence
  Synthetic
accgcgactatgtcaaagc

SEQ ID NO: 11726 - DNA, 16 bp, Artificial Sequence
  Synthetic
acacccccgcgctgat

SEQ ID NO: 11727 - DNA, 16 bp, Artificial Sequence
  Synthetic
aacttcccgctcgcca

SEQ ID NO: 11728 - DNA, 16 bp, Artificial Sequence
  Synthetic
cgggtgcggcattgac

SEQ ID NO: 11729 - DNA, 16 bp, Artificial Sequence
  Synthetic
aggccttctgcgccct

SEQ ID NO: 11730 - DNA, 18 bp, Artificial Sequence
  Synthetic
aggtctcggtgtcatcgc

SEQ ID NO: 11731 - DNA, 20 bp, Artificial Sequence
  Synthetic
agcagtccccaaacaaatcc

SEQ ID NO: 11732 - DNA, 19 bp, Artificial Sequence
  Synthetic
ggcacgcaaatcgaaatcc

SEQ ID NO: 11733 - DNA, 16 bp, Artificial Sequence
  Synthetic
tctgacctgcgcggac

SEQ ID NO: 11734 - DNA, 18 bp, Artificial Sequence
  Synthetic
gtggtcgggagaggacga

SEQ ID NO: 11735 - DNA, 16 bp, Artificial Sequence
  Synthetic
ccgccgaaaccgccaa

SEQ ID NO: 11736 - DNA, 18 bp, Artificial Sequence
  Synthetic
tcccattcgttgtggcac

SEQ ID NO: 11737 - DNA, 18 bp, Artificial Sequence
  Synthetic
gcaaaatcgcaaggcagc

SEQ ID NO: 11738 - DNA, 18 bp, Artificial Sequence
  Synthetic
gcggtttgagcgcatcaa

SEQ ID NO: 11739 - DNA, 17 bp, Artificial Sequence
  Synthetic
aacatcctgtgccgccc

SEQ ID NO: 11740 - DNA, 20 bp, Artificial Sequence
  Synthetic
gagaatgccgtctgaaatgt

SEQ ID NO: 11741 - DNA, 16 bp, Artificial Sequence
  Synthetic
cggaagggcacgcctt

SEQ ID NO: 11742 - DNA, 16 bp, Artificial Sequence
  Synthetic
tcgtccccgcctttca

SEQ ID NO: 11743 - DNA, 16 bp, Artificial Sequence
  Synthetic
acaaccccgacagcgc

SEQ ID NO: 11744 - DNA, 18 bp, Artificial Sequence
  Synthetic
gtccgcctgttccgaaat

SEQ ID NO: 11745 - DNA, 19 bp, Artificial Sequence
  Synthetic
ggcaaacgttaccgtaccg

SEQ ID NO: 11746 - DNA, 20 bp, Artificial Sequence
  Synthetic
tctgatttccaagatggcgc

SEQ ID NO: 11747 - DNA, 20 bp, Artificial Sequence
  Synthetic
tgtccacaatcatgcccaaa

SEQ ID NO: 11748 - DNA, 20 bp, Artificial Sequence
  Synthetic
gaacttgccaaagacgctca

SEQ ID NO: 11749 - DNA, 19 bp, Artificial Sequence
  Synthetic
aaaccctcaaagcctacgc

SEQ ID NO: 11750 - DNA, 19 bp, Artificial Sequence
  Synthetic
gccgcctatcaagattggg

SEQ ID NO: 11751 - DNA, 17 bp, Artificial Sequence
  Synthetic
gcaaacagccgtcgtgg

SEQ ID NO: 11752 - DNA, 18 bp, Artificial Sequence
  Synthetic
ggcgttacccacatcgtg

SEQ ID NO: 11753 - DNA, 16 bp, Artificial Sequence
  Synthetic
ggctgtggcggacgat

SEQ ID NO: 11754 - DNA, 19 bp, Artificial Sequence
  Synthetic
ttcgttcatcagacacgcg

SEQ ID NO: 11755 - DNA, 16 bp, Artificial Sequence
  Synthetic
ttacggcccggaccaa

SEQ ID NO: 11756 - DNA, 18 bp, Artificial Sequence
  Synthetic
cgcaggcgcaaaaaaacc

SEQ ID NO: 11757 - DNA, 16 bp, Artificial Sequence
  Synthetic
ccgcaaaacccacggc

SEQ ID NO: 11758 - DNA, 19 bp, Artificial Sequence
  Synthetic
atatccccgtcgtcttggt

SEQ ID NO: 11759 - DNA, 20 bp, Artificial Sequence
  Synthetic
cgtgatacgccttatcctgc

SEQ ID NO: 11760 - DNA, 16 bp, Artificial Sequence
  Synthetic
ggttttcggcgggcga

SEQ ID NO: 11761 - DNA, 16 bp, Artificial Sequence
  Synthetic
caaagagacgggcggc

SEQ ID NO: 11762 - DNA, 17 bp, Artificial Sequence
  Synthetic
ttgatgctgacggcgtg

SEQ ID NO: 11763 - DNA, 18 bp, Artificial Sequence
  Synthetic
gagattcggctcgttgat

SEQ ID NO: 11764 - DNA, 20 bp, Artificial Sequence
  Synthetic
accagaacaatactgtcggc

SEQ ID NO: 11765 - DNA, 20 bp, Artificial Sequence
  Synthetic
ccacaggggatacatcttgc

SEQ ID NO: 11766 - DNA, 17 bp, Artificial Sequence
  Synthetic
gcggcagcgttaccgtt

SEQ ID NO: 11767 - DNA, 18 bp, Artificial Sequence
  Synthetic
cgtgtttcatcaggccgg

SEQ ID NO: 11768 - DNA, 20 bp, Artificial Sequence
  Synthetic
tattcggcgtaaacgtctgc

SEQ ID NO: 11769 - DNA, 18 bp, Artificial Sequence
  Synthetic
gtccacgcgtttgacgat

SEQ ID NO: 11770 - DNA, 20 bp, Artificial Sequence
  Synthetic
ctgccttcttcgacaatcgc

SEQ ID NO: 11771 - DNA, 16 bp, Artificial Sequence
  Synthetic
cccgctagcagttcgc

SEQ ID NO: 11772 - DNA, 17 bp, Artificial Sequence
  Synthetic
ggcggatttcgggcaac

SEQ ID NO: 11773 - DNA, 16 bp, Artificial Sequence
  Synthetic
gtatggcgggcggtca

SEQ ID NO: 11774 - DNA, 23 bp, Artificial Sequence
  Synthetic
aacaggcaaataacaatacaatg

SEQ ID NO: 11775 - DNA, 17 bp, Artificial Sequence
  Synthetic
ctacggcaaacgcagcg

SEQ ID NO: 11776 - DNA, 17 bp, Artificial Sequence
  Synthetic
ggtaatcacgccgtcgg

SEQ ID NO: 11777 - DNA, 15 bp, Artificial Sequence
  Synthetic
aaaacgcgggctgcc

SEQ ID NO: 11778 - DNA, 20 bp, Artificial Sequence
  Synthetic
tgtttatggacgatttgcgc

SEQ ID NO: 11779 - DNA, 21 bp, Artificial Sequence
  Synthetic
cttacctcattgtttcacaca

SEQ ID NO: 11780 - DNA, 20 bp, Artificial Sequence
  Synthetic
atcccaaagtttcaagccgt

SEQ ID NO: 11781 - DNA, 20 bp, Artificial Sequence
  Synthetic
tcatcacgatatgcagcctg

SEQ ID NO: 11782 - DNA, 16 bp, Artificial Sequence
  Synthetic
tcgacctcacccgcaa

SEQ ID NO: 11783 - DNA, 20 bp, Artificial Sequence
  Synthetic
attccgattatcgatgccgc

SEQ ID NO: 11784 - DNA, 18 bp, Artificial Sequence
  Synthetic
aatgccagccccatcagc

SEQ ID NO: 11785 - DNA, 20 bp, Artificial Sequence
  Synthetic
acagggcgaactctacatcc

SEQ ID NO: 11786 - DNA, 18 bp, Artificial Sequence
  Synthetic
tcgccaaactccccttcg

SEQ ID NO: 11787 - DNA, 19 bp, Artificial Sequence
  Synthetic
cagcaaaaggggatacagg

SEQ ID NO: 11788 - DNA, 20 bp, Artificial Sequence
  Synthetic
ttctcgtaaggattggcgac

SEQ ID NO: 11789 - DNA, 16 bp, Artificial Sequence
  Synthetic
cgtgggtgcggctcat

SEQ ID NO: 11790 - DNA, 19 bp, Artificial Sequence
  Synthetic
tcggcaaaacgggaaaacc

SEQ ID NO: 11791 - DNA, 16 bp, Artificial Sequence
  Synthetic
ccggcatcgcgcactt

SEQ ID NO: 11792 - DNA, 16 bp, Artificial Sequence
  Synthetic
atcggcgtgccaaacc

SEQ ID NO: 11793 - DNA, 18 bp, Artificial Sequence
  Synthetic
ctgctcgaggaaggcatc

SEQ ID NO: 11794 - DNA, 20 bp, Artificial Sequence
  Synthetic
ggcaatgccgtctgaaaagc

SEQ ID NO: 11795 - DNA, 19 bp, Artificial Sequence
  Synthetic
cgtcagtttgtaacgccct

SEQ ID NO: 11796 - DNA, 16 bp, Artificial Sequence
  Synthetic
taccttggacggcggc

SEQ ID NO: 11797 - DNA, 18 bp, Artificial Sequence
  Synthetic
acacgcgctacttcctcc

SEQ ID NO: 11798 - DNA, 18 bp, Artificial Sequence
  Synthetic
caacgccgaacacatccg

SEQ ID NO: 11799 - DNA, 20 bp, Artificial Sequence
  Synthetic
ctgcgtcaaaaactcgaagc

SEQ ID NO: 11800 - DNA, 17 bp, Artificial Sequence
  Synthetic
ggcagacctgacgatgc

SEQ ID NO: 11801 - DNA, 17 bp, Artificial Sequence
  Synthetic
cgccctgaccaccaaag

SEQ ID NO: 11802 - DNA, 16 bp, Artificial Sequence
  Synthetic
tggtacggcggcaggt

SEQ ID NO: 11803 - DNA, 16 bp, Artificial Sequence
  Synthetic
cggcatcggcgcgaaa

SEQ ID NO: 11804 - DNA, 20 bp, Artificial Sequence
  Synthetic
gggcaaaatcgtagagtggc

SEQ ID NO: 11805 - DNA, 18 bp, Artificial Sequence
  Synthetic
ctctttttccacggcgcg

SEQ ID NO: 11806 - DNA, 19 bp, Artificial Sequence
  Synthetic
aactcctcgaaaaacgcgg

SEQ ID NO: 11807 - DNA, 17 bp, Artificial Sequence
  Synthetic
ccaaattaccgccggct

SEQ ID NO: 11808 - DNA, 20 bp, Artificial Sequence
  Synthetic
actcccaaccctgattgtgt

SEQ ID NO: 11809 - DNA, 19 bp, Artificial Sequence
  Synthetic
gttttcgcactcgttgtcc

SEQ ID NO: 11810 - DNA, 17 bp, Artificial Sequence
  Synthetic
aagacgtgctgccctgt

SEQ ID NO: 11811 - DNA, 18 bp, Artificial Sequence
  Synthetic
tcgcggcgtgaatcaatg

SEQ ID NO: 11812 - DNA, 18 bp, Artificial Sequence
  Synthetic
catcgcgctgataccgaa

SEQ ID NO: 11813 - DNA, 19 bp, Artificial Sequence
  Synthetic
aacaacaccattacggcgc

SEQ ID NO: 11814 - DNA, 20 bp, Artificial Sequence
  Synthetic
acggcgcacgatagaatcag

SEQ ID NO: 11815 - DNA, 20 bp, Artificial Sequence
  Synthetic
ctgtcgggttgttttgctct

SEQ ID NO: 11816 - DNA, 18 bp, Artificial Sequence
  Synthetic
cataatgccgcctacgcc

SEQ ID NO: 11817 - DNA, 16 bp, Artificial Sequence
  Synthetic
cggttccggcgggttt

SEQ ID NO: 11818 - DNA, 18 bp, Artificial Sequence
  Synthetic
tacgtttggggcgcaatc

SEQ ID NO: 11819 - DNA, 17 bp, Artificial Sequence
  Synthetic
gccaccctgttcggact

SEQ ID NO: 11820 - DNA, 18 bp, Artificial Sequence
  Synthetic
cgaaagcgggaatccagg

SEQ ID NO: 11821 - DNA, 17 bp, Artificial Sequence
  Synthetic
cacgcccgtgttcttcc

SEQ ID NO: 11822 - DNA, 20 bp, Artificial Sequence
  Synthetic
gcattgtcttcactgttggc

SEQ ID NO: 11823 - DNA, 18 bp, Artificial Sequence
  Synthetic
ccagtcaggggcacaaag

SEQ ID NO: 11824 - DNA, 19 bp, Artificial Sequence
  Synthetic
gtgcgtctatgctcggttc

SEQ ID NO: 11825 - DNA, 19 bp, Artificial Sequence
  Synthetic
cccattctacgccgttgat

SEQ ID NO: 11826 - DNA, 16 bp, Artificial Sequence
  Synthetic
cgcagttcgggcgtgt

SEQ ID NO: 11827 - DNA, 16 bp, Artificial Sequence
  Synthetic
gttccgccgccgaagt

SEQ ID NO: 11828 - DNA, 16 bp, Artificial Sequence
  Synthetic
aacacccggctctggc

SEQ ID NO: 11829 - DNA, 16 bp, Artificial Sequence
  Synthetic
gcgcaatcggcatcct

SEQ ID NO: 11830 - DNA, 18 bp, Artificial Sequence
  Synthetic
tgggcttaacttgcgacc

SEQ ID NO: 11831 - DNA, 18 bp, Artificial Sequence
  Synthetic
gtaaacgaggcatccggg

SEQ ID NO: 11832 - DNA, 20 bp, Artificial Sequence
  Synthetic
atcagaatcatcagcggcac

SEQ ID NO: 11833 - DNA, 16 bp, Artificial Sequence
  Synthetic
cgcgccgtttcagcct

SEQ ID NO: 11834 - DNA, 19 bp, Artificial Sequence
  Synthetic
atgccgtctgaaactcggg

SEQ ID NO: 11835 - DNA, 17 bp, Artificial Sequence
  Synthetic
cagggcgaatacgggga

SEQ ID NO: 11836 - DNA, 17 bp, Artificial Sequence
  Synthetic
caccgtgtaccgccaca

SEQ ID NO: 11837 - DNA, 16 bp, Artificial Sequence
  Synthetic
gcgcccgcgtacagat

SEQ ID NO: 11838 - DNA, 18 bp, Artificial Sequence
  Synthetic
tttgcgcatggttcagga

SEQ ID NO: 11839 - DNA, 17 bp, Artificial Sequence
  Synthetic
cacccgttgcagatgcc

SEQ ID NO: 11840 - DNA, 17 bp, Artificial Sequence
  Synthetic
caaagtccgttccgccg

SEQ ID NO: 11841 - DNA, 16 bp, Artificial Sequence
  Synthetic
ggcaccgaaagccgca

SEQ ID NO: 11842 - DNA, 16 bp, Artificial Sequence
  Synthetic
tctcgacggcggtctc

SEQ ID NO: 11843 - DNA, 17 bp, Artificial Sequence
  Synthetic
gtgatcaccgcgatggg

SEQ ID NO: 11844 - DNA, 19 bp, Artificial Sequence
  Synthetic
gcaaaaactcgccgaagac

SEQ ID NO: 11845 - DNA, 16 bp, Artificial Sequence
  Synthetic
gcacttcccgggcgat

SEQ ID NO: 11846 - DNA, 15 bp, Artificial Sequence
  Synthetic
tgcccgtcgtcgcat

SEQ ID NO: 11847 - DNA, 17 bp, Artificial Sequence
  Synthetic
gtgcatgctcatcggcg

SEQ ID NO: 11848 - DNA, 15 bp, Artificial Sequence
  Synthetic
agcaacggcaggcgt

SEQ ID NO: 11849 - DNA, 20 bp, Artificial Sequence
  Synthetic
aaatcgtcaacaccaccgag

SEQ ID NO: 11850 - DNA, 17 bp, Artificial Sequence
  Synthetic
cgccatcaaccccgaac

SEQ ID NO: 11851 - DNA, 16 bp, Artificial Sequence
  Synthetic
cccttttggacgcgcg

SEQ ID NO: 11852 - DNA, 18 bp, Artificial Sequence
  Synthetic
catcccgatgatgccctg

SEQ ID NO: 11853 - DNA, 20 bp, Artificial Sequence
  Synthetic
ccgacttcaccatccaagac

SEQ ID NO: 11854 - DNA, 18 bp, Artificial Sequence
  Synthetic
aaaaccggcatctcaggc

SEQ ID NO: 11855 - DNA, 18 bp, Artificial Sequence
  Synthetic
tttcccattttgcggcgt

SEQ ID NO: 11856 - DNA, 16 bp, Artificial Sequence
  Synthetic
aagtttccggcggcac

SEQ ID NO: 11857 - DNA, 20 bp, Artificial Sequence
  Synthetic
gaagaactgtggcaaaccgt

SEQ ID NO: 11858 - DNA, 20 bp, Artificial Sequence
  Synthetic
agcatctaattgagtctcgt

SEQ ID NO: 11859 - DNA, 18 bp, Artificial Sequence
  Synthetic
gcacatgcacgatgagat

SEQ ID NO: 11860 - DNA, 20 bp, Artificial Sequence
  Synthetic
ccaaaatacgaccaaaacgc

SEQ ID NO: 11861 - DNA, 20 bp, Artificial Sequence
  Synthetic
atgccgtctgaaaattcttg

SEQ ID NO: 11862 - DNA, 20 bp, Artificial Sequence
  Synthetic
ccgcgcttttaggaacttca

SEQ ID NO: 11863 - DNA, 20 bp, Artificial Sequence
  Synthetic
acaaagccgtctgaagtacc

SEQ ID NO: 11864 - DNA, 18 bp, Artificial Sequence
  Synthetic
gcgccgtatgcttccaat

SEQ ID NO: 11865 - DNA, 18 bp, Artificial Sequence
  Synthetic
ggtatttccccgcacctg

SEQ ID NO: 11866 - DNA, 20 bp, Artificial Sequence
  Synthetic
taatcagtttgtggcagcct

SEQ ID NO: 11867 - DNA, 19 bp, Artificial Sequence
  Synthetic
tcttgggcgatgtggtact

SEQ ID NO: 11868 - DNA, 17 bp, Artificial Sequence
  Synthetic
cggcggaaagctggatg

SEQ ID NO: 11869 - DNA, 19 bp, Artificial Sequence
  Synthetic
aacggctgaaagacaacga

SEQ ID NO: 11870 - DNA, 19 bp, Artificial Sequence
  Synthetic
tcagcacataacgcggatt

SEQ ID NO: 11871 - DNA, 16 bp, Artificial Sequence
  Synthetic
acccgcgcggaagtca

SEQ ID NO: 11872 - DNA, 16 bp, Artificial Sequence
  Synthetic
cgtttccgcccaacgc

SEQ ID NO: 11873 - DNA, 18 bp, Artificial Sequence
  Synthetic
acacgccgatgtcaaagg

SEQ ID NO: 11874 - DNA, 24 bp, Artificial Sequence
  Synthetic
tagtgtggttaaatctttttgcag

SEQ ID NO: 11875 - DNA, 19 bp, Artificial Sequence
  Synthetic
tcgtcagcgcgatacgttt

SEQ ID NO: 11876 - DNA, 16 bp, Artificial Sequence
  Synthetic
ttcgaccaccgcgtcc

SEQ ID NO: 11877 - DNA, 16 bp, Artificial Sequence
  Synthetic
cgccagttcggacgca

SEQ ID NO: 11878 - DNA, 15 bp, Artificial Sequence
  Synthetic
acggccttgcgctct

SEQ ID NO: 11879 - DNA, 18 bp, Artificial Sequence
  Synthetic
gcagcatcaaaagcgtcc

SEQ ID NO: 11880 - DNA, 20 bp, Artificial Sequence
  Synthetic
tgacacccttacctttcacg

SEQ ID NO: 11881 - DNA, 22 bp, Artificial Sequence
  Synthetic
ggggatattcgggtaaaattag

SEQ ID NO: 11882 - DNA, 15 bp, Artificial Sequence
  Synthetic
acgcccagcccgatt

SEQ ID NO: 11883 - DNA, 15 bp, Artificial Sequence
  Synthetic
tgaccgccgccgaaa

SEQ ID NO: 11884 - DNA, 16 bp, Artificial Sequence
  Synthetic
ggcagacggcggtaca

SEQ ID NO: 11885 - DNA, 20 bp, Artificial Sequence
  Synthetic
agcctctgctcattacctcg

SEQ ID NO: 11886 - DNA, 19 bp, Artificial Sequence
  Synthetic
tacctacacccccgaaacc

SEQ ID NO: 11887 - DNA, 16 bp, Artificial Sequence
  Synthetic
tcggacgcgccatcga

SEQ ID NO: 11888 - DNA, 16 bp, Artificial Sequence
  Synthetic
catcgccgccctcgaa

SEQ ID NO: 11889 - DNA, 18 bp, Artificial Sequence
  Synthetic
tgaccgcccttttcgtct

SEQ ID NO: 11890 - DNA, 18 bp, Artificial Sequence
  Synthetic
cgaacccgcaaaattcgc

SEQ ID NO: 11891 - DNA, 17 bp, Artificial Sequence
  Synthetic
cttccaacacctgcccg

SEQ ID NO: 11892 - DNA, 19 bp, Artificial Sequence
  Synthetic
gagattggcgggatgaagc

SEQ ID NO: 11893 - DNA, 20 bp, Artificial Sequence
  Synthetic
tgccttggatttgggcattc

SEQ ID NO: 11894 - DNA, 16 bp, Artificial Sequence
  Synthetic
ttcggcaccgcacacc

SEQ ID NO: 11895 - DNA, 16 bp, Artificial Sequence
  Synthetic
gctgccgaccgatgtc

SEQ ID NO: 11896 - DNA, 18 bp, Artificial Sequence
  Synthetic
cgctttggatgcccagat

SEQ ID NO: 11897 - DNA, 18 bp, Artificial Sequence
  Synthetic
tcgtccgcttcaaaacgc

SEQ ID NO: 11898 - DNA, 18 bp, Artificial Sequence
  Synthetic
ttgccgtctttcagccag

SEQ ID NO: 11899 - DNA, 20 bp, Artificial Sequence
  Synthetic
ttccagtaatgcggaatcgg

SEQ ID NO: 11900 - DNA, 19 bp, Artificial Sequence
  Synthetic
gaaatgtcctacacctgcc

SEQ ID NO: 11901 - DNA, 23 bp, Artificial Sequence
  Synthetic
gcagaaactgaatcaaaaacaac

SEQ ID NO: 11902 - DNA, 18 bp, Artificial Sequence
  Synthetic
gataccggtttgctgcat

SEQ ID NO: 11903 - DNA, 18 bp, Artificial Sequence
  Synthetic
tgcttatccgaccgaatc

SEQ ID NO: 11904 - DNA, 20 bp, Artificial Sequence
  Synthetic
gaggatgccggagaaattgt

SEQ ID NO: 11905 - DNA, 16 bp, Artificial Sequence
  Synthetic
aatagcgcaggcgggt

SEQ ID NO: 11906 - DNA, 16 bp, Artificial Sequence
  Synthetic
cgcggaggcattcagg

SEQ ID NO: 11907 - DNA, 16 bp, Artificial Sequence
  Synthetic
ccgccgtcaagcagga

SEQ ID NO: 11908 - DNA, 16 bp, Artificial Sequence
  Synthetic
gcgcccgtaccttcca

SEQ ID NO: 11909 - DNA, 19 bp, Artificial Sequence
  Synthetic
attgcctgccggaaattgc

SEQ ID NO: 11910 - DNA, 18 bp, Artificial Sequence
  Synthetic
cagttgtcgccgtcgaag

SEQ ID NO: 11911 - DNA, 18 bp, Artificial Sequence
  Synthetic
gtgcaacggtgtaacccg

SEQ ID NO: 11912 - DNA, 19 bp, Artificial Sequence
  Synthetic
cacgttgttgagcagctgg

SEQ ID NO: 11913 - DNA, 17 bp, Artificial Sequence
  Synthetic
tcaagtcggcggacacg

SEQ ID NO: 11914 - DNA, 20 bp, Artificial Sequence
  Synthetic
ttatgaacattcgcttccac

SEQ ID NO: 11915 - DNA, 20 bp, Artificial Sequence
  Synthetic
actgccggttttgtcattgg

SEQ ID NO: 11916 - DNA, 17 bp, Artificial Sequence
  Synthetic
cggggcttcgtggaaac

SEQ ID NO: 11917 - DNA, 16 bp, Artificial Sequence
  Synthetic
cagtccgctgccgctt

SEQ ID NO: 11918 - DNA, 17 bp, Artificial Sequence
  Synthetic
cgacttgtccgagcagc

SEQ ID NO: 11919 - DNA, 19 bp, Artificial Sequence
  Synthetic
ccttccagcagtacggagt

SEQ ID NO: 11920 - DNA, 18 bp, Artificial Sequence
  Synthetic
cgtcggcacccttatccg

SEQ ID NO: 11921 - DNA, 17 bp, Artificial Sequence
  Synthetic
ccgttccctgcaactcg

SEQ ID NO: 11922 - DNA, 18 bp, Artificial Sequence
  Synthetic
gcttcgtgatggccgaca

SEQ ID NO: 11923 - DNA, 20 bp, Artificial Sequence
  Synthetic
ggcaaagtcatgcatacgct

SEQ ID NO: 11924 - DNA, 15 bp, Artificial Sequence
  Synthetic
caacacgcggcgcat

SEQ ID NO: 11925 - DNA, 16 bp, Artificial Sequence
  Synthetic
tcggcaagctcgtccg

SEQ ID NO: 11926 - DNA, 17 bp, Artificial Sequence
  Synthetic
gccgggtttgatccacc

SEQ ID NO: 11927 - DNA, 16 bp, Artificial Sequence
  Synthetic
ggagcttgccgacggt

SEQ ID NO: 11928 - DNA, 16 bp, Artificial Sequence
  Synthetic
ggtcgcaccgtttggg

SEQ ID NO: 11929 - DNA, 18 bp, Artificial Sequence
  Synthetic
tgcacttggaaacggcag

SEQ ID NO: 11930 - DNA, 16 bp, Artificial Sequence
  Synthetic
ggtgtcggcaacagcc

SEQ ID NO: 11931 - DNA, 18 bp, Artificial Sequence
  Synthetic
ctttcattgcgccggaca

SEQ ID NO: 11932 - DNA, 16 bp, Artificial Sequence
  Synthetic
aatgccagccgtccgg

SEQ ID NO: 11933 - DNA, 20 bp, Artificial Sequence
  Synthetic
caatttgtccaagccttgcg

SEQ ID NO: 11934 - DNA, 17 bp, Artificial Sequence
  Synthetic
tgagcgtgatttcgggc

SEQ ID NO: 11935 - DNA, 18 bp, Artificial Sequence
  Synthetic
cgtttgagatggcggacg

SEQ ID NO: 11936 - DNA, 18 bp, Artificial Sequence
  Synthetic
cccgtcagcgtataggcg

SEQ ID NO: 11937 - DNA, 16 bp, Artificial Sequence
  Synthetic
ccgacggcatgaccca

SEQ ID NO: 11938 - DNA, 17 bp, Artificial Sequence
  Synthetic
agcaatcgccaaagccg

SEQ ID NO: 11939 - DNA, 16 bp, Artificial Sequence
  Synthetic
cgaccgtgccgaagca

SEQ ID NO: 11940 - DNA, 19 bp, Artificial Sequence
  Synthetic
cggctatgttgacgcaaac

SEQ ID NO: 11941 - DNA, 18 bp, Artificial Sequence
  Synthetic
ttgccgccgtgatgaatg

SEQ ID NO: 11942 - DNA, 16 bp, Artificial Sequence
  Synthetic
gtgccgctgtgtaccg

SEQ ID NO: 11943 - DNA, 16 bp, Artificial Sequence
  Synthetic
ccgggcattcggggtt

SEQ ID NO: 11944 - DNA, 16 bp, Artificial Sequence
  Synthetic
ccgcagcgaactcgac

SEQ ID NO: 11945 - DNA, 20 bp, Artificial Sequence
  Synthetic
ggacaaatccgcattaccga

SEQ ID NO: 11946 - DNA, 17 bp, Artificial Sequence
  Synthetic
cggtttgcaagtcgcca

SEQ ID NO: 11947 - DNA, 18 bp, Artificial Sequence
  Synthetic
tccgccaaatgcaggaag

SEQ ID NO: 11948 - DNA, 16 bp, Artificial Sequence
  Synthetic
cactggttacgcgcgg

SEQ ID NO: 11949 - DNA, 20 bp, Artificial Sequence
  Synthetic
gtatcagttcgtgggcgagg

SEQ ID NO: 11950 - DNA, 19 bp, Artificial Sequence
  Synthetic
acatccttgtcgccatcgg

SEQ ID NO: 11951 - DNA, 20 bp, Artificial Sequence
  Synthetic
tcctgattgtcttctgtgcc

SEQ ID NO: 11952 - DNA, 18 bp, Artificial Sequence
  Synthetic
ttcattttgcctgccgtt

SEQ ID NO: 11953 - DNA, 16 bp, Artificial Sequence
  Synthetic
ggcggcggaagacctt

SEQ ID NO: 11954 - DNA, 18 bp, Artificial Sequence
  Synthetic
gaactggaaaccgacggc

SEQ ID NO: 11955 - DNA, 19 bp, Artificial Sequence
  Synthetic
aggtcgaaacactcgttgc

SEQ ID NO: 11956 - DNA, 16 bp, Artificial Sequence
  Synthetic
gaagacgtgcgcaccg

SEQ ID NO: 11957 - DNA, 20 bp, Artificial Sequence
  Synthetic
ttgtcattgacgtatcgcgg

SEQ ID NO: 11958 - DNA, 17 bp, Artificial Sequence
  Synthetic
ttcgcgcgtgttcttcc

SEQ ID NO: 11959 - DNA, 16 bp, Artificial Sequence
  Synthetic
gatgccgccgctgatg

SEQ ID NO: 11960 - DNA, 20 bp, Artificial Sequence
  Synthetic
gaagcggcttccttcaaacc

SEQ ID NO: 11961 - DNA, 18 bp, Artificial Sequence
  Synthetic
gaatgcacgggggtttga

SEQ ID NO: 11962 - DNA, 16 bp, Artificial Sequence
  Synthetic
gtggcagcggtcaagg

SEQ ID NO: 11963 - DNA, 18 bp, Artificial Sequence
  Synthetic
gcttgggcttcctgatgg

SEQ ID NO: 11964 - DNA, 20 bp, Artificial Sequence
  Synthetic
cgatatagggtttgaagcgg

SEQ ID NO: 11965 - DNA, 16 bp, Artificial Sequence
  Synthetic
cgccgtcttcgccttc

SEQ ID NO: 11966 - DNA, 16 bp, Artificial Sequence
  Synthetic
tgtcggtgggggggat

SEQ ID NO: 11967 - DNA, 20 bp, Artificial Sequence
  Synthetic
atccgataagtttccgcacc

SEQ ID NO: 11968 - DNA, 16 bp, Artificial Sequence
  Synthetic
ttgaatcgggcgggcg

SEQ ID NO: 11969 - DNA, 18 bp, Artificial Sequence
  Synthetic
cgttcgagacggggaatc

SEQ ID NO: 11970 - DNA, 20 bp, Artificial Sequence
  Synthetic
gcggaaaaatctcttggagc

SEQ ID NO: 11971 - DNA, 19 bp, Artificial Sequence
  Synthetic
tgctgctgattgtcaggtc

SEQ ID NO: 11972 - DNA, 17 bp, Artificial Sequence
  Synthetic
ggcgcggttctgtttgc

SEQ ID NO: 11973 - DNA, 18 bp, Artificial Sequence
  Synthetic
ggattcgtacagcggcag

SEQ ID NO: 11974 - DNA, 16 bp, Artificial Sequence
  Synthetic
acaccgaccagcccga

SEQ ID NO: 11975 - DNA, 20 bp, Artificial Sequence
  Synthetic
cgtatagtccgaccagttcg

SEQ ID NO: 11976 - DNA, 16 bp, Artificial Sequence
  Synthetic
ccggtgaagcggtcga

SEQ ID NO: 11977 - DNA, 18 bp, Artificial Sequence
  Synthetic
agtatgaagggcgtggcg

SEQ ID NO: 11978 - DNA, 16 bp, Artificial Sequence
  Synthetic
cgccgccgatttccct

SEQ ID NO: 11979 - DNA, 18 bp, Artificial Sequence
  Synthetic
cgcgacatcatgcgttcg

SEQ ID NO: 11980 - DNA, 18 bp, Artificial Sequence
  Synthetic
ccaaccacggatagcggt

SEQ ID NO: 11981 - DNA, 18 bp, Artificial Sequence
  Synthetic
ggaatgcccaaatccgcc

SEQ ID NO: 11982 - DNA, 17 bp, Artificial Sequence
  Synthetic
ggcaggttctttcggcg

SEQ ID NO: 11983 - DNA, 20 bp, Artificial Sequence
  Synthetic
ccgtaaaattcggaagcggc

SEQ ID NO: 11984 - DNA, 20 bp, Artificial Sequence
  Synthetic
agatgttttatcggcctggg

SEQ ID NO: 11985 - DNA, 20 bp, Artificial Sequence
  Synthetic
aacattaccgtcttggcagt

SEQ ID NO: 11986 - DNA, 22 bp, Artificial Sequence
  Synthetic
tgcttctaatttctccaatcgt

SEQ ID NO: 11987 - DNA, 17 bp, Artificial Sequence
  Synthetic
acccgaccacaacaccg

SEQ ID NO: 11988 - DNA, 16 bp, Artificial Sequence
  Synthetic
acggacgcgctttcgg

SEQ ID NO: 11989 - DNA, 19 bp, Artificial Sequence
  Synthetic
gatttcggtattgcgcgcg

SEQ ID NO: 11990 - DNA, 20 bp, Artificial Sequence
  Synthetic
ggcaactacggttacaacgc

SEQ ID NO: 11991 - DNA, 15 bp, Artificial Sequence
  Synthetic
cggcggcgcattcat

SEQ ID NO: 11992 - DNA, 20 bp, Artificial Sequence
  Synthetic
caacacctacggcattgttg

SEQ ID NO: 11993 - DNA, 20 bp, Artificial Sequence
  Synthetic
gacgatgcttttcaagacgc

SEQ ID NO: 11994 - DNA, 16 bp, Artificial Sequence
  Synthetic
cgggcagcgtcatcgt

SEQ ID NO: 11995 - DNA, 17 bp, Artificial Sequence
  Synthetic
ccgtaatgcagcacgcg

SEQ ID NO: 11996 - DNA, 16 bp, Artificial Sequence
  Synthetic
cggtccggttgtgcga

SEQ ID NO: 11997 - DNA, 19 bp, Artificial Sequence
  Synthetic
gccggtgctgtattttgcc

SEQ ID NO: 11998 - DNA, 16 bp, Artificial Sequence
  Synthetic
cgaaatcggggcgcag

SEQ ID NO: 11999 - DNA, 16 bp, Artificial Sequence
  Synthetic
gaatccgtgccgccga

SEQ ID NO: 12000 - DNA, 18 bp, Artificial Sequence
  Synthetic
cggtttgggcgattttgc

SEQ ID NO: 12001 - DNA, 17 bp, Artificial Sequence
  Synthetic
ccggatggcttcgtgga

SEQ ID NO: 12002 - DNA, 18 bp, Artificial Sequence
  Synthetic
gtccttcggtgcgtttgc

SEQ ID NO: 12003 - DNA, 15 bp, Artificial Sequence
  Synthetic
tgtcgcccgcatcga

SEQ ID NO: 12004 - DNA, 20 bp, Artificial Sequence
  Synthetic
tatgctgacctataccccgc

SEQ ID NO: 12005 - DNA, 18 bp, Artificial Sequence
  Synthetic
cacacccttgtggctgtg

SEQ ID NO: 12006 - DNA, 20 bp, Artificial Sequence
  Synthetic
agcgcaatgtgtagttgagt

SEQ ID NO: 12007 - DNA, 20 bp, Artificial Sequence
  Synthetic
cttctttgccgatgacgttc

SEQ ID NO: 12008 - DNA, 19 bp, Artificial Sequence
  Synthetic
ggcttttgtcatacagcgc

SEQ ID NO: 12009 - DNA, 16 bp, Artificial Sequence
  Synthetic
ggaaacaccacgccgc

SEQ ID NO: 12010 - DNA, 15 bp, Artificial Sequence
  Synthetic
cgcgggcaaggcaaa

SEQ ID NO: 12011 - DNA, 17 bp, Artificial Sequence
  Synthetic
cgacaagctgcccgaaa

SEQ ID NO: 12012 - DNA, 17 bp, Artificial Sequence
  Synthetic
tgaccgccaaactgcag

SEQ ID NO: 12013 - DNA, 20 bp, Artificial Sequence
  Synthetic
tgccgaccaattatgccttt

SEQ ID NO: 12014 - DNA, 18 bp, Artificial Sequence
  Synthetic
ttgaatacgccgtcccgc

SEQ ID NO: 12015 - DNA, 18 bp, Artificial Sequence
  Synthetic
cagttcggcggcatcgag

SEQ ID NO: 12016 - DNA, 18 bp, Artificial Sequence
  Synthetic
gcatcggcgatgtcttgc

SEQ ID NO: 12017 - DNA, 17 bp, Artificial Sequence
  Synthetic
cgaggcgttcggattcg

SEQ ID NO: 12018 - DNA, 17 bp, Artificial Sequence
  Synthetic
tgatgcgcccttcgaca

SEQ ID NO: 12019 - DNA, 16 bp, Artificial Sequence
  Synthetic
tcgcgccagttttgca

SEQ ID NO: 12020 - DNA, 17 bp, Artificial Sequence
  Synthetic
cggcgggtttcatcagg

SEQ ID NO: 12021 - DNA, 17 bp, Artificial Sequence
  Synthetic
cccgttgccgtctgaac

SEQ ID NO: 12022 - DNA, 21 bp, Artificial Sequence
  Synthetic
cctgatggagaacctatttcc

SEQ ID NO: 12023 - DNA, 25 bp, Artificial Sequence
  Synthetic
gagttaagtgagttagttatacctg

SEQ ID NO: 12024 - DNA, 20 bp, Artificial Sequence
  Synthetic
cgaaagtatgctaaaagccc

SEQ ID NO: 12025 - DNA, 25 bp, Artificial Sequence
  Synthetic
gtaaaagaatgccaattattgtgtg

SEQ ID NO: 12026 - DNA, 22 bp, Artificial Sequence
  Synthetic
ggatactcaaatttaggtttgc

SEQ ID NO: 12027 - DNA, 21 bp, Artificial Sequence
  Synthetic
caagacgaagatgatatgtgg

SEQ ID NO: 12028 - DNA, 23 bp, Artificial Sequence
  Synthetic
aatcttaacagacttgaaagact

SEQ ID NO: 12029 - DNA, 18 bp, Artificial Sequence
  Synthetic
cactcctattcgcccttc

SEQ ID NO: 12030 - DNA, 25 bp, Artificial Sequence
  Synthetic
ttaagggagtcatttgaaattgaag

SEQ ID NO: 12031 - DNA, 21 bp, Artificial Sequence
  Synthetic
ctttgaacaaccaattcaggg

SEQ ID NO: 12032 - DNA, 25 bp, Artificial Sequence
  Synthetic
aaaccatagatgttcctaaagtttc

SEQ ID NO: 12033 - DNA, 23 bp, Artificial Sequence
  Synthetic
tgcacctcttgaagttattaact

SEQ ID NO: 12034 - DNA, 25 bp, Artificial Sequence
  Synthetic
gaaagtatttgagacatgtagaaga

SEQ ID NO: 12035 - DNA, 22 bp, Artificial Sequence
  Synthetic
ttatcatgcttactaactgtgg

SEQ ID NO: 12036 - DNA, 23 bp, Artificial Sequence
  Synthetic
gattcgaaatggaagattttgtg

SEQ ID NO: 12037 - DNA, 19 bp, Artificial Sequence
  Synthetic
tagagggaagagatcgcac

SEQ ID NO: 12038 - DNA, 23 bp, Artificial Sequence
  Synthetic
caaatgtccaaagaagtaaatgc

SEQ ID NO: 12039 - DNA, 22 bp, Artificial Sequence
  Synthetic
aaatccaaattatctgctgtca

SEQ ID NO: 12040 - DNA, 18 bp, Artificial Sequence
  Synthetic
cgagctgaccgattcaat

SEQ ID NO: 12041 - DNA, 18 bp, Artificial Sequence
  Synthetic
ggaaggcgaaagaccaat

SEQ ID NO: 12042 - DNA, 18 bp, Artificial Sequence
  Synthetic
aatggagatgaggccttg

SEQ ID NO: 12043 - DNA, 20 bp, Artificial Sequence
  Synthetic
gggttgagagtaccccagag

SEQ ID NO: 12044 - DNA, 20 bp, Artificial Sequence
  Synthetic
gtccccacatagcagactcc

SEQ ID NO: 12045 - DNA, 19 bp, Artificial Sequence
  Synthetic
ctcggtaatggcgaatggg

SEQ ID NO: 12046 - DNA, 20 bp, Artificial Sequence
  Synthetic
atcctatgggaatccctggc

SEQ ID NO: 12047 - DNA, 20 bp, Artificial Sequence
  Synthetic
gccgatagctgctttctctt

SEQ ID NO: 12048 - DNA, 24 bp, Artificial Sequence
  Synthetic
atatgttactaaaagggtgtaacc

SEQ ID NO: 12049 - DNA, 23 bp, Artificial Sequence
  Synthetic
atagacgctatacatgttctgtg

SEQ ID NO: 12050 - DNA, 24 bp, Artificial Sequence
  Synthetic
cagaaacacaagtgtaaagaacaa

SEQ ID NO: 12051 - DNA, 21 bp, Artificial Sequence
  Synthetic
gagcagatgttaatggaagac

SEQ ID NO: 12052 - DNA, 20 bp, Artificial Sequence
  Synthetic
tgattatgcagaacaggagg

SEQ ID NO: 12053 - DNA, 23 bp, Artificial Sequence
  Synthetic
tccaaatacatttccatttgaca

SEQ ID NO: 12054 - DNA, 18 bp, Artificial Sequence
  Synthetic
ctcgtgaaggaaacatgc

SEQ ID NO: 12055 - DNA, 25 bp, Artificial Sequence
  Synthetic
attataaaactgatatagggtggtg

SEQ ID NO: 12056 - DNA, 18 bp, Artificial Sequence
  Synthetic
ccagaccaccgaagccta

SEQ ID NO: 12057 - DNA, 21 bp, Artificial Sequence
  Synthetic
gtccgcccattattattgaac

SEQ ID NO: 12058 - DNA, 25 bp, Artificial Sequence
  Synthetic
tagatgaaacacttacatatgcttc

SEQ ID NO: 12059 - DNA, 21 bp, Artificial Sequence
  Synthetic
attcatctgcacctttgtttg

SEQ ID NO: 12060 - DNA, 21 bp, Artificial Sequence
  Synthetic
accactaacttacctgcaata

SEQ ID NO: 12061 - DNA, 19 bp, Artificial Sequence
  Synthetic
cctaaaactggccaaaagg

SEQ ID NO: 12062 - DNA, 20 bp, Artificial Sequence
  Synthetic
gacaacagggacaatgtttc

SEQ ID NO: 12063 - DNA, 22 bp, Artificial Sequence
  Synthetic
atgtctgcagatacatatggaa

SEQ ID NO: 12064 - DNA, 21 bp, Artificial Sequence
  Synthetic
cttctacctcttcctctacca

SEQ ID NO: 12065 - DNA, 20 bp, Artificial Sequence
  Synthetic
tccagtttgttacactccgc

SEQ ID NO: 12066 - DNA, 19 bp, Artificial Sequence
  Synthetic
gagtatcacgcctccggaa

SEQ ID NO: 12067 - DNA, 19 bp, Artificial Sequence
  Synthetic
cctttggggtggattggtg

SEQ ID NO: 12068 - DNA, 20 bp, Artificial Sequence
  Synthetic
caatcctgaccaattgctgc

SEQ ID NO: 12069 - DNA, 24 bp, Artificial Sequence
  Synthetic
actcttatttgagtgagaatgtgt

SEQ ID NO: 12070 - DNA, 24 bp, Artificial Sequence
  Synthetic
ggtctaaagaaatgtttaaacctc

SEQ ID NO: 12071 - DNA, 20 bp, Artificial Sequence
  Synthetic
tggcagggttagttttgtgg

SEQ ID NO: 12072 - DNA, 19 bp, Artificial Sequence
  Synthetic
ccttgtgctggtttgtttc

SEQ ID NO: 12073 - DNA, 16 bp, Artificial Sequence
  Synthetic
gcttggcgtgtgggga

SEQ ID NO: 12074 - DNA, 18 bp, Artificial Sequence
  Synthetic
ggttggctcatcccacag

SEQ ID NO: 12075 - DNA, 19 bp, Artificial Sequence
  Synthetic
ataccatccccagtacaca

SEQ ID NO: 12076 - DNA, 18 bp, Artificial Sequence
  Synthetic
gtgttgggcattggaaag

SEQ ID NO: 12077 - DNA, 19 bp, Artificial Sequence
  Synthetic
ggtatggttcctgaatgca

SEQ ID NO: 12078 - DNA, 19 bp, Artificial Sequence
  Synthetic
ctgcaattgacaagctgaa

SEQ ID NO: 12079 - DNA, 20 bp, Artificial Sequence
  Synthetic
ttggtacatggacatcggtg

SEQ ID NO: 12080 - DNA, 20 bp, Artificial Sequence
  Synthetic
aactttacaaaggacccaga

SEQ ID NO: 12081 - DNA, 19 bp, Artificial Sequence
  Synthetic
gagatccgtcccaggagtg

SEQ ID NO: 12082 - DNA, 21 bp, Artificial Sequence
  Synthetic
aacggcctacaaaaaagaagt

SEQ ID NO: 12083 - DNA, 20 bp, Artificial Sequence
  Synthetic
atgaagtagcagctcacacg

SEQ ID NO: 12084 - DNA, 18 bp, Artificial Sequence
  Synthetic
gtacccgtgtcaagcgtc

SEQ ID NO: 12085 - DNA, 20 bp, Artificial Sequence
  Synthetic
tgctggctgaaggtaaatgc

SEQ ID NO: 12086 - DNA, 18 bp, Artificial Sequence
  Synthetic
cgtgtgttggctgtccat

SEQ ID NO: 12087 - DNA, 18 bp, Artificial Sequence
  Synthetic
gcaaaattggctcgcttc

SEQ ID NO: 12088 - DNA, 17 bp, Artificial Sequence
  Synthetic
tttagggcagcggcaac

SEQ ID NO: 12089 - DNA, 23 bp, Artificial Sequence
  Synthetic
atcaaaagataataacgattggc

SEQ ID NO: 12090 - DNA, 18 bp, Artificial Sequence
  Synthetic
tgccccaaactagcagaa

SEQ ID NO: 12091 - DNA, 23 bp, Artificial Sequence
  Synthetic
gaattaggtgttccatttcatct

SEQ ID NO: 12092 - DNA, 25 bp, Artificial Sequence
  Synthetic
actaaaatactattcattgaggagg

SEQ ID NO: 12093 - DNA, 18 bp, Artificial Sequence
  Synthetic
aaaaacgacagctccagc

SEQ ID NO: 12094 - DNA, 20 bp, Artificial Sequence
  Synthetic
gaaactgttgcagaaaaagc

SEQ ID NO: 12095 - DNA, 19 bp, Artificial Sequence
  Synthetic
ctgaagaggaggagcaaca

SEQ ID NO: 12096 - DNA, 23 bp, Artificial Sequence
  Synthetic
gtgaagctgaatgtattactgat

SEQ ID NO: 12097 - DNA, 22 bp, Artificial Sequence
  Synthetic
aatttctgtggaaggaaaaagt

SEQ ID NO: 12098 - DNA, 25 bp, Artificial Sequence
  Synthetic
ctgtttcagcttgttaaatttcttg

SEQ ID NO: 12099 - DNA, 20 bp, Artificial Sequence
  Synthetic
ttgtctcctcttccagctcc

SEQ ID NO: 12100 - DNA, 18 bp, Artificial Sequence
  Synthetic
acaccagtgaatcagctg

SEQ ID NO: 12101 - DNA, 23 bp, Artificial Sequence
  Synthetic
tttggaagtgtaatttatttggg

SEQ ID NO: 12102 - DNA, 21 bp, Artificial Sequence
  Synthetic
atttgagtatgataatcccgc

SEQ ID NO: 12103 - DNA, 21 bp, Artificial Sequence
  Synthetic
cttacaattaggtcgtggtgg

SEQ ID NO: 12104 - DNA, 23 bp, Artificial Sequence
  Synthetic
cacctattgaattagtcagttca

SEQ ID NO: 12105 - DNA, 24 bp, Artificial Sequence
  Synthetic
aaatcaatatagacatcacacctg

SEQ ID NO: 12106 - DNA, 23 bp, Artificial Sequence
  Synthetic
actattgaaggactagtctatgg

SEQ ID NO: 12107 - DNA, 19 bp, Artificial Sequence
  Synthetic
ggagtatgagatggctgac

SEQ ID NO: 12108 - DNA, 21 bp, Artificial Sequence
  Synthetic
tattggtcggtactaaaacca

SEQ ID NO: 12109 - DNA, 18 bp, Artificial Sequence
  Synthetic
gtgcctgctagatcaagt

SEQ ID NO: 12110 - DNA, 22 bp, Artificial Sequence
  Synthetic
aattcagtgaggttgaaactag

SEQ ID NO: 12111 - DNA, 20 bp, Artificial Sequence
  Synthetic
agaaagcgtctagccatggc

SEQ ID NO: 12112 - DNA, 20 bp, Artificial Sequence
  Synthetic
caaaagaaacaccaaccgcc

SEQ ID NO: 12113 - DNA, 17 bp, Artificial Sequence
  Synthetic
acacgcacctggttgtg

SEQ ID NO: 12114 - DNA, 19 bp, Artificial Sequence
  Synthetic
gcatactttgcgtcaacgg

SEQ ID NO: 12115 - DNA, 19 bp, Artificial Sequence
  Synthetic
gggtttatagccggcctca

SEQ ID NO: 12116 - DNA, 18 bp, Artificial Sequence
  Synthetic
ggcagcaacgagactgac

SEQ ID NO: 12117 - DNA, 18 bp, Artificial Sequence
  Synthetic
catcggaggcctagagca

SEQ ID NO: 12118 - DNA, 20 bp, Artificial Sequence
  Synthetic
tgctcctaatctgtcaggca

SEQ ID NO: 12119 - DNA, 18 bp, Artificial Sequence
  Synthetic
gtgctggtcatgtggtgg

SEQ ID NO: 12120 - DNA, 20 bp, Artificial Sequence
  Synthetic
ttatgaccatcttgccccca

SEQ ID NO: 12121 - DNA, 19 bp, Artificial Sequence
  Synthetic
gccgggacaaaaatgaagc

SEQ ID NO: 12122 - DNA, 17 bp, Artificial Sequence
  Synthetic
tccttgctcagcccgag

SEQ ID NO: 12123 - DNA, 16 bp, Artificial Sequence
  Synthetic
ccgtccgtcgcagcaa

SEQ ID NO: 12124 - DNA, 20 bp, Artificial Sequence
  Synthetic
gaaatccccttctacggcag

SEQ ID NO: 12125 - DNA, 20 bp, Artificial Sequence
  Synthetic
tggacttcagtctggatccc

SEQ ID NO: 12126 - DNA, 20 bp, Artificial Sequence
  Synthetic
agcaacagtctgtgttcgtg

SEQ ID NO: 12127 - DNA, 20 bp, Artificial Sequence
  Synthetic
aataccttgctggcctttcg

SEQ ID NO: 12128 - DNA, 20 bp, Artificial Sequence
  Synthetic
gaactggtaaacctcctgcc

SEQ ID NO: 12129 - DNA, 18 bp, Artificial Sequence
  Synthetic
tttgggactgggtctgca

SEQ ID NO: 12130 - DNA, 20 bp, Artificial Sequence
  Synthetic
taccactacataacgggggt

SEQ ID NO: 12131 - DNA, 18 bp, Artificial Sequence
  Synthetic
gcgcaggctaaatcgagg

SEQ ID NO: 12132 - DNA, 16 bp, Artificial Sequence
  Synthetic
acccgcccctcttgga

SEQ ID NO: 12133 - DNA, 18 bp, Artificial Sequence
  Synthetic
gggaccctgacctttcgt

SEQ ID NO: 12134 - DNA, 20 bp, Artificial Sequence
  Synthetic
ggttaaggccagactactgc

SEQ ID NO: 12135 - DNA, 20 bp, Artificial Sequence
  Synthetic
ccactagtatgggcaacacc

SEQ ID NO: 12136 - DNA, 20 bp, Artificial Sequence
  Synthetic
ggaaactgccaaacactccc

SEQ ID NO: 12137 - DNA, 19 bp, Artificial Sequence
  Synthetic
gggtaccccctttgagagc

SEQ ID NO: 12138 - DNA, 21 bp, Artificial Sequence
  Synthetic
ttttacctacccaggaaaagc

SEQ ID NO: 12139 - DNA, 20 bp, Artificial Sequence
  Synthetic
ctcagtttgcctgtccttca

SEQ ID NO: 12140 - DNA, 18 bp, Artificial Sequence
  Synthetic
accagacacccttcgaaa

SEQ ID NO: 12141 - DNA, 21 bp, Artificial Sequence
  Synthetic
tgcagattatcacaaccactc

SEQ ID NO: 12142 - DNA, 23 bp, Artificial Sequence
  Synthetic
ttgattacaagtctttcaaaacc

SEQ ID NO: 12143 - DNA, 21 bp, Artificial Sequence
  Synthetic
ttctgaacagtcattacgtct

SEQ ID NO: 12144 - DNA, 23 bp, Artificial Sequence
  Synthetic
ttgtgtaaaatgcttcattgatg

SEQ ID NO: 12145 - DNA, 20 bp, Artificial Sequence
  Synthetic
cacaaatggagctatcgttg

SEQ ID NO: 12146 - DNA, 22 bp, Artificial Sequence
  Synthetic
acttatttgatgatgctggtga

SEQ ID NO: 12147 - DNA, 23 bp, Artificial Sequence
  Synthetic
ttaaaacttactgacaatgttgc

SEQ ID NO: 12148 - DNA, 23 bp, Artificial Sequence
  Synthetic
aggcagcatatgaaaatttcaat

SEQ ID NO: 12149 - DNA, 22 bp, Artificial Sequence
  Synthetic
gtaagctttaccatgattctca

SEQ ID NO: 12150 - DNA, 24 bp, Artificial Sequence
  Synthetic
taatgctaaggaagagattctagg

SEQ ID NO: 12151 - DNA, 20 bp, Artificial Sequence
  Synthetic
gctgtatgcgttctcttaaa

SEQ ID NO: 12152 - DNA, 23 bp, Artificial Sequence
  Synthetic
atggtgctgatgttacaaaaatt

SEQ ID NO: 12153 - DNA, 23 bp, Artificial Sequence
  Synthetic
aaactatgacccatcttctacag

SEQ ID NO: 12154 - DNA, 23 bp, Artificial Sequence
  Synthetic
ggtcattacactcatataactgc

SEQ ID NO: 12155 - DNA, 22 bp, Artificial Sequence
  Synthetic
ttaaatcaaatgacaggcttca

SEQ ID NO: 12156 - DNA, 22 bp, Artificial Sequence
  Synthetic
tgaagaagtagtggaaaatcct

SEQ ID NO: 12157 - DNA, 25 bp, Artificial Sequence
  Synthetic
gcttttggtgtactcttatctaatt

SEQ ID NO: 12158 - DNA, 21 bp, Artificial Sequence
  Synthetic
gctagtcatttcatcagcaat

SEQ ID NO: 12159 - DNA, 19 bp, Artificial Sequence
  Synthetic
tgtgacacattttgcactg

SEQ ID NO: 12160 - DNA, 22 bp, Artificial Sequence
  Synthetic
agacgttggagatagtactgaa

SEQ ID NO: 12161 - DNA, 19 bp, Artificial Sequence
  Synthetic
tcttggcgcatgtattgac

SEQ ID NO: 12162 - DNA, 24 bp, Artificial Sequence
  Synthetic
tatgccagtacatacattgtcaat

SEQ ID NO: 12163 - DNA, 19 bp, Artificial Sequence
  Synthetic
ttcttgctgctgagtgtac

SEQ ID NO: 12164 - DNA, 24 bp, Artificial Sequence
  Synthetic
cgatgaatctcatagctaacatct

SEQ ID NO: 12165 - DNA, 25 bp, Artificial Sequence
  Synthetic
taggaaaagagtcatgtttaatgga

SEQ ID NO: 12166 - DNA, 20 bp, Artificial Sequence
  Synthetic
atgactttagcaactcaggt

SEQ ID NO: 12167 - DNA, 21 bp, Artificial Sequence
  Synthetic
gtgttattggccattctatgc

SEQ ID NO: 12168 - DNA, 23 bp, Artificial Sequence
  Synthetic
tatcaatggtgataggtggtttc

SEQ ID NO: 12169 - DNA, 25 bp, Artificial Sequence
  Synthetic
gtaagttcaagaaaattgttaaggg

SEQ ID NO: 12170 - DNA, 23 bp, Artificial Sequence
  Synthetic
tgtcattacacttgtttacaaag

SEQ ID NO: 12171 - DNA, 23 bp, Artificial Sequence
  Synthetic
tggtctctacacaagaatttagg

SEQ ID NO: 12172 - DNA, 21 bp, Artificial Sequence
  Synthetic
ttgcaaaagacacaactgaag

SEQ ID NO: 12173 - DNA, 19 bp, Artificial Sequence
  Synthetic
agttggaaaagatggcaga

SEQ ID NO: 12174 - DNA, 25 bp, Artificial Sequence
  Synthetic
gttcaacttagtgaaattaacatgg

SEQ ID NO: 12175 - DNA, 23 bp, Artificial Sequence
  Synthetic
ggcttaaacaacctaaatagagg

SEQ ID NO: 12176 - DNA, 20 bp, Artificial Sequence
  Synthetic
cacattgaccatccaaatcc

SEQ ID NO: 12177 - DNA, 23 bp, Artificial Sequence
  Synthetic
gcatactatgtctaactaccaac

SEQ ID NO: 12178 - DNA, 22 bp, Artificial Sequence
  Synthetic
catcttacgcgtatatgctaac

SEQ ID NO: 12179 - DNA, 23 bp, Artificial Sequence
  Synthetic
gctgaaatatgattttacggaag

SEQ ID NO: 12180 - DNA, 18 bp, Artificial Sequence
  Synthetic
catgcagcttctggcaat

SEQ ID NO: 12181 - DNA, 21 bp, Artificial Sequence
  Synthetic
gcgtatactaagcgtaatgtc

SEQ ID NO: 12182 - DNA, 21 bp, Artificial Sequence
  Synthetic
cttaggataatggcctctctt

SEQ ID NO: 12183 - DNA, 25 bp, Artificial Sequence
  Synthetic
tgtctctatagaaatagggatgttg

SEQ ID NO: 12184 - DNA, 25 bp, Artificial Sequence
  Synthetic
atgatattgtcaaaacagatggtac

SEQ ID NO: 12185 - DNA, 18 bp, Artificial Sequence
  Synthetic
gttgcggtgcctgtatta

SEQ ID NO: 12186 - DNA, 20 bp, Artificial Sequence
  Synthetic
tgctggcgattacatacttg

SEQ ID NO: 12187 - DNA, 20 bp, Artificial Sequence
  Synthetic
acatctcacactgtaatgcc

SEQ ID NO: 12188 - DNA, 24 bp, Artificial Sequence
  Synthetic
caaagtgaattcaacactagaaca

SEQ ID NO: 12189 - DNA, 23 bp, Artificial Sequence
  Synthetic
tgtgagtgctttagtttatgaca

SEQ ID NO: 12190 - DNA, 18 bp, Artificial Sequence
  Synthetic
ccgcttcaatgtggctat

SEQ ID NO: 12191 - DNA, 22 bp, Artificial Sequence
  Synthetic
gggtttcaaaatgaattaccaa

SEQ ID NO: 12192 - DNA, 25 bp, Artificial Sequence
  Synthetic
atgtagtgcgtattaagatagtaca

SEQ ID NO: 12193 - DNA, 18 bp, Artificial Sequence
  Synthetic
cgcgttgattggtctgtt

SEQ ID NO: 12194 - DNA, 18 bp, Artificial Sequence
  Synthetic
gttgatcgttacccagcc

SEQ ID NO: 12195 - DNA, 19 bp, Artificial Sequence
  Synthetic
taccgacagtacttggatg

SEQ ID NO: 12196 - DNA, 23 bp, Artificial Sequence
  Synthetic
agcacatgtatctacaataggtg

SEQ ID NO: 12197 - DNA, 22 bp, Artificial Sequence
  Synthetic
agagcagagacttagaggattt

SEQ ID NO: 12198 - DNA, 24 bp, Artificial Sequence
  Synthetic
atcttttacttgatgactttgtcg

SEQ ID NO: 12199 - DNA, 18 bp, Artificial Sequence
  Synthetic
taaaggagttgcaccagg

SEQ ID NO: 12200 - DNA, 19 bp, Artificial Sequence
  Synthetic
gcttatgggccatttctca

SEQ ID NO: 12201 - DNA, 25 bp, Artificial Sequence
  Synthetic
tctactaatgttgttatacgagcat

SEQ ID NO: 12202 - DNA, 21 bp, Artificial Sequence
  Synthetic
tttagagccattcttacagcc

SEQ ID NO: 12203 - DNA, 24 bp, Artificial Sequence
  Synthetic
ctaattgtgttgctgattactctg

SEQ ID NO: 12204 - DNA, 23 bp, Artificial Sequence
  Synthetic
tataggtatcttagacatggcaa

SEQ ID NO: 12205 - DNA, 21 bp, Artificial Sequence
  Synthetic
ctgatttcactgattccgttc

SEQ ID NO: 12206 - DNA, 22 bp, Artificial Sequence
  Synthetic
tttgtgctagttaccatacagt

SEQ ID NO: 12207 - DNA, 21 bp, Artificial Sequence
  Synthetic
gaccctctaaagccaactaag

SEQ ID NO: 12208 - DNA, 21 bp, Artificial Sequence
  Synthetic
ttggagttacccaaaatgttc

SEQ ID NO: 12209 - DNA, 19 bp, Artificial Sequence
  Synthetic
ttctgctaatcttgctgct

SEQ ID NO: 12210 - DNA, 23 bp, Artificial Sequence
  Synthetic
atacatttgtctcaggaaattgt

SEQ ID NO: 12211 - DNA, 20 bp, Artificial Sequence
  Synthetic
gcttcattgctggactaatt

SEQ ID NO: 12212 - DNA, 18 bp, Artificial Sequence
  Synthetic
ggatggcttgttattggc

SEQ ID NO: 12213 - DNA, 22 bp, Artificial Sequence
  Synthetic
caaaactcaaagaagactacca

SEQ ID NO: 12214 - DNA, 24 bp, Artificial Sequence
  Synthetic
aaagtgagtacgaacttatgtact

SEQ ID NO: 12215 - DNA, 21 bp, Artificial Sequence
  Synthetic
attaccgttgaggagcttaaa

SEQ ID NO: 12216 - DNA, 20 bp, Artificial Sequence
  Synthetic
ggggacaattgtgaccagac

SEQ ID NO: 12217 - DNA, 25 bp, Artificial Sequence
  Synthetic
ggagttagattatccataaaacgaa

SEQ ID NO: 12218 - DNA, 24 bp, Artificial Sequence
  Synthetic
catgaaacttctcattgttttgac

SEQ ID NO: 12219 - DNA, 20 bp, Artificial Sequence
  Synthetic
tggaccccaatcaaaccaac

SEQ ID NO: 12220 - DNA, 19 bp, Artificial Sequence
  Synthetic
taggaactggcccagaagc

SEQ ID NO: 12221 - DNA, 20 bp, Artificial Sequence
  Synthetic
tgctagacagattgaaccag

SEQ ID NO: 12222 - DNA, 18 bp, Artificial Sequence
  Synthetic
gggaacatggctgactta

SEQ ID NO: 12223 - DNA, 20 bp, Artificial Sequence
  Synthetic
cagatgggctatgtaaacgt

SEQ ID NO: 12224 - DNA, 19 bp, Artificial Sequence
  Synthetic
ttaaaactgggagtgggtt

SEQ ID NO: 12225 - DNA, 18 bp, Artificial Sequence
  Synthetic
aattgggttggtcgctcc

SEQ ID NO: 12226 - DNA, 18 bp, Artificial Sequence
  Synthetic
gtaatgcgtaagtgcggg

SEQ ID NO: 12227 - DNA, 25 bp, Artificial Sequence
  Synthetic
tcaagaccctagtaaatttactgat

SEQ ID NO: 12228 - DNA, 21 bp, Artificial Sequence
  Synthetic
catccaacagattctacacct

SEQ ID NO: 12229 - DNA, 18 bp, Artificial Sequence
  Synthetic
ggtacaatcacacccacc

SEQ ID NO: 12230 - DNA, 24 bp, Artificial Sequence
  Synthetic
acacaatccatacctataacagta

SEQ ID NO: 12231 - DNA, 24 bp, Artificial Sequence
  Synthetic
cactcattcctgttaacaatacac

SEQ ID NO: 12232 - DNA, 25 bp, Artificial Sequence
  Synthetic
tgaaactattaattgcatacactcc

SEQ ID NO: 12233 - DNA, 18 bp, Artificial Sequence
  Synthetic
atggtgtgcatggtttct

SEQ ID NO: 12234 - DNA, 25 bp, Artificial Sequence
  Synthetic
aatgatagtggacatatagtattgc

SEQ ID NO: 12235 - DNA, 25 bp, Artificial Sequence
  Synthetic
accatatgtgttagaatagtgacat

SEQ ID NO: 12236 - DNA, 25 bp, Artificial Sequence
  Synthetic
cttcatctctttaattctgatcttg

SEQ ID NO: 12237 - DNA, 23 bp, Artificial Sequence
  Synthetic
gattgtggaggaaaactattgtg

SEQ ID NO: 12238 - DNA, 24 bp, Artificial Sequence
  Synthetic
taatggtaaggaatagttctgatc

SEQ ID NO: 12239 - DNA, 23 bp, Artificial Sequence
  Synthetic
aaccagttgcagttctaatacat

SEQ ID NO: 12240 - DNA, 23 bp, Artificial Sequence
  Synthetic
gcagatcttccagataaaggaaa

SEQ ID NO: 12241 - DNA, 25 bp, Artificial Sequence
  Synthetic
agtgttctattgaaagagatttagg

SEQ ID NO: 12242 - DNA, 20 bp, Artificial Sequence
  Synthetic
aaattcacaggtcttggcat

SEQ ID NO: 12243 - DNA, 24 bp, Artificial Sequence
  Synthetic
taacatcttattgagtggtaccaa

SEQ ID NO: 12244 - DNA, 25 bp, Artificial Sequence
  Synthetic
gtcatagaagctaatagtgtgaatg

SEQ ID NO: 12245 - DNA, 19 bp, Artificial Sequence
  Synthetic
tcttgccaaagaaggagaa

SEQ ID NO: 12246 - DNA, 22 bp, Artificial Sequence
  Synthetic
ttaagtgacgaatcattgtcag

SEQ ID NO: 12247 - DNA, 23 bp, Artificial Sequence
  Synthetic
gttcatataactcctgaaaaagc

SEQ ID NO: 12248 - DNA, 25 bp, Artificial Sequence
  Synthetic
catgaataagtctagtcatttttgg

SEQ ID NO: 12249 - DNA, 24 bp, Artificial Sequence
  Synthetic
tttagatcttacttctgaagatgc

SEQ ID NO: 12250 - DNA, 25 bp, Artificial Sequence
  Synthetic
taaagaacatactggagatattgtg

SEQ ID NO: 12251 - DNA, 23 bp, Artificial Sequence
  Synthetic
tgaaatgctggagaaatagatgt

SEQ ID NO: 12252 - DNA, 23 bp, Artificial Sequence
  Synthetic
aaatgctggtaaacctattcaag

SEQ ID NO: 12253 - DNA, 25 bp, Artificial Sequence
  Synthetic
atcttcaggagtttgaaatagaaga

SEQ ID NO: 12254 - DNA, 25 bp, Artificial Sequence
  Synthetic
ctcatatagtagtgacaagtaccac

SEQ ID NO: 12255 - DNA, 23 bp, Artificial Sequence
  Synthetic
aggtctctgctaatcaatatagg

SEQ ID NO: 12256 - DNA, 20 bp, Artificial Sequence
  Synthetic
ggatagatccgcagtacctt

SEQ ID NO: 12257 - DNA, 23 bp, Artificial Sequence
  Synthetic
tgaggagtttgaaattgaaatgg

SEQ ID NO: 12258 - DNA, 18 bp, Artificial Sequence
  Synthetic
ctggacttgagcctggaa

SEQ ID NO: 12259 - DNA, 18 bp, Artificial Sequence
  Synthetic
cgcacagagtgtagactt

SEQ ID NO: 12260 - DNA, 20 bp, Artificial Sequence
  Synthetic
aattggagaactgtctgtca

SEQ ID NO: 12261 - DNA, 22 bp, Artificial Sequence
  Synthetic
ctcaaattactgatgaatgcga

SEQ ID NO: 12262 - DNA, 21 bp, Artificial Sequence
  Synthetic
ctcgctgttcaattagatctg

SEQ ID NO: 12263 - DNA, 22 bp, Artificial Sequence
  Synthetic
aatattttctgaggatgcagac

SEQ ID NO: 12264 - DNA, 20 bp, Artificial Sequence
  Synthetic
actaccaactaccaccaccg

SEQ ID NO: 12265 - DNA, 20 bp, Artificial Sequence
  Synthetic
cgtgcacctgaaattactgt

SEQ ID NO: 12266 - DNA, 18 bp, Artificial Sequence
  Synthetic
ctttgagtagcacaccca

SEQ ID NO: 12267 - DNA, 18 bp, Artificial Sequence
  Synthetic
cacccgtgagtatcttgc

SEQ ID NO: 12268 - DNA, 21 bp, Artificial Sequence
  Synthetic
agaagcacgcactttcttaaa

SEQ ID NO: 12269 - DNA, 19 bp, Artificial Sequence
  Synthetic
ggagattcatcacagagcc

SEQ ID NO: 12270 - DNA, 18 bp, Artificial Sequence
  Synthetic
ccatagcagagcagcaag

SEQ ID NO: 12271 - DNA, 21 bp, Artificial Sequence
  Synthetic
agcaaaagcagggtagataat

SEQ ID NO: 12272 - DNA, 20 bp, Artificial Sequence
  Synthetic
aaggacccaaagaaaactgg

SEQ ID NO: 12273 - DNA, 20 bp, Artificial Sequence
  Synthetic
atgatggatcaggtacggga

SEQ ID NO: 12274 - DNA, 23 bp, Artificial Sequence
  Synthetic
atgagaatccagcacataaaagt

SEQ ID NO: 12275 - DNA, 25 bp, Artificial Sequence
  Synthetic
attagctcagagtcaattaaaacag

SEQ ID NO: 12276 - DNA, 25 bp, Artificial Sequence
  Synthetic
actttattcaaggagatgaaaatcg

SEQ ID NO: 12277 - DNA, 23 bp, Artificial Sequence
  Synthetic
tagtctggttgctaatttcaaac

SEQ ID NO: 12278 - DNA, 25 bp, Artificial Sequence
  Synthetic
gaattttcagcagtatttacagatg

SEQ ID NO: 12279 - DNA, 25 bp, Artificial Sequence
  Synthetic
gataatataagtggagaaaagggaa

SEQ ID NO: 12280 - DNA, 21 bp, Artificial Sequence
  Synthetic
ttaacagcaggtattgtaggc

SEQ ID NO: 12281 - DNA, 24 bp, Artificial Sequence
  Synthetic
tcttagctgatttagagtcaatca

SEQ ID NO: 12282 - DNA, 24 bp, Artificial Sequence
  Synthetic
aatgctgaagtagttgttatctca

SEQ ID NO: 12283 - DNA, 18 bp, Artificial Sequence
  Synthetic
acattccagcccttttgg

SEQ ID NO: 12284 - DNA, 19 bp, Artificial Sequence
  Synthetic
tacgtagtaagggttcagc

SEQ ID NO: 12285 - DNA, 24 bp, Artificial Sequence
  Synthetic
agctatagcctttatcatttttcg

SEQ ID NO: 12286 - DNA, 20 bp, Artificial Sequence
  Synthetic
ctgaatattgcggtaccatc

SEQ ID NO: 12287 - DNA, 21 bp, Artificial Sequence
  Synthetic
cttcaggcgtttttttaaggt

SEQ ID NO: 12288 - DNA, 23 bp, Artificial Sequence
  Synthetic
aggtggtaagctgatgattaatc

SEQ ID NO: 12289 - DNA, 20 bp, Artificial Sequence
  Synthetic
aatgccagagatgagttgag

SEQ ID NO: 12290 - DNA, 24 bp, Artificial Sequence
  Synthetic
gaaaaaggagaagtttctatgact

SEQ ID NO: 12291 - DNA, 23 bp, Artificial Sequence
  Synthetic
aacgctgatattgttttagttgg

SEQ ID NO: 12292 - DNA, 19 bp, Artificial Sequence
  Synthetic
ggtgaacctttactcgttg

SEQ ID NO: 12293 - DNA, 23 bp, Artificial Sequence
  Synthetic
tgatgacattgatttgattgaag

SEQ ID NO: 12294 - DNA, 25 bp, Artificial Sequence
  Synthetic
ctatcagtcatattaaagatggtga

SEQ ID NO: 12295 - DNA, 23 bp, Artificial Sequence
  Synthetic
catcttagacatactagcaggat

SEQ ID NO: 12296 - DNA, 23 bp, Artificial Sequence
  Synthetic
ccaccagacctttaaaaagaaac

SEQ ID NO: 12297 - DNA, 22 bp, Artificial Sequence
  Synthetic
tatagctaaatcatcctcgtgg

SEQ ID NO: 12298 - DNA, 25 bp, Artificial Sequence
  Synthetic
tctgtattaggataagtattagctc

SEQ ID NO: 12299 - DNA, 20 bp, Artificial Sequence
  Synthetic
tttagcttgcccttagaaac

SEQ ID NO: 12300 - DNA, 23 bp, Artificial Sequence
  Synthetic
tttaggggtgacttttatgaaga

SEQ ID NO: 12301 - DNA, 22 bp, Artificial Sequence
  Synthetic
atacttatactcttcgcgatgg

SEQ ID NO: 12302 - DNA, 18 bp, Artificial Sequence
  Synthetic
tggtacaaccgatccatc

SEQ ID NO: 12303 - DNA, 22 bp, Artificial Sequence
  Synthetic
tttaacatggaatttgaaccgt

SEQ ID NO: 12304 - DNA, 25 bp, Artificial Sequence
  Synthetic
atggtttctataatcctgaaaaagc

SEQ ID NO: 12305 - DNA, 19 bp, Artificial Sequence
  Synthetic
acaaagcagtgctattcgt

SEQ ID NO: 12306 - DNA, 23 bp, Artificial Sequence
  Synthetic
aaataaaaaggaagcagagatga

SEQ ID NO: 12307 - DNA, 20 bp, Artificial Sequence
  Synthetic
acggtcaggcaacgaatttg

SEQ ID NO: 12308 - DNA, 18 bp, Artificial Sequence
  Synthetic
agcacaaaaagctgtagc

SEQ ID NO: 12309 - DNA, 19 bp, Artificial Sequence
  Synthetic
ggaaacagcgattctatgc

SEQ ID NO: 12310 - DNA, 22 bp, Artificial Sequence
  Synthetic
tgatgatatcactttgcttgac

SEQ ID NO: 12311 - DNA, 20 bp, Artificial Sequence
  Synthetic
ttgagtgtatgtgggacatg

SEQ ID NO: 12312 - DNA, 20 bp, Artificial Sequence
  Synthetic
ctgtagaaatgcgacgctat

SEQ ID NO: 12313 - DNA, 18 bp, Artificial Sequence
  Synthetic
aaagcagcacatacggta

SEQ ID NO: 12314 - DNA, 23 bp, Artificial Sequence
  Synthetic
gtcaacctcattttaaagaacaa

SEQ ID NO: 12315 - DNA, 22 bp, Artificial Sequence
  Synthetic
cattcaatgtaatgggattggt

SEQ ID NO: 12316 - DNA, 18 bp, Artificial Sequence
  Synthetic
ccaagcggctaaaaatgg

SEQ ID NO: 12317 - DNA, 19 bp, Artificial Sequence
  Synthetic
caaaggttttggttgggga

SEQ ID NO: 12318 - DNA, 19 bp, Artificial Sequence
  Synthetic
ttttgacgaggaaaggagg

SEQ ID NO: 12319 - DNA, 20 bp, Artificial Sequence
  Synthetic
gtcaggtttattatgaccgc

SEQ ID NO: 12320 - DNA, 23 bp, Artificial Sequence
  Synthetic
gacatgtttgatagaaaaaaggc

SEQ ID NO: 12321 - DNA, 21 bp, Artificial Sequence
  Synthetic
gaagatcagctctatcacagt

SEQ ID NO: 12322 - DNA, 21 bp, Artificial Sequence
  Synthetic
tattttagcaggagcacagtt

SEQ ID NO: 12323 - DNA, 25 bp, Artificial Sequence
  Synthetic
aagaattatggaaagagttgttagg

SEQ ID NO: 12324 - DNA, 19 bp, Artificial Sequence
  Synthetic
caaagcagccaatctgaca

SEQ ID NO: 12325 - DNA, 23 bp, Artificial Sequence
  Synthetic
aacaagaaaattagtcgttgctg

SEQ ID NO: 12326 - DNA, 25 bp, Artificial Sequence
  Synthetic
aaagtgaccaaaaatattagtgacc

SEQ ID NO: 12327 - DNA, 24 bp, Artificial Sequence
  Synthetic
tgaaacacatgtcaaaaacagtag

SEQ ID NO: 12328 - DNA, 24 bp, Artificial Sequence
  Synthetic
cggatttctgtcaataattcttct

SEQ ID NO: 12329 - DNA, 23 bp, Artificial Sequence
  Synthetic
agtaaacaaaatccaatggaatc

SEQ ID NO: 12330 - DNA, 25 bp, Artificial Sequence
  Synthetic
ggggatgtttttaaatttattgagg

SEQ ID NO: 12331 - DNA, 23 bp, Artificial Sequence
  Synthetic
tcaagctctttctaaaaaatacg

SEQ ID NO: 12332 - DNA, 18 bp, Artificial Sequence
  Synthetic
ggaagggtttatggacgt

SEQ ID NO: 12333 - DNA, 23 bp, Artificial Sequence
  Synthetic
gcaatcacaaattgtttatgtgg

SEQ ID NO: 12334 - DNA, 21 bp, Artificial Sequence
  Synthetic
tagctcttggtgagattgatg

SEQ ID NO: 12335 - DNA, 23 bp, Artificial Sequence
  Synthetic
caatttcaagcaaccttaacaga

SEQ ID NO: 12336 - DNA, 23 bp, Artificial Sequence
  Synthetic
cttgagacgtttaatcattgacc

SEQ ID NO: 12337 - DNA, 19 bp, Artificial Sequence
  Synthetic
tatcacaccaccaccaagt

SEQ ID NO: 12338 - DNA, 21 bp, Artificial Sequence
  Synthetic
gcaaggagaatgtgaagacat

SEQ ID NO: 12339 - DNA, 18 bp, Artificial Sequence
  Synthetic
tggatgtttgattgcggt

SEQ ID NO: 12340 - DNA, 22 bp, Artificial Sequence
  Synthetic
gataagtttgaggtctatgcag

SEQ ID NO: 12341 - DNA, 18 bp, Artificial Sequence
  Synthetic
ccacctatggtaagggtg

SEQ ID NO: 12342 - DNA, 22 bp, Artificial Sequence
  Synthetic
cagcttgattttattaggacgt

SEQ ID NO: 12343 - DNA, 25 bp, Artificial Sequence
  Synthetic
tcaccttattaatattgtgtccatg

SEQ ID NO: 12344 - DNA, 24 bp, Artificial Sequence
  Synthetic
cttctttaagctagcaaagacaaa

SEQ ID NO: 12345 - DNA, 19 bp, Artificial Sequence
  Synthetic
aggaaaaagcagaagcagc

SEQ ID NO: 12346 - DNA, 18 bp, Artificial Sequence
  Synthetic
gcgagcagttgaagtagc

SEQ ID NO: 12347 - DNA, 22 bp, Artificial Sequence
  Synthetic
atggggattttaaatgtgactc

SEQ ID NO: 12348 - DNA, 18 bp, Artificial Sequence
  Synthetic
caggtttgtacgacggtc

SEQ ID NO: 12349 - DNA, 18 bp, Artificial Sequence
  Synthetic
cggcaacaccaaagctaa

SEQ ID NO: 12350 - DNA, 21 bp, Artificial Sequence
  Synthetic
gggatggtgtttgatagtgtc

SEQ ID NO: 12351 - DNA, 18 bp, Artificial Sequence
  Synthetic
gccaggctgattttctca

SEQ ID NO: 12352 - DNA, 23 bp, Artificial Sequence
  Synthetic
acttcatgggattgatattcgag

SEQ ID NO: 12353 - DNA, 23 bp, Artificial Sequence
  Synthetic
gccaaattccatagtttaacagg

SEQ ID NO: 12354 - DNA, 23 bp, Artificial Sequence
  Synthetic
aaacaacctttagaatttccatc

SEQ ID NO: 12355 - DNA, 24 bp, Artificial Sequence
  Synthetic
ggtcatttgaggaagattaaagac

SEQ ID NO: 12356 - DNA, 25 bp, Artificial Sequence
  Synthetic
ctaaaatagctacaataattccagc

SEQ ID NO: 12357 - DNA, 20 bp, Artificial Sequence
  Synthetic
tctccaaaagctcttgccat

SEQ ID NO: 12358 - DNA, 18 bp, Artificial Sequence
  Synthetic
ccaaccaaaagctcaacc

SEQ ID NO: 12359 - DNA, 19 bp, Artificial Sequence
  Synthetic
aaagccagacacaaaaacg

SEQ ID NO: 12360 - DNA, 18 bp, Artificial Sequence
  Synthetic
agccacgttcttagcatt

SEQ ID NO: 12361 - DNA, 22 bp, Artificial Sequence
  Synthetic
tactgagattggaaaccttgac

SEQ ID NO: 12362 - DNA, 23 bp, Artificial Sequence
  Synthetic
cgctaaaatcttaaccctttagg

SEQ ID NO: 12363 - DNA, 18 bp, Artificial Sequence
  Synthetic
agaccatctggcaagagg

SEQ ID NO: 12364 - DNA, 22 bp, Artificial Sequence
  Synthetic
catcttcattttcttcaggagc

SEQ ID NO: 12365 - DNA, 19 bp, Artificial Sequence
  Synthetic
tagacaccactgctggaaa

SEQ ID NO: 12366 - DNA, 22 bp, Artificial Sequence
  Synthetic
taacacgtctaacaggaacttg

SEQ ID NO: 12367 - DNA, 22 bp, Artificial Sequence
  Synthetic
attctttttccttttctagggc

SEQ ID NO: 12368 - DNA, 22 bp, Artificial Sequence
  Synthetic
tgtaaagagtttagttgggtct

SEQ ID NO: 12369 - DNA, 25 bp, Artificial Sequence
  Synthetic
accatcacataatacttaatgtcga

SEQ ID NO: 12370 - DNA, 19 bp, Artificial Sequence
  Synthetic
aacatcaaccctaacccca

SEQ ID NO: 12371 - DNA, 22 bp, Artificial Sequence
  Synthetic
ggtacaaagtttcaaaagaagc

SEQ ID NO: 12372 - DNA, 21 bp, Artificial Sequence
  Synthetic
tttagtcatgacacagccttt

SEQ ID NO: 12373 - DNA, 18 bp, Artificial Sequence
  Synthetic
ggttgttccttgtgcttg

SEQ ID NO: 12374 - DNA, 20 bp, Artificial Sequence
  Synthetic
agttatctcttgagcagtga

SEQ ID NO: 12375 - DNA, 22 bp, Artificial Sequence
  Synthetic
tgtctaaagcagtcaataaggt

SEQ ID NO: 12376 - DNA, 21 bp, Artificial Sequence
  Synthetic
tatcatagaagactgtctgca

SEQ ID NO: 12377 - DNA, 22 bp, Artificial Sequence
  Synthetic
taagtttcagagacttgaccaa

SEQ ID NO: 12378 - DNA, 25 bp, Artificial Sequence
  Synthetic
ttctttagtattcatgactccattc

SEQ ID NO: 12379 - DNA, 20 bp, Artificial Sequence
  Synthetic
attgtaaaggcgtgtttcac

SEQ ID NO: 12380 - DNA, 22 bp, Artificial Sequence
  Synthetic
tttgtattttgtcccaacattg

SEQ ID NO: 12381 - DNA, 21 bp, Artificial Sequence
  Synthetic
tgatgctgtaacggtaaatgg

SEQ ID NO: 12382 - DNA, 20 bp, Artificial Sequence
  Synthetic
tttgaaatcatctcgctgtt

SEQ ID NO: 12383 - DNA, 21 bp, Artificial Sequence
  Synthetic
acgttttttgtaaagctctgc

SEQ ID NO: 12384 - DNA, 18 bp, Artificial Sequence
  Synthetic
ctcatcatctcccgcttg

SEQ ID NO: 12385 - DNA, 18 bp, Artificial Sequence
  Synthetic
aaccgtccataaccctga

SEQ ID NO: 12386 - DNA, 24 bp, Artificial Sequence
  Synthetic
aatacaatcaaccaagttagttcg

SEQ ID NO: 12387 - DNA, 19 bp, Artificial Sequence
  Synthetic
tgaccctctgcttgtaagg

SEQ ID NO: 12388 - DNA, 19 bp, Artificial Sequence
  Synthetic
tcatcttgaggggggcttc

SEQ ID NO: 12389 - DNA, 20 bp, Artificial Sequence
  Synthetic
actcttgggggagataagcc

SEQ ID NO: 12390 - DNA, 19 bp, Artificial Sequence
  Synthetic
ttgcgctaaaccctcctct

SEQ ID NO: 12391 - DNA, 20 bp, Artificial Sequence
  Synthetic
ctactaaaattcgctcccca

SEQ ID NO: 12392 - DNA, 21 bp, Artificial Sequence
  Synthetic
accttcttcacacatagaacg

SEQ ID NO: 12393 - DNA, 18 bp, Artificial Sequence
  Synthetic
cggctccgtctcttcaac

SEQ ID NO: 12394 - DNA, 18 bp, Artificial Sequence
  Synthetic
gatggagcctagcgggat

SEQ ID NO: 12395 - DNA, 20 bp, Artificial Sequence
  Synthetic
tcaaagcctttaccttcagt

SEQ ID NO: 12396 - DNA, 18 bp, Artificial Sequence
  Synthetic
ttggaagcgaccaagagt

SEQ ID NO: 12397 - DNA, 20 bp, Artificial Sequence
  Synthetic
cttttacagcttcgacaact

SEQ ID NO: 12398 - DNA, 22 bp, Artificial Sequence
  Synthetic
taattttttggtcaaagtcgtc

SEQ ID NO: 12399 - DNA, 24 bp, Artificial Sequence
  Synthetic
taatagagattactgtttctgggt

SEQ ID NO: 12400 - DNA, 21 bp, Artificial Sequence
  Synthetic
tagtttaatcagcaagcgaaa

SEQ ID NO: 12401 - DNA, 24 bp, Artificial Sequence
  Synthetic
cttttttaacatcatctgtcaacc

SEQ ID NO: 12402 - DNA, 24 bp, Artificial Sequence
  Synthetic
gccattatcagtgaacttcataat

SEQ ID NO: 12403 - DNA, 22 bp, Artificial Sequence
  Synthetic
tctatgacactattatccagca

SEQ ID NO: 12404 - DNA, 24 bp, Artificial Sequence
  Synthetic
ggagtgctctacaaaatacttaaa

SEQ ID NO: 12405 - DNA, 21 bp, Artificial Sequence
  Synthetic
aagtcgttaaagcagacaatg

SEQ ID NO: 12406 - DNA, 23 bp, Artificial Sequence
  Synthetic
atgggtagatcaaaacaacaaac

SEQ ID NO: 12407 - DNA, 19 bp, Artificial Sequence
  Synthetic
accgcttctgcttttcaat

SEQ ID NO: 12408 - DNA, 18 bp, Artificial Sequence
  Synthetic
ccggcactcctatctttg

SEQ ID NO: 12409 - DNA, 22 bp, Artificial Sequence
  Synthetic
tactaaccgttaagagtattgc

SEQ ID NO: 12410 - DNA, 21 bp, Artificial Sequence
  Synthetic
accgtcatgaacaattagacc

SEQ ID NO: 12411 - DNA, 18 bp, Artificial Sequence
  Synthetic
atccagacgctttcccaa

SEQ ID NO: 12412 - DNA, 21 bp, Artificial Sequence
  Synthetic
tgaccttaattcaagcctttg

SEQ ID NO: 12413 - DNA, 18 bp, Artificial Sequence
  Synthetic
aagtgggcatgtcaacct

SEQ ID NO: 12414 - DNA, 22 bp, Artificial Sequence
  Synthetic
caggttcaacttttgatagcat

SEQ ID NO: 12415 - DNA, 21 bp, Artificial Sequence
  Synthetic
ttttgaaaacttgctggaatc

SEQ ID NO: 12416 - DNA, 18 bp, Artificial Sequence
  Synthetic
tttggtctggcaaagcac

SEQ ID NO: 12417 - DNA, 25 bp, Artificial Sequence
  Synthetic
cgtttatctggtatgatagttttac

SEQ ID NO: 12418 - DNA, 18 bp, Artificial Sequence
  Synthetic
cagggggggaaatctttg

SEQ ID NO: 12419 - DNA, 18 bp, Artificial Sequence
  Synthetic
acgatgctaaagccttct

SEQ ID NO: 12420 - DNA, 22 bp, Artificial Sequence
  Synthetic
gtgctaatacactctttgctaa

SEQ ID NO: 12421 - DNA, 24 bp, Artificial Sequence
  Synthetic
ctgcaagctatctaaaatagtcaa

SEQ ID NO: 12422 - DNA, 25 bp, Artificial Sequence
  Synthetic
atccgttagataatgattttcatcg

SEQ ID NO: 12423 - DNA, 18 bp, Artificial Sequence
  Synthetic
aatcaagtgcgcaggatg

SEQ ID NO: 12424 - DNA, 22 bp, Artificial Sequence
  Synthetic
ctttttcaattgaccatcctga

SEQ ID NO: 12425 - DNA, 17 bp, Artificial Sequence
  Synthetic
gcaacccccgatggaga

SEQ ID NO: 12426 - DNA, 20 bp, Artificial Sequence
  Synthetic
ttcttccacctgacggtaga

SEQ ID NO: 12427 - DNA, 20 bp, Artificial Sequence
  Synthetic
ccttgcacgatctacatccg

SEQ ID NO: 12428 - DNA, 18 bp, Artificial Sequence
  Synthetic
ctgctgtgcactcgtcat

SEQ ID NO: 12429 - DNA, 19 bp, Artificial Sequence
  Synthetic
cttgcgaggcatctccttt

SEQ ID NO: 12430 - DNA, 19 bp, Artificial Sequence
  Synthetic
gctattggccaaggtgtgt

SEQ ID NO: 12431 - DNA, 20 bp, Artificial Sequence
  Synthetic
ttagaggactcttgcgagga

SEQ ID NO: 12432 - DNA, 19 bp, Artificial Sequence
  Synthetic
gccttattgggctgatgcg

SEQ ID NO: 12433 - DNA, 18 bp, Artificial Sequence
  Synthetic
caatttggaccccccccg

SEQ ID NO: 12434 - DNA, 20 bp, Artificial Sequence
  Synthetic
gacacccaggcccataattc

SEQ ID NO: 12435 - DNA, 18 bp, Artificial Sequence
  Synthetic
ggtgcactaccggtttgt

SEQ ID NO: 12436 - DNA, 18 bp, Artificial Sequence
  Synthetic
gacccaaggcagatccct

SEQ ID NO: 12437 - DNA, 16 bp, Artificial Sequence
  Synthetic
gagcggacggccaaca

SEQ ID NO: 12438 - DNA, 18 bp, Artificial Sequence
  Synthetic
ttggcggtcttgtcgact

SEQ ID NO: 12439 - DNA, 20 bp, Artificial Sequence
  Synthetic
actctttaggccttgagtgc

SEQ ID NO: 12440 - DNA, 20 bp, Artificial Sequence
  Synthetic
ctaccagcaagagcctcgag

SEQ ID NO: 12441 - DNA, 16 bp, Artificial Sequence
  Synthetic
aggctgcgcaacgtca

SEQ ID NO: 12442 - DNA, 18 bp, Artificial Sequence
  Synthetic
ccatgtaccccggtggag

SEQ ID NO: 12443 - DNA, 19 bp, Artificial Sequence
  Synthetic
gctggttccaaactcggtg

SEQ ID NO: 12444 - DNA, 19 bp, Artificial Sequence
  Synthetic
tggtgcccccattaattcg

SEQ ID NO: 12445 - DNA, 19 bp, Artificial Sequence
  Synthetic
cagcacctccaggataggc

SEQ ID NO: 12446 - DNA, 22 bp, Artificial Sequence
  Synthetic
ttgtatactatcaactgccact

SEQ ID NO: 12447 - DNA, 22 bp, Artificial Sequence
  Synthetic
gactttgtgtctactcttctca

SEQ ID NO: 12448 - DNA, 19 bp, Artificial Sequence
  Synthetic
gttttgccattccttctgt

SEQ ID NO: 12449 - DNA, 18 bp, Artificial Sequence
  Synthetic
aatgctgtgtatagggcg

SEQ ID NO: 12450 - DNA, 23 bp, Artificial Sequence
  Synthetic
gaaattcattagaccctttttgc

SEQ ID NO: 12451 - DNA, 24 bp, Artificial Sequence
  Synthetic
ctacaactgaagttaagttttctg

SEQ ID NO: 12452 - DNA, 22 bp, Artificial Sequence
  Synthetic
aaactgcagtttttgtgtacac

SEQ ID NO: 12453 - DNA, 25 bp, Artificial Sequence
  Synthetic
acagattggttaaaaactcttaagc

SEQ ID NO: 12454 - DNA, 23 bp, Artificial Sequence
  Synthetic
gatgatgttgttaccagtctttg

SEQ ID NO: 12455 - DNA, 22 bp, Artificial Sequence
  Synthetic
ttttgagatgtcttgtgattgt

SEQ ID NO: 12456 - DNA, 23 bp, Artificial Sequence
  Synthetic
actgtttgttttgttgatgttga

SEQ ID NO: 12457 - DNA, 20 bp, Artificial Sequence
  Synthetic
gttaaaactgtaccagctgg

SEQ ID NO: 12458 - DNA, 23 bp, Artificial Sequence
  Synthetic
atgttaaagatgttgttgttgag

SEQ ID NO: 12459 - DNA, 23 bp, Artificial Sequence
  Synthetic
tgaacaatattcaacttgtgaca

SEQ ID NO: 12460 - DNA, 25 bp, Artificial Sequence
  Synthetic
gattttaagtacattgagaatggtc

SEQ ID NO: 12461 - DNA, 22 bp, Artificial Sequence
  Synthetic
actattagaactttggctacac

SEQ ID NO: 12462 - DNA, 24 bp, Artificial Sequence
  Synthetic
gaaacttaagaattatgctgcaag

SEQ ID NO: 12463 - DNA, 21 bp, Artificial Sequence
  Synthetic
ctagacatgtcatagcaccat

SEQ ID NO: 12464 - DNA, 23 bp, Artificial Sequence
  Synthetic
aatgttagaaatgatggtactgt

SEQ ID NO: 12465 - DNA, 25 bp, Artificial Sequence
  Synthetic
ggttatttagtttgtacttattggg

SEQ ID NO: 12466 - DNA, 23 bp, Artificial Sequence
  Synthetic
gtgttgcttcatcatttgttagt

SEQ ID NO: 12467 - DNA, 23 bp, Artificial Sequence
  Synthetic
attctaagattgtttgtgatggt

SEQ ID NO: 12468 - DNA, 23 bp, Artificial Sequence
  Synthetic
ttaaataccttacgtagaggtgc

SEQ ID NO: 12469 - DNA, 21 bp, Artificial Sequence
  Synthetic
gttcctcaccctagtatggat

SEQ ID NO: 12470 - DNA, 25 bp, Artificial Sequence
  Synthetic
ttaaaaatgctgatcttaaggatgg

SEQ ID NO: 12471 - DNA, 25 bp, Artificial Sequence
  Synthetic
tattttgatagtaagggttggtatg

SEQ ID NO: 12472 - DNA, 20 bp, Artificial Sequence
  Synthetic
cttttggtccactatgtcgt

SEQ ID NO: 12473 - DNA, 25 bp, Artificial Sequence
  Synthetic
ctatatcttatgaagaacaggatgc

SEQ ID NO: 12474 - DNA, 24 bp, Artificial Sequence
  Synthetic
ttatcccaaatgtgatagagcttt

SEQ ID NO: 12475 - DNA, 25 bp, Artificial Sequence
  Synthetic
accagaataatgtctttatgagtac

SEQ ID NO: 12476 - DNA, 23 bp, Artificial Sequence
  Synthetic
gggtgttcttgaatctttttctg

SEQ ID NO: 12477 - DNA, 24 bp, Artificial Sequence
  Synthetic
aactactaagttagttcctggtat

SEQ ID NO: 12478 - DNA, 23 bp, Artificial Sequence
  Synthetic
atagtttgttttgtacacgtgac

SEQ ID NO: 12479 - DNA, 23 bp, Artificial Sequence
  Synthetic
ttgttgttttaaacatgcattgg

SEQ ID NO: 12480 - DNA, 25 bp, Artificial Sequence
  Synthetic
agtgttattcatgacattggtaatc

SEQ ID NO: 12481 - DNA, 19 bp, Artificial Sequence
  Synthetic
gtgagttacctgttgcagt

SEQ ID NO: 12482 - DNA, 25 bp, Artificial Sequence
  Synthetic
tgtacttatatggatttgttgttgg

SEQ ID NO: 12483 - DNA, 24 bp, Artificial Sequence
  Synthetic
ctttgtcaatacctaaatagcact

SEQ ID NO: 12484 - DNA, 23 bp, Artificial Sequence
  Synthetic
gaaacttttcttgattttgcttg

SEQ ID NO: 12485 - DNA, 25 bp, Artificial Sequence
  Synthetic
ttgttatttacagaacagttaggtg

SEQ ID NO: 12486 - DNA, 24 bp, Artificial Sequence
  Synthetic
acatattttctgttcaacaggatg

SEQ ID NO: 12487 - DNA, 24 bp, Artificial Sequence
  Synthetic
tattgtagtaattcttcctcaggt

SEQ ID NO: 12488 - DNA, 24 bp, Artificial Sequence
  Synthetic
aaacttactttattgcgattctcc

SEQ ID NO: 12489 - DNA, 25 bp, Artificial Sequence
  Synthetic
tggtggtattacatatgtttctaac

SEQ ID NO: 12490 - DNA, 25 bp, Artificial Sequence
  Synthetic
tggagattataacctttctagtgtt

SEQ ID NO: 12491 - DNA, 24 bp, Artificial Sequence
  Synthetic
gctatacatactgttactattgca

SEQ ID NO: 12492 - DNA, 20 bp, Artificial Sequence
  Synthetic
gctgccaactgattacaaga

SEQ ID NO: 12493 - DNA, 25 bp, Artificial Sequence
  Synthetic
cagtacatatgttgatttgaagttg

SEQ ID NO: 12494 - DNA, 25 bp, Artificial Sequence
  Synthetic
tttagtaggacattatatcaaccag

SEQ ID NO: 12495 - DNA, 20 bp, Artificial Sequence
  Synthetic
gccgtgttaaaactttttgg

SEQ ID NO: 12496 - DNA, 21 bp, Artificial Sequence
  Synthetic
gggtgttttgtcagaaagaga

SEQ ID NO: 12497 - DNA, 23 bp, Artificial Sequence
  Synthetic
ctcataaggaccttaaattcaga

SEQ ID NO: 12498 - DNA, 21 bp, Artificial Sequence
  Synthetic
gtagcacttcaagacaacagt

SEQ ID NO: 12499 - DNA, 19 bp, Artificial Sequence
  Synthetic
cagaatggtgttgatgcca

SEQ ID NO: 12500 - DNA, 19 bp, Artificial Sequence
  Synthetic
atttggtgtttggatgctg

SEQ ID NO: 12501 - DNA, 25 bp, Artificial Sequence
  Synthetic
cagtaaaatggcagataataaaggt

SEQ ID NO: 12502 - DNA, 18 bp, Artificial Sequence
  Synthetic
cgccgcattattaagcag

SEQ ID NO: 12503 - DNA, 23 bp, Artificial Sequence
  Synthetic
taaccacaattcttccagttgat

SEQ ID NO: 12504 - DNA, 20 bp, Artificial Sequence
  Synthetic
cgcttagacttactgcaaga

SEQ ID NO: 12505 - DNA, 20 bp, Artificial Sequence
  Synthetic
gtcacttcaagacactagca

SEQ ID NO: 12506 - DNA, 20 bp, Artificial Sequence
  Synthetic
tgtcttccactagctcccca

SEQ ID NO: 12507 - DNA, 22 bp, Artificial Sequence
  Synthetic
gacagatagaaaaaacaccgag

SEQ ID NO: 12508 - DNA, 20 bp, Artificial Sequence
  Synthetic
gcccccaaagatatataccc

SEQ ID NO: 12509 - DNA, 18 bp, Artificial Sequence
  Synthetic
tgtggaaacagtaggccc

SEQ ID NO: 12510 - DNA, 25 bp, Artificial Sequence
  Synthetic
tgcatctacatctaatataagtgct

SEQ ID NO: 12511 - DNA, 18 bp, Artificial Sequence
  Synthetic
ggttcgttgagcagccac

SEQ ID NO: 12512 - DNA, 25 bp, Artificial Sequence
  Synthetic
cccactttttctatgatttaagttc

SEQ ID NO: 12513 - DNA, 18 bp, Artificial Sequence
  Synthetic
tctatcttcctccccagc

SEQ ID NO: 12514 - DNA, 21 bp, Artificial Sequence
  Synthetic
atagagataggtagaggccag

SEQ ID NO: 12515 - DNA, 21 bp, Artificial Sequence
  Synthetic
ggtgacatgatggatattggt

SEQ ID NO: 12516 - DNA, 18 bp, Artificial Sequence
  Synthetic
gcagatgctgaaccaaga

SEQ ID NO: 12517 - DNA, 21 bp, Artificial Sequence
  Synthetic
cacaagtgtgcattttttgtg

SEQ ID NO: 12518 - DNA, 22 bp, Artificial Sequence
  Synthetic
ttaaaagactacacctacagga

SEQ ID NO: 12519 - DNA, 18 bp, Artificial Sequence
  Synthetic
tgcagcaaccctatttgg

SEQ ID NO: 12520 - DNA, 24 bp, Artificial Sequence
  Synthetic
cttggatgattctgatatagatga

SEQ ID NO: 12521 - DNA, 22 bp, Artificial Sequence
  Synthetic
cacctaaagaaaagggtaaacg

SEQ ID NO: 12522 - DNA, 24 bp, Artificial Sequence
  Synthetic
ctgaacctccaaaattaagaagtg

SEQ ID NO: 12523 - DNA, 23 bp, Artificial Sequence
  Synthetic
gttttgtattttatggacctcct

SEQ ID NO: 12524 - DNA, 19 bp, Artificial Sequence
  Synthetic
agagtcactgcaagagaga

SEQ ID NO: 12525 - DNA, 23 bp, Artificial Sequence
  Synthetic
aattgaaaacacaacaattgctg

SEQ ID NO: 12526 - DNA, 23 bp, Artificial Sequence
  Synthetic
ccttcagtgattcctttagaaga

SEQ ID NO: 12527 - DNA, 23 bp, Artificial Sequence
  Synthetic
atttgtacactcattcataggag

SEQ ID NO: 12528 - DNA, 18 bp, Artificial Sequence
  Synthetic
ggccaacctttaggaagt

SEQ ID NO: 12529 - DNA, 21 bp, Artificial Sequence
  Synthetic
tccacctttagagttaatgca

SEQ ID NO: 12530 - DNA, 18 bp, Artificial Sequence
  Synthetic
gaagcagttccaaacctg

SEQ ID NO: 12531 - DNA, 25 bp, Artificial Sequence
  Synthetic
ttgtattatatttgcccctaaactg

SEQ ID NO: 12532 - DNA, 18 bp, Artificial Sequence
  Synthetic
cgcagaagcagaggattt

SEQ ID NO: 12533 - DNA, 22 bp, Artificial Sequence
  Synthetic
tcttgaagagagaaaagcaatt

SEQ ID NO: 12534 - DNA, 20 bp, Artificial Sequence
  Synthetic
aaagaggggaaattccgttt

SEQ ID NO: 12535 - DNA, 19 bp, Artificial Sequence
  Synthetic
catcggatcctcaactcac

SEQ ID NO: 12536 - DNA, 18 bp, Artificial Sequence
  Synthetic
ggaatttccggagtccct

SEQ ID NO: 12537 - DNA, 18 bp, Artificial Sequence
  Synthetic
ggggtcaactccatgatt

SEQ ID NO: 12538 - DNA, 21 bp, Artificial Sequence
  Synthetic
aaggtattttccagactgttg

SEQ ID NO: 12539 - DNA, 22 bp, Artificial Sequence
  Synthetic
catgctcttttccatgaagttg

SEQ ID NO: 12540 - DNA, 23 bp, Artificial Sequence
  Synthetic
tgcaatattaacaatgtggttag

SEQ ID NO: 12541 - DNA, 25 bp, Artificial Sequence
  Synthetic
atctgtcaaattatgaagatgcaag

SEQ ID NO: 12542 - DNA, 23 bp, Artificial Sequence
  Synthetic
tttgtcagatgttttgtttttgg

SEQ ID NO: 12543 - DNA, 20 bp, Artificial Sequence
  Synthetic
ctccttacagagtgaacagg

SEQ ID NO: 12544 - DNA, 23 bp, Artificial Sequence
  Synthetic
aacaaccatgaaagatttgaaag

SEQ ID NO: 12545 - DNA, 25 bp, Artificial Sequence
  Synthetic
aagagtacacatttcctataacctt

SEQ ID NO: 12546 - DNA, 21 bp, Artificial Sequence
  Synthetic
aaatgccatgttatccactga

SEQ ID NO: 12547 - DNA, 23 bp, Artificial Sequence
  Synthetic
tctcttttttatactgaggagca

SEQ ID NO: 12548 - DNA, 20 bp, Artificial Sequence
  Synthetic
ctgtggcttcagattactgg

SEQ ID NO: 12549 - DNA, 25 bp, Artificial Sequence
  Synthetic
tttcagatgatgataatgatagtgc

SEQ ID NO: 12550 - DNA, 25 bp, Artificial Sequence
  Synthetic
gtgattaaattagatgcagatccag

SEQ ID NO: 12551 - DNA, 18 bp, Artificial Sequence
  Synthetic
gatcaggcatggagagga

SEQ ID NO: 12552 - DNA, 21 bp, Artificial Sequence
  Synthetic
cgctttttagaaagagtccca

SEQ ID NO: 12553 - DNA, 21 bp, Artificial Sequence
  Synthetic
tgatgctatcaacatggattc

SEQ ID NO: 12554 - DNA, 18 bp, Artificial Sequence
  Synthetic
gatgcttgtcctctggat

SEQ ID NO: 12555 - DNA, 23 bp, Artificial Sequence
  Synthetic
ccatgaagactatcattgctttg

SEQ ID NO: 12556 - DNA, 20 bp, Artificial Sequence
  Synthetic
ccttgatggagaaaactgca

SEQ ID NO: 12557 - DNA, 25 bp, Artificial Sequence
  Synthetic
cagtttctttagtagattgaattgg

SEQ ID NO: 12558 - DNA, 25 bp, Artificial Sequence
  Synthetic
gcatctattggacaatagtaaaacc

SEQ ID NO: 12559 - DNA, 21 bp, Artificial Sequence
  Synthetic
tgttaagcaaaacactctgaa

SEQ ID NO: 12560 - DNA, 25 bp, Artificial Sequence
  Synthetic
ccatcagattgaaaaagaattctca

SEQ ID NO: 12561 - DNA, 23 bp, Artificial Sequence
  Synthetic
aatggaacttatgaccatgatgt

SEQ ID NO: 12562 - DNA, 18 bp, Artificial Sequence
  Synthetic
ttgagaggttgttggcaa

SEQ ID NO: 12563 - DNA, 20 bp, Artificial Sequence
  Synthetic
aggaaggttatgcatatgcg

SEQ ID NO: 12564 - DNA, 23 bp, Artificial Sequence
  Synthetic
ttgtagagagatatgattgggaa

SEQ ID NO: 12565 - DNA, 22 bp, Artificial Sequence
  Synthetic
tagaagacttgctgctagaaga

SEQ ID NO: 12566 - DNA, 18 bp, Artificial Sequence
  Synthetic
caggggagtgaggagttt

SEQ ID NO: 12567 - DNA, 23 bp, Artificial Sequence
  Synthetic
ttgttaaaatgcagtaatctcag

SEQ ID NO: 12568 - DNA, 21 bp, Artificial Sequence
  Synthetic
aaaatgttatcgctacagggt

SEQ ID NO: 12569 - DNA, 25 bp, Artificial Sequence
  Synthetic
taacccactttatatattgtatggc

SEQ ID NO: 12570 - DNA, 19 bp, Artificial Sequence
  Synthetic
gtcattccagaagcgattg

SEQ ID NO: 12571 - DNA, 22 bp, Artificial Sequence
  Synthetic
ctacatatgctgaaacaccaga

SEQ ID NO: 12572 - DNA, 25 bp, Artificial Sequence
  Synthetic
ccaacaataataattcatacagagg

SEQ ID NO: 12573 - DNA, 24 bp, Artificial Sequence
  Synthetic
gatgtgaggaaaaataatggagat

SEQ ID NO: 12574 - DNA, 25 bp, Artificial Sequence
  Synthetic
aaaatccaaatggctataatacagg

SEQ ID NO: 12575 - DNA, 25 bp, Artificial Sequence
  Synthetic
agtatccagatttcttaaaaatggc

SEQ ID NO: 12576 - DNA, 25 bp, Artificial Sequence
  Synthetic
aaagataataacaattggctctgtc

SEQ ID NO: 12577 - DNA, 19 bp, Artificial Sequence
  Synthetic
acagaaattggtcaaagcc

SEQ ID NO: 12578 - DNA, 19 bp, Artificial Sequence
  Synthetic
tcatttaggaaccaggcaa

SEQ ID NO: 12579 - DNA, 25 bp, Artificial Sequence
  Synthetic
actagaatactattcattgaagagg

SEQ ID NO: 12580 - DNA, 20 bp, Artificial Sequence
  Synthetic
tgcaggaatcctaacaatga

SEQ ID NO: 12581 - DNA, 18 bp, Artificial Sequence
  Synthetic
gcaagttgctaccgctgg

SEQ ID NO: 12582 - DNA, 17 bp, Artificial Sequence
  Synthetic
cctggccgctttctacg

SEQ ID NO: 12583 - DNA, 16 bp, Artificial Sequence
  Synthetic
cgaggtgcagaccgct

SEQ ID NO: 12584 - DNA, 20 bp, Artificial Sequence
  Synthetic
ggtacctgaaaccgaaagcg

SEQ ID NO: 12585 - DNA, 17 bp, Artificial Sequence
  Synthetic
tgggcaaagacggagcc

SEQ ID NO: 12586 - DNA, 17 bp, Artificial Sequence
  Synthetic
gagggtgagcgcgaaga

SEQ ID NO: 12587 - DNA, 16 bp, Artificial Sequence
  Synthetic
cgatcaccaccgcgac

SEQ ID NO: 12588 - DNA, 20 bp, Artificial Sequence
  Synthetic
ccggtttcggtgagacactt

SEQ ID NO: 12589 - DNA, 21 bp, Artificial Sequence
  Synthetic
ctccgttatgtctttcagatc

SEQ ID NO: 12590 - DNA, 22 bp, Artificial Sequence
  Synthetic
aatcttctcataaccgtagtcc

SEQ ID NO: 12591 - DNA, 19 bp, Artificial Sequence
  Synthetic
ccgtcacatgacaggaaat

SEQ ID NO: 12592 - DNA, 20 bp, Artificial Sequence
  Synthetic
gagaatgacacaccacagaa

SEQ ID NO: 12593 - DNA, 18 bp, Artificial Sequence
  Synthetic
aaacggtcgtcatcacat

SEQ ID NO: 12594 - DNA, 20 bp, Artificial Sequence
  Synthetic
acagaagttttccaccaaag

SEQ ID NO: 12595 - DNA, 19 bp, Artificial Sequence
  Synthetic
gtgtctaaacgagtctgga

SEQ ID NO: 12596 - DNA, 20 bp, Artificial Sequence
  Synthetic
ctttttccgacaaacacaga

SEQ ID NO: 12597 - DNA, 18 bp, Artificial Sequence
  Synthetic
ggagccgagtaagcattt

SEQ ID NO: 12598 - DNA, 18 bp, Artificial Sequence
  Synthetic
gagtccaccattttcgga

SEQ ID NO: 12599 - DNA, 21 bp, Artificial Sequence
  Synthetic
aaaacctctagattcttcccg

SEQ ID NO: 12600 - DNA, 19 bp, Artificial Sequence
  Synthetic
ggtggtttcttttgaagca

SEQ ID NO: 12601 - DNA, 19 bp, Artificial Sequence
  Synthetic
tcgccagattacttcagac

SEQ ID NO: 12602 - DNA, 25 bp, Artificial Sequence
  Synthetic
ggaattagatttttattgatggtgc

SEQ ID NO: 12603 - DNA, 18 bp, Artificial Sequence
  Synthetic
cgaagtgcttctctcgat

SEQ ID NO: 12604 - DNA, 20 bp, Artificial Sequence
  Synthetic
cgaatccggaatttacttgt

SEQ ID NO: 12605 - DNA, 22 bp, Artificial Sequence
  Synthetic
tatgaataacggagagcttgtt

SEQ ID NO: 12606 - DNA, 18 bp, Artificial Sequence
  Synthetic
tttctgtgtgtgctttcg

SEQ ID NO: 12607 - DNA, 19 bp, Artificial Sequence
  Synthetic
cgtggatttgttgaatgga

SEQ ID NO: 12608 - DNA, 20 bp, Artificial Sequence
  Synthetic
acagatccgtctctcagctg

SEQ ID NO: 12609 - DNA, 18 bp, Artificial Sequence
  Synthetic
gcacagagctggtcctga

SEQ ID NO: 12610 - DNA, 16 bp, Artificial Sequence
  Synthetic
gagggctgcaacgcga

SEQ ID NO: 12611 - DNA, 17 bp, Artificial Sequence
  Synthetic
gagacgcagaagccgtc

SEQ ID NO: 12612 - DNA, 18 bp, Artificial Sequence
  Synthetic
cagagacgtgaccggaga

SEQ ID NO: 12613 - DNA, 21 bp, Artificial Sequence
  Synthetic
caagaaacatagcatggatgg

SEQ ID NO: 12614 - DNA, 18 bp, Artificial Sequence
  Synthetic
gggagagtgctaagcaga

SEQ ID NO: 12615 - DNA, 21 bp, Artificial Sequence
  Synthetic
tcagttacacccaaaaagttg

SEQ ID NO: 12616 - DNA, 19 bp, Artificial Sequence
  Synthetic
ggaggttatggagggactg

SEQ ID NO: 12617 - DNA, 20 bp, Artificial Sequence
  Synthetic
acggatgttgtaacagttgt

SEQ ID NO: 12618 - DNA, 21 bp, Artificial Sequence
  Synthetic
gaggcaattgttgatcaagaa

SEQ ID NO: 12619 - DNA, 18 bp, Artificial Sequence
  Synthetic
cgcaaatgcagacacatt

SEQ ID NO: 12620 - DNA, 19 bp, Artificial Sequence
  Synthetic
gtgaatcactctccacagc

SEQ ID NO: 12621 - DNA, 25 bp, Artificial Sequence
  Synthetic
caaatcctacattaatgataaaggg

SEQ ID NO: 12622 - DNA, 23 bp, Artificial Sequence
  Synthetic
gggagacaaaataacattcgaag

SEQ ID NO: 12623 - DNA, 20 bp, Artificial Sequence
  Synthetic
gattgaggaatatcccgtct

SEQ ID NO: 12624 - DNA, 16 bp, Artificial Sequence
  Synthetic
cgacacactgcagcgg

SEQ ID NO: 12625 - DNA, 18 bp, Artificial Sequence
  Synthetic
gagctctctcaccccgtg

SEQ ID NO: 12626 - DNA, 20 bp, Artificial Sequence
  Synthetic
ctttgcgtttctcacggcat

SEQ ID NO: 12627 - DNA, 17 bp, Artificial Sequence
  Synthetic
ggccgccgagattaacg

SEQ ID NO: 12628 - DNA, 20 bp, Artificial Sequence
  Synthetic
aatcatctgactcgtgccag

SEQ ID NO: 12629 - DNA, 16 bp, Artificial Sequence
  Synthetic
tgagggcggccagact

SEQ ID NO: 12630 - DNA, 20 bp, Artificial Sequence
  Synthetic
ctgggaccgtggatagtgtg

SEQ ID NO: 12631 - DNA, 17 bp, Artificial Sequence
  Synthetic
aaagtaacgccgcgtcc

SEQ ID NO: 12632 - DNA, 17 bp, Artificial Sequence
  Synthetic
tccactcatgccgccga

SEQ ID NO: 12633 - DNA, 16 bp, Artificial Sequence
  Synthetic
cagcaccagcgcggaa

SEQ ID NO: 12634 - DNA, 23 bp, Artificial Sequence
  Synthetic
agatggatattcaaagtacaggg

SEQ ID NO: 12635 - DNA, 20 bp, Artificial Sequence
  Synthetic
tacgtcatcacactctttgc

SEQ ID NO: 12636 - DNA, 22 bp, Artificial Sequence
  Synthetic
aactaagaaaccgatttaccac

SEQ ID NO: 12637 - DNA, 19 bp, Artificial Sequence
  Synthetic
cccacataaaatcacgtgc

SEQ ID NO: 12638 - DNA, 22 bp, Artificial Sequence
  Synthetic
caacgattgaagaacatcatca

SEQ ID NO: 12639 - DNA, 22 bp, Artificial Sequence
  Synthetic
aaacaccaacgttttagttagg

SEQ ID NO: 12640 - DNA, 21 bp, Artificial Sequence
  Synthetic
ttctaatgaaatcgtcagtcg

SEQ ID NO: 12641 - DNA, 18 bp, Artificial Sequence
  Synthetic
cgctgaccacataaacgt

SEQ ID NO: 12642 - DNA, 21 bp, Artificial Sequence
  Synthetic
ggatacagagagcaaaaacag

SEQ ID NO: 12643 - DNA, 18 bp, Artificial Sequence
  Synthetic
ggtttgaggtgtctggtt

SEQ ID NO: 12644 - DNA, 21 bp, Artificial Sequence
  Synthetic
taacttggactggaaagatca

SEQ ID NO: 12645 - DNA, 21 bp, Artificial Sequence
  Synthetic
ccaattttagaagggcatgtc

SEQ ID NO: 12646 - DNA, 21 bp, Artificial Sequence
  Synthetic
cgaatccacgtatttatgtcc

SEQ ID NO: 12647 - DNA, 22 bp, Artificial Sequence
  Synthetic
agatcgagtcaatcatagagaa

SEQ ID NO: 12648 - DNA, 21 bp, Artificial Sequence
  Synthetic
cgttaatgctgatgaacttgg

SEQ ID NO: 12649 - DNA, 20 bp, Artificial Sequence
  Synthetic
gataggacggggaaaagaac

SEQ ID NO: 12650 - DNA, 25 bp, Artificial Sequence
  Synthetic
agtgtatcttccgagtctagtatta

SEQ ID NO: 12651 - DNA, 20 bp, Artificial Sequence
  Synthetic
gtcatctatggagacgctag

SEQ ID NO: 12652 - DNA, 21 bp, Artificial Sequence
  Synthetic
ttcagtgtttcgatttcatcc

SEQ ID NO: 12653 - DNA, 18 bp, Artificial Sequence
  Synthetic
tggatcctggggagttct

SEQ ID NO: 12654 - DNA, 18 bp, Artificial Sequence
  Synthetic
tttccatgcgcgtttcgg

SEQ ID NO: 12655 - DNA, 18 bp, Artificial Sequence
  Synthetic
catctgggatcccgctcg

SEQ ID NO: 12656 - DNA, 17 bp, Artificial Sequence
  Synthetic
gcacgagaacacgcgag

SEQ ID NO: 12657 - DNA, 20 bp, Artificial Sequence
  Synthetic
aatgtttccacgtgacgtcc

SEQ ID NO: 12658 - DNA, 18 bp, Artificial Sequence
  Synthetic
gagccgtgtacgtccacc

SEQ ID NO: 12659 - DNA, 19 bp, Artificial Sequence
  Synthetic
gacgctttgtccaaaatgc

SEQ ID NO: 12660 - DNA, 18 bp, Artificial Sequence
  Synthetic
gcagatgcaacggttcaa

SEQ ID NO: 12661 - DNA, 20 bp, Artificial Sequence
  Synthetic
atggactccaacaccatgtc

SEQ ID NO: 12662 - DNA, 18 bp, Artificial Sequence
  Synthetic
tacctacttcgcgctacc

SEQ ID NO: 12663 - DNA, 25 bp, Artificial Sequence
  Synthetic
atacttatgaggatgtcaaaaatgc

SEQ ID NO: 12664 - DNA, 22 bp, Artificial Sequence
  Synthetic
aattgtacagttactaaagggc

SEQ ID NO: 12665 - DNA, 18 bp, Artificial Sequence
  Synthetic
gactttccttttgcagcg

SEQ ID NO: 12666 - DNA, 20 bp, Artificial Sequence
  Synthetic
agcaattagacagctcagac

SEQ ID NO: 12667 - DNA, 18 bp, Artificial Sequence
  Synthetic
ttgctgatgggcacacta

SEQ ID NO: 12668 - DNA, 18 bp, Artificial Sequence
  Synthetic
gaaggtatagaggggggc

SEQ ID NO: 12669 - DNA, 25 bp, Artificial Sequence
  Synthetic
ttcatacattattaaaaggacaggc

SEQ ID NO: 12670 - DNA, 18 bp, Artificial Sequence
  Synthetic
aacaccggaatggatagc

SEQ ID NO: 12671 - DNA, 21 bp, Artificial Sequence
  Synthetic
cttttttaaaaggttggcgtc

SEQ ID NO: 12672 - DNA, 18 bp, Artificial Sequence
  Synthetic
tgtgtcaaaagccaaagc

SEQ ID NO: 12673 - DNA, 18 bp, Artificial Sequence
  Synthetic
ccgaaagcgaaggagaga

SEQ ID NO: 12674 - DNA, 19 bp, Artificial Sequence
  Synthetic
cagagggtgggttttcaat

SEQ ID NO: 12675 - DNA, 21 bp, Artificial Sequence
  Synthetic
gccacaattcctgatacattc

SEQ ID NO: 12676 - DNA, 21 bp, Artificial Sequence
  Synthetic
ttatcatgcaggtagtaccag

SEQ ID NO: 12677 - DNA, 18 bp, Artificial Sequence
  Synthetic
ggtcaggacagcagagaa

SEQ ID NO: 12678 - DNA, 21 bp, Artificial Sequence
  Synthetic
acagggcctaagtttaaatcc

SEQ ID NO: 12679 - DNA, 21 bp, Artificial Sequence
  Synthetic
tgtttcaaattgctaggtcaa

SEQ ID NO: 12680 - DNA, 19 bp, Artificial Sequence
  Synthetic
ggtttaggaccgaaaacgg

SEQ ID NO: 12681 - DNA, 23 bp, Artificial Sequence
  Synthetic
gagtagtgtatagagacgggtat

SEQ ID NO: 12682 - DNA, 18 bp, Artificial Sequence
  Synthetic
tgacatgctggagacaca

SEQ ID NO: 12683 - DNA, 19 bp, Artificial Sequence
  Synthetic
tctacacaggcagaaaggg

SEQ ID NO: 12684 - DNA, 18 bp, Artificial Sequence
  Synthetic
cgggaaagagcaaaatgg

SEQ ID NO: 12685 - DNA, 21 bp, Artificial Sequence
  Synthetic
attagtgacgtgtatgggagt

SEQ ID NO: 12686 - DNA, 18 bp, Artificial Sequence
  Synthetic
gggcacaacaacaacaga

SEQ ID NO: 12687 - DNA, 22 bp, Artificial Sequence
  Synthetic
aaatccatttccaattgatgtg

SEQ ID NO: 12688 - DNA, 18 bp, Artificial Sequence
  Synthetic
tgttgtgtggaaatgggt

SEQ ID NO: 12689 - DNA, 19 bp, Artificial Sequence
  Synthetic
ccataagacccccaccacc

SEQ ID NO: 12690 - DNA, 22 bp, Artificial Sequence
  Synthetic
gtgaagcaaacagactaaagtg

SEQ ID NO: 12691 - DNA, 25 bp, Artificial Sequence
  Synthetic
tacctggtatatacaatactacaca

SEQ ID NO: 12692 - DNA, 19 bp, Artificial Sequence
  Synthetic
ataacacccacctctacct

SEQ ID NO: 12693 - DNA, 22 bp, Artificial Sequence
  Synthetic
gatcctgcatttcttcacaaac

SEQ ID NO: 12694 - DNA, 18 bp, Artificial Sequence
  Synthetic
tacatggccttatgcacc

SEQ ID NO: 12695 - DNA, 18 bp, Artificial Sequence
  Synthetic
tatccctgtctgctgagg

SEQ ID NO: 12696 - DNA, 18 bp, Artificial Sequence
  Synthetic
gcatagtgccgtttcctg

SEQ ID NO: 12697 - DNA, 19 bp, Artificial Sequence
  Synthetic
ttaaaactgggtgtgggtt

SEQ ID NO: 12698 - DNA, 20 bp, Artificial Sequence
  Synthetic
tctttggttggtcgttcagc

SEQ ID NO: 12699 - DNA, 21 bp, Artificial Sequence
  Synthetic
tcaagatccaagcaaattcac

SEQ ID NO: 12700 - DNA, 24 bp, Artificial Sequence
  Synthetic
attagtccattacgtagtgaaact

SEQ ID NO: 12701 - DNA, 24 bp, Artificial Sequence
  Synthetic
tcaataatgtgggtaacaatgttg

SEQ ID NO: 12702 - DNA, 20 bp, Artificial Sequence
  Synthetic
attacttgcatacacaccac

SEQ ID NO: 12703 - DNA, 23 bp, Artificial Sequence
  Synthetic
ataacatcacaaacaagagatga

SEQ ID NO: 12704 - DNA, 25 bp, Artificial Sequence
  Synthetic
gtaatgcaatatatgtatgttcctc

SEQ ID NO: 12705 - DNA, 20 bp, Artificial Sequence
  Synthetic
tgattgtggtggaaaacttc

SEQ ID NO: 12706 - DNA, 25 bp, Artificial Sequence
  Synthetic
tctcggctatggttattataatcag

SEQ ID NO: 12707 - DNA, 19 bp, Artificial Sequence
  Synthetic
cattcaaagatcgcagcac

SEQ ID NO: 12708 - DNA, 20 bp, Artificial Sequence
  Synthetic
cgttttcggtacaattttgg

SEQ ID NO: 12709 - DNA, 25 bp, Artificial Sequence
  Synthetic
gtgttagattatctgctttgtatga

SEQ ID NO: 12710 - DNA, 25 bp, Artificial Sequence
  Synthetic
aaaggtactgatactaatgaaactg

SEQ ID NO: 12711 - DNA, 23 bp, Artificial Sequence
  Synthetic
gttcaaagaaatgtttggtgttc

SEQ ID NO: 12712 - DNA, 23 bp, Artificial Sequence
  Synthetic
aatgaattctatgatgaagcaga

SEQ ID NO: 12713 - DNA, 22 bp, Artificial Sequence
  Synthetic
catggcagtatatggacttaaa

SEQ ID NO: 12714 - DNA, 25 bp, Artificial Sequence
  Synthetic
gaaaagaagggttaagtagtttagg

SEQ ID NO: 12715 - DNA, 20 bp, Artificial Sequence
  Synthetic
gctcttcacggtgtgcttac

SEQ ID NO: 12716 - DNA, 24 bp, Artificial Sequence
  Synthetic
tagtagtgtaactcaaagagaagc

SEQ ID NO: 12717 - DNA, 18 bp, Artificial Sequence
  Synthetic
ccaacaacggaattggga

SEQ ID NO: 12718 - DNA, 19 bp, Artificial Sequence
  Synthetic
tttgaaaatcccgcctttg

SEQ ID NO: 12719 - DNA, 25 bp, Artificial Sequence
  Synthetic
gggtatttattgatgattatggttc

SEQ ID NO: 12720 - DNA, 23 bp, Artificial Sequence
  Synthetic
agaacgtttagtctggaaattac

SEQ ID NO: 12721 - DNA, 24 bp, Artificial Sequence
  Synthetic
ttatgccagacatatgttaaacag

SEQ ID NO: 12722 - DNA, 19 bp, Artificial Sequence
  Synthetic
tactggggtagaagatgcg

SEQ ID NO: 12723 - DNA, 20 bp, Artificial Sequence
  Synthetic
tgaagcttacttggttggcc

SEQ ID NO: 12724 - DNA, 20 bp, Artificial Sequence
  Synthetic
gttgatagtcgtaatgggca

SEQ ID NO: 12725 - DNA, 18 bp, Artificial Sequence
  Synthetic
ttttcccaagacccatcg

SEQ ID NO: 12726 - DNA, 20 bp, Artificial Sequence
  Synthetic
gtagattggaccactacgtc

SEQ ID NO: 12727 - DNA, 20 bp, Artificial Sequence
  Synthetic
gagggaggacatgtaattgg

SEQ ID NO: 12728 - DNA, 22 bp, Artificial Sequence
  Synthetic
ccattacaatctcaatagcacc

SEQ ID NO: 12729 - DNA, 25 bp, Artificial Sequence
  Synthetic
tctcaatttacaatgtacaagtgac

SEQ ID NO: 12730 - DNA, 18 bp, Artificial Sequence
  Synthetic
gttagaatgctgcgtgac

SEQ ID NO: 12731 - DNA, 20 bp, Artificial Sequence
  Synthetic
aattgagaacttcatgggcc

SEQ ID NO: 12732 - DNA, 21 bp, Artificial Sequence
  Synthetic
caacccgagtgttttctatca

SEQ ID NO: 12733 - DNA, 18 bp, Artificial Sequence
  Synthetic
cacccaatacacccacaa

SEQ ID NO: 12734 - DNA, 18 bp, Artificial Sequence
  Synthetic
cccagataccatcccaca

SEQ ID NO: 12735 - DNA, 23 bp, Artificial Sequence
  Synthetic
cacagatctaagaccctattcat

SEQ ID NO: 12736 - DNA, 19 bp, Artificial Sequence
  Synthetic
caacccttgctcttttagg

SEQ ID NO: 12737 - DNA, 24 bp, Artificial Sequence
  Synthetic
tttggttacttcaataatagccag

SEQ ID NO: 12738 - DNA, 23 bp, Artificial Sequence
  Synthetic
acaaatcttttaaatctccaacc

SEQ ID NO: 12739 - DNA, 18 bp, Artificial Sequence
  Synthetic
acatggtggttcagcaac

SEQ ID NO: 12740 - DNA, 23 bp, Artificial Sequence
  Synthetic
gtaccatatacgcattatatcgc

SEQ ID NO: 12741 - DNA, 20 bp, Artificial Sequence
  Synthetic
gctacatgcaggttgtacaa

SEQ ID NO: 12742 - DNA, 18 bp, Artificial Sequence
  Synthetic
tgtcttccacgatgtgtt

SEQ ID NO: 12743 - DNA, 18 bp, Artificial Sequence
  Synthetic
cttaccactagccctggt

SEQ ID NO: 12744 - DNA, 21 bp, Artificial Sequence
  Synthetic
acagtacttttcatgcaaacc

SEQ ID NO: 12745 - DNA, 18 bp, Artificial Sequence
  Synthetic
tccaagatgacctgggat

SEQ ID NO: 12746 - DNA, 25 bp, Artificial Sequence
  Synthetic
aaaagaactaagagatctaatgtcg

SEQ ID NO: 12747 - DNA, 19 bp, Artificial Sequence
  Synthetic
ggagcaagacaaatgatgc

SEQ ID NO: 12748 - DNA, 21 bp, Artificial Sequence
  Synthetic
agcacaagatgttatcatgga

SEQ ID NO: 12749 - DNA, 22 bp, Artificial Sequence
  Synthetic
gaggcttcactttcaaaagaac

SEQ ID NO: 12750 - DNA, 19 bp, Artificial Sequence
  Synthetic
catgataaaggcagtccga

SEQ ID NO: 12751 - DNA, 18 bp, Artificial Sequence
  Synthetic
gagagagtggtggtgagt

SEQ ID NO: 12752 - DNA, 20 bp, Artificial Sequence
  Synthetic
ttaacggttttagggcaggg

SEQ ID NO: 12753 - DNA, 18 bp, Artificial Sequence
  Synthetic
gagggccaacagactttg

SEQ ID NO: 12754 - DNA, 20 bp, Artificial Sequence
  Synthetic
tgcatttatctccgtttgag

SEQ ID NO: 12755 - DNA, 22 bp, Artificial Sequence
  Synthetic
ggttgtggaaaatcattttgtg

SEQ ID NO: 12756 - DNA, 20 bp, Artificial Sequence
  Synthetic
ttacaaatgacacgcccctg

SEQ ID NO: 12757 - DNA, 22 bp, Artificial Sequence
  Synthetic
atggatgtgtggagtattcttg

SEQ ID NO: 12758 - DNA, 20 bp, Artificial Sequence
  Synthetic
gacaaatggagccaggacac

SEQ ID NO: 12759 - DNA, 19 bp, Artificial Sequence
  Synthetic
acccattggttgaacccag

SEQ ID NO: 12760 - DNA, 20 bp, Artificial Sequence
  Synthetic
aagttttacggctgctggat

SEQ ID NO: 12761 - DNA, 18 bp, Artificial Sequence
  Synthetic
caccttccagccgtacca

SEQ ID NO: 12762 - DNA, 20 bp, Artificial Sequence
  Synthetic
agcccttatttgacaacccg

SEQ ID NO: 12763 - DNA, 18 bp, Artificial Sequence
  Synthetic
tattttttcgcgcgcggt

SEQ ID NO: 12764 - DNA, 18 bp, Artificial Sequence
  Synthetic
cggggggagatgatgtgt

SEQ ID NO: 12765 - DNA, 18 bp, Artificial Sequence
  Synthetic
aaaatggtttccggggcg

SEQ ID NO: 12766 - DNA, 18 bp, Artificial Sequence
  Synthetic
agggtctgcgagaggagc

SEQ ID NO: 12767 - DNA, 18 bp, Artificial Sequence
  Synthetic
gctggtagttcagggcct

SEQ ID NO: 12768 - DNA, 20 bp, Artificial Sequence
  Synthetic
cgtagacggacttgattggc

SEQ ID NO: 12769 - DNA, 20 bp, Artificial Sequence
  Synthetic
tgctcgtcctcactctcttc

SEQ ID NO: 12770 - DNA, 20 bp, Artificial Sequence
  Synthetic
ttgagctggacatattcgcg

SEQ ID NO: 12771 - DNA, 16 bp, Artificial Sequence
  Synthetic
gcggaggcgtacatgc

SEQ ID NO: 12772 - DNA, 18 bp, Artificial Sequence
  Synthetic
cacggtaagagcccagca

SEQ ID NO: 12773 - DNA, 18 bp, Artificial Sequence
  Synthetic
gcaggctcggttgttgat

SEQ ID NO: 12774 - DNA, 18 bp, Artificial Sequence
  Synthetic
aaggtaagggggtcccgc

SEQ ID NO: 12775 - DNA, 19 bp, Artificial Sequence
  Synthetic
aaaagcgtccgcagtactc

SEQ ID NO: 12776 - DNA, 16 bp, Artificial Sequence
  Synthetic
gtgctgcgccctgaga

SEQ ID NO: 12777 - DNA, 19 bp, Artificial Sequence
  Synthetic
caaacgcggctgtaaacca

SEQ ID NO: 12778 - DNA, 17 bp, Artificial Sequence
  Synthetic
agctcggcaatggtggc

SEQ ID NO: 12779 - DNA, 18 bp, Artificial Sequence
  Synthetic
cccgttgggtagcgaaag

SEQ ID NO: 12780 - DNA, 20 bp, Artificial Sequence
  Synthetic
agtcatgcatgagcctctca

SEQ ID NO: 12781 - DNA, 18 bp, Artificial Sequence
  Synthetic
cgtagtcgttgcaggtgc

SEQ ID NO: 12782 - DNA, 16 bp, Artificial Sequence
  Synthetic
agcggttgagcaggct

SEQ ID NO: 12783 - DNA, 17 bp, Artificial Sequence
  Synthetic
cgcccgtagtctggaga

SEQ ID NO: 12784 - DNA, 16 bp, Artificial Sequence
  Synthetic
gcggccaacctggtga

SEQ ID NO: 12785 - DNA, 18 bp, Artificial Sequence
  Synthetic
cctgagcctggccgagaa

SEQ ID NO: 12786 - DNA, 20 bp, Artificial Sequence
  Synthetic
tgaggatgaggaagaggagg

SEQ ID NO: 12787 - DNA, 16 bp, Artificial Sequence
  Synthetic
gcgctggcggagaaca

SEQ ID NO: 12788 - DNA, 16 bp, Artificial Sequence
  Synthetic
agtcgggcccggacta

SEQ ID NO: 12789 - DNA, 16 bp, Artificial Sequence
  Synthetic
cgtgcactggggcaga

SEQ ID NO: 12790 - DNA, 20 bp, Artificial Sequence
  Synthetic
gttgatggactacctgcacc

SEQ ID NO: 12791 - DNA, 20 bp, Artificial Sequence
  Synthetic
gtacctgaacgactcgctgc

SEQ ID NO: 12792 - DNA, 18 bp, Artificial Sequence
  Synthetic
caccaaggccatagcgtg

SEQ ID NO: 12793 - DNA, 20 bp, Artificial Sequence
  Synthetic
tagacctgatgaacaacgcc

SEQ ID NO: 12794 - DNA, 19 bp, Artificial Sequence
  Synthetic
tccccgcacttctaaatgt

SEQ ID NO: 12795 - DNA, 16 bp, Artificial Sequence
  Synthetic
ttacctgcggcgcgga

SEQ ID NO: 12796 - DNA, 19 bp, Artificial Sequence
  Synthetic
cagtatccgcggagtccag

SEQ ID NO: 12797 - DNA, 18 bp, Artificial Sequence
  Synthetic
cactttcgcgctccctgg

SEQ ID NO: 12798 - DNA, 16 bp, Artificial Sequence
  Synthetic
acccccacaggcagga

SEQ ID NO: 12799 - DNA, 19 bp, Artificial Sequence
  Synthetic
gcgagggggcagtagagtt

SEQ ID NO: 12800 - DNA, 17 bp, Artificial Sequence
  Synthetic
gcgagggcgagaacatg

SEQ ID NO: 12801 - DNA, 20 bp, Artificial Sequence
  Synthetic
aaaaaccctcgaccagcatc

SEQ ID NO: 12802 - DNA, 18 bp, Artificial Sequence
  Synthetic
gctaccaccccagcatcc

SEQ ID NO: 12803 - DNA, 19 bp, Artificial Sequence
  Synthetic
tctgacacacctggtcctg

SEQ ID NO: 12804 - DNA, 20 bp, Artificial Sequence
  Synthetic
agtggacattgcaaaccagg

SEQ ID NO: 12805 - DNA, 17 bp, Artificial Sequence
  Synthetic
acctgccttcaccaccc

SEQ ID NO: 12806 - DNA, 18 bp, Artificial Sequence
  Synthetic
ggacgcctcggagtacct

SEQ ID NO: 12807 - DNA, 18 bp, Artificial Sequence
  Synthetic
ccccaaactccagtcagt

SEQ ID NO: 12808 - DNA, 18 bp, Artificial Sequence
  Synthetic
ggcctctcagttgaatgc

SEQ ID NO: 12809 - DNA, 20 bp, Artificial Sequence
  Synthetic
tttctgtactcgaacgtggc

SEQ ID NO: 12810 - DNA, 16 bp, Artificial Sequence
  Synthetic
tgctcccgggctccta

SEQ ID NO: 12811 - DNA, 20 bp, Artificial Sequence
  Synthetic
ccttctacctcaaccacacc

SEQ ID NO: 12812 - DNA, 20 bp, Artificial Sequence
  Synthetic
acaaggattacaaggccgtt

SEQ ID NO: 12813 - DNA, 18 bp, Artificial Sequence
  Synthetic
atgagcccaccctcctct

SEQ ID NO: 12814 - DNA, 17 bp, Artificial Sequence
  Synthetic
gcctttggctggaaccc

SEQ ID NO: 12815 - DNA, 17 bp, Artificial Sequence
  Synthetic
cccgatcgacccatgga

SEQ ID NO: 12816 - DNA, 16 bp, Artificial Sequence
  Synthetic
ctgggaagggccacgt

SEQ ID NO: 12817 - DNA, 20 bp, Artificial Sequence
  Synthetic
ggggtcatcttacacagctg

SEQ ID NO: 12818 - DNA, 17 bp, Artificial Sequence
  Synthetic
gccttgctgggttgctc

SEQ ID NO: 12819 - DNA, 20 bp, Artificial Sequence
  Synthetic
gcctcctcgtttatccaggt

SEQ ID NO: 12820 - DNA, 19 bp, Artificial Sequence
  Synthetic
tcggggtttaccttggtca

SEQ ID NO: 12821 - DNA, 20 bp, Artificial Sequence
  Synthetic
ggagaacttaaccacccacg

SEQ ID NO: 12822 - DNA, 20 bp, Artificial Sequence
  Synthetic
agaaacagcagaggaacagg

SEQ ID NO: 12823 - DNA, 16 bp, Artificial Sequence
  Synthetic
tggccgtggtcctggt

SEQ ID NO: 12824 - DNA, 18 bp, Artificial Sequence
  Synthetic
tggcagcagtgtctcgag

SEQ ID NO: 12825 - DNA, 19 bp, Artificial Sequence
  Synthetic
agccactgctacctcttgc

SEQ ID NO: 12826 - DNA, 20 bp, Artificial Sequence
  Synthetic
tttgtaccccaggactacca

SEQ ID NO: 12827 - DNA, 20 bp, Artificial Sequence
  Synthetic
ttggaagaggtggaacagga

SEQ ID NO: 12828 - DNA, 18 bp, Artificial Sequence
  Synthetic
aggaggaggcctgaggat

SEQ ID NO: 12829 - DNA, 18 bp, Artificial Sequence
  Synthetic
tcagaaaatccccgggcc

SEQ ID NO: 12830 - DNA, 19 bp, Artificial Sequence
  Synthetic
cggaggcattggaactctc

SEQ ID NO: 12831 - DNA, 18 bp, Artificial Sequence
  Synthetic
caccacctacaccgtgta

SEQ ID NO: 12832 - DNA, 20 bp, Artificial Sequence
  Synthetic
cttgctgggtggaaatcaat

SEQ ID NO: 12833 - DNA, 19 bp, Artificial Sequence
  Synthetic
actgcatgtggctagactt

SEQ ID NO: 12834 - DNA, 21 bp, Artificial Sequence
  Synthetic
ctttagtgggaccattagacc

SEQ ID NO: 12835 - DNA, 25 bp, Artificial Sequence
  Synthetic
taacaaagacggttctaatagagaa

SEQ ID NO: 12836 - DNA, 20 bp, Artificial Sequence
  Synthetic
cagcacttatgatggcatct

SEQ ID NO: 12837 - DNA, 23 bp, Artificial Sequence
  Synthetic
gagtattattaatgcatggccag

SEQ ID NO: 12838 - DNA, 18 bp, Artificial Sequence
  Synthetic
cacacctcacccgactgt

SEQ ID NO: 12839 - DNA, 24 bp, Artificial Sequence
  Synthetic
gctataatgctacaatggatatgc

SEQ ID NO: 12840 - DNA, 18 bp, Artificial Sequence
  Synthetic
cagcatcgccttgcctat

SEQ ID NO: 12841 - DNA, 19 bp, Artificial Sequence
  Synthetic
gtctacccctatggctacg

SEQ ID NO: 12842 - DNA, 20 bp, Artificial Sequence
  Synthetic
ctggaaagggtattggaaca

SEQ ID NO: 12843 - DNA, 21 bp, Artificial Sequence
  Synthetic
aaagctattggttttatgcct

SEQ ID NO: 12844 - DNA, 18 bp, Artificial Sequence
  Synthetic
tttacaccagcgcgggta

SEQ ID NO: 12845 - DNA, 18 bp, Artificial Sequence
  Synthetic
catcagtcttctggtgcg

SEQ ID NO: 12846 - DNA, 18 bp, Artificial Sequence
  Synthetic
ctctcaccagatccaggg

SEQ ID NO: 12847 - DNA, 20 bp, Artificial Sequence
  Synthetic
tgaaacaaaaagcccgtcca

SEQ ID NO: 12848 - DNA, 19 bp, Artificial Sequence
  Synthetic
ccctccatcgatttcatca

SEQ ID NO: 12849 - DNA, 19 bp, Artificial Sequence
  Synthetic
ctccaaagctagcacctaa

SEQ ID NO: 12850 - DNA, 21 bp, Artificial Sequence
  Synthetic
ccttgcggacatacaaaaatt

SEQ ID NO: 12851 - DNA, 21 bp, Artificial Sequence
  Synthetic
gcttaccagtagacaaagagc

SEQ ID NO: 12852 - DNA, 19 bp, Artificial Sequence
  Synthetic
aagggacaagtcacagaca

SEQ ID NO: 12853 - DNA, 22 bp, Artificial Sequence
  Synthetic
tttggacctatgatcaacaaga

SEQ ID NO: 12854 - DNA, 19 bp, Artificial Sequence
  Synthetic
ccgagccccttttatatgt

SEQ ID NO: 12855 - DNA, 20 bp, Artificial Sequence
  Synthetic
gtggtggagctatagaagtg

SEQ ID NO: 12856 - DNA, 18 bp, Artificial Sequence
  Synthetic
caagattgcacgaaggct

SEQ ID NO: 12857 - DNA, 20 bp, Artificial Sequence
  Synthetic
accacgaaaacaagaatcac

SEQ ID NO: 12858 - DNA, 22 bp, Artificial Sequence
  Synthetic
caagatcatagatcaagtgagg

SEQ ID NO: 12859 - DNA, 22 bp, Artificial Sequence
  Synthetic
gtacacccttatctgatgatgg

SEQ ID NO: 12860 - DNA, 21 bp, Artificial Sequence
  Synthetic
caagtgaaaatagctccaacc

SEQ ID NO: 12861 - DNA, 25 bp, Artificial Sequence
  Synthetic
cactccatataattacagatagagg

SEQ ID NO: 12862 - DNA, 18 bp, Artificial Sequence
  Synthetic
attttgcccggagaaagg

SEQ ID NO: 12863 - DNA, 21 bp, Artificial Sequence
  Synthetic
gtattacggcacagatcaaga

SEQ ID NO: 12864 - DNA, 22 bp, Artificial Sequence
  Synthetic
cagattcagggttgtatttgtc

SEQ ID NO: 12865 - DNA, 22 bp, Artificial Sequence
  Synthetic
ataagtttccatgtacatgcaa

SEQ ID NO: 12866 - DNA, 25 bp, Artificial Sequence
  Synthetic
tcgtaccattaatcaaatacagatc

SEQ ID NO: 12867 - DNA, 19 bp, Artificial Sequence
  Synthetic
ctctgaaggatgccttgga

SEQ ID NO: 12868 - DNA, 25 bp, Artificial Sequence
  Synthetic
ggactataggagaaaaaagtcttac

SEQ ID NO: 12869 - DNA, 21 bp, Artificial Sequence
  Synthetic
gtgtagtggctaattgcattg

SEQ ID NO: 12870 - DNA, 22 bp, Artificial Sequence
  Synthetic
cagatcaagtacattgtagcat

SEQ ID NO: 12871 - DNA, 19 bp, Artificial Sequence
  Synthetic
aagtcatgcaacagacagg

SEQ ID NO: 12872 - DNA, 25 bp, Artificial Sequence
  Synthetic
cagatatgtatcctgatttaaaccc

SEQ ID NO: 12873 - DNA, 23 bp, Artificial Sequence
  Synthetic
tctcatcgatacaaaaatgaaga

SEQ ID NO: 12874 - DNA, 24 bp, Artificial Sequence
  Synthetic
ataactcaaaattacttaggtgcc

SEQ ID NO: 12875 - DNA, 25 bp, Artificial Sequence
  Synthetic
atcaggtgtatatactgatgcatat

SEQ ID NO: 12876 - DNA, 24 bp, Artificial Sequence
  Synthetic
caccaaatacaaaatcagaaatgg

SEQ ID NO: 12877 - DNA, 23 bp, Artificial Sequence
  Synthetic
ttaaaattaaccggttatgtcct

SEQ ID NO: 12878 - DNA, 21 bp, Artificial Sequence
  Synthetic
gactctttgccaagatgacat

SEQ ID NO: 12879 - DNA, 23 bp, Artificial Sequence
  Synthetic
ctaatctctattagtgcaatcca

SEQ ID NO: 12880 - DNA, 25 bp, Artificial Sequence
  Synthetic
ccattaatcctactattacgtcaac

SEQ ID NO: 12881 - DNA, 18 bp, Artificial Sequence
  Synthetic
ggacactcagaaaaccgg

SEQ ID NO: 12882 - DNA, 21 bp, Artificial Sequence
  Synthetic
gaatcgcaatggtttacactt

SEQ ID NO: 12883 - DNA, 25 bp, Artificial Sequence
  Synthetic
tgatatacccttattttgttccact

SEQ ID NO: 12884 - DNA, 24 bp, Artificial Sequence
  Synthetic
tcaggaaatcttcaattaaggtgt

SEQ ID NO: 12885 - DNA, 21 bp, Artificial Sequence
  Synthetic
taactctaccttttgatgggc

SEQ ID NO: 12886 - DNA, 18 bp, Artificial Sequence
  Synthetic
caaaagcaggcaaaccat

SEQ ID NO: 12887 - DNA, 19 bp, Artificial Sequence
  Synthetic
caatggctttccttgagga

SEQ ID NO: 12888 - DNA, 21 bp, Artificial Sequence
  Synthetic
cgggaaggctaatagatttcc

SEQ ID NO: 12889 - DNA, 18 bp, Artificial Sequence
  Synthetic
ttcgtgcactttgtcgaa

SEQ ID NO: 12890 - DNA, 20 bp, Artificial Sequence
  Synthetic
cctgaatggtttagaaacgt

SEQ ID NO: 12891 - DNA, 22 bp, Artificial Sequence
  Synthetic
atgttcaacatgctaagtacag

SEQ ID NO: 12892 - DNA, 22 bp, Artificial Sequence
  Synthetic
acaagctttttctatcgctatg

SEQ ID NO: 12893 - DNA, 25 bp, Artificial Sequence
  Synthetic
gatcaaacttatacaatatccggaa

SEQ ID NO: 12894 - DNA, 20 bp, Artificial Sequence
  Synthetic
attctcaacacaagccaaag

SEQ ID NO: 12895 - DNA, 25 bp, Artificial Sequence
  Synthetic
gacctgggtacatatataaagaaac

SEQ ID NO: 12896 - DNA, 19 bp, Artificial Sequence
  Synthetic
catgcttggcacgtgaagt

SEQ ID NO: 12897 - DNA, 20 bp, Artificial Sequence
  Synthetic
tagtccttgaagagcgtcct

SEQ ID NO: 12898 - DNA, 18 bp, Artificial Sequence
  Synthetic
aggtaaccaggaaacgca

SEQ ID NO: 12899 - DNA, 23 bp, Artificial Sequence
  Synthetic
gtggggaatggtaatattaatgc

SEQ ID NO: 12900 - DNA, 22 bp, Artificial Sequence
  Synthetic
tagtttgtccatgttagtgcaa

SEQ ID NO: 12901 - DNA, 24 bp, Artificial Sequence
  Synthetic
ttgtaccatttattagtgccctta

SEQ ID NO: 12902 - DNA, 20 bp, Artificial Sequence
  Synthetic
atctgatcaacaggaggagg

SEQ ID NO: 12903 - DNA, 22 bp, Artificial Sequence
  Synthetic
attgaagtacatctgtcattgc

SEQ ID NO: 12904 - DNA, 22 bp, Artificial Sequence
  Synthetic
tcctgctgcttatacttttctg

SEQ ID NO: 12905 - DNA, 18 bp, Artificial Sequence
  Synthetic
gtgggctagtttgggggt

SEQ ID NO: 12906 - DNA, 18 bp, Artificial Sequence
  Synthetic
ccggctgtgttggacatt

SEQ ID NO: 12907 - DNA, 18 bp, Artificial Sequence
  Synthetic
ccgtagtggtaggcgcat

SEQ ID NO: 12908 - DNA, 21 bp, Artificial Sequence
  Synthetic
ctgatgttgattttgcacatg

SEQ ID NO: 12909 - DNA, 24 bp, Artificial Sequence
  Synthetic
caccaacttattttattatggtgg

SEQ ID NO: 12910 - DNA, 18 bp, Artificial Sequence
  Synthetic
gccattgattttgctgca

SEQ ID NO: 12911 - DNA, 19 bp, Artificial Sequence
  Synthetic
tagtggctctatggtgtcc

SEQ ID NO: 12912 - DNA, 20 bp, Artificial Sequence
  Synthetic
cctgaaattatggcctacct

SEQ ID NO: 12913 - DNA, 18 bp, Artificial Sequence
  Synthetic
ctacccctacatcctccc

SEQ ID NO: 12914 - DNA, 20 bp, Artificial Sequence
  Synthetic
actgtgtgtcatgtgtgtgt

SEQ ID NO: 12915 - DNA, 20 bp, Artificial Sequence
  Synthetic
aaactttatgtgttgcacct

SEQ ID NO: 12916 - DNA, 18 bp, Artificial Sequence
  Synthetic
gtgacggtgacattgcag

SEQ ID NO: 12917 - DNA, 23 bp, Artificial Sequence
  Synthetic
atgatccaaacaattcaaatcct

SEQ ID NO: 12918 - DNA, 19 bp, Artificial Sequence
  Synthetic
gagcactcacgtccctaac

SEQ ID NO: 12919 - DNA, 18 bp, Artificial Sequence
  Synthetic
ccctctcccattggtccg

SEQ ID NO: 12920 - DNA, 24 bp, Artificial Sequence
  Synthetic
cataggctcttgaaataaacaatg

SEQ ID NO: 12921 - DNA, 21 bp, Artificial Sequence
  Synthetic
cgagttccttatatgcttacc

SEQ ID NO: 12922 - DNA, 17 bp, Artificial Sequence
  Synthetic
gcgactgctggcttcaa

SEQ ID NO: 12923 - DNA, 16 bp, Artificial Sequence
  Synthetic
actggcgggtggctca

SEQ ID NO: 12924 - DNA, 16 bp, Artificial Sequence
  Synthetic
gtggtcctgggacgca

SEQ ID NO: 12925 - DNA, 17 bp, Artificial Sequence
  Synthetic
tagatcgggcagggtgg

SEQ ID NO: 12926 - DNA, 16 bp, Artificial Sequence
  Synthetic
ggtgtgtggtcgccct

SEQ ID NO: 12927 - DNA, 20 bp, Artificial Sequence
  Synthetic
tggtgtcggaagatttcgtg

SEQ ID NO: 12928 - DNA, 20 bp, Artificial Sequence
  Synthetic
cactccggtagtatctgcgt

SEQ ID NO: 12929 - DNA, 18 bp, Artificial Sequence
  Synthetic
ggtgtgccgcctagacac

SEQ ID NO: 12930 - DNA, 18 bp, Artificial Sequence
  Synthetic
gttttgggggtagcagcg

SEQ ID NO: 12931 - DNA, 18 bp, Artificial Sequence
  Synthetic
gcagtgactccatcatgg

SEQ ID NO: 12932 - DNA, 18 bp, Artificial Sequence
  Synthetic
gtggacacgctgacgaaa

SEQ ID NO: 12933 - DNA, 20 bp, Artificial Sequence
  Synthetic
cgcagcttggctatacagac

SEQ ID NO: 12934 - DNA, 19 bp, Artificial Sequence
  Synthetic
ctgaaaggagggagcacac

SEQ ID NO: 12935 - DNA, 17 bp, Artificial Sequence
  Synthetic
cggccaccggtagttca

SEQ ID NO: 12936 - DNA, 16 bp, Artificial Sequence
  Synthetic
cccggtggtgcagttg

SEQ ID NO: 12937 - DNA, 19 bp, Artificial Sequence
  Synthetic
gaaccgccggtcaaaacac

SEQ ID NO: 12938 - DNA, 16 bp, Artificial Sequence
  Synthetic
acaggcgcgcgtatgg

SEQ ID NO: 12939 - DNA, 17 bp, Artificial Sequence
  Synthetic
cttcggcaccggtttcc

SEQ ID NO: 12940 - DNA, 20 bp, Artificial Sequence
  Synthetic
ccccgtatatgtccaacggg

SEQ ID NO: 12941 - DNA, 18 bp, Artificial Sequence
  Synthetic
aacccgccacgtaaagga

SEQ ID NO: 12942 - DNA, 20 bp, Artificial Sequence
  Synthetic
tcttgtgaggcctctttgtg

SEQ ID NO: 12943 - DNA, 20 bp, Artificial Sequence
  Synthetic
tacggtggaaacaaaggacg

SEQ ID NO: 12944 - DNA, 19 bp, Artificial Sequence
  Synthetic
aaactcggcataccaacgg

SEQ ID NO: 12945 - DNA, 18 bp, Artificial Sequence
  Synthetic
gctaccgaccccgaaacc

SEQ ID NO: 12946 - DNA, 20 bp, Artificial Sequence
  Synthetic
aaacaactcccccatccacg

SEQ ID NO: 12947 - DNA, 19 bp, Artificial Sequence
  Synthetic
agtggagatcgaacagggc

SEQ ID NO: 12948 - DNA, 17 bp, Artificial Sequence
  Synthetic
cgcagggggagagaaca

SEQ ID NO: 12949 - DNA, 18 bp, Artificial Sequence
  Synthetic
agcacctgttctgcgacc

SEQ ID NO: 12950 - DNA, 18 bp, Artificial Sequence
  Synthetic
tgctgctcctgctcctcc

SEQ ID NO: 12951 - DNA, 20 bp, Artificial Sequence
  Synthetic
gaatgagtatccgtggtccc

SEQ ID NO: 12952 - DNA, 16 bp, Artificial Sequence
  Synthetic
ttgtccctcggggcca

SEQ ID NO: 12953 - DNA, 18 bp, Artificial Sequence
  Synthetic
gaaggtggacccggctat

SEQ ID NO: 12954 - DNA, 16 bp, Artificial Sequence
  Synthetic
gcacatggcgctccga

SEQ ID NO: 12955 - DNA, 19 bp, Artificial Sequence
  Synthetic
tgtgtaggaggttggccat

SEQ ID NO: 12956 - DNA, 19 bp, Artificial Sequence
  Synthetic
cgggtcatgcgatctgttt

SEQ ID NO: 12957 - DNA, 23 bp, Artificial Sequence
  Synthetic
cgaattcggttgtatataaacag

SEQ ID NO: 12958 - DNA, 18 bp, Artificial Sequence
  Synthetic
accagatgtgcaggccta

SEQ ID NO: 12959 - DNA, 20 bp, Artificial Sequence
  Synthetic
cgaagaggcgcttattcgag

SEQ ID NO: 12960 - DNA, 19 bp, Artificial Sequence
  Synthetic
atgctgctaaacattcccg

SEQ ID NO: 12961 - DNA, 18 bp, Artificial Sequence
  Synthetic
gggactggaagcccatag

SEQ ID NO: 12962 - DNA, 21 bp, Artificial Sequence
  Synthetic
gaaatcttttggatggacacc

SEQ ID NO: 12963 - DNA, 20 bp, Artificial Sequence
  Synthetic
ggtccggctagaaaatgtca

SEQ ID NO: 12964 - DNA, 16 bp, Artificial Sequence
  Synthetic
ggacgtgggaggtgca

SEQ ID NO: 12965 - DNA, 19 bp, Artificial Sequence
  Synthetic
tgggaacggtgataagaca

SEQ ID NO: 12966 - DNA, 21 bp, Artificial Sequence
  Synthetic
ggaacatatcctgtggtactg

SEQ ID NO: 12967 - DNA, 20 bp, Artificial Sequence
  Synthetic
tttggtggaggactctagca

SEQ ID NO: 12968 - DNA, 20 bp, Artificial Sequence
  Synthetic
actgaggagttggagatgga

SEQ ID NO: 12969 - DNA, 22 bp, Artificial Sequence
  Synthetic
aaacgtgtccactatttctttg

SEQ ID NO: 12970 - DNA, 21 bp, Artificial Sequence
  Synthetic
cccctccaatttactaacaca

SEQ ID NO: 12971 - DNA, 25 bp, Artificial Sequence
  Synthetic
gtctgatactaattataaggctacc

SEQ ID NO: 12972 - DNA, 21 bp, Artificial Sequence
  Synthetic
tgtttatgttgttgttgtgct

SEQ ID NO: 12973 - DNA, 25 bp, Artificial Sequence
  Synthetic
aggaaagtgatggatctatagtttc

SEQ ID NO: 12974 - DNA, 20 bp, Artificial Sequence
  Synthetic
cagaaggcgactatttgatg

SEQ ID NO: 12975 - DNA, 25 bp, Artificial Sequence
  Synthetic
acagcttaatgtcatttttagaagg

SEQ ID NO: 12976 - DNA, 24 bp, Artificial Sequence
  Synthetic
tgaggaccaaatattgtattggaa

SEQ ID NO: 12977 - DNA, 20 bp, Artificial Sequence
  Synthetic
ccagtactggtgggaagtct

SEQ ID NO: 12978 - DNA, 19 bp, Artificial Sequence
  Synthetic
gaagctgtcctgatgatgt

SEQ ID NO: 12979 - DNA, 24 bp, Artificial Sequence
  Synthetic
tccaggaactagtagtatagtacc

SEQ ID NO: 12980 - DNA, 18 bp, Artificial Sequence
  Synthetic
ctcaggcggttcagtttg

SEQ ID NO: 12981 - DNA, 18 bp, Artificial Sequence
  Synthetic
tgtccctacacttccacc

SEQ ID NO: 12982 - DNA, 18 bp, Artificial Sequence
  Synthetic
cgaaccagggtaaggtgt

SEQ ID NO: 12983 - DNA, 22 bp, Artificial Sequence
  Synthetic
catcaacacaacgattagtttg

SEQ ID NO: 12984 - DNA, 18 bp, Artificial Sequence
  Synthetic
ctgagcctccacaagaca

SEQ ID NO: 12985 - DNA, 19 bp, Artificial Sequence
  Synthetic
tgctaggcattttttcacc

SEQ ID NO: 12986 - DNA, 22 bp, Artificial Sequence
  Synthetic
gccattgaggatcattacagat

SEQ ID NO: 12987 - DNA, 18 bp, Artificial Sequence
  Synthetic
gggcttaaggggtcttac

SEQ ID NO: 12988 - DNA, 22 bp, Artificial Sequence
  Synthetic
tgcattctatagttcagaagcc

SEQ ID NO: 12989 - DNA, 25 bp, Artificial Sequence
  Synthetic
agttgctttattattactgaagctg

SEQ ID NO: 12990 - DNA, 25 bp, Artificial Sequence
  Synthetic
aagcaataaagttaactcctgaaag

SEQ ID NO: 12991 - DNA, 19 bp, Artificial Sequence
  Synthetic
gaagtgtacctgcagcatt

SEQ ID NO: 12992 - DNA, 18 bp, Artificial Sequence
  Synthetic
ctaccagcaggtcgccaa

SEQ ID NO: 12993 - DNA, 19 bp, Artificial Sequence
  Synthetic
gctatgagcacagtatggc

SEQ ID NO: 12994 - DNA, 18 bp, Artificial Sequence
  Synthetic
gtacacagccaggaggtt

SEQ ID NO: 12995 - DNA, 22 bp, Artificial Sequence
  Synthetic
gtccatagtacctttagctgaa

SEQ ID NO: 12996 - DNA, 25 bp, Artificial Sequence
  Synthetic
agatccctctattagtaaaactaca

SEQ ID NO: 12997 - DNA, 18 bp, Artificial Sequence
  Synthetic
caacacgtcctgctgaat

SEQ ID NO: 12998 - DNA, 23 bp, Artificial Sequence
  Synthetic
gcctaggtttaaaagtttacagt

SEQ ID NO: 12999 - DNA, 22 bp, Artificial Sequence
  Synthetic
gtggctaaagttttgtctacag

SEQ ID NO: 13000 - DNA, 18 bp, Artificial Sequence
  Synthetic
ccagaacatgaacgcctt

SEQ ID NO: 13001 - DNA, 18 bp, Artificial Sequence
  Synthetic
ggggacgctattccagat

SEQ ID NO: 13002 - DNA, 25 bp, Artificial Sequence
  Synthetic
ctagtaaaagaaagaagtcttctgc

SEQ ID NO: 13003 - DNA, 23 bp, Artificial Sequence
  Synthetic
aagcagagcatattcttagaact

SEQ ID NO: 13004 - DNA, 20 bp, Artificial Sequence
  Synthetic
ataccctcgtttatcttgcc

SEQ ID NO: 13005 - DNA, 20 bp, Artificial Sequence
  Synthetic
gctgaggcatctagtatcag

SEQ ID NO: 13006 - DNA, 21 bp, Artificial Sequence
  Synthetic
cttatgataacagacggctca

SEQ ID NO: 13007 - DNA, 23 bp, Artificial Sequence
  Synthetic
tgcacaaagacttatctagacac

SEQ ID NO: 13008 - DNA, 21 bp, Artificial Sequence
  Synthetic
ggtattcttttggcttcgaaa

SEQ ID NO: 13009 - DNA, 18 bp, Artificial Sequence
  Synthetic
ccacattcgttccagcta

SEQ ID NO: 13010 - DNA, 19 bp, Artificial Sequence
  Synthetic
cagcacagagagtttcaca

SEQ ID NO: 13011 - DNA, 18 bp, Artificial Sequence
  Synthetic
cgagtcttcgtgttagcc

SEQ ID NO: 13012 - DNA, 20 bp, Artificial Sequence
  Synthetic
atttgatgaaagcccaaagt

SEQ ID NO: 13013 - DNA, 21 bp, Artificial Sequence
  Synthetic
ctcatctgtgtatgctcatgg

SEQ ID NO: 13014 - DNA, 23 bp, Artificial Sequence
  Synthetic
aaacataagttcccattcaaaga

SEQ ID NO: 13015 - DNA, 22 bp, Artificial Sequence
  Synthetic
aacattggaaactgttaagaca

SEQ ID NO: 13016 - DNA, 25 bp, Artificial Sequence
  Synthetic
ctaatggtatatactgcttggaaag

SEQ ID NO: 13017 - DNA, 18 bp, Artificial Sequence
  Synthetic
ctagctccaccccaccat

SEQ ID NO: 13018 - DNA, 19 bp, Artificial Sequence
  Synthetic
ggtctagaaccaggacccg

SEQ ID NO: 13019 - DNA, 18 bp, Artificial Sequence
  Synthetic
cctgacaaggtgggatca

SEQ ID NO: 13020 - DNA, 25 bp, Artificial Sequence
  Synthetic
tcaaatattaactgaatctacaccc

SEQ ID NO: 13021 - DNA, 22 bp, Artificial Sequence
  Synthetic
ctcaacaagtaaatgtccagga

SEQ ID NO: 13022 - DNA, 18 bp, Artificial Sequence
  Synthetic
gagctacagtaggggctc

SEQ ID NO: 13023 - DNA, 21 bp, Artificial Sequence
  Synthetic
agttagtttatggtagtggca

SEQ ID NO: 13024 - DNA, 20 bp, Artificial Sequence
  Synthetic
agatgacctcgctatggtta

SEQ ID NO: 13025 - DNA, 21 bp, Artificial Sequence
  Synthetic
atcccaacagatttgcactag

SEQ ID NO: 13026 - DNA, 21 bp, Artificial Sequence
  Synthetic
tcttctatgctagacgtgaac

SEQ ID NO: 13027 - DNA, 25 bp, Artificial Sequence
  Synthetic
taatcctatacatgacacatatagg

SEQ ID NO: 13028 - DNA, 22 bp, Artificial Sequence
  Synthetic
attggttaatgctcattcccaa

SEQ ID NO: 13029 - DNA, 25 bp, Artificial Sequence
  Synthetic
ttacgctgaacatctaaataaaacc

SEQ ID NO: 13030 - DNA, 20 bp, Artificial Sequence
  Synthetic
ctaagagagtcagcaaaggc

SEQ ID NO: 13031 - DNA, 22 bp, Artificial Sequence
  Synthetic
atatgatgggcaaagagtgtac

SEQ ID NO: 13032 - DNA, 19 bp, Artificial Sequence
  Synthetic
ccctggcattattcaacga

SEQ ID NO: 13033 - DNA, 24 bp, Artificial Sequence
  Synthetic
acataccacctctaaaaatttcag

SEQ ID NO: 13034 - DNA, 21 bp, Artificial Sequence
  Synthetic
tggcataaagttaaaggggaa

SEQ ID NO: 13035 - DNA, 18 bp, Artificial Sequence
  Synthetic
cctgaaacagctgacaca

SEQ ID NO: 13036 - DNA, 20 bp, Artificial Sequence
  Synthetic
acaccaatcacaagtcgagc

SEQ ID NO: 13037 - DNA, 19 bp, Artificial Sequence
  Synthetic
gttgcttataactgctggc

SEQ ID NO: 13038 - DNA, 19 bp, Artificial Sequence
  Synthetic
tattgttggttgtgctcca

SEQ ID NO: 13039 - DNA, 22 bp, Artificial Sequence
  Synthetic
gtgatcgtttgtttttctttgg

SEQ ID NO: 13040 - DNA, 21 bp, Artificial Sequence
  Synthetic
tgaactcagctattttggatg

SEQ ID NO: 13041 - DNA, 19 bp, Artificial Sequence
  Synthetic
ctgaatctttgtcacccga

SEQ ID NO: 13042 - DNA, 25 bp, Artificial Sequence
  Synthetic
agtctttggatgatctatttgaaga

SEQ ID NO: 13043 - DNA, 19 bp, Artificial Sequence
  Synthetic
ggatttctcctcgcaaacc

SEQ ID NO: 13044 - DNA, 24 bp, Artificial Sequence
  Synthetic
taagaagtcgtttactaatacctc

SEQ ID NO: 13045 - DNA, 21 bp, Artificial Sequence
  Synthetic
ccaaatctccatcaagaagac

SEQ ID NO: 13046 - DNA, 20 bp, Artificial Sequence
  Synthetic
cgtttgcaagtgtttggaag

SEQ ID NO: 13047 - DNA, 20 bp, Artificial Sequence
  Synthetic
cccatctgttgtacccctta

SEQ ID NO: 13048 - DNA, 21 bp, Artificial Sequence
  Synthetic
atttgaaattgaaaatcccgc

SEQ ID NO: 13049 - DNA, 20 bp, Artificial Sequence
  Synthetic
ttagtatggcagcttaaggg

SEQ ID NO: 13050 - DNA, 23 bp, Artificial Sequence
  Synthetic
gtgattgtccagctatagaatta

SEQ ID NO: 13051 - DNA, 25 bp, Artificial Sequence
  Synthetic
tgcctgatagttataaatatactgc

SEQ ID NO: 13052 - DNA, 22 bp, Artificial Sequence
  Synthetic
gccaaaatctgttaacaactgt

SEQ ID NO: 13053 - DNA, 21 bp, Artificial Sequence
  Synthetic
cacttttgaagcaaaaaaggc

SEQ ID NO: 13054 - DNA, 23 bp, Artificial Sequence
  Synthetic
tttagcttctctagttgaaaagc

SEQ ID NO: 13055 - DNA, 24 bp, Artificial Sequence
  Synthetic
gagcaacgactatttagaattgac

SEQ ID NO: 13056 - DNA, 21 bp, Artificial Sequence
  Synthetic
gtctaatacaccgagacaaca

SEQ ID NO: 13057 - DNA, 24 bp, Artificial Sequence
  Synthetic
gcactgttcttttatagaaaatcg

SEQ ID NO: 13058 - DNA, 20 bp, Artificial Sequence
  Synthetic
taccactctttctccccctg

SEQ ID NO: 13059 - DNA, 18 bp, Artificial Sequence
  Synthetic
gagaggtgggaggaagac

SEQ ID NO: 13060 - DNA, 23 bp, Artificial Sequence
  Synthetic
agtattttattctttgggggatt

SEQ ID NO: 13061 - DNA, 21 bp, Artificial Sequence
  Synthetic
cccttagttgaattaggccaa

SEQ ID NO: 13062 - DNA, 21 bp, Artificial Sequence
  Synthetic
tgtggattctcattttgatgg

SEQ ID NO: 13063 - DNA, 22 bp, Artificial Sequence
  Synthetic
agttaggtgacactgaaaatcc

SEQ ID NO: 13064 - DNA, 21 bp, Artificial Sequence
  Synthetic
ggcgatatgtgtgatataggc

SEQ ID NO: 13065 - DNA, 20 bp, Artificial Sequence
  Synthetic
cctgcaaaagagaaggtaga

SEQ ID NO: 13066 - DNA, 25 bp, Artificial Sequence
  Synthetic
attctgtatgaaggcattattatgc

SEQ ID NO: 13067 - DNA, 19 bp, Artificial Sequence
  Synthetic
cgatttcggtaccaaaagg

SEQ ID NO: 13068 - DNA, 22 bp, Artificial Sequence
  Synthetic
aagcagggttaataatcactca

SEQ ID NO: 13069 - DNA, 19 bp, Artificial Sequence
  Synthetic
gagcaatggtggatcaagt

SEQ ID NO: 13070 - DNA, 18 bp, Artificial Sequence
  Synthetic
acgagaatccagcacaca

SEQ ID NO: 13071 - DNA, 19 bp, Artificial Sequence
  Synthetic
caaaccagtgtgcaaccta

SEQ ID NO: 13072 - DNA, 24 bp, Artificial Sequence
  Synthetic
caagcatagtttatagaaagggag

SEQ ID NO: 13073 - DNA, 22 bp, Artificial Sequence
  Synthetic
tgagacagcagtataatcatgc

SEQ ID NO: 13074 - DNA, 23 bp, Artificial Sequence
  Synthetic
agtaatgtaataacaacacaggc

SEQ ID NO: 13075 - DNA, 19 bp, Artificial Sequence
  Synthetic
tggtagtggtaaacagcaa

SEQ ID NO: 13076 - DNA, 19 bp, Artificial Sequence
  Synthetic
ggatacagcgacaaacaca

SEQ ID NO: 13077 - DNA, 22 bp, Artificial Sequence
  Synthetic
acaaatgaacatgaaacaatgg

SEQ ID NO: 13078 - DNA, 25 bp, Artificial Sequence
  Synthetic
aaggtatatattatgtacatgacgg

SEQ ID NO: 13079 - DNA, 24 bp, Artificial Sequence
  Synthetic
ctatagttatacaacaacaaacgc

SEQ ID NO: 13080 - DNA, 25 bp, Artificial Sequence
  Synthetic
atacctttattacttgtatatgccc

SEQ ID NO: 13081 - DNA, 22 bp, Artificial Sequence
  Synthetic
attagacattacacctaccact

SEQ ID NO: 13082 - DNA, 20 bp, Artificial Sequence
  Synthetic
ccccacattccttaccaaac

SEQ ID NO: 13083 - DNA, 18 bp, Artificial Sequence
  Synthetic
aggccccatttgacacta

SEQ ID NO: 13084 - DNA, 23 bp, Artificial Sequence
  Synthetic
ccaatatattttatcatgcaggc

SEQ ID NO: 13085 - DNA, 23 bp, Artificial Sequence
  Synthetic
aggctcagttgtttaataaacct

SEQ ID NO: 13086 - DNA, 19 bp, Artificial Sequence
  Synthetic
tgtctgcagaaactatggc

SEQ ID NO: 13087 - DNA, 20 bp, Artificial Sequence
  Synthetic
gggttcgtactaaaccttct

SEQ ID NO: 13088 - DNA, 22 bp, Artificial Sequence
  Synthetic
cgtgtggttacataaactaagg

SEQ ID NO: 13089 - DNA, 23 bp, Artificial Sequence
  Synthetic
ctgcactttatgtttttttttgc

SEQ ID NO: 13090 - DNA, 21 bp, Artificial Sequence
  Synthetic
tatagggtgtaaccgaaaacg

SEQ ID NO: 13091 - DNA, 23 bp, Artificial Sequence
  Synthetic
gtaagaatgcatggaaaaaaacc

SEQ ID NO: 13092 - DNA, 18 bp, Artificial Sequence
  Synthetic
ctgcttatgggtgcacta

SEQ ID NO: 13093 - DNA, 20 bp, Artificial Sequence
  Synthetic
aacattagtgaaacggtggg

SEQ ID NO: 13094 - DNA, 21 bp, Artificial Sequence
  Synthetic
agtttatgcaaggtgtggtta

SEQ ID NO: 13095 - DNA, 23 bp, Artificial Sequence
  Synthetic
ggaaatatttgcacagtagaatg

SEQ ID NO: 13096 - DNA, 18 bp, Artificial Sequence
  Synthetic
cgtgcgactggaaaatgt

SEQ ID NO: 13097 - DNA, 18 bp, Artificial Sequence
  Synthetic
gtaaacgtgcatcagcca

SEQ ID NO: 13098 - DNA, 23 bp, Artificial Sequence
  Synthetic
cctcctgttattacatctgtagg

SEQ ID NO: 13099 - DNA, 18 bp, Artificial Sequence
  Synthetic
gcctgcaagataccacat

SEQ ID NO: 13100 - DNA, 18 bp, Artificial Sequence
  Synthetic
acctgtacagccttctgg

SEQ ID NO: 13101 - DNA, 23 bp, Artificial Sequence
  Synthetic
gtggaaacatagcagatagtagg

SEQ ID NO: 13102 - DNA, 25 bp, Artificial Sequence
  Synthetic
tccaacactatatgtaaatatccag

SEQ ID NO: 13103 - DNA, 25 bp, Artificial Sequence
  Synthetic
taaactatatatgttgtgtgagtgg

SEQ ID NO: 13104 - DNA, 22 bp, Artificial Sequence
  Synthetic
tcttgcaatagtcagtcttgtc

SEQ ID NO: 13105 - DNA, 19 bp, Artificial Sequence
  Synthetic
ctcggaaaccctatgtgtg

SEQ ID NO: 13106 - DNA, 23 bp, Artificial Sequence
  Synthetic
gcttatcaaaaagaacagtgcat

SEQ ID NO: 13107 - DNA, 23 bp, Artificial Sequence
  Synthetic
ttcttctggacaattttaaagcc

SEQ ID NO: 13108 - DNA, 18 bp, Artificial Sequence
  Synthetic
cttgcgactggactcaga

SEQ ID NO: 13109 - DNA, 24 bp, Artificial Sequence
  Synthetic
gttggaagggaatttaataacttg

SEQ ID NO: 13110 - DNA, 23 bp, Artificial Sequence
  Synthetic
tgtatggaaagtgtaaaaaacgg

SEQ ID NO: 13111 - DNA, 21 bp, Artificial Sequence
  Synthetic
agcaaaagcagggtagataat

SEQ ID NO: 13112 - DNA, 19 bp, Artificial Sequence
  Synthetic
tgcttttgacgaaaggaga

SEQ ID NO: 13113 - DNA, 19 bp, Artificial Sequence
  Synthetic
tctgatgcaaggttcaact

SEQ ID NO: 13114 - DNA, 19 bp, Artificial Sequence
  Synthetic
atgagaatccagcacacaa

SEQ ID NO: 13115 - DNA, 19 bp, Artificial Sequence
  Synthetic
atgagaggacaaaaggcaa

SEQ ID NO: 13116 - DNA, 23 bp, Artificial Sequence
  Synthetic
cagcagcttaagattctaaaacg

SEQ ID NO: 13117 - DNA, 18 bp, Artificial Sequence
  Synthetic
aatactggaggcagcaaa

SEQ ID NO: 13118 - DNA, 20 bp, Artificial Sequence
  Synthetic
cctgatacgggcaaatcaat

SEQ ID NO: 13119 - DNA, 25 bp, Artificial Sequence
  Synthetic
ccaataataacaattactgatgcag

SEQ ID NO: 13120 - DNA, 23 bp, Artificial Sequence
  Synthetic
tatgaactgtttatgacacctcc

SEQ ID NO: 13121 - DNA, 23 bp, Artificial Sequence
  Synthetic
cgaatccaacaaagaaaacataa

SEQ ID NO: 13122 - DNA, 19 bp, Artificial Sequence
  Synthetic
acaagtgccgttattgagg

SEQ ID NO: 13123 - DNA, 24 bp, Artificial Sequence
  Synthetic
ttatgatttcagctctatagatgc

SEQ ID NO: 13124 - DNA, 20 bp, Artificial Sequence
  Synthetic
cctttttctgtgccttctgt

SEQ ID NO: 13125 - DNA, 22 bp, Artificial Sequence
  Synthetic
tcctaatggatatcaaaagggt

SEQ ID NO: 13126 - DNA, 19 bp, Artificial Sequence
  Synthetic
ccataatggcactgttggt

SEQ ID NO: 13127 - DNA, 22 bp, Artificial Sequence
  Synthetic
caccgtctacctctattgaaac

SEQ ID NO: 13128 - DNA, 21 bp, Artificial Sequence
  Synthetic
ggctctgctacatatttttcg

SEQ ID NO: 13129 - DNA, 18 bp, Artificial Sequence
  Synthetic
tacctgaagaggaggagc

SEQ ID NO: 13130 - DNA, 25 bp, Artificial Sequence
  Synthetic
actaactcatcatttaagtttggag

SEQ ID NO: 13131 - DNA, 23 bp, Artificial Sequence
  Synthetic
tgtatctttcatgaataggcaaa

SEQ ID NO: 13132 - DNA, 19 bp, Artificial Sequence
  Synthetic
tgctaaaacagtggaagca

SEQ ID NO: 13133 - DNA, 20 bp, Artificial Sequence
  Synthetic
gcactccactatttcctccc

SEQ ID NO: 13134 - DNA, 19 bp, Artificial Sequence
  Synthetic
accagagaagctcccagaa

SEQ ID NO: 13135 - DNA, 18 bp, Artificial Sequence
  Synthetic
tggggaagaggaagatgt

SEQ ID NO: 13136 - DNA, 22 bp, Artificial Sequence
  Synthetic
cctaatgtaaatgtgtttgtgg

SEQ ID NO: 13137 - DNA, 18 bp, Artificial Sequence
  Synthetic
cgcctttacggatgacat

SEQ ID NO: 13138 - DNA, 21 bp, Artificial Sequence
  Synthetic
aggctggagaaatagaaatgc

SEQ ID NO: 13139 - DNA, 18 bp, Artificial Sequence
  Synthetic
tgtggaggttggaaggta

SEQ ID NO: 13140 - DNA, 18 bp, Artificial Sequence
  Synthetic
agcgggtattgatggtga

SEQ ID NO: 13141 - DNA, 19 bp, Artificial Sequence
  Synthetic
aaatgtcctccagatgctg

SEQ ID NO: 13142 - DNA, 21 bp, Artificial Sequence
  Synthetic
catggggtcaatatttttgcc

SEQ ID NO: 13143 - DNA, 21 bp, Artificial Sequence
  Synthetic
tgtattgttcaacaacagctg

SEQ ID NO: 13144 - DNA, 25 bp, Artificial Sequence
  Synthetic
aagacatttgctattagacttttgg

SEQ ID NO: 13145 - DNA, 18 bp, Artificial Sequence
  Synthetic
ggaaattccctggcattg

SEQ ID NO: 13146 - DNA, 25 bp, Artificial Sequence
  Synthetic
atgcattaccatttgataatgaagg

SEQ ID NO: 13147 - DNA, 19 bp, Artificial Sequence
  Synthetic
aaccccagaagactccgtg

SEQ ID NO: 13148 - DNA, 18 bp, Artificial Sequence
  Synthetic
gatttgtcccgtctccag

SEQ ID NO: 13149 - DNA, 18 bp, Artificial Sequence
  Synthetic
ggtctcgggattggtact

SEQ ID NO: 13150 - DNA, 21 bp, Artificial Sequence
  Synthetic
aggttgtaacaacacctgatc

SEQ ID NO: 13151 - DNA, 19 bp, Artificial Sequence
  Synthetic
tgcacattttacaggtgac

SEQ ID NO: 13152 - DNA, 20 bp, Artificial Sequence
  Synthetic
tgaccctgatgtaacaatga

SEQ ID NO: 13153 - DNA, 22 bp, Artificial Sequence
  Synthetic
gtactcctctagaaccttatgc

SEQ ID NO: 13154 - DNA, 20 bp, Artificial Sequence
  Synthetic
ttccatatacttccacgctg

SEQ ID NO: 13155 - DNA, 20 bp, Artificial Sequence
  Synthetic
taggagacacagaaaatccc

SEQ ID NO: 13156 - DNA, 22 bp, Artificial Sequence
  Synthetic
taataggagctcaagacaatca

SEQ ID NO: 13157 - DNA, 18 bp, Artificial Sequence
  Synthetic
ctcccctgcgaggaacca

SEQ ID NO: 13158 - DNA, 20 bp, Artificial Sequence
  Synthetic
accaaaagaaacaccgtccg

SEQ ID NO: 13159 - DNA, 20 bp, Artificial Sequence
  Synthetic
cctcggtaaggtgatcgaca

SEQ ID NO: 13160 - DNA, 20 bp, Artificial Sequence
  Synthetic
aacagacaacgccatcctac

SEQ ID NO: 13161 - DNA, 15 bp, Artificial Sequence
  Synthetic
acgtcaccggccaca

SEQ ID NO: 13162 - DNA, 20 bp, Artificial Sequence
  Synthetic
atgactctttgcagacaggg

SEQ ID NO: 13163 - DNA, 20 bp, Artificial Sequence
  Synthetic
gctcatggatgaacacaacg

SEQ ID NO: 13164 - DNA, 16 bp, Artificial Sequence
  Synthetic
tgcaattggacgcggg

SEQ ID NO: 13165 - DNA, 20 bp, Artificial Sequence
  Synthetic
tgatgatgcttatggcccag

SEQ ID NO: 13166 - DNA, 20 bp, Artificial Sequence
  Synthetic
agcccttattctctggtggg

SEQ ID NO: 13167 - DNA, 16 bp, Artificial Sequence
  Synthetic
cgctggaccggcactt

SEQ ID NO: 13168 - DNA, 19 bp, Artificial Sequence
  Synthetic
ctacccttgtcgtgagcct

SEQ ID NO: 13169 - DNA, 19 bp, Artificial Sequence
  Synthetic
tacagcgtccctactgtcc

SEQ ID NO: 13170 - DNA, 20 bp, Artificial Sequence
  Synthetic
gcttaatccatcagtcgcgg

SEQ ID NO: 13171 - DNA, 18 bp, Artificial Sequence
  Synthetic
cttggcaacgatggggaa

SEQ ID NO: 13172 - DNA, 19 bp, Artificial Sequence
  Synthetic
gacttctccttggacccca

SEQ ID NO: 13173 - DNA, 20 bp, Artificial Sequence
  Synthetic
tactggcagtgttgttgtgg

SEQ ID NO: 13174 - DNA, 20 bp, Artificial Sequence
  Synthetic
actgccaggtaatccaactg

SEQ ID NO: 13175 - DNA, 20 bp, Artificial Sequence
  Synthetic
ctggcaaacctcttacctgc

SEQ ID NO: 13176 - DNA, 19 bp, Artificial Sequence
  Synthetic
tgcatggtcctatccgact

SEQ ID NO: 13177 - DNA, 20 bp, Artificial Sequence
  Synthetic
tcgtcacaatgaccagcatt

SEQ ID NO: 13178 - DNA, 18 bp, Artificial Sequence
  Synthetic
cgagtacgcacctcccca

SEQ ID NO: 13179 - DNA, 18 bp, Artificial Sequence
  Synthetic
ctgcccactcagccagat

SEQ ID NO: 13180 - DNA, 20 bp, Artificial Sequence
  Synthetic
ggcttctcatatgacacccg

SEQ ID NO: 13181 - DNA, 16 bp, Artificial Sequence
  Synthetic
aaagcggctgcagcag

SEQ ID NO: 13182 - DNA, 20 bp, Artificial Sequence
  Synthetic
tgcggtctctacctcttcaa

SEQ ID NO: 13183 - DNA, 23 bp, Artificial Sequence
  Synthetic
atttctaaaaaatgttgctcctg

SEQ ID NO: 13184 - DNA, 25 bp, Artificial Sequence
  Synthetic
cttctagtttgaaaaaatcagaagg

SEQ ID NO: 13185 - DNA, 18 bp, Artificial Sequence
  Synthetic
aacattcccatacaccgg

SEQ ID NO: 13186 - DNA, 24 bp, Artificial Sequence
  Synthetic
ctttggatagaatggatgaagaac

SEQ ID NO: 13187 - DNA, 23 bp, Artificial Sequence
  Synthetic
aaacttggctaaaaatatctgtg

SEQ ID NO: 13188 - DNA, 18 bp, Artificial Sequence
  Synthetic
gagtcgctggagtgaatg

SEQ ID NO: 13189 - DNA, 22 bp, Artificial Sequence
  Synthetic
agagatggtctattagtagcag

SEQ ID NO: 13190 - DNA, 25 bp, Artificial Sequence
  Synthetic
aaaggaacagatctatactaaacac

SEQ ID NO: 13191 - DNA, 20 bp, Artificial Sequence
  Synthetic
ccaaaagcataacaatggcc

SEQ ID NO: 13192 - DNA, 20 bp, Artificial Sequence
  Synthetic
ccagaatgtgataggcttct

SEQ ID NO: 13193 - DNA, 18 bp, Artificial Sequence
  Synthetic
gtctggctgacacgtaaa

SEQ ID NO: 13194 - DNA, 21 bp, Artificial Sequence
  Synthetic
gggacaccataaattttgaga

SEQ ID NO: 13195 - DNA, 21 bp, Artificial Sequence
  Synthetic
gttccccagattgaatcaaga

SEQ ID NO: 13196 - DNA, 21 bp, Artificial Sequence
  Synthetic
gcaaataaatcaattcagccg

SEQ ID NO: 13197 - DNA, 24 bp, Artificial Sequence
  Synthetic
ttaaggagagacataagatgaaag

SEQ ID NO: 13198 - DNA, 21 bp, Artificial Sequence
  Synthetic
ggatagatctggtcttacagc

SEQ ID NO: 13199 - DNA, 22 bp, Artificial Sequence
  Synthetic
agcatcattattgtctttgact

SEQ ID NO: 13200 - DNA, 21 bp, Artificial Sequence
  Synthetic
acacattagtagtagcgagtg

SEQ ID NO: 13201 - DNA, 23 bp, Artificial Sequence
  Synthetic
tgatttctgatcagttaccaatc

SEQ ID NO: 13202 - DNA, 25 bp, Artificial Sequence
  Synthetic
ccagcagatttacttataaaagaac

SEQ ID NO: 13203 - DNA, 23 bp, Artificial Sequence
  Synthetic
acacacttgaaaatataacaacc

SEQ ID NO: 13204 - DNA, 21 bp, Artificial Sequence
  Synthetic
tgtggttcaactaatcaaaca

SEQ ID NO: 13205 - DNA, 19 bp, Artificial Sequence
  Synthetic
tccaaaaacaaggaccaac

SEQ ID NO: 13206 - DNA, 18 bp, Artificial Sequence
  Synthetic
agcccaccacaaaacaac

SEQ ID NO: 13207 - DNA, 20 bp, Artificial Sequence
  Synthetic
atcagaactacactgctcac

SEQ ID NO: 13208 - DNA, 25 bp, Artificial Sequence
  Synthetic
caaatcaaccagaatcaaaatcaac

SEQ ID NO: 13209 - DNA, 20 bp, Artificial Sequence
  Synthetic
ctagaaggggaagtgaacaa

SEQ ID NO: 13210 - DNA, 19 bp, Artificial Sequence
  Synthetic
aagggtccaacatctgttt

SEQ ID NO: 13211 - DNA, 19 bp, Artificial Sequence
  Synthetic
actgctcctatactgcaag

SEQ ID NO: 13212 - DNA, 19 bp, Artificial Sequence
  Synthetic
aaataagtggagctgcaga

SEQ ID NO: 13213 - DNA, 23 bp, Artificial Sequence
  Synthetic
atcaaagttatcttaacaaccct

SEQ ID NO: 13214 - DNA, 22 bp, Artificial Sequence
  Synthetic
caatagactggcagttactgag

SEQ ID NO: 13215 - DNA, 21 bp, Artificial Sequence
  Synthetic
cttagcataggaattcttggg

SEQ ID NO: 13216 - DNA, 20 bp, Artificial Sequence
  Synthetic
atcactcccctgtgaggaac

SEQ ID NO: 13217 - DNA, 20 bp, Artificial Sequence
  Synthetic
accaaacgtaacaccaaccg

SEQ ID NO: 13218 - DNA, 20 bp, Artificial Sequence
  Synthetic
catcgatacccttacgtgcg

SEQ ID NO: 13219 - DNA, 16 bp, Artificial Sequence
  Synthetic
gccgatgccatcctgc

SEQ ID NO: 13220 - DNA, 20 bp, Artificial Sequence
  Synthetic
tgatgatgaactggtcccct

SEQ ID NO: 13221 - DNA, 20 bp, Artificial Sequence
  Synthetic
ttcaactcttcaggctgtcc

SEQ ID NO: 13222 - DNA, 20 bp, Artificial Sequence
  Synthetic
tccttaacaacaccaggcca

SEQ ID NO: 13223 - DNA, 16 bp, Artificial Sequence
  Synthetic
gcacaggctggaagcg

SEQ ID NO: 13224 - DNA, 18 bp, Artificial Sequence
  Synthetic
cggctttggagaacctcg

SEQ ID NO: 13225 - DNA, 19 bp, Artificial Sequence
  Synthetic
tgtgtagtacacccgaccc

SEQ ID NO: 13226 - DNA, 17 bp, Artificial Sequence
  Synthetic
agactgggcgcacaacg

SEQ ID NO: 13227 - DNA, 20 bp, Artificial Sequence
  Synthetic
aactgctacccaaaccttcc

SEQ ID NO: 13228 - DNA, 16 bp, Artificial Sequence
  Synthetic
cacgccgtgggcctat

SEQ ID NO: 13229 - DNA, 20 bp, Artificial Sequence
  Synthetic
cctaatatcaggaccggggt

SEQ ID NO: 13230 - DNA, 19 bp, Artificial Sequence
  Synthetic
ggtgatcaaggggggaaga

SEQ ID NO: 13231 - DNA, 18 bp, Artificial Sequence
  Synthetic
caggactggcagggggaa

SEQ ID NO: 13232 - DNA, 19 bp, Artificial Sequence
  Synthetic
ccatcgtgggaccagatgt

SEQ ID NO: 13233 - DNA, 20 bp, Artificial Sequence
  Synthetic
gatggaagagtgctctcagc

SEQ ID NO: 13234 - DNA, 20 bp, Artificial Sequence
  Synthetic
tcaacatattgggggggtgg

SEQ ID NO: 13235 - DNA, 19 bp, Artificial Sequence
  Synthetic
gctaatagccttcgcctcc

SEQ ID NO: 13236 - DNA, 18 bp, Artificial Sequence
  Synthetic
ttatgcacactcgctgcc

SEQ ID NO: 13237 - DNA, 18 bp, Artificial Sequence
  Synthetic
gcgcctacacaggtttgc

SEQ ID NO: 13238 - DNA, 16 bp, Artificial Sequence
  Synthetic
caggagatgggcggca

SEQ ID NO: 13239 - DNA, 20 bp, Artificial Sequence
  Synthetic
cctatctactgccttggccg

SEQ ID NO: 13240 - DNA, 18 bp, Artificial Sequence
  Synthetic
caactcgttgctacgcca

SEQ ID NO: 13241 - DNA, 20 bp, Artificial Sequence
  Synthetic
gaacgaggttttctgcgttc

SEQ ID NO: 13242 - DNA, 20 bp, Artificial Sequence
  Synthetic
accaatgttgtgacctggac

SEQ ID NO: 13243 - DNA, 19 bp, Artificial Sequence
  Synthetic
acatcatgctcctccaacg

SEQ ID NO: 13244 - DNA, 20 bp, Artificial Sequence
  Synthetic
ttcaaagactccatggcctc

SEQ ID NO: 13245 - DNA, 18 bp, Artificial Sequence
  Synthetic
actttgtgcgacaatgct

SEQ ID NO: 13246 - DNA, 18 bp, Artificial Sequence
  Synthetic
gaacaatggcctggacag

SEQ ID NO: 13247 - DNA, 18 bp, Artificial Sequence
  Synthetic
attacctcctggcttgga

SEQ ID NO: 13248 - DNA, 22 bp, Artificial Sequence
  Synthetic
ttgacagattcaagttggattg

SEQ ID NO: 13249 - DNA, 25 bp, Artificial Sequence
  Synthetic
ttataaaaggaagatcccatttgag

SEQ ID NO: 13250 - DNA, 19 bp, Artificial Sequence
  Synthetic
gcccttttcaatcccttca

SEQ ID NO: 13251 - DNA, 21 bp, Artificial Sequence
  Synthetic
tattgaggaattgtcaaggga

SEQ ID NO: 13252 - DNA, 20 bp, Artificial Sequence
  Synthetic
ctcatcggaggacttgaatg

SEQ ID NO: 13253 - DNA, 22 bp, Artificial Sequence
  Synthetic
cgaaaccggtacatataaaagc

SEQ ID NO: 13254 - DNA, 18 bp, Artificial Sequence
  Synthetic
atgcatggaaatgtggct

SEQ ID NO: 13255 - DNA, 18 bp, Artificial Sequence
  Synthetic
catggcggataaccaagg

SEQ ID NO: 13256 - DNA, 20 bp, Artificial Sequence
  Synthetic
ggcagtccgtatgtaagtcc

SEQ ID NO: 13257 - DNA, 19 bp, Artificial Sequence
  Synthetic
tgctacaacacaatgctgg

SEQ ID NO: 13258 - DNA, 18 bp, Artificial Sequence
  Synthetic
gtcacgtttagcgctgaa

SEQ ID NO: 13259 - DNA, 18 bp, Artificial Sequence
  Synthetic
gcacaaggccattgaact

SEQ ID NO: 13260 - DNA, 22 bp, Artificial Sequence
  Synthetic
aggtgtgcagtaatatagatgc

SEQ ID NO: 13261 - DNA, 19 bp, Artificial Sequence
  Synthetic
caggaccctgcctttttac

SEQ ID NO: 13262 - DNA, 21 bp, Artificial Sequence
  Synthetic
atacacctatacccacatcct

SEQ ID NO: 13263 - DNA, 21 bp, Artificial Sequence
  Synthetic
ggctatggattttaaaaccct

SEQ ID NO: 13264 - DNA, 20 bp, Artificial Sequence
  Synthetic
aactcctagtggctctatgg

SEQ ID NO: 13265 - DNA, 23 bp, Artificial Sequence
  Synthetic
agatgttatggcctatattcatg

SEQ ID NO: 13266 - DNA, 16 bp, Artificial Sequence
  Synthetic
ccgccgccttacctga

SEQ ID NO: 13267 - DNA, 17 bp, Artificial Sequence
  Synthetic
caactctgctggctcgg

SEQ ID NO: 13268 - DNA, 18 bp, Artificial Sequence
  Synthetic
ccctcctagccagcctac

SEQ ID NO: 13269 - DNA, 19 bp, Artificial Sequence
  Synthetic
ggaagcccccagtttatgc

SEQ ID NO: 13270 - DNA, 20 bp, Artificial Sequence
  Synthetic
aaggcgagaataccagcaac

SEQ ID NO: 13271 - DNA, 18 bp, Artificial Sequence
  Synthetic
cctggacccccaaagaca

SEQ ID NO: 13272 - DNA, 20 bp, Artificial Sequence
  Synthetic
ggtcgtgatgccttacaaca

SEQ ID NO: 13273 - DNA, 18 bp, Artificial Sequence
  Synthetic
ggaggcaggccatatcga

SEQ ID NO: 13274 - DNA, 18 bp, Artificial Sequence
  Synthetic
ccggcactagatacgcct

SEQ ID NO: 13275 - DNA, 18 bp, Artificial Sequence
  Synthetic
ctgggcgctacctgaact

SEQ ID NO: 13276 - DNA, 19 bp, Artificial Sequence
  Synthetic
ccactgtggtgttccagtc

SEQ ID NO: 13277 - DNA, 18 bp, Artificial Sequence
  Synthetic
aaggcaggtcctctcagg

SEQ ID NO: 13278 - DNA, 21 bp, Artificial Sequence
  Synthetic
taggcaagcctagctacataa

SEQ ID NO: 13279 - DNA, 19 bp, Artificial Sequence
  Synthetic
tggaaaggaccacaggagg

SEQ ID NO: 13280 - DNA, 20 bp, Artificial Sequence
  Synthetic
catcctcggtgattacagcc

SEQ ID NO: 13281 - DNA, 21 bp, Artificial Sequence
  Synthetic
ctcttattcagacccttgttc

SEQ ID NO: 13282 - DNA, 20 bp, Artificial Sequence
  Synthetic
cataactccctcatcctgcc

SEQ ID NO: 13283 - DNA, 20 bp, Artificial Sequence
  Synthetic
aaaccctgagtcatccctgt

SEQ ID NO: 13284 - DNA, 15 bp, Artificial Sequence
  Synthetic
tgcgccgtgccttct

SEQ ID NO: 13285 - DNA, 20 bp, Artificial Sequence
  Synthetic
ccaaggataatagcccgtcc

SEQ ID NO: 13286 - DNA, 20 bp, Artificial Sequence
  Synthetic
gagcatcagatcacctggga

SEQ ID NO: 13287 - DNA, 20 bp, Artificial Sequence
  Synthetic
tttggacatttaccgatggc

SEQ ID NO: 13288 - DNA, 19 bp, Artificial Sequence
  Synthetic
taaggctctgacgtctccc

SEQ ID NO: 13289 - DNA, 20 bp, Artificial Sequence
  Synthetic
ataaaagcgtggggacagtt

SEQ ID NO: 13290 - DNA, 19 bp, Artificial Sequence
  Synthetic
aatctgatgtcgcagtctc

SEQ ID NO: 13291 - DNA, 19 bp, Artificial Sequence
  Synthetic
ggtcagatcgagtaatggt

SEQ ID NO: 13292 - DNA, 21 bp, Artificial Sequence
  Synthetic
ggatactaacgtcggaatcac

SEQ ID NO: 13293 - DNA, 22 bp, Artificial Sequence
  Synthetic
caaagtctaattattgcagcca

SEQ ID NO: 13294 - DNA, 19 bp, Artificial Sequence
  Synthetic
agcgggtcatcaatcaaga

SEQ ID NO: 13295 - DNA, 22 bp, Artificial Sequence
  Synthetic
gacctgaatttcgttaataggg

SEQ ID NO: 13296 - DNA, 19 bp, Artificial Sequence
  Synthetic
ttgaccggtttttgagagt

SEQ ID NO: 13297 - DNA, 21 bp, Artificial Sequence
  Synthetic
tctttagttcctaaggccatt

SEQ ID NO: 13298 - DNA, 20 bp, Artificial Sequence
  Synthetic
aacaattctcggaaaggatg

SEQ ID NO: 13299 - DNA, 20 bp, Artificial Sequence
  Synthetic
cttgaggaaatgtcaaggga

SEQ ID NO: 13300 - DNA, 19 bp, Artificial Sequence
  Synthetic
cttccaggacatactgctg

SEQ ID NO: 13301 - DNA, 18 bp, Artificial Sequence
  Synthetic
ccagcgcaaaatgccata

SEQ ID NO: 13302 - DNA, 22 bp, Artificial Sequence
  Synthetic
tatggctttccttgaagaatcc

SEQ ID NO: 13303 - DNA, 21 bp, Artificial Sequence
  Synthetic
aaggagagtaagagacaacat

SEQ ID NO: 13304 - DNA, 18 bp, Artificial Sequence
  Synthetic
gcgaaaagcttgaacagt

SEQ ID NO: 13305 - DNA, 21 bp, Artificial Sequence
  Synthetic
tgttctcaaacaaaatggcaa

SEQ ID NO: 13306 - DNA, 23 bp, Artificial Sequence
  Synthetic
caaaagaaatacaccaagacaat

SEQ ID NO: 13307 - DNA, 21 bp, Artificial Sequence
  Synthetic
tctggagtaaatgaatcagct

SEQ ID NO: 13308 - DNA, 17 bp, Artificial Sequence
  Synthetic
gctggtgcatgtgggga

SEQ ID NO: 13309 - DNA, 19 bp, Artificial Sequence
  Synthetic
ttttactcggaggccacgg

SEQ ID NO: 13310 - DNA, 20 bp, Artificial Sequence
  Synthetic
cagatcacacgctctttcct

SEQ ID NO: 13311 - DNA, 20 bp, Artificial Sequence
  Synthetic
gtagacggggtagggagatc

SEQ ID NO: 13312 - DNA, 18 bp, Artificial Sequence
  Synthetic
aacggataacgcggtggc

SEQ ID NO: 13313 - DNA, 20 bp, Artificial Sequence
  Synthetic
caactcttactgctctctcc

SEQ ID NO: 13314 - DNA, 20 bp, Artificial Sequence
  Synthetic
tcataaagctgttgaccggc

SEQ ID NO: 13315 - DNA, 20 bp, Artificial Sequence
  Synthetic
tacgggagatacaaggagcg

SEQ ID NO: 13316 - DNA, 16 bp, Artificial Sequence
  Synthetic
gcagccggcagaggat

SEQ ID NO: 13317 - DNA, 17 bp, Artificial Sequence
  Synthetic
tgttacatcgccggcgg

SEQ ID NO: 13318 - DNA, 16 bp, Artificial Sequence
  Synthetic
cactcggaccgctcct

SEQ ID NO: 13319 - DNA, 16 bp, Artificial Sequence
  Synthetic
gcgaactgtgcgtgcc

SEQ ID NO: 13320 - DNA, 18 bp, Artificial Sequence
  Synthetic
cctgctgtgctactggtg

SEQ ID NO: 13321 - DNA, 18 bp, Artificial Sequence
  Synthetic
ggtgagctggggaacagg

SEQ ID NO: 13322 - DNA, 20 bp, Artificial Sequence
  Synthetic
ttccacgctgttttcgaaac

SEQ ID NO: 13323 - DNA, 18 bp, Artificial Sequence
  Synthetic
caggtagcgcatgcagtg

SEQ ID NO: 13324 - DNA, 18 bp, Artificial Sequence
  Synthetic
tgcgcttcagatcgtgga

SEQ ID NO: 13325 - DNA, 18 bp, Artificial Sequence
  Synthetic
gggctccagaaacaggca

SEQ ID NO: 13326 - DNA, 16 bp, Artificial Sequence
  Synthetic
tggatgggctccgggt

SEQ ID NO: 13327 - DNA, 19 bp, Artificial Sequence
  Synthetic
aactcctgctgctcactgt

SEQ ID NO: 13328 - DNA, 18 bp, Artificial Sequence
  Synthetic
caggacgtggtgacctcg

SEQ ID NO: 13329 - DNA, 16 bp, Artificial Sequence
  Synthetic
tcaccaagggcgggct

SEQ ID NO: 13330 - DNA, 18 bp, Artificial Sequence
  Synthetic
ctcggacaagatcacggc

SEQ ID NO: 13331 - DNA, 17 bp, Artificial Sequence
  Synthetic
cctgcggggaaacgaga

SEQ ID NO: 13332 - DNA, 17 bp, Artificial Sequence
  Synthetic
tctggccgatggctgtg

SEQ ID NO: 13333 - DNA, 15 bp, Artificial Sequence
  Synthetic
cgtgtgcgcgctctt

SEQ ID NO: 13334 - DNA, 18 bp, Artificial Sequence
  Synthetic
agggctgctccaactttg

SEQ ID NO: 13335 - DNA, 16 bp, Artificial Sequence
  Synthetic
attgcgggacctgcgc

SEQ ID NO: 13336 - DNA, 17 bp, Artificial Sequence
  Synthetic
ggtgcacagcgacagtg

SEQ ID NO: 13337 - DNA, 16 bp, Artificial Sequence
  Synthetic
cgccgcggtagagcat

SEQ ID NO: 13338 - DNA, 18 bp, Artificial Sequence
  Synthetic
gccgctcagattccagga

SEQ ID NO: 13339 - DNA, 17 bp, Artificial Sequence
  Synthetic
ccaccgggaacaaagcg

SEQ ID NO: 13340 - DNA, 20 bp, Artificial Sequence
  Synthetic
actacatcaaagggtcggct

SEQ ID NO: 13341 - DNA, 20 bp, Artificial Sequence
  Synthetic
atcagcaacgtgttatcggc

SEQ ID NO: 13342 - DNA, 16 bp, Artificial Sequence
  Synthetic
gcagtacgggggtcga

SEQ ID NO: 13343 - DNA, 16 bp, Artificial Sequence
  Synthetic
gaactcgcgacccacg

SEQ ID NO: 13344 - DNA, 16 bp, Artificial Sequence
  Synthetic
ggtgccgcctggaaca

SEQ ID NO: 13345 - DNA, 17 bp, Artificial Sequence
  Synthetic
cgaagcccacactgacg

SEQ ID NO: 13346 - DNA, 16 bp, Artificial Sequence
  Synthetic
cacgccgatgtgcagc

SEQ ID NO: 13347 - DNA, 16 bp, Artificial Sequence
  Synthetic
cgggctctcgtcctgt

SEQ ID NO: 13348 - DNA, 20 bp, Artificial Sequence
  Synthetic
ccagcccagcttttgtatga

SEQ ID NO: 13349 - DNA, 17 bp, Artificial Sequence
  Synthetic
gcttcctgcgacaccag

SEQ ID NO: 13350 - DNA, 18 bp, Artificial Sequence
  Synthetic
tacccaccacgcgtttcg

SEQ ID NO: 13351 - DNA, 18 bp, Artificial Sequence
  Synthetic
ccgacaccgatcacgaag

SEQ ID NO: 13352 - DNA, 16 bp, Artificial Sequence
  Synthetic
ggcaccaccgagacgt

SEQ ID NO: 13353 - DNA, 18 bp, Artificial Sequence
  Synthetic
cggaatgtcacaacgccg

SEQ ID NO: 13354 - DNA, 20 bp, Artificial Sequence
  Synthetic
gacattcacgacctagacgc

SEQ ID NO: 13355 - DNA, 18 bp, Artificial Sequence
  Synthetic
ggccttggtacaggagca

SEQ ID NO: 13356 - DNA, 18 bp, Artificial Sequence
  Synthetic
cgcaccaaccactggagg

SEQ ID NO: 13357 - DNA, 15 bp, Artificial Sequence
  Synthetic
tgagcacggcgcaga

SEQ ID NO: 13358 - DNA, 19 bp, Artificial Sequence
  Synthetic
gctggcttttctggaggaa

SEQ ID NO: 13359 - DNA, 16 bp, Artificial Sequence
  Synthetic
acgtggcaggcggtct

SEQ ID NO: 13360 - DNA, 19 bp, Artificial Sequence
  Synthetic
agcctggtggaactcatca

SEQ ID NO: 13361 - DNA, 19 bp, Artificial Sequence
  Synthetic
ggctttcttggcgtacagc

SEQ ID NO: 13362 - DNA, 16 bp, Artificial Sequence
  Synthetic
tccgcgtcctcgtcga

SEQ ID NO: 13363 - DNA, 16 bp, Artificial Sequence
  Synthetic
gtccacgccgcctcat

SEQ ID NO: 13364 - DNA, 17 bp, Artificial Sequence
  Synthetic
tagttgcacacggccga

SEQ ID NO: 13365 - DNA, 16 bp, Artificial Sequence
  Synthetic
tggcgccctggtacga

SEQ ID NO: 13366 - DNA, 16 bp, Artificial Sequence
  Synthetic
aagggcggcgacatct

SEQ ID NO: 13367 - DNA, 18 bp, Artificial Sequence
  Synthetic
cgggtgacgttgtggatg

SEQ ID NO: 13368 - DNA, 16 bp, Artificial Sequence
  Synthetic
gtccgtcgccgctgtt

SEQ ID NO: 13369 - DNA, 19 bp, Artificial Sequence
  Synthetic
aacttgtccatcagcgacg

SEQ ID NO: 13370 - DNA, 16 bp, Artificial Sequence
  Synthetic
aggcgcacctccgaaa

SEQ ID NO: 13371 - DNA, 16 bp, Artificial Sequence
  Synthetic
tcggtaggcacgcgat

SEQ ID NO: 13372 - DNA, 20 bp, Artificial Sequence
  Synthetic
cgtcgtaacaaagcacaggc

SEQ ID NO: 13373 - DNA, 17 bp, Artificial Sequence
  Synthetic
acaaccgcaacgatccc

SEQ ID NO: 13374 - DNA, 18 bp, Artificial Sequence
  Synthetic
ctggaggggtccggaaca

SEQ ID NO: 13375 - DNA, 18 bp, Artificial Sequence
  Synthetic
gtcttcttgcggtaccgg

SEQ ID NO: 13376 - DNA, 19 bp, Artificial Sequence
  Synthetic
actgttgacggatgtgcaa

SEQ ID NO: 13377 - DNA, 19 bp, Artificial Sequence
  Synthetic
gtcgtcgtcatcgaaaggc

SEQ ID NO: 13378 - DNA, 17 bp, Artificial Sequence
  Synthetic
cgagaaacggctgtcgg

SEQ ID NO: 13379 - DNA, 16 bp, Artificial Sequence
  Synthetic
ggcggcccagaaaacc

SEQ ID NO: 13380 - DNA, 20 bp, Artificial Sequence
  Synthetic
cacgcgtcctatgatgagtt

SEQ ID NO: 13381 - DNA, 18 bp, Artificial Sequence
  Synthetic
gattcgacggggaacgct

SEQ ID NO: 13382 - DNA, 17 bp, Artificial Sequence
  Synthetic
gacacgcgctttgggag

SEQ ID NO: 13383 - DNA, 18 bp, Artificial Sequence
  Synthetic
acgctactacatgcccct

SEQ ID NO: 13384 - DNA, 17 bp, Artificial Sequence
  Synthetic
gaatttgcccgtgcgga

SEQ ID NO: 13385 - DNA, 17 bp, Artificial Sequence
  Synthetic
acgaccagtctccggac

SEQ ID NO: 13386 - DNA, 16 bp, Artificial Sequence
  Synthetic
ccgttcttcccgcgga

SEQ ID NO: 13387 - DNA, 20 bp, Artificial Sequence
  Synthetic
acgtggatccccattatccc

SEQ ID NO: 13388 - DNA, 17 bp, Artificial Sequence
  Synthetic
tggtcaccgtggtcagt

SEQ ID NO: 13389 - DNA, 16 bp, Artificial Sequence
  Synthetic
agcgtgagagccccgt

SEQ ID NO: 13390 - DNA, 19 bp, Artificial Sequence
  Synthetic
cggaaaaagtggatgcggc

SEQ ID NO: 13391 - DNA, 15 bp, Artificial Sequence
  Synthetic
gcagcgcaaaggcca

SEQ ID NO: 13392 - DNA, 20 bp, Artificial Sequence
  Synthetic
aaaacagcagagaaccgagg

SEQ ID NO: 13393 - DNA, 18 bp, Artificial Sequence
  Synthetic
actggttctgctgacgcg

SEQ ID NO: 13394 - DNA, 19 bp, Artificial Sequence
  Synthetic
agcgcgtacacatagatcg

SEQ ID NO: 13395 - DNA, 16 bp, Artificial Sequence
  Synthetic
ggacgccagtcgcatg

SEQ ID NO: 13396 - DNA, 20 bp, Artificial Sequence
  Synthetic
agatacgtaacgtgtgcgag

SEQ ID NO: 13397 - DNA, 18 bp, Artificial Sequence
  Synthetic
tacggctggtgagtccac

SEQ ID NO: 13398 - DNA, 18 bp, Artificial Sequence
  Synthetic
tcctggcacttgacgagc

SEQ ID NO: 13399 - DNA, 20 bp, Artificial Sequence
  Synthetic
aagtaatggtctgcagctgc

SEQ ID NO: 13400 - DNA, 18 bp, Artificial Sequence
  Synthetic
atcgagtcttcgggggtg

SEQ ID NO: 13401 - DNA, 18 bp, Artificial Sequence
  Synthetic
ttccatgttacgcggcag

SEQ ID NO: 13402 - DNA, 16 bp, Artificial Sequence
  Synthetic
gcaccgcccatgggtt

SEQ ID NO: 13403 - DNA, 16 bp, Artificial Sequence
  Synthetic
ccggcgctggtcttga

SEQ ID NO: 13404 - DNA, 18 bp, Artificial Sequence
  Synthetic
gcctgtccgatacacgtg

SEQ ID NO: 13405 - DNA, 19 bp, Artificial Sequence
  Synthetic
gacgttgttgttgcggatc

SEQ ID NO: 13406 - DNA, 18 bp, Artificial Sequence
  Synthetic
accgtcagaatcgacggt

SEQ ID NO: 13407 - DNA, 16 bp, Artificial Sequence
  Synthetic
gtcaacggcggtcgga

SEQ ID NO: 13408 - DNA, 19 bp, Artificial Sequence
  Synthetic
gaagggctgttcgatgtgg

SEQ ID NO: 13409 - DNA, 17 bp, Artificial Sequence
  Synthetic
cacctgcgagttgaggc

SEQ ID NO: 13410 - DNA, 18 bp, Artificial Sequence
  Synthetic
cgtgttcgagcacctgac

SEQ ID NO: 13411 - DNA, 20 bp, Artificial Sequence
  Synthetic
cgtagccacctgttggaacc

SEQ ID NO: 13412 - DNA, 17 bp, Artificial Sequence
  Synthetic
ccgcagaaggccatgag

SEQ ID NO: 13413 - DNA, 16 bp, Artificial Sequence
  Synthetic
tggcggccgaatctcc

SEQ ID NO: 13414 - DNA, 19 bp, Artificial Sequence
  Synthetic
cgtcttcgtcgtccctagt

SEQ ID NO: 13415 - DNA, 17 bp, Artificial Sequence
  Synthetic
cgtgatgcgtgacggag

SEQ ID NO: 13416 - DNA, 18 bp, Artificial Sequence
  Synthetic
gcgcgaatgttaccaccc

SEQ ID NO: 13417 - DNA, 17 bp, Artificial Sequence
  Synthetic
catgggtacggaggcgt

SEQ ID NO: 13418 - DNA, 20 bp, Artificial Sequence
  Synthetic
gcataatctgcgaggaggac

SEQ ID NO: 13419 - DNA, 20 bp, Artificial Sequence
  Synthetic
gtctctacgctcctacgaca

SEQ ID NO: 13420 - DNA, 17 bp, Artificial Sequence
  Synthetic
gcactgggcgtggaaac

SEQ ID NO: 13421 - DNA, 20 bp, Artificial Sequence
  Synthetic
cctacgatttggccatgtcg

SEQ ID NO: 13422 - DNA, 20 bp, Artificial Sequence
  Synthetic
attggcgcaaactttttggc

SEQ ID NO: 13423 - DNA, 16 bp, Artificial Sequence
  Synthetic
cgcgaagtgcagcagg

SEQ ID NO: 13424 - DNA, 17 bp, Artificial Sequence
  Synthetic
tggaaaccagcagcccg

SEQ ID NO: 13425 - DNA, 18 bp, Artificial Sequence
  Synthetic
tggcggtcaccactttca

SEQ ID NO: 13426 - DNA, 17 bp, Artificial Sequence
  Synthetic
gcgctccacaccaacag

SEQ ID NO: 13427 - DNA, 16 bp, Artificial Sequence
  Synthetic
tccagcgcctgcagat

SEQ ID NO: 13428 - DNA, 20 bp, Artificial Sequence
  Synthetic
ccttatgctgcgctacatgc

SEQ ID NO: 13429 - DNA, 16 bp, Artificial Sequence
  Synthetic
ccagagcgtgccggta

SEQ ID NO: 13430 - DNA, 18 bp, Artificial Sequence
  Synthetic
ggcgctgctttctttcga

SEQ ID NO: 13431 - DNA, 16 bp, Artificial Sequence
  Synthetic
ggctccttcgtgggca

SEQ ID NO: 13432 - DNA, 20 bp, Artificial Sequence
  Synthetic
ctttgtgctcgacgttaacg

SEQ ID NO: 13433 - DNA, 18 bp, Artificial Sequence
  Synthetic
gcctccggatcacatggt

SEQ ID NO: 13434 - DNA, 16 bp, Artificial Sequence
  Synthetic
tgtacacggccggcga

SEQ ID NO: 13435 - DNA, 18 bp, Artificial Sequence
  Synthetic
gtaggagcgacgctgacg

SEQ ID NO: 13436 - DNA, 20 bp, Artificial Sequence
  Synthetic
tgaagtgacgttaggggagg

SEQ ID NO: 13437 - DNA, 20 bp, Artificial Sequence
  Synthetic
ccacatctggtatacacccg

SEQ ID NO: 13438 - DNA, 20 bp, Artificial Sequence
  Synthetic
tacttttcactcccgggtgc

SEQ ID NO: 13439 - DNA, 19 bp, Artificial Sequence
  Synthetic
gcgtacaggagtcctaggt

SEQ ID NO: 13440 - DNA, 17 bp, Artificial Sequence
  Synthetic
tgcaagcccattccccg

SEQ ID NO: 13441 - DNA, 16 bp, Artificial Sequence
  Synthetic
acgcagcccagcctag

SEQ ID NO: 13442 - DNA, 18 bp, Artificial Sequence
  Synthetic
acaggaagcttacagggt

SEQ ID NO: 13443 - DNA, 21 bp, Artificial Sequence
  Synthetic
atatgtgcggtatgattttgc

SEQ ID NO: 13444 - DNA, 19 bp, Artificial Sequence
  Synthetic
tgattccgtagacgccagg

SEQ ID NO: 13445 - DNA, 18 bp, Artificial Sequence
  Synthetic
tgcgcgaatggaaaccat

SEQ ID NO: 13446 - DNA, 20 bp, Artificial Sequence
  Synthetic
ggatctacgtcccagtctct

SEQ ID NO: 13447 - DNA, 18 bp, Artificial Sequence
  Synthetic
cgacgtcgtacgagtcgc

SEQ ID NO: 13448 - DNA, 19 bp, Artificial Sequence
  Synthetic
cgagagattctccagcccg

SEQ ID NO: 13449 - DNA, 18 bp, Artificial Sequence
  Synthetic
ttgcaacagcttcgacgg

SEQ ID NO: 13450 - DNA, 17 bp, Artificial Sequence
  Synthetic
gcggatgctggtcgttg

SEQ ID NO: 13451 - DNA, 16 bp, Artificial Sequence
  Synthetic
cagctccaagcgccgt

SEQ ID NO: 13452 - DNA, 19 bp, Artificial Sequence
  Synthetic
gaaagccgtcccggtcatt

SEQ ID NO: 13453 - DNA, 15 bp, Artificial Sequence
  Synthetic
tgtggtgcacggcgt

SEQ ID NO: 13454 - DNA, 16 bp, Artificial Sequence
  Synthetic
ggatcggtcgtcgcgt

SEQ ID NO: 13455 - DNA, 16 bp, Artificial Sequence
  Synthetic
tggcgtgcgaggaaga

SEQ ID NO: 13456 - DNA, 19 bp, Artificial Sequence
  Synthetic
gatgtcgggcgtccaccta

SEQ ID NO: 13457 - DNA, 19 bp, Artificial Sequence
  Synthetic
aaagcctggttggatctcg

SEQ ID NO: 13458 - DNA, 18 bp, Artificial Sequence
  Synthetic
tagcctcctccaccacgg

SEQ ID NO: 13459 - DNA, 20 bp, Artificial Sequence
  Synthetic
cttgaagtacagcatgccca

SEQ ID NO: 13460 - DNA, 19 bp, Artificial Sequence
  Synthetic
aaaccgcgactttccacac

SEQ ID NO: 13461 - DNA, 18 bp, Artificial Sequence
  Synthetic
gcccacccccattacacg

SEQ ID NO: 13462 - DNA, 18 bp, Artificial Sequence
  Synthetic
acggatcaagaggtccat

SEQ ID NO: 13463 - DNA, 16 bp, Artificial Sequence
  Synthetic
gctctcggggccgtat

SEQ ID NO: 13464 - DNA, 20 bp, Artificial Sequence
  Synthetic
agcgttcataacaatcccgg

SEQ ID NO: 13465 - DNA, 17 bp, Artificial Sequence
  Synthetic
gttgcaggccacgaaca

SEQ ID NO: 13466 - DNA, 18 bp, Artificial Sequence
  Synthetic
accggtgtgcagctaagc

SEQ ID NO: 13467 - DNA, 17 bp, Artificial Sequence
  Synthetic
gacccaagccagactgc

SEQ ID NO: 13468 - DNA, 18 bp, Artificial Sequence
  Synthetic
ggccggcgagtaatagca

SEQ ID NO: 13469 - DNA, 16 bp, Artificial Sequence
  Synthetic
agccgccgaaacacga

SEQ ID NO: 13470 - DNA, 18 bp, Artificial Sequence
  Synthetic
ccgaaagcgtcgtgagca

SEQ ID NO: 13471 - DNA, 19 bp, Artificial Sequence
  Synthetic
taggggactacctcctcga

SEQ ID NO: 13472 - DNA, 18 bp, Artificial Sequence
  Synthetic
ccaatcggcgtcgcttag

SEQ ID NO: 13473 - DNA, 18 bp, Artificial Sequence
  Synthetic
gggacctgtttcagcgtg

SEQ ID NO: 13474 - DNA, 20 bp, Artificial Sequence
  Synthetic
gcgtaaatctgcgggatagc

SEQ ID NO: 13475 - DNA, 16 bp, Artificial Sequence
  Synthetic
tcgcctcgacagagcc

SEQ ID NO: 13476 - DNA, 17 bp, Artificial Sequence
  Synthetic
aagttcacgtcgcgtcc

SEQ ID NO: 13477 - DNA, 16 bp, Artificial Sequence
  Synthetic
tccggcatggtgctgc

SEQ ID NO: 13478 - DNA, 20 bp, Artificial Sequence
  Synthetic
ataacgccatgggatcctca

SEQ ID NO: 13479 - DNA, 19 bp, Artificial Sequence
  Synthetic
cctgaacagaccgctaacc

SEQ ID NO: 13480 - DNA, 19 bp, Artificial Sequence
  Synthetic
ctgatgctgttgtcgtgca

SEQ ID NO: 13481 - DNA, 18 bp, Artificial Sequence
  Synthetic
ccaccaccgcattaaccg

SEQ ID NO: 13482 - DNA, 18 bp, Artificial Sequence
  Synthetic
ggaccttctgggaccagt

SEQ ID NO: 13483 - DNA, 20 bp, Artificial Sequence
  Synthetic
ataggcagcgacgtgtatgg

SEQ ID NO: 13484 - DNA, 16 bp, Artificial Sequence
  Synthetic
ggacgcccgacatcca

SEQ ID NO: 13485 - DNA, 18 bp, Artificial Sequence
  Synthetic
ctttgtgcgacagtgctt

SEQ ID NO: 13486 - DNA, 19 bp, Artificial Sequence
  Synthetic
tggacagtggtgaatagca

SEQ ID NO: 13487 - DNA, 20 bp, Artificial Sequence
  Synthetic
taagacaggaaatggcaagc

SEQ ID NO: 13488 - DNA, 21 bp, Artificial Sequence
  Synthetic
aaacaagccaattaatgtggg

SEQ ID NO: 13489 - DNA, 20 bp, Artificial Sequence
  Synthetic
gattcgagctggatagaact

SEQ ID NO: 13490 - DNA, 23 bp, Artificial Sequence
  Synthetic
gttcattataaaaggaaggtccc

SEQ ID NO: 13491 - DNA, 20 bp, Artificial Sequence
  Synthetic
ctgccttcttcaatctcttc

SEQ ID NO: 13492 - DNA, 22 bp, Artificial Sequence
  Synthetic
gatcctatgaacagatggaaac

SEQ ID NO: 13493 - DNA, 20 bp, Artificial Sequence
  Synthetic
aggtccaatttacaggagaa

SEQ ID NO: 13494 - DNA, 19 bp, Artificial Sequence
  Synthetic
atggaactgattcggatga

SEQ ID NO: 13495 - DNA, 21 bp, Artificial Sequence
  Synthetic
attagagggacaagaatggtc

SEQ ID NO: 13496 - DNA, 20 bp, Artificial Sequence
  Synthetic
gaaatgatgttttttgggcg

SEQ ID NO: 13497 - DNA, 18 bp, Artificial Sequence
  Synthetic
ggcgccattatgagaact

SEQ ID NO: 13498 - DNA, 19 bp, Artificial Sequence
  Synthetic
cacaactgcaccctgaaga

SEQ ID NO: 13499 - DNA, 18 bp, Artificial Sequence
  Synthetic
gaagtgcggttccagaag

SEQ ID NO: 13500 - DNA, 22 bp, Artificial Sequence
  Synthetic
tcttagtaatggagttggaaac

SEQ ID NO: 13501 - DNA, 20 bp, Artificial Sequence
  Synthetic
acatgtcaatgcagctgtgg

SEQ ID NO: 13502 - DNA, 19 bp, Artificial Sequence
  Synthetic
gcttttgctaaattggcct

SEQ ID NO: 13503 - DNA, 24 bp, Artificial Sequence
  Synthetic
gtgtacttgctttaattgtagagg

SEQ ID NO: 13504 - DNA, 20 bp, Artificial Sequence
  Synthetic
gtaacttcagccactcaaac

SEQ ID NO: 13505 - DNA, 20 bp, Artificial Sequence
  Synthetic
aggatctacagtggacggtc

SEQ ID NO: 13506 - DNA, 18 bp, Artificial Sequence
  Synthetic
gtaagctcttgaccaccg

SEQ ID NO: 13507 - DNA, 23 bp, Artificial Sequence
  Synthetic
tgattgtattttgagattggcaa

SEQ ID NO: 13508 - DNA, 20 bp, Artificial Sequence
  Synthetic
acagtttctggagcaggtgt

SEQ ID NO: 13509 - DNA, 18 bp, Artificial Sequence
  Synthetic
gcttcagcagttgcaagc

SEQ ID NO: 13510 - DNA, 19 bp, Artificial Sequence
  Synthetic
aagacaaagcctctgtagc

SEQ ID NO: 13511 - DNA, 22 bp, Artificial Sequence
  Synthetic
tccgtatacagatttaaggggt

SEQ ID NO: 13512 - DNA, 19 bp, Artificial Sequence
  Synthetic
cttggtcttcatcgctttc

SEQ ID NO: 13513 - DNA, 20 bp, Artificial Sequence
  Synthetic
ttgcggcaatattgagttgc

SEQ ID NO: 13514 - DNA, 18 bp, Artificial Sequence
  Synthetic
gcccgctcataggggtta

SEQ ID NO: 13515 - DNA, 21 bp, Artificial Sequence
  Synthetic
aggtattcctccttatccttc

SEQ ID NO: 13516 - DNA, 23 bp, Artificial Sequence
  Synthetic
aaataatattttgccagctcttg

SEQ ID NO: 13517 - DNA, 22 bp, Artificial Sequence
  Synthetic
tgtaagcggtttctataggtac

SEQ ID NO: 13518 - DNA, 20 bp, Artificial Sequence
  Synthetic
aagtagaaatctcgtcggcg

SEQ ID NO: 13519 - DNA, 19 bp, Artificial Sequence
  Synthetic
tgcattgccactaccgttt

SEQ ID NO: 13520 - DNA, 16 bp, Artificial Sequence
  Synthetic
acggttccacggtgca

SEQ ID NO: 13521 - DNA, 23 bp, Artificial Sequence
  Synthetic
gttatcttggtaggcaatttctg

SEQ ID NO: 13522 - DNA, 19 bp, Artificial Sequence
  Synthetic
gtgggggttgtcttcttcg

SEQ ID NO: 13523 - DNA, 18 bp, Artificial Sequence
  Synthetic
cagtcacagtcacaaggt

SEQ ID NO: 13524 - DNA, 18 bp, Artificial Sequence
  Synthetic
caagcactgcctgttgaa

SEQ ID NO: 13525 - DNA, 19 bp, Artificial Sequence
  Synthetic
cttccaacatgaggcggtg

SEQ ID NO: 13526 - DNA, 20 bp, Artificial Sequence
  Synthetic
ccgtggtttggtggaaaagt

SEQ ID NO: 13527 - DNA, 17 bp, Artificial Sequence
  Synthetic
ctcctgagcgtcaccca

SEQ ID NO: 13528 - DNA, 18 bp, Artificial Sequence
  Synthetic
gcacactaatagcgcgag

SEQ ID NO: 13529 - DNA, 18 bp, Artificial Sequence
  Synthetic
gacgggagcaggaacaga

SEQ ID NO: 13530 - DNA, 18 bp, Artificial Sequence
  Synthetic
cagtagtgccgtctcgta

SEQ ID NO: 13531 - DNA, 18 bp, Artificial Sequence
  Synthetic
gccttgcgactaatggtt

SEQ ID NO: 13532 - DNA, 19 bp, Artificial Sequence
  Synthetic
tcgagctttcattaatcgc

SEQ ID NO: 13533 - DNA, 20 bp, Artificial Sequence
  Synthetic
gaatgggaggaaagacagcc

SEQ ID NO: 13534 - DNA, 20 bp, Artificial Sequence
  Synthetic
tggcacgcaaactattaact

SEQ ID NO: 13535 - DNA, 19 bp, Artificial Sequence
  Synthetic
tgctggaaagtgacattgg

SEQ ID NO: 13536 - DNA, 23 bp, Artificial Sequence
  Synthetic
ccttaaataaggctgctaggatt

SEQ ID NO: 13537 - DNA, 18 bp, Artificial Sequence
  Synthetic
gtaacaacacgggctggg

SEQ ID NO: 13538 - DNA, 16 bp, Artificial Sequence
  Synthetic
cggccagagcgttggt

SEQ ID NO: 13539 - DNA, 20 bp, Artificial Sequence
  Synthetic
caagcgcgatatcaagcatg

SEQ ID NO: 13540 - DNA, 19 bp, Artificial Sequence
  Synthetic
ttaaaagggaagccatgga

SEQ ID NO: 13541 - DNA, 18 bp, Artificial Sequence
  Synthetic
gggtaccgtgggacaact

SEQ ID NO: 13542 - DNA, 18 bp, Artificial Sequence
  Synthetic
gcccgacgaggtaatggt

SEQ ID NO: 13543 - DNA, 20 bp, Artificial Sequence
  Synthetic
cctatgttagcgccagagga

SEQ ID NO: 13544 - DNA, 18 bp, Artificial Sequence
  Synthetic
ctttacgctggctgtggg

SEQ ID NO: 13545 - DNA, 20 bp, Artificial Sequence
  Synthetic
gacaatccaaggatgacaac

SEQ ID NO: 13546 - DNA, 20 bp, Artificial Sequence
  Synthetic
cagttaatgctggatgcttt

SEQ ID NO: 13547 - DNA, 22 bp, Artificial Sequence
  Synthetic
gaagcttcttgtactcaaatgt

SEQ ID NO: 13548 - DNA, 18 bp, Artificial Sequence
  Synthetic
cccggttcctacacttac

SEQ ID NO: 13549 - DNA, 18 bp, Artificial Sequence
  Synthetic
ctgggttcagggtttgac

SEQ ID NO: 13550 - DNA, 18 bp, Artificial Sequence
  Synthetic
gagtaggcaagttgtgga

SEQ ID NO: 13551 - DNA, 18 bp, Artificial Sequence
  Synthetic
ccctcccagactgctgta

SEQ ID NO: 13552 - DNA, 20 bp, Artificial Sequence
  Synthetic
taccctagaaaagtcaaccc

SEQ ID NO: 13553 - DNA, 18 bp, Artificial Sequence
  Synthetic
ggttggtgggcagggata

SEQ ID NO: 13554 - DNA, 18 bp, Artificial Sequence
  Synthetic
cactggcataaggagacg

SEQ ID NO: 13555 - DNA, 20 bp, Artificial Sequence
  Synthetic
caccatctccattccatgca

SEQ ID NO: 13556 - DNA, 18 bp, Artificial Sequence
  Synthetic
gcttccatgcctttttcc

SEQ ID NO: 13557 - DNA, 20 bp, Artificial Sequence
  Synthetic
ctactcataccccaagacgc

SEQ ID NO: 13558 - DNA, 18 bp, Artificial Sequence
  Synthetic
agtttttgcagtgccaga

SEQ ID NO: 13559 - DNA, 20 bp, Artificial Sequence
  Synthetic
tgagcgcagtgatgaatcag

SEQ ID NO: 13560 - DNA, 20 bp, Artificial Sequence
  Synthetic
ctgcatttaccttttcctgt

SEQ ID NO: 13561 - DNA, 23 bp, Artificial Sequence
  Synthetic
actgaactattaagtgaaagtca

SEQ ID NO: 13562 - DNA, 20 bp, Artificial Sequence
  Synthetic
ttccatcacctttgtgtgct

SEQ ID NO: 13563 - DNA, 20 bp, Artificial Sequence
  Synthetic
tgggacaccattgaaaccag

SEQ ID NO: 13564 - DNA, 20 bp, Artificial Sequence
  Synthetic
gaaaacgcatttttcccact

SEQ ID NO: 13565 - DNA, 19 bp, Artificial Sequence
  Synthetic
ccccacatgatttccaggg

SEQ ID NO: 13566 - DNA, 21 bp, Artificial Sequence
  Synthetic
gctattggtggaaaaagatca

SEQ ID NO: 13567 - DNA, 22 bp, Artificial Sequence
  Synthetic
atttcaacctattaacctggga

SEQ ID NO: 13568 - DNA, 22 bp, Artificial Sequence
  Synthetic
ctaacttgtttctagtgcaaca

SEQ ID NO: 13569 - DNA, 23 bp, Artificial Sequence
  Synthetic
ttgtcacattacaattaactgca

SEQ ID NO: 13570 - DNA, 24 bp, Artificial Sequence
  Synthetic
tttctaaaacagaacctcttatgc

SEQ ID NO: 13571 - DNA, 24 bp, Artificial Sequence
  Synthetic
ctcctctgtagtttctttacaact

SEQ ID NO: 13572 - DNA, 20 bp, Artificial Sequence
  Synthetic
aaaaggacttttttgcctgg

SEQ ID NO: 13573 - DNA, 18 bp, Artificial Sequence
  Synthetic
catggtctccgtgtactc

SEQ ID NO: 13574 - DNA, 21 bp, Artificial Sequence
  Synthetic
cggaataaaacttaatgccca

SEQ ID NO: 13575 - DNA, 20 bp, Artificial Sequence
  Synthetic
tgtaaattctagcggtgccc

SEQ ID NO: 13576 - DNA, 21 bp, Artificial Sequence
  Synthetic
gggtcatgaaagtaaacgttg

SEQ ID NO: 13577 - DNA, 25 bp, Artificial Sequence
  Synthetic
cctaaatatccaaagtactactacc

SEQ ID NO: 13578 - DNA, 21 bp, Artificial Sequence
  Synthetic
aaatcagcctttctctacacc

SEQ ID NO: 13579 - DNA, 18 bp, Artificial Sequence
  Synthetic
gtcactcaagcggcattc

SEQ ID NO: 13580 - DNA, 22 bp, Artificial Sequence
  Synthetic
acaccttttgttaattaaggcg

SEQ ID NO: 13581 - DNA, 24 bp, Artificial Sequence
  Synthetic
atgtaaagtcagactattacactc

SEQ ID NO: 13582 - DNA, 25 bp, Artificial Sequence
  Synthetic
caaggtagaggcataaaaacttaat

SEQ ID NO: 13583 - DNA, 21 bp, Artificial Sequence
  Synthetic
agatttacattaggctccaca

SEQ ID NO: 13584 - DNA, 18 bp, Artificial Sequence
  Synthetic
gttccgtaaagactccgg

SEQ ID NO: 13585 - DNA, 23 bp, Artificial Sequence
  Synthetic
ccatgtggaggtataacaaaatt

SEQ ID NO: 13586 - DNA, 20 bp, Artificial Sequence
  Synthetic
ccggtacccttgtatacgct

SEQ ID NO: 13587 - DNA, 20 bp, Artificial Sequence
  Synthetic
tttctcaagacccgtccaag

SEQ ID NO: 13588 - DNA, 18 bp, Artificial Sequence
  Synthetic
gccatggggagatctgga

SEQ ID NO: 13589 - DNA, 22 bp, Artificial Sequence
  Synthetic
tccattgctcctatcaaatcag

SEQ ID NO: 13590 - DNA, 20 bp, Artificial Sequence
  Synthetic
gccttcaatcatcatgtcac

SEQ ID NO: 13591 - DNA, 22 bp, Artificial Sequence
  Synthetic
aatgaatgataacacaaatgcc

SEQ ID NO: 13592 - DNA, 21 bp, Artificial Sequence
  Synthetic
gctaagccaaaacatacaaca

SEQ ID NO: 13593 - DNA, 19 bp, Artificial Sequence
  Synthetic
ggtgaaggaccatgttctc

SEQ ID NO: 13594 - DNA, 22 bp, Artificial Sequence
  Synthetic
tggttgaaaaagtttactgagt

SEQ ID NO: 13595 - DNA, 18 bp, Artificial Sequence
  Synthetic
tggctacaaccaacagga

SEQ ID NO: 13596 - DNA, 20 bp, Artificial Sequence
  Synthetic
agtgtgtggagtacaatctc

SEQ ID NO: 13597 - DNA, 21 bp, Artificial Sequence
  Synthetic
agtagaggacacaattctgat

SEQ ID NO: 13598 - DNA, 20 bp, Artificial Sequence
  Synthetic
taaagcctatcaacacacca

SEQ ID NO: 13599 - DNA, 20 bp, Artificial Sequence
  Synthetic
agggaaaacaagagctatcg

SEQ ID NO: 13600 - DNA, 21 bp, Artificial Sequence
  Synthetic
tgatgtgatagcttcataccc

SEQ ID NO: 13601 - DNA, 22 bp, Artificial Sequence
  Synthetic
acagtgcatttctactaaatcc

SEQ ID NO: 13602 - DNA, 21 bp, Artificial Sequence
  Synthetic
aaatgacttagtgttaccagc

SEQ ID NO: 13603 - DNA, 22 bp, Artificial Sequence
  Synthetic
aagaagtcttaacagaaatggc

SEQ ID NO: 13604 - DNA, 23 bp, Artificial Sequence
  Synthetic
cgaaagtataacaaaagtccaga

SEQ ID NO: 13605 - DNA, 24 bp, Artificial Sequence
  Synthetic
atatcaaatgttatgtgatcctcc

SEQ ID NO: 13606 - DNA, 20 bp, Artificial Sequence
  Synthetic
cctgaagaggaaaacaatgg

SEQ ID NO: 13607 - DNA, 22 bp, Artificial Sequence
  Synthetic
cgggagaaagagcttattttac

SEQ ID NO: 13608 - DNA, 18 bp, Artificial Sequence
  Synthetic
ccaccacgtcccctgaaa

SEQ ID NO: 13609 - DNA, 20 bp, Artificial Sequence
  Synthetic
tattgttaaagggcacagca

SEQ ID NO: 13610 - DNA, 19 bp, Artificial Sequence
  Synthetic
gcaattgcctacctgatgt

SEQ ID NO: 13611 - DNA, 19 bp, Artificial Sequence
  Synthetic
tacagtgcctgtggaaagt

SEQ ID NO: 13612 - DNA, 18 bp, Artificial Sequence
  Synthetic
taacgccattgcagtgtt

SEQ ID NO: 13613 - DNA, 20 bp, Artificial Sequence
  Synthetic
caccacgtgacgttttaaat

SEQ ID NO: 13614 - DNA, 19 bp, Artificial Sequence
  Synthetic
tttcagagacagatgctgg

SEQ ID NO: 13615 - DNA, 23 bp, Artificial Sequence
  Synthetic
cacaaagtattagttcctaaggt

SEQ ID NO: 13616 - DNA, 21 bp, Artificial Sequence
  Synthetic
attgccacagtttgtaaatgg

SEQ ID NO: 13617 - DNA, 25 bp, Artificial Sequence
  Synthetic
tcctaatattttggataattggcag

SEQ ID NO: 13618 - DNA, 25 bp, Artificial Sequence
  Synthetic
tgtgaactatagtgaaataaactgc

SEQ ID NO: 13619 - DNA, 19 bp, Artificial Sequence
  Synthetic
tgtccacgacctactcacc

SEQ ID NO: 13620 - DNA, 21 bp, Artificial Sequence
  Synthetic
ttggtaatggtcattcagttc

SEQ ID NO: 13621 - DNA, 23 bp, Artificial Sequence
  Synthetic
aacctgataaatactcatgaagg

SEQ ID NO: 13622 - DNA, 17 bp, Artificial Sequence
  Synthetic
cgcgccttcagacctga

SEQ ID NO: 13623 - DNA, 22 bp, Artificial Sequence
  Synthetic
tcaacccatatttgatgtttct

SEQ ID NO: 13624 - DNA, 21 bp, Artificial Sequence
  Synthetic
ttgatatcagttccttgttgg

SEQ ID NO: 13625 - DNA, 21 bp, Artificial Sequence
  Synthetic
gtgagaaattgaaagaaagcg

SEQ ID NO: 13626 - DNA, 20 bp, Artificial Sequence
  Synthetic
tgtccaatcttgctatggaa

SEQ ID NO: 13627 - DNA, 24 bp, Artificial Sequence
  Synthetic
accctattgaatacagatatgaga

SEQ ID NO: 13628 - DNA, 20 bp, Artificial Sequence
  Synthetic
gccctaaaatttagcaaacg

SEQ ID NO: 13629 - DNA, 20 bp, Artificial Sequence
  Synthetic
gtgctgcctagaatttcatg

SEQ ID NO: 13630 - DNA, 22 bp, Artificial Sequence
  Synthetic
aggatattgtattagacctgca

SEQ ID NO: 13631 - DNA, 19 bp, Artificial Sequence
  Synthetic
ggacgattcaggtacagaa

SEQ ID NO: 13632 - DNA, 25 bp, Artificial Sequence
  Synthetic
gaaagtatttaggtagtccatatgt

SEQ ID NO: 13633 - DNA, 18 bp, Artificial Sequence
  Synthetic
aagggacatagaggggga

SEQ ID NO: 13634 - DNA, 20 bp, Artificial Sequence
  Synthetic
ggcagacagtcagtttaaat

SEQ ID NO: 13635 - DNA, 23 bp, Artificial Sequence
  Synthetic
ggaaatgtttttttgaaagactg

SEQ ID NO: 13636 - DNA, 18 bp, Artificial Sequence
  Synthetic
gtccgaagcaaaaggaca

SEQ ID NO: 13637 - DNA, 18 bp, Artificial Sequence
  Synthetic
gagtccaacagtcccctt

SEQ ID NO: 13638 - DNA, 20 bp, Artificial Sequence
  Synthetic
aaacatgccattgtaactgt

SEQ ID NO: 13639 - DNA, 25 bp, Artificial Sequence
  Synthetic
atggatatctgagtttattgtgtac

SEQ ID NO: 13640 - DNA, 20 bp, Artificial Sequence
  Synthetic
tcatctagtgatagcggtcc

SEQ ID NO: 13641 - DNA, 18 bp, Artificial Sequence
  Synthetic
ggggtaacaccacagttc

SEQ ID NO: 13642 - DNA, 18 bp, Artificial Sequence
  Synthetic
cctcctcctaaccctgta

SEQ ID NO: 13643 - DNA, 18 bp, Artificial Sequence
  Synthetic
acaggatggcgatatggt

SEQ ID NO: 13644 - DNA, 18 bp, Artificial Sequence
  Synthetic
ggctctttggtgtcctct

SEQ ID NO: 13645 - DNA, 18 bp, Artificial Sequence
  Synthetic
ccaagttgcttgccaagt

SEQ ID NO: 13646 - DNA, 19 bp, Artificial Sequence
  Synthetic
gtgttgtacagcctccagg

SEQ ID NO: 13647 - DNA, 20 bp, Artificial Sequence
  Synthetic
aatggacgttaagttcccgg

SEQ ID NO: 13648 - DNA, 18 bp, Artificial Sequence
  Synthetic
cgccgacctcatgggata

SEQ ID NO: 13649 - DNA, 15 bp, Artificial Sequence
  Synthetic
ttgcgtgccctgcgt

SEQ ID NO: 13650 - DNA, 19 bp, Artificial Sequence
  Synthetic
accttagttctcgcccagg

SEQ ID NO: 13651 - DNA, 19 bp, Artificial Sequence
  Synthetic
acagctcagggtgttccga

SEQ ID NO: 13652 - DNA, 20 bp, Artificial Sequence
  Synthetic
ttttgaactcgaccagaccg

SEQ ID NO: 13653 - DNA, 18 bp, Artificial Sequence
  Synthetic
ggcatgcaactggaccag

SEQ ID NO: 13654 - DNA, 20 bp, Artificial Sequence
  Synthetic
tctgcattgtctggcatgtc

SEQ ID NO: 13655 - DNA, 20 bp, Artificial Sequence
  Synthetic
tatagctaggaccgaggctg

SEQ ID NO: 13656 - DNA, 18 bp, Artificial Sequence
  Synthetic
gtgttcacgcccatggag

SEQ ID NO: 13657 - DNA, 20 bp, Artificial Sequence
  Synthetic
agaattgtggcgaagtgcag

SEQ ID NO: 13658 - DNA, 16 bp, Artificial Sequence
  Synthetic
gcgccggcatattccg

SEQ ID NO: 13659 - DNA, 20 bp, Artificial Sequence
  Synthetic
acatgtccaaggcatatggc

SEQ ID NO: 13660 - DNA, 18 bp, Artificial Sequence
  Synthetic
gccaacaacgggggaaat

SEQ ID NO: 13661 - DNA, 20 bp, Artificial Sequence
  Synthetic
gattacaaccgttccccagg

SEQ ID NO: 13662 - DNA, 20 bp, Artificial Sequence
  Synthetic
atcgggtgagaatttcccgt

SEQ ID NO: 13663 - DNA, 20 bp, Artificial Sequence
  Synthetic
gtgattgttgggagagtcgt

SEQ ID NO: 13664 - DNA, 20 bp, Artificial Sequence
  Synthetic
cattgcttccctcatgtcct

SEQ ID NO: 13665 - DNA, 18 bp, Artificial Sequence
  Synthetic
cattctatcgcccggagc

SEQ ID NO: 13666 - DNA, 20 bp, Artificial Sequence
  Synthetic
tgctgagtgacttcaagacg

SEQ ID NO: 13667 - DNA, 20 bp, Artificial Sequence
  Synthetic
acaacatcaagttcccctgc

SEQ ID NO: 13668 - DNA, 18 bp, Artificial Sequence
  Synthetic
cgaccctcgctagctagt

SEQ ID NO: 13669 - DNA, 20 bp, Artificial Sequence
  Synthetic
aagcagcaggactaccaagc

SEQ ID NO: 13670 - DNA, 20 bp, Artificial Sequence
  Synthetic
tcagactcttggtccactgt

SEQ ID NO: 13671 - DNA, 18 bp, Artificial Sequence
  Synthetic
ccccactcagccagatca

SEQ ID NO: 13672 - DNA, 20 bp, Artificial Sequence
  Synthetic
agcgggtggaatttcttctg

SEQ ID NO: 13673 - DNA, 16 bp, Artificial Sequence
  Synthetic
gcggcgctgagagact

SEQ ID NO: 13674 - DNA, 20 bp, Artificial Sequence
  Synthetic
tacctctttaactgggcggt

SEQ ID NO: 13675 - DNA, 19 bp, Artificial Sequence
  Synthetic
tcgtaatgagcaattccgg

SEQ ID NO: 13676 - DNA, 22 bp, Artificial Sequence
  Synthetic
agaaccagttaaagatctcatg

SEQ ID NO: 13677 - DNA, 21 bp, Artificial Sequence
  Synthetic
ttggatagtaagacatggaca

SEQ ID NO: 13678 - DNA, 23 bp, Artificial Sequence
  Synthetic
agttacctcataccactaaatgc

SEQ ID NO: 13679 - DNA, 20 bp, Artificial Sequence
  Synthetic
agcaatgctaggtactcatg

SEQ ID NO: 13680 - DNA, 23 bp, Artificial Sequence
  Synthetic
ttaggctgatgaaagatactcaa

SEQ ID NO: 13681 - DNA, 19 bp, Artificial Sequence
  Synthetic
aagccatgtatgttccaca

SEQ ID NO: 13682 - DNA, 18 bp, Artificial Sequence
  Synthetic
ttatcacagggcaaagct

SEQ ID NO: 13683 - DNA, 19 bp, Artificial Sequence
  Synthetic
tagtctcaacaggaggaca

SEQ ID NO: 13684 - DNA, 19 bp, Artificial Sequence
  Synthetic
atgcatacatggtcccatt

SEQ ID NO: 13685 - DNA, 21 bp, Artificial Sequence
  Synthetic
agaaatcatgatgacttggtc

SEQ ID NO: 13686 - DNA, 22 bp, Artificial Sequence
  Synthetic
agtgtgtgtattaatccatggt

SEQ ID NO: 13687 - DNA, 24 bp, Artificial Sequence
  Synthetic
ccaatggctagtttagataacaag

SEQ ID NO: 13688 - DNA, 25 bp, Artificial Sequence
  Synthetic
actttaccaacactatcttagaagt

SEQ ID NO: 13689 - DNA, 23 bp, Artificial Sequence
  Synthetic
ggagtttaacataaatccagtca

SEQ ID NO: 13690 - DNA, 21 bp, Artificial Sequence
  Synthetic
aaagtccgattagggaaaagt

SEQ ID NO: 13691 - DNA, 18 bp, Artificial Sequence
  Synthetic
tggatccacaagtgttgg

SEQ ID NO: 13692 - DNA, 18 bp, Artificial Sequence
  Synthetic
tgcaaagccgctatgtcc

SEQ ID NO: 13693 - DNA, 20 bp, Artificial Sequence
  Synthetic
accacaaaagatgctcgact

SEQ ID NO: 13694 - DNA, 18 bp, Artificial Sequence
  Synthetic
acgcgtctcggaaaaacg

SEQ ID NO: 13695 - DNA, 19 bp, Artificial Sequence
  Synthetic
aaaccaaattcttccgcgc

SEQ ID NO: 13696 - DNA, 18 bp, Artificial Sequence
  Synthetic
caccatgtccaccccatg

SEQ ID NO: 13697 - DNA, 19 bp, Artificial Sequence
  Synthetic
tactgcgactacttcaaca

SEQ ID NO: 13698 - DNA, 19 bp, Artificial Sequence
  Synthetic
ccagaggaggagttactgt

SEQ ID NO: 13699 - DNA, 22 bp, Artificial Sequence
  Synthetic
tggaagcaattagtctttctcc

SEQ ID NO: 13700 - DNA, 20 bp, Artificial Sequence
  Synthetic
cggctgcgctatatttttac

SEQ ID NO: 13701 - DNA, 25 bp, Artificial Sequence
  Synthetic
agaggtaaagtagtatcatacatga

SEQ ID NO: 13702 - DNA, 19 bp, Artificial Sequence
  Synthetic
gtcttcacctgtctccccg

SEQ ID NO: 13703 - DNA, 20 bp, Artificial Sequence
  Synthetic
agaacgtcatatcctctctg

SEQ ID NO: 13704 - DNA, 19 bp, Artificial Sequence
  Synthetic
tgcaaacagtaatcaacgc

SEQ ID NO: 13705 - DNA, 20 bp, Artificial Sequence
  Synthetic
acttgggtattggtacggga

SEQ ID NO: 13706 - DNA, 22 bp, Artificial Sequence
  Synthetic
acattggtgatccagaatacat

SEQ ID NO: 13707 - DNA, 24 bp, Artificial Sequence
  Synthetic
ggtgatttgacagacatattcaat

SEQ ID NO: 13708 - DNA, 19 bp, Artificial Sequence
  Synthetic
aaactgggtgacactgaaa

SEQ ID NO: 13709 - DNA, 22 bp, Artificial Sequence
  Synthetic
tttagtactttttcagcgagtc

SEQ ID NO: 13710 - DNA, 24 bp, Artificial Sequence
  Synthetic
cctaaaaatggattagggaatcac

SEQ ID NO: 13711 - DNA, 24 bp, Artificial Sequence
  Synthetic
ccatataagggcttaaatttttgg

SEQ ID NO: 13712 - DNA, 24 bp, Artificial Sequence
  Synthetic
ggtttctatttgaagtttgtacac

SEQ ID NO: 13713 - DNA, 18 bp, Artificial Sequence
  Synthetic
ctctagcagcggccaact

SEQ ID NO: 13714 - DNA, 20 bp, Artificial Sequence
  Synthetic
aaccctaatgtggtccaccg

SEQ ID NO: 13715 - DNA, 18 bp, Artificial Sequence
  Synthetic
cgaggctatgttccgcca

SEQ ID NO: 13716 - DNA, 18 bp, Artificial Sequence
  Synthetic
gccattggctgccacttt

SEQ ID NO: 13717 - DNA, 20 bp, Artificial Sequence
  Synthetic
gctacaaggttactgtgggc

SEQ ID NO: 13718 - DNA, 18 bp, Artificial Sequence
  Synthetic
tacgctcagtgtaggcgc

SEQ ID NO: 13719 - DNA, 17 bp, Artificial Sequence
  Synthetic
atgtcgaccccgctgaa

SEQ ID NO: 13720 - DNA, 20 bp, Artificial Sequence
  Synthetic
ttttgatgccagtcagagca

SEQ ID NO: 13721 - DNA, 17 bp, Artificial Sequence
  Synthetic
ccggccataacccacca

SEQ ID NO: 13722 - DNA, 19 bp, Artificial Sequence
  Synthetic
atacattaaccccccggcc

SEQ ID NO: 13723 - DNA, 18 bp, Artificial Sequence
  Synthetic
ccaataggccgacctgcc

SEQ ID NO: 13724 - DNA, 17 bp, Artificial Sequence
  Synthetic
cggcttcgctgctttca

SEQ ID NO: 13725 - DNA, 20 bp, Artificial Sequence
  Synthetic
ctgcggatgtatgtgagctg

SEQ ID NO: 13726 - DNA, 18 bp, Artificial Sequence
  Synthetic
gcgccacactgagaagtg

SEQ ID NO: 13727 - DNA, 20 bp, Artificial Sequence
  Synthetic
ttgtacgagctagtggaggc

SEQ ID NO: 13728 - DNA, 16 bp, Artificial Sequence
  Synthetic
ccttggcgcgcttcct

SEQ ID NO: 13729 - DNA, 16 bp, Artificial Sequence
  Synthetic
gggctggacctcgtgt

SEQ ID NO: 13730 - DNA, 20 bp, Artificial Sequence
  Synthetic
ctttgccctcgaacttgagt

SEQ ID NO: 13731 - DNA, 20 bp, Artificial Sequence
  Synthetic
tgtgctttggctttctctca

SEQ ID NO: 13732 - DNA, 20 bp, Artificial Sequence
  Synthetic
actgctagtgaccaactgct

SEQ ID NO: 13733 - DNA, 20 bp, Artificial Sequence
  Synthetic
aacaatataccaaaacggcg

SEQ ID NO: 13734 - DNA, 19 bp, Artificial Sequence
  Synthetic
taccgaaagacacagtgtt

SEQ ID NO: 13735 - DNA, 25 bp, Artificial Sequence
  Synthetic
gggttgtttattaagtttaaatcgg

SEQ ID NO: 13736 - DNA, 24 bp, Artificial Sequence
  Synthetic
gattcgggctatagagtattttac

SEQ ID NO: 13737 - DNA, 19 bp, Artificial Sequence
  Synthetic
gtggaaacgaaaaaccgtc

SEQ ID NO: 13738 - DNA, 20 bp, Artificial Sequence
  Synthetic
tgtttactgctattggacga

SEQ ID NO: 13739 - DNA, 18 bp, Artificial Sequence
  Synthetic
ggctatgttacctgcact

SEQ ID NO: 13740 - DNA, 20 bp, Artificial Sequence
  Synthetic
aggggtatgtatattagcgc

SEQ ID NO: 13741 - DNA, 21 bp, Artificial Sequence
  Synthetic
tttttcatcgtcgttacttcc

SEQ ID NO: 13742 - DNA, 21 bp, Artificial Sequence
  Synthetic
ttgctgggttatttaacatcc

SEQ ID NO: 13743 - DNA, 20 bp, Artificial Sequence
  Synthetic
cagaaactatccgacagaga

SEQ ID NO: 13744 - DNA, 18 bp, Artificial Sequence
  Synthetic
cgtttcctccttgcagac

SEQ ID NO: 13745 - DNA, 18 bp, Artificial Sequence
  Synthetic
acgaaccgtgttccgtcg

SEQ ID NO: 13746 - DNA, 18 bp, Artificial Sequence
  Synthetic
cccagaccccgagactgt

SEQ ID NO: 13747 - DNA, 18 bp, Artificial Sequence
  Synthetic
catcctcccagtgaccct

SEQ ID NO: 13748 - DNA, 17 bp, Artificial Sequence
  Synthetic
tctaggtttgccccccg

SEQ ID NO: 13749 - DNA, 24 bp, Artificial Sequence
  Synthetic
attagatcgatgggaaaaaattcg

SEQ ID NO: 13750 - DNA, 23 bp, Artificial Sequence
  Synthetic
tttagacaagatagaggaagagc

SEQ ID NO: 13751 - DNA, 19 bp, Artificial Sequence
  Synthetic
ccatcaatgaggaagctgc

SEQ ID NO: 13752 - DNA, 18 bp, Artificial Sequence
  Synthetic
gagcaagcttcacaggag

SEQ ID NO: 13753 - DNA, 21 bp, Artificial Sequence
  Synthetic
caccagggattagatatcagt

SEQ ID NO: 13754 - DNA, 21 bp, Artificial Sequence
  Synthetic
ccatcctgataaatggacagt

SEQ ID NO: 13755 - DNA, 20 bp, Artificial Sequence
  Synthetic
atatgcaagaatgaggggtg

SEQ ID NO: 13756 - DNA, 25 bp, Artificial Sequence
  Synthetic
tcaggaaagtactatttttagatgg

SEQ ID NO: 13757 - DNA, 22 bp, Artificial Sequence
  Synthetic
tagaagcagaagttattccagc

SEQ ID NO: 13758 - DNA, 18 bp, Artificial Sequence
  Synthetic
ggaaagctaggggatggt

SEQ ID NO: 13759 - DNA, 21 bp, Artificial Sequence
  Synthetic
attaggacacatagttagccc

SEQ ID NO: 13760 - DNA, 24 bp, Artificial Sequence
  Synthetic
cttagggcaacatatctatgaaac

SEQ ID NO: 13761 - DNA, 22 bp, Artificial Sequence
  Synthetic
tgtagtgctacagaaaaattgt

SEQ ID NO: 13762 - DNA, 20 bp, Artificial Sequence
  Synthetic
tggaacaggaccatgtacaa

SEQ ID NO: 13763 - DNA, 18 bp, Artificial Sequence
  Synthetic
caatgtatgcccctccca

SEQ ID NO: 13764 - DNA, 19 bp, Artificial Sequence
  Synthetic
caatgacgctgacggtaca

SEQ ID NO: 13765 - DNA, 20 bp, Artificial Sequence
  Synthetic
tggatggcctactgtaaggg

SEQ ID NO: 13766 - DNA, 20 bp, Artificial Sequence
  Synthetic
tagcatttcatcacgtggcc

SEQ ID NO: 13767 - DNA, 18 bp, Artificial Sequence
  Synthetic
caacgacatgcagtggct

SEQ ID NO: 13768 - DNA, 19 bp, Artificial Sequence
  Synthetic
gtttaggcgcaggtttccg

SEQ ID NO: 13769 - DNA, 16 bp, Artificial Sequence
  Synthetic
gagccggtcagcagct

SEQ ID NO: 13770 - DNA, 18 bp, Artificial Sequence
  Synthetic
cttcgagggcgtagtggc

SEQ ID NO: 13771 - DNA, 17 bp, Artificial Sequence
  Synthetic
gcgaactccaccgaggt

SEQ ID NO: 13772 - DNA, 20 bp, Artificial Sequence
  Synthetic
acacaacaaactccccctcg

SEQ ID NO: 13773 - DNA, 20 bp, Artificial Sequence
  Synthetic
taacgtacatgttctgcgcc

SEQ ID NO: 13774 - DNA, 18 bp, Artificial Sequence
  Synthetic
agtacatccccgcgtacg

SEQ ID NO: 13775 - DNA, 18 bp, Artificial Sequence
  Synthetic
ggacctccgggacttcga

SEQ ID NO: 13776 - DNA, 20 bp, Artificial Sequence
  Synthetic
tcctgaacacgctaatgtgc

SEQ ID NO: 13777 - DNA, 19 bp, Artificial Sequence
  Synthetic
ctctcctccacccaaacga

SEQ ID NO: 13778 - DNA, 16 bp, Artificial Sequence
  Synthetic
accgcgtcctccgaca

SEQ ID NO: 13779 - DNA, 18 bp, Artificial Sequence
  Synthetic
cagacggaacagctccca

SEQ ID NO: 13780 - DNA, 18 bp, Artificial Sequence
  Synthetic
atgggcgtaaagacgggc

SEQ ID NO: 13781 - DNA, 18 bp, Artificial Sequence
  Synthetic
ctaaggcccaccgtcacg

SEQ ID NO: 13782 - DNA, 16 bp, Artificial Sequence
  Synthetic
tgggcggtcagcgaga

SEQ ID NO: 13783 - DNA, 18 bp, Artificial Sequence
  Synthetic
cgctaaccagcagctcca

SEQ ID NO: 13784 - DNA, 16 bp, Artificial Sequence
  Synthetic
cacgatctggcgctgc

SEQ ID NO: 13785 - DNA, 19 bp, Artificial Sequence
  Synthetic
catcatctctaagcgcgcg

SEQ ID NO: 13786 - DNA, 19 bp, Artificial Sequence
  Synthetic
tacagcgtcctgaacacgt

SEQ ID NO: 13787 - DNA, 16 bp, Artificial Sequence
  Synthetic
cgggtggaccacgtca

SEQ ID NO: 13788 - DNA, 18 bp, Artificial Sequence
  Synthetic
gccagcgcgtgtatgagt

SEQ ID NO: 13789 - DNA, 19 bp, Artificial Sequence
  Synthetic
cggaaagaccactagcccg

SEQ ID NO: 13790 - DNA, 16 bp, Artificial Sequence
  Synthetic
ccaggggcaggacgaa

SEQ ID NO: 13791 - DNA, 18 bp, Artificial Sequence
  Synthetic
cttgggggattcgcaggc

SEQ ID NO: 13792 - DNA, 20 bp, Artificial Sequence
  Synthetic
taggtgataaacagcgggcg

SEQ ID NO: 13793 - DNA, 17 bp, Artificial Sequence
  Synthetic
cagggcgttgtagtgcg

SEQ ID NO: 13794 - DNA, 17 bp, Artificial Sequence
  Synthetic
cgccggccaattcttcc

SEQ ID NO: 13795 - DNA, 19 bp, Artificial Sequence
  Synthetic
gtcctgtctctgcagtcgt

SEQ ID NO: 13796 - DNA, 16 bp, Artificial Sequence
  Synthetic
tgcttcggcggctcct

SEQ ID NO: 13797 - DNA, 18 bp, Artificial Sequence
  Synthetic
gtgtagacctccaggggc

SEQ ID NO: 13798 - DNA, 17 bp, Artificial Sequence
  Synthetic
ccaatcagcgcccgaac

SEQ ID NO: 13799 - DNA, 20 bp, Artificial Sequence
  Synthetic
acgcgatggtctctatgtcc

SEQ ID NO: 13800 - DNA, 17 bp, Artificial Sequence
  Synthetic
tttgccccccacaaccc

SEQ ID NO: 13801 - DNA, 17 bp, Artificial Sequence
  Synthetic
tggtaccgcctcaagcc

SEQ ID NO: 13802 - DNA, 18 bp, Artificial Sequence
  Synthetic
agacgaactcgaaggcgg

SEQ ID NO: 13803 - DNA, 17 bp, Artificial Sequence
  Synthetic
catgaacgactgggccg

SEQ ID NO: 13804 - DNA, 16 bp, Artificial Sequence
  Synthetic
acgacgtcaaggggcg

SEQ ID NO: 13805 - DNA, 18 bp, Artificial Sequence
  Synthetic
cacaacaggtgggtgctt

SEQ ID NO: 13806 - DNA, 16 bp, Artificial Sequence
  Synthetic
gatgcgacgcctgtgc

SEQ ID NO: 13807 - DNA, 16 bp, Artificial Sequence
  Synthetic
ggcgttcaacgacgcc

SEQ ID NO: 13808 - DNA, 16 bp, Artificial Sequence
  Synthetic
aacccacgccccagtg

SEQ ID NO: 13809 - DNA, 16 bp, Artificial Sequence
  Synthetic
acagcgctccgatcgg

SEQ ID NO: 13810 - DNA, 17 bp, Artificial Sequence
  Synthetic
caaccaccttcgctccc

SEQ ID NO: 13811 - DNA, 17 bp, Artificial Sequence
  Synthetic
cagctcggcgatggtca

SEQ ID NO: 13812 - DNA, 17 bp, Artificial Sequence
  Synthetic
ccttgtcgcggtggttc

SEQ ID NO: 13813 - DNA, 17 bp, Artificial Sequence
  Synthetic
cgatggcgtccaccaga

SEQ ID NO: 13814 - DNA, 17 bp, Artificial Sequence
  Synthetic
tccagacggacagcacc

SEQ ID NO: 13815 - DNA, 18 bp, Artificial Sequence
  Synthetic
actgcgatcacgaagggc

SEQ ID NO: 13816 - DNA, 16 bp, Artificial Sequence
  Synthetic
tcctgcgccgacaaga

SEQ ID NO: 13817 - DNA, 17 bp, Artificial Sequence
  Synthetic
cccatgttttccgcggc

SEQ ID NO: 13818 - DNA, 17 bp, Artificial Sequence
  Synthetic
ctgcgcttcaagcacgg

SEQ ID NO: 13819 - DNA, 17 bp, Artificial Sequence
  Synthetic
gacacccagatgcgcct

SEQ ID NO: 13820 - DNA, 18 bp, Artificial Sequence
  Synthetic
acacgaaaatcacccgcc

SEQ ID NO: 13821 - DNA, 20 bp, Artificial Sequence
  Synthetic
tcgaacctgtttttacgggc

SEQ ID NO: 13822 - DNA, 16 bp, Artificial Sequence
  Synthetic
catgcccagcccccaa

SEQ ID NO: 13823 - DNA, 16 bp, Artificial Sequence
  Synthetic
gcggaaggaaacgggc

SEQ ID NO: 13824 - DNA, 16 bp, Artificial Sequence
  Synthetic
ccaccggggtgttgca

SEQ ID NO: 13825 - DNA, 16 bp, Artificial Sequence
  Synthetic
gtcgccccatgcacgt

SEQ ID NO: 13826 - DNA, 16 bp, Artificial Sequence
  Synthetic
gtttccgggagcgctg

SEQ ID NO: 13827 - DNA, 16 bp, Artificial Sequence
  Synthetic
tgggactccgcgtcgt

SEQ ID NO: 13828 - DNA, 20 bp, Artificial Sequence
  Synthetic
cccgatcactgtgtactacg

SEQ ID NO: 13829 - DNA, 18 bp, Artificial Sequence
  Synthetic
cggtctgtatgtcctgcg

SEQ ID NO: 13830 - DNA, 18 bp, Artificial Sequence
  Synthetic
gctggttgggtgggggta

SEQ ID NO: 13831 - DNA, 20 bp, Artificial Sequence
  Synthetic
acttatcctggggagaaggg

SEQ ID NO: 13832 - DNA, 18 bp, Artificial Sequence
  Synthetic
gatctggaggggaacttg

SEQ ID NO: 13833 - DNA, 20 bp, Artificial Sequence
  Synthetic
tcagtgtccattttgccagg

SEQ ID NO: 13834 - DNA, 20 bp, Artificial Sequence
  Synthetic
gacaaaacaacatcacagca

SEQ ID NO: 13835 - DNA, 24 bp, Artificial Sequence
  Synthetic
tgctgctttattcttctatcatag

SEQ ID NO: 13836 - DNA, 18 bp, Artificial Sequence
  Synthetic
agacactacaagacagcg

SEQ ID NO: 13837 - DNA, 23 bp, Artificial Sequence
  Synthetic
cttaacaaatttttggatggaca

SEQ ID NO: 13838 - DNA, 18 bp, Artificial Sequence
  Synthetic
ggcagccagttaccctaa

SEQ ID NO: 13839 - DNA, 18 bp, Artificial Sequence
  Synthetic
cagcgccctggtaaatgt

SEQ ID NO: 13840 - DNA, 22 bp, Artificial Sequence
  Synthetic
caagattcctaaaaacattggg

SEQ ID NO: 13841 - DNA, 17 bp, Artificial Sequence
  Synthetic
gggcattggcacaggac

SEQ ID NO: 13842 - DNA, 20 bp, Artificial Sequence
  Synthetic
ccgtaggtgacaatgctgaa

SEQ ID NO: 13843 - DNA, 19 bp, Artificial Sequence
  Synthetic
cgtagtgacacagacctgc

SEQ ID NO: 13844 - DNA, 20 bp, Artificial Sequence
  Synthetic
gaactagatgtactgggtga

SEQ ID NO: 13845 - DNA, 20 bp, Artificial Sequence
  Synthetic
atacaacggacattgaacac

SEQ ID NO: 13846 - DNA, 20 bp, Artificial Sequence
  Synthetic
gattgaggtttctaggggac

SEQ ID NO: 13847 - DNA, 20 bp, Artificial Sequence
  Synthetic
aagcagatgacaaatgtcct

SEQ ID NO: 13848 - DNA, 22 bp, Artificial Sequence
  Synthetic
ctaactttaccatcagtgttcc

SEQ ID NO: 13849 - DNA, 20 bp, Artificial Sequence
  Synthetic
aaatgtccctctaaggatgc

SEQ ID NO: 13850 - DNA, 20 bp, Artificial Sequence
  Synthetic
ccaacattggcaaacgtctc

SEQ ID NO: 13851 - DNA, 23 bp, Artificial Sequence
  Synthetic
tatgccaattaatttactgtgtg

SEQ ID NO: 13852 - DNA, 22 bp, Artificial Sequence
  Synthetic
cgaaagtatgtgataagtccac

SEQ ID NO: 13853 - DNA, 19 bp, Artificial Sequence
  Synthetic
tggaaacacaacagacact

SEQ ID NO: 13854 - DNA, 25 bp, Artificial Sequence
  Synthetic
tataggaattgtcaaatatctggtg

SEQ ID NO: 13855 - DNA, 23 bp, Artificial Sequence
  Synthetic
tattcagcaagttaaaacaacca

SEQ ID NO: 13856 - DNA, 22 bp, Artificial Sequence
  Synthetic
taagggaactattcataccaga

SEQ ID NO: 13857 - DNA, 22 bp, Artificial Sequence
  Synthetic
gaatctggaaaattgtatctgc

SEQ ID NO: 13858 - DNA, 25 bp, Artificial Sequence
  Synthetic
atcctaatagagaacgtttagtctg

SEQ ID NO: 13859 - DNA, 25 bp, Artificial Sequence
  Synthetic
ctctttacaatgtatattttgtggc

SEQ ID NO: 13860 - DNA, 21 bp, Artificial Sequence
  Synthetic
atggcaatgttagatcttgtt

SEQ ID NO: 13861 - DNA, 18 bp, Artificial Sequence
  Synthetic
acacctgttgtcacactt

SEQ ID NO: 13862 - DNA, 23 bp, Artificial Sequence
  Synthetic
atgcgtagattttaattctctgg

SEQ ID NO: 13863 - DNA, 21 bp, Artificial Sequence
  Synthetic
ttaaactttcaggacagtgga

SEQ ID NO: 13864 - DNA, 22 bp, Artificial Sequence
  Synthetic
atatggtgagtttccatcatgg

SEQ ID NO: 13865 - DNA, 25 bp, Artificial Sequence
  Synthetic
tttccaaataaattacctgtcactg

SEQ ID NO: 13866 - DNA, 20 bp, Artificial Sequence
  Synthetic
gggaacccaccaaaaggaaa

SEQ ID NO: 13867 - DNA, 18 bp, Artificial Sequence
  Synthetic
gccaactgctgtcccaac

SEQ ID NO: 13868 - DNA, 20 bp, Artificial Sequence
  Synthetic
ttaaacctccaaaacacacg

SEQ ID NO: 13869 - DNA, 18 bp, Artificial Sequence
  Synthetic
ggtccggaagaggatcag

SEQ ID NO: 13870 - DNA, 18 bp, Artificial Sequence
  Synthetic
cttcctgatccagcactt

SEQ ID NO: 13871 - DNA, 22 bp, Artificial Sequence
  Synthetic
tccggactttaatgtatttgtg

SEQ ID NO: 13872 - DNA, 21 bp, Artificial Sequence
  Synthetic
tttgaatttgaaaatcccgcg

SEQ ID NO: 13873 - DNA, 19 bp, Artificial Sequence
  Synthetic
gaccctgatgtgtctgatg

SEQ ID NO: 13874 - DNA, 20 bp, Artificial Sequence
  Synthetic
gagggtaagaggtatccaaa

SEQ ID NO: 13875 - DNA, 20 bp, Artificial Sequence
  Synthetic
tgattgtcctccaattcagc

SEQ ID NO: 13876 - DNA, 22 bp, Artificial Sequence
  Synthetic
actgtgaactagtatactgtga

SEQ ID NO: 13877 - DNA, 18 bp, Artificial Sequence
  Synthetic
cctagggctactttccga

SEQ ID NO: 13878 - DNA, 22 bp, Artificial Sequence
  Synthetic
aaggaatacaaaagactatgcc

SEQ ID NO: 13879 - DNA, 18 bp, Artificial Sequence
  Synthetic
ggcccatgctactcaaga

SEQ ID NO: 13880 - DNA, 23 bp, Artificial Sequence
  Synthetic
tctctgataatcttgaagcattt

SEQ ID NO: 13881 - DNA, 21 bp, Artificial Sequence
  Synthetic
gtcatggaatagcgataaggg

SEQ ID NO: 13882 - DNA, 20 bp, Artificial Sequence
  Synthetic
ctaggctttctgctaggtat

SEQ ID NO: 13883 - DNA, 25 bp, Artificial Sequence
  Synthetic
aatgatctagaaataaagctggaag

SEQ ID NO: 13884 - DNA, 18 bp, Artificial Sequence
  Synthetic
taagcgccctaaaacgaa

SEQ ID NO: 13885 - DNA, 20 bp, Artificial Sequence
  Synthetic
ctttcttacagggtgttcca

SEQ ID NO: 13886 - DNA, 19 bp, Artificial Sequence
  Synthetic
cacaggaaactctgacaga

SEQ ID NO: 13887 - DNA, 19 bp, Artificial Sequence
  Synthetic
cggcccacaatcttcgatc

SEQ ID NO: 13888 - DNA, 24 bp, Artificial Sequence
  Synthetic
gaatttgtatagacactgtaaagc

SEQ ID NO: 13889 - DNA, 19 bp, Artificial Sequence
  Synthetic
cagtccctatgaacctcct

SEQ ID NO: 13890 - DNA, 23 bp, Artificial Sequence
  Synthetic
gttacattcaacaaatcagaaca

SEQ ID NO: 13891 - DNA, 19 bp, Artificial Sequence
  Synthetic
ttagtaccagaagcggtac

SEQ ID NO: 13892 - DNA, 21 bp, Artificial Sequence
  Synthetic
tgttttgatgttttgcagatg

SEQ ID NO: 13893 - DNA, 20 bp, Artificial Sequence
  Synthetic
ccaatatcgagtgtttaggc

SEQ ID NO: 13894 - DNA, 21 bp, Artificial Sequence
  Synthetic
tattgggatgttgctaaacca

SEQ ID NO: 13895 - DNA, 24 bp, Artificial Sequence
  Synthetic
gatgtttatggcgataaatgtttc

SEQ ID NO: 13896 - DNA, 21 bp, Artificial Sequence
  Synthetic
gaatggcaattagcttttgtg

SEQ ID NO: 13897 - DNA, 20 bp, Artificial Sequence
  Synthetic
gctggacaggtagtattgtc

SEQ ID NO: 13898 - DNA, 18 bp, Artificial Sequence
  Synthetic
tcgttggatgatgctgaa

SEQ ID NO: 13899 - DNA, 18 bp, Artificial Sequence
  Synthetic
tggagccagcaaatcctt

SEQ ID NO: 13900 - DNA, 23 bp, Artificial Sequence
  Synthetic
agtttaacagctttagatgactt

SEQ ID NO: 13901 - DNA, 22 bp, Artificial Sequence
  Synthetic
gtggaattgtagaagatgaagc

SEQ ID NO: 13902 - DNA, 18 bp, Artificial Sequence
  Synthetic
ggtcctctccagtctctc

SEQ ID NO: 13903 - DNA, 21 bp, Artificial Sequence
  Synthetic
tttggcaatttaggaataggg

SEQ ID NO: 13904 - DNA, 21 bp, Artificial Sequence
  Synthetic
agaagaaattgaattaggccc

SEQ ID NO: 13905 - DNA, 19 bp, Artificial Sequence
  Synthetic
gatcgcctcttaacagtgg

SEQ ID NO: 13906 - DNA, 23 bp, Artificial Sequence
  Synthetic
aattagttgatgtagaaaaccct

SEQ ID NO: 13907 - DNA, 25 bp, Artificial Sequence
  Synthetic
tccttataaagacctaaagttttgg

SEQ ID NO: 13908 - DNA, 22 bp, Artificial Sequence
  Synthetic
atttccatcaagcaatactgac

SEQ ID NO: 13909 - DNA, 21 bp, Artificial Sequence
  Synthetic
cgacaaaacagtcaaatcaac

SEQ ID NO: 13910 - DNA, 19 bp, Artificial Sequence
  Synthetic
cgtccgtagaaatgaaggg

SEQ ID NO: 13911 - DNA, 21 bp, Artificial Sequence
  Synthetic
aagaagatctgtggatacctc

SEQ ID NO: 13912 - DNA, 20 bp, Artificial Sequence
  Synthetic
ccctccactagtttggtcga

SEQ ID NO: 13913 - DNA, 20 bp, Artificial Sequence
  Synthetic
tccatctaagttcacagagc

SEQ ID NO: 13914 - DNA, 19 bp, Artificial Sequence
  Synthetic
aaagctacttccaaaggct

SEQ ID NO: 13915 - DNA, 19 bp, Artificial Sequence
  Synthetic
atccaggagatcgaggtat

SEQ ID NO: 13916 - DNA, 18 bp, Artificial Sequence
  Synthetic
acccactggatcttctcc

SEQ ID NO: 13917 - DNA, 21 bp, Artificial Sequence
  Synthetic
caaattacctcataccactgc

SEQ ID NO: 13918 - DNA, 21 bp, Artificial Sequence
  Synthetic
gtggtccagaagatagaaagg

SEQ ID NO: 13919 - DNA, 19 bp, Artificial Sequence
  Synthetic
gatgtagagagcttcctcg

SEQ ID NO: 13920 - DNA, 18 bp, Artificial Sequence
  Synthetic
aggcaatgtatgtgcctc

SEQ ID NO: 13921 - DNA, 21 bp, Artificial Sequence
  Synthetic
tgatgttcataccacgattgt

SEQ ID NO: 13922 - DNA, 18 bp, Artificial Sequence
  Synthetic
ctactggagcacatggag

SEQ ID NO: 13923 - DNA, 20 bp, Artificial Sequence
  Synthetic
tagatgtatacatggcccca

SEQ ID NO: 13924 - DNA, 18 bp, Artificial Sequence
  Synthetic
aagccagggaaaagcttg

SEQ ID NO: 13925 - DNA, 19 bp, Artificial Sequence
  Synthetic
aaagaactgagccagtgtg

SEQ ID NO: 13926 - DNA, 25 bp, Artificial Sequence
  Synthetic
gttgtttactagtaactttgtgttg

SEQ ID NO: 13927 - DNA, 18 bp, Artificial Sequence
  Synthetic
caccacagagaaagggga

SEQ ID NO: 13928 - DNA, 21 bp, Artificial Sequence
  Synthetic
ctactttagtagtgcactcca

SEQ ID NO: 13929 - DNA, 25 bp, Artificial Sequence
  Synthetic
attgtatctaaacaaaaggtgagag

SEQ ID NO: 13930 - DNA, 18 bp, Artificial Sequence
  Synthetic
attttgtgcgacaatgct

SEQ ID NO: 13931 - DNA, 23 bp, Artificial Sequence
  Synthetic
gaagtaaatgctagaattgaacc

SEQ ID NO: 13932 - DNA, 19 bp, Artificial Sequence
  Synthetic
gctggatagagcttgatga

SEQ ID NO: 13933 - DNA, 20 bp, Artificial Sequence
  Synthetic
atcccacttaaggaatgaca

SEQ ID NO: 13934 - DNA, 18 bp, Artificial Sequence
  Synthetic
cgttgtctcctccagtca

SEQ ID NO: 13935 - DNA, 18 bp, Artificial Sequence
  Synthetic
cactcgcgagatactgac

SEQ ID NO: 13936 - DNA, 21 bp, Artificial Sequence
  Synthetic
caagcacagtccattatccaa

SEQ ID NO: 13937 - DNA, 21 bp, Artificial Sequence
  Synthetic
acatcagagtcacagttaacg

SEQ ID NO: 13938 - DNA, 24 bp, Artificial Sequence
  Synthetic
gctgctagaaatattgttagaaga

SEQ ID NO: 13939 - DNA, 19 bp, Artificial Sequence
  Synthetic
aggcaacctccaaacattg

SEQ ID NO: 13940 - DNA, 18 bp, Artificial Sequence
  Synthetic
aaaccagcggctaaatcc

SEQ ID NO: 13941 - DNA, 18 bp, Artificial Sequence
  Synthetic
cagaggggaaacgtactc

SEQ ID NO: 13942 - DNA, 19 bp, Artificial Sequence
  Synthetic
cgtactgggaacatttgac

SEQ ID NO: 13943 - DNA, 23 bp, Artificial Sequence
  Synthetic
accattgcatcaaatttacatga

SEQ ID NO: 13944 - DNA, 23 bp, Artificial Sequence
  Synthetic
attgtatggatgacatagagact

SEQ ID NO: 13945 - DNA, 23 bp, Artificial Sequence
  Synthetic
aagaaagacaaagtaaaaggaga

SEQ ID NO: 13946 - DNA, 18 bp, Artificial Sequence
  Synthetic
aacagcaacggtcggagg

SEQ ID NO: 13947 - DNA, 18 bp, Artificial Sequence
  Synthetic
tgctgaggaagttggaag

SEQ ID NO: 13948 - DNA, 23 bp, Artificial Sequence
  Synthetic
ttggaagtattctttatttgggt

SEQ ID NO: 13949 - DNA, 18 bp, Artificial Sequence
  Synthetic
gtcctggtttgcctacag

SEQ ID NO: 13950 - DNA, 24 bp, Artificial Sequence
  Synthetic
cagcaatattttacctcttactcc

SEQ ID NO: 13951 - DNA, 22 bp, Artificial Sequence
  Synthetic
tctttattttcatgccaattcg

SEQ ID NO: 13952 - DNA, 18 bp, Artificial Sequence
  Synthetic
cctctaggcataggaacg

SEQ ID NO: 13953 - DNA, 19 bp, Artificial Sequence
  Synthetic
tcactcccctgtgaggaac

SEQ ID NO: 13954 - DNA, 20 bp, Artificial Sequence
  Synthetic
aaagaaacaccaaccgtcgc

SEQ ID NO: 13955 - DNA, 18 bp, Artificial Sequence
  Synthetic
tagtgctggaagcggagg

SEQ ID NO: 13956 - DNA, 20 bp, Artificial Sequence
  Synthetic
atgatgatgaactggtcgcc

SEQ ID NO: 13957 - DNA, 20 bp, Artificial Sequence
  Synthetic
accgcagcaatttcaactcc

SEQ ID NO: 13958 - DNA, 19 bp, Artificial Sequence
  Synthetic
tcatgctagagagcctgcg

SEQ ID NO: 13959 - DNA, 20 bp, Artificial Sequence
  Synthetic
gtcccctcctcttttcaacc

SEQ ID NO: 13960 - DNA, 17 bp, Artificial Sequence
  Synthetic
cggcaaggtcgaagcag

SEQ ID NO: 13961 - DNA, 17 bp, Artificial Sequence
  Synthetic
gccgtagctgttgagcc

SEQ ID NO: 13962 - DNA, 20 bp, Artificial Sequence
  Synthetic
aacagccactcagagtttcc

SEQ ID NO: 13963 - DNA, 20 bp, Artificial Sequence
  Synthetic
ccatcagggcacgtagtagg

SEQ ID NO: 13964 - DNA, 20 bp, Artificial Sequence
  Synthetic
atatgggaagtttctggccg

SEQ ID NO: 13965 - DNA, 20 bp, Artificial Sequence
  Synthetic
ttaggtctcaatgctgtcgc

SEQ ID NO: 13966 - DNA, 19 bp, Artificial Sequence
  Synthetic
aaagccgggggtgtatagg

SEQ ID NO: 13967 - DNA, 20 bp, Artificial Sequence
  Synthetic
gggacgtgatgtggaaatgt

SEQ ID NO: 13968 - DNA, 20 bp, Artificial Sequence
  Synthetic
gctctaagcacatcccctac

SEQ ID NO: 13969 - DNA, 19 bp, Artificial Sequence
  Synthetic
tcaacatattgggcggctg

SEQ ID NO: 13970 - DNA, 19 bp, Artificial Sequence
  Synthetic
atagcctttgcctccaggg

SEQ ID NO: 13971 - DNA, 19 bp, Artificial Sequence
  Synthetic
gtgtgtcacaccacttgct

SEQ ID NO: 13972 - DNA, 20 bp, Artificial Sequence
  Synthetic
aggatacatcgttatgcgcc

SEQ ID NO: 13973 - DNA, 20 bp, Artificial Sequence
  Synthetic
tcctcgactcgtttgatcct

SEQ ID NO: 13974 - DNA, 20 bp, Artificial Sequence
  Synthetic
caacagctggctgataaggt

SEQ ID NO: 13975 - DNA, 20 bp, Artificial Sequence
  Synthetic
agtcttctgtgtagacccgt

SEQ ID NO: 13976 - DNA, 18 bp, Artificial Sequence
  Synthetic
ccctcacagaacgcctct

SEQ ID NO: 13977 - DNA, 20 bp, Artificial Sequence
  Synthetic
aacatcatgctcgtccaacg

SEQ ID NO: 13978 - DNA, 20 bp, Artificial Sequence
  Synthetic
tggtatggcagctttttccc

SEQ ID NO: 13979 - DNA, 19 bp, Artificial Sequence
  Synthetic
gtcaaaacagaaagacgcc

SEQ ID NO: 13980 - DNA, 20 bp, Artificial Sequence
  Synthetic
gattccattgggatcagact

SEQ ID NO: 13981 - DNA, 20 bp, Artificial Sequence
  Synthetic
tctgctgaattgttcactct

SEQ ID NO: 13982 - DNA, 23 bp, Artificial Sequence
  Synthetic
gtaaaagcaaactacaatgatgc

SEQ ID NO: 13983 - DNA, 22 bp, Artificial Sequence
  Synthetic
gtattaatgatggcatgctttg

SEQ ID NO: 13984 - DNA, 21 bp, Artificial Sequence
  Synthetic
acaccctttctttttcgaatt

SEQ ID NO: 13985 - DNA, 18 bp, Artificial Sequence
  Synthetic
aacgtttggggtatcgtt

SEQ ID NO: 13986 - DNA, 18 bp, Artificial Sequence
  Synthetic
gaggaggagcagcaagaa

SEQ ID NO: 13987 - DNA, 25 bp, Artificial Sequence
  Synthetic
actttatcatctagaaagcaaactc

SEQ ID NO: 13988 - DNA, 22 bp, Artificial Sequence
  Synthetic
aaaattcgtagtgtacctgttg

SEQ ID NO: 13989 - DNA, 22 bp, Artificial Sequence
  Synthetic
agatagtaaacatagacagcct

SEQ ID NO: 13990 - DNA, 18 bp, Artificial Sequence
  Synthetic
cacgtcagcaaggcatta

SEQ ID NO: 13991 - DNA, 18 bp, Artificial Sequence
  Synthetic
tacagagccatcagggga

SEQ ID NO: 13992 - DNA, 20 bp, Artificial Sequence
  Synthetic
tctgtctagacttagagcgt

SEQ ID NO: 13993 - DNA, 19 bp, Artificial Sequence
  Synthetic
ggtacaggaggttctatgg

SEQ ID NO: 13994 - DNA, 20 bp, Artificial Sequence
  Synthetic
aatcaaagggaggagtttca

SEQ ID NO: 13995 - DNA, 18 bp, Artificial Sequence
  Synthetic
gttgatcagcttgccgaa

SEQ ID NO: 13996 - DNA, 23 bp, Artificial Sequence
  Synthetic
ttcattctgctactgatagactc

SEQ ID NO: 13997 - DNA, 23 bp, Artificial Sequence
  Synthetic
atggcctgatttacttaaaatgt

SEQ ID NO: 13998 - DNA, 25 bp, Artificial Sequence
  Synthetic
aacattatctcagacatgtagaaga

SEQ ID NO: 13999 - DNA, 24 bp, Artificial Sequence
  Synthetic
gattactactgtgaaactactctg

SEQ ID NO: 14000 - DNA, 19 bp, Artificial Sequence
  Synthetic
cctcaatgggaatggagat

SEQ ID NO: 14001 - DNA, 18 bp, Artificial Sequence
  Synthetic
ttgccgcgagtatcattg

SEQ ID NO: 14002 - DNA, 19 bp, Artificial Sequence
  Synthetic
ggtacgggatgtaatggat

SEQ ID NO: 14003 - DNA, 23 bp, Artificial Sequence
  Synthetic
aaaaaggagattatttgaaagcg

SEQ ID NO: 14004 - DNA, 18 bp, Artificial Sequence
  Synthetic
gaggacgaggacaaggaa

SEQ ID NO: 14005 - DNA, 20 bp, Artificial Sequence
  Synthetic
acattacaagacgttagcct

SEQ ID NO: 14006 - DNA, 21 bp, Artificial Sequence
  Synthetic
aacatctgtaccttccattcc

SEQ ID NO: 14007 - DNA, 21 bp, Artificial Sequence
  Synthetic
tttttcagatgtctctttggc

SEQ ID NO: 14008 - DNA, 20 bp, Artificial Sequence
  Synthetic
aagtttggttttcctgacac

SEQ ID NO: 14009 - DNA, 18 bp, Artificial Sequence
  Synthetic
aaggatccccatgtacca

SEQ ID NO: 14010 - DNA, 25 bp, Artificial Sequence
  Synthetic
ttagacatttatttaatagggctgg

SEQ ID NO: 14011 - DNA, 24 bp, Artificial Sequence
  Synthetic
ccccttaaaaaatacactttttgg

SEQ ID NO: 14012 - DNA, 18 bp, Artificial Sequence
  Synthetic
cggttgcatgctttttgg

SEQ ID NO: 14013 - DNA, 22 bp, Artificial Sequence
  Synthetic
caaaagagaactgcaatgtttc

SEQ ID NO: 14014 - DNA, 22 bp, Artificial Sequence
  Synthetic
gtgtattaactgtcaaaagcca

SEQ ID NO: 14015 - DNA, 23 bp, Artificial Sequence
  Synthetic
actgttatgagcaattaaatgac

SEQ ID NO: 14016 - DNA, 20 bp, Artificial Sequence
  Synthetic
gcttcaatccaatgatcgtc

SEQ ID NO: 14017 - DNA, 21 bp, Artificial Sequence
  Synthetic
ggtgaatagtatctgcaacac

SEQ ID NO: 14018 - DNA, 18 bp, Artificial Sequence
  Synthetic
ggtgctagcagaacttca

SEQ ID NO: 14019 - DNA, 21 bp, Artificial Sequence
  Synthetic
agaacttgatgaaatagggga

SEQ ID NO: 14020 - DNA, 21 bp, Artificial Sequence
  Synthetic
atttgaggaatgataccgacg

SEQ ID NO: 14021 - DNA, 22 bp, Artificial Sequence
  Synthetic
cagattgagagcatgattgaag

SEQ ID NO: 14022 - DNA, 22 bp, Artificial Sequence
  Synthetic
gattacaacacatttccagagg

SEQ ID NO: 14023 - DNA, 18 bp, Artificial Sequence
  Synthetic
cgaggagcatctgtgaga

SEQ ID NO: 14024 - DNA, 19 bp, Artificial Sequence
  Synthetic
tgttctcaaacaagatggc

SEQ ID NO: 14025 - DNA, 18 bp, Artificial Sequence
  Synthetic
atctcgggcagaagaagt

SEQ ID NO: 14026 - DNA, 20 bp, Artificial Sequence
  Synthetic
agtgtccgggattaatgagt

SEQ ID NO: 14027 - DNA, 18 bp, Artificial Sequence
  Synthetic
agggccaaacctgtacaa

SEQ ID NO: 14028 - DNA, 21 bp, Artificial Sequence
  Synthetic
gttctaacacgaacgtttacg

SEQ ID NO: 14029 - DNA, 18 bp, Artificial Sequence
  Synthetic
ttgcttgttgtcagtgct

SEQ ID NO: 14030 - DNA, 20 bp, Artificial Sequence
  Synthetic
agagcagccaaatataggtg

SEQ ID NO: 14031 - DNA, 18 bp, Artificial Sequence
  Synthetic
ctgtgtgccattcgacac

SEQ ID NO: 14032 - DNA, 18 bp, Artificial Sequence
  Synthetic
cagaacgagcaggaccta

SEQ ID NO: 14033 - DNA, 18 bp, Artificial Sequence
  Synthetic
gtacagtctctgggaggt

SEQ ID NO: 14034 - DNA, 22 bp, Artificial Sequence
  Synthetic
gcattttccttaacagacatca

SEQ ID NO: 14035 - DNA, 18 bp, Artificial Sequence
  Synthetic
caagttgtgccttccctt

SEQ ID NO: 14036 - DNA, 20 bp, Artificial Sequence
  Synthetic
aggacaatccacccaaactg

SEQ ID NO: 14037 - DNA, 22 bp, Artificial Sequence
  Synthetic
ttctgttattttaggggcattt

SEQ ID NO: 14038 - DNA, 21 bp, Artificial Sequence
  Synthetic
atctagttcagctgttcttca

SEQ ID NO: 14039 - DNA, 22 bp, Artificial Sequence
  Synthetic
aactgagttcacaactagtaca

SEQ ID NO: 14040 - DNA, 22 bp, Artificial Sequence
  Synthetic
gaagtggtgttactataggtgc

SEQ ID NO: 14041 - DNA, 23 bp, Artificial Sequence
  Synthetic
tttagataattcaacaggggatt

SEQ ID NO: 14042 - DNA, 19 bp, Artificial Sequence
  Synthetic
ccgtgcaaatgataacact

SEQ ID NO: 14043 - DNA, 21 bp, Artificial Sequence
  Synthetic
caaaatgttgcttttgatgca

SEQ ID NO: 14044 - DNA, 18 bp, Artificial Sequence
  Synthetic
ttcctttaggccgcaaat

SEQ ID NO: 14045 - DNA, 23 bp, Artificial Sequence
  Synthetic
ttgttaataaacgtttatgctgc

SEQ ID NO: 14046 - DNA, 23 bp, Artificial Sequence
  Synthetic
gatcatatgaacaaatggagact

SEQ ID NO: 14047 - DNA, 23 bp, Artificial Sequence
  Synthetic
gaacaatagcaatggagttaatc

SEQ ID NO: 14048 - DNA, 19 bp, Artificial Sequence
  Synthetic
tgaggggatcagttgcaca

SEQ ID NO: 14049 - DNA, 25 bp, Artificial Sequence
  Synthetic
caagtttcataagaggaaagaaagt

SEQ ID NO: 14050 - DNA, 23 bp, Artificial Sequence
  Synthetic
aagacaatagcataagaattggt

SEQ ID NO: 14051 - DNA, 19 bp, Artificial Sequence
  Synthetic
catgggctggctaacaatc

SEQ ID NO: 14052 - DNA, 23 bp, Artificial Sequence
  Synthetic
aattctcactatgaggaatgttc

SEQ ID NO: 14053 - DNA, 19 bp, Artificial Sequence
  Synthetic
tggtgtttggataggaagg

SEQ ID NO: 14054 - DNA, 20 bp, Artificial Sequence
  Synthetic
cagattgtgtattggaagca

SEQ ID NO: 14055 - DNA, 21 bp, Artificial Sequence
  Synthetic
tactttgtcgaaacactagcg

SEQ ID NO: 14056 - DNA, 24 bp, Artificial Sequence
  Synthetic
gtttagaaatgtcttaagcattgc

SEQ ID NO: 14057 - DNA, 21 bp, Artificial Sequence
  Synthetic
agtcttaggagtttcaatcct

SEQ ID NO: 14058 - DNA, 20 bp, Artificial Sequence
  Synthetic
agccaacttcagtatggagc

SEQ ID NO: 14059 - DNA, 25 bp, Artificial Sequence
  Synthetic
cgaaaacggtgtatataaaagatgt

SEQ ID NO: 14060 - DNA, 19 bp, Artificial Sequence
  Synthetic
tgctgcatgccataaatgt

SEQ ID NO: 14061 - DNA, 25 bp, Artificial Sequence
  Synthetic
aatattaagtatgcatggacctaag

SEQ ID NO: 14062 - DNA, 19 bp, Artificial Sequence
  Synthetic
aacattttgtgaacaggca

SEQ ID NO: 14063 - DNA, 18 bp, Artificial Sequence
  Synthetic
tgttctgaagtggaagca

SEQ ID NO: 14064 - DNA, 18 bp, Artificial Sequence
  Synthetic
gtgccacaatgtgcaaac

SEQ ID NO: 14065 - DNA, 22 bp, Artificial Sequence
  Synthetic
gacatagacagccaaatacagt

SEQ ID NO: 14066 - DNA, 22 bp, Artificial Sequence
  Synthetic
ggcaacaaagacaattgtatga

SEQ ID NO: 14067 - DNA, 19 bp, Artificial Sequence
  Synthetic
cggtatccgctactcagct

SEQ ID NO: 14068 - DNA, 23 bp, Artificial Sequence
  Synthetic
acagtttaaaatgtttacggtac

SEQ ID NO: 14069 - DNA, 18 bp, Artificial Sequence
  Synthetic
tatgtgtgctgccatgtc

SEQ ID NO: 14070 - DNA, 25 bp, Artificial Sequence
  Synthetic
tcctctttaattacatatgacaacc

SEQ ID NO: 14071 - DNA, 19 bp, Artificial Sequence
  Synthetic
tgcagcctttagtatctgc

SEQ ID NO: 14072 - DNA, 18 bp, Artificial Sequence
  Synthetic
tgaggacgttagggacaa

SEQ ID NO: 14073 - DNA, 20 bp, Artificial Sequence
  Synthetic
gggattccatgtttttttgc

SEQ ID NO: 14074 - DNA, 20 bp, Artificial Sequence
  Synthetic
tgtttgctggcataatcaat

SEQ ID NO: 14075 - DNA, 20 bp, Artificial Sequence
  Synthetic
atttgtgtttgtggtatggg

SEQ ID NO: 14076 - DNA, 18 bp, Artificial Sequence
  Synthetic
ggatgtcaatccgacctt

SEQ ID NO: 14077 - DNA, 20 bp, Artificial Sequence
  Synthetic
acagattgtgtattggaagc

SEQ ID NO: 14078 - DNA, 18 bp, Artificial Sequence
  Synthetic
ttgagacactggcaagga

SEQ ID NO: 14079 - DNA, 18 bp, Artificial Sequence
  Synthetic
ttaggcgtctccatcctg

SEQ ID NO: 14080 - DNA, 19 bp, Artificial Sequence
  Synthetic
tttgttgccaatttcagca

SEQ ID NO: 14081 - DNA, 22 bp, Artificial Sequence
  Synthetic
tgaatacaagtcaaagaggagt

SEQ ID NO: 14082 - DNA, 16 bp, Artificial Sequence
  Synthetic
cgccccaccacctcaa

SEQ ID NO: 14083 - DNA, 17 bp, Artificial Sequence
  Synthetic
tcggggacagctatgcg

SEQ ID NO: 14084 - DNA, 17 bp, Artificial Sequence
  Synthetic
tggagttgctacgcggc

SEQ ID NO: 14085 - DNA, 18 bp, Artificial Sequence
  Synthetic
ttggtgttggagcaacgc

SEQ ID NO: 14086 - DNA, 20 bp, Artificial Sequence
  Synthetic
ccgagagggaactgtgtgga

SEQ ID NO: 14087 - DNA, 20 bp, Artificial Sequence
  Synthetic
aaggccaaaatacctgggtc

SEQ ID NO: 14088 - DNA, 18 bp, Artificial Sequence
  Synthetic
gcgtggacgtctgcaatg

SEQ ID NO: 14089 - DNA, 19 bp, Artificial Sequence
  Synthetic
ccccactgtcaagcctttg

SEQ ID NO: 14090 - DNA, 19 bp, Artificial Sequence
  Synthetic
tggggttcctagcagtgtg

SEQ ID NO: 14091 - DNA, 19 bp, Artificial Sequence
  Synthetic
ctggtgcgtgttctaccaa

SEQ ID NO: 14092 - DNA, 16 bp, Artificial Sequence
  Synthetic
cagcggcagagcggtt

SEQ ID NO: 14093 - DNA, 19 bp, Artificial Sequence
  Synthetic
tcatggcactaacgggagg

SEQ ID NO: 14094 - DNA, 18 bp, Artificial Sequence
  Synthetic
tcttgtgtgacgagggcc

SEQ ID NO: 14095 - DNA, 20 bp, Artificial Sequence
  Synthetic
ggccatgacgtggtgatctg

SEQ ID NO: 14096 - DNA, 19 bp, Artificial Sequence
  Synthetic
ttgcaagatacgccactgg

SEQ ID NO: 14097 - DNA, 18 bp, Artificial Sequence
  Synthetic
tgaggatgcaacgcaggg

SEQ ID NO: 14098 - DNA, 16 bp, Artificial Sequence
  Synthetic
tgggcccccagctgat

SEQ ID NO: 14099 - DNA, 16 bp, Artificial Sequence
  Synthetic
cggcgaggagtcccaa

SEQ ID NO: 14100 - DNA, 19 bp, Artificial Sequence
  Synthetic
tttcaccaatggtcgctcg

SEQ ID NO: 14101 - DNA, 20 bp, Artificial Sequence
  Synthetic
ttgacctcctttctggcaag

SEQ ID NO: 14102 - DNA, 18 bp, Artificial Sequence
  Synthetic
gccttggtcgctacctgt

SEQ ID NO: 14103 - DNA, 17 bp, Artificial Sequence
  Synthetic
ccagcttggttgcgcag

SEQ ID NO: 14104 - DNA, 20 bp, Artificial Sequence
  Synthetic
ttgaggctatagggtctgca

SEQ ID NO: 14105 - DNA, 19 bp, Artificial Sequence
  Synthetic
atccgtgatgaggtgaggg

SEQ ID NO: 14106 - DNA, 20 bp, Artificial Sequence
  Synthetic
ccaaaccagcgtgtaaaagc

SEQ ID NO: 14107 - DNA, 20 bp, Artificial Sequence
  Synthetic
ttaaggctgctttggctgac

SEQ ID NO: 14108 - DNA, 19 bp, Artificial Sequence
  Synthetic
acccagtggtgagatacgt

SEQ ID NO: 14109 - DNA, 25 bp, Artificial Sequence
  Synthetic
tacctttaagtattagagacttagc

SEQ ID NO: 14110 - DNA, 22 bp, Artificial Sequence
  Synthetic
tagaaaagttagattgctgtgg

SEQ ID NO: 14111 - DNA, 25 bp, Artificial Sequence
  Synthetic
acaattatttgagagagatacagac

SEQ ID NO: 14112 - DNA, 18 bp, Artificial Sequence
  Synthetic
gtggaggtaccggctatt

SEQ ID NO: 14113 - DNA, 23 bp, Artificial Sequence
  Synthetic
catgatgatctatttgaaagctc

SEQ ID NO: 14114 - DNA, 23 bp, Artificial Sequence
  Synthetic
ggcaagtacttttgatttttcag

SEQ ID NO: 14115 - DNA, 23 bp, Artificial Sequence
  Synthetic
ttgcattttaatttatggtcctc

SEQ ID NO: 14116 - DNA, 23 bp, Artificial Sequence
  Synthetic
tatgaaagcagataatacacctc

SEQ ID NO: 14117 - DNA, 16 bp, Artificial Sequence
  Synthetic
cagctccacgcctcca

SEQ ID NO: 14118 - DNA, 17 bp, Artificial Sequence
  Synthetic
tcgggcccttacaagca

SEQ ID NO: 14119 - DNA, 18 bp, Artificial Sequence
  Synthetic
gagggtcacttcgatcag

SEQ ID NO: 14120 - DNA, 21 bp, Artificial Sequence
  Synthetic
aggagagattttgatgaagcg

SEQ ID NO: 14121 - DNA, 20 bp, Artificial Sequence
  Synthetic
tctaactgagtccacaggcg

SEQ ID NO: 14122 - DNA, 23 bp, Artificial Sequence
  Synthetic
ttcgttttgcatttgataatcct

SEQ ID NO: 14123 - DNA, 24 bp, Artificial Sequence
  Synthetic
catactatacacaagacacaaagg

SEQ ID NO: 14124 - DNA, 23 bp, Artificial Sequence
  Synthetic
aaagatacagaaaacagtaatgc

SEQ ID NO: 14125 - DNA, 24 bp, Artificial Sequence
  Synthetic
caaaaatcagttttacattccagg

SEQ ID NO: 14126 - DNA, 18 bp, Artificial Sequence
  Synthetic
ccaagctgggttacaaca

SEQ ID NO: 14127 - DNA, 23 bp, Artificial Sequence
  Synthetic
gacaatatgtttactcatgcaga

SEQ ID NO: 14128 - DNA, 20 bp, Artificial Sequence
  Synthetic
ctttctccaaggacaactca

SEQ ID NO: 14129 - DNA, 18 bp, Artificial Sequence
  Synthetic
atagcatggtccagctca

SEQ ID NO: 14130 - DNA, 18 bp, Artificial Sequence
  Synthetic
cacattggtccactgtca

SEQ ID NO: 14131 - DNA, 18 bp, Artificial Sequence
  Synthetic
ggtgggcctttgacaatg

SEQ ID NO: 14132 - DNA, 22 bp, Artificial Sequence
  Synthetic
gcttcgagcactaataaaactg

SEQ ID NO: 14133 - DNA, 22 bp, Artificial Sequence
  Synthetic
agagataaagaagagcgtctac

SEQ ID NO: 14134 - DNA, 22 bp, Artificial Sequence
  Synthetic
tgattcaatggcaaagaaaacc

SEQ ID NO: 14135 - DNA, 20 bp, Artificial Sequence
  Synthetic
aaacctttaagttttggcgc

SEQ ID NO: 14136 - DNA, 23 bp, Artificial Sequence
  Synthetic
aattgattgttgttatgctgaac

SEQ ID NO: 14137 - DNA, 18 bp, Artificial Sequence
  Synthetic
cttgtggagcaggtgtac

SEQ ID NO: 14138 - DNA, 20 bp, Artificial Sequence
  Synthetic
actgatggatctgatgtctc

SEQ ID NO: 14139 - DNA, 18 bp, Artificial Sequence
  Synthetic
gtcatgagtcagctgcta

SEQ ID NO: 14140 - DNA, 22 bp, Artificial Sequence
  Synthetic
acagatgtagtacattttggtt

SEQ ID NO: 14141 - DNA, 23 bp, Artificial Sequence
  Synthetic
tactaataaaacctggacatgtt

SEQ ID NO: 14142 - DNA, 20 bp, Artificial Sequence
  Synthetic
ctccggatctcttcaagggt

SEQ ID NO: 14143 - DNA, 22 bp, Artificial Sequence
  Synthetic
accagatacaatagtgacaact

SEQ ID NO: 14144 - DNA, 23 bp, Artificial Sequence
  Synthetic
taacatttggtgaggaaatacca

SEQ ID NO: 14145 - DNA, 23 bp, Artificial Sequence
  Synthetic
tacctctaatacctggaagatcc

SEQ ID NO: 14146 - DNA, 22 bp, Artificial Sequence
  Synthetic
ttaccgatgagtctaaagtagc

SEQ ID NO: 14147 - DNA, 23 bp, Artificial Sequence
  Synthetic
taataagtatgtggatgctgaga

SEQ ID NO: 14148 - DNA, 20 bp, Artificial Sequence
  Synthetic
tggaaatgcaaactttgagc

SEQ ID NO: 14149 - DNA, 18 bp, Artificial Sequence
  Synthetic
agtggctcacttgtctcc

SEQ ID NO: 14150 - DNA, 25 bp, Artificial Sequence
  Synthetic
taaacttgagtgaaaagttaactgg

SEQ ID NO: 14151 - DNA, 21 bp, Artificial Sequence
  Synthetic
gatgtcaatccgactctactg

SEQ ID NO: 14152 - DNA, 19 bp, Artificial Sequence
  Synthetic
acaaacagactgtgtcctg

SEQ ID NO: 14153 - DNA, 21 bp, Artificial Sequence
  Synthetic
aggatgtgatggaatcaatgg

SEQ ID NO: 14154 - DNA, 22 bp, Artificial Sequence
  Synthetic
cgttgaaactttagctagaagc

SEQ ID NO: 14155 - DNA, 20 bp, Artificial Sequence
  Synthetic
catcgcaccaataatgttct

SEQ ID NO: 14156 - DNA, 20 bp, Artificial Sequence
  Synthetic
agtctcggtactgaatcttg

SEQ ID NO: 14157 - DNA, 20 bp, Artificial Sequence
  Synthetic
tggagtgtctggaataaacg

SEQ ID NO: 14158 - DNA, 19 bp, Artificial Sequence
  Synthetic
ccaatcaagggcaggacta

SEQ ID NO: 14159 - DNA, 20 bp, Artificial Sequence
  Synthetic
tagccaaaggggaattcttg

SEQ ID NO: 14160 - DNA, 18 bp, Artificial Sequence
  Synthetic
agacgtgacaaccgacta

SEQ ID NO: 14161 - DNA, 23 bp, Artificial Sequence
  Synthetic
cctgatattgttttagaagagct

SEQ ID NO: 14162 - DNA, 18 bp, Artificial Sequence
  Synthetic
aagttttatgccaccccg

SEQ ID NO: 14163 - DNA, 18 bp, Artificial Sequence
  Synthetic
ttcaacctgatgccactg

SEQ ID NO: 14164 - DNA, 18 bp, Artificial Sequence
  Synthetic
gttgtagctctgcatgga

SEQ ID NO: 14165 - DNA, 21 bp, Artificial Sequence
  Synthetic
aatttgaaggcaacacaatcg

SEQ ID NO: 14166 - DNA, 24 bp, Artificial Sequence
  Synthetic
tcaatagttccattagtagaaggc

SEQ ID NO: 14167 - DNA, 23 bp, Artificial Sequence
  Synthetic
tgttaatgtattagttgacccca

SEQ ID NO: 14168 - DNA, 25 bp, Artificial Sequence
  Synthetic
tgttcagtttgaatatagaaatccc

SEQ ID NO: 14169 - DNA, 18 bp, Artificial Sequence
  Synthetic
aagtactcctgttgccag

SEQ ID NO: 14170 - DNA, 24 bp, Artificial Sequence
  Synthetic
ttggaaactagtaggtatagaagt

SEQ ID NO: 14171 - DNA, 20 bp, Artificial Sequence
  Synthetic
aagtgtcctccaatacaact

SEQ ID NO: 14172 - DNA, 23 bp, Artificial Sequence
  Synthetic
aggttgatattaaggacattgtc

SEQ ID NO: 14173 - DNA, 20 bp, Artificial Sequence
  Synthetic
agatgtagatttgagtccgc

SEQ ID NO: 14174 - DNA, 20 bp, Artificial Sequence
  Synthetic
gacgaagacccagatcatcc

SEQ ID NO: 14175 - DNA, 18 bp, Artificial Sequence
  Synthetic
ctacaagaagaggctcgg

SEQ ID NO: 14176 - DNA, 18 bp, Artificial Sequence
  Synthetic
ggaggtggtggaagagtc

SEQ ID NO: 14177 - DNA, 18 bp, Artificial Sequence
  Synthetic
cccgctgtttctacaact

SEQ ID NO: 14178 - DNA, 23 bp, Artificial Sequence
  Synthetic
aggaatttaatattgaagagcca

SEQ ID NO: 14179 - DNA, 19 bp, Artificial Sequence
  Synthetic
gaaaacagtgatgcacctt

SEQ ID NO: 14180 - DNA, 23 bp, Artificial Sequence
  Synthetic
gtattacatcccagtcatatccc

SEQ ID NO: 14181 - DNA, 23 bp, Artificial Sequence
  Synthetic
agacggtttgtttatcaaattgg

SEQ ID NO: 14182 - DNA, 22 bp, Artificial Sequence
  Synthetic
ttttccaatcttctcatctgac

SEQ ID NO: 14183 - DNA, 22 bp, Artificial Sequence
  Synthetic
ctactcctgtaactattaccga

SEQ ID NO: 14184 - DNA, 19 bp, Artificial Sequence
  Synthetic
acgaagttttgtcaccaga

SEQ ID NO: 14185 - DNA, 20 bp, Artificial Sequence
  Synthetic
gcagacatagatttgagtcc

SEQ ID NO: 14186 - DNA, 23 bp, Artificial Sequence
  Synthetic
tattcaaattatgtgtgaccctc

SEQ ID NO: 14187 - DNA, 24 bp, Artificial Sequence
  Synthetic
gtattcactaatacgttttctgga

SEQ ID NO: 14188 - DNA, 19 bp, Artificial Sequence
  Synthetic
ctcaccagaagaagagcag

SEQ ID NO: 14189 - DNA, 21 bp, Artificial Sequence
  Synthetic
ttgatgaaaaagcacaaacct

SEQ ID NO: 14190 - DNA, 25 bp, Artificial Sequence
  Synthetic
atgggtagattatgatagtagtagc

SEQ ID NO: 14191 - DNA, 19 bp, Artificial Sequence
  Synthetic
tggatcctttgggacctac

SEQ ID NO: 14192 - DNA, 20 bp, Artificial Sequence
  Synthetic
ctaaggcttttcaaagagca

SEQ ID NO: 14193 - DNA, 21 bp, Artificial Sequence
  Synthetic
atcacaatgccaactattcct

SEQ ID NO: 14194 - DNA, 18 bp, Artificial Sequence
  Synthetic
acaaggttgtggtgccta

SEQ ID NO: 14195 - DNA, 21 bp, Artificial Sequence
  Synthetic
gtgtacctttggacatagtgg

SEQ ID NO: 14196 - DNA, 19 bp, Artificial Sequence
  Synthetic
ttcctctggaacctgatgt

SEQ ID NO: 14197 - DNA, 19 bp, Artificial Sequence
  Synthetic
acatgttttgagcctctcc

SEQ ID NO: 14198 - DNA, 18 bp, Artificial Sequence
  Synthetic
acagtctttggctgcaac

SEQ ID NO: 14199 - DNA, 20 bp, Artificial Sequence
  Synthetic
ccatctcgggggtctctagc

SEQ ID NO: 14200 - DNA, 17 bp, Artificial Sequence
  Synthetic
atgctctggggcacaca

SEQ ID NO: 14201 - DNA, 16 bp, Artificial Sequence
  Synthetic
tggggctggacgttcg

SEQ ID NO: 14202 - DNA, 16 bp, Artificial Sequence
  Synthetic
gccacgtacgcgctgt

SEQ ID NO: 14203 - DNA, 18 bp, Artificial Sequence
  Synthetic
tgttggtgttgacgacgg

SEQ ID NO: 14204 - DNA, 16 bp, Artificial Sequence
  Synthetic
gccacgaccagctgct

SEQ ID NO: 14205 - DNA, 18 bp, Artificial Sequence
  Synthetic
cgtaagcacggggagggt

SEQ ID NO: 14206 - DNA, 16 bp, Artificial Sequence
  Synthetic
tctggcggacggaaca

SEQ ID NO: 14207 - DNA, 19 bp, Artificial Sequence
  Synthetic
ttctccctgttcaacccca

SEQ ID NO: 14208 - DNA, 18 bp, Artificial Sequence
  Synthetic
cagttgccactgggtcct

SEQ ID NO: 14209 - DNA, 18 bp, Artificial Sequence
  Synthetic
tgcttttggccatctgca

SEQ ID NO: 14210 - DNA, 18 bp, Artificial Sequence
  Synthetic
tcgaacaccagctgcatg

SEQ ID NO: 14211 - DNA, 16 bp, Artificial Sequence
  Synthetic
gtggtcacgtccccga

SEQ ID NO: 14212 - DNA, 18 bp, Artificial Sequence
  Synthetic
acactcgtgtccggagag

SEQ ID NO: 14213 - DNA, 19 bp, Artificial Sequence
  Synthetic
gcagatcaccgtcctgttg

SEQ ID NO: 14214 - DNA, 18 bp, Artificial Sequence
  Synthetic
cgttgtttcggcagcagc

SEQ ID NO: 14215 - DNA, 16 bp, Artificial Sequence
  Synthetic
ttgctgggtcctgcgg

SEQ ID NO: 14216 - DNA, 16 bp, Artificial Sequence
  Synthetic
gcccggggcttttcgt

SEQ ID NO: 14217 - DNA, 16 bp, Artificial Sequence
  Synthetic
acacaggcgggacacc

SEQ ID NO: 14218 - DNA, 16 bp, Artificial Sequence
  Synthetic
cagaccccccgaagct

SEQ ID NO: 14219 - DNA, 17 bp, Artificial Sequence
  Synthetic
tcgctgcttcctcgagt

SEQ ID NO: 14220 - DNA, 16 bp, Artificial Sequence
  Synthetic
cgcgcgggactttagc

SEQ ID NO: 14221 - DNA, 16 bp, Artificial Sequence
  Synthetic
tcgggggtttcctccg

SEQ ID NO: 14222 - DNA, 19 bp, Artificial Sequence
  Synthetic
gggcgcgtcagatacagaa

SEQ ID NO: 14223 - DNA, 16 bp, Artificial Sequence
  Synthetic
ccgtggccgagatcgt

SEQ ID NO: 14224 - DNA, 18 bp, Artificial Sequence
  Synthetic
ggccgattccttcatgca

SEQ ID NO: 14225 - DNA, 17 bp, Artificial Sequence
  Synthetic
tcccccaacactgacgt

SEQ ID NO: 14226 - DNA, 18 bp, Artificial Sequence
  Synthetic
gtctcctagttggcccgc

SEQ ID NO: 14227 - DNA, 16 bp, Artificial Sequence
  Synthetic
cggggtttctggggct

SEQ ID NO: 14228 - DNA, 16 bp, Artificial Sequence
  Synthetic
ctgtacgtcgctggcg

SEQ ID NO: 14229 - DNA, 16 bp, Artificial Sequence
  Synthetic
tggagctggcccagga

SEQ ID NO: 14230 - DNA, 16 bp, Artificial Sequence
  Synthetic
gttcacgaacgccgcg

SEQ ID NO: 14231 - DNA, 20 bp, Artificial Sequence
  Synthetic
tgcatcggcaacaacaaagc

SEQ ID NO: 14232 - DNA, 20 bp, Artificial Sequence
  Synthetic
agctccggaaacttggtaca

SEQ ID NO: 14233 - DNA, 16 bp, Artificial Sequence
  Synthetic
ggtgggcggcagcatt

SEQ ID NO: 14234 - DNA, 16 bp, Artificial Sequence
  Synthetic
acccacgcccacatcc

SEQ ID NO: 14235 - DNA, 17 bp, Artificial Sequence
  Synthetic
ggcgttgtagtgtgccc

SEQ ID NO: 14236 - DNA, 16 bp, Artificial Sequence
  Synthetic
gcagaccgcgccgttt

SEQ ID NO: 14237 - DNA, 16 bp, Artificial Sequence
  Synthetic
cgaatcgcggccagca

SEQ ID NO: 14238 - DNA, 16 bp, Artificial Sequence
  Synthetic
acgaagccatacgcgc

SEQ ID NO: 14239 - DNA, 16 bp, Artificial Sequence
  Synthetic
tcttctgcgtgcccgt

SEQ ID NO: 14240 - DNA, 19 bp, Artificial Sequence
  Synthetic
gacgtctgggaacacaggc

SEQ ID NO: 14241 - DNA, 20 bp, Artificial Sequence
  Synthetic
accatcacggactttcccct

SEQ ID NO: 14242 - DNA, 16 bp, Artificial Sequence
  Synthetic
tgcgctccatggcaga

SEQ ID NO: 14243 - DNA, 20 bp, Artificial Sequence
  Synthetic
caaactcgtgatcctccagc

SEQ ID NO: 14244 - DNA, 16 bp, Artificial Sequence
  Synthetic
acgtcgccgagcatcc

SEQ ID NO: 14245 - DNA, 19 bp, Artificial Sequence
  Synthetic
cgatcagaaagcccccatt

SEQ ID NO: 14246 - DNA, 19 bp, Artificial Sequence
  Synthetic
tggatatggcgtcggaaga

SEQ ID NO: 14247 - DNA, 17 bp, Artificial Sequence
  Synthetic
gccgtccagaaccactg

SEQ ID NO: 14248 - DNA, 18 bp, Artificial Sequence
  Synthetic
ccgacagaaacccgttgt

SEQ ID NO: 14249 - DNA, 16 bp, Artificial Sequence
  Synthetic
gcctcgcggttggtga

SEQ ID NO: 14250 - DNA, 17 bp, Artificial Sequence
  Synthetic
tgaacagctgcaacggg

SEQ ID NO: 14251 - DNA, 16 bp, Artificial Sequence
  Synthetic
ttcggacggacacgcg

SEQ ID NO: 14252 - DNA, 16 bp, Artificial Sequence
  Synthetic
ttcgaggcggaggtgg

SEQ ID NO: 14253 - DNA, 18 bp, Artificial Sequence
  Synthetic
agagcctcctcagcatcc

SEQ ID NO: 14254 - DNA, 20 bp, Artificial Sequence
  Synthetic
actccatctttgtgctgtgc

SEQ ID NO: 14255 - DNA, 16 bp, Artificial Sequence
  Synthetic
tagtgcaggtgggcgg

SEQ ID NO: 14256 - DNA, 17 bp, Artificial Sequence
  Synthetic
gggcggcacacctatca

SEQ ID NO: 14257 - DNA, 16 bp, Artificial Sequence
  Synthetic
ctcggcgacctggaca

SEQ ID NO: 14258 - DNA, 18 bp, Artificial Sequence
  Synthetic
taatgtcgcggatgctgc

SEQ ID NO: 14259 - DNA, 18 bp, Artificial Sequence
  Synthetic
ccctagggggccaatggt

SEQ ID NO: 14260 - DNA, 18 bp, Artificial Sequence
  Synthetic
gcatgcacgataccgacc

SEQ ID NO: 14261 - DNA, 17 bp, Artificial Sequence
  Synthetic
ggagatagcccagccca

SEQ ID NO: 14262 - DNA, 18 bp, Artificial Sequence
  Synthetic
tctatgcgctggaggtgc

SEQ ID NO: 14263 - DNA, 18 bp, Artificial Sequence
  Synthetic
tgtgtatacggacgcgcc

SEQ ID NO: 14264 - DNA, 19 bp, Artificial Sequence
  Synthetic
actcaggacatcggtgtgt

SEQ ID NO: 14265 - DNA, 16 bp, Artificial Sequence
  Synthetic
acaaggcgaccctgcg

SEQ ID NO: 14266 - DNA, 19 bp, Artificial Sequence
  Synthetic
tgttcaaagacgcggtgaa

SEQ ID NO: 14267 - DNA, 18 bp, Artificial Sequence
  Synthetic
tccttgtagaacgcgggt

SEQ ID NO: 14268 - DNA, 18 bp, Artificial Sequence
  Synthetic
agagctgggtctggagtc

SEQ ID NO: 14269 - DNA, 19 bp, Artificial Sequence
  Synthetic
ccggggcatccttatccat

SEQ ID NO: 14270 - DNA, 16 bp, Artificial Sequence
  Synthetic
tgacgaggccgcagct

SEQ ID NO: 14271 - DNA, 20 bp, Artificial Sequence
  Synthetic
ggtgtgtgatgatttcgcca

SEQ ID NO: 14272 - DNA, 17 bp, Artificial Sequence
  Synthetic
ggagggtcagccgttca

SEQ ID NO: 14273 - DNA, 16 bp, Artificial Sequence
  Synthetic
cgtacaggggctgggt

SEQ ID NO: 14274 - DNA, 18 bp, Artificial Sequence
  Synthetic
cgccgtctaagtggagct

SEQ ID NO: 14275 - DNA, 16 bp, Artificial Sequence
  Synthetic
ggaccggacggacctt

SEQ ID NO: 14276 - DNA, 16 bp, Artificial Sequence
  Synthetic
cgcagaacgccctcga

SEQ ID NO: 14277 - DNA, 17 bp, Artificial Sequence
  Synthetic
tgcgcggacaattaggc

SEQ ID NO: 14278 - DNA, 16 bp, Artificial Sequence
  Synthetic
tcctgatgggccgcca

SEQ ID NO: 14279 - DNA, 18 bp, Artificial Sequence
  Synthetic
cgacaagatcggactgcg

SEQ ID NO: 14280 - DNA, 16 bp, Artificial Sequence
  Synthetic
ttaagcacggccgggc

SEQ ID NO: 14281 - DNA, 17 bp, Artificial Sequence
  Synthetic
tccctgcagcacctctc

SEQ ID NO: 14282 - DNA, 17 bp, Artificial Sequence
  Synthetic
gtgcgtctggtggtcgt

SEQ ID NO: 14283 - DNA, 17 bp, Artificial Sequence
  Synthetic
tggacctctccgacagc

SEQ ID NO: 14284 - DNA, 16 bp, Artificial Sequence
  Synthetic
cgggccccggacataa

SEQ ID NO: 14285 - DNA, 16 bp, Artificial Sequence
  Synthetic
cgcgcccgagttttgc

SEQ ID NO: 14286 - DNA, 18 bp, Artificial Sequence
  Synthetic
attggcacggacaacagg

SEQ ID NO: 14287 - DNA, 16 bp, Artificial Sequence
  Synthetic
ggatgcgccccaaagc

SEQ ID NO: 14288 - DNA, 19 bp, Artificial Sequence
  Synthetic
cttcacccccagtaccctc

SEQ ID NO: 14289 - DNA, 16 bp, Artificial Sequence
  Synthetic
aggatgaagccccccg

SEQ ID NO: 14290 - DNA, 20 bp, Artificial Sequence
  Synthetic
accggatagcagatgtgagg

SEQ ID NO: 14291 - DNA, 16 bp, Artificial Sequence
  Synthetic
cggtgcagcagtcgga

SEQ ID NO: 14292 - DNA, 16 bp, Artificial Sequence
  Synthetic
tggccggacgaacgac

SEQ ID NO: 14293 - DNA, 17 bp, Artificial Sequence
  Synthetic
tacgggggggtaggtca

SEQ ID NO: 14294 - DNA, 16 bp, Artificial Sequence
  Synthetic
gccgtcccgggtgttt

SEQ ID NO: 14295 - DNA, 18 bp, Artificial Sequence
  Synthetic
ccccccggtatacgacga

SEQ ID NO: 14296 - DNA, 18 bp, Artificial Sequence
  Synthetic
tcggaggggtgtgtcttt

SEQ ID NO: 14297 - DNA, 20 bp, Artificial Sequence
  Synthetic
tctggtcctccccaagtacc

SEQ ID NO: 14298 - DNA, 17 bp, Artificial Sequence
  Synthetic
actgccgtccacaacgc

SEQ ID NO: 14299 - DNA, 18 bp, Artificial Sequence
  Synthetic
tcgtccctcgcatgaagc

SEQ ID NO: 14300 - DNA, 16 bp, Artificial Sequence
  Synthetic
cggggcggtcattgga

SEQ ID NO: 14301 - DNA, 17 bp, Artificial Sequence
  Synthetic
gcgcagtctggcatctg

SEQ ID NO: 14302 - DNA, 18 bp, Artificial Sequence
  Synthetic
ccccccaaaccatgtccg

SEQ ID NO: 14303 - DNA, 17 bp, Artificial Sequence
  Synthetic
ccagcctggttgtccgt

SEQ ID NO: 14304 - DNA, 17 bp, Artificial Sequence
  Synthetic
gcaacgcgggactatgc

SEQ ID NO: 14305 - DNA, 16 bp, Artificial Sequence
  Synthetic
gcggccgtggttaacc

SEQ ID NO: 14306 - DNA, 16 bp, Artificial Sequence
  Synthetic
tcagcgcgatccgaca

SEQ ID NO: 14307 - DNA, 18 bp, Artificial Sequence
  Synthetic
gatcgcctgtctcctcgt

SEQ ID NO: 14308 - DNA, 25 bp, Artificial Sequence
  Synthetic
atcagaagataataaccattggatc

SEQ ID NO: 14309 - DNA, 18 bp, Artificial Sequence
  Synthetic
aggtttgagtctgttgct

SEQ ID NO: 14310 - DNA, 25 bp, Artificial Sequence
  Synthetic
gaaaaagggaaagtagttaaatcag

SEQ ID NO: 14311 - DNA, 23 bp, Artificial Sequence
  Synthetic
aaagggttttcatttaaatacgg

SEQ ID NO: 14312 - DNA, 20 bp, Artificial Sequence
  Synthetic
tgtatccctcctgttgctgt

SEQ ID NO: 14313 - DNA, 23 bp, Artificial Sequence
  Synthetic
ctttgggtatacatttaaaccct

SEQ ID NO: 14314 - DNA, 20 bp, Artificial Sequence
  Synthetic
cgtctgtgccttctcatctg

SEQ ID NO: 14315 - DNA, 20 bp, Artificial Sequence
  Synthetic
ttagagtctcctgagcattg

SEQ ID NO: 14316 - DNA, 20 bp, Artificial Sequence
  Synthetic
gaaacaacacatagcgcctc

SEQ ID NO: 14317 - DNA, 22 bp, Artificial Sequence
  Synthetic
aataaaagaactacggaacctg

SEQ ID NO: 14318 - DNA, 19 bp, Artificial Sequence
  Synthetic
gatcagatcgagtgatggt

SEQ ID NO: 14319 - DNA, 19 bp, Artificial Sequence
  Synthetic
ctaattattgcggccagga

SEQ ID NO: 14320 - DNA, 18 bp, Artificial Sequence
  Synthetic
aagcgggtcatcagtcaa

SEQ ID NO: 14321 - DNA, 20 bp, Artificial Sequence
  Synthetic
gacctgaatttcgtcaacag

SEQ ID NO: 14322 - DNA, 20 bp, Artificial Sequence
  Synthetic
tgatcggtttttgagagttc

SEQ ID NO: 14323 - DNA, 18 bp, Artificial Sequence
  Synthetic
ccaaggccattagaagcc

SEQ ID NO: 14324 - DNA, 18 bp, Artificial Sequence
  Synthetic
gaaaagatgccggcactt

SEQ ID NO: 14325 - DNA, 23 bp, Artificial Sequence
  Synthetic
tattttgatgttactcctgatgt

SEQ ID NO: 14326 - DNA, 21 bp, Artificial Sequence
  Synthetic
aagagttaaatgtgaggtgtc

SEQ ID NO: 14327 - DNA, 24 bp, Artificial Sequence
  Synthetic
aggagcatccagtatataaagttg

SEQ ID NO: 14328 - DNA, 25 bp, Artificial Sequence
  Synthetic
gtggatgatatacaatgtattgatg

SEQ ID NO: 14329 - DNA, 20 bp, Artificial Sequence
  Synthetic
ttgaattttcaggacagtgg

SEQ ID NO: 14330 - DNA, 24 bp, Artificial Sequence
  Synthetic
tggactcccaaataaattattgga

SEQ ID NO: 14331 - DNA, 20 bp, Artificial Sequence
  Synthetic
cagctctgcaagttccttct

SEQ ID NO: 14332 - DNA, 19 bp, Artificial Sequence
  Synthetic
cgactcttgctgatcgatt

SEQ ID NO: 14333 - DNA, 23 bp, Artificial Sequence
  Synthetic
caacattaattgaatcaggagga

SEQ ID NO: 14334 - DNA, 19 bp, Artificial Sequence
  Synthetic
ctttagcactgacgtcact

SEQ ID NO: 14335 - DNA, 19 bp, Artificial Sequence
  Synthetic
ctataggttctgacgctgc

SEQ ID NO: 14336 - DNA, 18 bp, Artificial Sequence
  Synthetic
caagaccaatcgccagag

SEQ ID NO: 14337 - DNA, 23 bp, Artificial Sequence
  Synthetic
ttaagaggtattgaaataggtcg

SEQ ID NO: 14338 - DNA, 24 bp, Artificial Sequence
  Synthetic
tccacctgtgcaattaattaattc

SEQ ID NO: 14339 - DNA, 19 bp, Artificial Sequence
  Synthetic
ctaagtgtcctactgctgc

SEQ ID NO: 14340 - DNA, 25 bp, Artificial Sequence
  Synthetic
attgtgataaaatactgtgaatccc

SEQ ID NO: 14341 - DNA, 18 bp, Artificial Sequence
  Synthetic
gagggtcgatactgccaa

SEQ ID NO: 14342 - DNA, 22 bp, Artificial Sequence
  Synthetic
gggagataaggctactattcct

SEQ ID NO: 14343 - DNA, 21 bp, Artificial Sequence
  Synthetic
acagatctcagagctaagtcc

SEQ ID NO: 14344 - DNA, 20 bp, Artificial Sequence
  Synthetic
ccgagagaatctggaaccac

SEQ ID NO: 14345 - DNA, 23 bp, Artificial Sequence
  Synthetic
tttggaagtttggtatattttgg

SEQ ID NO: 14346 - DNA, 23 bp, Artificial Sequence
  Synthetic
gggcctgatatatcttttattgc

SEQ ID NO: 14347 - DNA, 25 bp, Artificial Sequence
  Synthetic
gtgatactaatgtgtttgtagatcc

SEQ ID NO: 14348 - DNA, 20 bp, Artificial Sequence
  Synthetic
tttgagtttgaaaatcccgc

SEQ ID NO: 14349 - DNA, 19 bp, Artificial Sequence
  Synthetic
cctactgctgaaccagaag

SEQ ID NO: 14350 - DNA, 21 bp, Artificial Sequence
  Synthetic
tgaatattttaccgtggtgtc

SEQ ID NO: 14351 - DNA, 20 bp, Artificial Sequence
  Synthetic
aggaggagacatagaatcct

SEQ ID NO: 14352 - DNA, 18 bp, Artificial Sequence
  Synthetic
ctgaggctgcagggactt

SEQ ID NO: 14353 - DNA, 20 bp, Artificial Sequence
  Synthetic
tctgttaggacccttctcgc

SEQ ID NO: 14354 - DNA, 18 bp, Artificial Sequence
  Synthetic
gcgagaaactccgtcttg

SEQ ID NO: 14355 - DNA, 20 bp, Artificial Sequence
  Synthetic
acaagtagaccaacagcacc

SEQ ID NO: 14356 - DNA, 19 bp, Artificial Sequence
  Synthetic
caagagggtctgacatagc

SEQ ID NO: 14357 - DNA, 18 bp, Artificial Sequence
  Synthetic
ggaccaagccctatccca

SEQ ID NO: 14358 - DNA, 21 bp, Artificial Sequence
  Synthetic
accataatgacaggagatacc

SEQ ID NO: 14359 - DNA, 24 bp, Artificial Sequence
  Synthetic
aaataaggtgactcaagatttcac

SEQ ID NO: 14360 - DNA, 19 bp, Artificial Sequence
  Synthetic
gacaggacaggtttagagc

SEQ ID NO: 14361 - DNA, 18 bp, Artificial Sequence
  Synthetic
cagaagaagtgcagtgga

SEQ ID NO: 14362 - DNA, 21 bp, Artificial Sequence
  Synthetic
gagtgggactttgtatctacc

SEQ ID NO: 14363 - DNA, 19 bp, Artificial Sequence
  Synthetic
agtctatgttgcatgggtc

SEQ ID NO: 14364 - DNA, 20 bp, Artificial Sequence
  Synthetic
gaagcagaagtcatcccaca

SEQ ID NO: 14365 - DNA, 19 bp, Artificial Sequence
  Synthetic
aagaaggggaggaataggg

SEQ ID NO: 14366 - DNA, 21 bp, Artificial Sequence
  Synthetic
gaacctaacaccagaaaaagg

SEQ ID NO: 14367 - DNA, 21 bp, Artificial Sequence
  Synthetic
ccatagaagccttaaacaggg

SEQ ID NO: 14368 - DNA, 20 bp, Artificial Sequence
  Synthetic
aggaagaagccttaagacat

SEQ ID NO: 14369 - DNA, 18 bp, Artificial Sequence
  Synthetic
agacgaagaaggactcca

SEQ ID NO: 14370 - DNA, 22 bp, Artificial Sequence
  Synthetic
tggaataatacagtgacagaac

SEQ ID NO: 14371 - DNA, 22 bp, Artificial Sequence
  Synthetic
catggtatttagaagatgtggt

SEQ ID NO: 14372 - DNA, 23 bp, Artificial Sequence
  Synthetic
gtaagagaccaggaaataagaca

SEQ ID NO: 14373 - DNA, 21 bp, Artificial Sequence
  Synthetic
caattgggtagaagacaagaa

SEQ ID NO: 14374 - DNA, 19 bp, Artificial Sequence
  Synthetic
aagagtcactgctatcgag

SEQ ID NO: 14375 - DNA, 20 bp, Artificial Sequence
  Synthetic
actatccaagaactccccga

SEQ ID NO: 14376 - DNA, 18 bp, Artificial Sequence
  Synthetic
agagtacatgaacagccc

SEQ ID NO: 14377 - DNA, 21 bp, Artificial Sequence
  Synthetic
aacaagcagacatgatgatga

SEQ ID NO: 14378 - DNA, 18 bp, Artificial Sequence
  Synthetic
gagaggctggcagatcga

SEQ ID NO: 14379 - DNA, 24 bp, Artificial Sequence
  Synthetic
gaaggcaataattgtactactcat

SEQ ID NO: 14380 - DNA, 19 bp, Artificial Sequence
  Synthetic
cctaggcagaccaaaatgc

SEQ ID NO: 14381 - DNA, 18 bp, Artificial Sequence
  Synthetic
atgggaacggcttcttca

SEQ ID NO: 14382 - DNA, 20 bp, Artificial Sequence
  Synthetic
ccaaatcaaacagaagacga

SEQ ID NO: 14383 - DNA, 20 bp, Artificial Sequence
  Synthetic
ccaatatgggtgaaaacacc

SEQ ID NO: 14384 - DNA, 18 bp, Artificial Sequence
  Synthetic
cggagcaatgaatgagct

SEQ ID NO: 14385 - DNA, 19 bp, Artificial Sequence
  Synthetic
tgctttgaaaccaaacaca

SEQ ID NO: 14386 - DNA, 22 bp, Artificial Sequence
  Synthetic
tggagatccaaacaatatggat

SEQ ID NO: 14387 - DNA, 20 bp, Artificial Sequence
  Synthetic
tgagaacagaatggtgctgg

SEQ ID NO: 14388 - DNA, 18 bp, Artificial Sequence
  Synthetic
gcagcgattcaagtgatc

SEQ ID NO: 14389 - DNA, 19 bp, Artificial Sequence
  Synthetic
gtgtaagggtttgtgttgc

SEQ ID NO: 14390 - DNA, 24 bp, Artificial Sequence
  Synthetic
ctaacgtttcccaattaatagacg

SEQ ID NO: 14391 - DNA, 22 bp, Artificial Sequence
  Synthetic
aaaattactgatgctgaatgga

SEQ ID NO: 14392 - DNA, 22 bp, Artificial Sequence
  Synthetic
tgggattggatatactatcagg

SEQ ID NO: 14393 - DNA, 25 bp, Artificial Sequence
  Synthetic
tgacagtttataatgtatagagctg

SEQ ID NO: 14394 - DNA, 19 bp, Artificial Sequence
  Synthetic
gaggtacaacaaggcctat

SEQ ID NO: 14395 - DNA, 25 bp, Artificial Sequence
  Synthetic
atgatactgcagctatattagatgt

SEQ ID NO: 14396 - DNA, 22 bp, Artificial Sequence
  Synthetic
tggctgaatttgaaataatgga

SEQ ID NO: 14397 - DNA, 25 bp, Artificial Sequence
  Synthetic
attacataggcctacttatactaca

SEQ ID NO: 14398 - DNA, 25 bp, Artificial Sequence
  Synthetic
catcagatgactattttctacatcc

SEQ ID NO: 14399 - DNA, 22 bp, Artificial Sequence
  Synthetic
gaacacagtctgtagtagtacc

SEQ ID NO: 14400 - DNA, 25 bp, Artificial Sequence
  Synthetic
gatgaaaatgatcacagattgaatg

SEQ ID NO: 14401 - DNA, 19 bp, Artificial Sequence
  Synthetic
agatctggtgttcctttgg

SEQ ID NO: 14402 - DNA, 21 bp, Artificial Sequence
  Synthetic
tttgcaaagtttctctggatc

SEQ ID NO: 14403 - DNA, 20 bp, Artificial Sequence
  Synthetic
cgccgctttctatatcaaac

SEQ ID NO: 14404 - DNA, 18 bp, Artificial Sequence
  Synthetic
aaacagctgagtctggtt

SEQ ID NO: 14405 - DNA, 19 bp, Artificial Sequence
  Synthetic
agcccatctattgtgtgaa

SEQ ID NO: 14406 - DNA, 23 bp, Artificial Sequence
  Synthetic
ttggaagcaataagaatttctcc

SEQ ID NO: 14407 - DNA, 25 bp, Artificial Sequence
  Synthetic
ctgggaaatcatatatttatggaac

SEQ ID NO: 14408 - DNA, 21 bp, Artificial Sequence
  Synthetic
acccgaagataatgaatcaga

SEQ ID NO: 14409 - DNA, 20 bp, Artificial Sequence
  Synthetic
gtctctatccgactcccctg

SEQ ID NO: 14410 - DNA, 21 bp, Artificial Sequence
  Synthetic
taaacgaataaagcgagcttc

SEQ ID NO: 14411 - DNA, 20 bp, Artificial Sequence
  Synthetic
ccccaagaccttctattcca

SEQ ID NO: 14412 - DNA, 18 bp, Artificial Sequence
  Synthetic
agggccctttaaggagta

SEQ ID NO: 14413 - DNA, 20 bp, Artificial Sequence
  Synthetic
tataggagggttcagggatg

SEQ ID NO: 14414 - DNA, 23 bp, Artificial Sequence
  Synthetic
taataatgtccaagttccaaagg

SEQ ID NO: 14415 - DNA, 25 bp, Artificial Sequence
  Synthetic
attaattctacatgtaaatggccag

SEQ ID NO: 14416 - DNA, 19 bp, Artificial Sequence
  Synthetic
cctttagaggctgatgtgt

SEQ ID NO: 14417 - DNA, 23 bp, Artificial Sequence
  Synthetic
tttacatatcagtcgttcaaagg

SEQ ID NO: 14418 - DNA, 18 bp, Artificial Sequence
  Synthetic
cactcgcgagatactgac

SEQ ID NO: 14419 - DNA, 18 bp, Artificial Sequence
  Synthetic
gctggatcagacagggta

SEQ ID NO: 14420 - DNA, 20 bp, Artificial Sequence
  Synthetic
gtcgttttcccaaatgaagt

SEQ ID NO: 14421 - DNA, 22 bp, Artificial Sequence
  Synthetic
gggaggtaagaaatgatgatgt

SEQ ID NO: 14422 - DNA, 21 bp, Artificial Sequence
  Synthetic
aagagaggaagaagtgcttac

SEQ ID NO: 14423 - DNA, 20 bp, Artificial Sequence
  Synthetic
ccgaggtgatttgaatttcg

SEQ ID NO: 14424 - DNA, 18 bp, Artificial Sequence
  Synthetic
cgtttcttaagggtccga

SEQ ID NO: 14425 - DNA, 20 bp, Artificial Sequence
  Synthetic
gccagaagccaatatagtgg

SEQ ID NO: 14426 - DNA, 21 bp, Artificial Sequence
  Synthetic
ttacaatacttgggaaggacg

SEQ ID NO: 14427 - DNA, 20 bp, Artificial Sequence
  Synthetic
gcgatcattccaacaaatgc

SEQ ID NO: 14428 - DNA, 22 bp, Artificial Sequence
  Synthetic
ccgatttaattattgagaggcg

SEQ ID NO: 14429 - DNA, 19 bp, Artificial Sequence
  Synthetic
gggatccatcattccgtat

SEQ ID NO: 14430 - DNA, 18 bp, Artificial Sequence
  Synthetic
tccagagtggagtacagg

SEQ ID NO: 14431 - DNA, 18 bp, Artificial Sequence
  Synthetic
tttggtgctatagcgggt

SEQ ID NO: 14432 - DNA, 20 bp, Artificial Sequence
  Synthetic
ctgaactcttggtagcaatg

SEQ ID NO: 14433 - DNA, 19 bp, Artificial Sequence
  Synthetic
ggtttaaccgaaaacggtg

SEQ ID NO: 14434 - DNA, 22 bp, Artificial Sequence
  Synthetic
attttggcatacagtagaacaa

SEQ ID NO: 14435 - DNA, 22 bp, Artificial Sequence
  Synthetic
aatttgacacctcagatgaaga

SEQ ID NO: 14436 - DNA, 18 bp, Artificial Sequence
  Synthetic
acgggagtatgggtaacg

SEQ ID NO: 14437 - DNA, 22 bp, Artificial Sequence
  Synthetic
catacaatggttaacctgtacc

SEQ ID NO: 14438 - DNA, 25 bp, Artificial Sequence
  Synthetic
gcatatgataatgatttaaccgaag

SEQ ID NO: 14439 - DNA, 22 bp, Artificial Sequence
  Synthetic
gaatttcaagaatcagaggacg

SEQ ID NO: 14440 - DNA, 19 bp, Artificial Sequence
  Synthetic
ccatggacattgcaagaga

SEQ ID NO: 14441 - DNA, 20 bp, Artificial Sequence
  Synthetic
cacctacacccacaaccatc

SEQ ID NO: 14442 - DNA, 22 bp, Artificial Sequence
  Synthetic
ttactgtgagtccactattgtg

SEQ ID NO: 14443 - DNA, 25 bp, Artificial Sequence
  Synthetic
ttgtacatacgtgataatatggtac

SEQ ID NO: 14444 - DNA, 22 bp, Artificial Sequence
  Synthetic
attgattctagcataccagtgc

SEQ ID NO: 14445 - DNA, 18 bp, Artificial Sequence
  Synthetic
gggctcgtattgggtcta

SEQ ID NO: 14446 - DNA, 23 bp, Artificial Sequence
  Synthetic
taccatatttttttgcagatgtc

SEQ ID NO: 14447 - DNA, 18 bp, Artificial Sequence
  Synthetic
ctgcttgctctgcacaat

SEQ ID NO: 14448 - DNA, 25 bp, Artificial Sequence
  Synthetic
tgcaaaattacattatctgtagagg

SEQ ID NO: 14449 - DNA, 23 bp, Artificial Sequence
  Synthetic
caatcctccattttagtacatgc

SEQ ID NO: 14450 - DNA, 19 bp, Artificial Sequence
  Synthetic
gtgtgttacctgaatgggt

SEQ ID NO: 14451 - DNA, 22 bp, Artificial Sequence
  Synthetic
acaggtcaagtttgtaaaagac

SEQ ID NO: 14452 - DNA, 19 bp, Artificial Sequence
  Synthetic
ctgaatcccagagcaacgg

SEQ ID NO: 14453 - DNA, 19 bp, Artificial Sequence
  Synthetic
ctgctgacattactgctga

SEQ ID NO: 14454 - DNA, 18 bp, Artificial Sequence
  Synthetic
gcccaggtcttgatgttg

SEQ ID NO: 14455 - DNA, 23 bp, Artificial Sequence
  Synthetic
acttttcagcattttcagaaagt

SEQ ID NO: 14456 - DNA, 18 bp, Artificial Sequence
  Synthetic
gacaatgctacacctcca

SEQ ID NO: 14457 - DNA, 19 bp, Artificial Sequence
  Synthetic
tttgaagtggagcttgtga

SEQ ID NO: 14458 - DNA, 23 bp, Artificial Sequence
  Synthetic
atttgcgagataaatttacctcc

SEQ ID NO: 14459 - DNA, 23 bp, Artificial Sequence
  Synthetic
aacatatggtgctatgtatcctg

SEQ ID NO: 14460 - DNA, 21 bp, Artificial Sequence
  Synthetic
ttgaacttagaccgaatttgg

SEQ ID NO: 14461 - DNA, 18 bp, Artificial Sequence
  Synthetic
ggcagatggcgactacca

SEQ ID NO: 14462 - DNA, 20 bp, Artificial Sequence
  Synthetic
gcaaatgcagagattcaagt

SEQ ID NO: 14463 - DNA, 22 bp, Artificial Sequence
  Synthetic
tggataatgagaaacaacatgc

SEQ ID NO: 14464 - DNA, 21 bp, Artificial Sequence
  Synthetic
tcaacaattgaagaccttgtc

SEQ ID NO: 14465 - DNA, 21 bp, Artificial Sequence
  Synthetic
caactatcctgccatatggag

SEQ ID NO: 14466 - DNA, 20 bp, Artificial Sequence
  Synthetic
tttagagtttgcttgcaact

SEQ ID NO: 14467 - DNA, 20 bp, Artificial Sequence
  Synthetic
gaaactgtacagagaggacc

SEQ ID NO: 14468 - DNA, 23 bp, Artificial Sequence
  Synthetic
gaaaatctcaaaaacaacaacca

SEQ ID NO: 14469 - DNA, 25 bp, Artificial Sequence
  Synthetic
gaaaagatcaagaaaactaggtttg

SEQ ID NO: 14470 - DNA, 22 bp, Artificial Sequence
  Synthetic
atacacattcccagaatcatca

SEQ ID NO: 14471 - DNA, 23 bp, Artificial Sequence
  Synthetic
ataaaaccagaactatacccatg

SEQ ID NO: 14472 - DNA, 21 bp, Artificial Sequence
  Synthetic
caagagtggatgcaattttcc

SEQ ID NO: 14473 - DNA, 22 bp, Artificial Sequence
  Synthetic
tagaagactctaactcttgtgg

SEQ ID NO: 14474 - DNA, 21 bp, Artificial Sequence
  Synthetic
tgattactcaatcaccctcca

SEQ ID NO: 14475 - DNA, 21 bp, Artificial Sequence
  Synthetic
tgcaaactgtataacaaccac

SEQ ID NO: 14476 - DNA, 24 bp, Artificial Sequence
  Synthetic
aatccaactctactcatacaattg

SEQ ID NO: 14477 - DNA, 25 bp, Artificial Sequence
  Synthetic
taacacatgatgtaggtataaaacc

SEQ ID NO: 14478 - DNA, 20 bp, Artificial Sequence
  Synthetic
tatgctgcactatacccatc

SEQ ID NO: 14479 - DNA, 18 bp, Artificial Sequence
  Synthetic
cacagggagcattgtgtc

SEQ ID NO: 14480 - DNA, 18 bp, Artificial Sequence
  Synthetic
gcctcctgtgacattacc

SEQ ID NO: 14481 - DNA, 25 bp, Artificial Sequence
  Synthetic
tagcaaaagaatctattatgatggg

SEQ ID NO: 14482 - DNA, 23 bp, Artificial Sequence
  Synthetic
atcaatccaactataacacagaa

SEQ ID NO: 14483 - DNA, 25 bp, Artificial Sequence
  Synthetic
atcagatatgaagatatgtgttcag

SEQ ID NO: 14484 - DNA, 21 bp, Artificial Sequence
  Synthetic
atgggcatttggtaatgatga

SEQ ID NO: 14485 - DNA, 22 bp, Artificial Sequence
  Synthetic
gactttgtgtctacttttctca

SEQ ID NO: 14486 - DNA, 20 bp, Artificial Sequence
  Synthetic
aatttctgcaaatggctgtt

SEQ ID NO: 14487 - DNA, 20 bp, Artificial Sequence
  Synthetic
ttatggcagtttgttgacca

SEQ ID NO: 14488 - DNA, 21 bp, Artificial Sequence
  Synthetic
tctcctgttatgacaaatggt

SEQ ID NO: 14489 - DNA, 20 bp, Artificial Sequence
  Synthetic
agagtgattgctcttcagag

SEQ ID NO: 14490 - DNA, 21 bp, Artificial Sequence
  Synthetic
tgcctgagaagtttttgaatg

SEQ ID NO: 14491 - DNA, 23 bp, Artificial Sequence
  Synthetic
aaagttaagtatgcaacagttgt

SEQ ID NO: 14492 - DNA, 23 bp, Artificial Sequence
  Synthetic
actttatgtgagagactatgttg

SEQ ID NO: 14493 - DNA, 18 bp, Artificial Sequence
  Synthetic
gaacatgtgcaaagcgtt

SEQ ID NO: 14494 - DNA, 25 bp, Artificial Sequence
  Synthetic
caggattaagtcttttagtactttc

SEQ ID NO: 14495 - DNA, 23 bp, Artificial Sequence
  Synthetic
tgagtttgaagatgaaaaacttg

SEQ ID NO: 14496 - DNA, 25 bp, Artificial Sequence
  Synthetic
tactcaaacaattggataacaactg

SEQ ID NO: 14497 - DNA, 21 bp, Artificial Sequence
  Synthetic
aaatgtagttgtaccagtggt

SEQ ID NO: 14498 - DNA, 23 bp, Artificial Sequence
  Synthetic
aagttgaaatatctgttacacca

SEQ ID NO: 14499 - DNA, 22 bp, Artificial Sequence
  Synthetic
aaggttaaggattttgtgtctg

SEQ ID NO: 14500 - DNA, 22 bp, Artificial Sequence
  Synthetic
gttctgttgttgtctacatgtg

SEQ ID NO: 14501 - DNA, 22 bp, Artificial Sequence
  Synthetic
taaggacaaagatctttctggt

SEQ ID NO: 14502 - DNA, 18 bp, Artificial Sequence
  Synthetic
tgtgctagtgtcaaacgt

SEQ ID NO: 14503 - DNA, 22 bp, Artificial Sequence
  Synthetic
gttaaaataatggccaaagcac

SEQ ID NO: 14504 - DNA, 22 bp, Artificial Sequence
  Synthetic
tcaaggatgattactgtgatgg

SEQ ID NO: 14505 - DNA, 19 bp, Artificial Sequence
  Synthetic
tgtgctttttggttgtgaa

SEQ ID NO: 14506 - DNA, 19 bp, Artificial Sequence
  Synthetic
tatgtctttagccgagtgc

SEQ ID NO: 14507 - DNA, 24 bp, Artificial Sequence
  Synthetic
cgcaagtatattgtaaaaactagc

SEQ ID NO: 14508 - DNA, 21 bp, Artificial Sequence
  Synthetic
ggcttcacacctttaaacaag

SEQ ID NO: 14509 - DNA, 21 bp, Artificial Sequence
  Synthetic
caaggctttggttttagaaca

SEQ ID NO: 14510 - DNA, 25 bp, Artificial Sequence
  Synthetic
attgtatttctttgctactagaagc

SEQ ID NO: 14511 - DNA, 22 bp, Artificial Sequence
  Synthetic
cttttcgcgtgatcataatgac

SEQ ID NO: 14512 - DNA, 23 bp, Artificial Sequence
  Synthetic
tgcatggagtaactcttaaaatt

SEQ ID NO: 14513 - DNA, 21 bp, Artificial Sequence
  Synthetic
ggttttgaagaccaacctaat

SEQ ID NO: 14514 - DNA, 22 bp, Artificial Sequence
  Synthetic
aatccataagcttatttgctgg

SEQ ID NO: 14515 - DNA, 21 bp, Artificial Sequence
  Synthetic
atttgtctttttgttgcactg

SEQ ID NO: 14516 - DNA, 23 bp, Artificial Sequence
  Synthetic
gctgtatgtactatggtttgttg

SEQ ID NO: 14517 - DNA, 20 bp, Artificial Sequence
  Synthetic
acaaacgtcgttctaatggg

SEQ ID NO: 14518 - DNA, 22 bp, Artificial Sequence
  Synthetic
ttgaagaaggctatgaatgttg

SEQ ID NO: 14519 - DNA, 23 bp, Artificial Sequence
  Synthetic
aaatgatggtagatggttttgtg

SEQ ID NO: 14520 - DNA, 18 bp, Artificial Sequence
  Synthetic
ggtggacgtgcattcatg

SEQ ID NO: 14521 - DNA, 18 bp, Artificial Sequence
  Synthetic
cagctgcagcctatcttg

SEQ ID NO: 14522 - DNA, 22 bp, Artificial Sequence
  Synthetic
taatcatggctgtacatgtgac

SEQ ID NO: 14523 - DNA, 23 bp, Artificial Sequence
  Synthetic
tatggtaatgttagtagacagga

SEQ ID NO: 14524 - DNA, 25 bp, Artificial Sequence
  Synthetic
tcttaatgggaatttctatgacttc

SEQ ID NO: 14525 - DNA, 19 bp, Artificial Sequence
  Synthetic
tcttcgcaaccacaattcc

SEQ ID NO: 14526 - DNA, 23 bp, Artificial Sequence
  Synthetic
gctttgagtacaggattaacatc

SEQ ID NO: 14527 - DNA, 25 bp, Artificial Sequence
  Synthetic
tgactcagttaaatcttaaatacgc

SEQ ID NO: 14528 - DNA, 23 bp, Artificial Sequence
  Synthetic
gcaaaagcatttttctatgatga

SEQ ID NO: 14529 - DNA, 20 bp, Artificial Sequence
  Synthetic
catcactaagactgatgctg

SEQ ID NO: 14530 - DNA, 20 bp, Artificial Sequence
  Synthetic
accacaaaccacatctttca

SEQ ID NO: 14531 - DNA, 23 bp, Artificial Sequence
  Synthetic
catgcttccaaattacaaaagac

SEQ ID NO: 14532 - DNA, 18 bp, Artificial Sequence
  Synthetic
tcctcctggtagtggaaa

SEQ ID NO: 14533 - DNA, 22 bp, Artificial Sequence
  Synthetic
tctatgtgcactaactatgact

SEQ ID NO: 14534 - DNA, 25 bp, Artificial Sequence
  Synthetic
agcgatttatacataaaaactccac

SEQ ID NO: 14535 - DNA, 19 bp, Artificial Sequence
  Synthetic
gtttaaggattgtgcacgt

SEQ ID NO: 14536 - DNA, 20 bp, Artificial Sequence
  Synthetic
tcatgtcagaggttggttag

SEQ ID NO: 14537 - DNA, 18 bp, Artificial Sequence
  Synthetic
ggtgtttgtactttgggc

SEQ ID NO: 14538 - DNA, 23 bp, Artificial Sequence
  Synthetic
gtatgactgctttgttaagaatg

SEQ ID NO: 14539 - DNA, 22 bp, Artificial Sequence
  Synthetic
tgaattctcaattgtttgcagg

SEQ ID NO: 14540 - DNA, 23 bp, Artificial Sequence
  Synthetic
ataacatttttactcaagctggt

SEQ ID NO: 14541 - DNA, 21 bp, Artificial Sequence
  Synthetic
ttgtcgccacatataagtttg

SEQ ID NO: 14542 - DNA, 22 bp, Artificial Sequence
  Synthetic
ttaactggtttgtttacgtacg

SEQ ID NO: 14543 - DNA, 22 bp, Artificial Sequence
  Synthetic
tcctagttctaagactgtttgt

SEQ ID NO: 14544 - DNA, 25 bp, Artificial Sequence
  Synthetic
tgtgtcaatattttaacagtaccac

SEQ ID NO: 14545 - DNA, 23 bp, Artificial Sequence
  Synthetic
gttgtcggaattaactatcttgg

SEQ ID NO: 14546 - DNA, 19 bp, Artificial Sequence
  Synthetic
tgccttgttgcatattgct

SEQ ID NO: 14547 - DNA, 20 bp, Artificial Sequence
  Synthetic
gatgctcacataccatttgg

SEQ ID NO: 14548 - DNA, 23 bp, Artificial Sequence
  Synthetic
agatggtttttattctacaagcc

SEQ ID NO: 14549 - DNA, 25 bp, Artificial Sequence
  Synthetic
aatatttatgatgtatctggtgtgg

SEQ ID NO: 14550 - DNA, 25 bp, Artificial Sequence
  Synthetic
gttttaacttattctagttttggcg

SEQ ID NO: 14551 - DNA, 20 bp, Artificial Sequence
  Synthetic
ctgcagatgttagtgagatg

SEQ ID NO: 14552 - DNA, 22 bp, Artificial Sequence
  Synthetic
ttctttaattggtggaattgct

SEQ ID NO: 14553 - DNA, 22 bp, Artificial Sequence
  Synthetic
tctatgacagacttgacactat

SEQ ID NO: 14554 - DNA, 18 bp, Artificial Sequence
  Synthetic
ggttgtgcgttgatggta

SEQ ID NO: 14555 - DNA, 22 bp, Artificial Sequence
  Synthetic
tacaaattgccaaattacactg

SEQ ID NO: 14556 - DNA, 20 bp, Artificial Sequence
  Synthetic
ggcttctttagttgttttgc

SEQ ID NO: 14557 - DNA, 24 bp, Artificial Sequence
  Synthetic
ttctaatccttttcgtttatgtgc

SEQ ID NO: 14558 - DNA, 19 bp, Artificial Sequence
  Synthetic
agctagtggatgatcatgc

SEQ ID NO: 14559 - DNA, 20 bp, Artificial Sequence
  Synthetic
ttgaagatgcttgtactgtg

SEQ ID NO: 14560 - DNA, 24 bp, Artificial Sequence
  Synthetic
taatttatagtagagtcggaaggt

SEQ ID NO: 14561 - DNA, 21 bp, Artificial Sequence
  Synthetic
tacccatcaacaagaaagaca

SEQ ID NO: 14562 - DNA, 20 bp, Artificial Sequence
  Synthetic
ggaatccttcaagtgacaga

SEQ ID NO: 14563 - DNA, 18 bp, Artificial Sequence
  Synthetic
aaatgcaaaagccacggt

SEQ ID NO: 14564 - DNA, 22 bp, Artificial Sequence
  Synthetic
attcactagagaaatgcaacaa

SEQ ID NO: 14565 - DNA, 24 bp, Artificial Sequence
  Synthetic
tcagagctgcttttaattaacatg

SEQ ID NO: 14566 - DNA, 20 bp, Artificial Sequence
  Synthetic
ctcatgtcctgtttctgtgt

SEQ ID NO: 14567 - DNA, 19 bp, Artificial Sequence
  Synthetic
gcgatgagtgtctagactc

SEQ ID NO: 14568 - DNA, 20 bp, Artificial Sequence
  Synthetic
aaaagacggctgtttgaggg

SEQ ID NO: 14569 - DNA, 18 bp, Artificial Sequence
  Synthetic
ccgcggcataaaagtgtt

SEQ ID NO: 14570 - DNA, 22 bp, Artificial Sequence
  Synthetic
gcatggctaaaaagtaacaatc

SEQ ID NO: 14571 - DNA, 22 bp, Artificial Sequence
  Synthetic
agtcatgaactgtatacaacac

SEQ ID NO: 14572 - DNA, 21 bp, Artificial Sequence
  Synthetic
agaaagaaaacatagatcgcg

SEQ ID NO: 14573 - DNA, 24 bp, Artificial Sequence
  Synthetic
atatatatagacattgtgtggggt

SEQ ID NO: 14574 - DNA, 19 bp, Artificial Sequence
  Synthetic
cttaggccaagtgtggtgg

SEQ ID NO: 14575 - DNA, 18 bp, Artificial Sequence
  Synthetic
cacttccacgcctaaacg

SEQ ID NO: 14576 - DNA, 18 bp, Artificial Sequence
  Synthetic
tccaaagggcaagggacc

SEQ ID NO: 14577 - DNA, 23 bp, Artificial Sequence
  Synthetic
ttagaagatacttatgctgagga

SEQ ID NO: 14578 - DNA, 19 bp, Artificial Sequence
  Synthetic
cttggtacgtaaacgcaaa

SEQ ID NO: 14579 - DNA, 20 bp, Artificial Sequence
  Synthetic
atctgggaatcagtacagag

SEQ ID NO: 14580 - DNA, 19 bp, Artificial Sequence
  Synthetic
tgccatgtttttctttggt

SEQ ID NO: 14581 - DNA, 25 bp, Artificial Sequence
  Synthetic
tctcatattaatgtaatggatccag

SEQ ID NO: 14582 - DNA, 17 bp, Artificial Sequence
  Synthetic
gtccgcggaaatccagc

SEQ ID NO: 14583 - DNA, 19 bp, Artificial Sequence
  Synthetic
gcatggacatctctccgtc

SEQ ID NO: 14584 - DNA, 20 bp, Artificial Sequence
  Synthetic
agtgtcgttggatctgaggg

SEQ ID NO: 14585 - DNA, 16 bp, Artificial Sequence
  Synthetic
gcctggtgacctgcct

SEQ ID NO: 14586 - DNA, 19 bp, Artificial Sequence
  Synthetic
aacatgtacccggcagtcc

SEQ ID NO: 14587 - DNA, 18 bp, Artificial Sequence
  Synthetic
aacattagcatcccggcg

SEQ ID NO: 14588 - DNA, 19 bp, Artificial Sequence
  Synthetic
accatccttttgccaatca

SEQ ID NO: 14589 - DNA, 20 bp, Artificial Sequence
  Synthetic
ccaggggggactttatgtga

SEQ ID NO: 14590 - DNA, 16 bp, Artificial Sequence
  Synthetic
gtcgctgactccgcca

SEQ ID NO: 14591 - DNA, 19 bp, Artificial Sequence
  Synthetic
cagctcctaagaaggcacc

SEQ ID NO: 14592 - DNA, 16 bp, Artificial Sequence
  Synthetic
accctaggcgtcccct

SEQ ID NO: 14593 - DNA, 17 bp, Artificial Sequence
  Synthetic
cacacacccacccgtct

SEQ ID NO: 14594 - DNA, 18 bp, Artificial Sequence
  Synthetic
aaaggtcagggcccaagg

SEQ ID NO: 14595 - DNA, 17 bp, Artificial Sequence
  Synthetic
acacccaggcacacact

SEQ ID NO: 14596 - DNA, 20 bp, Artificial Sequence
  Synthetic
ccaaaattggtgccttgctc

SEQ ID NO: 14597 - DNA, 16 bp, Artificial Sequence
  Synthetic
acacgttagggggcgc

SEQ ID NO: 14598 - DNA, 18 bp, Artificial Sequence
  Synthetic
ttgtcggaggtggagagg

SEQ ID NO: 14599 - DNA, 20 bp, Artificial Sequence
  Synthetic
aaactctaggcctgtggagc

SEQ ID NO: 14600 - DNA, 19 bp, Artificial Sequence
  Synthetic
gctccagggaatctttggg

SEQ ID NO: 14601 - DNA, 16 bp, Artificial Sequence
  Synthetic
tccccgctgaccagtc

SEQ ID NO: 14602 - DNA, 19 bp, Artificial Sequence
  Synthetic
gcagcttgtccttgaggag

SEQ ID NO: 14603 - DNA, 16 bp, Artificial Sequence
  Synthetic
tcgggagaggcgcctt

SEQ ID NO: 14604 - DNA, 16 bp, Artificial Sequence
  Synthetic
agagggccggtctcga

SEQ ID NO: 14605 - DNA, 16 bp, Artificial Sequence
  Synthetic
gccgaggccaccttgt

SEQ ID NO: 14606 - DNA, 17 bp, Artificial Sequence
  Synthetic
cctgttgtctggccacg

SEQ ID NO: 14607 - DNA, 20 bp, Artificial Sequence
  Synthetic
tctaggtcagacaggtagcg

SEQ ID NO: 14608 - DNA, 18 bp, Artificial Sequence
  Synthetic
gagaatggccgcgagttt

SEQ ID NO: 14609 - DNA, 18 bp, Artificial Sequence
  Synthetic
ctggatgccctccacgac

SEQ ID NO: 14610 - DNA, 16 bp, Artificial Sequence
  Synthetic
agctgcccccgtcaag

SEQ ID NO: 14611 - DNA, 18 bp, Artificial Sequence
  Synthetic
agctcgttggagaggacc

SEQ ID NO: 14612 - DNA, 19 bp, Artificial Sequence
  Synthetic
gagaaccacgagaggtgcc

SEQ ID NO: 14613 - DNA, 20 bp, Artificial Sequence
  Synthetic
gacagcgggcaagttttgtg

SEQ ID NO: 14614 - DNA, 16 bp, Artificial Sequence
  Synthetic
gtgctgcagccctcga

SEQ ID NO: 14615 - DNA, 17 bp, Artificial Sequence
  Synthetic
gccttcactggccctgt

SEQ ID NO: 14616 - DNA, 18 bp, Artificial Sequence
  Synthetic
cacctccgccacctccta

SEQ ID NO: 14617 - DNA, 20 bp, Artificial Sequence
  Synthetic
acgtgacatggagaaactgg

SEQ ID NO: 14618 - DNA, 16 bp, Artificial Sequence
  Synthetic
ccaggcccgcatgagt

SEQ ID NO: 14619 - DNA, 16 bp, Artificial Sequence
  Synthetic
cagccgcttcttgggc

SEQ ID NO: 14620 - DNA, 18 bp, Artificial Sequence
  Synthetic
ggggtactgggggtggtt

SEQ ID NO: 14621 - DNA, 19 bp, Artificial Sequence
  Synthetic
caacatgagacgtgaccgg

SEQ ID NO: 14622 - DNA, 18 bp, Artificial Sequence
  Synthetic
cacctggcttctgaccgg

SEQ ID NO: 14623 - DNA, 20 bp, Artificial Sequence
  Synthetic
tatagcctcagccatctacc

SEQ ID NO: 14624 - DNA, 18 bp, Artificial Sequence
  Synthetic
agcagctcagggaatggc

SEQ ID NO: 14625 - DNA, 16 bp, Artificial Sequence
  Synthetic
gcattagacgcgcgcg

SEQ ID NO: 14626 - DNA, 20 bp, Artificial Sequence
  Synthetic
tttgtcaatccatggcaggc

SEQ ID NO: 14627 - DNA, 18 bp, Artificial Sequence
  Synthetic
gtatgggttaccgcacgc

SEQ ID NO: 14628 - DNA, 20 bp, Artificial Sequence
  Synthetic
caacttagcagttcggcacc

SEQ ID NO: 14629 - DNA, 17 bp, Artificial Sequence
  Synthetic
cgagtcactgctgctgg

SEQ ID NO: 14630 - DNA, 20 bp, Artificial Sequence
  Synthetic
gcatcgcttaagtatgagtg

SEQ ID NO: 14631 - DNA, 19 bp, Artificial Sequence
  Synthetic
agggaatgaaagctcacgg

SEQ ID NO: 14632 - DNA, 18 bp, Artificial Sequence
  Synthetic
tgagggcagtgatagcga

SEQ ID NO: 14633 - DNA, 16 bp, Artificial Sequence
  Synthetic
gcagttcgcccagctc

SEQ ID NO: 14634 - DNA, 17 bp, Artificial Sequence
  Synthetic
gcgttccagcttcgtcc

SEQ ID NO: 14635 - DNA, 16 bp, Artificial Sequence
  Synthetic
cgccgctggagttcct

SEQ ID NO: 14636 - DNA, 19 bp, Artificial Sequence
  Synthetic
aggagcgacgagtatgtgg

SEQ ID NO: 14637 - DNA, 18 bp, Artificial Sequence
  Synthetic
cgaaaatactgccccgcg

SEQ ID NO: 14638 - DNA, 20 bp, Artificial Sequence
  Synthetic
ttctacaatgccagggggga

SEQ ID NO: 14639 - DNA, 17 bp, Artificial Sequence
  Synthetic
gcttggtgcctctgtgg

SEQ ID NO: 14640 - DNA, 18 bp, Artificial Sequence
  Synthetic
ggcatgtctgttccccct

SEQ ID NO: 14641 - DNA, 21 bp, Artificial Sequence
  Synthetic
actggaccctttaaaacatcc

SEQ ID NO: 14642 - DNA, 20 bp, Artificial Sequence
  Synthetic
attgtctgcgtacgctttcc

SEQ ID NO: 14643 - DNA, 18 bp, Artificial Sequence
  Synthetic
gacagcacctccaacagc

SEQ ID NO: 14644 - DNA, 20 bp, Artificial Sequence
  Synthetic
aatgcctctatgttggcaca

SEQ ID NO: 14645 - DNA, 17 bp, Artificial Sequence
  Synthetic
gcaccgagctgatgggt

SEQ ID NO: 14646 - DNA, 19 bp, Artificial Sequence
  Synthetic
aatctggttgtcggcctcc

SEQ ID NO: 14647 - DNA, 19 bp, Artificial Sequence
  Synthetic
cagacggatgtcaggtcgg

SEQ ID NO: 14648 - DNA, 19 bp, Artificial Sequence
  Synthetic
ctcaagtgtaagcagcccg

SEQ ID NO: 14649 - DNA, 19 bp, Artificial Sequence
  Synthetic
gtgctctcatccctgcaac

SEQ ID NO: 14650 - DNA, 20 bp, Artificial Sequence
  Synthetic
aaccagaaagatacccagag

SEQ ID NO: 14651 - DNA, 19 bp, Artificial Sequence
  Synthetic
cacgcatccctgtcttctc

SEQ ID NO: 14652 - DNA, 16 bp, Artificial Sequence
  Synthetic
ggctagcccccgcaaa

SEQ ID NO: 14653 - DNA, 17 bp, Artificial Sequence
  Synthetic
gaaaagggggtggcggt

SEQ ID NO: 14654 - DNA, 19 bp, Artificial Sequence
  Synthetic
ggtgtcttgggcatcatcc

SEQ ID NO: 14655 - DNA, 16 bp, Artificial Sequence
  Synthetic
gccccaagccttcgca

SEQ ID NO: 14656 - DNA, 20 bp, Artificial Sequence
  Synthetic
gacaaggcagtagaggacac

SEQ ID NO: 14657 - DNA, 20 bp, Artificial Sequence
  Synthetic
caggcaccgtctgtatacgt

SEQ ID NO: 14658 - DNA, 18 bp, Artificial Sequence
  Synthetic
gccaccacagcacaagtg

SEQ ID NO: 14659 - DNA, 18 bp, Artificial Sequence
  Synthetic
ccttccccgggaatgtgt

SEQ ID NO: 14660 - DNA, 19 bp, Artificial Sequence
  Synthetic
tctcctaggaatgccgagc

SEQ ID NO: 14661 - DNA, 17 bp, Artificial Sequence
  Synthetic
gttgcgctcgacgaact

SEQ ID NO: 14662 - DNA, 16 bp, Artificial Sequence
  Synthetic
cgtcagcacccccaca

SEQ ID NO: 14663 - DNA, 18 bp, Artificial Sequence
  Synthetic
gggaaagaggccgttggc

SEQ ID NO: 14664 - DNA, 18 bp, Artificial Sequence
  Synthetic
cccagtaggtgcctggct

SEQ ID NO: 14665 - DNA, 19 bp, Artificial Sequence
  Synthetic
accccctctatgtcttcgc

SEQ ID NO: 14666 - DNA, 19 bp, Artificial Sequence
  Synthetic
gaaggcccgtctgtagagg

SEQ ID NO: 14667 - DNA, 18 bp, Artificial Sequence
  Synthetic
gtcccctctgccgtggaa

SEQ ID NO: 14668 - DNA, 16 bp, Artificial Sequence
  Synthetic
gccgcatccacgtcct

SEQ ID NO: 14669 - DNA, 19 bp, Artificial Sequence
  Synthetic
gcaaagatctgcgtggaca

SEQ ID NO: 14670 - DNA, 16 bp, Artificial Sequence
  Synthetic
acctgtggcccgcgta

SEQ ID NO: 14671 - DNA, 18 bp, Artificial Sequence
  Synthetic
cgatgtcggctgtcctgc

SEQ ID NO: 14672 - DNA, 16 bp, Artificial Sequence
  Synthetic
cgggaggccgtgcttt

SEQ ID NO: 14673 - DNA, 20 bp, Artificial Sequence
  Synthetic
gagcggtctgtataaaaacg

SEQ ID NO: 14674 - DNA, 25 bp, Artificial Sequence
  Synthetic
agacaaatatgattggaaatagacc

SEQ ID NO: 14675 - DNA, 23 bp, Artificial Sequence
  Synthetic
gttagtgcaagattccaataacg

SEQ ID NO: 14676 - DNA, 23 bp, Artificial Sequence
  Synthetic
actgtactgaattccaaatgatt

SEQ ID NO: 14677 - DNA, 25 bp, Artificial Sequence
  Synthetic
agtttatgaaataactaatgccacc

SEQ ID NO: 14678 - DNA, 20 bp, Artificial Sequence
  Synthetic
tattttgaggatgcaaacgg

SEQ ID NO: 14679 - DNA, 18 bp, Artificial Sequence
  Synthetic
aacaattgcaccgactcg

SEQ ID NO: 14680 - DNA, 24 bp, Artificial Sequence
  Synthetic
tggagaagaaattcctttagatcc

SEQ ID NO: 14681 - DNA, 19 bp, Artificial Sequence
  Synthetic
atcttccacctcaaaagcc

SEQ ID NO: 14682 - DNA, 23 bp, Artificial Sequence
  Synthetic
gagattgtcctcctattgaatta

SEQ ID NO: 14683 - DNA, 19 bp, Artificial Sequence
  Synthetic
gggaacttgcctttgtacc

SEQ ID NO: 14684 - DNA, 25 bp, Artificial Sequence
  Synthetic
cacgtatattttatttttcaaccgc

SEQ ID NO: 14685 - DNA, 20 bp, Artificial Sequence
  Synthetic
ctactggtcctgttatgtgc

SEQ ID NO: 14686 - DNA, 18 bp, Artificial Sequence
  Synthetic
ctgcttccagtgagatca

SEQ ID NO: 14687 - DNA, 18 bp, Artificial Sequence
  Synthetic
atttgctatggctgacgg

SEQ ID NO: 14688 - DNA, 18 bp, Artificial Sequence
  Synthetic
ttgctaaaacccggagac

SEQ ID NO: 14689 - DNA, 22 bp, Artificial Sequence
  Synthetic
gttacaggactaaggaacattc

SEQ ID NO: 14690 - DNA, 25 bp, Artificial Sequence
  Synthetic
tgattatcccaaatattcagaagag

SEQ ID NO: 14691 - DNA, 18 bp, Artificial Sequence
  Synthetic
caaggttcgttggcagac

SEQ ID NO: 14692 - DNA, 23 bp, Artificial Sequence
  Synthetic
tgagctacttaattttgatcaca

SEQ ID NO: 14693 - DNA, 25 bp, Artificial Sequence
  Synthetic
taagttattagacttagtggagaag

SEQ ID NO: 14694 - DNA, 21 bp, Artificial Sequence
  Synthetic
cgtgcttgctacaaatttagg

SEQ ID NO: 14695 - DNA, 19 bp, Artificial Sequence
  Synthetic
atttgacgaagggacagac

SEQ ID NO: 14696 - DNA, 23 bp, Artificial Sequence
  Synthetic
aaatgaagctgaagatctttctg

SEQ ID NO: 14697 - DNA, 23 bp, Artificial Sequence
  Synthetic
tgaatgatgacttaattgaaagc

SEQ ID NO: 14698 - DNA, 21 bp, Artificial Sequence
  Synthetic
tcctgaatggatacttacaca

SEQ ID NO: 14699 - DNA, 21 bp, Artificial Sequence
  Synthetic
cagcagagttaaatcctttgc

SEQ ID NO: 14700 - DNA, 22 bp, Artificial Sequence
  Synthetic
agactttaagacaagagcaaat

SEQ ID NO: 14701 - DNA, 18 bp, Artificial Sequence
  Synthetic
tcttcgccaccaactgga

SEQ ID NO: 14702 - DNA, 16 bp, Artificial Sequence
  Synthetic
aaaggggaggggagcg

SEQ ID NO: 14703 - DNA, 18 bp, Artificial Sequence
  Synthetic
cacgattactggctgagg

SEQ ID NO: 14704 - DNA, 23 bp, Artificial Sequence
  Synthetic
atgatctgtaagctttactaacg

SEQ ID NO: 14705 - DNA, 19 bp, Artificial Sequence
  Synthetic
ataagtacaggccgtggca

SEQ ID NO: 14706 - DNA, 22 bp, Artificial Sequence
  Synthetic
agaatcaattgctgagatacac

SEQ ID NO: 14707 - DNA, 24 bp, Artificial Sequence
  Synthetic
tgaggtcacacaaatatttgaaag

SEQ ID NO: 14708 - DNA, 20 bp, Artificial Sequence
  Synthetic
gaaatgcaattattggggga

SEQ ID NO: 14709 - DNA, 19 bp, Artificial Sequence
  Synthetic
cagtggcgagagttcaaag

SEQ ID NO: 14710 - DNA, 18 bp, Artificial Sequence
  Synthetic
gtttgggcctgtagaggt

SEQ ID NO: 14711 - DNA, 22 bp, Artificial Sequence
  Synthetic
ttatgttagaggaggttcagtt

SEQ ID NO: 14712 - DNA, 20 bp, Artificial Sequence
  Synthetic
agatcactgaaagccagaga

SEQ ID NO: 14713 - DNA, 20 bp, Artificial Sequence
  Synthetic
ctttcttctagcatggacca

SEQ ID NO: 14714 - DNA, 20 bp, Artificial Sequence
  Synthetic
ctcaagggcgttatattgga

SEQ ID NO: 14715 - DNA, 18 bp, Artificial Sequence
  Synthetic
gcaagaagcttgtggatg

SEQ ID NO: 14716 - DNA, 18 bp, Artificial Sequence
  Synthetic
ggcaggagaaatcccatc

SEQ ID NO: 14717 - DNA, 18 bp, Artificial Sequence
  Synthetic
atgggggttaaagggaga

SEQ ID NO: 14718 - DNA, 19 bp, Artificial Sequence
  Synthetic
gcatggtatcaacagtggg

SEQ ID NO: 14719 - DNA, 18 bp, Artificial Sequence
  Synthetic
gtgtagctgcttctggtg

SEQ ID NO: 14720 - DNA, 19 bp, Artificial Sequence
  Synthetic
cagttagtctggacggatg

SEQ ID NO: 14721 - DNA, 24 bp, Artificial Sequence
  Synthetic
ctaccttcctttagtaaagaatgt

SEQ ID NO: 14722 - DNA, 19 bp, Artificial Sequence
  Synthetic
attgggttgattggtttgg

SEQ ID NO: 14723 - DNA, 20 bp, Artificial Sequence
  Synthetic
ttctcaaaagggattgacgg

SEQ ID NO: 14724 - DNA, 20 bp, Artificial Sequence
  Synthetic
tgaagctaacagaacattgc

SEQ ID NO: 14725 - DNA, 20 bp, Artificial Sequence
  Synthetic
catcgcaatcgtaagtatcc

SEQ ID NO: 14726 - DNA, 19 bp, Artificial Sequence
  Synthetic
cctctttgtgaacagtgtc

SEQ ID NO: 14727 - DNA, 20 bp, Artificial Sequence
  Synthetic
tacagggtgttatgttttgc

SEQ ID NO: 14728 - DNA, 22 bp, Artificial Sequence
  Synthetic
aactttttggatatctgccttc

SEQ ID NO: 14729 - DNA, 25 bp, Artificial Sequence
  Synthetic
gaagaagataaaactaagaatcagg

SEQ ID NO: 14730 - DNA, 20 bp, Artificial Sequence
  Synthetic
ggctcttttgttgagtttga

SEQ ID NO: 14731 - DNA, 22 bp, Artificial Sequence
  Synthetic
caatgttctgttatctccagat

SEQ ID NO: 14732 - DNA, 19 bp, Artificial Sequence
  Synthetic
atgcggttttaaagatggc

SEQ ID NO: 14733 - DNA, 22 bp, Artificial Sequence
  Synthetic
tctgattgagggacttctatca

SEQ ID NO: 14734 - DNA, 21 bp, Artificial Sequence
  Synthetic
gtttctcggaaatcacaaact

SEQ ID NO: 14735 - DNA, 21 bp, Artificial Sequence
  Synthetic
ctgaataggaattcctcgacc

SEQ ID NO: 14736 - DNA, 18 bp, Artificial Sequence
  Synthetic
cttcgccaagctttgagt

SEQ ID NO: 14737 - DNA, 22 bp, Artificial Sequence
  Synthetic
cttcgcattcttattaccaatg

SEQ ID NO: 14738 - DNA, 19 bp, Artificial Sequence
  Synthetic
ttacagtttgtggagggtt

SEQ ID NO: 14739 - DNA, 22 bp, Artificial Sequence
  Synthetic
taaacaatatgctcaatacggg

SEQ ID NO: 14740 - DNA, 19 bp, Artificial Sequence
  Synthetic
ctttcggaacaacaactgc

SEQ ID NO: 14741 - DNA, 22 bp, Artificial Sequence
  Synthetic
aaagcctgtacagaatacaaga

SEQ ID NO: 14742 - DNA, 23 bp, Artificial Sequence
  Synthetic
gtttaacagtagatcaactttcc

SEQ ID NO: 14743 - DNA, 19 bp, Artificial Sequence
  Synthetic
cttgccctttatgtggtct

SEQ ID NO: 14744 - DNA, 25 bp, Artificial Sequence
  Synthetic
tcctacttaacctattttacagatg

SEQ ID NO: 14745 - DNA, 19 bp, Artificial Sequence
  Synthetic
tggctatggcttttatggg

SEQ ID NO: 14746 - DNA, 19 bp, Artificial Sequence
  Synthetic
aagcactcctcctatcaca

SEQ ID NO: 14747 - DNA, 21 bp, Artificial Sequence
  Synthetic
ccaacaacattatactcccct

SEQ ID NO: 14748 - DNA, 19 bp, Artificial Sequence
  Synthetic
ctgttgaagtacgtccctt

SEQ ID NO: 14749 - DNA, 20 bp, Artificial Sequence
  Synthetic
aggctgataaatgttttcgg

SEQ ID NO: 14750 - DNA, 18 bp, Artificial Sequence
  Synthetic
ttgtcgcgaatagtcaca

SEQ ID NO: 14751 - DNA, 23 bp, Artificial Sequence
  Synthetic
tttgattttctctactaagtcgt

SEQ ID NO: 14752 - DNA, 18 bp, Artificial Sequence
  Synthetic
gttatccccaggcatgac

SEQ ID NO: 14753 - DNA, 18 bp, Artificial Sequence
  Synthetic
gtttggcaagcaaacaac

SEQ ID NO: 14754 - DNA, 19 bp, Artificial Sequence
  Synthetic
cctcttacaaaccgcattt

SEQ ID NO: 14755 - DNA, 21 bp, Artificial Sequence
  Synthetic
attgcttctctcttttccaaa

SEQ ID NO: 14756 - DNA, 18 bp, Artificial Sequence
  Synthetic
gagcctgtgcagaatgtg

SEQ ID NO: 14757 - DNA, 22 bp, Artificial Sequence
  Synthetic
taaagtaacaggactatcccct

SEQ ID NO: 14758 - DNA, 18 bp, Artificial Sequence
  Synthetic
accggtactttgcaacac

SEQ ID NO: 14759 - DNA, 25 bp, Artificial Sequence
  Synthetic
gaaacaagaagttctttttcaacac

SEQ ID NO: 14760 - DNA, 23 bp, Artificial Sequence
  Synthetic
gaccttatctttgggatacagat

SEQ ID NO: 14761 - DNA, 18 bp, Artificial Sequence
  Synthetic
agaaaacaggcaagccat

SEQ ID NO: 14762 - DNA, 21 bp, Artificial Sequence
  Synthetic
ccaacataaaactggagttct

SEQ ID NO: 14763 - DNA, 23 bp, Artificial Sequence
  Synthetic
atatcattctctgtaacaacctc

SEQ ID NO: 14764 - DNA, 25 bp, Artificial Sequence
  Synthetic
cggtcttaattccattaataagact

SEQ ID NO: 14765 - DNA, 18 bp, Artificial Sequence
  Synthetic
gcagacactacatgccaa

SEQ ID NO: 14766 - DNA, 18 bp, Artificial Sequence
  Synthetic
ttgttgtgtccttccgtt

SEQ ID NO: 14767 - DNA, 19 bp, Artificial Sequence
  Synthetic
cgtagcaaaaatctcccca

SEQ ID NO: 14768 - DNA, 20 bp, Artificial Sequence
  Synthetic
tcttcccaaaagacttcaga

SEQ ID NO: 14769 - DNA, 18 bp, Artificial Sequence
  Synthetic
aactgacaaaagctgccg

SEQ ID NO: 14770 - DNA, 18 bp, Artificial Sequence
  Synthetic
ccgtagtggttcgggatt

SEQ ID NO: 14771 - DNA, 18 bp, Artificial Sequence
  Synthetic
aaacggtgcaactcgatc

SEQ ID NO: 14772 - DNA, 25 bp, Artificial Sequence
  Synthetic
caaaaataggattagaagaacttcc

SEQ ID NO: 14773 - DNA, 23 bp, Artificial Sequence
  Synthetic
gctggattcacaatagtaaatgc

SEQ ID NO: 14774 - DNA, 21 bp, Artificial Sequence
  Synthetic
cagaacacatcacttcagaag

SEQ ID NO: 14775 - DNA, 21 bp, Artificial Sequence
  Synthetic
taatccagactcttcctcatc

SEQ ID NO: 14776 - DNA, 19 bp, Artificial Sequence
  Synthetic
aaggcagaaggatcttgtt

SEQ ID NO: 14777 - DNA, 19 bp, Artificial Sequence
  Synthetic
cttgcttgcgttattttcg

SEQ ID NO: 14778 - DNA, 21 bp, Artificial Sequence
  Synthetic
cctttaattacagctgggatg

SEQ ID NO: 14779 - DNA, 21 bp, Artificial Sequence
  Synthetic
atttcaacattgcgatcatca

SEQ ID NO: 14780 - DNA, 21 bp, Artificial Sequence
  Synthetic
ttaaacacgtacagaaagcaa

SEQ ID NO: 14781 - DNA, 18 bp, Artificial Sequence
  Synthetic
tgactgcgctatgaggat

SEQ ID NO: 14782 - DNA, 23 bp, Artificial Sequence
  Synthetic
tcaaatcaatgatttccacttca

SEQ ID NO: 14783 - DNA, 19 bp, Artificial Sequence
  Synthetic
ttggacaataaaatgcgcg

SEQ ID NO: 14784 - DNA, 24 bp, Artificial Sequence
  Synthetic
taccgaatctctaataatggatca

SEQ ID NO: 14785 - DNA, 18 bp, Artificial Sequence
  Synthetic
gtgctgctatccccgata

SEQ ID NO: 14786 - DNA, 18 bp, Artificial Sequence
  Synthetic
atccaccatccctgcttc

SEQ ID NO: 14787 - DNA, 20 bp, Artificial Sequence
  Synthetic
aaattcactgctttagcctg

SEQ ID NO: 14788 - DNA, 18 bp, Artificial Sequence
  Synthetic
aaaacgacgaggacccta

SEQ ID NO: 14789 - DNA, 21 bp, Artificial Sequence
  Synthetic
gtgctgcttgagaattcttac

SEQ ID NO: 14790 - DNA, 22 bp, Artificial Sequence
  Synthetic
gaaaactcgaatccaaactttc

SEQ ID NO: 14791 - DNA, 20 bp, Artificial Sequence
  Synthetic
gacgctgtagcataatcaat

SEQ ID NO: 14792 - DNA, 20 bp, Artificial Sequence
  Synthetic
agaacgcaaagattttcacg

SEQ ID NO: 14793 - DNA, 19 bp, Artificial Sequence
  Synthetic
gtgtgcccaatcatttcag

SEQ ID NO: 14794 - DNA, 22 bp, Artificial Sequence
  Synthetic
atatgctgatcaaattttggct

SEQ ID NO: 14795 - DNA, 25 bp, Artificial Sequence
  Synthetic
agaatccccttagaagttacttaaa

SEQ ID NO: 14796 - DNA, 21 bp, Artificial Sequence
  Synthetic
aggattaaccagcaaatacac

SEQ ID NO: 14797 - DNA, 19 bp, Artificial Sequence
  Synthetic
ttcctgctttcatcatggg

SEQ ID NO: 14798 - DNA, 19 bp, Artificial Sequence
  Synthetic
aaaattgggatagcgctct

SEQ ID NO: 14799 - DNA, 20 bp, Artificial Sequence
  Synthetic
ttgattaaccaaaagagcgc

SEQ ID NO: 14800 - DNA, 19 bp, Artificial Sequence
  Synthetic
tagctttcgatgctcaacc

SEQ ID NO: 14801 - DNA, 20 bp, Artificial Sequence
  Synthetic
atcgcagaagaaaaattccc

SEQ ID NO: 14802 - DNA, 19 bp, Artificial Sequence
  Synthetic
acctatgaagaagctcgtc

SEQ ID NO: 14803 - DNA, 20 bp, Artificial Sequence
  Synthetic
agactttaggagatcgtgtg

SEQ ID NO: 14804 - DNA, 25 bp, Artificial Sequence
  Synthetic
ttatcctttatctaacagtctctct

SEQ ID NO: 14805 - DNA, 25 bp, Artificial Sequence
  Synthetic
gtctctttactattaggaattaacg

SEQ ID NO: 14806 - DNA, 21 bp, Artificial Sequence
  Synthetic
tcaatgaccttcctatgtctc

SEQ ID NO: 14807 - DNA, 19 bp, Artificial Sequence
  Synthetic
catcgacaagattccctcc

SEQ ID NO: 14808 - DNA, 19 bp, Artificial Sequence
  Synthetic
aaagcagtgaaaacttgcc

SEQ ID NO: 14809 - DNA, 20 bp, Artificial Sequence
  Synthetic
ctttcaatcttcgggacaac

SEQ ID NO: 14810 - DNA, 19 bp, Artificial Sequence
  Synthetic
tcgtgcaagtatgttcaac

SEQ ID NO: 14811 - DNA, 24 bp, Artificial Sequence
  Synthetic
acgtttagaaattctagaagatgc

SEQ ID NO: 14812 - DNA, 22 bp, Artificial Sequence
  Synthetic
ctaaaaattcgtctaactgctg

SEQ ID NO: 14813 - DNA, 20 bp, Artificial Sequence
  Synthetic
aacttctacaatagcgtgca

SEQ ID NO: 14814 - DNA, 18 bp, Artificial Sequence
  Synthetic
tcttgaacgcaacgagaa

SEQ ID NO: 14815 - DNA, 19 bp, Artificial Sequence
  Synthetic
aacaggaaaatggagaggt

SEQ ID NO: 14816 - DNA, 18 bp, Artificial Sequence
  Synthetic
ccatttgttcgcgagtca

SEQ ID NO: 14817 - DNA, 18 bp, Artificial Sequence
  Synthetic
ttgtctcggacgttttgc

SEQ ID NO: 14818 - DNA, 21 bp, Artificial Sequence
  Synthetic
acatttctcgcatatgaacag

SEQ ID NO: 14819 - DNA, 21 bp, Artificial Sequence
  Synthetic
tgtgcgatcaaaaatacgttt

SEQ ID NO: 14820 - DNA, 21 bp, Artificial Sequence
  Synthetic
ccattttcaccatttcacaga

SEQ ID NO: 14821 - DNA, 22 bp, Artificial Sequence
  Synthetic
tatcacagatacatcaagagct

SEQ ID NO: 14822 - DNA, 18 bp, Artificial Sequence
  Synthetic
ccaaagcgacgaagaact

SEQ ID NO: 14823 - DNA, 19 bp, Artificial Sequence
  Synthetic
caagagatgcaaccagaag

SEQ ID NO: 14824 - DNA, 21 bp, Artificial Sequence
  Synthetic
tcggacaataaactcgtaacg

SEQ ID NO: 14825 - DNA, 19 bp, Artificial Sequence
  Synthetic
agcttcatcttgagcttct

SEQ ID NO: 14826 - DNA, 21 bp, Artificial Sequence
  Synthetic
gtcattttctgttcatttcgg

SEQ ID NO: 14827 - DNA, 18 bp, Artificial Sequence
  Synthetic
cgctatcgtcaacagcat

SEQ ID NO: 14828 - DNA, 18 bp, Artificial Sequence
  Synthetic
tttagtgcaccgttacga

SEQ ID NO: 14829 - DNA, 23 bp, Artificial Sequence
  Synthetic
tcgtctattaatccttctaacga

SEQ ID NO: 14830 - DNA, 21 bp, Artificial Sequence
  Synthetic
ttacgctcttttgaacatgtc

SEQ ID NO: 14831 - DNA, 22 bp, Artificial Sequence
  Synthetic
attagttgctatgtctacctct

SEQ ID NO: 14832 - DNA, 18 bp, Artificial Sequence
  Synthetic
agctctgtttggttcctt

SEQ ID NO: 14833 - DNA, 19 bp, Artificial Sequence
  Synthetic
ccaagaggttccttctcaa

SEQ ID NO: 14834 - DNA, 22 bp, Artificial Sequence
  Synthetic
aaggaattcgatacttggattc

SEQ ID NO: 14835 - DNA, 23 bp, Artificial Sequence
  Synthetic
atgacttttttcaagctaacatc

SEQ ID NO: 14836 - DNA, 25 bp, Artificial Sequence
  Synthetic
tcttagatagtcgcttattagtgaa

SEQ ID NO: 14837 - DNA, 18 bp, Artificial Sequence
  Synthetic
gttgacaatggcttgagc

SEQ ID NO: 14838 - DNA, 23 bp, Artificial Sequence
  Synthetic
ttttcaggttgagtatatggaag

SEQ ID NO: 14839 - DNA, 25 bp, Artificial Sequence
  Synthetic
tagaaactattgatcaaagtatccg

SEQ ID NO: 14840 - DNA, 21 bp, Artificial Sequence
  Synthetic
agagttagtggtcatacaagg

SEQ ID NO: 14841 - DNA, 22 bp, Artificial Sequence
  Synthetic
caaaaaaattatcaggacgctt

SEQ ID NO: 14842 - DNA, 20 bp, Artificial Sequence
  Synthetic
ccatcacacacagcttttac

SEQ ID NO: 14843 - DNA, 22 bp, Artificial Sequence
  Synthetic
actggaatatacacttcttccg

SEQ ID NO: 14844 - DNA, 21 bp, Artificial Sequence
  Synthetic
aaggaagtgatgattcgaaga

SEQ ID NO: 14845 - DNA, 18 bp, Artificial Sequence
  Synthetic
agaaatccccgccagaaa

SEQ ID NO: 14846 - DNA, 19 bp, Artificial Sequence
  Synthetic
cccatggatcgtttagagc

SEQ ID NO: 14847 - DNA, 21 bp, Artificial Sequence
  Synthetic
ctagctttgatcaattccgta

SEQ ID NO: 14848 - DNA, 18 bp, Artificial Sequence
  Synthetic
tttggcagtcattgagga

SEQ ID NO: 14849 - DNA, 20 bp, Artificial Sequence
  Synthetic
ttgctgattttgtggttctt

SEQ ID NO: 14850 - DNA, 18 bp, Artificial Sequence
  Synthetic
agcagagcaatacgttgg

SEQ ID NO: 14851 - DNA, 19 bp, Artificial Sequence
  Synthetic
tattcccccttaggtctgg

SEQ ID NO: 14852 - DNA, 22 bp, Artificial Sequence
  Synthetic
agcttttcttctttcagttctg

SEQ ID NO: 14853 - DNA, 19 bp, Artificial Sequence
  Synthetic
tattcatgcttcgatccca

SEQ ID NO: 14854 - DNA, 19 bp, Artificial Sequence
  Synthetic
tttctcggaagggagttgt

SEQ ID NO: 14855 - DNA, 18 bp, Artificial Sequence
  Synthetic
tttttgggcttctctgcg

SEQ ID NO: 14856 - DNA, 19 bp, Artificial Sequence
  Synthetic
gtgaaagcacaggttcatg

SEQ ID NO: 14857 - DNA, 21 bp, Artificial Sequence
  Synthetic
atgacaatgctctttatcgac

SEQ ID NO: 14858 - DNA, 25 bp, Artificial Sequence
  Synthetic
agaattattaagcaaggatttaccg

SEQ ID NO: 14859 - DNA, 20 bp, Artificial Sequence
  Synthetic
ttgcaaccgatagattctga

SEQ ID NO: 14860 - DNA, 18 bp, Artificial Sequence
  Synthetic
ccggaagtggctactacc

SEQ ID NO: 14861 - DNA, 21 bp, Artificial Sequence
  Synthetic
aatgtttgttcctttcgatcg

SEQ ID NO: 14862 - DNA, 18 bp, Artificial Sequence
  Synthetic
ttatgcctttgttgctgc

SEQ ID NO: 14863 - DNA, 21 bp, Artificial Sequence
  Synthetic
tcaaagagcatcatacgaaga

SEQ ID NO: 14864 - DNA, 19 bp, Artificial Sequence
  Synthetic
tgtcgttcggaaaatctcc

SEQ ID NO: 14865 - DNA, 18 bp, Artificial Sequence
  Synthetic
ccttatggctcagcttca

SEQ ID NO: 14866 - DNA, 18 bp, Artificial Sequence
  Synthetic
atttgttttcctccggga

SEQ ID NO: 14867 - DNA, 20 bp, Artificial Sequence
  Synthetic
ttggagattgaaagacacga

SEQ ID NO: 14868 - DNA, 21 bp, Artificial Sequence
  Synthetic
gtgtcagtcttttttctggat

SEQ ID NO: 14869 - DNA, 22 bp, Artificial Sequence
  Synthetic
tccgaataattacatctgttgc

SEQ ID NO: 14870 - DNA, 22 bp, Artificial Sequence
  Synthetic
gtgctttggttaaaattgctac

SEQ ID NO: 14871 - DNA, 18 bp, Artificial Sequence
  Synthetic
accacaggatacggcata

SEQ ID NO: 14872 - DNA, 25 bp, Artificial Sequence
  Synthetic
agcttagtctatttgtaaagtagtg

SEQ ID NO: 14873 - DNA, 19 bp, Artificial Sequence
  Synthetic
tagtttggttggtgagtga

SEQ ID NO: 14874 - DNA, 19 bp, Artificial Sequence
  Synthetic
tgaaatggcgttatgttcc

SEQ ID NO: 14875 - DNA, 25 bp, Artificial Sequence
  Synthetic
gataagactatcatgattaaagctg

SEQ ID NO: 14876 - DNA, 23 bp, Artificial Sequence
  Synthetic
gcccattaaagataatcattgga

SEQ ID NO: 14877 - DNA, 20 bp, Artificial Sequence
  Synthetic
aactctggatcagtttcctt

SEQ ID NO: 14878 - DNA, 18 bp, Artificial Sequence
  Synthetic
gcgagtagcttctttggt

SEQ ID NO: 14879 - DNA, 18 bp, Artificial Sequence
  Synthetic
atttgttcggagatgcgt

SEQ ID NO: 14880 - DNA, 18 bp, Artificial Sequence
  Synthetic
gcttccggactatcgaag

SEQ ID NO: 14881 - DNA, 23 bp, Artificial Sequence
  Synthetic
acagccttgtttttattaaaccc

SEQ ID NO: 14882 - DNA, 22 bp, Artificial Sequence
  Synthetic
aatgcaagaagatataatcgcc

SEQ ID NO: 14883 - DNA, 19 bp, Artificial Sequence
  Synthetic
agatggaaactgatgggga

SEQ ID NO: 14884 - DNA, 21 bp, Artificial Sequence
  Synthetic
aggacccatatacaagagagt

SEQ ID NO: 14885 - DNA, 19 bp, Artificial Sequence
  Synthetic
gacaatggtgatggagttg

SEQ ID NO: 14886 - DNA, 24 bp, Artificial Sequence
  Synthetic
caaatgaaaacatggatactatgg

SEQ ID NO: 14887 - DNA, 18 bp, Artificial Sequence
  Synthetic
ctctgccctgttagtgga

SEQ ID NO: 14888 - DNA, 19 bp, Artificial Sequence
  Synthetic
caagtgcttgtcatgatgg

SEQ ID NO: 14889 - DNA, 25 bp, Artificial Sequence
  Synthetic
gaaaagggaaagatagtcaaatcag

SEQ ID NO: 14890 - DNA, 22 bp, Artificial Sequence
  Synthetic
ggagtaaaagggttttcattca

SEQ ID NO: 14891 - DNA, 21 bp, Artificial Sequence
  Synthetic
tattgtggattcttgatcgtc

SEQ ID NO: 14892 - DNA, 25 bp, Artificial Sequence
  Synthetic
agaggctgaaaaaataaagatatgc

SEQ ID NO: 14893 - DNA, 19 bp, Artificial Sequence
  Synthetic
tctttgtctggtggatcct

SEQ ID NO: 14894 - DNA, 18 bp, Artificial Sequence
  Synthetic
cttggtgaatgccttgga

SEQ ID NO: 14895 - DNA, 21 bp, Artificial Sequence
  Synthetic
tgtgacaactactttcaagtg

SEQ ID NO: 14896 - DNA, 21 bp, Artificial Sequence
  Synthetic
catacattggagaagctgatg

SEQ ID NO: 14897 - DNA, 21 bp, Artificial Sequence
  Synthetic
aatccattccaaaaatcccag

SEQ ID NO: 14898 - DNA, 24 bp, Artificial Sequence
  Synthetic
gaatgacagaatttctcatgatga

SEQ ID NO: 14899 - DNA, 23 bp, Artificial Sequence
  Synthetic
tattttcaagttcaacgaaactg

SEQ ID NO: 14900 - DNA, 22 bp, Artificial Sequence
  Synthetic
atacaagaagctcaaaagagaa

SEQ ID NO: 14901 - DNA, 19 bp, Artificial Sequence
  Synthetic
tagcactacggcaaaggct

SEQ ID NO: 14902 - DNA, 21 bp, Artificial Sequence
  Synthetic
gccatagaaaaacacgtaacc

SEQ ID NO: 14903 - DNA, 20 bp, Artificial Sequence
  Synthetic
ggaaacaggctactatacca

SEQ ID NO: 14904 - DNA, 21 bp, Artificial Sequence
  Synthetic
gcaaaaatggcagataaaggt

SEQ ID NO: 14905 - DNA, 23 bp, Artificial Sequence
  Synthetic
aagtattttagtcctaaagctgt

SEQ ID NO: 14906 - DNA, 18 bp, Artificial Sequence
  Synthetic
aaatgttggggatgcaca

SEQ ID NO: 14907 - DNA, 21 bp, Artificial Sequence
  Synthetic
ggcaattagatctaagtgacc

SEQ ID NO: 14908 - DNA, 24 bp, Artificial Sequence
  Synthetic
tatcatggtgcctattttatggat

SEQ ID NO: 14909 - DNA, 20 bp, Artificial Sequence
  Synthetic
tctaaaggaaggtacgggcg

SEQ ID NO: 14910 - DNA, 18 bp, Artificial Sequence
  Synthetic
cgggagcaggagaaggag

SEQ ID NO: 14911 - DNA, 24 bp, Artificial Sequence
  Synthetic
aatactcttaagtgttatcgctac

SEQ ID NO: 14912 - DNA, 18 bp, Artificial Sequence
  Synthetic
ggtgaagggacgagtgta

SEQ ID NO: 14913 - DNA, 20 bp, Artificial Sequence
  Synthetic
acaaaaacttggtaggccta

SEQ ID NO: 14914 - DNA, 25 bp, Artificial Sequence
  Synthetic
gataataccccaacagtaataattc

SEQ ID NO: 14915 - DNA, 22 bp, Artificial Sequence
  Synthetic
gttggacacccttattttgaag

SEQ ID NO: 14916 - DNA, 21 bp, Artificial Sequence
  Synthetic
caatactggaacaaaggatga

SEQ ID NO: 14917 - DNA, 23 bp, Artificial Sequence
  Synthetic
ttggatatagtagactccacatg

SEQ ID NO: 14918 - DNA, 24 bp, Artificial Sequence
  Synthetic
aaattgccagttctatctatttcc

SEQ ID NO: 14919 - DNA, 25 bp, Artificial Sequence
  Synthetic
aaactttataaaaacatccactccc

SEQ ID NO: 14920 - DNA, 21 bp, Artificial Sequence
  Synthetic
aaaatcatgtgatggtggatt

SEQ ID NO: 14921 - DNA, 18 bp, Artificial Sequence
  Synthetic
gtgtctgtcttggtgcag

SEQ ID NO: 14922 - DNA, 19 bp, Artificial Sequence
  Synthetic
tcctacttggagtcaggaa

SEQ ID NO: 14923 - DNA, 20 bp, Artificial Sequence
  Synthetic
ggttttgttatgcagtttgg

SEQ ID NO: 14924 - DNA, 20 bp, Artificial Sequence
  Synthetic
gttttaggttgcaaggctat

SEQ ID NO: 14925 - DNA, 19 bp, Artificial Sequence
  Synthetic
gcacaagcatttcagagtg

SEQ ID NO: 14926 - DNA, 21 bp, Artificial Sequence
  Synthetic
attctgaaccacctaaagttg

SEQ ID NO: 14927 - DNA, 23 bp, Artificial Sequence
  Synthetic
tcctgaagatgatgactttcttg

SEQ ID NO: 14928 - DNA, 23 bp, Artificial Sequence
  Synthetic
ataaaaatttgcaggatctttgg

SEQ ID NO: 14929 - DNA, 23 bp, Artificial Sequence
  Synthetic
ccgatatggttaagtctaaagga

SEQ ID NO: 14930 - DNA, 18 bp, Artificial Sequence
  Synthetic
gggcactaagaaattggc

SEQ ID NO: 14931 - DNA, 23 bp, Artificial Sequence
  Synthetic
aagccttgtttttggataaagtg

SEQ ID NO: 14932 - DNA, 19 bp, Artificial Sequence
  Synthetic
gcaggttgttgttaatggt

SEQ ID NO: 14933 - DNA, 21 bp, Artificial Sequence
  Synthetic
atgtaaatgtggtgtaaagca

SEQ ID NO: 14934 - DNA, 23 bp, Artificial Sequence
  Synthetic
aatattattgtgacggaggtaag

SEQ ID NO: 14935 - DNA, 23 bp, Artificial Sequence
  Synthetic
taatagaccttcattggttgatg

SEQ ID NO: 14936 - DNA, 21 bp, Artificial Sequence
  Synthetic
tgcccttatcagtattcagat

SEQ ID NO: 14937 - DNA, 22 bp, Artificial Sequence
  Synthetic
actggcttttgttcaaaacatc

SEQ ID NO: 14938 - DNA, 19 bp, Artificial Sequence
  Synthetic
gcatgtgcagggtaatgtt

SEQ ID NO: 14939 - DNA, 23 bp, Artificial Sequence
  Synthetic
gctgtaatagatcaggattttgg

SEQ ID NO: 14940 - DNA, 21 bp, Artificial Sequence
  Synthetic
atgctaaaggttttatccgtt

SEQ ID NO: 14941 - DNA, 18 bp, Artificial Sequence
  Synthetic
gcctgtggattttttggc

SEQ ID NO: 14942 - DNA, 18 bp, Artificial Sequence
  Synthetic
tgcatatagggaggctgc

SEQ ID NO: 14943 - DNA, 20 bp, Artificial Sequence
  Synthetic
tttagctgcttataacggca

SEQ ID NO: 14944 - DNA, 25 bp, Artificial Sequence
  Synthetic
gtgttctgtagaagattttaatgtg

SEQ ID NO: 14945 - DNA, 21 bp, Artificial Sequence
  Synthetic
ttgtgttataagtttggccat

SEQ ID NO: 14946 - DNA, 22 bp, Artificial Sequence
  Synthetic
aagggttctaacttagaggaag

SEQ ID NO: 14947 - DNA, 23 bp, Artificial Sequence
  Synthetic
ccctcctaagaatagttttgaag

SEQ ID NO: 14948 - DNA, 19 bp, Artificial Sequence
  Synthetic
cgatgattacgcaaaggac

SEQ ID NO: 14949 - DNA, 19 bp, Artificial Sequence
  Synthetic
tggcagcaaatactctgaa

SEQ ID NO: 14950 - DNA, 23 bp, Artificial Sequence
  Synthetic
ttttgtaaaaggttgtaacacac

SEQ ID NO: 14951 - DNA, 21 bp, Artificial Sequence
  Synthetic
tctgtttgtatatattgccgc

SEQ ID NO: 14952 - DNA, 23 bp, Artificial Sequence
  Synthetic
aagggcatttgatatttacaatg

SEQ ID NO: 14953 - DNA, 18 bp, Artificial Sequence
  Synthetic
ccctagttagcgctactg

SEQ ID NO: 14954 - DNA, 22 bp, Artificial Sequence
  Synthetic
attgtgatgaatatggatgtgg

SEQ ID NO: 14955 - DNA, 25 bp, Artificial Sequence
  Synthetic
agtattttgagatttatgatggtgg

SEQ ID NO: 14956 - DNA, 23 bp, Artificial Sequence
  Synthetic
aaatgtttgaaaagtatagcagc

SEQ ID NO: 14957 - DNA, 20 bp, Artificial Sequence
  Synthetic
gccaatgtatgtgccttaat

SEQ ID NO: 14958 - DNA, 21 bp, Artificial Sequence
  Synthetic
gttgggttgaacatgacataa

SEQ ID NO: 14959 - DNA, 21 bp, Artificial Sequence
  Synthetic
atcttggatagctacagtgtt

SEQ ID NO: 14960 - DNA, 25 bp, Artificial Sequence
  Synthetic
taatcgtatagctagttgtaaatgg

SEQ ID NO: 14961 - DNA, 22 bp, Artificial Sequence
  Synthetic
agctaatttaagtgctcctacg

SEQ ID NO: 14962 - DNA, 18 bp, Artificial Sequence
  Synthetic
tattgttccggccaaggt

SEQ ID NO: 14963 - DNA, 24 bp, Artificial Sequence
  Synthetic
taataagtttttgaaggctaaccc

SEQ ID NO: 14964 - DNA, 21 bp, Artificial Sequence
  Synthetic
ccttagataaagtgccacagg

SEQ ID NO: 14965 - DNA, 18 bp, Artificial Sequence
  Synthetic
gcgtgatagcattgggac

SEQ ID NO: 14966 - DNA, 18 bp, Artificial Sequence
  Synthetic
agttacatgggcagccaa

SEQ ID NO: 14967 - DNA, 23 bp, Artificial Sequence
  Synthetic
actttgtgttatgatattggcaa

SEQ ID NO: 14968 - DNA, 18 bp, Artificial Sequence
  Synthetic
ggcagcctttgagcattt

SEQ ID NO: 14969 - DNA, 22 bp, Artificial Sequence
  Synthetic
tcaagactggtcattatacagg

SEQ ID NO: 14970 - DNA, 22 bp, Artificial Sequence
  Synthetic
aattgaatgtcctttttgatgg

SEQ ID NO: 14971 - DNA, 23 bp, Artificial Sequence
  Synthetic
tattcagaagtatggtttggagg

SEQ ID NO: 14972 - DNA, 23 bp, Artificial Sequence
  Synthetic
gtaacgatgagaaagttatgact

SEQ ID NO: 14973 - DNA, 25 bp, Artificial Sequence
  Synthetic
acatacatttgtcatatgattcgag

SEQ ID NO: 14974 - DNA, 23 bp, Artificial Sequence
  Synthetic
aggtttacaatttcaaattctcg

SEQ ID NO: 14975 - DNA, 18 bp, Artificial Sequence
  Synthetic
gatgcagcactgtccatt

SEQ ID NO: 14976 - DNA, 20 bp, Artificial Sequence
  Synthetic
aggagttttcactttaccga

SEQ ID NO: 14977 - DNA, 21 bp, Artificial Sequence
  Synthetic
ccctctggtaattatttagcc

SEQ ID NO: 14978 - DNA, 24 bp, Artificial Sequence
  Synthetic
gtgagttccctgctataactatag

SEQ ID NO: 14979 - DNA, 24 bp, Artificial Sequence
  Synthetic
gtttaatgtttatttaggcatggc

SEQ ID NO: 14980 - DNA, 22 bp, Artificial Sequence
  Synthetic
cgtaaacctaatcttcccaatt

SEQ ID NO: 14981 - DNA, 21 bp, Artificial Sequence
  Synthetic
ctgctaatgtttctgttagca

SEQ ID NO: 14982 - DNA, 19 bp, Artificial Sequence
  Synthetic
acttataagtgcccccaaa

SEQ ID NO: 14983 - DNA, 23 bp, Artificial Sequence
  Synthetic
caaacagaacttttatgattcgt

SEQ ID NO: 14984 - DNA, 24 bp, Artificial Sequence
  Synthetic
accttcagagtttactataggtaa

SEQ ID NO: 14985 - DNA, 25 bp, Artificial Sequence
  Synthetic
gttgaggcttataataattgtacag

SEQ ID NO: 14986 - DNA, 25 bp, Artificial Sequence
  Synthetic
caagaaattctatctagacttgatg

SEQ ID NO: 14987 - DNA, 18 bp, Artificial Sequence
  Synthetic
tatgtcacagcgagggtt

SEQ ID NO: 14988 - DNA, 21 bp, Artificial Sequence
  Synthetic
tgttacattcttggacctaca

SEQ ID NO: 14989 - DNA, 22 bp, Artificial Sequence
  Synthetic
agacctgagaagaaatatctcc

SEQ ID NO: 14990 - DNA, 22 bp, Artificial Sequence
  Synthetic
attagaactggaagtttttgga

SEQ ID NO: 14991 - DNA, 18 bp, Artificial Sequence
  Synthetic
ccaaaagggttctggcat

SEQ ID NO: 14992 - DNA, 19 bp, Artificial Sequence
  Synthetic
gaacaggaccgcatgctaa

SEQ ID NO: 14993 - DNA, 18 bp, Artificial Sequence
  Synthetic
cgcgtagtagagccaatt

SEQ ID NO: 14994 - DNA, 19 bp, Artificial Sequence
  Synthetic
tatctgggaatcctgacga

SEQ ID NO: 14995 - DNA, 21 bp, Artificial Sequence
  Synthetic
atactgaagacacctcagaaa

SEQ ID NO: 14996 - DNA, 21 bp, Artificial Sequence
  Synthetic
aactgacatgactattgagga

SEQ ID NO: 14997 - DNA, 23 bp, Artificial Sequence
  Synthetic
ttttccaggacatactattgagg

SEQ ID NO: 14998 - DNA, 20 bp, Artificial Sequence
  Synthetic
ctgctttctttggcatgtcc

SEQ ID NO: 14999 - DNA, 21 bp, Artificial Sequence
  Synthetic
gctacctaactgaaatgactc

SEQ ID NO: 15000 - DNA, 19 bp, Artificial Sequence
  Synthetic
cttccaggacatactgacg

SEQ ID NO: 15001 - DNA, 20 bp, Artificial Sequence
  Synthetic
gatcactcccctgtgaggaa

SEQ ID NO: 15002 - DNA, 20 bp, Artificial Sequence
  Synthetic
aaagaaacaccatccgtcgc

SEQ ID NO: 15003 - DNA, 18 bp, Artificial Sequence
  Synthetic
ggaggtcccgcaatttgg

SEQ ID NO: 15004 - DNA, 18 bp, Artificial Sequence
  Synthetic
cattctgcacacacccgg

SEQ ID NO: 15005 - DNA, 19 bp, Artificial Sequence
  Synthetic
ggacatcgaatggcttggg

SEQ ID NO: 15006 - DNA, 18 bp, Artificial Sequence
  Synthetic
agctgcaagcccatcact

SEQ ID NO: 15007 - DNA, 17 bp, Artificial Sequence
  Synthetic
gcgtgccaacctacacc

SEQ ID NO: 15008 - DNA, 20 bp, Artificial Sequence
  Synthetic
tgaacatcgatttaccgccg

SEQ ID NO: 15009 - DNA, 19 bp, Artificial Sequence
  Synthetic
ccctttggctgatgctgat

SEQ ID NO: 15010 - DNA, 20 bp, Artificial Sequence
  Synthetic
acctatacgaccacctagcg

SEQ ID NO: 15011 - DNA, 20 bp, Artificial Sequence
  Synthetic
gagacaagaacgtggtgacc

SEQ ID NO: 15012 - DNA, 19 bp, Artificial Sequence
  Synthetic
gctcagtcctaggcctctc

SEQ ID NO: 15013 - DNA, 19 bp, Artificial Sequence
  Synthetic
ccacattaggcttcggctc

SEQ ID NO: 15014 - DNA, 20 bp, Artificial Sequence
  Synthetic
accttttccattgagacccg

SEQ ID NO: 15015 - DNA, 19 bp, Artificial Sequence
  Synthetic
agactaagcagcagggact

SEQ ID NO: 15016 - DNA, 18 bp, Artificial Sequence
  Synthetic
tcggctgcgttgtgattg

SEQ ID NO: 15017 - DNA, 17 bp, Artificial Sequence
  Synthetic
ttgcctggcaaccctgc

SEQ ID NO: 15018 - DNA, 19 bp, Artificial Sequence
  Synthetic
gcccgccatactatctccg

SEQ ID NO: 15019 - DNA, 18 bp, Artificial Sequence
  Synthetic
ccgacttcaaggcatggc

SEQ ID NO: 15020 - DNA, 18 bp, Artificial Sequence
  Synthetic
gggtgggggacttccatt

SEQ ID NO: 15021 - DNA, 19 bp, Artificial Sequence
  Synthetic
atccgccagccaactatca

SEQ ID NO: 15022 - DNA, 20 bp, Artificial Sequence
  Synthetic
tgtaccaccaactgtccatg

SEQ ID NO: 15023 - DNA, 19 bp, Artificial Sequence
  Synthetic
accgttagtgacagcgagg

SEQ ID NO: 15024 - DNA, 18 bp, Artificial Sequence
  Synthetic
tcactctgcccgatcgaa

SEQ ID NO: 15025 - DNA, 20 bp, Artificial Sequence
  Synthetic
cactgaacaggacatcaggg

SEQ ID NO: 15026 - DNA, 18 bp, Artificial Sequence
  Synthetic
caaaggccgcaaacctcc

SEQ ID NO: 15027 - DNA, 25 bp, Artificial Sequence
  Synthetic
aaagaactaagaaatctaatgtcgc

SEQ ID NO: 15028 - DNA, 18 bp, Artificial Sequence
  Synthetic
ggatcagaccgagtgatg

SEQ ID NO: 15029 - DNA, 21 bp, Artificial Sequence
  Synthetic
aagttgttttccctaacgaag

SEQ ID NO: 15030 - DNA, 22 bp, Artificial Sequence
  Synthetic
aatgatgatgttgatcaaagct

SEQ ID NO: 15031 - DNA, 18 bp, Artificial Sequence
  Synthetic
acaagcggatcatcagtc

SEQ ID NO: 15032 - DNA, 22 bp, Artificial Sequence
  Synthetic
gatctgaatttcgtcaataggg

SEQ ID NO: 15033 - DNA, 19 bp, Artificial Sequence
  Synthetic
attgaccggttcttgagag

SEQ ID NO: 15034 - DNA, 22 bp, Artificial Sequence
  Synthetic
tagtacctaaggccattagagg

SEQ ID NO: 15035 - DNA, 20 bp, Artificial Sequence
  Synthetic
ggcactttaaccgaagaccc

SEQ ID NO: 15036 - DNA, 20 bp, Artificial Sequence
  Synthetic
atgaaagccttaacaccggc

SEQ ID NO: 15037 - DNA, 20 bp, Artificial Sequence
  Synthetic
tccttaacaacaccaggcca

SEQ ID NO: 15038 - DNA, 16 bp, Artificial Sequence
  Synthetic
gcctgcaactggacgc

SEQ ID NO: 15039 - DNA, 20 bp, Artificial Sequence
  Synthetic
tactcaatgcagcatccctg

SEQ ID NO: 15040 - DNA, 20 bp, Artificial Sequence
  Synthetic
tgtgttgtacacccgactct

SEQ ID NO: 15041 - DNA, 17 bp, Artificial Sequence
  Synthetic
ctgcgagatctggccgt

SEQ ID NO: 15042 - DNA, 19 bp, Artificial Sequence
  Synthetic
caacgtgcatcaatggggt

SEQ ID NO: 15043 - DNA, 16 bp, Artificial Sequence
  Synthetic
ggtgtgcacccgtgga

SEQ ID NO: 15044 - DNA, 18 bp, Artificial Sequence
  Synthetic
gcagccccatcacgtact

SEQ ID NO: 15045 - DNA, 20 bp, Artificial Sequence
  Synthetic
tcaaagaagaagtgcgacga

SEQ ID NO: 15046 - DNA, 20 bp, Artificial Sequence
  Synthetic
tctacagatttgtggcaccg

SEQ ID NO: 15047 - DNA, 18 bp, Artificial Sequence
  Synthetic
ggccaacacccctgctat

SEQ ID NO: 15048 - DNA, 19 bp, Artificial Sequence
  Synthetic
aagggatgatgctcgctga

SEQ ID NO: 15049 - DNA, 16 bp, Artificial Sequence
  Synthetic
tgggcgctggcttagc

SEQ ID NO: 15050 - DNA, 19 bp, Artificial Sequence
  Synthetic
ggaaccatgtttcccccac

SEQ ID NO: 15051 - DNA, 20 bp, Artificial Sequence
  Synthetic
tggacatgtcaaaaacggga

SEQ ID NO: 15052 - DNA, 16 bp, Artificial Sequence
  Synthetic
tgctgcgggaggaggt

SEQ ID NO: 15053 - DNA, 17 bp, Artificial Sequence
  Synthetic
tcgatccgcttgtggca

SEQ ID NO: 15054 - DNA, 17 bp, Artificial Sequence
  Synthetic
ggcattacgggcgacaa

SEQ ID NO: 15055 - DNA, 20 bp, Artificial Sequence
  Synthetic
attaccaggacgtgctcaag

SEQ ID NO: 15056 - DNA, 18 bp, Artificial Sequence
  Synthetic
cctgagaaggggggtcgt

SEQ ID NO: 15057 - DNA, 19 bp, Artificial Sequence
  Synthetic
ttatgttgggggccctctt

SEQ ID NO: 15058 - DNA, 18 bp, Artificial Sequence
  Synthetic
gcgctggaaagagggtct

SEQ ID NO: 15059 - DNA, 20 bp, Artificial Sequence
  Synthetic
tgaaatcaatagggtggccg

SEQ ID NO: 15060 - DNA, 24 bp, Artificial Sequence
  Synthetic
cgaatggggtacatataaaacaag

SEQ ID NO: 15061 - DNA, 25 bp, Artificial Sequence
  Synthetic
tattcatattatgtagaaggtgtgg

SEQ ID NO: 15062 - DNA, 21 bp, Artificial Sequence
  Synthetic
ggatatccctgtatgcaatgt

SEQ ID NO: 15063 - DNA, 18 bp, Artificial Sequence
  Synthetic
atttcagccccgtgtgtg

SEQ ID NO: 15064 - DNA, 22 bp, Artificial Sequence
  Synthetic
gcataaagaccctaatacaacc

SEQ ID NO: 15065 - DNA, 22 bp, Artificial Sequence
  Synthetic
aggagtaccaaaaaaaagttgt

SEQ ID NO: 15066 - DNA, 19 bp, Artificial Sequence
  Synthetic
tgacaacacaaggagaacc

SEQ ID NO: 15067 - DNA, 22 bp, Artificial Sequence
  Synthetic
ttatgtgcagaactatagtgac

SEQ ID NO: 15068 - DNA, 19 bp, Artificial Sequence
  Synthetic
aaagcgacagcgactcgag

SEQ ID NO: 15069 - DNA, 22 bp, Artificial Sequence
  Synthetic
tggatttttacttgtgtcgact

SEQ ID NO: 15070 - DNA, 19 bp, Artificial Sequence
  Synthetic
ataggacctgcaaggcctc

SEQ ID NO: 15071 - DNA, 18 bp, Artificial Sequence
  Synthetic
agggtccaccatacctac

SEQ ID NO: 15072 - DNA, 20 bp, Artificial Sequence
  Synthetic
cccgggtacattactatcag

SEQ ID NO: 15073 - DNA, 18 bp, Artificial Sequence
  Synthetic
gcgctctagtgacaactt

SEQ ID NO: 15074 - DNA, 22 bp, Artificial Sequence
  Synthetic
ctattcaggatggtgatatggt

SEQ ID NO: 15075 - DNA, 22 bp, Artificial Sequence
  Synthetic
aggaatatgatttgcagttcat

SEQ ID NO: 15076 - DNA, 21 bp, Artificial Sequence
  Synthetic
tgttatgagcatgtatgtgtg

SEQ ID NO: 15077 - DNA, 18 bp, Artificial Sequence
  Synthetic
ctgaggaggaggagcaat

SEQ ID NO: 15078 - DNA, 20 bp, Artificial Sequence
  Synthetic
cactctggaggatttgtttg

SEQ ID NO: 15079 - DNA, 21 bp, Artificial Sequence
  Synthetic
tttcaaaaaacatggctacac

SEQ ID NO: 15080 - DNA, 20 bp, Artificial Sequence
  Synthetic
tctagttctaccaggcagcc

SEQ ID NO: 15081 - DNA, 18 bp, Artificial Sequence
  Synthetic
acgaaccaccgagacaga

SEQ ID NO: 15082 - DNA, 18 bp, Artificial Sequence
  Synthetic
atttgggcaacttgggta

SEQ ID NO: 15083 - DNA, 20 bp, Artificial Sequence
  Synthetic
gagctcttcaattgttcctt

SEQ ID NO: 15084 - DNA, 19 bp, Artificial Sequence
  Synthetic
attttgtaaggcaaccgtc

SEQ ID NO: 15085 - DNA, 21 bp, Artificial Sequence
  Synthetic
acattggcctctaatattcct

SEQ ID NO: 15086 - DNA, 22 bp, Artificial Sequence
  Synthetic
aatcgtggaaagttatatctgc

SEQ ID NO: 15087 - DNA, 24 bp, Artificial Sequence
  Synthetic
gttggtttggaaattgataggatt

SEQ ID NO: 15088 - DNA, 20 bp, Artificial Sequence
  Synthetic
aaaggtttgcgaaaatgtcc

SEQ ID NO: 15089 - DNA, 19 bp, Artificial Sequence
  Synthetic
tttacgcgaggcactttta

SEQ ID NO: 15090 - DNA, 18 bp, Artificial Sequence
  Synthetic
atgctgccttttaagcca

SEQ ID NO: 15091 - DNA, 20 bp, Artificial Sequence
  Synthetic
actaaagcagctgttaaggg

SEQ ID NO: 15092 - DNA, 20 bp, Artificial Sequence
  Synthetic
ttcaatagcagcagttacct

SEQ ID NO: 15093 - DNA, 23 bp, Artificial Sequence
  Synthetic
aataccaagagaatctacttgga

SEQ ID NO: 15094 - DNA, 19 bp, Artificial Sequence
  Synthetic
atgattgtagcttgcagga

SEQ ID NO: 15095 - DNA, 18 bp, Artificial Sequence
  Synthetic
tatgggacggagaagagg

SEQ ID NO: 15096 - DNA, 18 bp, Artificial Sequence
  Synthetic
gccaacttttatccccca

SEQ ID NO: 15097 - DNA, 22 bp, Artificial Sequence
  Synthetic
gaagttataatgggagccaatg

SEQ ID NO: 15098 - DNA, 20 bp, Artificial Sequence
  Synthetic
ggtcagtacagtggatttgc

SEQ ID NO: 15099 - DNA, 18 bp, Artificial Sequence
  Synthetic
atggggaatgcagtactg

SEQ ID NO: 15100 - DNA, 22 bp, Artificial Sequence
  Synthetic
gtctatcagcttacgatctctt

SEQ ID NO: 15101 - DNA, 18 bp, Artificial Sequence
  Synthetic
gttatgcccctctactgg

SEQ ID NO: 15102 - DNA, 25 bp, Artificial Sequence
  Synthetic
gataattgtgatttttatggttggg

SEQ ID NO: 15103 - DNA, 22 bp, Artificial Sequence
  Synthetic
ttatgttcaatgtaagtgtggt

SEQ ID NO: 15104 - DNA, 21 bp, Artificial Sequence
  Synthetic
tgagtattgtcaaccacctaa

SEQ ID NO: 15105 - DNA, 21 bp, Artificial Sequence
  Synthetic
acctcaattgtatggtttgtg

SEQ ID NO: 15106 - DNA, 23 bp, Artificial Sequence
  Synthetic
cggtccatttttttcttttgaac

SEQ ID NO: 15107 - DNA, 21 bp, Artificial Sequence
  Synthetic
ttggtacattagcaaagactg

SEQ ID NO: 15108 - DNA, 23 bp, Artificial Sequence
  Synthetic
ttaaaccatttgctaaagttgac

SEQ ID NO: 15109 - DNA, 23 bp, Artificial Sequence
  Synthetic
cggttttatatagttgttactgc

SEQ ID NO: 15110 - DNA, 20 bp, Artificial Sequence
  Synthetic
gggtgtgcaattagaaaagg

SEQ ID NO: 15111 - DNA, 25 bp, Artificial Sequence
  Synthetic
ctttgtgtactatgtttaaaagagg

SEQ ID NO: 15112 - DNA, 19 bp, Artificial Sequence
  Synthetic
taatgtctggtcggatgag

SEQ ID NO: 15113 - DNA, 22 bp, Artificial Sequence
  Synthetic
ttatggtccatatagagatgct

SEQ ID NO: 15114 - DNA, 21 bp, Artificial Sequence
  Synthetic
tgtatgaacgtgataaagctg

SEQ ID NO: 15115 - DNA, 20 bp, Artificial Sequence
  Synthetic
atcatgctggtactggtatg

SEQ ID NO: 15116 - DNA, 21 bp, Artificial Sequence
  Synthetic
tactgtcatttttgcagacac

SEQ ID NO: 15117 - DNA, 21 bp, Artificial Sequence
  Synthetic
ccgtttgttgtttctattggt

SEQ ID NO: 15118 - DNA, 22 bp, Artificial Sequence
  Synthetic
aagccagactttattatgaggc

SEQ ID NO: 15119 - DNA, 19 bp, Artificial Sequence
  Synthetic
cctgttcttatgggttggg

SEQ ID NO: 15120 - DNA, 24 bp, Artificial Sequence
  Synthetic
tccagatccttctagaattttagg

SEQ ID NO: 15121 - DNA, 18 bp, Artificial Sequence
  Synthetic
aatcttgcacgggttcac

SEQ ID NO: 15122 - DNA, 18 bp, Artificial Sequence
  Synthetic
gtgcacctacacttgtcc

SEQ ID NO: 15123 - DNA, 18 bp, Artificial Sequence
  Synthetic
tgttagaggttgggttgg

SEQ ID NO: 15124 - DNA, 18 bp, Artificial Sequence
  Synthetic
ggttattgcagcgtgtca

SEQ ID NO: 15125 - DNA, 25 bp, Artificial Sequence
  Synthetic
ccttttttctattattcagatacgc

SEQ ID NO: 15126 - DNA, 25 bp, Artificial Sequence
  Synthetic
agtaggttatcaatgattaaaggtc

SEQ ID NO: 15127 - DNA, 20 bp, Artificial Sequence
  Synthetic
acaggctgtatgatgaatgt

SEQ ID NO: 15128 - DNA, 20 bp, Artificial Sequence
  Synthetic
aaccttcttttgcttcaagt

SEQ ID NO: 15129 - DNA, 24 bp, Artificial Sequence
  Synthetic
ctgattattctgtttcttcttgtg

SEQ ID NO: 15130 - DNA, 25 bp, Artificial Sequence
  Synthetic
ttacaagaaattttatctcgtctcg

SEQ ID NO: 15131 - DNA, 22 bp, Artificial Sequence
  Synthetic
attgatatgaaaggcaagatgt

SEQ ID NO: 15132 - DNA, 19 bp, Artificial Sequence
  Synthetic
cggtcattatgctggaagt

SEQ ID NO: 15133 - DNA, 22 bp, Artificial Sequence
  Synthetic
gtaaagattctaaacctcagca

SEQ ID NO: 15134 - DNA, 21 bp, Artificial Sequence
  Synthetic
cagaacactgattctgattcg

SEQ ID NO: 15135 - DNA, 19 bp, Artificial Sequence
  Synthetic
agattttgtgcgacaatgc

SEQ ID NO: 15136 - DNA, 18 bp, Artificial Sequence
  Synthetic
gaaagcagggctaggatt

SEQ ID NO: 15137 - DNA, 20 bp, Artificial Sequence
  Synthetic
atgtccaaagaagtgaatgc

SEQ ID NO: 15138 - DNA, 20 bp, Artificial Sequence
  Synthetic
tggaagcaagtattgtcaga

SEQ ID NO: 15139 - DNA, 21 bp, Artificial Sequence
  Synthetic
gatagagctcgatgaaattgg

SEQ ID NO: 15140 - DNA, 21 bp, Artificial Sequence
  Synthetic
cacagatgtggtaaactttgt

SEQ ID NO: 15141 - DNA, 19 bp, Artificial Sequence
  Synthetic
tcgagagcatgattgaagc

SEQ ID NO: 15142 - DNA, 18 bp, Artificial Sequence
  Synthetic
gaaactggtggagaacgc

SEQ ID NO: 15143 - DNA, 20 bp, Artificial Sequence
  Synthetic
gggacaatggtaatggaact

SEQ ID NO: 15144 - DNA, 20 bp, Artificial Sequence
  Synthetic
agcagaaatcctgggaatgc

SEQ ID NO: 15145 - DNA, 18 bp, Artificial Sequence
  Synthetic
catgccattctgcagcat

SEQ ID NO: 15146 - DNA, 23 bp, Artificial Sequence
  Synthetic
gatacttattgctttgattgctc

SEQ ID NO: 15147 - DNA, 19 bp, Artificial Sequence
  Synthetic
tctcaaggtccgttccaga

SEQ ID NO: 15148 - DNA, 18 bp, Artificial Sequence
  Synthetic
gggcaggaactagatcag

SEQ ID NO: 15149 - DNA, 20 bp, Artificial Sequence
  Synthetic
ctttaccaaaaggcacatca

SEQ ID NO: 15150 - DNA, 23 bp, Artificial Sequence
  Synthetic
ctggtggttcattaggatatagg

SEQ ID NO: 15151 - DNA, 19 bp, Artificial Sequence
  Synthetic
ggtgattcaatagggggga

SEQ ID NO: 15152 - DNA, 19 bp, Artificial Sequence
  Synthetic
ggactcaggatttggtcag

SEQ ID NO: 15153 - DNA, 21 bp, Artificial Sequence
  Synthetic
ccaatgaagattttgctgaca

SEQ ID NO: 15154 - DNA, 18 bp, Artificial Sequence
  Synthetic
cagaacagcggatggatt

SEQ ID NO: 15155 - DNA, 20 bp, Artificial Sequence
  Synthetic
gcaggaagacagatctagtg

SEQ ID NO: 15156 - DNA, 21 bp, Artificial Sequence
  Synthetic
atgtaaggtaaagcttgaacc

SEQ ID NO: 15157 - DNA, 23 bp, Artificial Sequence
  Synthetic
aacggttttcttcagatttaagc

SEQ ID NO: 15158 - DNA, 25 bp, Artificial Sequence
  Synthetic
tgtcataatacactataaaaggctg

SEQ ID NO: 15159 - DNA, 22 bp, Artificial Sequence
  Synthetic
aaaggcaatgaaagaatatggg

SEQ ID NO: 15160 - DNA, 23 bp, Artificial Sequence
  Synthetic
tggtgaacagtatatgtaacaca

SEQ ID NO: 15161 - DNA, 25 bp, Artificial Sequence
  Synthetic
cttttcactataagacaagaaatgg

SEQ ID NO: 15162 - DNA, 20 bp, Artificial Sequence
  Synthetic
agatcccaaggacaaagaac

SEQ ID NO: 15163 - DNA, 23 bp, Artificial Sequence
  Synthetic
tgatgaaataggagaagatgttg

SEQ ID NO: 15164 - DNA, 23 bp, Artificial Sequence
  Synthetic
tgaactttgtaagtatggagttc

SEQ ID NO: 15165 - DNA, 19 bp, Artificial Sequence
  Synthetic
ttgagagcatgattgaggc

SEQ ID NO: 15166 - DNA, 19 bp, Artificial Sequence
  Synthetic
cgataacctcgtttcaggt

SEQ ID NO: 15167 - DNA, 21 bp, Artificial Sequence
  Synthetic
ggtatatcaccgatatgagca

SEQ ID NO: 15168 - DNA, 22 bp, Artificial Sequence
  Synthetic
ttacagaggatgtcaaaaatgc

SEQ ID NO: 15169 - DNA, 24 bp, Artificial Sequence
  Synthetic
gtaatggaatcaatggataaggaa

SEQ ID NO: 15170 - DNA, 18 bp, Artificial Sequence
  Synthetic
aggattcgtgcactttgt

SEQ ID NO: 15171 - DNA, 25 bp, Artificial Sequence
  Synthetic
ttaggagtctcaatcttaaatcttg

SEQ ID NO: 15172 - DNA, 18 bp, Artificial Sequence
  Synthetic
tagccaacttcagcatgg

SEQ ID NO: 15173 - DNA, 19 bp, Artificial Sequence
  Synthetic
attcccaagagaaatcgct

SEQ ID NO: 15174 - DNA, 24 bp, Artificial Sequence
  Synthetic
gaaatcggtgcatatatataaccc

SEQ ID NO: 15175 - DNA, 18 bp, Artificial Sequence
  Synthetic
ccgcagagaaacacaagt

SEQ ID NO: 15176 - DNA, 25 bp, Artificial Sequence
  Synthetic
ctagtaatacaaattatatgcaggc

SEQ ID NO: 15177 - DNA, 23 bp, Artificial Sequence
  Synthetic
gcactatattggtataggacagg

SEQ ID NO: 15178 - DNA, 25 bp, Artificial Sequence
  Synthetic
gtagggtaacagtatttacatttcc

SEQ ID NO: 15179 - DNA, 25 bp, Artificial Sequence
  Synthetic
gtctggaaaatgcaatatattatgc

SEQ ID NO: 15180 - DNA, 25 bp, Artificial Sequence
  Synthetic
tacaatgttctgaatctatgtacag

SEQ ID NO: 15181 - DNA, 19 bp, Artificial Sequence
  Synthetic
gtggcagacctaatactgt

SEQ ID NO: 15182 - DNA, 18 bp, Artificial Sequence
  Synthetic
tgcatttaccgacccttc

SEQ ID NO: 15183 - DNA, 25 bp, Artificial Sequence
  Synthetic
atagacactacattaaccttttcac

SEQ ID NO: 15184 - DNA, 18 bp, Artificial Sequence
  Synthetic
cgcaagcaagacattcct

SEQ ID NO: 15185 - DNA, 19 bp, Artificial Sequence
  Synthetic
cccatgttgctacttctgt

SEQ ID NO: 15186 - DNA, 21 bp, Artificial Sequence
  Synthetic
aggttcccttagacatttgtc

SEQ ID NO: 15187 - DNA, 20 bp, Artificial Sequence
  Synthetic
ggcacatatatgggaaagac

SEQ ID NO: 15188 - DNA, 20 bp, Artificial Sequence
  Synthetic
gtggtcaagtactagttgcc

SEQ ID NO: 15189 - DNA, 20 bp, Artificial Sequence
  Synthetic
actggaactgctaagcatat

SEQ ID NO: 15190 - DNA, 21 bp, Artificial Sequence
  Synthetic
gagtcaagggattctcatacc

SEQ ID NO: 15191 - DNA, 19 bp, Artificial Sequence
  Synthetic
agatctaatgtcgcagtcc

SEQ ID NO: 15192 - DNA, 18 bp, Artificial Sequence
  Synthetic
gtatcacctctggccgta

SEQ ID NO: 15193 - DNA, 25 bp, Artificial Sequence
  Synthetic
ataacaaaagagaagaaagaagagc

SEQ ID NO: 15194 - DNA, 21 bp, Artificial Sequence
  Synthetic
agtttgattatcgctgctaga

SEQ ID NO: 15195 - DNA, 21 bp, Artificial Sequence
  Synthetic
aagaagaagaagtgctaacgg

SEQ ID NO: 15196 - DNA, 20 bp, Artificial Sequence
  Synthetic
gaacgtactattgtctcccg

SEQ ID NO: 15197 - DNA, 18 bp, Artificial Sequence
  Synthetic
ggacactgttccagcaaa

SEQ ID NO: 15198 - DNA, 18 bp, Artificial Sequence
  Synthetic
gatgaaggcacatctggg

SEQ ID NO: 15199 - DNA, 18 bp, Artificial Sequence
  Synthetic
atttgtgaccgggagaga

SEQ ID NO: 15200 - DNA, 22 bp, Artificial Sequence
  Synthetic
ttaagcaatgaatctctgtcac

SEQ ID NO: 15201 - DNA, 18 bp, Artificial Sequence
  Synthetic
ggatcgctcatttgcaga

SEQ ID NO: 15202 - DNA, 19 bp, Artificial Sequence
  Synthetic
acaacaaggagaacgttcc

SEQ ID NO: 15203 - DNA, 19 bp, Artificial Sequence
  Synthetic
tttgggaattggatctggg

SEQ ID NO: 15204 - DNA, 23 bp, Artificial Sequence
  Synthetic
tttagattttgtagctcctgatg

SEQ ID NO: 15205 - DNA, 19 bp, Artificial Sequence
  Synthetic
aatttgaaaatgccgccta

SEQ ID NO: 15206 - DNA, 21 bp, Artificial Sequence
  Synthetic
agaattgcagactatagctgg

SEQ ID NO: 15207 - DNA, 23 bp, Artificial Sequence
  Synthetic
tatcaggtgtagaaattaaacgt

SEQ ID NO: 15208 - DNA, 22 bp, Artificial Sequence
  Synthetic
taatagccctattcaggatggt

SEQ ID NO: 15209 - DNA, 25 bp, Artificial Sequence
  Synthetic
ttcattaacctgctatgtatttgtc

SEQ ID NO: 15210 - DNA, 19 bp, Artificial Sequence
  Synthetic
gtggtgacagattgcaagt

SEQ ID NO: 15211 - DNA, 18 bp, Artificial Sequence
  Synthetic
aggtggaaaaggtagcgt

SEQ ID NO: 15212 - DNA, 25 bp, Artificial Sequence
  Synthetic
atgtagagatactgtacaaaaactg

SEQ ID NO: 15213 - DNA, 22 bp, Artificial Sequence
  Synthetic
ccactaacagatgctaaattgg

SEQ ID NO: 15214 - DNA, 20 bp, Artificial Sequence
  Synthetic
ccaaatacaacactgggatc

SEQ ID NO: 15215 - DNA, 25 bp, Artificial Sequence
  Synthetic
atatattatcaagatgcagatgagc

SEQ ID NO: 15216 - DNA, 21 bp, Artificial Sequence
  Synthetic
cattgaaatgttggaggtaca

SEQ ID NO: 15217 - DNA, 19 bp, Artificial Sequence
  Synthetic
actttgggggtctgggtat

SEQ ID NO: 15218 - DNA, 18 bp, Artificial Sequence
  Synthetic
aaagggtctctgtaggca

SEQ ID NO: 15219 - DNA, 21 bp, Artificial Sequence
  Synthetic
ctgaaggccacattagactaa

SEQ ID NO: 15220 - DNA, 25 bp, Artificial Sequence
  Synthetic
actacattttatttacatcctggac

SEQ ID NO: 15221 - DNA, 21 bp, Artificial Sequence
  Synthetic
gacaaagtgtctctatggacc

SEQ ID NO: 15222 - DNA, 23 bp, Artificial Sequence
  Synthetic
attacattggttgataacacaca

SEQ ID NO: 15223 - DNA, 20 bp, Artificial Sequence
  Synthetic
tacagaacgtttgtcctctg

SEQ ID NO: 15224 - DNA, 21 bp, Artificial Sequence
  Synthetic
tcaacaacaagattactcagc

SEQ ID NO: 15225 - DNA, 21 bp, Artificial Sequence
  Synthetic
tttacctgtcagtcttttagc

SEQ ID NO: 15226 - DNA, 18 bp, Artificial Sequence
  Synthetic
ctgtttgaggtgctccag

SEQ ID NO: 15227 - DNA, 25 bp, Artificial Sequence
  Synthetic
gttaactaaaacacctttgaaaagc

SEQ ID NO: 15228 - DNA, 22 bp, Artificial Sequence
  Synthetic
aaagaatactttggtgtagcat

SEQ ID NO: 15229 - DNA, 24 bp, Artificial Sequence
  Synthetic
atggaaatagagcatattttctcc

SEQ ID NO: 15230 - DNA, 20 bp, Artificial Sequence
  Synthetic
tctctagctctaccacgtcg

SEQ ID NO: 15231 - DNA, 18 bp, Artificial Sequence
  Synthetic
cagatgtggtcggtgttg

SEQ ID NO: 15232 - DNA, 19 bp, Artificial Sequence
  Synthetic
aggccctattaatcagcct

SEQ ID NO: 15233 - DNA, 18 bp, Artificial Sequence
  Synthetic
gccagaccaggattttgc

SEQ ID NO: 15234 - DNA, 24 bp, Artificial Sequence
  Synthetic
aatacctgacaatatactagagga

SEQ ID NO: 15235 - DNA, 24 bp, Artificial Sequence
  Synthetic
tatggcagtagatgtttatgatga

SEQ ID NO: 15236 - DNA, 23 bp, Artificial Sequence
  Synthetic
gtagtggaaatcagtttagagtt

SEQ ID NO: 15237 - DNA, 20 bp, Artificial Sequence
  Synthetic
ccgcatatcctttaaagcag

SEQ ID NO: 15238 - DNA, 21 bp, Artificial Sequence
  Synthetic
ggggtctacatttttgtctac

SEQ ID NO: 15239 - DNA, 18 bp, Artificial Sequence
  Synthetic
ccgcggaaatccagcaat

SEQ ID NO: 15240 - DNA, 19 bp, Artificial Sequence
  Synthetic
aacatgtacccggcagtcc

SEQ ID NO: 15241 - DNA, 20 bp, Artificial Sequence
  Synthetic
tccactaaccatccttttgc

SEQ ID NO: 15242 - DNA, 20 bp, Artificial Sequence
  Synthetic
ggggggactttatgtgaccc

SEQ ID NO: 15243 - DNA, 16 bp, Artificial Sequence
  Synthetic
gtcgctgactccgcca

SEQ ID NO: 15244 - DNA, 16 bp, Artificial Sequence
  Synthetic
tccaaggactcgggcc

SEQ ID NO: 15245 - DNA, 18 bp, Artificial Sequence
  Synthetic
gccacttcctgggtcatg

SEQ ID NO: 15246 - DNA, 18 bp, Artificial Sequence
  Synthetic
caatccaacacgaggcaa

SEQ ID NO: 15247 - DNA, 16 bp, Artificial Sequence
  Synthetic
tatgcgccgaggcctt

SEQ ID NO: 15248 - DNA, 19 bp, Artificial Sequence
  Synthetic
cgagttacgctccttggag

SEQ ID NO: 15249 - DNA, 18 bp, Artificial Sequence
  Synthetic
aagctgtgtgacggtccc

SEQ ID NO: 15250 - DNA, 19 bp, Artificial Sequence
  Synthetic
cgatcgtaagccgcaatgt

SEQ ID NO: 15251 - DNA, 19 bp, Artificial Sequence
  Synthetic
cctgagaggaggcttgtgt

SEQ ID NO: 15252 - DNA, 16 bp, Artificial Sequence
  Synthetic
ctcgtttcggccccga

SEQ ID NO: 15253 - DNA, 20 bp, Artificial Sequence
  Synthetic
gagtccgacaggaggtctcc

SEQ ID NO: 15254 - DNA, 18 bp, Artificial Sequence
  Synthetic
tgtagttgagcggctcct

SEQ ID NO: 15255 - DNA, 17 bp, Artificial Sequence
  Synthetic
ttcgtcgcgtgacctgg

SEQ ID NO: 15256 - DNA, 19 bp, Artificial Sequence
  Synthetic
gggtgttccagtcatcggg

SEQ ID NO: 15257 - DNA, 20 bp, Artificial Sequence
  Synthetic
tttcagccagcatcttagca

SEQ ID NO: 15258 - DNA, 16 bp, Artificial Sequence
  Synthetic
acgcagttgctgacgc

SEQ ID NO: 15259 - DNA, 16 bp, Artificial Sequence
  Synthetic
gggcgtttgtcccacg

SEQ ID NO: 15260 - DNA, 18 bp, Artificial Sequence
  Synthetic
gcggggggaggatgaaac

SEQ ID NO: 15261 - DNA, 18 bp, Artificial Sequence
  Synthetic
cctttatgcgctttgccg

SEQ ID NO: 15262 - DNA, 20 bp, Artificial Sequence
  Synthetic
ttctctatcgtcaactgcgc

SEQ ID NO: 15263 - DNA, 18 bp, Artificial Sequence
  Synthetic
ccaacatctgcctcccgc

SEQ ID NO: 15264 - DNA, 17 bp, Artificial Sequence
  Synthetic
gagtcccgctgagcaga

SEQ ID NO: 15265 - DNA, 16 bp, Artificial Sequence
  Synthetic
ccgttgaggcccacgt

SEQ ID NO: 15266 - DNA, 18 bp, Artificial Sequence
  Synthetic
caaggccagagacaccct

SEQ ID NO: 15267 - DNA, 16 bp, Artificial Sequence
  Synthetic
acgtgtctgggaggcg

SEQ ID NO: 15268 - DNA, 19 bp, Artificial Sequence
  Synthetic
aaaagcctcggtctgctcc

SEQ ID NO: 15269 - DNA, 18 bp, Artificial Sequence
  Synthetic
gaactgggcctcgtggga

SEQ ID NO: 15270 - DNA, 17 bp, Artificial Sequence
  Synthetic
acgagagaacccgccac

SEQ ID NO: 15271 - DNA, 18 bp, Artificial Sequence
  Synthetic
gatctcggccgttgtctc

SEQ ID NO: 15272 - DNA, 18 bp, Artificial Sequence
  Synthetic
ggggggtggcatatctga

SEQ ID NO: 15273 - DNA, 16 bp, Artificial Sequence
  Synthetic
ctggctcgcctggagt

SEQ ID NO: 15274 - DNA, 16 bp, Artificial Sequence
  Synthetic
gtcatgtcgggggcct

SEQ ID NO: 15275 - DNA, 19 bp, Artificial Sequence
  Synthetic
attggtttcagcaatcgga

SEQ ID NO: 15276 - DNA, 18 bp, Artificial Sequence
  Synthetic
caggcagcgtcttcagga

SEQ ID NO: 15277 - DNA, 16 bp, Artificial Sequence
  Synthetic
cgggcttcaggggcat

SEQ ID NO: 15278 - DNA, 19 bp, Artificial Sequence
  Synthetic
tgtcgctgcagtactacga

SEQ ID NO: 15279 - DNA, 18 bp, Artificial Sequence
  Synthetic
ggaagaggacgaggacga

SEQ ID NO: 15280 - DNA, 18 bp, Artificial Sequence
  Synthetic
cggggtcgaggaggtagt

SEQ ID NO: 15281 - DNA, 20 bp, Artificial Sequence
  Synthetic
gaggttcagggacttgtcct

SEQ ID NO: 15282 - DNA, 17 bp, Artificial Sequence
  Synthetic
ccatagctgcccctggt

SEQ ID NO: 15283 - DNA, 18 bp, Artificial Sequence
  Synthetic
ccatgactgctgacccgc

SEQ ID NO: 15284 - DNA, 17 bp, Artificial Sequence
  Synthetic
catccggcaagcaccat

SEQ ID NO: 15285 - DNA, 20 bp, Artificial Sequence
  Synthetic
ttcgtgccaaaccaaaaagg

SEQ ID NO: 15286 - DNA, 18 bp, Artificial Sequence
  Synthetic
tcctctgaaggatgggcg

SEQ ID NO: 15287 - DNA, 19 bp, Artificial Sequence
  Synthetic
atcaacaggtgggggttgt

SEQ ID NO: 15288 - DNA, 19 bp, Artificial Sequence
  Synthetic
gtagcagaatagggcccct

SEQ ID NO: 15289 - DNA, 16 bp, Artificial Sequence
  Synthetic
tgcccatacctgcggg

SEQ ID NO: 15290 - DNA, 16 bp, Artificial Sequence
  Synthetic
tggccaggtggacgca

SEQ ID NO: 15291 - DNA, 18 bp, Artificial Sequence
  Synthetic
agaccctcgtgagacccg

SEQ ID NO: 15292 - DNA, 18 bp, Artificial Sequence
  Synthetic
tgtcggatctcggtccag

SEQ ID NO: 15293 - DNA, 17 bp, Artificial Sequence
  Synthetic
gtagcctgagccgcact

SEQ ID NO: 15294 - DNA, 20 bp, Artificial Sequence
  Synthetic
cctaacagggtcatcgtcct

SEQ ID NO: 15295 - DNA, 18 bp, Artificial Sequence
  Synthetic
agccggtcaacacgacat

SEQ ID NO: 15296 - DNA, 17 bp, Artificial Sequence
  Synthetic
caccagcccgttcacca

SEQ ID NO: 15297 - DNA, 18 bp, Artificial Sequence
  Synthetic
gcagaacgttgtcggtga

SEQ ID NO: 15298 - DNA, 18 bp, Artificial Sequence
  Synthetic
aagcggggtcttttggac

SEQ ID NO: 15299 - DNA, 20 bp, Artificial Sequence
  Synthetic
cgggacagattgtcttccac

SEQ ID NO: 15300 - DNA, 18 bp, Artificial Sequence
  Synthetic
cccccttttccgcatcag

SEQ ID NO: 15301 - DNA, 18 bp, Artificial Sequence
  Synthetic
attgccaaaacaacgtgt

SEQ ID NO: 15302 - DNA, 16 bp, Artificial Sequence
  Synthetic
ggcggtggacagcagt

SEQ ID NO: 15303 - DNA, 19 bp, Artificial Sequence
  Synthetic
caaaagaccctccccacct

SEQ ID NO: 15304 - DNA, 17 bp, Artificial Sequence
  Synthetic
taccacccccacccaca

SEQ ID NO: 15305 - DNA, 18 bp, Artificial Sequence
  Synthetic
cgggaggacaccaaccct

SEQ ID NO: 15306 - DNA, 18 bp, Artificial Sequence
  Synthetic
ttctggagtgcctttcgc

SEQ ID NO: 15307 - DNA, 19 bp, Artificial Sequence
  Synthetic
aggaaggcgctgtaggatt

SEQ ID NO: 15308 - DNA, 18 bp, Artificial Sequence
  Synthetic
tttctcgcccccttcact

SEQ ID NO: 15309 - DNA, 17 bp, Artificial Sequence
  Synthetic
ggtgatgcggaccttgg

SEQ ID NO: 15310 - DNA, 16 bp, Artificial Sequence
  Synthetic
ccttgccgtgccctct

SEQ ID NO: 15311 - DNA, 20 bp, Artificial Sequence
  Synthetic
ctggccatatcagggaagtc

SEQ ID NO: 15312 - DNA, 20 bp, Artificial Sequence
  Synthetic
cagggtctgggtaaacaggt

SEQ ID NO: 15313 - DNA, 16 bp, Artificial Sequence
  Synthetic
ccagcctgccggactt

SEQ ID NO: 15314 - DNA, 16 bp, Artificial Sequence
  Synthetic
gtcggcaaacaggggc

SEQ ID NO: 15315 - DNA, 20 bp, Artificial Sequence
  Synthetic
cacctccttgtcgtagagcg

SEQ ID NO: 15316 - DNA, 18 bp, Artificial Sequence
  Synthetic
cctgtgcagagccttgac

SEQ ID NO: 15317 - DNA, 17 bp, Artificial Sequence
  Synthetic
cacgtcacggggaactg

SEQ ID NO: 15318 - DNA, 16 bp, Artificial Sequence
  Synthetic
ctgagccgcgaccagt

SEQ ID NO: 15319 - DNA, 20 bp, Artificial Sequence
  Synthetic
gcaaaggcaggtctttctca

SEQ ID NO: 15320 - DNA, 16 bp, Artificial Sequence
  Synthetic
ggctgaccccggcaaa

SEQ ID NO: 15321 - DNA, 18 bp, Artificial Sequence
  Synthetic
gttttccgtttgctgcat

SEQ ID NO: 15322 - DNA, 20 bp, Artificial Sequence
  Synthetic
aaagacattgtcctgcagct

SEQ ID NO: 15323 - DNA, 22 bp, Artificial Sequence
  Synthetic
tgttaaactccagtaatcgaag

SEQ ID NO: 15324 - DNA, 22 bp, Artificial Sequence
  Synthetic
gtgtgctaaaaacagagatacc

SEQ ID NO: 15325 - DNA, 22 bp, Artificial Sequence
  Synthetic
tggctgatgtagatagtaatgc

SEQ ID NO: 15326 - DNA, 22 bp, Artificial Sequence
  Synthetic
tgtttagtattttatgggcctg

SEQ ID NO: 15327 - DNA, 25 bp, Artificial Sequence
  Synthetic
agaactgtatgaaaaagatagtgac

SEQ ID NO: 15328 - DNA, 19 bp, Artificial Sequence
  Synthetic
tatagcaacgaacgatgga

SEQ ID NO: 15329 - DNA, 20 bp, Artificial Sequence
  Synthetic
gtacatgtgggttcaagggt

SEQ ID NO: 15330 - DNA, 19 bp, Artificial Sequence
  Synthetic
atgatagtgtggaacagcg

SEQ ID NO: 15331 - DNA, 24 bp, Artificial Sequence
  Synthetic
gtttctagcactatatatacaggc

SEQ ID NO: 15332 - DNA, 18 bp, Artificial Sequence
  Synthetic
ggagcagatgttccagtg

SEQ ID NO: 15333 - DNA, 25 bp, Artificial Sequence
  Synthetic
atgctggtagttctagattacttac

SEQ ID NO: 15334 - DNA, 18 bp, Artificial Sequence
  Synthetic
cggacagcctttaggaat

SEQ ID NO: 15335 - DNA, 18 bp, Artificial Sequence
  Synthetic
cacaggttttggggcaat

SEQ ID NO: 15336 - DNA, 19 bp, Artificial Sequence
  Synthetic
tctttatgcatccacacct

SEQ ID NO: 15337 - DNA, 20 bp, Artificial Sequence
  Synthetic
catggatgctacattactgg

SEQ ID NO: 15338 - DNA, 20 bp, Artificial Sequence
  Synthetic
tgcgtgtcatgtatgtgtgt

SEQ ID NO: 15339 - DNA, 18 bp, Artificial Sequence
  Synthetic
tgcctggcagttatttgg

SEQ ID NO: 15340 - DNA, 25 bp, Artificial Sequence
  Synthetic
gtttctggtattgttagaaagatgg

SEQ ID NO: 15341 - DNA, 20 bp, Artificial Sequence
  Synthetic
gcctactgctgaaaatttgg

SEQ ID NO: 15342 - DNA, 18 bp, Artificial Sequence
  Synthetic
acgatgcttcacagggaa

SEQ ID NO: 15343 - DNA, 25 bp, Artificial Sequence
  Synthetic
actgtaggattatatgctttaatgc

SEQ ID NO: 15344 - DNA, 25 bp, Artificial Sequence
  Synthetic
caaagcaataatcaagctaaacatg

SEQ ID NO: 15345 - DNA, 18 bp, Artificial Sequence
  Synthetic
cgtatgcagcagaaacct

SEQ ID NO: 15346 - DNA, 18 bp, Artificial Sequence
  Synthetic
cgccacaccttccacatc

SEQ ID NO: 15347 - DNA, 23 bp, Artificial Sequence
  Synthetic
atttggcagtgttatttatttgg

SEQ ID NO: 15348 - DNA, 21 bp, Artificial Sequence
  Synthetic
atgtatttgaggacttgtcca

SEQ ID NO: 15349 - DNA, 20 bp, Artificial Sequence
  Synthetic
gtttggtacgttttagcaga

SEQ ID NO: 15350 - DNA, 22 bp, Artificial Sequence
  Synthetic
ctaactctataccgtacacacc

SEQ ID NO: 15351 - DNA, 19 bp, Artificial Sequence
  Synthetic
gccgatacagaaaatccca

SEQ ID NO: 15352 - DNA, 18 bp, Artificial Sequence
  Synthetic
acgagatgtcctccagaa

SEQ ID NO: 15353 - DNA, 21 bp, Artificial Sequence
  Synthetic
atcttcctattgtgcaaagtc

SEQ ID NO: 15354 - DNA, 20 bp, Artificial Sequence
  Synthetic
ctgtgcagtgaggaaaagga

SEQ ID NO: 15355 - DNA, 19 bp, Artificial Sequence
  Synthetic
cctacagaaccagcacagc

SEQ ID NO: 15356 - DNA, 20 bp, Artificial Sequence
  Synthetic
tagtgatgaggacgaggagg

SEQ ID NO: 15357 - DNA, 20 bp, Artificial Sequence
  Synthetic
acgtagactgtttgagctgc

SEQ ID NO: 15358 - DNA, 21 bp, Artificial Sequence
  Synthetic
aaaagtaataggaccacgtgt

SEQ ID NO: 15359 - DNA, 20 bp, Artificial Sequence
  Synthetic
ccaaaataagacatccagcg

SEQ ID NO: 15360 - DNA, 22 bp, Artificial Sequence
  Synthetic
gccaagcaaaatatgtaaagga

SEQ ID NO: 15361 - DNA, 22 bp, Artificial Sequence
  Synthetic
atacttttgtatgagcctgttg

SEQ ID NO: 15362 - DNA, 19 bp, Artificial Sequence
  Synthetic
tagaggaagacaggtggaa

SEQ ID NO: 15363 - DNA, 19 bp, Artificial Sequence
  Synthetic
acgttaagtttgatggcga

SEQ ID NO: 15364 - DNA, 15 bp, Artificial Sequence
  Synthetic
aacccgacgccacca

SEQ ID NO: 15365 - DNA, 23 bp, Artificial Sequence
  Synthetic
ttaaggtatagattgcacaaaca

SEQ ID NO: 15366 - DNA, 21 bp, Artificial Sequence
  Synthetic
agtgtggagacctttatttgc

SEQ ID NO: 15367 - DNA, 19 bp, Artificial Sequence
  Synthetic
cttgtgttgtagtgtgcaa

SEQ ID NO: 15368 - DNA, 18 bp, Artificial Sequence
  Synthetic
ttctttgggggtttgggc

SEQ ID NO: 15369 - DNA, 20 bp, Artificial Sequence
  Synthetic
ccaacaagtacatgtacagg

SEQ ID NO: 15370 - DNA, 19 bp, Artificial Sequence
  Synthetic
ttcccgactgttaactgtt

SEQ ID NO: 15371 - DNA, 20 bp, Artificial Sequence
  Synthetic
tgacactgaaaacaccaatt

SEQ ID NO: 15372 - DNA, 24 bp, Artificial Sequence
  Synthetic
gatgtgcctttagatattgtaacc

SEQ ID NO: 15373 - DNA, 20 bp, Artificial Sequence
  Synthetic
atcccagttgtttaacaagc

SEQ ID NO: 15374 - DNA, 19 bp, Artificial Sequence
  Synthetic
ccaaacgttcctaagcatg

SEQ ID NO: 15375 - DNA, 20 bp, Artificial Sequence
  Synthetic
gtggtgtcctgtatgtgacc

SEQ ID NO: 15376 - DNA, 19 bp, Artificial Sequence
  Synthetic
gccatgaatcactcccctg

SEQ ID NO: 15377 - DNA, 19 bp, Artificial Sequence
  Synthetic
aagaaacaccaaccgtcgc

SEQ ID NO: 15378 - DNA, 15 bp, Artificial Sequence
  Synthetic
tcgcgcaacgtgggt

SEQ ID NO: 15379 - DNA, 17 bp, Artificial Sequence
  Synthetic
gctgctgtcctccacgt

SEQ ID NO: 15380 - DNA, 20 bp, Artificial Sequence
  Synthetic
cacggctaccatgatcttgg

SEQ ID NO: 15381 - DNA, 18 bp, Artificial Sequence
  Synthetic
ccttgcacaccggcttta

SEQ ID NO: 15382 - DNA, 18 bp, Artificial Sequence
  Synthetic
gtcatggttcggctgcac

SEQ ID NO: 15383 - DNA, 18 bp, Artificial Sequence
  Synthetic
ttcactcgtggggatcgt

SEQ ID NO: 15384 - DNA, 18 bp, Artificial Sequence
  Synthetic
cagctagctgcaatggct

SEQ ID NO: 15385 - DNA, 19 bp, Artificial Sequence
  Synthetic
ccgtcgccatattctaccc

SEQ ID NO: 15386 - DNA, 19 bp, Artificial Sequence
  Synthetic
agacagctgcttgtgggga

SEQ ID NO: 15387 - DNA, 18 bp, Artificial Sequence
  Synthetic
tctcgggggttttgtgga

SEQ ID NO: 15388 - DNA, 20 bp, Artificial Sequence
  Synthetic
tttcatccccgttgagacac

SEQ ID NO: 15389 - DNA, 20 bp, Artificial Sequence
  Synthetic
atatggcaaattcctcgccg

SEQ ID NO: 15390 - DNA, 18 bp, Artificial Sequence
  Synthetic
tcggggtatgggcttgaa

SEQ ID NO: 15391 - DNA, 20 bp, Artificial Sequence
  Synthetic
gtgtagtgctctgtgagtgc

SEQ ID NO: 15392 - DNA, 16 bp, Artificial Sequence
  Synthetic
acactcgtgggcccca

SEQ ID NO: 15393 - DNA, 18 bp, Artificial Sequence
  Synthetic
gccgagatgctgaagtcc

SEQ ID NO: 15394 - DNA, 20 bp, Artificial Sequence
  Synthetic
aggtaaggtgctagtggaca

SEQ ID NO: 15395 - DNA, 18 bp, Artificial Sequence
  Synthetic
catgagaatcacggggcc

SEQ ID NO: 15396 - DNA, 17 bp, Artificial Sequence
  Synthetic
cagcttccttgcgaccc

SEQ ID NO: 15397 - DNA, 20 bp, Artificial Sequence
  Synthetic
cgaccttgagccttcgatac

SEQ ID NO: 15398 - DNA, 20 bp, Artificial Sequence
  Synthetic
cctgatgagttggccctttc

SEQ ID NO: 15399 - DNA, 20 bp, Artificial Sequence
  Synthetic
tgataggatgcaagtgctcg

SEQ ID NO: 15400 - DNA, 18 bp, Artificial Sequence
  Synthetic
tttaccctgacctcggcg

SEQ ID NO: 15401 - DNA, 20 bp, Artificial Sequence
  Synthetic
ggtgctcaccactagcatgg

SEQ ID NO: 15402 - DNA, 20 bp, Artificial Sequence
  Synthetic
tcctcaaatgtgtctgtggc

SEQ ID NO: 15403 - DNA, 20 bp, Artificial Sequence
  Synthetic
ctctgcacacatacactccc

SEQ ID NO: 15404 - DNA, 18 bp, Artificial Sequence
  Synthetic
gttgagggcagccagttg

SEQ ID NO: 15405 - DNA, 19 bp, Artificial Sequence
  Synthetic
gcggtaatgaggccgaagt

SEQ ID NO: 15406 - DNA, 20 bp, Artificial Sequence
  Synthetic
tcttcgtcaacggtcaagtc

SEQ ID NO: 15407 - DNA, 20 bp, Artificial Sequence
  Synthetic
agaggatgcggttttgttcg

SEQ ID NO: 15408 - DNA, 20 bp, Artificial Sequence
  Synthetic
cgaaaagaaaatcgccctcc

SEQ ID NO: 15409 - DNA, 20 bp, Artificial Sequence
  Synthetic
tggacggcttggattttcag

SEQ ID NO: 15410 - DNA, 20 bp, Artificial Sequence
  Synthetic
atgtcgcccaagttttcaga

SEQ ID NO: 15411 - DNA, 16 bp, Artificial Sequence
  Synthetic
acgaagccgccctggt

SEQ ID NO: 15412 - DNA, 18 bp, Artificial Sequence
  Synthetic
ggcttcgatgcccttgtt

SEQ ID NO: 15413 - DNA, 16 bp, Artificial Sequence
  Synthetic
cggctgccgtcttggt

SEQ ID NO: 15414 - DNA, 19 bp, Artificial Sequence
  Synthetic
ccgaacaggcggtatttgc

SEQ ID NO: 15415 - DNA, 20 bp, Artificial Sequence
  Synthetic
ttgttgcgatgtgatgacgc

SEQ ID NO: 15416 - DNA, 20 bp, Artificial Sequence
  Synthetic
cgggttctgccttttcaaac

SEQ ID NO: 15417 - DNA, 18 bp, Artificial Sequence
  Synthetic
aggcggacaccttgttgc

SEQ ID NO: 15418 - DNA, 20 bp, Artificial Sequence
  Synthetic
acaatttcagccacaactgc

SEQ ID NO: 15419 - DNA, 16 bp, Artificial Sequence
  Synthetic
cacaccagcgcaccga

SEQ ID NO: 15420 - DNA, 20 bp, Artificial Sequence
  Synthetic
gcaagataaaccacgtcgcc

SEQ ID NO: 15421 - DNA, 19 bp, Artificial Sequence
  Synthetic
ttccaatgcctgcgtttca

SEQ ID NO: 15422 - DNA, 17 bp, Artificial Sequence
  Synthetic
aactcttgccgcgttcc

SEQ ID NO: 15423 - DNA, 16 bp, Artificial Sequence
  Synthetic
tcagcggtgcaggcga

SEQ ID NO: 15424 - DNA, 17 bp, Artificial Sequence
  Synthetic
gtaacgcgcaaaccccg

SEQ ID NO: 15425 - DNA, 20 bp, Artificial Sequence
  Synthetic
aggttttgtggacataggcg

SEQ ID NO: 15426 - DNA, 17 bp, Artificial Sequence
  Synthetic
ttttgggcggcaggacg

SEQ ID NO: 15427 - DNA, 20 bp, Artificial Sequence
  Synthetic
gttcatgttcgtgccttccg

SEQ ID NO: 15428 - DNA, 18 bp, Artificial Sequence
  Synthetic
gttttccagtgcgaacgc

SEQ ID NO: 15429 - DNA, 15 bp, Artificial Sequence
  Synthetic
tttcttgggcgcggc

SEQ ID NO: 15430 - DNA, 17 bp, Artificial Sequence
  Synthetic
ggcatcggacggcaaag

SEQ ID NO: 15431 - DNA, 16 bp, Artificial Sequence
  Synthetic
cgaagctgcgttgggc

SEQ ID NO: 15432 - DNA, 17 bp, Artificial Sequence
  Synthetic
cataccgggttcgccga

SEQ ID NO: 15433 - DNA, 16 bp, Artificial Sequence
  Synthetic
gcacgcctgccgctat

SEQ ID NO: 15434 - DNA, 15 bp, Artificial Sequence
  Synthetic
ttcggcggcggcaat

SEQ ID NO: 15435 - DNA, 19 bp, Artificial Sequence
  Synthetic
cgccttgttctttcaggga

SEQ ID NO: 15436 - DNA, 18 bp, Artificial Sequence
  Synthetic
gggtttgaccgccgtaat

SEQ ID NO: 15437 - DNA, 18 bp, Artificial Sequence
  Synthetic
ccgcacctgtcagaatcg

SEQ ID NO: 15438 - DNA, 19 bp, Artificial Sequence
  Synthetic
atggacagatggatgtgcg

SEQ ID NO: 15439 - DNA, 20 bp, Artificial Sequence
  Synthetic
agaaaatcaccgccatcagc

SEQ ID NO: 15440 - DNA, 17 bp, Artificial Sequence
  Synthetic
cgccttaagccttgccg

SEQ ID NO: 15441 - DNA, 18 bp, Artificial Sequence
  Synthetic
gaacacctgccccggtat

SEQ ID NO: 15442 - DNA, 17 bp, Artificial Sequence
  Synthetic
attgcgccgcttccaac

SEQ ID NO: 15443 - DNA, 18 bp, Artificial Sequence
  Synthetic
tgctgcaaggctacgact

SEQ ID NO: 15444 - DNA, 20 bp, Artificial Sequence
  Synthetic
tcgttttcgaaccccaaccc

SEQ ID NO: 15445 - DNA, 19 bp, Artificial Sequence
  Synthetic
aatcgaacacagctacgcc

SEQ ID NO: 15446 - DNA, 19 bp, Artificial Sequence
  Synthetic
aaaaagccgaagccgaact

SEQ ID NO: 15447 - DNA, 18 bp, Artificial Sequence
  Synthetic
tgcctgcctcaacatcgg

SEQ ID NO: 15448 - DNA, 16 bp, Artificial Sequence
  Synthetic
aggcagtcggcgcagt

SEQ ID NO: 15449 - DNA, 18 bp, Artificial Sequence
  Synthetic
gcgttggcggctttttgg

SEQ ID NO: 15450 - DNA, 20 bp, Artificial Sequence
  Synthetic
cgaacttcaccaaacccacg

SEQ ID NO: 15451 - DNA, 16 bp, Artificial Sequence
  Synthetic
ccttttgggcgagccg

SEQ ID NO: 15452 - DNA, 20 bp, Artificial Sequence
  Synthetic
taatgttggggaacggcatt

SEQ ID NO: 15453 - DNA, 16 bp, Artificial Sequence
  Synthetic
tcgcggattgcctgct

SEQ ID NO: 15454 - DNA, 15 bp, Artificial Sequence
  Synthetic
tcagcgtcgggtgca

SEQ ID NO: 15455 - DNA, 20 bp, Artificial Sequence
  Synthetic
aaacggcatcggcttcttct

SEQ ID NO: 15456 - DNA, 20 bp, Artificial Sequence
  Synthetic
tgtgcatataaagcggcagg

SEQ ID NO: 15457 - DNA, 18 bp, Artificial Sequence
  Synthetic
cgatcggacgcgttttgc

SEQ ID NO: 15458 - DNA, 17 bp, Artificial Sequence
  Synthetic
caaggtttgccagcgcg

SEQ ID NO: 15459 - DNA, 19 bp, Artificial Sequence
  Synthetic
cggcatagtattcgcggac

SEQ ID NO: 15460 - DNA, 16 bp, Artificial Sequence
  Synthetic
gacgttgagccgggga

SEQ ID NO: 15461 - DNA, 20 bp, Artificial Sequence
  Synthetic
tcaatctgttcgggtgtcag

SEQ ID NO: 15462 - DNA, 17 bp, Artificial Sequence
  Synthetic
ccttgcgaggctttgcg

SEQ ID NO: 15463 - DNA, 20 bp, Artificial Sequence
  Synthetic
ccagttgttcggacaaacgc

SEQ ID NO: 15464 - DNA, 20 bp, Artificial Sequence
  Synthetic
tgcttttgtcttcttcgccc

SEQ ID NO: 15465 - DNA, 19 bp, Artificial Sequence
  Synthetic
ctacgagcttttgggcgag

SEQ ID NO: 15466 - DNA, 16 bp, Artificial Sequence
  Synthetic
ctgcccgcctgcatga

SEQ ID NO: 15467 - DNA, 17 bp, Artificial Sequence
  Synthetic
ggcgcgcaccataacca

SEQ ID NO: 15468 - DNA, 16 bp, Artificial Sequence
  Synthetic
cgttttcaggcggccc

SEQ ID NO: 15469 - DNA, 18 bp, Artificial Sequence
  Synthetic
ctggagctgttcgtcggt

SEQ ID NO: 15470 - DNA, 19 bp, Artificial Sequence
  Synthetic
cgaaatccgtgtcgatgca

SEQ ID NO: 15471 - DNA, 16 bp, Artificial Sequence
  Synthetic
cgctgcacgacacgct

SEQ ID NO: 15472 - DNA, 18 bp, Artificial Sequence
  Synthetic
aaaggccgaagtcatggc

SEQ ID NO: 15473 - DNA, 19 bp, Artificial Sequence
  Synthetic
gccaagctcgaagaagact

SEQ ID NO: 15474 - DNA, 16 bp, Artificial Sequence
  Synthetic
cgcctgacggatgctg

SEQ ID NO: 15475 - DNA, 16 bp, Artificial Sequence
  Synthetic
gcgtatcatcggcgcg

SEQ ID NO: 15476 - DNA, 16 bp, Artificial Sequence
  Synthetic
gcgtgggtcatgccgt

SEQ ID NO: 15477 - DNA, 17 bp, Artificial Sequence
  Synthetic
aaacctgcctcgtcggg

SEQ ID NO: 15478 - DNA, 18 bp, Artificial Sequence
  Synthetic
tctcggcaaagaacgtac

SEQ ID NO: 15479 - DNA, 17 bp, Artificial Sequence
  Synthetic
tttcggcggcacagaag

SEQ ID NO: 15480 - DNA, 20 bp, Artificial Sequence
  Synthetic
tttggaactgtggccaaaca

SEQ ID NO: 15481 - DNA, 20 bp, Artificial Sequence
  Synthetic
tgtttgagccagatttcgga

SEQ ID NO: 15482 - DNA, 19 bp, Artificial Sequence
  Synthetic
agacccaatgcgaggtagc

SEQ ID NO: 15483 - DNA, 20 bp, Artificial Sequence
  Synthetic
atacacgggataatcagcgc

SEQ ID NO: 15484 - DNA, 19 bp, Artificial Sequence
  Synthetic
caagcgtggcgataatcga

SEQ ID NO: 15485 - DNA, 16 bp, Artificial Sequence
  Synthetic
aatcgccgtctgccca

SEQ ID NO: 15486 - DNA, 20 bp, Artificial Sequence
  Synthetic
ttcatggcaacgtcaatcgg

SEQ ID NO: 15487 - DNA, 19 bp, Artificial Sequence
  Synthetic
tgtattccatcacgccgtc

SEQ ID NO: 15488 - DNA, 20 bp, Artificial Sequence
  Synthetic
acctgtcgttttattggggc

SEQ ID NO: 15489 - DNA, 17 bp, Artificial Sequence
  Synthetic
cgtttggcgcaggttgg

SEQ ID NO: 15490 - DNA, 16 bp, Artificial Sequence
  Synthetic
gggcgcaggtcatcga

SEQ ID NO: 15491 - DNA, 16 bp, Artificial Sequence
  Synthetic
ccgcaaaaagccgccg

SEQ ID NO: 15492 - DNA, 18 bp, Artificial Sequence
  Synthetic
aaaaaccgaccgttgggc

SEQ ID NO: 15493 - DNA, 17 bp, Artificial Sequence
  Synthetic
aatccggcatcgacgct

SEQ ID NO: 15494 - DNA, 16 bp, Artificial Sequence
  Synthetic
gccgagggcgaatgtg

SEQ ID NO: 15495 - DNA, 16 bp, Artificial Sequence
  Synthetic
ctgctgcgcgggttca

SEQ ID NO: 15496 - DNA, 20 bp, Artificial Sequence
  Synthetic
cctatcaggctcatacggcg

SEQ ID NO: 15497 - DNA, 20 bp, Artificial Sequence
  Synthetic
agttgctgttcaaaccacgg

SEQ ID NO: 15498 - DNA, 17 bp, Artificial Sequence
  Synthetic
gcatcccttgccgtcca

SEQ ID NO: 15499 - DNA, 19 bp, Artificial Sequence
  Synthetic
cggcactctgcatttttgc

SEQ ID NO: 15500 - DNA, 19 bp, Artificial Sequence
  Synthetic
ggatgacggtcagtgtgtg

SEQ ID NO: 15501 - DNA, 18 bp, Artificial Sequence
  Synthetic
ttggacggcgttatgggt

SEQ ID NO: 15502 - DNA, 16 bp, Artificial Sequence
  Synthetic
gcgggcaagctgacgt

SEQ ID NO: 15503 - DNA, 16 bp, Artificial Sequence
  Synthetic
tcgggacaggggtgga

SEQ ID NO: 15504 - DNA, 19 bp, Artificial Sequence
  Synthetic
ggattgcgctgaacagcct

SEQ ID NO: 15505 - DNA, 18 bp, Artificial Sequence
  Synthetic
ctttgacggatgcctggc

SEQ ID NO: 15506 - DNA, 20 bp, Artificial Sequence
  Synthetic
cgggggaaaaggagttaacc

SEQ ID NO: 15507 - DNA, 17 bp, Artificial Sequence
  Synthetic
tgtacgacaggtgcggc

SEQ ID NO: 15508 - DNA, 16 bp, Artificial Sequence
  Synthetic
ctgcaaccggggatgc

SEQ ID NO: 15509 - DNA, 20 bp, Artificial Sequence
  Synthetic
cgggttttttgacggttcag

SEQ ID NO: 15510 - DNA, 18 bp, Artificial Sequence
  Synthetic
tcggcaatggcatgcatg

SEQ ID NO: 15511 - DNA, 17 bp, Artificial Sequence
  Synthetic
gcgcaatgcctgctcga

SEQ ID NO: 15512 - DNA, 18 bp, Artificial Sequence
  Synthetic
gacgttactttgcgccaa

SEQ ID NO: 15513 - DNA, 18 bp, Artificial Sequence
  Synthetic
ttgaccgatggcacgacc

SEQ ID NO: 15514 - DNA, 16 bp, Artificial Sequence
  Synthetic
cgggtcggcgtggatt

SEQ ID NO: 15515 - DNA, 18 bp, Artificial Sequence
  Synthetic
atttcgaccgcccattcc

SEQ ID NO: 15516 - DNA, 19 bp, Artificial Sequence
  Synthetic
tgatgctgactttgtccgc

SEQ ID NO: 15517 - DNA, 15 bp, Artificial Sequence
  Synthetic
tgctgcgcttgggca

SEQ ID NO: 15518 - DNA, 16 bp, Artificial Sequence
  Synthetic
ccgcgagacaggtcgt

SEQ ID NO: 15519 - DNA, 19 bp, Artificial Sequence
  Synthetic
aaaccttccaatacgcccg

SEQ ID NO: 15520 - DNA, 20 bp, Artificial Sequence
  Synthetic
gatgccttcgatgacgaggt

SEQ ID NO: 15521 - DNA, 18 bp, Artificial Sequence
  Synthetic
ggatagcgtccggcaagt

SEQ ID NO: 15522 - DNA, 20 bp, Artificial Sequence
  Synthetic
cgtccgatgtgtattcccaa

SEQ ID NO: 15523 - DNA, 17 bp, Artificial Sequence
  Synthetic
gtaaacgacgacgcgcg

SEQ ID NO: 15524 - DNA, 19 bp, Artificial Sequence
  Synthetic
cgctgaatcggataggtcg

SEQ ID NO: 15525 - DNA, 18 bp, Artificial Sequence
  Synthetic
ggggtgaggatgtagcgt

SEQ ID NO: 15526 - DNA, 16 bp, Artificial Sequence
  Synthetic
gcctgttggacgggga

SEQ ID NO: 15527 - DNA, 17 bp, Artificial Sequence
  Synthetic
cggattcaaacgcgcca

SEQ ID NO: 15528 - DNA, 17 bp, Artificial Sequence
  Synthetic
tggaaaacccgcccagc

SEQ ID NO: 15529 - DNA, 20 bp, Artificial Sequence
  Synthetic
tcggctttgaataactgcgt

SEQ ID NO: 15530 - DNA, 18 bp, Artificial Sequence
  Synthetic
cggaaagggtaacggtcg

SEQ ID NO: 15531 - DNA, 16 bp, Artificial Sequence
  Synthetic
ccgtcagccagagggt

SEQ ID NO: 15532 - DNA, 20 bp, Artificial Sequence
  Synthetic
caaggcattggctttttcca

SEQ ID NO: 15533 - DNA, 18 bp, Artificial Sequence
  Synthetic
tcgcgttcgatttcgctg

SEQ ID NO: 15534 - DNA, 19 bp, Artificial Sequence
  Synthetic
ctcgggatggtttcgttcc

SEQ ID NO: 15535 - DNA, 19 bp, Artificial Sequence
  Synthetic
ggtcggcgaaaccaaatgg

SEQ ID NO: 15536 - DNA, 16 bp, Artificial Sequence
  Synthetic
cgttgcggctgactgc

SEQ ID NO: 15537 - DNA, 19 bp, Artificial Sequence
  Synthetic
cgaacggtattgcgcttcg

SEQ ID NO: 15538 - DNA, 20 bp, Artificial Sequence
  Synthetic
tgcaaagtgtgtatcaggct

SEQ ID NO: 15539 - DNA, 16 bp, Artificial Sequence
  Synthetic
ggtttgcgccccgatt

SEQ ID NO: 15540 - DNA, 20 bp, Artificial Sequence
  Synthetic
atgtattgaatgccgcgagc

SEQ ID NO: 15541 - DNA, 19 bp, Artificial Sequence
  Synthetic
cgctatgccgaaatgagcg

SEQ ID NO: 15542 - DNA, 20 bp, Artificial Sequence
  Synthetic
tgaattccgctttatcggcg

SEQ ID NO: 15543 - DNA, 18 bp, Artificial Sequence
  Synthetic
ccaacctcaaaccgccag

SEQ ID NO: 15544 - DNA, 17 bp, Artificial Sequence
  Synthetic
aacccgttttggcgcaa

SEQ ID NO: 15545 - DNA, 17 bp, Artificial Sequence
  Synthetic
tttctgcctgcccgtcc

SEQ ID NO: 15546 - DNA, 16 bp, Artificial Sequence
  Synthetic
gggcgggcgagttgaa

SEQ ID NO: 15547 - DNA, 17 bp, Artificial Sequence
  Synthetic
ttcaaaccgaccaccgc

SEQ ID NO: 15548 - DNA, 18 bp, Artificial Sequence
  Synthetic
tggcggggtcttttttgc

SEQ ID NO: 15549 - DNA, 19 bp, Artificial Sequence
  Synthetic
caaatcgtaggcaagcgca

SEQ ID NO: 15550 - DNA, 16 bp, Artificial Sequence
  Synthetic
cggcggcagaaggctt

SEQ ID NO: 15551 - DNA, 19 bp, Artificial Sequence
  Synthetic
agcgtccgggattttcaac

SEQ ID NO: 15552 - DNA, 17 bp, Artificial Sequence
  Synthetic
ccgcgccgattacttcg

SEQ ID NO: 15553 - DNA, 20 bp, Artificial Sequence
  Synthetic
ttggacgacctgataacaag

SEQ ID NO: 15554 - DNA, 23 bp, Artificial Sequence
  Synthetic
attggccgtaataaaaagtatgg

SEQ ID NO: 15555 - DNA, 16 bp, Artificial Sequence
  Synthetic
ggcaactggacgggga

SEQ ID NO: 15556 - DNA, 19 bp, Artificial Sequence
  Synthetic
tacatcgaatgctcgctcg

SEQ ID NO: 15557 - DNA, 16 bp, Artificial Sequence
  Synthetic
ggcggctttgccccaa

SEQ ID NO: 15558 - DNA, 16 bp, Artificial Sequence
  Synthetic
cgcaaaccgccgttgc

SEQ ID NO: 15559 - DNA, 16 bp, Artificial Sequence
  Synthetic
attcggcttgccgctg

SEQ ID NO: 15560 - DNA, 16 bp, Artificial Sequence
  Synthetic
tcggcagatacgccgt

SEQ ID NO: 15561 - DNA, 20 bp, Artificial Sequence
  Synthetic
ccttcctgaatcaggtcggc

SEQ ID NO: 15562 - DNA, 16 bp, Artificial Sequence
  Synthetic
cggtttgttgggcggt

SEQ ID NO: 15563 - DNA, 16 bp, Artificial Sequence
  Synthetic
aaggtaggcgggcagc

SEQ ID NO: 15564 - DNA, 16 bp, Artificial Sequence
  Synthetic
ggcgcatcagcagcat

SEQ ID NO: 15565 - DNA, 20 bp, Artificial Sequence
  Synthetic
aacgacgattcctgtgatgg

SEQ ID NO: 15566 - DNA, 16 bp, Artificial Sequence
  Synthetic
ccagccgttgcgtgca

SEQ ID NO: 15567 - DNA, 19 bp, Artificial Sequence
  Synthetic
gcaaaaatggttatcggcc

SEQ ID NO: 15568 - DNA, 21 bp, Artificial Sequence
  Synthetic
aaaagaagatttggctgaagt

SEQ ID NO: 15569 - DNA, 21 bp, Artificial Sequence
  Synthetic
aaaaagcggtaataaagggaa

SEQ ID NO: 15570 - DNA, 19 bp, Artificial Sequence
  Synthetic
ccgaacaacgccttttcct

SEQ ID NO: 15571 - DNA, 20 bp, Artificial Sequence
  Synthetic
acgcagttgttcggaaaacg

SEQ ID NO: 15572 - DNA, 20 bp, Artificial Sequence
  Synthetic
aggttgatgctgtcgaactg

SEQ ID NO: 15573 - DNA, 18 bp, Artificial Sequence
  Synthetic
catggcggcgacaaatgc

SEQ ID NO: 15574 - DNA, 20 bp, Artificial Sequence
  Synthetic
aaacagtttctcgaacggta

SEQ ID NO: 15575 - DNA, 16 bp, Artificial Sequence
  Synthetic
cgattgcggcatgggc

SEQ ID NO: 15576 - DNA, 18 bp, Artificial Sequence
  Synthetic
gctatctctctacgccac

SEQ ID NO: 15577 - DNA, 19 bp, Artificial Sequence
  Synthetic
tttctttttcggcgagcgt

SEQ ID NO: 15578 - DNA, 20 bp, Artificial Sequence
  Synthetic
ttcaaacccttgcccaaacc

SEQ ID NO: 15579 - DNA, 16 bp, Artificial Sequence
  Synthetic
ccgctccttcgcatgg

SEQ ID NO: 15580 - DNA, 23 bp, Artificial Sequence
  Synthetic
ttaaatcccaaaacagaaatgac

SEQ ID NO: 15581 - DNA, 16 bp, Artificial Sequence
  Synthetic
ggcaacgacagcgagg

SEQ ID NO: 15582 - DNA, 16 bp, Artificial Sequence
  Synthetic
ggtacgcgcatgacgg

SEQ ID NO: 15583 - DNA, 18 bp, Artificial Sequence
  Synthetic
cttctgctggcggaatcg

SEQ ID NO: 15584 - DNA, 18 bp, Artificial Sequence
  Synthetic
gatgtatctcggccggct

SEQ ID NO: 15585 - DNA, 16 bp, Artificial Sequence
  Synthetic
ggctacggacacggca

SEQ ID NO: 15586 - DNA, 25 bp, Artificial Sequence
  Synthetic
tcggattaatttgttcaatatcacc

SEQ ID NO: 15587 - DNA, 20 bp, Artificial Sequence
  Synthetic
cttcaggaaagctttgccgc

SEQ ID NO: 15588 - DNA, 20 bp, Artificial Sequence
  Synthetic
ccaatccgtgcaaaaacagg

SEQ ID NO: 15589 - DNA, 16 bp, Artificial Sequence
  Synthetic
gcattgtccgccacgc

SEQ ID NO: 15590 - DNA, 17 bp, Artificial Sequence
  Synthetic
tcggggatgatggcgac

SEQ ID NO: 15591 - DNA, 19 bp, Artificial Sequence
  Synthetic
attgtggctgccggtaatc

SEQ ID NO: 15592 - DNA, 16 bp, Artificial Sequence
  Synthetic
gttaggcggcgtggca

SEQ ID NO: 15593 - DNA, 16 bp, Artificial Sequence
  Synthetic
gccacgccgaagacga

SEQ ID NO: 15594 - DNA, 20 bp, Artificial Sequence
  Synthetic
gcttcccgattaccctgaaa

SEQ ID NO: 15595 - DNA, 16 bp, Artificial Sequence
  Synthetic
atgtcggtggcacggc

SEQ ID NO: 15596 - DNA, 18 bp, Artificial Sequence
  Synthetic
cgttcggcgcaataaagc

SEQ ID NO: 15597 - DNA, 18 bp, Artificial Sequence
  Synthetic
tcgaggtgtatgggcagg

SEQ ID NO: 15598 - DNA, 20 bp, Artificial Sequence
  Synthetic
ctttcagacggcattggtcg

SEQ ID NO: 15599 - DNA, 19 bp, Artificial Sequence
  Synthetic
ccgcccagccataaaacag

SEQ ID NO: 15600 - DNA, 18 bp, Artificial Sequence
  Synthetic
ttgggcggatatttcggc

SEQ ID NO: 15601 - DNA, 19 bp, Artificial Sequence
  Synthetic
attttgcgcctgattccga

SEQ ID NO: 15602 - DNA, 17 bp, Artificial Sequence
  Synthetic
gccttaccacatcgcgc

SEQ ID NO: 15603 - DNA, 19 bp, Artificial Sequence
  Synthetic
cgtcagcgtaaccatgtcg

SEQ ID NO: 15604 - DNA, 17 bp, Artificial Sequence
  Synthetic
ttgccggcaacaacgac

SEQ ID NO: 15605 - DNA, 20 bp, Artificial Sequence
  Synthetic
cgcatccccttcctttatgc

SEQ ID NO: 15606 - DNA, 18 bp, Artificial Sequence
  Synthetic
cgctcgttgatgtagcgg

SEQ ID NO: 15607 - DNA, 17 bp, Artificial Sequence
  Synthetic
gccaagcctttgcctgc

SEQ ID NO: 15608 - DNA, 20 bp, Artificial Sequence
  Synthetic
acaattacccgcaaacacgt

SEQ ID NO: 15609 - DNA, 18 bp, Artificial Sequence
  Synthetic
ccacaacaaccgcatcct

SEQ ID NO: 15610 - DNA, 20 bp, Artificial Sequence
  Synthetic
tatcgcgacgacttccatca

SEQ ID NO: 15611 - DNA, 16 bp, Artificial Sequence
  Synthetic
cgttggaacaggcgca

SEQ ID NO: 15612 - DNA, 20 bp, Artificial Sequence
  Synthetic
ggcaaatgtggcgacatagc

SEQ ID NO: 15613 - DNA, 19 bp, Artificial Sequence
  Synthetic
aactcaaacaggttgcggg

SEQ ID NO: 15614 - DNA, 18 bp, Artificial Sequence
  Synthetic
ggtcaaactcgaaggcgg

SEQ ID NO: 15615 - DNA, 16 bp, Artificial Sequence
  Synthetic
cagtgggcgaacgggt

SEQ ID NO: 15616 - DNA, 17 bp, Artificial Sequence
  Synthetic
ccgcagggattacgcca

SEQ ID NO: 15617 - DNA, 19 bp, Artificial Sequence
  Synthetic
ggcaggattttatgtgctg

SEQ ID NO: 15618 - DNA, 18 bp, Artificial Sequence
  Synthetic
tgtgatgaatgtcgcgca

SEQ ID NO: 15619 - DNA, 17 bp, Artificial Sequence
  Synthetic
cgcgaacatcatgcccg

SEQ ID NO: 15620 - DNA, 20 bp, Artificial Sequence
  Synthetic
cgatgtagtaggcgtgttcc

SEQ ID NO: 15621 - DNA, 18 bp, Artificial Sequence
  Synthetic
gggtaagaaggaacaggg

SEQ ID NO: 15622 - DNA, 18 bp, Artificial Sequence
  Synthetic
ttccgatacctttgcgcc

SEQ ID NO: 15623 - DNA, 19 bp, Artificial Sequence
  Synthetic
caatcggggtctgacaggt

SEQ ID NO: 15624 - DNA, 19 bp, Artificial Sequence
  Synthetic
ataagcggtttcgggatgg

SEQ ID NO: 15625 - DNA, 19 bp, Artificial Sequence
  Synthetic
gatggtacagaccgtgcgc

SEQ ID NO: 15626 - DNA, 16 bp, Artificial Sequence
  Synthetic
cggttgccaagcgtcc

SEQ ID NO: 15627 - DNA, 18 bp, Artificial Sequence
  Synthetic
ggacggtcgcagaaaagc

SEQ ID NO: 15628 - DNA, 16 bp, Artificial Sequence
  Synthetic
gcctgtggacgcaacc

SEQ ID NO: 15629 - DNA, 16 bp, Artificial Sequence
  Synthetic
ggcgcggttgccgtat

SEQ ID NO: 15630 - DNA, 16 bp, Artificial Sequence
  Synthetic
ccgcaacaagaggccg

SEQ ID NO: 15631 - DNA, 17 bp, Artificial Sequence
  Synthetic
gtccttgaccgcgaacc

SEQ ID NO: 15632 - DNA, 21 bp, Artificial Sequence
  Synthetic
aaaacgctaatcataagaggg

SEQ ID NO: 15633 - DNA, 17 bp, Artificial Sequence
  Synthetic
caggcatcgggagggat

SEQ ID NO: 15634 - DNA, 16 bp, Artificial Sequence
  Synthetic
cgcggcaggggttgtt

SEQ ID NO: 15635 - DNA, 19 bp, Artificial Sequence
  Synthetic
ccgcctgaaagaatcccat

SEQ ID NO: 15636 - DNA, 18 bp, Artificial Sequence
  Synthetic
cgagatgcacggctcaaa

SEQ ID NO: 15637 - DNA, 19 bp, Artificial Sequence
  Synthetic
gttccgcccgaaaatctgc

SEQ ID NO: 15638 - DNA, 19 bp, Artificial Sequence
  Synthetic
gcaggacaatccgaacctg

SEQ ID NO: 15639 - DNA, 20 bp, Artificial Sequence
  Synthetic
gacgatttcttcctcagcgt

SEQ ID NO: 15640 - DNA, 20 bp, Artificial Sequence
  Synthetic
tcgatacgaacgtccgttac

SEQ ID NO: 15641 - DNA, 20 bp, Artificial Sequence
  Synthetic
tcggcaacatgaacgaagtg

SEQ ID NO: 15642 - DNA, 18 bp, Artificial Sequence
  Synthetic
cgcccgattacaggcttg

SEQ ID NO: 15643 - DNA, 20 bp, Artificial Sequence
  Synthetic
tgacgtgaaatccgacatcg

SEQ ID NO: 15644 - DNA, 18 bp, Artificial Sequence
  Synthetic
cctgacggctggttttcg

SEQ ID NO: 15645 - DNA, 18 bp, Artificial Sequence
  Synthetic
tgggcgtggaaatttcgg

SEQ ID NO: 15646 - DNA, 16 bp, Artificial Sequence
  Synthetic
cgtcgaggcagtccga

SEQ ID NO: 15647 - DNA, 19 bp, Artificial Sequence
  Synthetic
ttatcgtgaatgccgaccg

SEQ ID NO: 15648 - DNA, 17 bp, Artificial Sequence
  Synthetic
ttgccttgtgttgccgt

SEQ ID NO: 15649 - DNA, 19 bp, Artificial Sequence
  Synthetic
ggggtcgaaggcaagatgg

SEQ ID NO: 15650 - DNA, 17 bp, Artificial Sequence
  Synthetic
ggactggtatcgcgcca

SEQ ID NO: 15651 - DNA, 16 bp, Artificial Sequence
  Synthetic
ccggcgcgtggcaata

SEQ ID NO: 15652 - DNA, 17 bp, Artificial Sequence
  Synthetic
cgatgtgattcgggcgg

SEQ ID NO: 15653 - DNA, 17 bp, Artificial Sequence
  Synthetic
ttcacgaagccgatgcc

SEQ ID NO: 15654 - DNA, 16 bp, Artificial Sequence
  Synthetic
acgcatcgcacttgcc

SEQ ID NO: 15655 - DNA, 18 bp, Artificial Sequence
  Synthetic
cccgattcttgccgttgc

SEQ ID NO: 15656 - DNA, 18 bp, Artificial Sequence
  Synthetic
gcggcaggcatattgagg

SEQ ID NO: 15657 - DNA, 16 bp, Artificial Sequence
  Synthetic
cggcgggaaaatgcgc

SEQ ID NO: 15658 - DNA, 18 bp, Artificial Sequence
  Synthetic
caagcactgccatcaccg

SEQ ID NO: 15659 - DNA, 21 bp, Artificial Sequence
  Synthetic
ctagatcgtcaaagtttagca

SEQ ID NO: 15660 - DNA, 18 bp, Artificial Sequence
  Synthetic
cggcgagattctgaactt

SEQ ID NO: 15661 - DNA, 17 bp, Artificial Sequence
  Synthetic
acaataccgccaagccg

SEQ ID NO: 15662 - DNA, 16 bp, Artificial Sequence
  Synthetic
cgccacgcgttttcgg

SEQ ID NO: 15663 - DNA, 16 bp, Artificial Sequence
  Synthetic
tgccttgtccgagccg

SEQ ID NO: 15664 - DNA, 16 bp, Artificial Sequence
  Synthetic
gcagcatcgcggtgga

SEQ ID NO: 15665 - DNA, 20 bp, Artificial Sequence
  Synthetic
atctgtggcgcatcaaaacc

SEQ ID NO: 15666 - DNA, 17 bp, Artificial Sequence
  Synthetic
gcacaaggtgcggcagt

SEQ ID NO: 15667 - DNA, 19 bp, Artificial Sequence
  Synthetic
gcgttgacgtgatccatcg

SEQ ID NO: 15668 - DNA, 20 bp, Artificial Sequence
  Synthetic
gaaaacgctgcaaaatgaac

SEQ ID NO: 15669 - DNA, 20 bp, Artificial Sequence
  Synthetic
atacacccaaagccacttcc

SEQ ID NO: 15670 - DNA, 16 bp, Artificial Sequence
  Synthetic
tcggcctggatgtggc

SEQ ID NO: 15671 - DNA, 20 bp, Artificial Sequence
  Synthetic
aaagtcgaaaacgtcgtgcg

SEQ ID NO: 15672 - DNA, 18 bp, Artificial Sequence
  Synthetic
gaagaggtcagcgcgatg

SEQ ID NO: 15673 - DNA, 18 bp, Artificial Sequence
  Synthetic
gccgcgatttgttcatcg

SEQ ID NO: 15674 - DNA, 17 bp, Artificial Sequence
  Synthetic
gacaccatcgagcagcg

SEQ ID NO: 15675 - DNA, 16 bp, Artificial Sequence
  Synthetic
agtgtccctcgtcgcc

SEQ ID NO: 15676 - DNA, 19 bp, Artificial Sequence
  Synthetic
ttgaccgaatgctgcatca

SEQ ID NO: 15677 - DNA, 16 bp, Artificial Sequence
  Synthetic
gacggcatcgacgtgg

SEQ ID NO: 15678 - DNA, 16 bp, Artificial Sequence
  Synthetic
cgcggtacaccacgct

SEQ ID NO: 15679 - DNA, 18 bp, Artificial Sequence
  Synthetic
acagaaagccggtgtgga

SEQ ID NO: 15680 - DNA, 17 bp, Artificial Sequence
  Synthetic
cgccggagagtgcaatc

SEQ ID NO: 15681 - DNA, 20 bp, Artificial Sequence
  Synthetic
tttgtaggcaataagcgcgg

SEQ ID NO: 15682 - DNA, 16 bp, Artificial Sequence
  Synthetic
ccggcggcagcagttt

SEQ ID NO: 15683 - DNA, 18 bp, Artificial Sequence
  Synthetic
cctgacggtcttcagccc

SEQ ID NO: 15684 - DNA, 19 bp, Artificial Sequence
  Synthetic
gggaacatctttgaccagt

SEQ ID NO: 15685 - DNA, 21 bp, Artificial Sequence
  Synthetic
ttgagcgtttttgaattcagc

SEQ ID NO: 15686 - DNA, 16 bp, Artificial Sequence
  Synthetic
cctgcgcgagtgttgc

SEQ ID NO: 15687 - DNA, 19 bp, Artificial Sequence
  Synthetic
gttcaggttgttgaggcgt

SEQ ID NO: 15688 - DNA, 16 bp, Artificial Sequence
  Synthetic
gcggtattgacggcgg

SEQ ID NO: 15689 - DNA, 19 bp, Artificial Sequence
  Synthetic
cgacctgcatcatttcgcc

SEQ ID NO: 15690 - DNA, 18 bp, Artificial Sequence
  Synthetic
gggaaatcggcgaaacgg

SEQ ID NO: 15691 - DNA, 15 bp, Artificial Sequence
  Synthetic
ttcggcggctttgcg

SEQ ID NO: 15692 - DNA, 16 bp, Artificial Sequence
  Synthetic
ccccgccaaaaacggc

SEQ ID NO: 15693 - DNA, 20 bp, Artificial Sequence
  Synthetic
ttccgaagatgaagttgccg

SEQ ID NO: 15694 - DNA, 20 bp, Artificial Sequence
  Synthetic
ttgttttcggtaatgctgcg

SEQ ID NO: 15695 - DNA, 16 bp, Artificial Sequence
  Synthetic
cgttggagggcgacga

SEQ ID NO: 15696 - DNA, 19 bp, Artificial Sequence
  Synthetic
cgttgatggtgtcggtgag

SEQ ID NO: 15697 - DNA, 18 bp, Artificial Sequence
  Synthetic
tcttcggtggtcatgcgg

SEQ ID NO: 15698 - DNA, 17 bp, Artificial Sequence
  Synthetic
cgccgagtttcagcgtg

SEQ ID NO: 15699 - DNA, 21 bp, Artificial Sequence
  Synthetic
catagtaacggatgtggaaag

SEQ ID NO: 15700 - DNA, 16 bp, Artificial Sequence
  Synthetic
gcaaactgcccacgcc

SEQ ID NO: 15701 - DNA, 20 bp, Artificial Sequence
  Synthetic
gaacaagcctgttttcctgc

SEQ ID NO: 15702 - DNA, 18 bp, Artificial Sequence
  Synthetic
acaaattcacacgggcgg

SEQ ID NO: 15703 - DNA, 20 bp, Artificial Sequence
  Synthetic
gctttatcaggcgatggagg

SEQ ID NO: 15704 - DNA, 20 bp, Artificial Sequence
  Synthetic
gtatcggcatcgttaccagt

SEQ ID NO: 15705 - DNA, 17 bp, Artificial Sequence
  Synthetic
gattgtctgtcgcggcg

SEQ ID NO: 15706 - DNA, 18 bp, Artificial Sequence
  Synthetic
atcatcggcttctgcgtg

SEQ ID NO: 15707 - DNA, 19 bp, Artificial Sequence
  Synthetic
cgccatatccgacgcttac

SEQ ID NO: 15708 - DNA, 18 bp, Artificial Sequence
  Synthetic
ggcgtttaccggttcgac

SEQ ID NO: 15709 - DNA, 17 bp, Artificial Sequence
  Synthetic
cgtttcaaacggcgcgg

SEQ ID NO: 15710 - DNA, 16 bp, Artificial Sequence
  Synthetic
gagcagggcgcatcga

SEQ ID NO: 15711 - DNA, 18 bp, Artificial Sequence
  Synthetic
gcacgatggaagcaggaa

SEQ ID NO: 15712 - DNA, 15 bp, Artificial Sequence
  Synthetic
ttggcggcctgcagt

SEQ ID NO: 15713 - DNA, 19 bp, Artificial Sequence
  Synthetic
tccgtatctggttaaacgg

SEQ ID NO: 15714 - DNA, 19 bp, Artificial Sequence
  Synthetic
agggtcagtccgatttcgt

SEQ ID NO: 15715 - DNA, 19 bp, Artificial Sequence
  Synthetic
tcttcggtcaacacgatgg

SEQ ID NO: 15716 - DNA, 20 bp, Artificial Sequence
  Synthetic
atatattcgagtgcgcgctc

SEQ ID NO: 15717 - DNA, 17 bp, Artificial Sequence
  Synthetic
tcgccatcgtgtgttcg

SEQ ID NO: 15718 - DNA, 20 bp, Artificial Sequence
  Synthetic
tttggcaatccttttacgcg

SEQ ID NO: 15719 - DNA, 18 bp, Artificial Sequence
  Synthetic
cggcaggcgttttctacc

SEQ ID NO: 15720 - DNA, 19 bp, Artificial Sequence
  Synthetic
gaccaaatccgcctgtacg

SEQ ID NO: 15721 - DNA, 17 bp, Artificial Sequence
  Synthetic
ccgggtcggtatggaca

SEQ ID NO: 15722 - DNA, 16 bp, Artificial Sequence
  Synthetic
cggtggaaggcgggaa

SEQ ID NO: 15723 - DNA, 18 bp, Artificial Sequence
  Synthetic
cgcgccgtctgaaaatcc

SEQ ID NO: 15724 - DNA, 16 bp, Artificial Sequence
  Synthetic
gccgccgccaaatcca

SEQ ID NO: 15725 - DNA, 17 bp, Artificial Sequence
  Synthetic
ggtgtggtgcaggagga

SEQ ID NO: 15726 - DNA, 16 bp, Artificial Sequence
  Synthetic
gcatacgcgccatcgt

SEQ ID NO: 15727 - DNA, 19 bp, Artificial Sequence
  Synthetic
atcgattcaaaacactggc

SEQ ID NO: 15728 - DNA, 18 bp, Artificial Sequence
  Synthetic
aacccaaactcaaagcca

SEQ ID NO: 15729 - DNA, 16 bp, Artificial Sequence
  Synthetic
ccccggcaggagcatt

SEQ ID NO: 15730 - DNA, 18 bp, Artificial Sequence
  Synthetic
cggctttgtgcagattgc

SEQ ID NO: 15731 - DNA, 18 bp, Artificial Sequence
  Synthetic
tgagcgacgctttaccga

SEQ ID NO: 15732 - DNA, 19 bp, Artificial Sequence
  Synthetic
agagggctttgagcatcgc

SEQ ID NO: 15733 - DNA, 17 bp, Artificial Sequence
  Synthetic
ggaagccggcgaagagt

SEQ ID NO: 15734 - DNA, 16 bp, Artificial Sequence
  Synthetic
tcagggcttcgggcgt

SEQ ID NO: 15735 - DNA, 19 bp, Artificial Sequence
  Synthetic
cgacgcagataaaatcgcg

SEQ ID NO: 15736 - DNA, 20 bp, Artificial Sequence
  Synthetic
cactcttggggtcctgaagc

SEQ ID NO: 15737 - DNA, 18 bp, Artificial Sequence
  Synthetic
gcgctcaaacctttcggt

SEQ ID NO: 15738 - DNA, 18 bp, Artificial Sequence
  Synthetic
cacccccatcgacctgat

SEQ ID NO: 15739 - DNA, 20 bp, Artificial Sequence
  Synthetic
tttccgatagattcctgccg

SEQ ID NO: 15740 - DNA, 18 bp, Artificial Sequence
  Synthetic
cggtcggctttttcctgc

SEQ ID NO: 15741 - DNA, 20 bp, Artificial Sequence
  Synthetic
tgaacaggatgttgcggatg

SEQ ID NO: 15742 - DNA, 16 bp, Artificial Sequence
  Synthetic
cgacacgctcgtccgt

SEQ ID NO: 15743 - DNA, 16 bp, Artificial Sequence
  Synthetic
cggcgggggtttctgt

SEQ ID NO: 15744 - DNA, 17 bp, Artificial Sequence
  Synthetic
caaggatgcgggcgatg

SEQ ID NO: 15745 - DNA, 18 bp, Artificial Sequence
  Synthetic
ttgctgacgctttcggtc

SEQ ID NO: 15746 - DNA, 18 bp, Artificial Sequence
  Synthetic
aggtgtcagtgcgttgtg

SEQ ID NO: 15747 - DNA, 19 bp, Artificial Sequence
  Synthetic
gcagcccgcatgtttttcc

SEQ ID NO: 15748 - DNA, 19 bp, Artificial Sequence
  Synthetic
acgccgttgtttttcacgt

SEQ ID NO: 15749 - DNA, 20 bp, Artificial Sequence
  Synthetic
cgaaacgttttttgcagcgg

SEQ ID NO: 15750 - DNA, 17 bp, Artificial Sequence
  Synthetic
cagacgcgttcggcaac

SEQ ID NO: 15751 - DNA, 17 bp, Artificial Sequence
  Synthetic
gcttcggcgacaacagc

SEQ ID NO: 15752 - DNA, 21 bp, Artificial Sequence
  Synthetic
agccgtattgtttcatcatct

SEQ ID NO: 15753 - DNA, 18 bp, Artificial Sequence
  Synthetic
cgcttcgattacggcgtt

SEQ ID NO: 15754 - DNA, 18 bp, Artificial Sequence
  Synthetic
ttggacatcgcgcattgg

SEQ ID NO: 15755 - DNA, 18 bp, Artificial Sequence
  Synthetic
gtaggggaggttgttctg

SEQ ID NO: 15756 - DNA, 22 bp, Artificial Sequence
  Synthetic
tatcggataacatctccttcaa

SEQ ID NO: 15757 - DNA, 24 bp, Artificial Sequence
  Synthetic
aagtaatcattaaattcggatccg

SEQ ID NO: 15758 - DNA, 19 bp, Artificial Sequence
  Synthetic
caaatgtgggtgacaatcg

SEQ ID NO: 15759 - DNA, 19 bp, Artificial Sequence
  Synthetic
attgggtatctaggccact

SEQ ID NO: 15760 - DNA, 23 bp, Artificial Sequence
  Synthetic
ttgaaaccacttctgatttacct

SEQ ID NO: 15761 - DNA, 21 bp, Artificial Sequence
  Synthetic
tcctgattcatttttctctgg

SEQ ID NO: 15762 - DNA, 19 bp, Artificial Sequence
  Synthetic
ctccaaagtaatcggttcg

SEQ ID NO: 15763 - DNA, 18 bp, Artificial Sequence
  Synthetic
cacgccaaatcgcaaggt

SEQ ID NO: 15764 - DNA, 16 bp, Artificial Sequence
  Synthetic
cctccgcgctgatgca

SEQ ID NO: 15765 - DNA, 18 bp, Artificial Sequence
  Synthetic
cgtgcgttgggtcaaaga

SEQ ID NO: 15766 - DNA, 19 bp, Artificial Sequence
  Synthetic
ctgaccgccattcacaacg

SEQ ID NO: 15767 - DNA, 18 bp, Artificial Sequence
  Synthetic
taccaaggccgctcgtac

SEQ ID NO: 15768 - DNA, 16 bp, Artificial Sequence
  Synthetic
cgtccgccaagatgcc

SEQ ID NO: 15769 - DNA, 17 bp, Artificial Sequence
  Synthetic
ggacgcgataccgacga

SEQ ID NO: 15770 - DNA, 18 bp, Artificial Sequence
  Synthetic
gcctgaacatccccacca

SEQ ID NO: 15771 - DNA, 16 bp, Artificial Sequence
  Synthetic
gacctgcggctcgtgt

SEQ ID NO: 15772 - DNA, 20 bp, Artificial Sequence
  Synthetic
gtcttattcggcaacatcgc

SEQ ID NO: 15773 - DNA, 17 bp, Artificial Sequence
  Synthetic
gggcggacttcatcgtg

SEQ ID NO: 15774 - DNA, 20 bp, Artificial Sequence
  Synthetic
ggaaacgccgaaattttccg

SEQ ID NO: 15775 - DNA, 20 bp, Artificial Sequence
  Synthetic
tccgaaccgtctttctgtgc

SEQ ID NO: 15776 - DNA, 20 bp, Artificial Sequence
  Synthetic
atgtccaacaagaaatgcgc

SEQ ID NO: 15777 - DNA, 20 bp, Artificial Sequence
  Synthetic
acatcggatgctcttccaga

SEQ ID NO: 15778 - DNA, 17 bp, Artificial Sequence
  Synthetic
tgtccaactcgagggcg

SEQ ID NO: 15779 - DNA, 20 bp, Artificial Sequence
  Synthetic
ggtctgaccgtctttgaagg

SEQ ID NO: 15780 - DNA, 18 bp, Artificial Sequence
  Synthetic
cgacaaacgtgccttccg

SEQ ID NO: 15781 - DNA, 18 bp, Artificial Sequence
  Synthetic
tccaaatcaaacgcgccc

SEQ ID NO: 15782 - DNA, 18 bp, Artificial Sequence
  Synthetic
cgtctgaacaccctcccg

SEQ ID NO: 15783 - DNA, 17 bp, Artificial Sequence
  Synthetic
catcgcttttgccgccg

SEQ ID NO: 15784 - DNA, 17 bp, Artificial Sequence
  Synthetic
gcacggacagggatcgt

SEQ ID NO: 15785 - DNA, 18 bp, Artificial Sequence
  Synthetic
cgaccaaccgaccgattc

SEQ ID NO: 15786 - DNA, 16 bp, Artificial Sequence
  Synthetic
ggcgcaacggccttac

SEQ ID NO: 15787 - DNA, 19 bp, Artificial Sequence
  Synthetic
gctttggcactgaaaagcg

SEQ ID NO: 15788 - DNA, 18 bp, Artificial Sequence
  Synthetic
tcgcctcgggattgaaca

SEQ ID NO: 15789 - DNA, 19 bp, Artificial Sequence
  Synthetic
ctatctgaagtccgagcgc

SEQ ID NO: 15790 - DNA, 19 bp, Artificial Sequence
  Synthetic
aaaactgtacagcaggcgc

SEQ ID NO: 15791 - DNA, 20 bp, Artificial Sequence
  Synthetic
ttttcgtcatccgttaccgc

SEQ ID NO: 15792 - DNA, 20 bp, Artificial Sequence
  Synthetic
cctactggtacatcgacacg

SEQ ID NO: 15793 - DNA, 18 bp, Artificial Sequence
  Synthetic
cccgaacacctgcaacaa

SEQ ID NO: 15794 - DNA, 20 bp, Artificial Sequence
  Synthetic
aaaaccgttcgttacctccg

SEQ ID NO: 15795 - DNA, 18 bp, Artificial Sequence
  Synthetic
gcgacaaataccccgttt

SEQ ID NO: 15796 - DNA, 20 bp, Artificial Sequence
  Synthetic
tcgtttatgctgatccctcg

SEQ ID NO: 15797 - DNA, 20 bp, Artificial Sequence
  Synthetic
ttcaatatagccaaggggat

SEQ ID NO: 15798 - DNA, 18 bp, Artificial Sequence
  Synthetic
gcgactgcgtgtccattg

SEQ ID NO: 15799 - DNA, 18 bp, Artificial Sequence
  Synthetic
tcgtcaacagcgtcgtcg

SEQ ID NO: 15800 - DNA, 17 bp, Artificial Sequence
  Synthetic
cacgcgctgaaggaggt

SEQ ID NO: 15801 - DNA, 17 bp, Artificial Sequence
  Synthetic
attgccgggaaacacgc

SEQ ID NO: 15802 - DNA, 18 bp, Artificial Sequence
  Synthetic
actgcccaaaagcgtacc

SEQ ID NO: 15803 - DNA, 18 bp, Artificial Sequence
  Synthetic
gttctttggcggcttcgt

SEQ ID NO: 15804 - DNA, 19 bp, Artificial Sequence
  Synthetic
gcggcgattatcatctgca

SEQ ID NO: 15805 - DNA, 18 bp, Artificial Sequence
  Synthetic
aaaatcggtgcggacgtg

SEQ ID NO: 15806 - DNA, 18 bp, Artificial Sequence
  Synthetic
atgagtccgaggctgtgg

SEQ ID NO: 15807 - DNA, 16 bp, Artificial Sequence
  Synthetic
gccattgcaggcggtt

SEQ ID NO: 15808 - DNA, 16 bp, Artificial Sequence
  Synthetic
ttgccgatgttgccgc

SEQ ID NO: 15809 - DNA, 16 bp, Artificial Sequence
  Synthetic
cgagtatggtggcgcg

SEQ ID NO: 15810 - DNA, 20 bp, Artificial Sequence
  Synthetic
tggtgttccaaagcagtacc

SEQ ID NO: 15811 - DNA, 20 bp, Artificial Sequence
  Synthetic
tgtattcctgatttccggcc

SEQ ID NO: 15812 - DNA, 23 bp, Artificial Sequence
  Synthetic
ctttgttatcgacttcaatttgg

SEQ ID NO: 15813 - DNA, 17 bp, Artificial Sequence
  Synthetic
gcgccgcataacctctt

SEQ ID NO: 15814 - DNA, 19 bp, Artificial Sequence
  Synthetic
agcagtagggtcatcaggc

SEQ ID NO: 15815 - DNA, 16 bp, Artificial Sequence
  Synthetic
gacagccagcgcatcg

SEQ ID NO: 15816 - DNA, 17 bp, Artificial Sequence
  Synthetic
tcgccctgatagccgtc

SEQ ID NO: 15817 - DNA, 18 bp, Artificial Sequence
  Synthetic
gatatgggcggcgagtcc

SEQ ID NO: 15818 - DNA, 16 bp, Artificial Sequence
  Synthetic
ggggcgaacaacaccg

SEQ ID NO: 15819 - DNA, 16 bp, Artificial Sequence
  Synthetic
tgctctgcggcggaca

SEQ ID NO: 15820 - DNA, 19 bp, Artificial Sequence
  Synthetic
ttgaacccgtataccaacc

SEQ ID NO: 15821 - DNA, 20 bp, Artificial Sequence
  Synthetic
cggtagctaagacgacgtcc

SEQ ID NO: 15822 - DNA, 16 bp, Artificial Sequence
  Synthetic
catttcgcgcgcaccc

SEQ ID NO: 15823 - DNA, 16 bp, Artificial Sequence
  Synthetic
acctcttcgcgacgct

SEQ ID NO: 15824 - DNA, 20 bp, Artificial Sequence
  Synthetic
acgagcaaatgaaactggcg

SEQ ID NO: 15825 - DNA, 20 bp, Artificial Sequence
  Synthetic
cggaatcgtacaggaagacg

SEQ ID NO: 15826 - DNA, 16 bp, Artificial Sequence
  Synthetic
cgcgtggcaggaacac

SEQ ID NO: 15827 - DNA, 15 bp, Artificial Sequence
  Synthetic
aaaaggccgcgctcg

SEQ ID NO: 15828 - DNA, 20 bp, Artificial Sequence
  Synthetic
gaaactggtcgaatgcaacg

SEQ ID NO: 15829 - DNA, 18 bp, Artificial Sequence
  Synthetic
gatgcgcgtttcggcata

SEQ ID NO: 15830 - DNA, 19 bp, Artificial Sequence
  Synthetic
cgtatccgcactacctcgc

SEQ ID NO: 15831 - DNA, 16 bp, Artificial Sequence
  Synthetic
ggctgctgctgtccct

SEQ ID NO: 15832 - DNA, 18 bp, Artificial Sequence
  Synthetic
tttcgcaccctcttccgt

SEQ ID NO: 15833 - DNA, 18 bp, Artificial Sequence
  Synthetic
ccaaggcttcgatgaaga

SEQ ID NO: 15834 - DNA, 16 bp, Artificial Sequence
  Synthetic
tcagacggcaggcagc

SEQ ID NO: 15835 - DNA, 20 bp, Artificial Sequence
  Synthetic
ccgatttgcacaaattaacc

SEQ ID NO: 15836 - DNA, 21 bp, Artificial Sequence
  Synthetic
atttcggatttaattgacccg

SEQ ID NO: 15837 - DNA, 18 bp, Artificial Sequence
  Synthetic
gcgatgaagcgtgggatt

SEQ ID NO: 15838 - DNA, 21 bp, Artificial Sequence
  Synthetic
ctaccattgatattgtgtgct

SEQ ID NO: 15839 - DNA, 19 bp, Artificial Sequence
  Synthetic
aatttgggcaaagaccccg

SEQ ID NO: 15840 - DNA, 24 bp, Artificial Sequence
  Synthetic
tctttgattgataatggtgaaacg

SEQ ID NO: 15841 - DNA, 19 bp, Artificial Sequence
  Synthetic
aaacaattactggcgtgtc

SEQ ID NO: 15842 - DNA, 18 bp, Artificial Sequence
  Synthetic
aaagggatacgcaaccat

SEQ ID NO: 15843 - DNA, 16 bp, Artificial Sequence
  Synthetic
cgccgtactgctggct

SEQ ID NO: 15844 - DNA, 16 bp, Artificial Sequence
  Synthetic
acaccgacgctgacct

SEQ ID NO: 15845 - DNA, 19 bp, Artificial Sequence
  Synthetic
aatatttccgttgccgtcc

SEQ ID NO: 15846 - DNA, 20 bp, Artificial Sequence
  Synthetic
tatctgccagttttccttgt

SEQ ID NO: 15847 - DNA, 17 bp, Artificial Sequence
  Synthetic
ccgaaatgcgtaccggc

SEQ ID NO: 15848 - DNA, 16 bp, Artificial Sequence
  Synthetic
ggctcgcccgaatcca

SEQ ID NO: 15849 - DNA, 21 bp, Artificial Sequence
  Synthetic
ttgttttgcagtaaatcgaga

SEQ ID NO: 15850 - DNA, 19 bp, Artificial Sequence
  Synthetic
ttgtcctttgtaagcggcg

SEQ ID NO: 15851 - DNA, 20 bp, Artificial Sequence
  Synthetic
aagcagtcgaaaatcaggcg

SEQ ID NO: 15852 - DNA, 20 bp, Artificial Sequence
  Synthetic
aaggtcgaaatcgccaaacg

SEQ ID NO: 15853 - DNA, 18 bp, Artificial Sequence
  Synthetic
tcggggaatcagaagcgg

SEQ ID NO: 15854 - DNA, 19 bp, Artificial Sequence
  Synthetic
tgacgaaagaggcggaaca

SEQ ID NO: 15855 - DNA, 18 bp, Artificial Sequence
  Synthetic
gccgtgtcaagatggaaa

SEQ ID NO: 15856 - DNA, 16 bp, Artificial Sequence
  Synthetic
tgcagacggcggaaca

SEQ ID NO: 15857 - DNA, 18 bp, Artificial Sequence
  Synthetic
gtcgagaccgcctgtttc

SEQ ID NO: 15858 - DNA, 20 bp, Artificial Sequence
  Synthetic
aatcggcgagatttccatcg

SEQ ID NO: 15859 - DNA, 17 bp, Artificial Sequence
  Synthetic
cgtaccacgctgctgac

SEQ ID NO: 15860 - DNA, 20 bp, Artificial Sequence
  Synthetic
ccgtcctattatgtccgtcg

SEQ ID NO: 15861 - DNA, 18 bp, Artificial Sequence
  Synthetic
cgtatcggacgggttgga

SEQ ID NO: 15862 - DNA, 16 bp, Artificial Sequence
  Synthetic
gtgctcctggcgcaga

SEQ ID NO: 15863 - DNA, 18 bp, Artificial Sequence
  Synthetic
acgcttggaaaacacccg

SEQ ID NO: 15864 - DNA, 20 bp, Artificial Sequence
  Synthetic
atctcgaaacccgtcattcc

SEQ ID NO: 15865 - DNA, 16 bp, Artificial Sequence
  Synthetic
gcccgcctgagcaaca

SEQ ID NO: 15866 - DNA, 19 bp, Artificial Sequence
  Synthetic
cgaagaaaaccacctgcgt

SEQ ID NO: 15867 - DNA, 16 bp, Artificial Sequence
  Synthetic
ggaagctgcccgaagc

SEQ ID NO: 15868 - DNA, 16 bp, Artificial Sequence
  Synthetic
gccgccgtttcccgtt

SEQ ID NO: 15869 - DNA, 20 bp, Artificial Sequence
  Synthetic
aaggaaccaccgtatccaca

SEQ ID NO: 15870 - DNA, 17 bp, Artificial Sequence
  Synthetic
gcgcgataatcggcagg

SEQ ID NO: 15871 - DNA, 16 bp, Artificial Sequence
  Synthetic
acgtccagcggcgtca

SEQ ID NO: 15872 - DNA, 19 bp, Artificial Sequence
  Synthetic
gccgcatagtcaaaatgcc

SEQ ID NO: 15873 - DNA, 16 bp, Artificial Sequence
  Synthetic
ccgcagcaattcccgc

SEQ ID NO: 15874 - DNA, 19 bp, Artificial Sequence
  Synthetic
ccctcataaaaccgctgcc

SEQ ID NO: 15875 - DNA, 20 bp, Artificial Sequence
  Synthetic
aaccaccaccagataatcgc

SEQ ID NO: 15876 - DNA, 19 bp, Artificial Sequence
  Synthetic
tcgcatcctcctccttcaa

SEQ ID NO: 15877 - DNA, 19 bp, Artificial Sequence
  Synthetic
gccaccagcgtgattttgc

SEQ ID NO: 15878 - DNA, 15 bp, Artificial Sequence
  Synthetic
aatccgccgccgcat

SEQ ID NO: 15879 - DNA, 20 bp, Artificial Sequence
  Synthetic
taagcctgtccaacacatcc

SEQ ID NO: 15880 - DNA, 19 bp, Artificial Sequence
  Synthetic
caaaccccaccgcagaatg

SEQ ID NO: 15881 - DNA, 17 bp, Artificial Sequence
  Synthetic
gcggcagggatttgacc

SEQ ID NO: 15882 - DNA, 16 bp, Artificial Sequence
  Synthetic
caccgtgcgccctgtt

SEQ ID NO: 15883 - DNA, 20 bp, Artificial Sequence
  Synthetic
caacacggttgtttcagggt

SEQ ID NO: 15884 - DNA, 19 bp, Artificial Sequence
  Synthetic
gtatcacgcgcattcccct

SEQ ID NO: 15885 - DNA, 20 bp, Artificial Sequence
  Synthetic
acggcgtagttttcaatccg

SEQ ID NO: 15886 - DNA, 17 bp, Artificial Sequence
  Synthetic
tcaacggcgcggattcg

SEQ ID NO: 15887 - DNA, 16 bp, Artificial Sequence
  Synthetic
cgccggccgatgatga

SEQ ID NO: 15888 - DNA, 20 bp, Artificial Sequence
  Synthetic
tccactccgaatgtctgacg

SEQ ID NO: 15889 - DNA, 16 bp, Artificial Sequence
  Synthetic
cgtgccggggttctca

SEQ ID NO: 15890 - DNA, 21 bp, Artificial Sequence
  Synthetic
atactggaatttctgcgtttg

SEQ ID NO: 15891 - DNA, 18 bp, Artificial Sequence
  Synthetic
tttggtggcggaggaaac

SEQ ID NO: 15892 - DNA, 19 bp, Artificial Sequence
  Synthetic
tggtcaggaacaatgcctg

SEQ ID NO: 15893 - DNA, 19 bp, Artificial Sequence
  Synthetic
ataaggcgtggcagaagga

SEQ ID NO: 15894 - DNA, 20 bp, Artificial Sequence
  Synthetic
agagatggttaacgaaggcg

SEQ ID NO: 15895 - DNA, 19 bp, Artificial Sequence
  Synthetic
gccacatcgacatccaaga

SEQ ID NO: 15896 - DNA, 19 bp, Artificial Sequence
  Synthetic
agctcgttaccgaacagct

SEQ ID NO: 15897 - DNA, 18 bp, Artificial Sequence
  Synthetic
gccgtttaccgcaacaac

SEQ ID NO: 15898 - DNA, 19 bp, Artificial Sequence
  Synthetic
gtatccatcccgattcggc

SEQ ID NO: 15899 - DNA, 19 bp, Artificial Sequence
  Synthetic
ttacctctacacggacggc

SEQ ID NO: 15900 - DNA, 23 bp, Artificial Sequence
  Synthetic
gatgtttcaaatttcgaagatgt

SEQ ID NO: 15901 - DNA, 19 bp, Artificial Sequence
  Synthetic
tagctacccggctatgcaa

SEQ ID NO: 15902 - DNA, 16 bp, Artificial Sequence
  Synthetic
cttttcctgccgcgcc

SEQ ID NO: 15903 - DNA, 16 bp, Artificial Sequence
  Synthetic
aacgctcaaaccgccg

SEQ ID NO: 15904 - DNA, 15 bp, Artificial Sequence
  Synthetic
gccatcgcgccgttt

SEQ ID NO: 15905 - DNA, 18 bp, Artificial Sequence
  Synthetic
ccctgaaatcgaacgccg

SEQ ID NO: 15906 - DNA, 20 bp, Artificial Sequence
  Synthetic
cttcctgattaccatcggcg

SEQ ID NO: 15907 - DNA, 18 bp, Artificial Sequence
  Synthetic
tcaacagtggcgcgaaac

SEQ ID NO: 15908 - DNA, 16 bp, Artificial Sequence
  Synthetic
gcggcggcttcagcta

SEQ ID NO: 15909 - DNA, 16 bp, Artificial Sequence
  Synthetic
ggcagcgttacgggca

SEQ ID NO: 15910 - DNA, 20 bp, Artificial Sequence
  Synthetic
ggtctggtcggacagattgc

SEQ ID NO: 15911 - DNA, 17 bp, Artificial Sequence
  Synthetic
tctacaccgcccaagca

SEQ ID NO: 15912 - DNA, 18 bp, Artificial Sequence
  Synthetic
ggcacgttctaccaaggc

SEQ ID NO: 15913 - DNA, 16 bp, Artificial Sequence
  Synthetic
cagctcgcccaagcca

SEQ ID NO: 15914 - DNA, 17 bp, Artificial Sequence
  Synthetic
cctcacccaagccgtct

SEQ ID NO: 15915 - DNA, 19 bp, Artificial Sequence
  Synthetic
cggcaaacacccattgacc

SEQ ID NO: 15916 - DNA, 20 bp, Artificial Sequence
  Synthetic
cgtaaacgctgtaatactgc

SEQ ID NO: 15917 - DNA, 20 bp, Artificial Sequence
  Synthetic
caatgactaccaccacgacg

SEQ ID NO: 15918 - DNA, 19 bp, Artificial Sequence
  Synthetic
aaactaccgccgcaatacg

SEQ ID NO: 15919 - DNA, 16 bp, Artificial Sequence
  Synthetic
cgaagcccagcgcatc

SEQ ID NO: 15920 - DNA, 17 bp, Artificial Sequence
  Synthetic
acgcggctacaacgtcg

SEQ ID NO: 15921 - DNA, 17 bp, Artificial Sequence
  Synthetic
cccgttgcgtttcggaa

SEQ ID NO: 15922 - DNA, 20 bp, Artificial Sequence
  Synthetic
gctgccgtagattttgacgg

SEQ ID NO: 15923 - DNA, 18 bp, Artificial Sequence
  Synthetic
ttcgggtttttgacggcg

SEQ ID NO: 15924 - DNA, 18 bp, Artificial Sequence
  Synthetic
tcgggagccagagtctct

SEQ ID NO: 15925 - DNA, 18 bp, Artificial Sequence
  Synthetic
gcgttgcgccataatggt

SEQ ID NO: 15926 - DNA, 16 bp, Artificial Sequence
  Synthetic
gcggcggctttgttca

SEQ ID NO: 15927 - DNA, 16 bp, Artificial Sequence
  Synthetic
cagctgacgggcgtgt

SEQ ID NO: 15928 - DNA, 16 bp, Artificial Sequence
  Synthetic
cgcagcaaaccgccga

SEQ ID NO: 15929 - DNA, 20 bp, Artificial Sequence
  Synthetic
tgcctgatacagtcggtaca

SEQ ID NO: 15930 - DNA, 19 bp, Artificial Sequence
  Synthetic
tttggaaggcaagagcgac

SEQ ID NO: 15931 - DNA, 17 bp, Artificial Sequence
  Synthetic
tgccgcctgcaaacctc

SEQ ID NO: 15932 - DNA, 15 bp, Artificial Sequence
  Synthetic
ccaaacgccgcgtgt

SEQ ID NO: 15933 - DNA, 17 bp, Artificial Sequence
  Synthetic
gcaacgacatcctcgcc

SEQ ID NO: 15934 - DNA, 16 bp, Artificial Sequence
  Synthetic
ccgcgctgtacggcat

SEQ ID NO: 15935 - DNA, 18 bp, Artificial Sequence
  Synthetic
atcgacgaccaccacacc

SEQ ID NO: 15936 - DNA, 20 bp, Artificial Sequence
  Synthetic
cttagggcaaatgggtctgc

SEQ ID NO: 15937 - DNA, 18 bp, Artificial Sequence
  Synthetic
atcagtacgggaatgagc

SEQ ID NO: 15938 - DNA, 19 bp, Artificial Sequence
  Synthetic
ttgaaagtgcgcgaactgt

SEQ ID NO: 15939 - DNA, 17 bp, Artificial Sequence
  Synthetic
gccaaagccgaactcgc

SEQ ID NO: 15940 - DNA, 20 bp, Artificial Sequence
  Synthetic
cccataccgattccaacacg

SEQ ID NO: 15941 - DNA, 19 bp, Artificial Sequence
  Synthetic
gcgtgggcgttttacttgt

SEQ ID NO: 15942 - DNA, 20 bp, Artificial Sequence
  Synthetic
cgtagccggcttctatttcg

SEQ ID NO: 15943 - DNA, 20 bp, Artificial Sequence
  Synthetic
gccaaacggcaaaaaaacgc

SEQ ID NO: 15944 - DNA, 22 bp, Artificial Sequence
  Synthetic
taaacttttggtgctttttccg

SEQ ID NO: 15945 - DNA, 22 bp, Artificial Sequence
  Synthetic
aaaagaaggttcaatatgtcgg

SEQ ID NO: 15946 - DNA, 16 bp, Artificial Sequence
  Synthetic
cggctgtgcgtgaggt

SEQ ID NO: 15947 - DNA, 19 bp, Artificial Sequence
  Synthetic
cctgttttttgacgctgaa

SEQ ID NO: 15948 - DNA, 17 bp, Artificial Sequence
  Synthetic
gcacatccgccacatcc

SEQ ID NO: 15949 - DNA, 18 bp, Artificial Sequence
  Synthetic
cagcaggctgatggcaat

SEQ ID NO: 15950 - DNA, 16 bp, Artificial Sequence
  Synthetic
cggcccagcaacacca

SEQ ID NO: 15951 - DNA, 17 bp, Artificial Sequence
  Synthetic
ctcccgcaacaatgggc

SEQ ID NO: 15952 - DNA, 17 bp, Artificial Sequence
  Synthetic
ggcacctgtatcggcgt

SEQ ID NO: 15953 - DNA, 16 bp, Artificial Sequence
  Synthetic
aaacccaagccgcacc

SEQ ID NO: 15954 - DNA, 18 bp, Artificial Sequence
  Synthetic
aaaagccgaaaccgcacc

SEQ ID NO: 15955 - DNA, 16 bp, Artificial Sequence
  Synthetic
tgagttcgggcgggag

SEQ ID NO: 15956 - DNA, 20 bp, Artificial Sequence
  Synthetic
aggaaaaccaacatgtccgc

SEQ ID NO: 15957 - DNA, 18 bp, Artificial Sequence
  Synthetic
acctgttcccgattggcg

SEQ ID NO: 15958 - DNA, 16 bp, Artificial Sequence
  Synthetic
cagcgtgcagagccac

SEQ ID NO: 15959 - DNA, 19 bp, Artificial Sequence
  Synthetic
gcgaagaaagccttgccaa

SEQ ID NO: 15960 - DNA, 18 bp, Artificial Sequence
  Synthetic
atggcggacggtataggc

SEQ ID NO: 15961 - DNA, 19 bp, Artificial Sequence
  Synthetic
cggagcatccaaatggcag

SEQ ID NO: 15962 - DNA, 17 bp, Artificial Sequence
  Synthetic
cgtaaaggcagacgcgg

SEQ ID NO: 15963 - DNA, 19 bp, Artificial Sequence
  Synthetic
caccagaggttcgtccact

SEQ ID NO: 15964 - DNA, 18 bp, Artificial Sequence
  Synthetic
aaagatgaagcggcaatg

SEQ ID NO: 15965 - DNA, 20 bp, Artificial Sequence
  Synthetic
ccaaacccaatgcttcaacc

SEQ ID NO: 15966 - DNA, 19 bp, Artificial Sequence
  Synthetic
gcggatccgggtttgatta

SEQ ID NO: 15967 - DNA, 20 bp, Artificial Sequence
  Synthetic
tttgccgaaaatatccccca

SEQ ID NO: 15968 - DNA, 18 bp, Artificial Sequence
  Synthetic
tgcctgtatttccgcgac

SEQ ID NO: 15969 - DNA, 20 bp, Artificial Sequence
  Synthetic
aactcaatgcggacgtatcc

SEQ ID NO: 15970 - DNA, 20 bp, Artificial Sequence
  Synthetic
cgcacaaaaccatgtttggg

SEQ ID NO: 15971 - DNA, 18 bp, Artificial Sequence
  Synthetic
gcgcgccatttgagtttc

SEQ ID NO: 15972 - DNA, 19 bp, Artificial Sequence
  Synthetic
tgcatcgatttgaccggtt

SEQ ID NO: 15973 - DNA, 18 bp, Artificial Sequence
  Synthetic
gcttgaaagcccacctcg

SEQ ID NO: 15974 - DNA, 17 bp, Artificial Sequence
  Synthetic
gactacggcttccacgc

SEQ ID NO: 15975 - DNA, 15 bp, Artificial Sequence
  Synthetic
tcaacgcgccgcaca

SEQ ID NO: 15976 - DNA, 20 bp, Artificial Sequence
  Synthetic
cctgacaggttgcttcgaag

SEQ ID NO: 15977 - DNA, 16 bp, Artificial Sequence
  Synthetic
cccgactttgagcgcg

SEQ ID NO: 15978 - DNA, 19 bp, Artificial Sequence
  Synthetic
gtcggggtggacttcaaag

SEQ ID NO: 15979 - DNA, 20 bp, Artificial Sequence
  Synthetic
atcaggtcggtcagatagct

SEQ ID NO: 15980 - DNA, 20 bp, Artificial Sequence
  Synthetic
ttgcacgtcgatttcagtgg

SEQ ID NO: 15981 - DNA, 18 bp, Artificial Sequence
  Synthetic
accgtatgttccgcaacc

SEQ ID NO: 15982 - DNA, 18 bp, Artificial Sequence
  Synthetic
gcggggttcagttcgatg

SEQ ID NO: 15983 - DNA, 17 bp, Artificial Sequence
  Synthetic
gcggatgaagccttcgc

SEQ ID NO: 15984 - DNA, 18 bp, Artificial Sequence
  Synthetic
tgaaacatctgccgcgtc

SEQ ID NO: 15985 - DNA, 20 bp, Artificial Sequence
  Synthetic
gcaaaaaccaccgtttaccg

SEQ ID NO: 15986 - DNA, 20 bp, Artificial Sequence
  Synthetic
ccatactgacggttctgcag

SEQ ID NO: 15987 - DNA, 16 bp, Artificial Sequence
  Synthetic
cggcaagcgtcccgtt

SEQ ID NO: 15988 - DNA, 18 bp, Artificial Sequence
  Synthetic
gttgacggtgcggacatt

SEQ ID NO: 15989 - DNA, 16 bp, Artificial Sequence
  Synthetic
ccgtcgtgcgaggcat

SEQ ID NO: 15990 - DNA, 19 bp, Artificial Sequence
  Synthetic
ggaagaaatccgcgctttg

SEQ ID NO: 15991 - DNA, 16 bp, Artificial Sequence
  Synthetic
cattgcagcacgccgg

SEQ ID NO: 15992 - DNA, 16 bp, Artificial Sequence
  Synthetic
cgttcgcgtggggcat

SEQ ID NO: 15993 - DNA, 20 bp, Artificial Sequence
  Synthetic
ttcggcaaaaaagaaaccgc

SEQ ID NO: 15994 - DNA, 17 bp, Artificial Sequence
  Synthetic
gtaccgacgcttccggt

SEQ ID NO: 15995 - DNA, 16 bp, Artificial Sequence
  Synthetic
cacgcgcccgaacaga

SEQ ID NO: 15996 - DNA, 20 bp, Artificial Sequence
  Synthetic
caaaatcagggtttgcgagc

SEQ ID NO: 15997 - DNA, 18 bp, Artificial Sequence
  Synthetic
gttcgggaagtcgctgac

SEQ ID NO: 15998 - DNA, 18 bp, Artificial Sequence
  Synthetic
catcggtgcgctctttgg

SEQ ID NO: 15999 - DNA, 16 bp, Artificial Sequence
  Synthetic
gatacgggcggcggtt

SEQ ID NO: 16000 - DNA, 19 bp, Artificial Sequence
  Synthetic
ctgatgagggcttcgagga

SEQ ID NO: 16001 - DNA, 20 bp, Artificial Sequence
  Synthetic
tactgcaaaaggtgatgccg

SEQ ID NO: 16002 - DNA, 20 bp, Artificial Sequence
  Synthetic
tccggcttcgaacaatctgt

SEQ ID NO: 16003 - DNA, 17 bp, Artificial Sequence
  Synthetic
tgccacatcgggttgcc

SEQ ID NO: 16004 - DNA, 18 bp, Artificial Sequence
  Synthetic
cctgcgtcagatcgggat

SEQ ID NO: 16005 - DNA, 18 bp, Artificial Sequence
  Synthetic
cggttcgacaccccattt

SEQ ID NO: 16006 - DNA, 18 bp, Artificial Sequence
  Synthetic
ctcaggcacgacatcacg

SEQ ID NO: 16007 - DNA, 18 bp, Artificial Sequence
  Synthetic
ggacttttctcccacgaa

SEQ ID NO: 16008 - DNA, 18 bp, Artificial Sequence
  Synthetic
aggctgggtcaaatccgg

SEQ ID NO: 16009 - DNA, 16 bp, Artificial Sequence
  Synthetic
gggcaagtgttcgccg

SEQ ID NO: 16010 - DNA, 16 bp, Artificial Sequence
  Synthetic
tacggctgcggacggt

SEQ ID NO: 16011 - DNA, 16 bp, Artificial Sequence
  Synthetic
gttgtggtagccgccg

SEQ ID NO: 16012 - DNA, 18 bp, Artificial Sequence
  Synthetic
atcacgaagacggctcgg

SEQ ID NO: 16013 - DNA, 18 bp, Artificial Sequence
  Synthetic
atgtcgaaaccgccgttg

SEQ ID NO: 16014 - DNA, 20 bp, Artificial Sequence
  Synthetic
attttccaacacctgcttgc

SEQ ID NO: 16015 - DNA, 20 bp, Artificial Sequence
  Synthetic
aaccaccacgtcgtaatcgt

SEQ ID NO: 16016 - DNA, 16 bp, Artificial Sequence
  Synthetic
ggcgcatacacgtcgg

SEQ ID NO: 16017 - DNA, 20 bp, Artificial Sequence
  Synthetic
aactacaccaaccgttctcc

SEQ ID NO: 16018 - DNA, 16 bp, Artificial Sequence
  Synthetic
cgcgcttgccagccaa

SEQ ID NO: 16019 - DNA, 20 bp, Artificial Sequence
  Synthetic
tatcggcaatttcctgctgg

SEQ ID NO: 16020 - DNA, 20 bp, Artificial Sequence
  Synthetic
gcaaacgcctcgatattggg

SEQ ID NO: 16021 - DNA, 20 bp, Artificial Sequence
  Synthetic
tacgcaaacactacgtctgc

SEQ ID NO: 16022 - DNA, 17 bp, Artificial Sequence
  Synthetic
gcgcggtgcaaatcttg

SEQ ID NO: 16023 - DNA, 16 bp, Artificial Sequence
  Synthetic
cccaacatcgcgcgca

SEQ ID NO: 16024 - DNA, 16 bp, Artificial Sequence
  Synthetic
ggctcgtcggcgaaga

SEQ ID NO: 16025 - DNA, 20 bp, Artificial Sequence
  Synthetic
gatacgcctttcaaacggct

SEQ ID NO: 16026 - DNA, 18 bp, Artificial Sequence
  Synthetic
agcttgcagaaacgcgag

SEQ ID NO: 16027 - DNA, 16 bp, Artificial Sequence
  Synthetic
cttcgagcgcgtccag

SEQ ID NO: 16028 - DNA, 20 bp, Artificial Sequence
  Synthetic
tagcgatgtcgtctgaaagc

SEQ ID NO: 16029 - DNA, 19 bp, Artificial Sequence
  Synthetic
cctgtacgggcagggattt

SEQ ID NO: 16030 - DNA, 16 bp, Artificial Sequence
  Synthetic
tgccacagttgcggcg

SEQ ID NO: 16031 - DNA, 16 bp, Artificial Sequence
  Synthetic
tcggcatgggcaagct

SEQ ID NO: 16032 - DNA, 20 bp, Artificial Sequence
  Synthetic
aatgggggcggtgtttaagc

SEQ ID NO: 16033 - DNA, 18 bp, Artificial Sequence
  Synthetic
tcggtgcgttcttctccg

SEQ ID NO: 16034 - DNA, 16 bp, Artificial Sequence
  Synthetic
tgcctgtccgacgacc

SEQ ID NO: 16035 - DNA, 18 bp, Artificial Sequence
  Synthetic
tatgccaaaagccccgtc

SEQ ID NO: 16036 - DNA, 16 bp, Artificial Sequence
  Synthetic
tgggaacaagccgcca

SEQ ID NO: 16037 - DNA, 18 bp, Artificial Sequence
  Synthetic
cgacaacacgctcgttct

SEQ ID NO: 16038 - DNA, 20 bp, Artificial Sequence
  Synthetic
ttgaaaccctgaccctctgc

SEQ ID NO: 16039 - DNA, 16 bp, Artificial Sequence
  Synthetic
gcgtccagggtcagct

SEQ ID NO: 16040 - DNA, 18 bp, Artificial Sequence
  Synthetic
acttcctgatcgcgcatc

SEQ ID NO: 16041 - DNA, 20 bp, Artificial Sequence
  Synthetic
gggtttgtaccaacagtccg

SEQ ID NO: 16042 - DNA, 20 bp, Artificial Sequence
  Synthetic
gtctacttcgcggttgaagg

SEQ ID NO: 16043 - DNA, 17 bp, Artificial Sequence
  Synthetic
aatggcggggaagtcgg

SEQ ID NO: 16044 - DNA, 17 bp, Artificial Sequence
  Synthetic
gcgcgtaggtcagttcc

SEQ ID NO: 16045 - DNA, 16 bp, Artificial Sequence
  Synthetic
cgcctaagccgatgcg

SEQ ID NO: 16046 - DNA, 18 bp, Artificial Sequence
  Synthetic
cgtacacgctccaaaccg

SEQ ID NO: 16047 - DNA, 23 bp, Artificial Sequence
  Synthetic
ttaacacagagtatgcaacttac

SEQ ID NO: 16048 - DNA, 21 bp, Artificial Sequence
  Synthetic
cagtatgacaatttgctgaac

SEQ ID NO: 16049 - DNA, 18 bp, Artificial Sequence
  Synthetic
tgctgattaccaccaaca

SEQ ID NO: 16050 - DNA, 18 bp, Artificial Sequence
  Synthetic
ttgggtcaaaatgggtgc

SEQ ID NO: 16051 - DNA, 19 bp, Artificial Sequence
  Synthetic
tgaaatgttcaacggcatt

SEQ ID NO: 16052 - DNA, 19 bp, Artificial Sequence
  Synthetic
ctgaaaatgcgcctgctca

SEQ ID NO: 16053 - DNA, 21 bp, Artificial Sequence
  Synthetic
ttcttgttttgatgttggcag

SEQ ID NO: 16054 - DNA, 18 bp, Artificial Sequence
  Synthetic
actttagcgcgaaaccat

SEQ ID NO: 16055 - DNA, 18 bp, Artificial Sequence
  Synthetic
cctgcatttcccaaaagc

SEQ ID NO: 16056 - DNA, 18 bp, Artificial Sequence
  Synthetic
caaccgcttgaaacactt

SEQ ID NO: 16057 - DNA, 21 bp, Artificial Sequence
  Synthetic
catacaggacataatgcctac

SEQ ID NO: 16058 - DNA, 22 bp, Artificial Sequence
  Synthetic
gcatatccggcaaataatcttg

SEQ ID NO: 16059 - DNA, 18 bp, Artificial Sequence
  Synthetic
gtcgtcaaagcaggcaaa

SEQ ID NO: 16060 - DNA, 19 bp, Artificial Sequence
  Synthetic
cggcaataatcgacagcgc

SEQ ID NO: 16061 - DNA, 17 bp, Artificial Sequence
  Synthetic
gcccgtagcgacttggt

SEQ ID NO: 16062 - DNA, 25 bp, Artificial Sequence
  Synthetic
agatagggagagaaataaatatcgt

SEQ ID NO: 16063 - DNA, 17 bp, Artificial Sequence
  Synthetic
gcctgatcgaatggccg

SEQ ID NO: 16064 - DNA, 16 bp, Artificial Sequence
  Synthetic
gccggcacactgttcg

SEQ ID NO: 16065 - DNA, 16 bp, Artificial Sequence
  Synthetic
gcgtgtcgccaaaggg

SEQ ID NO: 16066 - DNA, 19 bp, Artificial Sequence
  Synthetic
gcacccgatatgccgtcta

SEQ ID NO: 16067 - DNA, 20 bp, Artificial Sequence
  Synthetic
gccgagttcttctccaaact

SEQ ID NO: 16068 - DNA, 20 bp, Artificial Sequence
  Synthetic
gatgccttgttcttccagcc

SEQ ID NO: 16069 - DNA, 18 bp, Artificial Sequence
  Synthetic
cgaccaagcccaaatcgc

SEQ ID NO: 16070 - DNA, 19 bp, Artificial Sequence
  Synthetic
caacaccagctcgttcaca

SEQ ID NO: 16071 - DNA, 20 bp, Artificial Sequence
  Synthetic
gaagcagtcgtctatggtcg

SEQ ID NO: 16072 - DNA, 16 bp, Artificial Sequence
  Synthetic
gaccaggccctgcgta

SEQ ID NO: 16073 - DNA, 18 bp, Artificial Sequence
  Synthetic
aagcaagcgaaaacggca

SEQ ID NO: 16074 - DNA, 16 bp, Artificial Sequence
  Synthetic
gtgctcctggcgcaga

SEQ ID NO: 16075 - DNA, 20 bp, Artificial Sequence
  Synthetic
aaacacccgcttcaaaaccc

SEQ ID NO: 16076 - DNA, 18 bp, Artificial Sequence
  Synthetic
gggaatccggacctgtcc

SEQ ID NO: 16077 - DNA, 17 bp, Artificial Sequence
  Synthetic
caaccatacggacggcg

SEQ ID NO: 16078 - DNA, 20 bp, Artificial Sequence
  Synthetic
tgtcgatgacggtagtcgga

SEQ ID NO: 16079 - DNA, 16 bp, Artificial Sequence
  Synthetic
ccgctccggcatggtt

SEQ ID NO: 16080 - DNA, 16 bp, Artificial Sequence
  Synthetic
cctgacattcggcggc

SEQ ID NO: 16081 - DNA, 15 bp, Artificial Sequence
  Synthetic
gcgcgtaccggcaaa

SEQ ID NO: 16082 - DNA, 20 bp, Artificial Sequence
  Synthetic
cattggatggcgagatgtgg

SEQ ID NO: 16083 - DNA, 20 bp, Artificial Sequence
  Synthetic
cgcgggttggaagtattggt

SEQ ID NO: 16084 - DNA, 17 bp, Artificial Sequence
  Synthetic
ccggcgtcatgttggaa

SEQ ID NO: 16085 - DNA, 16 bp, Artificial Sequence
  Synthetic
atatcgggcaggcgca

SEQ ID NO: 16086 - DNA, 16 bp, Artificial Sequence
  Synthetic
ggcatggtcgccccaa

SEQ ID NO: 16087 - DNA, 16 bp, Artificial Sequence
  Synthetic
cggggtggtgtccgta

SEQ ID NO: 16088 - DNA, 17 bp, Artificial Sequence
  Synthetic
cagaaagccgcgtttgc

SEQ ID NO: 16089 - DNA, 16 bp, Artificial Sequence
  Synthetic
acgcagtcggtcaggt

SEQ ID NO: 16090 - DNA, 17 bp, Artificial Sequence
  Synthetic
gcggcggttcacaatgt

SEQ ID NO: 16091 - DNA, 19 bp, Artificial Sequence
  Synthetic
aatggcggtcagaatcagc

SEQ ID NO: 16092 - DNA, 18 bp, Artificial Sequence
  Synthetic
cgttcagacggcctttga

SEQ ID NO: 16093 - DNA, 19 bp, Artificial Sequence
  Synthetic
cgttgatgatgtcgtgcgg

SEQ ID NO: 16094 - DNA, 17 bp, Artificial Sequence
  Synthetic
cgactggtcaaggccgt

SEQ ID NO: 16095 - DNA, 20 bp, Artificial Sequence
  Synthetic
gtttgattgccgaaccaggt

SEQ ID NO: 16096 - DNA, 18 bp, Artificial Sequence
  Synthetic
agcgaaagttccaaacct

SEQ ID NO: 16097 - DNA, 19 bp, Artificial Sequence
  Synthetic
atgtcgcggaatttggcag

SEQ ID NO: 16098 - DNA, 19 bp, Artificial Sequence
  Synthetic
gtgctttcttgcgcactgc

SEQ ID NO: 16099 - DNA, 19 bp, Artificial Sequence
  Synthetic
acagaccttttccggattg

SEQ ID NO: 16100 - DNA, 17 bp, Artificial Sequence
  Synthetic
ggcgttgactttgccct

SEQ ID NO: 16101 - DNA, 16 bp, Artificial Sequence
  Synthetic
catccacgccatcggc

SEQ ID NO: 16102 - DNA, 16 bp, Artificial Sequence
  Synthetic
gatgcttgccgtgcgc

SEQ ID NO: 16103 - DNA, 16 bp, Artificial Sequence
  Synthetic
ggcgaagtcgtgtccg

SEQ ID NO: 16104 - DNA, 16 bp, Artificial Sequence
  Synthetic
gatgccagcatcggcg

SEQ ID NO: 16105 - DNA, 16 bp, Artificial Sequence
  Synthetic
gaccgaacttgccgcc

SEQ ID NO: 16106 - DNA, 18 bp, Artificial Sequence
  Synthetic
tcggtttcgacatcacgc

SEQ ID NO: 16107 - DNA, 18 bp, Artificial Sequence
  Synthetic
gccatgtacggtttgggt

SEQ ID NO: 16108 - DNA, 18 bp, Artificial Sequence
  Synthetic
aacgccaaggcaaccaaa

SEQ ID NO: 16109 - DNA, 16 bp, Artificial Sequence
  Synthetic
ggcttgcccgtcttgg

SEQ ID NO: 16110 - DNA, 19 bp, Artificial Sequence
  Synthetic
catcggaaaacacgtcgcc

SEQ ID NO: 16111 - DNA, 20 bp, Artificial Sequence
  Synthetic
acaaacgcaagacttcgtct

SEQ ID NO: 16112 - DNA, 20 bp, Artificial Sequence
  Synthetic
tcgatgcccgtaaacgttac

SEQ ID NO: 16113 - DNA, 16 bp, Artificial Sequence
  Synthetic
tttccggcggcgaacg

SEQ ID NO: 16114 - DNA, 20 bp, Artificial Sequence
  Synthetic
gacggaacagaacaaatgcc

SEQ ID NO: 16115 - DNA, 17 bp, Artificial Sequence
  Synthetic
gggcaaacggcaacagc

SEQ ID NO: 16116 - DNA, 21 bp, Artificial Sequence
  Synthetic
tcgtacaggttaatcaaatgg

SEQ ID NO: 16117 - DNA, 18 bp, Artificial Sequence
  Synthetic
taccccctaccctgaccg

SEQ ID NO: 16118 - DNA, 16 bp, Artificial Sequence
  Synthetic
cgaagccctgttccgc

SEQ ID NO: 16119 - DNA, 18 bp, Artificial Sequence
  Synthetic
cccgatacagctaccccg

SEQ ID NO: 16120 - DNA, 18 bp, Artificial Sequence
  Synthetic
gacagggcggttgtcatc

SEQ ID NO: 16121 - DNA, 20 bp, Artificial Sequence
  Synthetic
acaggaagcgtttcatctgg

SEQ ID NO: 16122 - DNA, 20 bp, Artificial Sequence
  Synthetic
ttgttcgacggtcattttgc

SEQ ID NO: 16123 - DNA, 16 bp, Artificial Sequence
  Synthetic
gtgtgccgcttccgca

SEQ ID NO: 16124 - DNA, 19 bp, Artificial Sequence
  Synthetic
aggcacggtagaagaagcc

SEQ ID NO: 16125 - DNA, 15 bp, Artificial Sequence
  Synthetic
tacgcgcgcggcatt

SEQ ID NO: 16126 - DNA, 19 bp, Artificial Sequence
  Synthetic
aatatttcaccgcccccga

SEQ ID NO: 16127 - DNA, 16 bp, Artificial Sequence
  Synthetic
tccccgaccgcgacat

SEQ ID NO: 16128 - DNA, 16 bp, Artificial Sequence
  Synthetic
cgcggacaagacctgc

SEQ ID NO: 16129 - DNA, 16 bp, Artificial Sequence
  Synthetic
cgcaggattgtgccgc

SEQ ID NO: 16130 - DNA, 17 bp, Artificial Sequence
  Synthetic
ccgaacgcgcctttctg

SEQ ID NO: 16131 - DNA, 16 bp, Artificial Sequence
  Synthetic
gccgcctttgtccgca

SEQ ID NO: 16132 - DNA, 18 bp, Artificial Sequence
  Synthetic
ttaaggcggctttgtcgg

SEQ ID NO: 16133 - DNA, 20 bp, Artificial Sequence
  Synthetic
gtaccgcttcaggaaatcgc

SEQ ID NO: 16134 - DNA, 18 bp, Artificial Sequence
  Synthetic
gcccagttgaacagggga

SEQ ID NO: 16135 - DNA, 20 bp, Artificial Sequence
  Synthetic
cttaccccgtatcggcaaac

SEQ ID NO: 16136 - DNA, 16 bp, Artificial Sequence
  Synthetic
cggctgtgcgtgaggt

SEQ ID NO: 16137 - DNA, 16 bp, Artificial Sequence
  Synthetic
cggcgcggcaaagtct

SEQ ID NO: 16138 - DNA, 16 bp, Artificial Sequence
  Synthetic
gcgaactcaacgccgc

SEQ ID NO: 16139 - DNA, 21 bp, Artificial Sequence
  Synthetic
gaaaagtaattcttggttgcc

SEQ ID NO: 16140 - DNA, 20 bp, Artificial Sequence
  Synthetic
ttccacataatgaagcggct

SEQ ID NO: 16141 - DNA, 20 bp, Artificial Sequence
  Synthetic
aaatcaaactgattgccgcc

SEQ ID NO: 16142 - DNA, 19 bp, Artificial Sequence
  Synthetic
tccgaaaaaggcctgaccg

SEQ ID NO: 16143 - DNA, 17 bp, Artificial Sequence
  Synthetic
tcgcggacgacgtttcc

SEQ ID NO: 16144 - DNA, 18 bp, Artificial Sequence
  Synthetic
catttgttgcaggcggga

SEQ ID NO: 16145 - DNA, 19 bp, Artificial Sequence
  Synthetic
gacggcacagtaaaggctg

SEQ ID NO: 16146 - DNA, 19 bp, Artificial Sequence
  Synthetic
gccttcgacgatttcggaa

SEQ ID NO: 16147 - DNA, 16 bp, Artificial Sequence
  Synthetic
cgccaaccgcaaccat

SEQ ID NO: 16148 - DNA, 16 bp, Artificial Sequence
  Synthetic
tccctgccgtccgcat

SEQ ID NO: 16149 - DNA, 17 bp, Artificial Sequence
  Synthetic
actggtggctgacccat

SEQ ID NO: 16150 - DNA, 18 bp, Artificial Sequence
  Synthetic
cccaatttcgcacaatgg

SEQ ID NO: 16151 - DNA, 16 bp, Artificial Sequence
  Synthetic
gctgatcggcgatgcg

SEQ ID NO: 16152 - DNA, 16 bp, Artificial Sequence
  Synthetic
ctgaccggcgttccct

SEQ ID NO: 16153 - DNA, 20 bp, Artificial Sequence
  Synthetic
cgaattgaacggcttatggc

SEQ ID NO: 16154 - DNA, 16 bp, Artificial Sequence
  Synthetic
tgaccgccctgacagg

SEQ ID NO: 16155 - DNA, 18 bp, Artificial Sequence
  Synthetic
aaccgaaaatgccgtctt

SEQ ID NO: 16156 - DNA, 18 bp, Artificial Sequence
  Synthetic
tcctcctcaaacccgacc

SEQ ID NO: 16157 - DNA, 16 bp, Artificial Sequence
  Synthetic
gccgcatccgcctaca

SEQ ID NO: 16158 - DNA, 20 bp, Artificial Sequence
  Synthetic
cggacggcaagaaataccgg

SEQ ID NO: 16159 - DNA, 19 bp, Artificial Sequence
  Synthetic
gatgcgctgtttgcacaaa

SEQ ID NO: 16160 - DNA, 15 bp, Artificial Sequence
  Synthetic
agcgcgtcccacctt

SEQ ID NO: 16161 - DNA, 19 bp, Artificial Sequence
  Synthetic
cctccatatacgccagccc

SEQ ID NO: 16162 - DNA, 17 bp, Artificial Sequence
  Synthetic
catgcccgacaacccca

SEQ ID NO: 16163 - DNA, 21 bp, Artificial Sequence
  Synthetic
aggtaatactgttcctctacc

SEQ ID NO: 16164 - DNA, 18 bp, Artificial Sequence
  Synthetic
ccgtaacggcgcattacg

SEQ ID NO: 16165 - DNA, 16 bp, Artificial Sequence
  Synthetic
gcaaggtcgtgcgcca

SEQ ID NO: 16166 - DNA, 20 bp, Artificial Sequence
  Synthetic
caaggcgatgtcctgatacg

SEQ ID NO: 16167 - DNA, 20 bp, Artificial Sequence
  Synthetic
atttgatgatgtgccagccg

SEQ ID NO: 16168 - DNA, 16 bp, Artificial Sequence
  Synthetic
tgcgaaatccgtgccg

SEQ ID NO: 16169 - DNA, 19 bp, Artificial Sequence
  Synthetic
atttcagcttcgctcacgc

SEQ ID NO: 16170 - DNA, 17 bp, Artificial Sequence
  Synthetic
ggataccgccctgctgt

SEQ ID NO: 16171 - DNA, 17 bp, Artificial Sequence
  Synthetic
tcgcccaacatttcggc

SEQ ID NO: 16172 - DNA, 17 bp, Artificial Sequence
  Synthetic
ttcggttctctcggggc

SEQ ID NO: 16173 - DNA, 20 bp, Artificial Sequence
  Synthetic
gcacactgatacccaaagca

SEQ ID NO: 16174 - DNA, 16 bp, Artificial Sequence
  Synthetic
cgcacttgccgcagaa

SEQ ID NO: 16175 - DNA, 18 bp, Artificial Sequence
  Synthetic
ctggcggtatgaacaggc

SEQ ID NO: 16176 - DNA, 16 bp, Artificial Sequence
  Synthetic
agaatccgcccgaccg

SEQ ID NO: 16177 - DNA, 16 bp, Artificial Sequence
  Synthetic
cgcgccccgatgaaac

SEQ ID NO: 16178 - DNA, 19 bp, Artificial Sequence
  Synthetic
ttcacgggcgcaaaacttc

SEQ ID NO: 16179 - DNA, 20 bp, Artificial Sequence
  Synthetic
acggctttgggcattttgtc

SEQ ID NO: 16180 - DNA, 16 bp, Artificial Sequence
  Synthetic
tcggcaaatacgcgcc

SEQ ID NO: 16181 - DNA, 19 bp, Artificial Sequence
  Synthetic
cgaagccgtctatgccaag

SEQ ID NO: 16182 - DNA, 19 bp, Artificial Sequence
  Synthetic
tttacgccaaactctgggc

SEQ ID NO: 16183 - DNA, 16 bp, Artificial Sequence
  Synthetic
gccgccgctacatcgt

SEQ ID NO: 16184 - DNA, 17 bp, Artificial Sequence
  Synthetic
cgcacgggattcgagga

SEQ ID NO: 16185 - DNA, 18 bp, Artificial Sequence
  Synthetic
ccgtccgacaacaccatc

SEQ ID NO: 16186 - DNA, 16 bp, Artificial Sequence
  Synthetic
tcccacacggcaagct

SEQ ID NO: 16187 - DNA, 18 bp, Artificial Sequence
  Synthetic
cagaaatcggagtcgggc

SEQ ID NO: 16188 - DNA, 18 bp, Artificial Sequence
  Synthetic
ggagagcgcccaatacca

SEQ ID NO: 16189 - DNA, 19 bp, Artificial Sequence
  Synthetic
cgacgtaaaccaccaccag

SEQ ID NO: 16190 - DNA, 20 bp, Artificial Sequence
  Synthetic
atgataaataccgacgccgc

SEQ ID NO: 16191 - DNA, 16 bp, Artificial Sequence
  Synthetic
ccgccgcctgtacgaa

SEQ ID NO: 16192 - DNA, 19 bp, Artificial Sequence
  Synthetic
caatgcgccgtctatgtgt

SEQ ID NO: 16193 - DNA, 20 bp, Artificial Sequence
  Synthetic
tcattatgggacaggtcgcc

SEQ ID NO: 16194 - DNA, 17 bp, Artificial Sequence
  Synthetic
gccctgctgattctgcc

SEQ ID NO: 16195 - DNA, 19 bp, Artificial Sequence
  Synthetic
gtgatgctcacccaccaaa

SEQ ID NO: 16196 - DNA, 20 bp, Artificial Sequence
  Synthetic
gagcttcagatgtgtagggc

SEQ ID NO: 16197 - DNA, 17 bp, Artificial Sequence
  Synthetic
cgacccgcgcaaattcc

SEQ ID NO: 16198 - DNA, 16 bp, Artificial Sequence
  Synthetic
catgcggcggtcagga

SEQ ID NO: 16199 - DNA, 16 bp, Artificial Sequence
  Synthetic
cagttcggcggacgca

SEQ ID NO: 16200 - DNA, 16 bp, Artificial Sequence
  Synthetic
cgtccgcggaaggctt

SEQ ID NO: 16201 - DNA, 16 bp, Artificial Sequence
  Synthetic
ccggacacgcccagtt

SEQ ID NO: 16202 - DNA, 19 bp, Artificial Sequence
  Synthetic
cgacgacggagttgagatg

SEQ ID NO: 16203 - DNA, 20 bp, Artificial Sequence
  Synthetic
catcatgaccgtcttgcacg

SEQ ID NO: 16204 - DNA, 18 bp, Artificial Sequence
  Synthetic
gatggtgtacgccatggc

SEQ ID NO: 16205 - DNA, 20 bp, Artificial Sequence
  Synthetic
ctacaaaaccaacgcctcca

SEQ ID NO: 16206 - DNA, 16 bp, Artificial Sequence
  Synthetic
cggcgggttggtgcaa

SEQ ID NO: 16207 - DNA, 18 bp, Artificial Sequence
  Synthetic
ttttcaatccggccggtg

SEQ ID NO: 16208 - DNA, 16 bp, Artificial Sequence
  Synthetic
gacggcgatgtcctgc

SEQ ID NO: 16209 - DNA, 17 bp, Artificial Sequence
  Synthetic
cgacagccgttttgccg

SEQ ID NO: 16210 - DNA, 19 bp, Artificial Sequence
  Synthetic
cgcaatccaagtcccatcc

SEQ ID NO: 16211 - DNA, 16 bp, Artificial Sequence
  Synthetic
cgacatccgcgcccaa

SEQ ID NO: 16212 - DNA, 20 bp, Artificial Sequence
  Synthetic
cggaaggcttattgaccacc

SEQ ID NO: 16213 - DNA, 18 bp, Artificial Sequence
  Synthetic
gggcaaactctcccgttt

SEQ ID NO: 16214 - DNA, 20 bp, Artificial Sequence
  Synthetic
aagcgatgaaggacaacacc

SEQ ID NO: 16215 - DNA, 16 bp, Artificial Sequence
  Synthetic
caccgcccgaaaccga

SEQ ID NO: 16216 - DNA, 16 bp, Artificial Sequence
  Synthetic
ccgcgcacgttttcgg

SEQ ID NO: 16217 - DNA, 18 bp, Artificial Sequence
  Synthetic
gcacaggaaatgccgtct

SEQ ID NO: 16218 - DNA, 19 bp, Artificial Sequence
  Synthetic
cacggcagttatcaggctg

SEQ ID NO: 16219 - DNA, 19 bp, Artificial Sequence
  Synthetic
cgcggagtttaaagcacgc

SEQ ID NO: 16220 - DNA, 19 bp, Artificial Sequence
  Synthetic
gaacaaatccgcgtgttcg

SEQ ID NO: 16221 - DNA, 17 bp, Artificial Sequence
  Synthetic
ttcctgcaccagctcga

SEQ ID NO: 16222 - DNA, 16 bp, Artificial Sequence
  Synthetic
tgccctgcggatccaa

SEQ ID NO: 16223 - DNA, 17 bp, Artificial Sequence
  Synthetic
acaacggcagcgaatgg

SEQ ID NO: 16224 - DNA, 18 bp, Artificial Sequence
  Synthetic
atgacgcgcgaacgtttg

SEQ ID NO: 16225 - DNA, 16 bp, Artificial Sequence
  Synthetic
tgctcctgaccaccgc

SEQ ID NO: 16226 - DNA, 16 bp, Artificial Sequence
  Synthetic
tggaagccctcgccga

SEQ ID NO: 16227 - DNA, 18 bp, Artificial Sequence
  Synthetic
caccatcggcgtgaaacc

SEQ ID NO: 16228 - DNA, 16 bp, Artificial Sequence
  Synthetic
cgctgctcgccgtgat

SEQ ID NO: 16229 - DNA, 18 bp, Artificial Sequence
  Synthetic
cgtgtcgaaggcttgcag

SEQ ID NO: 16230 - DNA, 19 bp, Artificial Sequence
  Synthetic
agcgtaaccataggcagct

SEQ ID NO: 16231 - DNA, 17 bp, Artificial Sequence
  Synthetic
tgatgaccgcgctgtcc

SEQ ID NO: 16232 - DNA, 19 bp, Artificial Sequence
  Synthetic
gattacccagcaaatgcgc

SEQ ID NO: 16233 - DNA, 16 bp, Artificial Sequence
  Synthetic
cgcccccatgtgcgat

SEQ ID NO: 16234 - DNA, 24 bp, Artificial Sequence
  Synthetic
ccaaatcttttgctttagtatcag

SEQ ID NO: 16235 - DNA, 20 bp, Artificial Sequence
  Synthetic
tcaattgtaccaatcaggct

SEQ ID NO: 16236 - DNA, 22 bp, Artificial Sequence
  Synthetic
ttagttttgcctttagtggtaa

SEQ ID NO: 16237 - DNA, 19 bp, Artificial Sequence
  Synthetic
ggcacaaaataagccgatt

SEQ ID NO: 16238 - DNA, 17 bp, Artificial Sequence
  Synthetic
gacggcattgcatcgcg

SEQ ID NO: 16239 - DNA, 20 bp, Artificial Sequence
  Synthetic
atcgtcttcaacaacgacca

SEQ ID NO: 16240 - DNA, 19 bp, Artificial Sequence
  Synthetic
gcccaaacctccatctcac

SEQ ID NO: 16241 - DNA, 16 bp, Artificial Sequence
  Synthetic
cccgcgcctgtaaacg

SEQ ID NO: 16242 - DNA, 18 bp, Artificial Sequence
  Synthetic
ttgctgtgggggttgtct

SEQ ID NO: 16243 - DNA, 18 bp, Artificial Sequence
  Synthetic
cgaaataacgccgctcca

SEQ ID NO: 16244 - DNA, 18 bp, Artificial Sequence
  Synthetic
gcggattgcggatttcgt

SEQ ID NO: 16245 - DNA, 18 bp, Artificial Sequence
  Synthetic
tactacacccgcacccat

SEQ ID NO: 16246 - DNA, 19 bp, Artificial Sequence
  Synthetic
ccccgtattgaccacgtcc

SEQ ID NO: 16247 - DNA, 17 bp, Artificial Sequence
  Synthetic
gcgatgtggcaaacgcg

SEQ ID NO: 16248 - DNA, 18 bp, Artificial Sequence
  Synthetic
cgtatggcgatgtaccgg

SEQ ID NO: 16249 - DNA, 16 bp, Artificial Sequence
  Synthetic
cagcgattggggcgtc

SEQ ID NO: 16250 - DNA, 18 bp, Artificial Sequence
  Synthetic
aattgatgacgggggaag

SEQ ID NO: 16251 - DNA, 16 bp, Artificial Sequence
  Synthetic
gcgtgcggcatcgact

SEQ ID NO: 16252 - DNA, 17 bp, Artificial Sequence
  Synthetic
agcgatttggcgagccg

SEQ ID NO: 16253 - DNA, 18 bp, Artificial Sequence
  Synthetic
aataaatcgacgcgccgg

SEQ ID NO: 16254 - DNA, 16 bp, Artificial Sequence
  Synthetic
tccaactcgcgcaggt

SEQ ID NO: 16255 - DNA, 18 bp, Artificial Sequence
  Synthetic
accgccgcgatacctatg

SEQ ID NO: 16256 - DNA, 18 bp, Artificial Sequence
  Synthetic
catcctcctgccggtttg

SEQ ID NO: 16257 - DNA, 18 bp, Artificial Sequence
  Synthetic
gaggtatttggggcgaaa

SEQ ID NO: 16258 - DNA, 19 bp, Artificial Sequence
  Synthetic
tttccgggtgtattcggca

SEQ ID NO: 16259 - DNA, 19 bp, Artificial Sequence
  Synthetic
ccggacacttggttttcgg

SEQ ID NO: 16260 - DNA, 17 bp, Artificial Sequence
  Synthetic
cgctatgcgccaatccc

SEQ ID NO: 16261 - DNA, 18 bp, Artificial Sequence
  Synthetic
cttcccgttttcgccagt

SEQ ID NO: 16262 - DNA, 18 bp, Artificial Sequence
  Synthetic
ctggctgaccaacccctt

SEQ ID NO: 16263 - DNA, 16 bp, Artificial Sequence
  Synthetic
gctgccgccaatcgct

SEQ ID NO: 16264 - DNA, 20 bp, Artificial Sequence
  Synthetic
accggcagcttcaaaaacac

SEQ ID NO: 16265 - DNA, 18 bp, Artificial Sequence
  Synthetic
gccaacccaactacaccg

SEQ ID NO: 16266 - DNA, 16 bp, Artificial Sequence
  Synthetic
cgacagcctgcaaccc

SEQ ID NO: 16267 - DNA, 17 bp, Artificial Sequence
  Synthetic
acatgggacccgacgac

SEQ ID NO: 16268 - DNA, 19 bp, Artificial Sequence
  Synthetic
ctaccctatagcccgcctt

SEQ ID NO: 16269 - DNA, 18 bp, Artificial Sequence
  Synthetic
cgctgacgctgatttccg

SEQ ID NO: 16270 - DNA, 16 bp, Artificial Sequence
  Synthetic
gcgcccaagcttcgac

SEQ ID NO: 16271 - DNA, 19 bp, Artificial Sequence
  Synthetic
gtcgttgccaaagcctttg

SEQ ID NO: 16272 - DNA, 18 bp, Artificial Sequence
  Synthetic
acataaacagcggcaggg

SEQ ID NO: 16273 - DNA, 18 bp, Artificial Sequence
  Synthetic
ctttggacggcgttacca

SEQ ID NO: 16274 - DNA, 18 bp, Artificial Sequence
  Synthetic
ggaaggttcgggcatcac

SEQ ID NO: 16275 - DNA, 17 bp, Artificial Sequence
  Synthetic
tagcgtgccgggcgtta

SEQ ID NO: 16276 - DNA, 18 bp, Artificial Sequence
  Synthetic
aactcgtccgtactttgg

SEQ ID NO: 16277 - DNA, 20 bp, Artificial Sequence
  Synthetic
aatgcaatgtttatctgcct

SEQ ID NO: 16278 - DNA, 20 bp, Artificial Sequence
  Synthetic
caaatgccttggaaaaacct

SEQ ID NO: 16279 - DNA, 18 bp, Artificial Sequence
  Synthetic
ttgttatggcttggggtg

SEQ ID NO: 16280 - DNA, 18 bp, Artificial Sequence
  Synthetic
aggttgacaagcccggtt

SEQ ID NO: 16281 - DNA, 17 bp, Artificial Sequence
  Synthetic
gttgccggaaaccgtca

SEQ ID NO: 16282 - DNA, 19 bp, Artificial Sequence
  Synthetic
ctgccggtaatgttttgcg

SEQ ID NO: 16283 - DNA, 20 bp, Artificial Sequence
  Synthetic
cgatgcggtcgttttgaaag

SEQ ID NO: 16284 - DNA, 16 bp, Artificial Sequence
  Synthetic
gtcaggccggcggtat

SEQ ID NO: 16285 - DNA, 16 bp, Artificial Sequence
  Synthetic
tcgatgcgcgaagggt

SEQ ID NO: 16286 - DNA, 18 bp, Artificial Sequence
  Synthetic
gtcgagcagtgtgccttt

SEQ ID NO: 16287 - DNA, 20 bp, Artificial Sequence
  Synthetic
ttgtccgcgtatgatgaacg

SEQ ID NO: 16288 - DNA, 18 bp, Artificial Sequence
  Synthetic
cgtttccaagaggcggtc

SEQ ID NO: 16289 - DNA, 16 bp, Artificial Sequence
  Synthetic
ccgtcaaaaccggccg

SEQ ID NO: 16290 - DNA, 18 bp, Artificial Sequence
  Synthetic
ttttacccctgcttcacg

SEQ ID NO: 16291 - DNA, 16 bp, Artificial Sequence
  Synthetic
cggcgtacggctcgaa

SEQ ID NO: 16292 - DNA, 16 bp, Artificial Sequence
  Synthetic
cgatgccgtgtccgca

SEQ ID NO: 16293 - DNA, 17 bp, Artificial Sequence
  Synthetic
tcttctgtgccgtccgg

SEQ ID NO: 16294 - DNA, 17 bp, Artificial Sequence
  Synthetic
caggtggcggttgtagc

SEQ ID NO: 16295 - DNA, 19 bp, Artificial Sequence
  Synthetic
cgatacagtcgcacatggc

SEQ ID NO: 16296 - DNA, 18 bp, Artificial Sequence
  Synthetic
cgacctcgacaccgacga

SEQ ID NO: 16297 - DNA, 19 bp, Artificial Sequence
  Synthetic
aactcaaagtcctcgccga

SEQ ID NO: 16298 - DNA, 19 bp, Artificial Sequence
  Synthetic
tccccggtctgattgaagg

SEQ ID NO: 16299 - DNA, 18 bp, Artificial Sequence
  Synthetic
gggctggacggacatgtg

SEQ ID NO: 16300 - DNA, 16 bp, Artificial Sequence
  Synthetic
gttcggctgcacccca

SEQ ID NO: 16301 - DNA, 18 bp, Artificial Sequence
  Synthetic
ccacttgggcgtgaatcg

SEQ ID NO: 16302 - DNA, 19 bp, Artificial Sequence
  Synthetic
cgcctttgacaaagttcgg

SEQ ID NO: 16303 - DNA, 18 bp, Artificial Sequence
  Synthetic
ttgccgcaacacgtatcg

SEQ ID NO: 16304 - DNA, 19 bp, Artificial Sequence
  Synthetic
cgagtgcctgatgttcagt

SEQ ID NO: 16305 - DNA, 16 bp, Artificial Sequence
  Synthetic
agggcgaacagacggt

SEQ ID NO: 16306 - DNA, 17 bp, Artificial Sequence
  Synthetic
gggaaaacgcccaagcc

SEQ ID NO: 16307 - DNA, 16 bp, Artificial Sequence
  Synthetic
aatcggggtcggcagg

SEQ ID NO: 16308 - DNA, 17 bp, Artificial Sequence
  Synthetic
attcgacggccagtgcg

SEQ ID NO: 16309 - DNA, 19 bp, Artificial Sequence
  Synthetic
ggcggtgggcatttgtttg

SEQ ID NO: 16310 - DNA, 17 bp, Artificial Sequence
  Synthetic
gtgtaaacccgcgccac

SEQ ID NO: 16311 - DNA, 20 bp, Artificial Sequence
  Synthetic
actcgctggataatggcttg

SEQ ID NO: 16312 - DNA, 16 bp, Artificial Sequence
  Synthetic
agcgttgccgtcaggg

SEQ ID NO: 16313 - DNA, 15 bp, Artificial Sequence
  Synthetic
aaagcagggccgcca

SEQ ID NO: 16314 - DNA, 16 bp, Artificial Sequence
  Synthetic
ccgatccgcgcatcgt

SEQ ID NO: 16315 - DNA, 16 bp, Artificial Sequence
  Synthetic
cgcaagccggcaaact

SEQ ID NO: 16316 - DNA, 20 bp, Artificial Sequence
  Synthetic
ggcaaaaaccaaggctttga

SEQ ID NO: 16317 - DNA, 18 bp, Artificial Sequence
  Synthetic
cgaccgggcatattcagc

SEQ ID NO: 16318 - DNA, 16 bp, Artificial Sequence
  Synthetic
gcttttcgccgcttgc

SEQ ID NO: 16319 - DNA, 16 bp, Artificial Sequence
  Synthetic
gcgcggcaggtcgaaa

SEQ ID NO: 16320 - DNA, 20 bp, Artificial Sequence
  Synthetic
aaactttaccgcgaactgcc

SEQ ID NO: 16321 - DNA, 19 bp, Artificial Sequence
  Synthetic
gcaaggcgaagtcatcacc

SEQ ID NO: 16322 - DNA, 16 bp, Artificial Sequence
  Synthetic
tgctcaaacgcctgcg

SEQ ID NO: 16323 - DNA, 19 bp, Artificial Sequence
  Synthetic
cgtgaaaacaaacgcggac

SEQ ID NO: 16324 - DNA, 18 bp, Artificial Sequence
  Synthetic
actggccgaaatcacccg

SEQ ID NO: 16325 - DNA, 16 bp, Artificial Sequence
  Synthetic
cgcagcagcctttcgc

SEQ ID NO: 16326 - DNA, 17 bp, Artificial Sequence
  Synthetic
ccatttgggctgctcgc

SEQ ID NO: 16327 - DNA, 20 bp, Artificial Sequence
  Synthetic
ttgttctttgcccctgaagg

SEQ ID NO: 16328 - DNA, 18 bp, Artificial Sequence
  Synthetic
tgaaaagcctgaatccgt

SEQ ID NO: 16329 - DNA, 18 bp, Artificial Sequence
  Synthetic
gccgcctttaccgaatgc

SEQ ID NO: 16330 - DNA, 17 bp, Artificial Sequence
  Synthetic
ttggacgaagccgcagc

SEQ ID NO: 16331 - DNA, 17 bp, Artificial Sequence
  Synthetic
gccatccgtgaagcagc

SEQ ID NO: 16332 - DNA, 20 bp, Artificial Sequence
  Synthetic
tcatcacctacaaactcgcc

SEQ ID NO: 16333 - DNA, 17 bp, Artificial Sequence
  Synthetic
caggttgacggcaggtg

SEQ ID NO: 16334 - DNA, 20 bp, Artificial Sequence
  Synthetic
taatcgcgtccagattgagg

SEQ ID NO: 16335 - DNA, 17 bp, Artificial Sequence
  Synthetic
cctttttcgcgtgccgc

SEQ ID NO: 16336 - DNA, 18 bp, Artificial Sequence
  Synthetic
tgcccttgattgccgttg

SEQ ID NO: 16337 - DNA, 16 bp, Artificial Sequence
  Synthetic
aaggcttgggcgcaca

SEQ ID NO: 16338 - DNA, 19 bp, Artificial Sequence
  Synthetic
atggccttggtcggtatgg

SEQ ID NO: 16339 - DNA, 17 bp, Artificial Sequence
  Synthetic
cgaacatcggcggtctg

SEQ ID NO: 16340 - DNA, 19 bp, Artificial Sequence
  Synthetic
gaaccggtatcgaaatcgt

SEQ ID NO: 16341 - DNA, 20 bp, Artificial Sequence
  Synthetic
ttcctttctttgcgatgcct

SEQ ID NO: 16342 - DNA, 16 bp, Artificial Sequence
  Synthetic
cgccggcagaagcgtt

SEQ ID NO: 16343 - DNA, 20 bp, Artificial Sequence
  Synthetic
gacaaaaccaaattcccgcc

SEQ ID NO: 16344 - DNA, 16 bp, Artificial Sequence
  Synthetic
cgtgcctgttccggca

SEQ ID NO: 16345 - DNA, 17 bp, Artificial Sequence
  Synthetic
ggtaactgtgcgcctgc

SEQ ID NO: 16346 - DNA, 16 bp, Artificial Sequence
  Synthetic
gcgagcgtttcccagc

SEQ ID NO: 16347 - DNA, 18 bp, Artificial Sequence
  Synthetic
gcactaccgctggacgta

SEQ ID NO: 16348 - DNA, 16 bp, Artificial Sequence
  Synthetic
cggcgttcgtgtcggt

SEQ ID NO: 16349 - DNA, 20 bp, Artificial Sequence
  Synthetic
gatttcctcgaccttgcctt

SEQ ID NO: 16350 - DNA, 19 bp, Artificial Sequence
  Synthetic
agggttcgtacagggatgc

SEQ ID NO: 16351 - DNA, 18 bp, Artificial Sequence
  Synthetic
cgccgcatcatatgggaa

SEQ ID NO: 16352 - DNA, 16 bp, Artificial Sequence
  Synthetic
ccaagcgtgcggatgc

SEQ ID NO: 16353 - DNA, 15 bp, Artificial Sequence
  Synthetic
ccggttgcgcgcaaa

SEQ ID NO: 16354 - DNA, 20 bp, Artificial Sequence
  Synthetic
ttggaaatggaaaacccgcg

SEQ ID NO: 16355 - DNA, 18 bp, Artificial Sequence
  Synthetic
aggttgatgtcttgcggc

SEQ ID NO: 16356 - DNA, 19 bp, Artificial Sequence
  Synthetic
cttcatcggtcagcggaat

SEQ ID NO: 16357 - DNA, 17 bp, Artificial Sequence
  Synthetic
atgctgtcggcgagtgc

SEQ ID NO: 16358 - DNA, 16 bp, Artificial Sequence
  Synthetic
ggtcgctgtctcgcgt

SEQ ID NO: 16359 - DNA, 16 bp, Artificial Sequence
  Synthetic
aatcgggcccggatgg

SEQ ID NO: 16360 - DNA, 16 bp, Artificial Sequence
  Synthetic
gcactgccgccggatt

SEQ ID NO: 16361 - DNA, 16 bp, Artificial Sequence
  Synthetic
gcaccaaaatgccgcg

SEQ ID NO: 16362 - DNA, 23 bp, Artificial Sequence
  Synthetic
ggctttaattgacgattatcttg

SEQ ID NO: 16363 - DNA, 17 bp, Artificial Sequence
  Synthetic
ccgtccggttcaaaccc

SEQ ID NO: 16364 - DNA, 17 bp, Artificial Sequence
  Synthetic
attgtgcggcggaaacc

SEQ ID NO: 16365 - DNA, 17 bp, Artificial Sequence
  Synthetic
cgttcggctttggtgcc

SEQ ID NO: 16366 - DNA, 17 bp, Artificial Sequence
  Synthetic
aggctccggcgaatacg

SEQ ID NO: 16367 - DNA, 19 bp, Artificial Sequence
  Synthetic
cctgccctatctggtagcg

SEQ ID NO: 16368 - DNA, 20 bp, Artificial Sequence
  Synthetic
cgccggctttgtttatgttg

SEQ ID NO: 16369 - DNA, 16 bp, Artificial Sequence
  Synthetic
cgtttgaggcgcgggt

SEQ ID NO: 16370 - DNA, 18 bp, Artificial Sequence
  Synthetic
ttccgccgactattccca

SEQ ID NO: 16371 - DNA, 18 bp, Artificial Sequence
  Synthetic
gcggcggattttgcctct

SEQ ID NO: 16372 - DNA, 17 bp, Artificial Sequence
  Synthetic
aaacaggatgccgacgc

SEQ ID NO: 16373 - DNA, 20 bp, Artificial Sequence
  Synthetic
aacaagtgcagatgcttggt

SEQ ID NO: 16374 - DNA, 19 bp, Artificial Sequence
  Synthetic
ttcgttgaggaatcgggct

SEQ ID NO: 16375 - DNA, 18 bp, Artificial Sequence
  Synthetic
tgcctgaaacaatgccgt

SEQ ID NO: 16376 - DNA, 16 bp, Artificial Sequence
  Synthetic
cgaggtcgttgcgcag

SEQ ID NO: 16377 - DNA, 17 bp, Artificial Sequence
  Synthetic
tttggcggatgcggtcg

SEQ ID NO: 16378 - DNA, 18 bp, Artificial Sequence
  Synthetic
cgccgcaaaccaatttcg

SEQ ID NO: 16379 - DNA, 19 bp, Artificial Sequence
  Synthetic
catccgatacagccgtccc

SEQ ID NO: 16380 - DNA, 16 bp, Artificial Sequence
  Synthetic
cccgcctgccaaaacc

SEQ ID NO: 16381 - DNA, 20 bp, Artificial Sequence
  Synthetic
tacccggaaaaacatacgcg

SEQ ID NO: 16382 - DNA, 15 bp, Artificial Sequence
  Synthetic
ttgcggtcggtgcgt

SEQ ID NO: 16383 - DNA, 18 bp, Artificial Sequence
  Synthetic
aacagggcatattcgcgc

SEQ ID NO: 16384 - DNA, 17 bp, Artificial Sequence
  Synthetic
cggcaggcatgataggc

SEQ ID NO: 16385 - DNA, 19 bp, Artificial Sequence
  Synthetic
ccatttccgttacccgctt

SEQ ID NO: 16386 - DNA, 18 bp, Artificial Sequence
  Synthetic
gtcgtcgcttcgtttgcc

SEQ ID NO: 16387 - DNA, 17 bp, Artificial Sequence
  Synthetic
gcaaaattgccgccgcc

SEQ ID NO: 16388 - DNA, 19 bp, Artificial Sequence
  Synthetic
gccgtcgccgtattcaaac

SEQ ID NO: 16389 - DNA, 17 bp, Artificial Sequence
  Synthetic
atggcgaacgggtttgc

SEQ ID NO: 16390 - DNA, 18 bp, Artificial Sequence
  Synthetic
cgcaaggaagacggttcg

SEQ ID NO: 16391 - DNA, 18 bp, Artificial Sequence
  Synthetic
gaatgtttgttgcgccgg

SEQ ID NO: 16392 - DNA, 16 bp, Artificial Sequence
  Synthetic
gcgtcgccgaatctgc

SEQ ID NO: 16393 - DNA, 18 bp, Artificial Sequence
  Synthetic
ttgtccaatgcgctggtg

SEQ ID NO: 16394 - DNA, 15 bp, Artificial Sequence
  Synthetic
cgcgagcgtgccttt

SEQ ID NO: 16395 - DNA, 18 bp, Artificial Sequence
  Synthetic
ggtggaaaggatgtcggc

SEQ ID NO: 16396 - DNA, 19 bp, Artificial Sequence
  Synthetic
ctgcaatgggaaggaacgg

SEQ ID NO: 16397 - DNA, 18 bp, Artificial Sequence
  Synthetic
cttgcgtgcagagtaccg

SEQ ID NO: 16398 - DNA, 22 bp, Artificial Sequence
  Synthetic
ttgtagctactttgatattccg

SEQ ID NO: 16399 - DNA, 19 bp, Artificial Sequence
  Synthetic
ttatgcaacgaaagcttgt

SEQ ID NO: 16400 - DNA, 18 bp, Artificial Sequence
  Synthetic
aaaaggaccgtctgttgc

SEQ ID NO: 16401 - DNA, 18 bp, Artificial Sequence
  Synthetic
agaagtgttcctgcagct

SEQ ID NO: 16402 - DNA, 21 bp, Artificial Sequence
  Synthetic
atcatataccagcaacaaggg

SEQ ID NO: 16403 - DNA, 21 bp, Artificial Sequence
  Synthetic
tgggaaagttgattatgatgg

SEQ ID NO: 16404 - DNA, 18 bp, Artificial Sequence
  Synthetic
ctagggatccggccatag

SEQ ID NO: 16405 - DNA, 22 bp, Artificial Sequence
  Synthetic
tattccactagaacctataggc

SEQ ID NO: 16406 - DNA, 20 bp, Artificial Sequence
  Synthetic
gccacctgtacaaagtactc

SEQ ID NO: 16407 - DNA, 23 bp, Artificial Sequence
  Synthetic
ttttctgacgaatctttattgga

SEQ ID NO: 16408 - DNA, 21 bp, Artificial Sequence
  Synthetic
gttttgcgtttacagttacct

SEQ ID NO: 16409 - DNA, 18 bp, Artificial Sequence
  Synthetic
tggccagattttgtgcag

SEQ ID NO: 16410 - DNA, 23 bp, Artificial Sequence
  Synthetic
ttggaagtagaaatagtaatgca

SEQ ID NO: 16411 - DNA, 22 bp, Artificial Sequence
  Synthetic
caatgttaagctgtgaaacttg

SEQ ID NO: 16412 - DNA, 18 bp, Artificial Sequence
  Synthetic
cgacaatgcttcaatccg

SEQ ID NO: 16413 - DNA, 20 bp, Artificial Sequence
  Synthetic
gcctggacagtagtaaacag

SEQ ID NO: 16414 - DNA, 23 bp, Artificial Sequence
  Synthetic
attgaaccttttctgaaaacaac

SEQ ID NO: 16415 - DNA, 18 bp, Artificial Sequence
  Synthetic
aagcaagtactggcggaa

SEQ ID NO: 16416 - DNA, 19 bp, Artificial Sequence
  Synthetic
ctggatagagctcgatgag

SEQ ID NO: 16417 - DNA, 23 bp, Artificial Sequence
  Synthetic
atggtttcatcataaaaggaaga

SEQ ID NO: 16418 - DNA, 20 bp, Artificial Sequence
  Synthetic
ctccttcagtcactacaaca

SEQ ID NO: 16419 - DNA, 17 bp, Artificial Sequence
  Synthetic
ggaggaagccacacgga

SEQ ID NO: 16420 - DNA, 19 bp, Artificial Sequence
  Synthetic
cggaccccctttcaaagtg

SEQ ID NO: 16421 - DNA, 20 bp, Artificial Sequence
  Synthetic
tagcttcccagagagaagcg

SEQ ID NO: 16422 - DNA, 20 bp, Artificial Sequence
  Synthetic
ttccccttatgtccagtccc

SEQ ID NO: 16423 - DNA, 19 bp, Artificial Sequence
  Synthetic
gttctcgagggccttcctt

SEQ ID NO: 16424 - DNA, 22 bp, Artificial Sequence
  Synthetic
cgaaaccggtacatataaaagt

SEQ ID NO: 16425 - DNA, 20 bp, Artificial Sequence
  Synthetic
tatggtgcaacattagaagc

SEQ ID NO: 16426 - DNA, 25 bp, Artificial Sequence
  Synthetic
attgaagatgtaatactagatctgg

SEQ ID NO: 16427 - DNA, 18 bp, Artificial Sequence
  Synthetic
cttggtgtgccatcagtg

SEQ ID NO: 16428 - DNA, 19 bp, Artificial Sequence
  Synthetic
taacccaggcattgtttca

SEQ ID NO: 16429 - DNA, 21 bp, Artificial Sequence
  Synthetic
caatgggaatcctgtatatgc

SEQ ID NO: 16430 - DNA, 18 bp, Artificial Sequence
  Synthetic
gtggtgccctctactgtt

SEQ ID NO: 16431 - DNA, 21 bp, Artificial Sequence
  Synthetic
taaaggtactggagatgttga

SEQ ID NO: 16432 - DNA, 18 bp, Artificial Sequence
  Synthetic
ggcaccaaggaaaccgag

SEQ ID NO: 16433 - DNA, 18 bp, Artificial Sequence
  Synthetic
ctgtgggtcctacagaac

SEQ ID NO: 16434 - DNA, 20 bp, Artificial Sequence
  Synthetic
cagtagtactgtagcacctg

SEQ ID NO: 16435 - DNA, 21 bp, Artificial Sequence
  Synthetic
atatgcagaccctgatacagt

SEQ ID NO: 16436 - DNA, 25 bp, Artificial Sequence
  Synthetic
catggggataattattatttatggc

SEQ ID NO: 16437 - DNA, 21 bp, Artificial Sequence
  Synthetic
cgaaattcctaaggtatctgc

SEQ ID NO: 16438 - DNA, 25 bp, Artificial Sequence
  Synthetic
cagttatgtattataggttgtacac

SEQ ID NO: 16439 - DNA, 22 bp, Artificial Sequence
  Synthetic
acagcatgtttttttttcttcg

SEQ ID NO: 16440 - DNA, 22 bp, Artificial Sequence
  Synthetic
aacgcaaaaaacgtaaacttac

SEQ ID NO: 16441 - DNA, 16 bp, Artificial Sequence
  Synthetic
tggagcacccccccta

SEQ ID NO: 16442 - DNA, 20 bp, Artificial Sequence
  Synthetic
gcaagcccacctatatgtgt

SEQ ID NO: 16443 - DNA, 18 bp, Artificial Sequence
  Synthetic
tctagtaggcccgctggt

SEQ ID NO: 16444 - DNA, 20 bp, Artificial Sequence
  Synthetic
ttgttctccttccacttgcc

SEQ ID NO: 16445 - DNA, 20 bp, Artificial Sequence
  Synthetic
tttgttacagtccaaagtgg

SEQ ID NO: 16446 - DNA, 21 bp, Artificial Sequence
  Synthetic
tcaggccatttgtattttgag

SEQ ID NO: 16447 - DNA, 18 bp, Artificial Sequence
  Synthetic
gtcaccgcatagctctgc

SEQ ID NO: 16448 - DNA, 18 bp, Artificial Sequence
  Synthetic
cgctggtgactttctgtg

SEQ ID NO: 16449 - DNA, 19 bp, Artificial Sequence
  Synthetic
cacggttgatggtttgccc

SEQ ID NO: 16450 - DNA, 20 bp, Artificial Sequence
  Synthetic
acacccaataaccgttgacg

SEQ ID NO: 16451 - DNA, 20 bp, Artificial Sequence
  Synthetic
gccactcttgatacaaaacc

SEQ ID NO: 16452 - DNA, 18 bp, Artificial Sequence
  Synthetic
gtcctaaccgaagctcca

SEQ ID NO: 16453 - DNA, 19 bp, Artificial Sequence
  Synthetic
acattgttgaagccttcga

SEQ ID NO: 16454 - DNA, 21 bp, Artificial Sequence
  Synthetic
gagtacaatcaccacaactag

SEQ ID NO: 16455 - DNA, 18 bp, Artificial Sequence
  Synthetic
ttgacatgctaggcggct

SEQ ID NO: 16456 - DNA, 22 bp, Artificial Sequence
  Synthetic
acttgttcaaattactggagag

SEQ ID NO: 16457 - DNA, 19 bp, Artificial Sequence
  Synthetic
tcatgtcctgaaagcctgc

SEQ ID NO: 16458 - DNA, 20 bp, Artificial Sequence
  Synthetic
tgggaaagagtgagttttcg

SEQ ID NO: 16459 - DNA, 20 bp, Artificial Sequence
  Synthetic
gctaagtcccacatcactgg

SEQ ID NO: 16460 - DNA, 19 bp, Artificial Sequence
  Synthetic
tgttgtcgatgtggtcacc

SEQ ID NO: 16461 - DNA, 18 bp, Artificial Sequence
  Synthetic
cgaacaggctggcatgaa

SEQ ID NO: 16462 - DNA, 20 bp, Artificial Sequence
  Synthetic
ttgaggacaaacttcccgag

SEQ ID NO: 16463 - DNA, 18 bp, Artificial Sequence
  Synthetic
cttctctggcatgctaca

SEQ ID NO: 16464 - DNA, 18 bp, Artificial Sequence
  Synthetic
gggagaccccgggcttaa

SEQ ID NO: 16465 - DNA, 21 bp, Artificial Sequence
  Synthetic
tctgtttctctcaccatttcc

SEQ ID NO: 16466 - DNA, 20 bp, Artificial Sequence
  Synthetic
tacagaaattggtcaaagcc

SEQ ID NO: 16467 - DNA, 18 bp, Artificial Sequence
  Synthetic
caagtgtgcatagcatgg

SEQ ID NO: 16468 - DNA, 23 bp, Artificial Sequence
  Synthetic
ggaaaatcattcatactagcaca

SEQ ID NO: 16469 - DNA, 22 bp, Artificial Sequence
  Synthetic
cattgcttggatcctaacaatg

SEQ ID NO: 16470 - DNA, 23 bp, Artificial Sequence
  Synthetic
ttgaattgtcttattgttcgttg

SEQ ID NO: 16471 - DNA, 22 bp, Artificial Sequence
  Synthetic
attatattgggttgacacctgt

SEQ ID NO: 16472 - DNA, 25 bp, Artificial Sequence
  Synthetic
atatatttgaagagagtacagatgg

SEQ ID NO: 16473 - DNA, 22 bp, Artificial Sequence
  Synthetic
aaaagacgattatttcaggaca

SEQ ID NO: 16474 - DNA, 25 bp, Artificial Sequence
  Synthetic
aggtaaagtcatttctttcatgaac

SEQ ID NO: 16475 - DNA, 18 bp, Artificial Sequence
  Synthetic
tcgcagactccagccaag

SEQ ID NO: 16476 - DNA, 18 bp, Artificial Sequence
  Synthetic
gaatctgctgtcccgtct

SEQ ID NO: 16477 - DNA, 18 bp, Artificial Sequence
  Synthetic
tggattgggaattggcac

SEQ ID NO: 16478 - DNA, 20 bp, Artificial Sequence
  Synthetic
cttttccgatgatgtcactt

SEQ ID NO: 16479 - DNA, 18 bp, Artificial Sequence
  Synthetic
accgttaggggttggaac

SEQ ID NO: 16480 - DNA, 23 bp, Artificial Sequence
  Synthetic
aatacaagatggtgatatgtgtg

SEQ ID NO: 16481 - DNA, 18 bp, Artificial Sequence
  Synthetic
cagagctgtcaaccgttt

SEQ ID NO: 16482 - DNA, 18 bp, Artificial Sequence
  Synthetic
caacccttcttgtgacct

SEQ ID NO: 16483 - DNA, 20 bp, Artificial Sequence
  Synthetic
caaaagagcggtttttaccc

SEQ ID NO: 16484 - DNA, 18 bp, Artificial Sequence
  Synthetic
ggccaaacattgcgagta

SEQ ID NO: 16485 - DNA, 19 bp, Artificial Sequence
  Synthetic
agaggactatttggagcca

SEQ ID NO: 16486 - DNA, 23 bp, Artificial Sequence
  Synthetic
agattgatgaccaaatacaagac

SEQ ID NO: 16487 - DNA, 20 bp, Artificial Sequence
  Synthetic
atgagtgtcgaacagcctcc

SEQ ID NO: 16488 - DNA, 17 bp, Artificial Sequence
  Synthetic
gcccacaggacgtcaag

SEQ ID NO: 16489 - DNA, 17 bp, Artificial Sequence
  Synthetic
tgccctgtgtcctggaa

SEQ ID NO: 16490 - DNA, 20 bp, Artificial Sequence
  Synthetic
ctgggccaaggttatactgg

SEQ ID NO: 16491 - DNA, 20 bp, Artificial Sequence
  Synthetic
tcaactcttctgggtgtcca

SEQ ID NO: 16492 - DNA, 18 bp, Artificial Sequence
  Synthetic
taacattaggccccccgc

SEQ ID NO: 16493 - DNA, 20 bp, Artificial Sequence
  Synthetic
aattggacctatggtgagcg

SEQ ID NO: 16494 - DNA, 20 bp, Artificial Sequence
  Synthetic
gaagcaacctgcaagaacgt

SEQ ID NO: 16495 - DNA, 20 bp, Artificial Sequence
  Synthetic
tttcatagcccgagtggagg

SEQ ID NO: 16496 - DNA, 18 bp, Artificial Sequence
  Synthetic
tgaaggattgggcagcgt

SEQ ID NO: 16497 - DNA, 20 bp, Artificial Sequence
  Synthetic
aggtgcagttcttatccacg

SEQ ID NO: 16498 - DNA, 20 bp, Artificial Sequence
  Synthetic
ttacctcaagggttcctcgg

SEQ ID NO: 16499 - DNA, 16 bp, Artificial Sequence
  Synthetic
gttcgggttcggggca

SEQ ID NO: 16500 - DNA, 19 bp, Artificial Sequence
  Synthetic
taaagggcggtaggcatct

SEQ ID NO: 16501 - DNA, 20 bp, Artificial Sequence
  Synthetic
gagactactacagtgcccca

SEQ ID NO: 16502 - DNA, 20 bp, Artificial Sequence
  Synthetic
ccagctgggatacaatgtgg

SEQ ID NO: 16503 - DNA, 18 bp, Artificial Sequence
  Synthetic
accttgccgggtaatccc

SEQ ID NO: 16504 - DNA, 20 bp, Artificial Sequence
  Synthetic
tcaatactctgccctggagc

SEQ ID NO: 16505 - DNA, 19 bp, Artificial Sequence
  Synthetic
cggcactgacagacttcaa

SEQ ID NO: 16506 - DNA, 20 bp, Artificial Sequence
  Synthetic
acaatctgaagtgtccctgc

SEQ ID NO: 16507 - DNA, 18 bp, Artificial Sequence
  Synthetic
tctccaccctctctggca

SEQ ID NO: 16508 - DNA, 17 bp, Artificial Sequence
  Synthetic
gacttggaagcgaccgg

SEQ ID NO: 16509 - DNA, 18 bp, Artificial Sequence
  Synthetic
cagggtcatggtcaaccg

SEQ ID NO: 16510 - DNA, 19 bp, Artificial Sequence
  Synthetic
ccctagaggaagcctgtgg

SEQ ID NO: 16511 - DNA, 20 bp, Artificial Sequence
  Synthetic
gctttagcctcctgtagagc

SEQ ID NO: 16512 - DNA, 20 bp, Artificial Sequence
  Synthetic
cggttaattcctggctaggg

SEQ ID NO: 16513 - DNA, 18 bp, Artificial Sequence
  Synthetic
ttggagacatcgggctcg

SEQ ID NO: 16514 - DNA, 23 bp, Artificial Sequence
  Synthetic
cttgtagatctgttctctaaacg

SEQ ID NO: 16515 - DNA, 20 bp, Artificial Sequence
  Synthetic
ggttagagacgtgctagtgc

SEQ ID NO: 16516 - DNA, 20 bp, Artificial Sequence
  Synthetic
gagtgccaagaaatttgaca

SEQ ID NO: 16517 - DNA, 18 bp, Artificial Sequence
  Synthetic
gcaagggaggtaggacta

SEQ ID NO: 16518 - DNA, 18 bp, Artificial Sequence
  Synthetic
attgttgagtcctgcggt

SEQ ID NO: 16519 - DNA, 21 bp, Artificial Sequence
  Synthetic
gacgccatggtttatacttca

SEQ ID NO: 16520 - DNA, 19 bp, Artificial Sequence
  Synthetic
ttgttaacaaggcactcga

SEQ ID NO: 16521 - DNA, 19 bp, Artificial Sequence
  Synthetic
accagtctgtgtaaatggc

SEQ ID NO: 16522 - DNA, 25 bp, Artificial Sequence
  Synthetic
acttttcatcacgtatgtattgttc

SEQ ID NO: 16523 - DNA, 21 bp, Artificial Sequence
  Synthetic
tgtgttgacatcgttaaggag

SEQ ID NO: 16524 - DNA, 20 bp, Artificial Sequence
  Synthetic
tcacaggacatcttacttgc

SEQ ID NO: 16525 - DNA, 20 bp, Artificial Sequence
  Synthetic
gaacatgcttagaggtgaag

SEQ ID NO: 16526 - DNA, 22 bp, Artificial Sequence
  Synthetic
aactgtatcctggaatttgaga

SEQ ID NO: 16527 - DNA, 20 bp, Artificial Sequence
  Synthetic
ccgtagtgtcagtatcatca

SEQ ID NO: 16528 - DNA, 23 bp, Artificial Sequence
  Synthetic
atgtaaatcatgagggtaagact

SEQ ID NO: 16529 - DNA, 21 bp, Artificial Sequence
  Synthetic
catgctaatttggaatctgca

SEQ ID NO: 16530 - DNA, 21 bp, Artificial Sequence
  Synthetic
taaggagaccctctatcgtat

SEQ ID NO: 16531 - DNA, 18 bp, Artificial Sequence
  Synthetic
caaagccagcttcacgag

SEQ ID NO: 16532 - DNA, 22 bp, Artificial Sequence
  Synthetic
accatacagaaggaagtcatag

SEQ ID NO: 16533 - DNA, 21 bp, Artificial Sequence
  Synthetic
gctccttcttattgtaatggc

SEQ ID NO: 16534 - DNA, 18 bp, Artificial Sequence
  Synthetic
tcttggctcatgtggttt

SEQ ID NO: 16535 - DNA, 21 bp, Artificial Sequence
  Synthetic
tcattagtgatgaagttgctc

SEQ ID NO: 16536 - DNA, 22 bp, Artificial Sequence
  Synthetic
gtttccgttaagatgtttgatg

SEQ ID NO: 16537 - DNA, 20 bp, Artificial Sequence
  Synthetic
catatcaatgcccaagtagc

SEQ ID NO: 16538 - DNA, 21 bp, Artificial Sequence
  Synthetic
aaatcattggttacaaagcca

SEQ ID NO: 16539 - DNA, 18 bp, Artificial Sequence
  Synthetic
gctatgggcaaacctgtg

SEQ ID NO: 16540 - DNA, 19 bp, Artificial Sequence
  Synthetic
ttactcctcttgtgcaacc

SEQ ID NO: 16541 - DNA, 22 bp, Artificial Sequence
  Synthetic
gttacatttagtaccttcgagg

SEQ ID NO: 16542 - DNA, 20 bp, Artificial Sequence
  Synthetic
gctgatgttctctaccaacc

SEQ ID NO: 16543 - DNA, 21 bp, Artificial Sequence
  Synthetic
aaaattgtctgcttaggctta

SEQ ID NO: 16544 - DNA, 22 bp, Artificial Sequence
  Synthetic
agattcaccactactttgaatg

SEQ ID NO: 16545 - DNA, 24 bp, Artificial Sequence
  Synthetic
catcattggatgcttttaactttc

SEQ ID NO: 16546 - DNA, 25 bp, Artificial Sequence
  Synthetic
tctactatggtaatgctttagatca

SEQ ID NO: 16547 - DNA, 18 bp, Artificial Sequence
  Synthetic
atatgaactcccaggggc

SEQ ID NO: 16548 - DNA, 22 bp, Artificial Sequence
  Synthetic
agaagatggtttctcttttgtc

SEQ ID NO: 16549 - DNA, 19 bp, Artificial Sequence
  Synthetic
caggctatgacccaaatgt

SEQ ID NO: 16550 - DNA, 21 bp, Artificial Sequence
  Synthetic
ttggcctcttattgttacagc

SEQ ID NO: 16551 - DNA, 18 bp, Artificial Sequence
  Synthetic
tatggtgctgggcagttt

SEQ ID NO: 16552 - DNA, 23 bp, Artificial Sequence
  Synthetic
taaaggattctgtgacttgaaag

SEQ ID NO: 16553 - DNA, 23 bp, Artificial Sequence
  Synthetic
ataacttggttaaagattgtcca

SEQ ID NO: 16554 - DNA, 24 bp, Artificial Sequence
  Synthetic
tgtacgccaatcattattaaagac

SEQ ID NO: 16555 - DNA, 23 bp, Artificial Sequence
  Synthetic
tctcttcgaccgttattttaaat

SEQ ID NO: 16556 - DNA, 22 bp, Artificial Sequence
  Synthetic
tattgctagataaacgcactac

SEQ ID NO: 16557 - DNA, 25 bp, Artificial Sequence
  Synthetic
aactcaaatgaatcttaagtatgcc

SEQ ID NO: 16558 - DNA, 20 bp, Artificial Sequence
  Synthetic
gttcttgctcgcaaacataa

SEQ ID NO: 16559 - DNA, 21 bp, Artificial Sequence
  Synthetic
atcatgaattcgtggatgagt

SEQ ID NO: 16560 - DNA, 22 bp, Artificial Sequence
  Synthetic
acttatgattgaaaggttcgtg

SEQ ID NO: 16561 - DNA, 20 bp, Artificial Sequence
  Synthetic
gaccattcctatgttgcaag

SEQ ID NO: 16562 - DNA, 20 bp, Artificial Sequence
  Synthetic
ccaacacttgtactgagaga

SEQ ID NO: 16563 - DNA, 21 bp, Artificial Sequence
  Synthetic
cttagtgcacctactctagtg

SEQ ID NO: 16564 - DNA, 19 bp, Artificial Sequence
  Synthetic
atgcattgccagaaacaac

SEQ ID NO: 16565 - DNA, 22 bp, Artificial Sequence
  Synthetic
aaaagcacacaaggataagtca

SEQ ID NO: 16566 - DNA, 22 bp, Artificial Sequence
  Synthetic
cattttgtgcataatgtctgat

SEQ ID NO: 16567 - DNA, 24 bp, Artificial Sequence
  Synthetic
ggttaccctaatatgtttatcacc

SEQ ID NO: 16568 - DNA, 22 bp, Artificial Sequence
  Synthetic
agtgatacactgaaaggattgt

SEQ ID NO: 16569 - DNA, 22 bp, Artificial Sequence
  Synthetic
attataggagatgaactgaggg

SEQ ID NO: 16570 - DNA, 21 bp, Artificial Sequence
  Synthetic
aatgcaattgtgtgtaggttt

SEQ ID NO: 16571 - DNA, 20 bp, Artificial Sequence
  Synthetic
atttctgctggatttagcct

SEQ ID NO: 16572 - DNA, 18 bp, Artificial Sequence
  Synthetic
tctgcacaatgactgaca

SEQ ID NO: 16573 - DNA, 20 bp, Artificial Sequence
  Synthetic
taagcccagatcacaaatgg

SEQ ID NO: 16574 - DNA, 25 bp, Artificial Sequence
  Synthetic
aataaagtcacaagatttgtcagtg

SEQ ID NO: 16575 - DNA, 19 bp, Artificial Sequence
  Synthetic
ctcagacaatggttgccaa

SEQ ID NO: 16576 - DNA, 22 bp, Artificial Sequence
  Synthetic
ggacagcttttgttacaaatgt

SEQ ID NO: 16577 - DNA, 22 bp, Artificial Sequence
  Synthetic
gtaactttgaattgtgtgacaa

SEQ ID NO: 16578 - DNA, 19 bp, Artificial Sequence
  Synthetic
ttttcacctgctcaagaca

SEQ ID NO: 16579 - DNA, 25 bp, Artificial Sequence
  Synthetic
ctacaactcaacatttttttcaacc

SEQ ID NO: 16580 - DNA, 18 bp, Artificial Sequence
  Synthetic
taggccctttgagagaga

SEQ ID NO: 16581 - DNA, 25 bp, Artificial Sequence
  Synthetic
catctgaaatattagacatttcacc

SEQ ID NO: 16582 - DNA, 22 bp, Artificial Sequence
  Synthetic
actagccaaaaatctattgtgg

SEQ ID NO: 16583 - DNA, 22 bp, Artificial Sequence
  Synthetic
aggtcttttattgaggacttgc

SEQ ID NO: 16584 - DNA, 24 bp, Artificial Sequence
  Synthetic
tctatgagaaccaaaaacaaatcg

SEQ ID NO: 16585 - DNA, 19 bp, Artificial Sequence
  Synthetic
tgagtgtgttcttggacaa

SEQ ID NO: 16586 - DNA, 23 bp, Artificial Sequence
  Synthetic
tcgttattggcatcattaacaac

SEQ ID NO: 16587 - DNA, 22 bp, Artificial Sequence
  Synthetic
catcgtcatggttacaatcttg

SEQ ID NO: 16588 - DNA, 19 bp, Artificial Sequence
  Synthetic
gctgtttttcagagcgcta

SEQ ID NO: 16589 - DNA, 21 bp, Artificial Sequence
  Synthetic
aattggtggttattctgagga

SEQ ID NO: 16590 - DNA, 18 bp, Artificial Sequence
  Synthetic
tcggaagaaacaggtacg

SEQ ID NO: 16591 - DNA, 18 bp, Artificial Sequence
  Synthetic
tcctggaacaatggaacc

SEQ ID NO: 16592 - DNA, 20 bp, Artificial Sequence
  Synthetic
acttgtcattggtgctgtga

SEQ ID NO: 16593 - DNA, 24 bp, Artificial Sequence
  Synthetic
catgaaaattattctcttcctgac

SEQ ID NO: 16594 - DNA, 22 bp, Artificial Sequence
  Synthetic
ttgtatttctctatgcagttgc

SEQ ID NO: 16595 - DNA, 19 bp, Artificial Sequence
  Synthetic
ccccccgcattacatttgg

SEQ ID NO: 16596 - DNA, 18 bp, Artificial Sequence
  Synthetic
acttccctacggcgctaa

SEQ ID NO: 16597 - DNA, 20 bp, Artificial Sequence
  Synthetic
cttgagagcaaagtttctgg

SEQ ID NO: 16598 - DNA, 20 bp, Artificial Sequence
  Synthetic
tcatggagccattaaattgg

SEQ ID NO: 16599 - DNA, 24 bp, Artificial Sequence
  Synthetic
ttccgtttacgatacatagtctac

SEQ ID NO: 16600 - DNA, 18 bp, Artificial Sequence
  Synthetic
ccatgcggtgttgtactc

SEQ ID NO: 16601 - DNA, 20 bp, Artificial Sequence
  Synthetic
agtagacctggcagatgagg

SEQ ID NO: 16602 - DNA, 18 bp, Artificial Sequence
  Synthetic
gtgtccgtgtttcctgtt

SEQ ID NO: 16603 - DNA, 24 bp, Artificial Sequence
  Synthetic
ctgttaaagatgtgttagaaaagg

SEQ ID NO: 16604 - DNA, 18 bp, Artificial Sequence
  Synthetic
tggacagtcgttcttgga

SEQ ID NO: 16605 - DNA, 19 bp, Artificial Sequence
  Synthetic
aggtgagcaaggtagagaa

SEQ ID NO: 16606 - DNA, 22 bp, Artificial Sequence
  Synthetic
tcaattagccctatgttttcag

SEQ ID NO: 16607 - DNA, 25 bp, Artificial Sequence
  Synthetic
tgaatatgtacactgttgatttacg

SEQ ID NO: 16608 - DNA, 18 bp, Artificial Sequence
  Synthetic
tcctggtgttggaaaacc

SEQ ID NO: 16609 - DNA, 25 bp, Artificial Sequence
  Synthetic
caaagatttttgcttaagattagcc

SEQ ID NO: 16610 - DNA, 20 bp, Artificial Sequence
  Synthetic
ttatgtatgtacccccagga

SEQ ID NO: 16611 - DNA, 21 bp, Artificial Sequence
  Synthetic
cacgattcaaatattgtgtgc

SEQ ID NO: 16612 - DNA, 25 bp, Artificial Sequence
  Synthetic
tgattctattcttgtatcatactcc

SEQ ID NO: 16613 - DNA, 24 bp, Artificial Sequence
  Synthetic
tggtgttataggtatgattacagc

SEQ ID NO: 16614 - DNA, 20 bp, Artificial Sequence
  Synthetic
cacaaactgtaattgccact

SEQ ID NO: 16615 - DNA, 20 bp, Artificial Sequence
  Synthetic
actggaaaatctcttgccac

SEQ ID NO: 16616 - DNA, 21 bp, Artificial Sequence
  Synthetic
accatttacatccaagtttgt

SEQ ID NO: 16617 - DNA, 25 bp, Artificial Sequence
  Synthetic
ctataggtataatagctaatgtggt

SEQ ID NO: 16618 - DNA, 20 bp, Artificial Sequence
  Synthetic
tggtacttccaacacattct

SEQ ID NO: 16619 - DNA, 20 bp, Artificial Sequence
  Synthetic
tactgcacgaatgatcaagt

SEQ ID NO: 16620 - DNA, 24 bp, Artificial Sequence
  Synthetic
tgtgttattcagaagtgtatttgg

SEQ ID NO: 16621 - DNA, 18 bp, Artificial Sequence
  Synthetic
acccctgctgataagtct

SEQ ID NO: 16622 - DNA, 18 bp, Artificial Sequence
  Synthetic
aagaggtggagttgtcac

SEQ ID NO: 16623 - DNA, 24 bp, Artificial Sequence
  Synthetic
tctaaaaggagattgtttacagac

SEQ ID NO: 16624 - DNA, 22 bp, Artificial Sequence
  Synthetic
gggtaaagtaggctttctagat

SEQ ID NO: 16625 - DNA, 18 bp, Artificial Sequence
  Synthetic
ctgagcgtacgttttgct

SEQ ID NO: 16626 - DNA, 23 bp, Artificial Sequence
  Synthetic
caacctgatgtgttaaagtatgg

SEQ ID NO: 16627 - DNA, 24 bp, Artificial Sequence
  Synthetic
cagaaatatgggcatttatacctg

SEQ ID NO: 16628 - DNA, 18 bp, Artificial Sequence
  Synthetic
gcccattacaaggcctaa

SEQ ID NO: 16629 - DNA, 18 bp, Artificial Sequence
  Synthetic
cacacctgtcactgcatt

SEQ ID NO: 16630 - DNA, 25 bp, Artificial Sequence
  Synthetic
agaaggggaaacattaaatattcct

SEQ ID NO: 16631 - DNA, 23 bp, Artificial Sequence
  Synthetic
gtattcagatgtaagttaccaga

SEQ ID NO: 16632 - DNA, 18 bp, Artificial Sequence
  Synthetic
caattgctttgtggcctg

SEQ ID NO: 16633 - DNA, 23 bp, Artificial Sequence
  Synthetic
atgtaaaataactttggatgctg

SEQ ID NO: 16634 - DNA, 24 bp, Artificial Sequence
  Synthetic
gcttgaataaattgtttactgtgc

SEQ ID NO: 16635 - DNA, 23 bp, Artificial Sequence
  Synthetic
taaagtatgaaggggactattgc

SEQ ID NO: 16636 - DNA, 18 bp, Artificial Sequence
  Synthetic
ccaggacctgctttcaag

SEQ ID NO: 16637 - DNA, 18 bp, Artificial Sequence
  Synthetic
ccgagctttagtggacct

SEQ ID NO: 16638 - DNA, 20 bp, Artificial Sequence
  Synthetic
cagtgtgacgaagaagatga

SEQ ID NO: 16639 - DNA, 23 bp, Artificial Sequence
  Synthetic
tattcaaatactggacaatggac

SEQ ID NO: 16640 - DNA, 19 bp, Artificial Sequence
  Synthetic
cgacaagagaacgacgacg

SEQ ID NO: 16641 - DNA, 20 bp, Artificial Sequence
  Synthetic
tacaaaaccaagcataccac

SEQ ID NO: 16642 - DNA, 25 bp, Artificial Sequence
  Synthetic
cttttaatagggttatcaatcaagg

SEQ ID NO: 16643 - DNA, 18 bp, Artificial Sequence
  Synthetic
gcgcaggtgttaagacaa

SEQ ID NO: 16644 - DNA, 18 bp, Artificial Sequence
  Synthetic
atgtcgctgtttggagac

SEQ ID NO: 16645 - DNA, 18 bp, Artificial Sequence
  Synthetic
cctgtcaggaatgggaac

SEQ ID NO: 16646 - DNA, 18 bp, Artificial Sequence
  Synthetic
gtcttcggtacctggagt

SEQ ID NO: 16647 - DNA, 20 bp, Artificial Sequence
  Synthetic
actcactgagtgacatcaac

SEQ ID NO: 16648 - DNA, 19 bp, Artificial Sequence
  Synthetic
aggtccaatctaccgaaga

SEQ ID NO: 16649 - DNA, 20 bp, Artificial Sequence
  Synthetic
agcagaaatcctgggaatgc

SEQ ID NO: 16650 - DNA, 19 bp, Artificial Sequence
  Synthetic
caattggtgtggatggcat

SEQ ID NO: 16651 - DNA, 19 bp, Artificial Sequence
  Synthetic
tttttgttcatgatgcccg

SEQ ID NO: 16652 - DNA, 18 bp, Artificial Sequence
  Synthetic
ggctgttgctgcttcaat

SEQ ID NO: 16653 - DNA, 22 bp, Artificial Sequence
  Synthetic
aaattgacacgattactgttga

SEQ ID NO: 16654 - DNA, 21 bp, Artificial Sequence
  Synthetic
ccgttgaggtatttttctcac

SEQ ID NO: 16655 - DNA, 23 bp, Artificial Sequence
  Synthetic
gttgaaatgaaaaaacctcatgc

SEQ ID NO: 16656 - DNA, 25 bp, Artificial Sequence
  Synthetic
gttggtaaatcaaccttatttaacg

SEQ ID NO: 16657 - DNA, 18 bp, Artificial Sequence
  Synthetic
taaacgttatgcgcgtgt

SEQ ID NO: 16658 - DNA, 22 bp, Artificial Sequence
  Synthetic
cgtgcagaagaagaaatttcag

SEQ ID NO: 16659 - DNA, 23 bp, Artificial Sequence
  Synthetic
atggtaaaaatgattgttggtct

SEQ ID NO: 16660 - DNA, 20 bp, Artificial Sequence
  Synthetic
aggaggacataatggcatta

SEQ ID NO: 16661 - DNA, 18 bp, Artificial Sequence
  Synthetic
gtgggcttgtctggtcta

SEQ ID NO: 16662 - DNA, 20 bp, Artificial Sequence
  Synthetic
ggaggctcaaaatttgtgat

SEQ ID NO: 16663 - DNA, 18 bp, Artificial Sequence
  Synthetic
cagcaattagaagcgctg

SEQ ID NO: 16664 - DNA, 23 bp, Artificial Sequence
  Synthetic
aagttactaagttttgacgatgt

SEQ ID NO: 16665 - DNA, 23 bp, Artificial Sequence
  Synthetic
gaataccgattgaaatttctcct

SEQ ID NO: 16666 - DNA, 19 bp, Artificial Sequence
  Synthetic
gtggtgatcacatctgctt

SEQ ID NO: 16667 - DNA, 19 bp, Artificial Sequence
  Synthetic
tggtaccgaaaacatgagt

SEQ ID NO: 16668 - DNA, 25 bp, Artificial Sequence
  Synthetic
atcaagatgaataccctaaatttgg

SEQ ID NO: 16669 - DNA, 18 bp, Artificial Sequence
  Synthetic
cttttgctgctcaggctt

SEQ ID NO: 16670 - DNA, 18 bp, Artificial Sequence
  Synthetic
cacgattatggtcggtgg

SEQ ID NO: 16671 - DNA, 22 bp, Artificial Sequence
  Synthetic
tcttgccaaagaatatctgaac

SEQ ID NO: 16672 - DNA, 25 bp, Artificial Sequence
  Synthetic
tttgaaggataagattgatagaagg

SEQ ID NO: 16673 - DNA, 25 bp, Artificial Sequence
  Synthetic
ctttgatcagcatttaaaactactg

SEQ ID NO: 16674 - DNA, 24 bp, Artificial Sequence
  Synthetic
ctaaaaaatggttagttaagccag

SEQ ID NO: 16675 - DNA, 20 bp, Artificial Sequence
  Synthetic
gttgtcaagagcttactgac

SEQ ID NO: 16676 - DNA, 19 bp, Artificial Sequence
  Synthetic
aaagtaaatggttggcagc

SEQ ID NO: 16677 - DNA, 19 bp, Artificial Sequence
  Synthetic
tgtctcttggtatacggct

SEQ ID NO: 16678 - DNA, 19 bp, Artificial Sequence
  Synthetic
tggtgcttacttcttgagc

SEQ ID NO: 16679 - DNA, 25 bp, Artificial Sequence
  Synthetic
tctttcaaaaacactaagaaagacc

SEQ ID NO: 16680 - DNA, 20 bp, Artificial Sequence
  Synthetic
aaagctgagtttgcaaaagc

SEQ ID NO: 16681 - DNA, 24 bp, Artificial Sequence
  Synthetic
catcagtttttagaggagaattgg

SEQ ID NO: 16682 - DNA, 25 bp, Artificial Sequence
  Synthetic
ctaaaaagagcttatttgtgacaag

SEQ ID NO: 16683 - DNA, 19 bp, Artificial Sequence
  Synthetic
gcacctgcttctagtccag

SEQ ID NO: 16684 - DNA, 18 bp, Artificial Sequence
  Synthetic
caccacaagtgttgcaac

SEQ ID NO: 16685 - DNA, 20 bp, Artificial Sequence
  Synthetic
gccatttgcaagtatttacg

SEQ ID NO: 16686 - DNA, 25 bp, Artificial Sequence
  Synthetic
ggtcttgaaatgtattatactagtg

SEQ ID NO: 16687 - DNA, 19 bp, Artificial Sequence
  Synthetic
ttccctcactggaaattcc

SEQ ID NO: 16688 - DNA, 22 bp, Artificial Sequence
  Synthetic
aggtttatccaccatattgatg

SEQ ID NO: 16689 - DNA, 18 bp, Artificial Sequence
  Synthetic
ctaagccaaccaaagcgt

SEQ ID NO: 16690 - DNA, 21 bp, Artificial Sequence
  Synthetic
aaagaaaatgagaccactgtc

SEQ ID NO: 16691 - DNA, 18 bp, Artificial Sequence
  Synthetic
ccaaacagctccgttgag

SEQ ID NO: 16692 - DNA, 22 bp, Artificial Sequence
  Synthetic
tatcatttacgatgcccttacc

SEQ ID NO: 16693 - DNA, 20 bp, Artificial Sequence
  Synthetic
gcagagttgaatttgacctt

SEQ ID NO: 16694 - DNA, 25 bp, Artificial Sequence
  Synthetic
cacatgtctaagttattattggttg

SEQ ID NO: 16695 - DNA, 18 bp, Artificial Sequence
  Synthetic
tgtggctctagcttttcg

SEQ ID NO: 16696 - DNA, 22 bp, Artificial Sequence
  Synthetic
agatactacgacgattagagaa

SEQ ID NO: 16697 - DNA, 22 bp, Artificial Sequence
  Synthetic
gaagcagtcttagctaatcaac

SEQ ID NO: 16698 - DNA, 24 bp, Artificial Sequence
  Synthetic
tattgttggtcctaatttcaatcg

SEQ ID NO: 16699 - DNA, 23 bp, Artificial Sequence
  Synthetic
taaaaatagggatgatgctatcg

SEQ ID NO: 16700 - DNA, 18 bp, Artificial Sequence
  Synthetic
gccattaccgactaccga

SEQ ID NO: 16701 - DNA, 19 bp, Artificial Sequence
  Synthetic
taagccctgattatgctcc

SEQ ID NO: 16702 - DNA, 21 bp, Artificial Sequence
  Synthetic
taaacggtaagaaagtagccg

SEQ ID NO: 16703 - DNA, 19 bp, Artificial Sequence
  Synthetic
ctcttgacgatgctcttcg

SEQ ID NO: 16704 - DNA, 18 bp, Artificial Sequence
  Synthetic
gctgcagcttctttttcc

SEQ ID NO: 16705 - DNA, 21 bp, Artificial Sequence
  Synthetic
tacaaaaaagagtttcggtgg

SEQ ID NO: 16706 - DNA, 21 bp, Artificial Sequence
  Synthetic
caagtccccttcttagaaagt

SEQ ID NO: 16707 - DNA, 19 bp, Artificial Sequence
  Synthetic
aggaaggtcaattggttgc

SEQ ID NO: 16708 - DNA, 19 bp, Artificial Sequence
  Synthetic
gttccggctatgaaaatgc

SEQ ID NO: 16709 - DNA, 20 bp, Artificial Sequence
  Synthetic
aaaatggcaccattgattgc

SEQ ID NO: 16710 - DNA, 19 bp, Artificial Sequence
  Synthetic
ttatccaaacgtgccaaac

SEQ ID NO: 16711 - DNA, 20 bp, Artificial Sequence
  Synthetic
ggctttattcaagacttgcc

SEQ ID NO: 16712 - DNA, 25 bp, Artificial Sequence
  Synthetic
cagtttgttccttttagaatcaaag

SEQ ID NO: 16713 - DNA, 21 bp, Artificial Sequence
  Synthetic
cctactttgctgaaatctacc

SEQ ID NO: 16714 - DNA, 19 bp, Artificial Sequence
  Synthetic
tacacctgatgacacactc

SEQ ID NO: 16715 - DNA, 19 bp, Artificial Sequence
  Synthetic
gaaggaacgcaaagacaaa

SEQ ID NO: 16716 - DNA, 18 bp, Artificial Sequence
  Synthetic
gtctggcgcataccattt

SEQ ID NO: 16717 - DNA, 18 bp, Artificial Sequence
  Synthetic
cggattgcgagaaatcac

SEQ ID NO: 16718 - DNA, 20 bp, Artificial Sequence
  Synthetic
aacaaagaacgcctagaaca

SEQ ID NO: 16719 - DNA, 18 bp, Artificial Sequence
  Synthetic
caggcttgattgcgtcag

SEQ ID NO: 16720 - DNA, 21 bp, Artificial Sequence
  Synthetic
ccgctcagttgatttatgatc

SEQ ID NO: 16721 - DNA, 25 bp, Artificial Sequence
  Synthetic
ttatcagtttttagaggctattggt

SEQ ID NO: 16722 - DNA, 18 bp, Artificial Sequence
  Synthetic
aaacgacctcaactccaa

SEQ ID NO: 16723 - DNA, 19 bp, Artificial Sequence
  Synthetic
tctttttcagatggggggt

SEQ ID NO: 16724 - DNA, 18 bp, Artificial Sequence
  Synthetic
cttagcagccgagtacga

SEQ ID NO: 16725 - DNA, 18 bp, Artificial Sequence
  Synthetic
agcagccttgtctgctta

SEQ ID NO: 16726 - DNA, 18 bp, Artificial Sequence
  Synthetic
cgtcagttagtggaaggg

SEQ ID NO: 16727 - DNA, 23 bp, Artificial Sequence
  Synthetic
tatggcctgtcaattagatacac

SEQ ID NO: 16728 - DNA, 23 bp, Artificial Sequence
  Synthetic
atgaacccctaaaacattacact

SEQ ID NO: 16729 - DNA, 19 bp, Artificial Sequence
  Synthetic
gtttgaatttgcatgtggc

SEQ ID NO: 16730 - DNA, 20 bp, Artificial Sequence
  Synthetic
ttgtggatctgtgtttaagc

SEQ ID NO: 16731 - DNA, 18 bp, Artificial Sequence
  Synthetic
aaagcaagagcccctgaa

SEQ ID NO: 16732 - DNA, 20 bp, Artificial Sequence
  Synthetic
ccagttgctactttatcgac

SEQ ID NO: 16733 - DNA, 20 bp, Artificial Sequence
  Synthetic
gcggtaaaaattcctggacg

SEQ ID NO: 16734 - DNA, 21 bp, Artificial Sequence
  Synthetic
caggctgtaataatttagcgc

SEQ ID NO: 16735 - DNA, 19 bp, Artificial Sequence
  Synthetic
ccaaaggtttcaagccttg

SEQ ID NO: 16736 - DNA, 22 bp, Artificial Sequence
  Synthetic
tgccttaaacccatttaattgc

SEQ ID NO: 16737 - DNA, 18 bp, Artificial Sequence
  Synthetic
caagtcctgcaacagcta

SEQ ID NO: 16738 - DNA, 23 bp, Artificial Sequence
  Synthetic
tatttttgatggtcttgtcaacg

SEQ ID NO: 16739 - DNA, 22 bp, Artificial Sequence
  Synthetic
gtaatcaccaaaggtttgtagt

SEQ ID NO: 16740 - DNA, 23 bp, Artificial Sequence
  Synthetic
caggtggagtatatcaattctcc

SEQ ID NO: 16741 - DNA, 22 bp, Artificial Sequence
  Synthetic
agcttcaacgattttttcaatg

SEQ ID NO: 16742 - DNA, 19 bp, Artificial Sequence
  Synthetic
agccttatttcggtaagct

SEQ ID NO: 16743 - DNA, 23 bp, Artificial Sequence
  Synthetic
taaccattgctcaaaaaagaaga

SEQ ID NO: 16744 - DNA, 20 bp, Artificial Sequence
  Synthetic
ttgatttgggacataacagc

SEQ ID NO: 16745 - DNA, 18 bp, Artificial Sequence
  Synthetic
atgttttaaggcccgtcg

SEQ ID NO: 16746 - DNA, 23 bp, Artificial Sequence
  Synthetic
taagccaagaatgttaaaaaacc

SEQ ID NO: 16747 - DNA, 22 bp, Artificial Sequence
  Synthetic
ttatgctggtgattttttctca

SEQ ID NO: 16748 - DNA, 23 bp, Artificial Sequence
  Synthetic
tttgaaaaacgttggataagacg

SEQ ID NO: 16749 - DNA, 19 bp, Artificial Sequence
  Synthetic
caagaagtgcaatgatggg

SEQ ID NO: 16750 - DNA, 18 bp, Artificial Sequence
  Synthetic
tcccaccaaagtaatgcg

SEQ ID NO: 16751 - DNA, 20 bp, Artificial Sequence
  Synthetic
tttcacttcttcactagcgt

SEQ ID NO: 16752 - DNA, 18 bp, Artificial Sequence
  Synthetic
cgacgacgttctaagcta

SEQ ID NO: 16753 - DNA, 20 bp, Artificial Sequence
  Synthetic
ccatagaaacacggacatca

SEQ ID NO: 16754 - DNA, 21 bp, Artificial Sequence
  Synthetic
caagaagaaccagagtcaaac

SEQ ID NO: 16755 - DNA, 19 bp, Artificial Sequence
  Synthetic
cccatgatggatgaaaggt

SEQ ID NO: 16756 - DNA, 20 bp, Artificial Sequence
  Synthetic
tagtcatcctcaccaaaacc

SEQ ID NO: 16757 - DNA, 25 bp, Artificial Sequence
  Synthetic
cgatatacgtattagtatcaaggat

SEQ ID NO: 16758 - DNA, 21 bp, Artificial Sequence
  Synthetic
tatcaacctgacttaaagcgt

SEQ ID NO: 16759 - DNA, 18 bp, Artificial Sequence
  Synthetic
ttgttcccaagctgcttg

SEQ ID NO: 16760 - DNA, 25 bp, Artificial Sequence
  Synthetic
ctgtgattataagcaaatcatcttg

SEQ ID NO: 16761 - DNA, 23 bp, Artificial Sequence
  Synthetic
aaacgattaatgtctattctcgt

SEQ ID NO: 16762 - DNA, 25 bp, Artificial Sequence
  Synthetic
aaagttactaaatagctatagtccg

SEQ ID NO: 16763 - DNA, 19 bp, Artificial Sequence
  Synthetic
agctgagctaaactcccat

SEQ ID NO: 16764 - DNA, 20 bp, Artificial Sequence
  Synthetic
atgctttcagcgcttatccc

SEQ ID NO: 16765 - DNA, 20 bp, Artificial Sequence
  Synthetic
tgttatccccagggtagctt

SEQ ID NO: 16766 - DNA, 19 bp, Artificial Sequence
  Synthetic
ggcgtcaccccctatacat

SEQ ID NO: 16767 - DNA, 25 bp, Artificial Sequence
  Synthetic
cagctcaatgttataaagataagca

SEQ ID NO: 16768 - DNA, 20 bp, Artificial Sequence
  Synthetic
ctctcctaccatgacacttt

SEQ ID NO: 16769 - DNA, 19 bp, Artificial Sequence
  Synthetic
atcgtaactcgccggttca

SEQ ID NO: 16770 - DNA, 18 bp, Artificial Sequence
  Synthetic
gacctcctgcgtgcaaag

SEQ ID NO: 16771 - DNA, 23 bp, Artificial Sequence
  Synthetic
tctttgattgttttttcagtagc

SEQ ID NO: 16772 - DNA, 20 bp, Artificial Sequence
  Synthetic
cttgttatctgctgccattg

SEQ ID NO: 16773 - DNA, 19 bp, Artificial Sequence
  Synthetic
ctgggatacgagttgatcc

SEQ ID NO: 16774 - DNA, 21 bp, Artificial Sequence
  Synthetic
accaccaagtttgttatcacc

SEQ ID NO: 16775 - DNA, 18 bp, Artificial Sequence
  Synthetic
cactgcttgacgttttgc

SEQ ID NO: 16776 - DNA, 25 bp, Artificial Sequence
  Synthetic
gcttctaacttgctatctagtttac

SEQ ID NO: 16777 - DNA, 18 bp, Artificial Sequence
  Synthetic
ccaaggcacgttctagat

SEQ ID NO: 16778 - DNA, 25 bp, Artificial Sequence
  Synthetic
cgataataatcacctaatttagcag

SEQ ID NO: 16779 - DNA, 18 bp, Artificial Sequence
  Synthetic
agcgctcctctacgatag

SEQ ID NO: 16780 - DNA, 18 bp, Artificial Sequence
  Synthetic
cttggcatccgtccacta

SEQ ID NO: 16781 - DNA, 18 bp, Artificial Sequence
  Synthetic
gctggtggaacttctgtt

SEQ ID NO: 16782 - DNA, 22 bp, Artificial Sequence
  Synthetic
cacaaaaagatctctttgcctt

SEQ ID NO: 16783 - DNA, 23 bp, Artificial Sequence
  Synthetic
ctatgcgcaaaatgatatctttg

SEQ ID NO: 16784 - DNA, 19 bp, Artificial Sequence
  Synthetic
tggaaaataagcgtgctca

SEQ ID NO: 16785 - DNA, 24 bp, Artificial Sequence
  Synthetic
aagcctattatgatctgatgaaga

SEQ ID NO: 16786 - DNA, 18 bp, Artificial Sequence
  Synthetic
tcgtgattgtggttgacc

SEQ ID NO: 16787 - DNA, 18 bp, Artificial Sequence
  Synthetic
ctattgagagcgcacaga

SEQ ID NO: 16788 - DNA, 20 bp, Artificial Sequence
  Synthetic
cgatcaagaacaagaagctc

SEQ ID NO: 16789 - DNA, 25 bp, Artificial Sequence
  Synthetic
taccaagcctataaagaaaaacaag

SEQ ID NO: 16790 - DNA, 24 bp, Artificial Sequence
  Synthetic
tagctctagtgatatcaaatatgc

SEQ ID NO: 16791 - DNA, 19 bp, Artificial Sequence
  Synthetic
ggtcagaatcaccacttcc

SEQ ID NO: 16792 - DNA, 18 bp, Artificial Sequence
  Synthetic
caaaagggcacaggttga

SEQ ID NO: 16793 - DNA, 23 bp, Artificial Sequence
  Synthetic
gaaaggaattcacacttatgact

SEQ ID NO: 16794 - DNA, 20 bp, Artificial Sequence
  Synthetic
ctcagtttgactttgcctta

SEQ ID NO: 16795 - DNA, 24 bp, Artificial Sequence
  Synthetic
ctctttaatcagcttgagattgac

SEQ ID NO: 16796 - DNA, 23 bp, Artificial Sequence
  Synthetic
atcaaagatgtagataatcaccg

SEQ ID NO: 16797 - DNA, 19 bp, Artificial Sequence
  Synthetic
agattgggctttatcacgt

SEQ ID NO: 16798 - DNA, 23 bp, Artificial Sequence
  Synthetic
gtctgattaaatcctacccattg

SEQ ID NO: 16799 - DNA, 23 bp, Artificial Sequence
  Synthetic
gattactccattattggcaaagg

SEQ ID NO: 16800 - DNA, 19 bp, Artificial Sequence
  Synthetic
ccacgagtggtttgattgt

SEQ ID NO: 16801 - DNA, 18 bp, Artificial Sequence
  Synthetic
catcagtatgtcgccgcc

SEQ ID NO: 16802 - DNA, 17 bp, Artificial Sequence
  Synthetic
gatatgcagcgctggcg

SEQ ID NO: 16803 - DNA, 20 bp, Artificial Sequence
  Synthetic
caatgcgtgctcatggtatg

SEQ ID NO: 16804 - DNA, 19 bp, Artificial Sequence
  Synthetic
gcgcgttagggctattggg

SEQ ID NO: 16805 - DNA, 19 bp, Artificial Sequence
  Synthetic
aaagtcaccgttggcacag

SEQ ID NO: 16806 - DNA, 20 bp, Artificial Sequence
  Synthetic
aaagagacatttgtccccgg

SEQ ID NO: 16807 - DNA, 20 bp, Artificial Sequence
  Synthetic
ctgacagccgacttttaccc

SEQ ID NO: 16808 - DNA, 18 bp, Artificial Sequence
  Synthetic
gccaccgtctacaccgga

SEQ ID NO: 16809 - DNA, 16 bp, Artificial Sequence
  Synthetic
gagtccagccggtcca

SEQ ID NO: 16810 - DNA, 19 bp, Artificial Sequence
  Synthetic
tgtggcgcctgactatagg

SEQ ID NO: 16811 - DNA, 16 bp, Artificial Sequence
  Synthetic
ggggaagtccgtcggt

SEQ ID NO: 16812 - DNA, 20 bp, Artificial Sequence
  Synthetic
tgattttgagagcaagggcc

SEQ ID NO: 16813 - DNA, 20 bp, Artificial Sequence
  Synthetic
tgcaggacatagacgcagtg

SEQ ID NO: 16814 - DNA, 19 bp, Artificial Sequence
  Synthetic
caggtacggcaaggagaca

SEQ ID NO: 16815 - DNA, 20 bp, Artificial Sequence
  Synthetic
tattgatgaaggaggccggg

SEQ ID NO: 16816 - DNA, 16 bp, Artificial Sequence
  Synthetic
gccctcatcaccggct

SEQ ID NO: 16817 - DNA, 17 bp, Artificial Sequence
  Synthetic
ctgctctgtcgtgcctg

SEQ ID NO: 16818 - DNA, 16 bp, Artificial Sequence
  Synthetic
cgacgcggcacacgat

SEQ ID NO: 16819 - DNA, 18 bp, Artificial Sequence
  Synthetic
ggtgggtatgcggtgtca

SEQ ID NO: 16820 - DNA, 19 bp, Artificial Sequence
  Synthetic
accaattcagcctacaccg

SEQ ID NO: 16821 - DNA, 16 bp, Artificial Sequence
  Synthetic
gctcgccccatcacca

SEQ ID NO: 16822 - DNA, 19 bp, Artificial Sequence
  Synthetic
gggcaagatcagtttttgg

SEQ ID NO: 16823 - DNA, 23 bp, Artificial Sequence
  Synthetic
actaaacgaaatttttctagtgc

SEQ ID NO: 16824 - DNA, 18 bp, Artificial Sequence
  Synthetic
gttcgcacctatagcgaa

SEQ ID NO: 16825 - DNA, 23 bp, Artificial Sequence
  Synthetic
attacaaatggtatgtcattgct

SEQ ID NO: 16826 - DNA, 25 bp, Artificial Sequence
  Synthetic
tactttctaatcaattacgtctagc

SEQ ID NO: 16827 - DNA, 22 bp, Artificial Sequence
  Synthetic
tgaacttgccactgttaatttg

SEQ ID NO: 16828 - DNA, 19 bp, Artificial Sequence
  Synthetic
ggttgatggctgtagtgtc

SEQ ID NO: 16829 - DNA, 25 bp, Artificial Sequence
  Synthetic
cacttacttctaatggtcttttagg

SEQ ID NO: 16830 - DNA, 24 bp, Artificial Sequence
  Synthetic
gtccattatttatacaggtgattg

SEQ ID NO: 16831 - DNA, 22 bp, Artificial Sequence
  Synthetic
ggtaaaaagtttgatgatcagg

SEQ ID NO: 16832 - DNA, 20 bp, Artificial Sequence
  Synthetic
aagctggtgaagttaaacct

SEQ ID NO: 16833 - DNA, 21 bp, Artificial Sequence
  Synthetic
tttttgttgagagttgtacca

SEQ ID NO: 16834 - DNA, 19 bp, Artificial Sequence
  Synthetic
aacaattgggtgttgtgag

SEQ ID NO: 16835 - DNA, 23 bp, Artificial Sequence
  Synthetic
tgtaaaagtactgtagttgaagt

SEQ ID NO: 16836 - DNA, 21 bp, Artificial Sequence
  Synthetic
tgtttgaagcacctttacact

SEQ ID NO: 16837 - DNA, 21 bp, Artificial Sequence
  Synthetic
tattgtagagttggtgaatgc

SEQ ID NO: 16838 - DNA, 21 bp, Artificial Sequence
  Synthetic
atagtggtagtgctagtgagg

SEQ ID NO: 16839 - DNA, 25 bp, Artificial Sequence
  Synthetic
accactgttcttattgattatgatc

SEQ ID NO: 16840 - DNA, 23 bp, Artificial Sequence
  Synthetic
tacaccaaattgagttaggtagt

SEQ ID NO: 16841 - DNA, 25 bp, Artificial Sequence
  Synthetic
aggttttttaaatgtactatgggtg

SEQ ID NO: 16842 - DNA, 23 bp, Artificial Sequence
  Synthetic
ttgcttatgaaaatgctagacaa

SEQ ID NO: 16843 - DNA, 20 bp, Artificial Sequence
  Synthetic
tctgttcattatgctggagt

SEQ ID NO: 16844 - DNA, 21 bp, Artificial Sequence
  Synthetic
cgttcttggttttataggtgc

SEQ ID NO: 16845 - DNA, 20 bp, Artificial Sequence
  Synthetic
ggtaaatgtgttcaggttcc

SEQ ID NO: 16846 - DNA, 25 bp, Artificial Sequence
  Synthetic
tgttataaagaggtgtactaagtcg

SEQ ID NO: 16847 - DNA, 25 bp, Artificial Sequence
  Synthetic
cccagttgaaaatgaagatatacat

SEQ ID NO: 16848 - DNA, 20 bp, Artificial Sequence
  Synthetic
gtgttccacttgttacaact

SEQ ID NO: 16849 - DNA, 21 bp, Artificial Sequence
  Synthetic
ctttgacaaagcgtaatgtcc

SEQ ID NO: 16850 - DNA, 22 bp, Artificial Sequence
  Synthetic
gcctaacatgatacgtatgatt

SEQ ID NO: 16851 - DNA, 23 bp, Artificial Sequence
  Synthetic
gttgggttgaagaagatttaact

SEQ ID NO: 16852 - DNA, 25 bp, Artificial Sequence
  Synthetic
aatcaagaagataagttttggtgtg

SEQ ID NO: 16853 - DNA, 23 bp, Artificial Sequence
  Synthetic
ttttgtcttaacatctcacaatg

SEQ ID NO: 16854 - DNA, 20 bp, Artificial Sequence
  Synthetic
tttgctattcgtaatgtgcg

SEQ ID NO: 16855 - DNA, 23 bp, Artificial Sequence
  Synthetic
gttgtgattatgtttacaatccg

SEQ ID NO: 16856 - DNA, 19 bp, Artificial Sequence
  Synthetic
gctgttactgatgccaaat

SEQ ID NO: 16857 - DNA, 21 bp, Artificial Sequence
  Synthetic
caaagtttttgttcgctatgg

SEQ ID NO: 16858 - DNA, 24 bp, Artificial Sequence
  Synthetic
actaaagagtttagatcttggtgt

SEQ ID NO: 16859 - DNA, 18 bp, Artificial Sequence
  Synthetic
acaatgtgcgtacctcat

SEQ ID NO: 16860 - DNA, 19 bp, Artificial Sequence
  Synthetic
tggcctcttgctttttcac

SEQ ID NO: 16861 - DNA, 22 bp, Artificial Sequence
  Synthetic
ggcataactatatctggtgaaa

SEQ ID NO: 16862 - DNA, 18 bp, Artificial Sequence
  Synthetic
gccgcattcctaatggtt

SEQ ID NO: 16863 - DNA, 21 bp, Artificial Sequence
  Synthetic
ttcttgacaccacaatacctt

SEQ ID NO: 16864 - DNA, 18 bp, Artificial Sequence
  Synthetic
gtgtgagcacttgcagtt

SEQ ID NO: 16865 - DNA, 23 bp, Artificial Sequence
  Synthetic
cttggttttaaaaatgtttccac

SEQ ID NO: 16866 - DNA, 21 bp, Artificial Sequence
  Synthetic
ttacctcagagaaacattcgt

SEQ ID NO: 16867 - DNA, 21 bp, Artificial Sequence
  Synthetic
tgttaatcaacagggtagtgc

SEQ ID NO: 16868 - DNA, 18 bp, Artificial Sequence
  Synthetic
atgtaaaggcgtggtctg

SEQ ID NO: 16869 - DNA, 24 bp, Artificial Sequence
  Synthetic
gaaaattatatcaaatggccttgg

SEQ ID NO: 16870 - DNA, 22 bp, Artificial Sequence
  Synthetic
tgcttaccaagattatatgcaa

SEQ ID NO: 16871 - DNA, 23 bp, Artificial Sequence
  Synthetic
gcttttaatcctgaaactaatgc

SEQ ID NO: 16872 - DNA, 25 bp, Artificial Sequence
  Synthetic
tctaaactaaacaaaatggctagtg

SEQ ID NO: 16873 - DNA, 19 bp, Artificial Sequence
  Synthetic
caacgttctgatggtgttg

SEQ ID NO: 16874 - DNA, 22 bp, Artificial Sequence
  Synthetic
gattctaaccagtcttcttcag

SEQ ID NO: 16875 - DNA, 18 bp, Artificial Sequence
  Synthetic
aggttttccacagcttgc

SEQ ID NO: 16876 - DNA, 19 bp, Artificial Sequence
  Synthetic
tcaagggtgtgctagaact

SEQ ID NO: 16877 - DNA, 19 bp, Artificial Sequence
  Synthetic
aacgattggtttttggtgg

SEQ ID NO: 16878 - DNA, 18 bp, Artificial Sequence
  Synthetic
taaagatacggctggcgt

SEQ ID NO: 16879 - DNA, 20 bp, Artificial Sequence
  Synthetic
ctgagcctccaaaatcaaga

SEQ ID NO: 16880 - DNA, 25 bp, Artificial Sequence
  Synthetic
aacaggacagtaaattgatagaaga

SEQ ID NO: 16881 - DNA, 18 bp, Artificial Sequence
  Synthetic
gagagctgtttttggcac

SEQ ID NO: 16882 - DNA, 16 bp, Artificial Sequence
  Synthetic
ctggggctcctgcagt

SEQ ID NO: 16883 - DNA, 21 bp, Artificial Sequence
  Synthetic
aggataggtagtgctagaatg

SEQ ID NO: 16884 - DNA, 22 bp, Artificial Sequence
  Synthetic
ctcatgcaaaatatcaaacacc

SEQ ID NO: 16885 - DNA, 22 bp, Artificial Sequence
  Synthetic
gaaattttccccatagatgttg

SEQ ID NO: 16886 - DNA, 20 bp, Artificial Sequence
  Synthetic
ggagaagcatcaacatcaga

SEQ ID NO: 16887 - DNA, 20 bp, Artificial Sequence
  Synthetic
aatccagcatttgagccaga

SEQ ID NO: 16888 - DNA, 20 bp, Artificial Sequence
  Synthetic
tattgctccagaagactcaa

SEQ ID NO: 16889 - DNA, 20 bp, Artificial Sequence
  Synthetic
ccatcactagaatcctgtcc

SEQ ID NO: 16890 - DNA, 19 bp, Artificial Sequence
  Synthetic
gggccaccctcttttaaat

SEQ ID NO: 16891 - DNA, 19 bp, Artificial Sequence
  Synthetic
ttggggctatggattttgc

SEQ ID NO: 16892 - DNA, 21 bp, Artificial Sequence
  Synthetic
caacaaattatgtaggcacac

SEQ ID NO: 16893 - DNA, 24 bp, Artificial Sequence
  Synthetic
ctgattgattgtgtgttattttcc

SEQ ID NO: 16894 - DNA, 23 bp, Artificial Sequence
  Synthetic
tcttcattgtttatggtttaccg

SEQ ID NO: 16895 - DNA, 18 bp, Artificial Sequence
  Synthetic
gcgcagtgtttgaatgtg

SEQ ID NO: 16896 - DNA, 25 bp, Artificial Sequence
  Synthetic
ttggaaactaacagtgatatatcag

SEQ ID NO: 16897 - DNA, 21 bp, Artificial Sequence
  Synthetic
cgaaggcgattatttaatgtg

SEQ ID NO: 16898 - DNA, 18 bp, Artificial Sequence
  Synthetic
cctgctgcaatgttttgg

SEQ ID NO: 16899 - DNA, 19 bp, Artificial Sequence
  Synthetic
tttgtatgagcctgttgca

SEQ ID NO: 16900 - DNA, 22 bp, Artificial Sequence
  Synthetic
ctgttgagtctttatgaacagg

SEQ ID NO: 16901 - DNA, 25 bp, Artificial Sequence
  Synthetic
aagattcttcaatatggaagtttgg

SEQ ID NO: 16902 - DNA, 22 bp, Artificial Sequence
  Synthetic
tctatctaacattcccactaca

SEQ ID NO: 16903 - DNA, 21 bp, Artificial Sequence
  Synthetic
gtcaatctgtaggtgaagaca

SEQ ID NO: 16904 - DNA, 18 bp, Artificial Sequence
  Synthetic
tgttaccgggcatcctag

SEQ ID NO: 16905 - DNA, 22 bp, Artificial Sequence
  Synthetic
tagaagatggtgatatgatgga

SEQ ID NO: 16906 - DNA, 22 bp, Artificial Sequence
  Synthetic
aatacatttgtagccaatggag

SEQ ID NO: 16907 - DNA, 23 bp, Artificial Sequence
  Synthetic
gacaccaaatcctaataaaatgc

SEQ ID NO: 16908 - DNA, 19 bp, Artificial Sequence
  Synthetic
tttagtcactggcaaacgg

SEQ ID NO: 16909 - DNA, 22 bp, Artificial Sequence
  Synthetic
ggggtaaaaatgatgaaagtgc

SEQ ID NO: 16910 - DNA, 23 bp, Artificial Sequence
  Synthetic
aaaaagggatatacgtaatgtgt

SEQ ID NO: 16911 - DNA, 19 bp, Artificial Sequence
  Synthetic
tcttcgagcgttttgatga

SEQ ID NO: 16912 - DNA, 18 bp, Artificial Sequence
  Synthetic
tggaagtccatggtgagg

SEQ ID NO: 16913 - DNA, 18 bp, Artificial Sequence
  Synthetic
gcatggagctgtaggagt

SEQ ID NO: 16914 - DNA, 18 bp, Artificial Sequence
  Synthetic
tggtcttgaccacatcct

SEQ ID NO: 16915 - DNA, 25 bp, Artificial Sequence
  Synthetic
gtggtgaaattattatacaatgagc

SEQ ID NO: 16916 - DNA, 25 bp, Artificial Sequence
  Synthetic
aaggttccatttatttacacaagag

SEQ ID NO: 16917 - DNA, 20 bp, Artificial Sequence
  Synthetic
agcaaagatgtcttttgctt

SEQ ID NO: 16918 - DNA, 24 bp, Artificial Sequence
  Synthetic
gagatcttgtctttgattttcaag

SEQ ID NO: 16919 - DNA, 20 bp, Artificial Sequence
  Synthetic
aagtcagcacatcagaaagg

SEQ ID NO: 16920 - DNA, 21 bp, Artificial Sequence
  Synthetic
aagctaacagagggaaaatgg

SEQ ID NO: 16921 - DNA, 21 bp, Artificial Sequence
  Synthetic
gtcttcaacctctaatcctcc

SEQ ID NO: 16922 - DNA, 18 bp, Artificial Sequence
  Synthetic
cagctggagacttggagt

SEQ ID NO: 16923 - DNA, 23 bp, Artificial Sequence
  Synthetic
tgaaataatgaagttttcctgga

SEQ ID NO: 16924 - DNA, 25 bp, Artificial Sequence
  Synthetic
atggatatagtggacaattagtttg

SEQ ID NO: 16925 - DNA, 22 bp, Artificial Sequence
  Synthetic
gtttttccagtcttttccatct

SEQ ID NO: 16926 - DNA, 21 bp, Artificial Sequence
  Synthetic
agaatctcagtcaactttgga

SEQ ID NO: 16927 - DNA, 19 bp, Artificial Sequence
  Synthetic
cgaaggtcttcctggaatg

SEQ ID NO: 16928 - DNA, 23 bp, Artificial Sequence
  Synthetic
atcatcacattgataaaaccatg

SEQ ID NO: 16929 - DNA, 21 bp, Artificial Sequence
  Synthetic
ctcctggatttccttatgtcc

SEQ ID NO: 16930 - DNA, 20 bp, Artificial Sequence
  Synthetic
tactcaattttgtgccgaat

SEQ ID NO: 16931 - DNA, 21 bp, Artificial Sequence
  Synthetic
agctacattctatgtctggtt

SEQ ID NO: 16932 - DNA, 18 bp, Artificial Sequence
  Synthetic
ggagaccctcagtgtgat

SEQ ID NO: 16933 - DNA, 24 bp, Artificial Sequence
  Synthetic
gacccacttaaaattcaaataccc

SEQ ID NO: 16934 - DNA, 24 bp, Artificial Sequence
  Synthetic
ggagacatacttttgattaacagc

SEQ ID NO: 16935 - DNA, 18 bp, Artificial Sequence
  Synthetic
gcaacagggatgcgaaat

SEQ ID NO: 16936 - DNA, 22 bp, Artificial Sequence
  Synthetic
gaagtagaagggagaattcagg

SEQ ID NO: 16937 - DNA, 25 bp, Artificial Sequence
  Synthetic
atacagagatgaagcattaaacaac

SEQ ID NO: 16938 - DNA, 19 bp, Artificial Sequence
  Synthetic
cctgccactcataaacaag

SEQ ID NO: 16939 - DNA, 21 bp, Artificial Sequence
  Synthetic
tgttgtttcaattgtgctaga

SEQ ID NO: 16940 - DNA, 21 bp, Artificial Sequence
  Synthetic
agaagcaactataccagacat

SEQ ID NO: 16941 - DNA, 18 bp, Artificial Sequence
  Synthetic
accttctttgctgtgtcc

SEQ ID NO: 16942 - DNA, 19 bp, Artificial Sequence
  Synthetic
gagcagcaaatacaggact

SEQ ID NO: 16943 - DNA, 23 bp, Artificial Sequence
  Synthetic
atgctcagcaaatttaaaaacag

SEQ ID NO: 16944 - DNA, 21 bp, Artificial Sequence
  Synthetic
gaaagacaaacttagaggctc

SEQ ID NO: 16945 - DNA, 18 bp, Artificial Sequence
  Synthetic
gcgcacgtagagtaaagc

SEQ ID NO: 16946 - DNA, 24 bp, Artificial Sequence
  Synthetic
gtcctactgatataatacctttgg

SEQ ID NO: 16947 - DNA, 23 bp, Artificial Sequence
  Synthetic
aggttacattagagtcagtagac

SEQ ID NO: 16948 - DNA, 21 bp, Artificial Sequence
  Synthetic
tttacatccaagtttgagacg

SEQ ID NO: 16949 - DNA, 21 bp, Artificial Sequence
  Synthetic
catgaagtgttagttcccaag

SEQ ID NO: 16950 - DNA, 21 bp, Artificial Sequence
  Synthetic
ggtgaatacatcctttgatcc

SEQ ID NO: 16951 - DNA, 21 bp, Artificial Sequence
  Synthetic
taatgatgtgtatggcaatgc

SEQ ID NO: 16952 - DNA, 18 bp, Artificial Sequence
  Synthetic
tctctcaccattgcaaca

SEQ ID NO: 16953 - DNA, 22 bp, Artificial Sequence
  Synthetic
gcaatgtcaaattacaggattt

SEQ ID NO: 16954 - DNA, 18 bp, Artificial Sequence
  Synthetic
gtgtgtgtagcatggtcc

SEQ ID NO: 16955 - DNA, 22 bp, Artificial Sequence
  Synthetic
ggaaaattgtccatattagccc

SEQ ID NO: 16956 - DNA, 18 bp, Artificial Sequence
  Synthetic
gagagggaatccaggagt

SEQ ID NO: 16957 - DNA, 19 bp, Artificial Sequence
  Synthetic
gcctaattacgctgtccgc

SEQ ID NO: 16958 - DNA, 19 bp, Artificial Sequence
  Synthetic
ccctgtggagactgcatct

SEQ ID NO: 16959 - DNA, 17 bp, Artificial Sequence
  Synthetic
gctggacgaactgtgcg

SEQ ID NO: 16960 - DNA, 16 bp, Artificial Sequence
  Synthetic
gggcggtctcccttgt

SEQ ID NO: 16961 - DNA, 20 bp, Artificial Sequence
  Synthetic
gtgtacgtccaccacatgag

SEQ ID NO: 16962 - DNA, 18 bp, Artificial Sequence
  Synthetic
gccggcgagagaaagaga

SEQ ID NO: 16963 - DNA, 16 bp, Artificial Sequence
  Synthetic
cgggtatgagccgcca

SEQ ID NO: 16964 - DNA, 18 bp, Artificial Sequence
  Synthetic
cgtagacgggctcgaagc

SEQ ID NO: 16965 - DNA, 19 bp, Artificial Sequence
  Synthetic
aacatcaagttccctggaa

SEQ ID NO: 16966 - DNA, 19 bp, Artificial Sequence
  Synthetic
gcaaaaagtctggcaaacc

SEQ ID NO: 16967 - DNA, 19 bp, Artificial Sequence
  Synthetic
tgcaaaaaaacagagtggt

SEQ ID NO: 16968 - DNA, 22 bp, Artificial Sequence
  Synthetic
gacacgaaacactgatacttac

SEQ ID NO: 16969 - DNA, 18 bp, Artificial Sequence
  Synthetic
ctcccgaagaactgacag

SEQ ID NO: 16970 - DNA, 21 bp, Artificial Sequence
  Synthetic
cctttgccatagtaaacatga

SEQ ID NO: 16971 - DNA, 21 bp, Artificial Sequence
  Synthetic
gtttgttgttgtacttcaagc

SEQ ID NO: 16972 - DNA, 20 bp, Artificial Sequence
  Synthetic
attgtttgatttcggttgga

SEQ ID NO: 16973 - DNA, 21 bp, Artificial Sequence
  Synthetic
agggacttgatatatccgagt

SEQ ID NO: 16974 - DNA, 22 bp, Artificial Sequence
  Synthetic
ttgtgtttttttaccgaaagac

SEQ ID NO: 16975 - DNA, 22 bp, Artificial Sequence
  Synthetic
tctgcgcagattttaaaatacg

SEQ ID NO: 16976 - DNA, 19 bp, Artificial Sequence
  Synthetic
ttacgtcgtttcctgtagc

SEQ ID NO: 16977 - DNA, 18 bp, Artificial Sequence
  Synthetic
tctgacggctaaggtgaa

SEQ ID NO: 16978 - DNA, 21 bp, Artificial Sequence
  Synthetic
tgtatcggaaaaactcgaatt

SEQ ID NO: 16979 - DNA, 24 bp, Artificial Sequence
  Synthetic
gaaagtttcggaaaatgtaaacac

SEQ ID NO: 16980 - DNA, 23 bp, Artificial Sequence
  Synthetic
tgtgttataacagacatatgcaa

SEQ ID NO: 16981 - DNA, 22 bp, Artificial Sequence
  Synthetic
aggacactttcaaaatttttcg

SEQ ID NO: 16982 - DNA, 18 bp, Artificial Sequence
  Synthetic
cggtgagcaagttctctt

SEQ ID NO: 16983 - DNA, 18 bp, Artificial Sequence
  Synthetic
aacgctgtttaaaagggc

SEQ ID NO: 16984 - DNA, 19 bp, Artificial Sequence
  Synthetic
gctgacaggatcgtcccct

SEQ ID NO: 16985 - DNA, 16 bp, Artificial Sequence
  Synthetic
tggagacgcgggcgaa

SEQ ID NO: 16986 - DNA, 20 bp, Artificial Sequence
  Synthetic
gccgtgacgtatgaagaaga

SEQ ID NO: 16987 - DNA, 19 bp, Artificial Sequence
  Synthetic
gcctccgatacgtacgact

SEQ ID NO: 16988 - DNA, 20 bp, Artificial Sequence
  Synthetic
aatcatgcattgtgtggggt

SEQ ID NO: 16989 - DNA, 18 bp, Artificial Sequence
  Synthetic
ccttagcccaagagcatg

SEQ ID NO: 16990 - DNA, 18 bp, Artificial Sequence
  Synthetic
ctcacagaacttcaggct

SEQ ID NO: 16991 - DNA, 18 bp, Artificial Sequence
  Synthetic
aaatgggaggacctgaga

SEQ ID NO: 16992 - DNA, 23 bp, Artificial Sequence
  Synthetic
aatacaataagcaatgaggaaac

SEQ ID NO: 16993 - DNA, 23 bp, Artificial Sequence
  Synthetic
gactttcgagtttagtagtacag

SEQ ID NO: 16994 - DNA, 23 bp, Artificial Sequence
  Synthetic
cgatacaagggtatgatatgacc

SEQ ID NO: 16995 - DNA, 22 bp, Artificial Sequence
  Synthetic
gttatcatgcgaacaattcaac

SEQ ID NO: 16996 - DNA, 20 bp, Artificial Sequence
  Synthetic
aagctcatggtcctacattg

SEQ ID NO: 16997 - DNA, 19 bp, Artificial Sequence
  Synthetic
aaagaagtcctcgtgctat

SEQ ID NO: 16998 - DNA, 19 bp, Artificial Sequence
  Synthetic
tggaaatctagtggtaccg

SEQ ID NO: 16999 - DNA, 23 bp, Artificial Sequence
  Synthetic
attcaatctagaggcctatttgg

SEQ ID NO: 17000 - DNA, 17 bp, Artificial Sequence
  Synthetic
cttccacgcggcagatc

SEQ ID NO: 17001 - DNA, 20 bp, Artificial Sequence
  Synthetic
ttggagtgggagagaacaga

SEQ ID NO: 17002 - DNA, 18 bp, Artificial Sequence
  Synthetic
ctccgcacgtctgtctga

SEQ ID NO: 17003 - DNA, 16 bp, Artificial Sequence
  Synthetic
agtctatgcgcgcgcc

SEQ ID NO: 17004 - DNA, 20 bp, Artificial Sequence
  Synthetic
ttcacacagatgcaaccgat

SEQ ID NO: 17005 - DNA, 16 bp, Artificial Sequence
  Synthetic
ccgtctggcgtcgaac

SEQ ID NO: 17006 - DNA, 18 bp, Artificial Sequence
  Synthetic
cgccgttctgtctcgaga

SEQ ID NO: 17007 - DNA, 20 bp, Artificial Sequence
  Synthetic
gaagaatctgccgatcacca

SEQ ID NO: 17008 - DNA, 16 bp, Artificial Sequence
  Synthetic
agaaagaggcgccggt

SEQ ID NO: 17009 - DNA, 20 bp, Artificial Sequence
  Synthetic
ctgcgaagatagtgaccccg

SEQ ID NO: 17010 - DNA, 24 bp, Artificial Sequence
  Synthetic
actccttaacacatcattattcct

SEQ ID NO: 17011 - DNA, 19 bp, Artificial Sequence
  Synthetic
tagcgattttgtgctcatg

SEQ ID NO: 17012 - DNA, 22 bp, Artificial Sequence
  Synthetic
gtttccaatgtccattttttcc

SEQ ID NO: 17013 - DNA, 24 bp, Artificial Sequence
  Synthetic
tagctctgttttctttgttttgtc

SEQ ID NO: 17014 - DNA, 23 bp, Artificial Sequence
  Synthetic
tttttgttaaaaagcgaatgtcc

SEQ ID NO: 17015 - DNA, 18 bp, Artificial Sequence
  Synthetic
cacacatcacgagtctcc

SEQ ID NO: 17016 - DNA, 23 bp, Artificial Sequence
  Synthetic
tatgatcatctgaaactgtttgg

SEQ ID NO: 17017 - DNA, 20 bp, Artificial Sequence
  Synthetic
gatgacgcatacgatctact

SEQ ID NO: 17018 - DNA, 18 bp, Artificial Sequence
  Synthetic
ccgtcattacatctcccg

SEQ ID NO: 17019 - DNA, 18 bp, Artificial Sequence
  Synthetic
tttcgacgcaaactttgg

SEQ ID NO: 17020 - DNA, 20 bp, Artificial Sequence
  Synthetic
gttcgttgagagaattaggc

SEQ ID NO: 17021 - DNA, 25 bp, Artificial Sequence
  Synthetic
agaaacatactgatttgtacagaag

SEQ ID NO: 17022 - DNA, 18 bp, Artificial Sequence
  Synthetic
gtgttggtaaacgcgtgt

SEQ ID NO: 17023 - DNA, 18 bp, Artificial Sequence
  Synthetic
tttttcaaacgtctgggc

SEQ ID NO: 17024 - DNA, 18 bp, Artificial Sequence
  Synthetic
gtttgtggagtcggtagc

SEQ ID NO: 17025 - DNA, 20 bp, Artificial Sequence
  Synthetic
gagcctagcgattagtttgt

SEQ ID NO: 17026 - DNA, 18 bp, Artificial Sequence
  Synthetic
tgatgccaatgaagcctt

SEQ ID NO: 17027 - DNA, 19 bp, Artificial Sequence
  Synthetic
tgaatgggagcctttgaac

SEQ ID NO: 17028 - DNA, 21 bp, Artificial Sequence
  Synthetic
atctgtgtttgtatctgctcc

SEQ ID NO: 17029 - DNA, 23 bp, Artificial Sequence
  Synthetic
tgaattttttctggaatcttgag

SEQ ID NO: 17030 - DNA, 16 bp, Artificial Sequence
  Synthetic
gccgacacactgcagc

SEQ ID NO: 17031 - DNA, 18 bp, Artificial Sequence
  Synthetic
gagctctctcaccccgtg

SEQ ID NO: 17032 - DNA, 17 bp, Artificial Sequence
  Synthetic
ggccgccgagattaacg

SEQ ID NO: 17033 - DNA, 17 bp, Artificial Sequence
  Synthetic
ccggtgattcccggaga

SEQ ID NO: 17034 - DNA, 16 bp, Artificial Sequence
  Synthetic
acatgagggcggccag

SEQ ID NO: 17035 - DNA, 18 bp, Artificial Sequence
  Synthetic
ccttaatgggaacgggga

SEQ ID NO: 17036 - DNA, 21 bp, Artificial Sequence
  Synthetic
ctattgccgcaaatatcattg

SEQ ID NO: 17037 - DNA, 20 bp, Artificial Sequence
  Synthetic
gtttcctttggcatatccgc

SEQ ID NO: 17038 - DNA, 18 bp, Artificial Sequence
  Synthetic
tttctgacatgaccctcg

SEQ ID NO: 17039 - DNA, 20 bp, Artificial Sequence
  Synthetic
ctcatcggaggacttgaatg

SEQ ID NO: 17040 - DNA, 18 bp, Artificial Sequence
  Synthetic
gtaaccgaaaacggtccg

SEQ ID NO: 17041 - DNA, 25 bp, Artificial Sequence
  Synthetic
ttatggaaaagtgaatcagtatagg

SEQ ID NO: 17042 - DNA, 20 bp, Artificial Sequence
  Synthetic
tcagaagatgaccatgaaca

SEQ ID NO: 17043 - DNA, 19 bp, Artificial Sequence
  Synthetic
tatagtgtgccccaactgt

SEQ ID NO: 17044 - DNA, 18 bp, Artificial Sequence
  Synthetic
gcgacagttgaaacggaa

SEQ ID NO: 17045 - DNA, 18 bp, Artificial Sequence
  Synthetic
tggacaacgtgtagatgg

SEQ ID NO: 17046 - DNA, 21 bp, Artificial Sequence
  Synthetic
gttggaacatagttttgctga

SEQ ID NO: 17047 - DNA, 19 bp, Artificial Sequence
  Synthetic
cagtttagagctgcagaca

SEQ ID NO: 17048 - DNA, 19 bp, Artificial Sequence
  Synthetic
catgcagcaattgaaatgc

SEQ ID NO: 17049 - DNA, 18 bp, Artificial Sequence
  Synthetic
cggagacttgtccatcag

SEQ ID NO: 17050 - DNA, 20 bp, Artificial Sequence
  Synthetic
catcaggtacagatgtccct

SEQ ID NO: 17051 - DNA, 20 bp, Artificial Sequence
  Synthetic
ttaacatctggtcctgacat

SEQ ID NO: 17052 - DNA, 23 bp, Artificial Sequence
  Synthetic
ccatattttgaattgaaaaagcc

SEQ ID NO: 17053 - DNA, 25 bp, Artificial Sequence
  Synthetic
gttgctatggattataaacaaactc

SEQ ID NO: 17054 - DNA, 18 bp, Artificial Sequence
  Synthetic
gcccctacctcttcttcc

SEQ ID NO: 17055 - DNA, 18 bp, Artificial Sequence
  Synthetic
gttccctgccaaaaatgc

SEQ ID NO: 17056 - DNA, 23 bp, Artificial Sequence
  Synthetic
acatataaaagcactgtgtacaa

SEQ ID NO: 17057 - DNA, 25 bp, Artificial Sequence
  Synthetic
ctgtttgctattttatagtaaggtc

SEQ ID NO: 17058 - DNA, 21 bp, Artificial Sequence
  Synthetic
atcagcagtataatcatgcac

SEQ ID NO: 17059 - DNA, 18 bp, Artificial Sequence
  Synthetic
gacagctcagcagttgtt

SEQ ID NO: 17060 - DNA, 19 bp, Artificial Sequence
  Synthetic
aggctcacaacatagtgtg

SEQ ID NO: 17061 - DNA, 22 bp, Artificial Sequence
  Synthetic
acaccagaatggatagaaagac

SEQ ID NO: 17062 - DNA, 23 bp, Artificial Sequence
  Synthetic
tatgaaacaatggataaagcatg

SEQ ID NO: 17063 - DNA, 23 bp, Artificial Sequence
  Synthetic
aatggaaatcctgtataccaatt

SEQ ID NO: 17064 - DNA, 19 bp, Artificial Sequence
  Synthetic
ggatgggtggtgtaaagtg

SEQ ID NO: 17065 - DNA, 18 bp, Artificial Sequence
  Synthetic
ggcacctacgaagcctca

SEQ ID NO: 17066 - DNA, 23 bp, Artificial Sequence
  Synthetic
aggtatcggtttcaaaaacataa

SEQ ID NO: 17067 - DNA, 19 bp, Artificial Sequence
  Synthetic
cgccatatatgctgctagg

SEQ ID NO: 17068 - DNA, 25 bp, Artificial Sequence
  Synthetic
agttctactacatatactaatccca

SEQ ID NO: 17069 - DNA, 25 bp, Artificial Sequence
  Synthetic
gataatcccatatttcaaaatgctg

SEQ ID NO: 17070 - DNA, 22 bp, Artificial Sequence
  Synthetic
tcaatctccttttgataccacc

SEQ ID NO: 17071 - DNA, 25 bp, Artificial Sequence
  Synthetic
catactatgaattctaccttactgg

SEQ ID NO: 17072 - DNA, 25 bp, Artificial Sequence
  Synthetic
tttgttttatacactatgccttacc

SEQ ID NO: 17073 - DNA, 18 bp, Artificial Sequence
  Synthetic
cccaatgggtgttgtact

SEQ ID NO: 17074 - DNA, 20 bp, Artificial Sequence
  Synthetic
tgcatacccagcagtagacc

SEQ ID NO: 17075 - DNA, 20 bp, Artificial Sequence
  Synthetic
tgacccagttaaagatgtct

SEQ ID NO: 17076 - DNA, 24 bp, Artificial Sequence
  Synthetic
acatcttctaatatagtgccaatc

SEQ ID NO: 17077 - DNA, 21 bp, Artificial Sequence
  Synthetic
tgtacactgtacaactaggga

SEQ ID NO: 17078 - DNA, 21 bp, Artificial Sequence
  Synthetic
ctggtattgatgaaccaacaa

SEQ ID NO: 17079 - DNA, 24 bp, Artificial Sequence
  Synthetic
tagaaagtttccttggtagatctg

SEQ ID NO: 17080 - DNA, 18 bp, Artificial Sequence
  Synthetic
caggagctccaattcctt

SEQ ID NO: 17081 - DNA, 18 bp, Artificial Sequence
  Synthetic
acatggtgtcattggcat

SEQ ID NO: 17082 - DNA, 18 bp, Artificial Sequence
  Synthetic
aaactcctctgaccctca

SEQ ID NO: 17083 - DNA, 21 bp, Artificial Sequence
  Synthetic
ttgctcaacatacaccttagc

SEQ ID NO: 17084 - DNA, 20 bp, Artificial Sequence
  Synthetic
ccaaaggctgttttagtacc

SEQ ID NO: 17085 - DNA, 23 bp, Artificial Sequence
  Synthetic
tgaaaattattgtgtgtgtgttg

SEQ ID NO: 17086 - DNA, 20 bp, Artificial Sequence
  Synthetic
aaagttggtttgttgtggat

SEQ ID NO: 17087 - DNA, 24 bp, Artificial Sequence
  Synthetic
agaagctacaaaagtaataagtcc

SEQ ID NO: 17088 - DNA, 21 bp, Artificial Sequence
  Synthetic
tatacgcagatgaagatagca

SEQ ID NO: 17089 - DNA, 22 bp, Artificial Sequence
  Synthetic
tatgaggaatgcattagatggt

SEQ ID NO: 17090 - DNA, 22 bp, Artificial Sequence
  Synthetic
ttcaagtttcagaagctaaagc

SEQ ID NO: 17091 - DNA, 18 bp, Artificial Sequence
  Synthetic
ggcctcctccaactccat

SEQ ID NO: 17092 - DNA, 21 bp, Artificial Sequence
  Synthetic
aactgtaaacctcccaaaagg

SEQ ID NO: 17093 - DNA, 23 bp, Artificial Sequence
  Synthetic
aggggaaatcgatattgtatcag

SEQ ID NO: 17094 - DNA, 25 bp, Artificial Sequence
  Synthetic
gatgtttcatttacatttgaaaggg

SEQ ID NO: 17095 - DNA, 22 bp, Artificial Sequence
  Synthetic
tggattggtagtgtttaatccc

SEQ ID NO: 17096 - DNA, 21 bp, Artificial Sequence
  Synthetic
gaagaggaaatccattaggtg

SEQ ID NO: 17097 - DNA, 18 bp, Artificial Sequence
  Synthetic
ggctggaaaggttggaga

SEQ ID NO: 17098 - DNA, 24 bp, Artificial Sequence
  Synthetic
tacaagtatattacttcatgggcc

SEQ ID NO: 17099 - DNA, 18 bp, Artificial Sequence
  Synthetic
gctcagccactaacccgt

SEQ ID NO: 17100 - DNA, 18 bp, Artificial Sequence
  Synthetic
ctgtgggatggaaccaac

SEQ ID NO: 17101 - DNA, 20 bp, Artificial Sequence
  Synthetic
aaattcacacaacctctagc

SEQ ID NO: 17102 - DNA, 19 bp, Artificial Sequence
  Synthetic
taaaggttggtggtggaag

SEQ ID NO: 17103 - DNA, 25 bp, Artificial Sequence
  Synthetic
ttcaaatgttaggagagataacaag

SEQ ID NO: 17104 - DNA, 21 bp, Artificial Sequence
  Synthetic
gataagtcagagttctcaggg

SEQ ID NO: 17105 - DNA, 20 bp, Artificial Sequence
  Synthetic
caagaaaacagcagacaagc

SEQ ID NO: 17106 - DNA, 20 bp, Artificial Sequence
  Synthetic
acaccaatgatgaaacagga

SEQ ID NO: 17107 - DNA, 18 bp, Artificial Sequence
  Synthetic
ctctttgggccaagatcc

SEQ ID NO: 17108 - DNA, 24 bp, Artificial Sequence
  Synthetic
ggttttcctaggtttactattcca

SEQ ID NO: 17109 - DNA, 20 bp, Artificial Sequence
  Synthetic
attcagcacaaactaccatg

SEQ ID NO: 17110 - DNA, 20 bp, Artificial Sequence
  Synthetic
ttggagggctgctactatag

SEQ ID NO: 17111 - DNA, 20 bp, Artificial Sequence
  Synthetic
gtttagacactcaccaaggt

SEQ ID NO: 17112 - DNA, 19 bp, Artificial Sequence
  Synthetic
ctgtcacaagtcaccatgg

SEQ ID NO: 17113 - DNA, 20 bp, Artificial Sequence
  Synthetic
gtttaaccaaaccaggtgac

SEQ ID NO: 17114 - DNA, 18 bp, Artificial Sequence
  Synthetic
acccacagtaacagtccc

SEQ ID NO: 17115 - DNA, 20 bp, Artificial Sequence
  Synthetic
atagaggagagcaaatccag

SEQ ID NO: 17116 - DNA, 20 bp, Artificial Sequence
  Synthetic
ttgatgtgtattgcccaagg

SEQ ID NO: 17117 - DNA, 21 bp, Artificial Sequence
  Synthetic
atatgactatccaacccaacc

SEQ ID NO: 17118 - DNA, 19 bp, Artificial Sequence
  Synthetic
tcctggtgttaaggaacca

SEQ ID NO: 17119 - DNA, 20 bp, Artificial Sequence
  Synthetic
ttcccttatgtgtctttggg

SEQ ID NO: 17120 - DNA, 20 bp, Artificial Sequence
  Synthetic
caggtatcttaacaggctca

SEQ ID NO: 17121 - DNA, 20 bp, Artificial Sequence
  Synthetic
aatgtgaccttccttaaacg

SEQ ID NO: 17122 - DNA, 21 bp, Artificial Sequence
  Synthetic
cgcgagatactaacaaaaacc

SEQ ID NO: 17123 - DNA, 18 bp, Artificial Sequence
  Synthetic
gtcggacagagtgatggt

SEQ ID NO: 17124 - DNA, 20 bp, Artificial Sequence
  Synthetic
gtcgttttcccaaatgaagt

SEQ ID NO: 17125 - DNA, 19 bp, Artificial Sequence
  Synthetic
catccgtcaagaaggaaga

SEQ ID NO: 17126 - DNA, 18 bp, Artificial Sequence
  Synthetic
ggcgatctgaatttcgtg

SEQ ID NO: 17127 - DNA, 19 bp, Artificial Sequence
  Synthetic
attgaccgtttcttgaggg

SEQ ID NO: 17128 - DNA, 20 bp, Artificial Sequence
  Synthetic
acaagcggtaatgcagttga

SEQ ID NO: 17129 - DNA, 18 bp, Artificial Sequence
  Synthetic
accgattacgtggggttt

SEQ ID NO: 17130 - DNA, 18 bp, Artificial Sequence
  Synthetic
cccacacttcaggaccta

SEQ ID NO: 17131 - DNA, 18 bp, Artificial Sequence
  Synthetic
ttggacaatcctgaggtg

SEQ ID NO: 17132 - DNA, 18 bp, Artificial Sequence
  Synthetic
ggttagaccgagtggcga

SEQ ID NO: 17133 - DNA, 20 bp, Artificial Sequence
  Synthetic
gggaatttaacaagacacgc

SEQ ID NO: 17134 - DNA, 19 bp, Artificial Sequence
  Synthetic
gcaggggctacattctgga

SEQ ID NO: 17135 - DNA, 18 bp, Artificial Sequence
  Synthetic
acgaggattgggaggagg

SEQ ID NO: 17136 - DNA, 18 bp, Artificial Sequence
  Synthetic
tggaagacccaagagcga

SEQ ID NO: 17137 - DNA, 20 bp, Artificial Sequence
  Synthetic
gtgcaactttagccagacca

SEQ ID NO: 17138 - DNA, 16 bp, Artificial Sequence
  Synthetic
gggatgggccggagtt

SEQ ID NO: 17139 - DNA, 18 bp, Artificial Sequence
  Synthetic
tggtccacctctcccgat

SEQ ID NO: 17140 - DNA, 20 bp, Artificial Sequence
  Synthetic
ggcctggatcttaaggttgg

SEQ ID NO: 17141 - DNA, 17 bp, Artificial Sequence
  Synthetic
ggggtgatgagctgcga

SEQ ID NO: 17142 - DNA, 16 bp, Artificial Sequence
  Synthetic
tccaggcggtcccaga

SEQ ID NO: 17143 - DNA, 17 bp, Artificial Sequence
  Synthetic
cggagcttgcccttgga

SEQ ID NO: 17144 - DNA, 16 bp, Artificial Sequence
  Synthetic
tgtcctgcaggggcgt

SEQ ID NO: 17145 - DNA, 18 bp, Artificial Sequence
  Synthetic
ccagctgttggggtaggt

SEQ ID NO: 17146 - DNA, 18 bp, Artificial Sequence
  Synthetic
cgcaacgcacttccattc

SEQ ID NO: 17147 - DNA, 20 bp, Artificial Sequence
  Synthetic
tacacatagatgggctccga

SEQ ID NO: 17148 - DNA, 20 bp, Artificial Sequence
  Synthetic
atggttaacggccttgtagg

SEQ ID NO: 17149 - DNA, 18 bp, Artificial Sequence
  Synthetic
ctgggcggctaggacaat

SEQ ID NO: 17150 - DNA, 16 bp, Artificial Sequence
  Synthetic
tcccagcgatcccagc

SEQ ID NO: 17151 - DNA, 16 bp, Artificial Sequence
  Synthetic
cgctgcacgggctgta

SEQ ID NO: 17152 - DNA, 16 bp, Artificial Sequence
  Synthetic
gacgcggcggttgaca

SEQ ID NO: 17153 - DNA, 16 bp, Artificial Sequence
  Synthetic
tccccgtcaacgtcgc

SEQ ID NO: 17154 - DNA, 18 bp, Artificial Sequence
  Synthetic
tcgcgctcaaaatccccg

SEQ ID NO: 17155 - DNA, 18 bp, Artificial Sequence
  Synthetic
ggcgctaacgatgcatct

SEQ ID NO: 17156 - DNA, 19 bp, Artificial Sequence
  Synthetic
atgtcatcatttgcggcgg

SEQ ID NO: 17157 - DNA, 17 bp, Artificial Sequence
  Synthetic
actaggaagtgcggcgg

SEQ ID NO: 17158 - DNA, 18 bp, Artificial Sequence
  Synthetic
cttcctccgtagcctggc

SEQ ID NO: 17159 - DNA, 18 bp, Artificial Sequence
  Synthetic
agcattgccagggttacg

SEQ ID NO: 17160 - DNA, 18 bp, Artificial Sequence
  Synthetic
ggcctacgagcagacggt

SEQ ID NO: 17161 - DNA, 20 bp, Artificial Sequence
  Synthetic
gcgatcaactactcagtgct

SEQ ID NO: 17162 - DNA, 16 bp, Artificial Sequence
  Synthetic
aggatgcacccgctgc

SEQ ID NO: 17163 - DNA, 16 bp, Artificial Sequence
  Synthetic
aggccatccgtcccga

SEQ ID NO: 17164 - DNA, 20 bp, Artificial Sequence
  Synthetic
tttttccagacaagccggca

SEQ ID NO: 17165 - DNA, 19 bp, Artificial Sequence
  Synthetic
acgacaccgacagtttgag

SEQ ID NO: 17166 - DNA, 16 bp, Artificial Sequence
  Synthetic
gcgcggcgtccatgaa

SEQ ID NO: 17167 - DNA, 20 bp, Artificial Sequence
  Synthetic
gaacgccatggccaataacg

SEQ ID NO: 17168 - DNA, 20 bp, Artificial Sequence
  Synthetic
ccttgttagagatgaggcgc

SEQ ID NO: 17169 - DNA, 19 bp, Artificial Sequence
  Synthetic
aagtggggcgtcaaaatgg

SEQ ID NO: 17170 - DNA, 20 bp, Artificial Sequence
  Synthetic
caagtacttggaaagcaaga

SEQ ID NO: 17171 - DNA, 20 bp, Artificial Sequence
  Synthetic
gcaagtttactggtcgctgc

SEQ ID NO: 17172 - DNA, 20 bp, Artificial Sequence
  Synthetic
cgagtgaccgttactgacgc

SEQ ID NO: 17173 - DNA, 16 bp, Artificial Sequence
  Synthetic
gcttacaagcgcgggc

SEQ ID NO: 17174 - DNA, 16 bp, Artificial Sequence
  Synthetic
cagacgagcggccgtt

SEQ ID NO: 17175 - DNA, 17 bp, Artificial Sequence
  Synthetic
tgtgcgcgagtttgctc

SEQ ID NO: 17176 - DNA, 19 bp, Artificial Sequence
  Synthetic
tacccgaccatgcagatca

SEQ ID NO: 17177 - DNA, 16 bp, Artificial Sequence
  Synthetic
gtgcagaccgacccct

SEQ ID NO: 17178 - DNA, 19 bp, Artificial Sequence
  Synthetic
actgttgcagagagatggc

SEQ ID NO: 17179 - DNA, 20 bp, Artificial Sequence
  Synthetic
catcaattttgcgtccctgg

SEQ ID NO: 17180 - DNA, 16 bp, Artificial Sequence
  Synthetic
ccgtgcagcgcgagat

SEQ ID NO: 17181 - DNA, 16 bp, Artificial Sequence
  Synthetic
cagctccggtcgtgca

SEQ ID NO: 17182 - DNA, 16 bp, Artificial Sequence
  Synthetic
ccgggtctggtgcagt

SEQ ID NO: 17183 - DNA, 22 bp, Artificial Sequence
  Synthetic
caaaacaaactaatgctggaaa

SEQ ID NO: 17184 - DNA, 20 bp, Artificial Sequence
  Synthetic
tgtggttgacttacaagaca

SEQ ID NO: 17185 - DNA, 18 bp, Artificial Sequence
  Synthetic
ttgtacctgcccgactcc

SEQ ID NO: 17186 - DNA, 20 bp, Artificial Sequence
  Synthetic
cacctacgagtggaacttcc

SEQ ID NO: 17187 - DNA, 19 bp, Artificial Sequence
  Synthetic
gttcgactcctcggttagc

SEQ ID NO: 17188 - DNA, 16 bp, Artificial Sequence
  Synthetic
ccctgcccttccagca

SEQ ID NO: 17189 - DNA, 20 bp, Artificial Sequence
  Synthetic
tgaagttttcgacgtggtca

SEQ ID NO: 17190 - DNA, 16 bp, Artificial Sequence
  Synthetic
gctcgcgcacctgcta

SEQ ID NO: 17191 - DNA, 18 bp, Artificial Sequence
  Synthetic
gggaaccccaccatgaac

SEQ ID NO: 17192 - DNA, 19 bp, Artificial Sequence
  Synthetic
tgcggtactggtacttggg

SEQ ID NO: 17193 - DNA, 19 bp, Artificial Sequence
  Synthetic
ctgtggggcttgtggttac

SEQ ID NO: 17194 - DNA, 16 bp, Artificial Sequence
  Synthetic
gcgctgaccgttctcg

SEQ ID NO: 17195 - DNA, 20 bp, Artificial Sequence
  Synthetic
tttggaagatctcggtctgc

SEQ ID NO: 17196 - DNA, 20 bp, Artificial Sequence
  Synthetic
tgtttggtctttctgggctg

SEQ ID NO: 17197 - DNA, 20 bp, Artificial Sequence
  Synthetic
gcaacccaaaatcaagcagg

SEQ ID NO: 17198 - DNA, 19 bp, Artificial Sequence
  Synthetic
gttacactagcgccctggt

SEQ ID NO: 17199 - DNA, 18 bp, Artificial Sequence
  Synthetic
ttggaatgtatgcgccgc

SEQ ID NO: 17200 - DNA, 19 bp, Artificial Sequence
  Synthetic
gacgagaacctgaaggagc

SEQ ID NO: 17201 - DNA, 19 bp, Artificial Sequence
  Synthetic
agctggccaactacattgc

SEQ ID NO: 17202 - DNA, 20 bp, Artificial Sequence
  Synthetic
tctttgaggaccaattgcgc

SEQ ID NO: 17203 - DNA, 17 bp, Artificial Sequence
  Synthetic
gcaggcaacagagcagc

SEQ ID NO: 17204 - DNA, 18 bp, Artificial Sequence
  Synthetic
cttgaccaccagggagct

SEQ ID NO: 17205 - DNA, 20 bp, Artificial Sequence
  Synthetic
actaccgtactacttccgcg

SEQ ID NO: 17206 - DNA, 20 bp, Artificial Sequence
  Synthetic
cagttcgtggaggagtttgt

SEQ ID NO: 17207 - DNA, 18 bp, Artificial Sequence
  Synthetic
cccgaagttgcatgagaa

SEQ ID NO: 17208 - DNA, 22 bp, Artificial Sequence
  Synthetic
tatctgctgggttagatattgc

SEQ ID NO: 17209 - DNA, 19 bp, Artificial Sequence
  Synthetic
ctaccaaggagaacatggt

SEQ ID NO: 17210 - DNA, 21 bp, Artificial Sequence
  Synthetic
ccagttacatggtatgatgga

SEQ ID NO: 17211 - DNA, 20 bp, Artificial Sequence
  Synthetic
gtgtcagtcaaaaccttgtt

SEQ ID NO: 17212 - DNA, 22 bp, Artificial Sequence
  Synthetic
gataaggcaaatcgttacagaa

SEQ ID NO: 17213 - DNA, 24 bp, Artificial Sequence
  Synthetic
ctcaggtttgcatattcaaattac

SEQ ID NO: 17214 - DNA, 18 bp, Artificial Sequence
  Synthetic
gccattccccacctacct

SEQ ID NO: 17215 - DNA, 23 bp, Artificial Sequence
  Synthetic
ttcctattacttggtaattgtgg

SEQ ID NO: 17216 - DNA, 19 bp, Artificial Sequence
  Synthetic
ccccagcagaagcaaaagt

SEQ ID NO: 17217 - DNA, 18 bp, Artificial Sequence
  Synthetic
cttccttactcccccctt

SEQ ID NO: 17218 - DNA, 24 bp, Artificial Sequence
  Synthetic
ggtggaaatatatgtgttagagtt

SEQ ID NO: 17219 - DNA, 21 bp, Artificial Sequence
  Synthetic
tttggtagcctatccaaaacc

SEQ ID NO: 17220 - DNA, 19 bp, Artificial Sequence
  Synthetic
cacattctcccaccaccag

SEQ ID NO: 17221 - DNA, 19 bp, Artificial Sequence
  Synthetic
gcaccgcattctaatttcg

SEQ ID NO: 17222 - DNA, 20 bp, Artificial Sequence
  Synthetic
aggcacactgacatacatct

SEQ ID NO: 17223 - DNA, 19 bp, Artificial Sequence
  Synthetic
tgcgaattcccctcaacac

SEQ ID NO: 17224 - DNA, 20 bp, Artificial Sequence
  Synthetic
catcatgttacattcctgca

SEQ ID NO: 17225 - DNA, 19 bp, Artificial Sequence
  Synthetic
ctgcatgctggaataagct

SEQ ID NO: 17226 - DNA, 19 bp, Artificial Sequence
  Synthetic
gtccgtgtgattaaagagc

SEQ ID NO: 17227 - DNA, 18 bp, Artificial Sequence
  Synthetic
cagtacaagcgccaacag

SEQ ID NO: 17228 - DNA, 18 bp, Artificial Sequence
  Synthetic
ttataatggccgggctac

SEQ ID NO: 17229 - DNA, 18 bp, Artificial Sequence
  Synthetic
ccattgttccaagggcaa

SEQ ID NO: 17230 - DNA, 20 bp, Artificial Sequence
  Synthetic
atactcagagacccagttca

SEQ ID NO: 17231 - DNA, 25 bp, Artificial Sequence
  Synthetic
ttgatcatacagacataacatttgg

SEQ ID NO: 17232 - DNA, 18 bp, Artificial Sequence
  Synthetic
ggccgacagaaaacagag

SEQ ID NO: 17233 - DNA, 19 bp, Artificial Sequence
  Synthetic
tctcagatgtcatcggact

SEQ ID NO: 17234 - DNA, 20 bp, Artificial Sequence
  Synthetic
ggagtggaatctctaggaga

SEQ ID NO: 17235 - DNA, 24 bp, Artificial Sequence
  Synthetic
gagggtagaacaaataataatgga

SEQ ID NO: 17236 - DNA, 18 bp, Artificial Sequence
  Synthetic
tcgaagaccacaacacca

SEQ ID NO: 17237 - DNA, 18 bp, Artificial Sequence
  Synthetic
cgggaaaacgggaaatcc

SEQ ID NO: 17238 - DNA, 20 bp, Artificial Sequence
  Synthetic
aaatggctgaaacatacagg

SEQ ID NO: 17239 - DNA, 22 bp, Artificial Sequence
  Synthetic
gcattgacctcaaaataactgt

SEQ ID NO: 17240 - DNA, 24 bp, Artificial Sequence
  Synthetic
tggaacatcactaggtacaattac

SEQ ID NO: 17241 - DNA, 21 bp, Artificial Sequence
  Synthetic
caggcacattatccaaaactc

SEQ ID NO: 17242 - DNA, 25 bp, Artificial Sequence
  Synthetic
tcagttcaaataagaaaaacgtagg

SEQ ID NO: 17243 - DNA, 25 bp, Artificial Sequence
  Synthetic
atccctgataacaataactaatgac

SEQ ID NO: 17244 - DNA, 25 bp, Artificial Sequence
  Synthetic
ctctactctgctaatataacagaaa

SEQ ID NO: 17245 - DNA, 18 bp, Artificial Sequence
  Synthetic
catccacatgtacatgcg

SEQ ID NO: 17246 - DNA, 24 bp, Artificial Sequence
  Synthetic
catacaacaatcaaatctatccac

SEQ ID NO: 17247 - DNA, 21 bp, Artificial Sequence
  Synthetic
gaaaacaccattgctattcac

SEQ ID NO: 17248 - DNA, 23 bp, Artificial Sequence
  Synthetic
ggtaatttctcatacctatgaca

SEQ ID NO: 17249 - DNA, 22 bp, Artificial Sequence
  Synthetic
acttttgaccatcctttttctg

SEQ ID NO: 17250 - DNA, 23 bp, Artificial Sequence
  Synthetic
gaaggtaggctacttaaactagg

SEQ ID NO: 17251 - DNA, 19 bp, Artificial Sequence
  Synthetic
ccactatctcctgatgcag

SEQ ID NO: 17252 - DNA, 19 bp, Artificial Sequence
  Synthetic
cccggcagatcaaaatcag

SEQ ID NO: 17253 - DNA, 25 bp, Artificial Sequence
  Synthetic
gtattaatgtattgtgatgttgtcg

SEQ ID NO: 17254 - DNA, 19 bp, Artificial Sequence
  Synthetic
aagatgagagcagtccagg

SEQ ID NO: 17255 - DNA, 20 bp, Artificial Sequence
  Synthetic
tcttgcagctgttaaagttg

SEQ ID NO: 17256 - DNA, 23 bp, Artificial Sequence
  Synthetic
aagggaaaaattggttaagatgt

SEQ ID NO: 17257 - DNA, 25 bp, Artificial Sequence
  Synthetic
gagtatatgtgttcagtagaattgg

SEQ ID NO: 17258 - DNA, 19 bp, Artificial Sequence
  Synthetic
gggcttatggaactgatga

SEQ ID NO: 17259 - DNA, 21 bp, Artificial Sequence
  Synthetic
ttcgggggtattctaatcaat

SEQ ID NO: 17260 - DNA, 21 bp, Artificial Sequence
  Synthetic
tgagagtaagaggtataggga

SEQ ID NO: 17261 - DNA, 22 bp, Artificial Sequence
  Synthetic
ttatcacaccaattgagacttt

SEQ ID NO: 17262 - DNA, 18 bp, Artificial Sequence
  Synthetic
ggatgtcaatccgacctt

SEQ ID NO: 17263 - DNA, 20 bp, Artificial Sequence
  Synthetic
atcacacccaggaatctttg

SEQ ID NO: 17264 - DNA, 22 bp, Artificial Sequence
  Synthetic
ggatgtgatagaatcaatggat

SEQ ID NO: 17265 - DNA, 22 bp, Artificial Sequence
  Synthetic
acactagcgagaaatatttgtg

SEQ ID NO: 17266 - DNA, 18 bp, Artificial Sequence
  Synthetic
ctgagcattgcacccata

SEQ ID NO: 17267 - DNA, 21 bp, Artificial Sequence
  Synthetic
tcttaggagtctcaatcctga

SEQ ID NO: 17268 - DNA, 22 bp, Artificial Sequence
  Synthetic
gatttgtagccaattttagcat

SEQ ID NO: 17269 - DNA, 19 bp, Artificial Sequence
  Synthetic
tctccacattccagaagtc

SEQ ID NO: 17270 - DNA, 21 bp, Artificial Sequence
  Synthetic
gggaattcttgaagatgaaca

SEQ ID NO: 17271 - DNA, 18 bp, Artificial Sequence
  Synthetic
gtagggtcagcaaagcac

SEQ ID NO: 17272 - DNA, 18 bp, Artificial Sequence
  Synthetic
aaaagtgagggagctgcg

SEQ ID NO: 17273 - DNA, 20 bp, Artificial Sequence
  Synthetic
ggtggttgacctacattgca

SEQ ID NO: 17274 - DNA, 24 bp, Artificial Sequence
  Synthetic
agacatattagaggtgtttaaggt

SEQ ID NO: 17275 - DNA, 19 bp, Artificial Sequence
  Synthetic
tgtgcgatacaaatgtggg

SEQ ID NO: 17276 - DNA, 19 bp, Artificial Sequence
  Synthetic
tgggcatatgacaatgaca

SEQ ID NO: 17277 - DNA, 20 bp, Artificial Sequence
  Synthetic
ggtaccaaaaaaaagctgca

SEQ ID NO: 17278 - DNA, 18 bp, Artificial Sequence
  Synthetic
aggaggaggaggatgagg

SEQ ID NO: 17279 - DNA, 19 bp, Artificial Sequence
  Synthetic
aagggttacaaacaagtgc

SEQ ID NO: 17280 - DNA, 21 bp, Artificial Sequence
  Synthetic
gctttcctatctttcctcact

SEQ ID NO: 17281 - DNA, 19 bp, Artificial Sequence
  Synthetic
gggggattgggtataggca

SEQ ID NO: 17282 - DNA, 18 bp, Artificial Sequence
  Synthetic
gggtctgtgcaggttagc

SEQ ID NO: 17283 - DNA, 19 bp, Artificial Sequence
  Synthetic
gcgctcgggtacactttta

SEQ ID NO: 17284 - DNA, 20 bp, Artificial Sequence
  Synthetic
gtaccagctgtaccatatgt

SEQ ID NO: 17285 - DNA, 18 bp, Artificial Sequence
  Synthetic
cagttcccgtctgcttac

SEQ ID NO: 17286 - DNA, 22 bp, Artificial Sequence
  Synthetic
aataaatctgaagtgccattgg

SEQ ID NO: 17287 - DNA, 25 bp, Artificial Sequence
  Synthetic
ctgattcccaattatttaataagcc

SEQ ID NO: 17288 - DNA, 19 bp, Artificial Sequence
  Synthetic
ttgttggatgactggaact

SEQ ID NO: 17289 - DNA, 20 bp, Artificial Sequence
  Synthetic
tgctacaaaacgcaaaaagc

SEQ ID NO: 17290 - DNA, 20 bp, Artificial Sequence
  Synthetic
tgcaccctgtgagtaagtgt

SEQ ID NO: 17291 - DNA, 18 bp, Artificial Sequence
  Synthetic
gggtgtgtttgacaggtt

SEQ ID NO: 17292 - DNA, 21 bp, Artificial Sequence
  Synthetic
ttggagaaacagtggaattac

SEQ ID NO: 17293 - DNA, 18 bp, Artificial Sequence
  Synthetic
gacgtttgcatccaacac

SEQ ID NO: 17294 - DNA, 19 bp, Artificial Sequence
  Synthetic
gggacggtccagtacttcc

SEQ ID NO: 17295 - DNA, 18 bp, Artificial Sequence
  Synthetic
ccggcccgtcaatcaaag

SEQ ID NO: 17296 - DNA, 21 bp, Artificial Sequence
  Synthetic
tttaccgagtaaaaggttcca

SEQ ID NO: 17297 - DNA, 19 bp, Artificial Sequence
  Synthetic
tgattctggtctcacctgt

SEQ ID NO: 17298 - DNA, 18 bp, Artificial Sequence
  Synthetic
cgcggttcgatgtagggt

SEQ ID NO: 17299 - DNA, 20 bp, Artificial Sequence
  Synthetic
catgtggctgagcaaaaagg

SEQ ID NO: 17300 - DNA, 17 bp, Artificial Sequence
  Synthetic
aggttcctgcggaggtg

SEQ ID NO: 17301 - DNA, 17 bp, Artificial Sequence
  Synthetic
tacttgaggagccggcg

SEQ ID NO: 17302 - DNA, 16 bp, Artificial Sequence
  Synthetic
ccccttccgcctccaa

SEQ ID NO: 17303 - DNA, 18 bp, Artificial Sequence
  Synthetic
gtcgtcacgctccacaac

SEQ ID NO: 17304 - DNA, 18 bp, Artificial Sequence
  Synthetic
gtcctcgaattcgtggcc

SEQ ID NO: 17305 - DNA, 20 bp, Artificial Sequence
  Synthetic
cggtgcgaaatgaagagtgt

SEQ ID NO: 17306 - DNA, 20 bp, Artificial Sequence
  Synthetic
tgagaagcagtttcaggacg

SEQ ID NO: 17307 - DNA, 19 bp, Artificial Sequence
  Synthetic
ttatcaggtacgtgctgtt

SEQ ID NO: 17308 - DNA, 16 bp, Artificial Sequence
  Synthetic
cgatggagcgcatgcc

SEQ ID NO: 17309 - DNA, 18 bp, Artificial Sequence
  Synthetic
cccgttgcagtgattcgg

SEQ ID NO: 17310 - DNA, 17 bp, Artificial Sequence
  Synthetic
gtcccgttgtgcgttgt

SEQ ID NO: 17311 - DNA, 19 bp, Artificial Sequence
  Synthetic
cagacggtgtcagtcaagg

SEQ ID NO: 17312 - DNA, 20 bp, Artificial Sequence
  Synthetic
ccaacagtagtccctctgcc

SEQ ID NO: 17313 - DNA, 19 bp, Artificial Sequence
  Synthetic
cgtcctccccctgaaaagc

SEQ ID NO: 17314 - DNA, 17 bp, Artificial Sequence
  Synthetic
cgtagctggcggttctg

SEQ ID NO: 17315 - DNA, 16 bp, Artificial Sequence
  Synthetic
agccacgcgctagcac

SEQ ID NO: 17316 - DNA, 20 bp, Artificial Sequence
  Synthetic
aaaggggatcaaattggccc

SEQ ID NO: 17317 - DNA, 18 bp, Artificial Sequence
  Synthetic
cgaggcctgcgtaacttg

SEQ ID NO: 17318 - DNA, 19 bp, Artificial Sequence
  Synthetic
ctgtccttagttggcgccg

SEQ ID NO: 17319 - DNA, 18 bp, Artificial Sequence
  Synthetic
cggcggtaacaaaggacg

SEQ ID NO: 17320 - DNA, 18 bp, Artificial Sequence
  Synthetic
gacgcaaagacgctcctg

SEQ ID NO: 17321 - DNA, 20 bp, Artificial Sequence
  Synthetic
cagagagcctagaatcacgc

SEQ ID NO: 17322 - DNA, 19 bp, Artificial Sequence
  Synthetic
ccccacacgccatagacat

SEQ ID NO: 17323 - DNA, 20 bp, Artificial Sequence
  Synthetic
ctttccacacgcaatgaagc

SEQ ID NO: 17324 - DNA, 20 bp, Artificial Sequence
  Synthetic
ttgtatgccagaagcctcct

SEQ ID NO: 17325 - DNA, 16 bp, Artificial Sequence
  Synthetic
cgctgtgcgccctcaa

SEQ ID NO: 17326 - DNA, 17 bp, Artificial Sequence
  Synthetic
tgctgctcctgctcctc

SEQ ID NO: 17327 - DNA, 18 bp, Artificial Sequence
  Synthetic
cggagacacaggatggga

SEQ ID NO: 17328 - DNA, 16 bp, Artificial Sequence
  Synthetic
acggtgcccagtgggt

SEQ ID NO: 17329 - DNA, 20 bp, Artificial Sequence
  Synthetic
gagacagctctgattcacgg

SEQ ID NO: 17330 - DNA, 17 bp, Artificial Sequence
  Synthetic
aagcgtcggagagctgg

SEQ ID NO: 17331 - DNA, 17 bp, Artificial Sequence
  Synthetic
ggacggagtgatggcct

SEQ ID NO: 17332 - DNA, 19 bp, Artificial Sequence
  Synthetic
agtccggagaagatagggc

SEQ ID NO: 17333 - DNA, 18 bp, Artificial Sequence
  Synthetic
gcagggatgtctgaggag

SEQ ID NO: 17334 - DNA, 19 bp, Artificial Sequence
  Synthetic
cggggtggtaactacctgc

SEQ ID NO: 17335 - DNA, 20 bp, Artificial Sequence
  Synthetic
cagacagtgggtatggcaat

SEQ ID NO: 17336 - DNA, 21 bp, Artificial Sequence
  Synthetic
catagaaccaccaaaactgag

SEQ ID NO: 17337 - DNA, 22 bp, Artificial Sequence
  Synthetic
tcaggtttctaagacatcaagg

SEQ ID NO: 17338 - DNA, 20 bp, Artificial Sequence
  Synthetic
agtgagcatagacagaaagc

SEQ ID NO: 17339 - DNA, 19 bp, Artificial Sequence
  Synthetic
tgctgtttaaggcccgaga

SEQ ID NO: 17340 - DNA, 20 bp, Artificial Sequence
  Synthetic
tggctgggactgttattcac

SEQ ID NO: 17341 - DNA, 18 bp, Artificial Sequence
  Synthetic
gcctttgtaacactgtgg

SEQ ID NO: 17342 - DNA, 19 bp, Artificial Sequence
  Synthetic
tggggtcatgatgatgttc

SEQ ID NO: 17343 - DNA, 18 bp, Artificial Sequence
  Synthetic
caggagcgtcacatccca

SEQ ID NO: 17344 - DNA, 19 bp, Artificial Sequence
  Synthetic
gttgcccccagcttctact

SEQ ID NO: 17345 - DNA, 18 bp, Artificial Sequence
  Synthetic
gtggcggcctaatgaaag

SEQ ID NO: 17346 - DNA, 18 bp, Artificial Sequence
  Synthetic
gaggacggggatatggtt

SEQ ID NO: 17347 - DNA, 22 bp, Artificial Sequence
  Synthetic
ggaatatctcaggcatatggag

SEQ ID NO: 17348 - DNA, 22 bp, Artificial Sequence
  Synthetic
acatgtatggtatgtatcccct

SEQ ID NO: 17349 - DNA, 23 bp, Artificial Sequence
  Synthetic
aaacttactagatgatagcgatg

SEQ ID NO: 17350 - DNA, 22 bp, Artificial Sequence
  Synthetic
acagtggaatagaaaatgaagc

SEQ ID NO: 17351 - DNA, 25 bp, Artificial Sequence
  Synthetic
ggtttctcatatgaattcaaaaagc

SEQ ID NO: 17352 - DNA, 24 bp, Artificial Sequence
  Synthetic
tcatgagaaaagaaggaatactgt

SEQ ID NO: 17353 - DNA, 20 bp, Artificial Sequence
  Synthetic
atcagctcttcctaccccac

SEQ ID NO: 17354 - DNA, 23 bp, Artificial Sequence
  Synthetic
aataaagtagaggaaacaacact

SEQ ID NO: 17355 - DNA, 19 bp, Artificial Sequence
  Synthetic
ggtcactcctgaagtagtg

SEQ ID NO: 17356 - DNA, 19 bp, Artificial Sequence
  Synthetic
gaaaatcccgcctttacca

SEQ ID NO: 17357 - DNA, 19 bp, Artificial Sequence
  Synthetic
tggtgtggctcttagagtg

SEQ ID NO: 17358 - DNA, 19 bp, Artificial Sequence
  Synthetic
atcttccaccttccagacc

SEQ ID NO: 17359 - DNA, 21 bp, Artificial Sequence
  Synthetic
gaaactgaaaggtattgaggt

SEQ ID NO: 17360 - DNA, 19 bp, Artificial Sequence
  Synthetic
ctgcccacctcttgaatta

SEQ ID NO: 17361 - DNA, 23 bp, Artificial Sequence
  Synthetic
gggttgtaggtgaaaatattcct

SEQ ID NO: 17362 - DNA, 18 bp, Artificial Sequence
  Synthetic
ccacacgttgtcctgatc

SEQ ID NO: 17363 - DNA, 23 bp, Artificial Sequence
  Synthetic
actgtgaatttaatgtgaaatgc

SEQ ID NO: 17364 - DNA, 23 bp, Artificial Sequence
  Synthetic
ttgcaagaaattgatattcgttg

SEQ ID NO: 17365 - DNA, 23 bp, Artificial Sequence
  Synthetic
gtgagaatgagcatgatactttg

SEQ ID NO: 17366 - DNA, 23 bp, Artificial Sequence
  Synthetic
attgaaaagacgattgttgtttc

SEQ ID NO: 17367 - DNA, 25 bp, Artificial Sequence
  Synthetic
taacaaatgcctcttatatgtatgg

SEQ ID NO: 17368 - DNA, 18 bp, Artificial Sequence
  Synthetic
gacgacgacgacgaagag

SEQ ID NO: 17369 - DNA, 25 bp, Artificial Sequence
  Synthetic
gaacataaagaatctagtagcaagc

SEQ ID NO: 17370 - DNA, 25 bp, Artificial Sequence
  Synthetic
aataaagtagaaggtaatacatggg

SEQ ID NO: 17371 - DNA, 20 bp, Artificial Sequence
  Synthetic
tgttatagacacaggcacat

SEQ ID NO: 17372 - DNA, 18 bp, Artificial Sequence
  Synthetic
actgctgtgcaaactcat

SEQ ID NO: 17373 - DNA, 23 bp, Artificial Sequence
  Synthetic
ttgcactttatacatctaggttt

SEQ ID NO: 17374 - DNA, 22 bp, Artificial Sequence
  Synthetic
attaatacattaccctgtgcag

SEQ ID NO: 17375 - DNA, 25 bp, Artificial Sequence
  Synthetic
attgttggaactgatttatacttcc

SEQ ID NO: 17376 - DNA, 23 bp, Artificial Sequence
  Synthetic
ggtattgaaattgatagaggtgg

SEQ ID NO: 17377 - DNA, 22 bp, Artificial Sequence
  Synthetic
tattttaatcctaatggccagg

SEQ ID NO: 17378 - DNA, 23 bp, Artificial Sequence
  Synthetic
tattttgcatgtgaaatggaaca

SEQ ID NO: 17379 - DNA, 20 bp, Artificial Sequence
  Synthetic
tgaacaggccaaaaatgaac

SEQ ID NO: 17380 - DNA, 18 bp, Artificial Sequence
  Synthetic
agggctcaacctttcaga

SEQ ID NO: 17381 - DNA, 20 bp, Artificial Sequence
  Synthetic
caactgtggaaaactccatt

SEQ ID NO: 17382 - DNA, 25 bp, Artificial Sequence
  Synthetic
tgcagatttcttaaaattagagagg

SEQ ID NO: 17383 - DNA, 18 bp, Artificial Sequence
  Synthetic
ccagaccggatgatggaa

SEQ ID NO: 17384 - DNA, 23 bp, Artificial Sequence
  Synthetic
taaaggacaagaaatgtgatgtc

SEQ ID NO: 17385 - DNA, 18 bp, Artificial Sequence
  Synthetic
cattttggcgccaactct

SEQ ID NO: 17386 - DNA, 18 bp, Artificial Sequence
  Synthetic
ggggtgtgtagacattgc

SEQ ID NO: 17387 - DNA, 20 bp, Artificial Sequence
  Synthetic
ctgacgctgctattagaagt

SEQ ID NO: 17388 - DNA, 25 bp, Artificial Sequence
  Synthetic
tcaaatttgttaaatgatgaggagg

SEQ ID NO: 17389 - DNA, 22 bp, Artificial Sequence
  Synthetic
tgattggattgtaaatcagacc

SEQ ID NO: 17390 - DNA, 21 bp, Artificial Sequence
  Synthetic
atggtacccctgtatttcaac

SEQ ID NO: 17391 - DNA, 23 bp, Artificial Sequence
  Synthetic
caagctttattattttttgcacg

SEQ ID NO: 17392 - DNA, 24 bp, Artificial Sequence
  Synthetic
tttgtagactcagatgatatgtgg

SEQ ID NO: 17393 - DNA, 17 bp, Artificial Sequence
  Synthetic
ccacggggctacgagaa

SEQ ID NO: 17394 - DNA, 17 bp, Artificial Sequence
  Synthetic
gggaagcgagcacctca

SEQ ID NO: 17395 - DNA, 21 bp, Artificial Sequence
  Synthetic
agagtacaaacagttagtgga

SEQ ID NO: 17396 - DNA, 23 bp, Artificial Sequence
  Synthetic
gaatctgcattaactgatcatgt

SEQ ID NO: 17397 - DNA, 18 bp, Artificial Sequence
  Synthetic
gccctcacgtttagttcg

SEQ ID NO: 17398 - DNA, 25 bp, Artificial Sequence
  Synthetic
agtgcatttttatacagatcttagc

SEQ ID NO: 17399 - DNA, 21 bp, Artificial Sequence
  Synthetic
gcgttctaccacatttactgt

SEQ ID NO: 17400 - DNA, 19 bp, Artificial Sequence
  Synthetic
cctgcaactggtaaggtat

SEQ ID NO: 17401 - DNA, 24 bp, Artificial Sequence
  Synthetic
ccagaaaaggaaagattagtatgg

SEQ ID NO: 17402 - DNA, 18 bp, Artificial Sequence
  Synthetic
aatgttatgccaggcact

SEQ ID NO: 17403 - DNA, 19 bp, Artificial Sequence
  Synthetic
tcttacatcacaggcaaca

SEQ ID NO: 17404 - DNA, 20 bp, Artificial Sequence
  Synthetic
acagaaaataacagggtccc

SEQ ID NO: 17405 - DNA, 18 bp, Artificial Sequence
  Synthetic
gaaggggtcttgcaagga

SEQ ID NO: 17406 - DNA, 23 bp, Artificial Sequence
  Synthetic
agacattaaacgaaaaacagatg

SEQ ID NO: 17407 - DNA, 23 bp, Artificial Sequence
  Synthetic
tacaagaaaatgtagaagacctt

SEQ ID NO: 17408 - DNA, 19 bp, Artificial Sequence
  Synthetic
gcaggtaaacgaggaatgt

SEQ ID NO: 17409 - DNA, 18 bp, Artificial Sequence
  Synthetic
aaaaccacgctaaaaccg

SEQ ID NO: 17410 - DNA, 19 bp, Artificial Sequence
  Synthetic
ttttaccgaactggatggg

SEQ ID NO: 17411 - DNA, 23 bp, Artificial Sequence
  Synthetic
agtgttattgatattcaaacgcc

SEQ ID NO: 17412 - DNA, 19 bp, Artificial Sequence
  Synthetic
gggcgcgagatttgtacaa

SEQ ID NO: 17413 - DNA, 18 bp, Artificial Sequence
  Synthetic
cagtgacggaagacctag

SEQ ID NO: 17414 - DNA, 18 bp, Artificial Sequence
  Synthetic
ccttagggcaacattggg

SEQ ID NO: 17415 - DNA, 21 bp, Artificial Sequence
  Synthetic
aaaacgtgaacaagtctatgc

SEQ ID NO: 17416 - DNA, 18 bp, Artificial Sequence
  Synthetic
tagcctttgtaccagcac

SEQ ID NO: 17417 - DNA, 18 bp, Artificial Sequence
  Synthetic
gatgagctggaggaggag

SEQ ID NO: 17418 - DNA, 25 bp, Artificial Sequence
  Synthetic
gggtcagttatttcaaatctaatag

SEQ ID NO: 17419 - DNA, 23 bp, Artificial Sequence
  Synthetic
tccaaaaaaacgtttatttgagg

SEQ ID NO: 17420 - DNA, 20 bp, Artificial Sequence
  Synthetic
atttgtgtttggtcaaatgc

SEQ ID NO: 17421 - DNA, 19 bp, Artificial Sequence
  Synthetic
cagcaagaaaacgaagagt

SEQ ID NO: 17422 - DNA, 19 bp, Artificial Sequence
  Synthetic
tattttgggggtttgggaa

SEQ ID NO: 17423 - DNA, 19 bp, Artificial Sequence
  Synthetic
cagaaggtgttccagagac

SEQ ID NO: 17424 - DNA, 23 bp, Artificial Sequence
  Synthetic
ttgttattcaatcaagaacttgc

SEQ ID NO: 17425 - DNA, 21 bp, Artificial Sequence
  Synthetic
agaattaggtagaggaggtcc

SEQ ID NO: 17426 - DNA, 21 bp, Artificial Sequence
  Synthetic
gcacacaagaattcaagatgg

SEQ ID NO: 17427 - DNA, 21 bp, Artificial Sequence
  Synthetic
aagcgattttaaccagtacac

SEQ ID NO: 17428 - DNA, 20 bp, Artificial Sequence
  Synthetic
ttttgccaaatgtactgtga

SEQ ID NO: 17429 - DNA, 20 bp, Artificial Sequence
  Synthetic
cagaggcgattgttataccg

SEQ ID NO: 17430 - DNA, 24 bp, Artificial Sequence
  Synthetic
ctttacctgaggtgattattaggt

SEQ ID NO: 17431 - DNA, 19 bp, Artificial Sequence
  Synthetic
acttcttgtgcaaactgtg

SEQ ID NO: 17432 - DNA, 18 bp, Artificial Sequence
  Synthetic
ggcaaaacggagactgtt

SEQ ID NO: 17433 - DNA, 24 bp, Artificial Sequence
  Synthetic
taatttcatgatgggagaatttcc

SEQ ID NO: 17434 - DNA, 20 bp, Artificial Sequence
  Synthetic
ctagctctacaaggccaacc

SEQ ID NO: 17435 - DNA, 18 bp, Artificial Sequence
  Synthetic
tagaacggttgcgagaac

SEQ ID NO: 17436 - DNA, 18 bp, Artificial Sequence
  Synthetic
gggcataggtactggcaa

SEQ ID NO: 17437 - DNA, 21 bp, Artificial Sequence
  Synthetic
ccatcagttgttagtacctct

SEQ ID NO: 17438 - DNA, 21 bp, Artificial Sequence
  Synthetic
tatagggggacaatatgagga

SEQ ID NO: 17439 - DNA, 23 bp, Artificial Sequence
  Synthetic
taacaaatacatgagcaaacagt

SEQ ID NO: 17440 - DNA, 23 bp, Artificial Sequence
  Synthetic
tgtcaattttgtaaagtttcagg

SEQ ID NO: 17441 - DNA, 25 bp, Artificial Sequence
  Synthetic
tccttatgccagatataatttttgg

SEQ ID NO: 17442 - DNA, 25 bp, Artificial Sequence
  Synthetic
caactatatctactgactcatttgg

SEQ ID NO: 17443 - DNA, 20 bp, Artificial Sequence
  Synthetic
cgccaaaaggaagtaaagac

SEQ ID NO: 17444 - DNA, 21 bp, Artificial Sequence
  Synthetic
cgagtgacatcaaaatcatgg

SEQ ID NO: 17445 - DNA, 18 bp, Artificial Sequence
  Synthetic
gagagaaagtcggaaccc

SEQ ID NO: 17446 - DNA, 18 bp, Artificial Sequence
  Synthetic
gagtcagctggtgtggat

SEQ ID NO: 17447 - DNA, 22 bp, Artificial Sequence
  Synthetic
cgttttctgtacaaagaaacct

SEQ ID NO: 17448 - DNA, 19 bp, Artificial Sequence
  Synthetic
tttcaaccgaaaacggtac

SEQ ID NO: 17449 - DNA, 23 bp, Artificial Sequence
  Synthetic
acggtaaagtaacaactattcca

SEQ ID NO: 17450 - DNA, 18 bp, Artificial Sequence
  Synthetic
gacagggagacagctcag

SEQ ID NO: 17451 - DNA, 18 bp, Artificial Sequence
  Synthetic
gatggaggctcacagact

SEQ ID NO: 17452 - DNA, 20 bp, Artificial Sequence
  Synthetic
aatacagcacagttttcagg

SEQ ID NO: 17453 - DNA, 25 bp, Artificial Sequence
  Synthetic
cacacatatgtagtaaagtagatga

SEQ ID NO: 17454 - DNA, 24 bp, Artificial Sequence
  Synthetic
attatacagactttaatgacgagg

SEQ ID NO: 17455 - DNA, 18 bp, Artificial Sequence
  Synthetic
tattttgctgctacgcct

SEQ ID NO: 17456 - DNA, 22 bp, Artificial Sequence
  Synthetic
atgctgtgtggttaataaacac

SEQ ID NO: 17457 - DNA, 18 bp, Artificial Sequence
  Synthetic
ggctctgtccatgttagt

SEQ ID NO: 17458 - DNA, 22 bp, Artificial Sequence
  Synthetic
tggataatccagtctttgagga

SEQ ID NO: 17459 - DNA, 22 bp, Artificial Sequence
  Synthetic
cacatgatgtggttatacatgg

SEQ ID NO: 17460 - DNA, 18 bp, Artificial Sequence
  Synthetic
ctcacgtttgcttgctgt

SEQ ID NO: 17461 - DNA, 19 bp, Artificial Sequence
  Synthetic
acagggacacaataatggc

SEQ ID NO: 17462 - DNA, 25 bp, Artificial Sequence
  Synthetic
catactatgaactccactttacttg

SEQ ID NO: 17463 - DNA, 21 bp, Artificial Sequence
  Synthetic
actactactaaaaaacgctcg

SEQ ID NO: 17464 - DNA, 18 bp, Artificial Sequence
  Synthetic
ggttgtgtccctaggcat

SEQ ID NO: 17465 - DNA, 18 bp, Artificial Sequence
  Synthetic
gtaagacgcctcgcctta

SEQ ID NO: 17466 - DNA, 22 bp, Artificial Sequence
  Synthetic
atatcggtgcatatataagtgc

SEQ ID NO: 17467 - DNA, 18 bp, Artificial Sequence
  Synthetic
aagtgtgcaggacattgt

SEQ ID NO: 17468 - DNA, 18 bp, Artificial Sequence
  Synthetic
aaaattgtgtgccccaac

SEQ ID NO: 17469 - DNA, 22 bp, Artificial Sequence
  Synthetic
gtacccgaatggattaaaagac

SEQ ID NO: 17470 - DNA, 20 bp, Artificial Sequence
  Synthetic
agtcatttttggttatcgcc

SEQ ID NO: 17471 - DNA, 23 bp, Artificial Sequence
  Synthetic
aaagtgtttacgttttcaaatcc

SEQ ID NO: 17472 - DNA, 20 bp, Artificial Sequence
  Synthetic
acataaggcacgtgaaatgg

SEQ ID NO: 17473 - DNA, 22 bp, Artificial Sequence
  Synthetic
tacaaaacatgtaagcaaagtg

SEQ ID NO: 17474 - DNA, 25 bp, Artificial Sequence
  Synthetic
gattcttctatagtttcattagtgg

SEQ ID NO: 17475 - DNA, 20 bp, Artificial Sequence
  Synthetic
agaatttcagcacagtgact

SEQ ID NO: 17476 - DNA, 22 bp, Artificial Sequence
  Synthetic
tatgggtccgattttatattgc

SEQ ID NO: 17477 - DNA, 25 bp, Artificial Sequence
  Synthetic
gtcagtagattataaacaaacacag

SEQ ID NO: 17478 - DNA, 18 bp, Artificial Sequence
  Synthetic
gcagatccctatggcgat

SEQ ID NO: 17479 - DNA, 19 bp, Artificial Sequence
  Synthetic
taatagccactgtgtctcc

SEQ ID NO: 17480 - DNA, 22 bp, Artificial Sequence
  Synthetic
aaaagtgatcagatttgcattg

SEQ ID NO: 17481 - DNA, 19 bp, Artificial Sequence
  Synthetic
acgaattcatcaatgtgcc

SEQ ID NO: 17482 - DNA, 20 bp, Artificial Sequence
  Synthetic
acccaacaataaagaggagc

SEQ ID NO: 17483 - DNA, 21 bp, Artificial Sequence
  Synthetic
gaatgatgccatcaatttcga

SEQ ID NO: 17484 - DNA, 25 bp, Artificial Sequence
  Synthetic
gagagagagaagaagaaaaaagaga

SEQ ID NO: 17485 - DNA, 25 bp, Artificial Sequence
  Synthetic
aaggaggatagagaatttaaacaag

SEQ ID NO: 17486 - DNA, 18 bp, Artificial Sequence
  Synthetic
aacgtatgactacccgca

SEQ ID NO: 17487 - DNA, 22 bp, Artificial Sequence
  Synthetic
ctgagtgacatcaaaatcatgg

SEQ ID NO: 17488 - DNA, 23 bp, Artificial Sequence
  Synthetic
aataaatacctggaagaacatcc

SEQ ID NO: 17489 - DNA, 18 bp, Artificial Sequence
  Synthetic
ctccctaggaggtctgga

SEQ ID NO: 17490 - DNA, 18 bp, Artificial Sequence
  Synthetic
gagtcaactggtgtggat

SEQ ID NO: 17491 - DNA, 25 bp, Artificial Sequence
  Synthetic
ctattggagatgtaaagttagaact

SEQ ID NO: 17492 - DNA, 21 bp, Artificial Sequence
  Synthetic
aaagtactttagtcctagccc

SEQ ID NO: 17493 - DNA, 20 bp, Artificial Sequence
  Synthetic
aacattactgcaaccacatt

SEQ ID NO: 17494 - DNA, 25 bp, Artificial Sequence
  Synthetic
aataaaatatacccaaggtaaggtg

SEQ ID NO: 17495 - DNA, 24 bp, Artificial Sequence
  Synthetic
ctttttttagtaaactgtggaagc

SEQ ID NO: 17496 - DNA, 23 bp, Artificial Sequence
  Synthetic
tcgcatacatttaaaaaacaagg

SEQ ID NO: 17497 - DNA, 18 bp, Artificial Sequence
  Synthetic
ggggatccgagtctccta

SEQ ID NO: 17498 - DNA, 22 bp, Artificial Sequence
  Synthetic
acctcctacatctactcctaag

SEQ ID NO: 17499 - DNA, 18 bp, Artificial Sequence
  Synthetic
tggctcagttgaattgca

SEQ ID NO: 17500 - DNA, 19 bp, Artificial Sequence
  Synthetic
acatcctgttattcctggc

SEQ ID NO: 17501 - DNA, 18 bp, Artificial Sequence
  Synthetic
ggtgctaaggacgctaga

SEQ ID NO: 17502 - DNA, 23 bp, Artificial Sequence
  Synthetic
gtttgagggtaatggtaaaaagt

SEQ ID NO: 17503 - DNA, 25 bp, Artificial Sequence
  Synthetic
cttacagatatattgattctcttgc

SEQ ID NO: 17504 - DNA, 19 bp, Artificial Sequence
  Synthetic
tattgcttttggaggcacc

SEQ ID NO: 17505 - DNA, 24 bp, Artificial Sequence
  Synthetic
acctgttccacaagtactacaaca

SEQ ID NO: 17506 - DNA, 22 bp, Artificial Sequence
  Synthetic
tgctgcagctgtttcatgattt

SEQ ID NO: 17507 - DNA, 25 bp, Artificial Sequence
  Synthetic
gcagagtagcatcatctagaaaacc

SEQ ID NO: 17508 - DNA, 25 bp, Artificial Sequence
  Synthetic
tggcgagcataataatatagcacat

SEQ ID NO: 17509 - DNA, 19 bp, Artificial Sequence
  Synthetic
ggtggggaaacggagtcgc

SEQ ID NO: 17510 - DNA, 20 bp, Artificial Sequence
  Synthetic
ataccccagcaccgaccacc

SEQ ID NO: 17511 - DNA, 25 bp, Artificial Sequence
  Synthetic
tgagcctgattttgaaatgctacaa

SEQ ID NO: 17512 - DNA, 25 bp, Artificial Sequence
  Synthetic
ggacctcccaaagtctctaattcta

SEQ ID NO: 17513 - DNA, 20 bp, Artificial Sequence
  Synthetic
aatgcctcatctggagcagc

SEQ ID NO: 17514 - DNA, 23 bp, Artificial Sequence
  Synthetic
gggttaacaatagtgtgtggcac

SEQ ID NO: 17515 - DNA, 25 bp, Artificial Sequence
  Synthetic
ggatttcctgttaatccaatgccta

SEQ ID NO: 17516 - DNA, 25 bp, Artificial Sequence
  Synthetic
ggccatttaccttatttactggtga

SEQ ID NO: 17517 - DNA, 22 bp, Artificial Sequence
  Synthetic
ccagaatgcatattgtccccag

SEQ ID NO: 17518 - DNA, 25 bp, Artificial Sequence
  Synthetic
gtctgtaactaagtcctaaggatgc

SEQ ID NO: 17519 - DNA, 20 bp, Artificial Sequence
  Synthetic
aatgcctgcaataagcacgc

SEQ ID NO: 17520 - DNA, 24 bp, Artificial Sequence
  Synthetic
ggacaacaaagagaaagtccttcg

SEQ ID NO: 17521 - DNA, 24 bp, Artificial Sequence
  Synthetic
actttcgttttagggcagctattg

SEQ ID NO: 17522 - DNA, 25 bp, Artificial Sequence
  Synthetic
gcgccaagctttctaaagaaagatt

SEQ ID NO: 17523 - DNA, 20 bp, Artificial Sequence
  Synthetic
gcgtgtcttggaggtcgagg

SEQ ID NO: 17524 - DNA, 25 bp, Artificial Sequence
  Synthetic
ccaagtctagacagacctgttgttt

SEQ ID NO: 17525 - DNA, 25 bp, Artificial Sequence
  Synthetic
ctccaggatttactctactaggagt

SEQ ID NO: 17526 - DNA, 20 bp, Artificial Sequence
  Synthetic
acggttggatgtccactagc

SEQ ID NO: 17527 - DNA, 24 bp, Artificial Sequence
  Synthetic
ctctggtgtgtaatgtctccaaag

SEQ ID NO: 17528 - DNA, 20 bp, Artificial Sequence
  Synthetic
agcaaaatccagatcgggcg

SEQ ID NO: 17529 - DNA, 24 bp, Artificial Sequence
  Synthetic
tcgcctatgacttggatgaagtat

SEQ ID NO: 17530 - DNA, 24 bp, Artificial Sequence
  Synthetic
ccgaataggaaagtatgggtgacc

SEQ ID NO: 17531 - DNA, 22 bp, Artificial Sequence
  Synthetic
ggtctaaagatacgtcctggcg

SEQ ID NO: 17532 - DNA, 23 bp, Artificial Sequence
  Synthetic
ggtgttccaaagtacacatgtga

SEQ ID NO: 17533 - DNA, 22 bp, Artificial Sequence
  Synthetic
ggtcctggaggctgtacgacac

SEQ ID NO: 17534 - DNA, 20 bp, Artificial Sequence
  Synthetic
gactccgccaacgatctgcc

SEQ ID NO: 17535 - DNA, 22 bp, Artificial Sequence
  Synthetic
gcgcctaggacagggatgtacc

SEQ ID NO: 17536 - DNA, 22 bp, Artificial Sequence
  Synthetic
cactggttcccaacacctgcta

SEQ ID NO: 17537 - DNA, 19 bp, Artificial Sequence
  Synthetic
ccattgacaaggccggcgc

SEQ ID NO: 17538 - DNA, 22 bp, Artificial Sequence
  Synthetic
cctctcgggacagccactagaa

SEQ ID NO: 17539 - DNA, 22 bp, Artificial Sequence
  Synthetic
gacgtatcttgcacggaggacc

SEQ ID NO: 17540 - DNA, 21 bp, Artificial Sequence
  Synthetic
ggggacatgtccaccctgtct

SEQ ID NO: 17541 - DNA, 20 bp, Artificial Sequence
  Synthetic
gccgcgttgaggtggatcaa

SEQ ID NO: 17542 - DNA, 22 bp, Artificial Sequence
  Synthetic
cacgtttggagtgctgcttcac

SEQ ID NO: 17543 - DNA, 19 bp, Artificial Sequence
  Synthetic
aaatcccgtaggccgccgg

SEQ ID NO: 17544 - DNA, 19 bp, Artificial Sequence
  Synthetic
aacacctgcacctcgccgg

SEQ ID NO: 17545 - DNA, 20 bp, Artificial Sequence
  Synthetic
acaagacaggccctcccgag

SEQ ID NO: 17546 - DNA, 22 bp, Artificial Sequence
  Synthetic
cggtgcgcacacttggatcaat

SEQ ID NO: 17547 - DNA, 21 bp, Artificial Sequence
  Synthetic
cccccttgatgtgttgcaggg

SEQ ID NO: 17548 - DNA, 22 bp, Artificial Sequence
  Synthetic
gcgagacagaatcttgcgggac

SEQ ID NO: 17549 - DNA, 20 bp, Artificial Sequence
  Synthetic
aaacctctctgtcgggggcc

SEQ ID NO: 17550 - DNA, 21 bp, Artificial Sequence
  Synthetic
gggggctagtaactgaggcgg

SEQ ID NO: 17551 - DNA, 22 bp, Artificial Sequence
  Synthetic
cggcacaaacaactcccacaac

SEQ ID NO: 17552 - DNA, 22 bp, Artificial Sequence
  Synthetic
tccctggaaggctgggaagtac

SEQ ID NO: 17553 - DNA, 20 bp, Artificial Sequence
  Synthetic
acacgggcacttgaggtcct

SEQ ID NO: 17554 - DNA, 19 bp, Artificial Sequence
  Synthetic
acaggaggggtctgcgcag

SEQ ID NO: 17555 - DNA, 22 bp, Artificial Sequence
  Synthetic
tgggcgcaagagatctgacttc

SEQ ID NO: 17556 - DNA, 22 bp, Artificial Sequence
  Synthetic
gctctcagtgcggatgtcttgt

SEQ ID NO: 17557 - DNA, 19 bp, Artificial Sequence
  Synthetic
gtcatcgccgcagaccagg

SEQ ID NO: 17558 - DNA, 22 bp, Artificial Sequence
  Synthetic
cgcctgcaagtggagtgagttt

SEQ ID NO: 17559 - DNA, 25 bp, Artificial Sequence
  Synthetic
gctgattttcctcctgttattgctg

SEQ ID NO: 17560 - DNA, 22 bp, Artificial Sequence
  Synthetic
agtctccagctgctttcatttg

SEQ ID NO: 17561 - DNA, 24 bp, Artificial Sequence
  Synthetic
gtgtctattgtgtagcctgttccc

SEQ ID NO: 17562 - DNA, 20 bp, Artificial Sequence
  Synthetic
catggcattctgtgaccctg

SEQ ID NO: 17563 - DNA, 21 bp, Artificial Sequence
  Synthetic
cgtttccacctacgggtaaac

SEQ ID NO: 17564 - DNA, 25 bp, Artificial Sequence
  Synthetic
cccatcccattgttgatcatattgt

SEQ ID NO: 17565 - DNA, 25 bp, Artificial Sequence
  Synthetic
ttctggaatatgcaggtttctcaaa

SEQ ID NO: 17566 - DNA, 22 bp, Artificial Sequence
  Synthetic
aaggttgcaacacttagcgtag

SEQ ID NO: 17567 - DNA, 20 bp, Artificial Sequence
  Synthetic
gcatatctggtcccccctca

SEQ ID NO: 17568 - DNA, 25 bp, Artificial Sequence
  Synthetic
actgtatctcgggttttctttctcc

SEQ ID NO: 17569 - DNA, 23 bp, Artificial Sequence
  Synthetic
cgcttgtattgttgtacgatcct

SEQ ID NO: 17570 - DNA, 24 bp, Artificial Sequence
  Synthetic
atccctgaactacctcttttcgat

SEQ ID NO: 17571 - DNA, 24 bp, Artificial Sequence
  Synthetic
tgccatcctccttctataaaacca

SEQ ID NO: 17572 - DNA, 22 bp, Artificial Sequence
  Synthetic
tttgtggtgtggtgtcattgtg

SEQ ID NO: 17573 - DNA, 23 bp, Artificial Sequence
  Synthetic
aacttgactttgctaagagccat

SEQ ID NO: 17574 - DNA, 25 bp, Artificial Sequence
  Synthetic
tgggtagtaagcctttataacgttt

SEQ ID NO: 17575 - DNA, 20 bp, Artificial Sequence
  Synthetic
cccattatgcctaggccagc

SEQ ID NO: 17576 - DNA, 24 bp, Artificial Sequence
  Synthetic
aaccatggcatctcttataccatc

SEQ ID NO: 17577 - DNA, 25 bp, Artificial Sequence
  Synthetic
gtttgtttgttggtcttctgttggt

SEQ ID NO: 17578 - DNA, 25 bp, Artificial Sequence
  Synthetic
tgggtgtggatatttgtttcactag

SEQ ID NO: 17579 - DNA, 25 bp, Artificial Sequence
  Synthetic
cctgagtaagggatgatttttgcat

SEQ ID NO: 17580 - DNA, 25 bp, Artificial Sequence
  Synthetic
ctgatgaacaatgacttgggatgat

SEQ ID NO: 17581 - DNA, 21 bp, Artificial Sequence
  Synthetic
tgattgagagtgtcccaggtc

SEQ ID NO: 17582 - DNA, 25 bp, Artificial Sequence
  Synthetic
gcaaggtacaaagttgaacacttca

SEQ ID NO: 17583 - DNA, 23 bp, Artificial Sequence
  Synthetic
ttcccttttgacttgtgtgttct

SEQ ID NO: 17584 - DNA, 24 bp, Artificial Sequence
  Synthetic
gcatttgttttgaggattggcaac

SEQ ID NO: 17585 - DNA, 25 bp, Artificial Sequence
  Synthetic
actccatttgataagctgactacag

SEQ ID NO: 17586 - DNA, 23 bp, Artificial Sequence
  Synthetic
actgatcctgcattgtcacagta

SEQ ID NO: 17587 - DNA, 23 bp, Artificial Sequence
  Synthetic
accactcagttgatccttgctta

SEQ ID NO: 17588 - DNA, 20 bp, Artificial Sequence
  Synthetic
cactccaactacaccgaggg

SEQ ID NO: 17589 - DNA, 23 bp, Artificial Sequence
  Synthetic
ctgagttctctttctttgcctgt

SEQ ID NO: 17590 - DNA, 24 bp, Artificial Sequence
  Synthetic
tctgtagtggtatagtgttgtgca

SEQ ID NO: 17591 - DNA, 25 bp, Artificial Sequence
  Synthetic
ggcgatgcaaatagttaacacttaa

SEQ ID NO: 17592 - DNA, 22 bp, Artificial Sequence
  Synthetic
ggaggctgcacgacactcatac

SEQ ID NO: 17593 - DNA, 19 bp, Artificial Sequence
  Synthetic
acgatctgaccgccacccg

SEQ ID NO: 17594 - DNA, 19 bp, Artificial Sequence
  Synthetic
tggcagcgcctccaagagg

SEQ ID NO: 17595 - DNA, 19 bp, Artificial Sequence
  Synthetic
tcgaggcgttaccctcgcg

SEQ ID NO: 17596 - DNA, 20 bp, Artificial Sequence
  Synthetic
ttgtgggatccggagcagct

SEQ ID NO: 17597 - DNA, 21 bp, Artificial Sequence
  Synthetic
tgggcaaaatcggtaaggcgt

SEQ ID NO: 17598 - DNA, 22 bp, Artificial Sequence
  Synthetic
tccgcacactttggtgaatcca

SEQ ID NO: 17599 - DNA, 22 bp, Artificial Sequence
  Synthetic
cggacctgtccctgtcttccag

SEQ ID NO: 17600 - DNA, 19 bp, Artificial Sequence
  Synthetic
acaagaccgtgcgtcccgg

SEQ ID NO: 17601 - DNA, 21 bp, Artificial Sequence
  Synthetic
ggtccgaagatggccaggagt

SEQ ID NO: 17602 - DNA, 22 bp, Artificial Sequence
  Synthetic
cgggagaagacgactggttcca

SEQ ID NO: 17603 - DNA, 22 bp, Artificial Sequence
  Synthetic
cccgtggtagacagtccagcat

SEQ ID NO: 17604 - DNA, 22 bp, Artificial Sequence
  Synthetic
aaagtccaccgctttagccact

SEQ ID NO: 17605 - DNA, 22 bp, Artificial Sequence
  Synthetic
aggaacttgccgtaggtggagt

SEQ ID NO: 17606 - DNA, 21 bp, Artificial Sequence
  Synthetic
cgagctcgtcgcacttcttct

SEQ ID NO: 17607 - DNA, 22 bp, Artificial Sequence
  Synthetic
ggacgagtcgaacatgccggag

SEQ ID NO: 17608 - DNA, 19 bp, Artificial Sequence
  Synthetic
gggtgttggcccatggagg

SEQ ID NO: 17609 - DNA, 21 bp, Artificial Sequence
  Synthetic
tgcttgaactgctcagcgagc

SEQ ID NO: 17610 - DNA, 19 bp, Artificial Sequence
  Synthetic
aaggcagtagcggcaccgg

SEQ ID NO: 17611 - DNA, 18 bp, Artificial Sequence
  Synthetic
tgcatcgctctccggcac

SEQ ID NO: 17612 - DNA, 22 bp, Artificial Sequence
  Synthetic
gtcctaggaccgacgatcctca

SEQ ID NO: 17613 - DNA, 22 bp, Artificial Sequence
  Synthetic
cgggtactcgtggagtcctact

SEQ ID NO: 17614 - DNA, 22 bp, Artificial Sequence
  Synthetic
agcggatcgaaggagtccagaa

SEQ ID NO: 17615 - DNA, 20 bp, Artificial Sequence
  Synthetic
gccggaagttgaggagctgc

SEQ ID NO: 17616 - DNA, 22 bp, Artificial Sequence
  Synthetic
ctttggcaagcactgcgtgaag

SEQ ID NO: 17617 - DNA, 21 bp, Artificial Sequence
  Synthetic
acacgatgagacgagctggct

SEQ ID NO: 17618 - DNA, 22 bp, Artificial Sequence
  Synthetic
gcccccaacataaagcctctca

SEQ ID NO: 17619 - DNA, 22 bp, Artificial Sequence
  Synthetic
ggggttgtagggtcacgggtaa

SEQ ID NO: 17620 - DNA, 22 bp, Artificial Sequence
  Synthetic
tgcggccaccctattgatttca

SEQ ID NO: 17621 - DNA, 25 bp, Artificial Sequence
  Synthetic
cccatattctttcattgccttttcc

SEQ ID NO: 17622 - DNA, 25 bp, Artificial Sequence
  Synthetic
ggagaaatttaggcttctcaactcc

SEQ ID NO: 17623 - DNA, 25 bp, Artificial Sequence
  Synthetic
tgtctttggaattttctcctcgttt

SEQ ID NO: 17624 - DNA, 22 bp, Artificial Sequence
  Synthetic
cttgcaatgtgctcaattggag

SEQ ID NO: 17625 - DNA, 25 bp, Artificial Sequence
  Synthetic
tcggatcagtaagagagaattccat

SEQ ID NO: 17626 - DNA, 25 bp, Artificial Sequence
  Synthetic
gtctttttctttgacagaagactcg

SEQ ID NO: 17627 - DNA, 20 bp, Artificial Sequence
  Synthetic
gagggccttccactttctgc

SEQ ID NO: 17628 - DNA, 25 bp, Artificial Sequence
  Synthetic
ccaagcgaatctctgtagagtttta

SEQ ID NO: 17629 - DNA, 21 bp, Artificial Sequence
  Synthetic
ggggttcagtagcagacattg

SEQ ID NO: 17630 - DNA, 23 bp, Artificial Sequence
  Synthetic
caggtcaaacggttctggtttta

SEQ ID NO: 17631 - DNA, 25 bp, Artificial Sequence
  Synthetic
gcttccacaaaaaaccatccattac

SEQ ID NO: 17632 - DNA, 22 bp, Artificial Sequence
  Synthetic
ccgggggcttaggtccttttct

SEQ ID NO: 17633 - DNA, 23 bp, Artificial Sequence
  Synthetic
aggattgccatctaatgcattgc

SEQ ID NO: 17634 - DNA, 22 bp, Artificial Sequence
  Synthetic
gtgttgctagggtctccattct

SEQ ID NO: 17635 - DNA, 23 bp, Artificial Sequence
  Synthetic
gttcggtgctgtatactgtcttt

SEQ ID NO: 17636 - DNA, 25 bp, Artificial Sequence
  Synthetic
ccacataatacactttgtgttctgc

SEQ ID NO: 17637 - DNA, 25 bp, Artificial Sequence
  Synthetic
gggttaccctcatatacaggattgt

SEQ ID NO: 17638 - DNA, 20 bp, Artificial Sequence
  Synthetic
aggacgtgcgggaacaaatg

SEQ ID NO: 17639 - DNA, 22 bp, Artificial Sequence
  Synthetic
gaggtagctacatcaaggggta

SEQ ID NO: 17640 - DNA, 24 bp, Artificial Sequence
  Synthetic
cccgttgtaaccagtatggcttat

SEQ ID NO: 17641 - DNA, 25 bp, Artificial Sequence
  Synthetic
gggttataccaaagttccagtcctc

SEQ ID NO: 17642 - DNA, 19 bp, Artificial Sequence
  Synthetic
tcaggaggcaccacaggcg

SEQ ID NO: 17643 - DNA, 22 bp, Artificial Sequence
  Synthetic
acgagcccccaactgtgtacta

SEQ ID NO: 17644 - DNA, 22 bp, Artificial Sequence
  Synthetic
ctgggcttgggtttggatgagt

SEQ ID NO: 17645 - DNA, 20 bp, Artificial Sequence
  Synthetic
tggcagtggggtcaaactgc

SEQ ID NO: 17646 - DNA, 20 bp, Artificial Sequence
  Synthetic
gtctttggcactccctggca

SEQ ID NO: 17647 - DNA, 20 bp, Artificial Sequence
  Synthetic
ggctgatttggggggggttt

SEQ ID NO: 17648 - DNA, 22 bp, Artificial Sequence
  Synthetic
ggcaagattacaggcggccttt

SEQ ID NO: 17649 - DNA, 21 bp, Artificial Sequence
  Synthetic
tcgccaggttccattggcttt

SEQ ID NO: 17650 - DNA, 22 bp, Artificial Sequence
  Synthetic
gcatttcgaacagggtgggact

SEQ ID NO: 17651 - DNA, 22 bp, Artificial Sequence
  Synthetic
gctggcgtaaggtaggagttcc

SEQ ID NO: 17652 - DNA, 20 bp, Artificial Sequence
  Synthetic
tggggtaggggggcatgtag

SEQ ID NO: 17653 - DNA, 22 bp, Artificial Sequence
  Synthetic
gcgaacgtggtgcaaatagacg

SEQ ID NO: 17654 - DNA, 25 bp, Artificial Sequence
  Synthetic
acacatattgaggaagtcttgggaa

SEQ ID NO: 17655 - DNA, 21 bp, Artificial Sequence
  Synthetic
gcgcttaccgggatgagagca

SEQ ID NO: 17656 - DNA, 22 bp, Artificial Sequence
  Synthetic
gggcaggattgcagggtttaga

SEQ ID NO: 17657 - DNA, 20 bp, Artificial Sequence
  Synthetic
taggggcaggtccatgattg

SEQ ID NO: 17658 - DNA, 19 bp, Artificial Sequence
  Synthetic
gcgggatcctagcgtggga

SEQ ID NO: 17659 - DNA, 20 bp, Artificial Sequence
  Synthetic
ggctggaggcgatgtggttg

SEQ ID NO: 17660 - DNA, 22 bp, Artificial Sequence
  Synthetic
agagcgggagaaagaggaggaa

SEQ ID NO: 17661 - DNA, 20 bp, Artificial Sequence
  Synthetic
tttgcctgttccatgcccgg

SEQ ID NO: 17662 - DNA, 22 bp, Artificial Sequence
  Synthetic
ggaggggagtcgagggataagg

SEQ ID NO: 17663 - DNA, 23 bp, Artificial Sequence
  Synthetic
tgtagtactaaagatggctggcc

SEQ ID NO: 17664 - DNA, 20 bp, Artificial Sequence
  Synthetic
acgtcagggcctagcctgag

SEQ ID NO: 17665 - DNA, 21 bp, Artificial Sequence
  Synthetic
ggatggcggcctcaggtaagg

SEQ ID NO: 17666 - DNA, 21 bp, Artificial Sequence
  Synthetic
gccatatggtccactgtggtt

SEQ ID NO: 17667 - DNA, 25 bp, Artificial Sequence
  Synthetic
ttgtcattggtccatttctattcca

SEQ ID NO: 17668 - DNA, 25 bp, Artificial Sequence
  Synthetic
aggagaaattttgcaatcttggagt

SEQ ID NO: 17669 - DNA, 23 bp, Artificial Sequence
  Synthetic
ctagtggatctgctgatactgct

SEQ ID NO: 17670 - DNA, 25 bp, Artificial Sequence
  Synthetic
gcacccttattttcaatgtttggag

SEQ ID NO: 17671 - DNA, 25 bp, Artificial Sequence
  Synthetic
gcacttttgcatctttctgaaaatg

SEQ ID NO: 17672 - DNA, 22 bp, Artificial Sequence
  Synthetic
gtttcactgacctcctcaggag

SEQ ID NO: 17673 - DNA, 25 bp, Artificial Sequence
  Synthetic
ccctcatttgttggaatagagtcct

SEQ ID NO: 17674 - DNA, 20 bp, Artificial Sequence
  Synthetic
tccggatgtgccttcatctg

SEQ ID NO: 17675 - DNA, 20 bp, Artificial Sequence
  Synthetic
caaagagggcctgccacttt

SEQ ID NO: 17676 - DNA, 22 bp, Artificial Sequence
  Synthetic
tccattcaagtcctccgatgag

SEQ ID NO: 17677 - DNA, 22 bp, Artificial Sequence
  Synthetic
tccatggctgtatggaggatct

SEQ ID NO: 17678 - DNA, 25 bp, Artificial Sequence
  Synthetic
acttccattgtttcaaggcatgaat

SEQ ID NO: 17679 - DNA, 25 bp, Artificial Sequence
  Synthetic
agcctctcttattcagtctttgttt

SEQ ID NO: 17680 - DNA, 23 bp, Artificial Sequence
  Synthetic
tctcacaacatttgccagtttgg

SEQ ID NO: 17681 - DNA, 25 bp, Artificial Sequence
  Synthetic
gctggtatttgtgttcgaatcttca

SEQ ID NO: 17682 - DNA, 22 bp, Artificial Sequence
  Synthetic
agcaaaatcgtcggatgattgg

SEQ ID NO: 17683 - DNA, 25 bp, Artificial Sequence
  Synthetic
ccaaggtcattgtttatcatgttgt

SEQ ID NO: 17684 - DNA, 22 bp, Artificial Sequence
  Synthetic
cgccaacagtaaggtgacgaca

SEQ ID NO: 17685 - DNA, 21 bp, Artificial Sequence
  Synthetic
gcctcgagcttgggcttctcc

SEQ ID NO: 17686 - DNA, 22 bp, Artificial Sequence
  Synthetic
agtttcggggattgtgaaccgt

SEQ ID NO: 17687 - DNA, 18 bp, Artificial Sequence
  Synthetic
agcagcgtggcggcgaaa

SEQ ID NO: 17688 - DNA, 21 bp, Artificial Sequence
  Synthetic
gcagtaccactaccgccaccc

SEQ ID NO: 17689 - DNA, 23 bp, Artificial Sequence
  Synthetic
aatgttgcgttgttggagagtat

SEQ ID NO: 17690 - DNA, 20 bp, Artificial Sequence
  Synthetic
caagaagcgaccgcagtggg

SEQ ID NO: 17691 - DNA, 20 bp, Artificial Sequence
  Synthetic
gcgtgctgcatagcttggcg

SEQ ID NO: 17692 - DNA, 22 bp, Artificial Sequence
  Synthetic
cggtgctttctgcagtgtgtgg

SEQ ID NO: 17693 - DNA, 21 bp, Artificial Sequence
  Synthetic
cgaaacgagaggctcagccgc

SEQ ID NO: 17694 - DNA, 20 bp, Artificial Sequence
  Synthetic
tccacaggtaccgcgtctgt

SEQ ID NO: 17695 - DNA, 18 bp, Artificial Sequence
  Synthetic
ccggcggctgcagttgtt

SEQ ID NO: 17696 - DNA, 22 bp, Artificial Sequence
  Synthetic
cgcctcgttttcctcttcggtg

SEQ ID NO: 17697 - DNA, 22 bp, Artificial Sequence
  Synthetic
gcgcctctctcatggatccact

SEQ ID NO: 17698 - DNA, 19 bp, Artificial Sequence
  Synthetic
tgacgtacccgccgggaac

SEQ ID NO: 17699 - DNA, 18 bp, Artificial Sequence
  Synthetic
tggagtttgcgcgcgtcg

SEQ ID NO: 17700 - DNA, 19 bp, Artificial Sequence
  Synthetic
accccgtgcaacgtcgaga

SEQ ID NO: 17701 - DNA, 21 bp, Artificial Sequence
  Synthetic
gcagctatgctcgatgaccga

SEQ ID NO: 17702 - DNA, 20 bp, Artificial Sequence
  Synthetic
gccgtcaacagcgtgccttt

SEQ ID NO: 17703 - DNA, 21 bp, Artificial Sequence
  Synthetic
gccgacttggaggactttgcc

SEQ ID NO: 17704 - DNA, 19 bp, Artificial Sequence
  Synthetic
gccgtagttgtcgcggtcc

SEQ ID NO: 17705 - DNA, 21 bp, Artificial Sequence
  Synthetic
cgactgccgcatggtttcctc

SEQ ID NO: 17706 - DNA, 21 bp, Artificial Sequence
  Synthetic
cgctcgtcagcaggtagaagg

SEQ ID NO: 17707 - DNA, 20 bp, Artificial Sequence
  Synthetic
cccttgaacatcccgcagca

SEQ ID NO: 17708 - DNA, 19 bp, Artificial Sequence
  Synthetic
gcgcggtcattctggccaa

SEQ ID NO: 17709 - DNA, 18 bp, Artificial Sequence
  Synthetic
gctcgcagtagtggcgca

SEQ ID NO: 17710 - DNA, 20 bp, Artificial Sequence
  Synthetic
agtgcgtatacggggctggg

SEQ ID NO: 17711 - DNA, 20 bp, Artificial Sequence
  Synthetic
aagcagccgcgtcttaagcg

SEQ ID NO: 17712 - DNA, 20 bp, Artificial Sequence
  Synthetic
ctacgcacctgtggccgcag

SEQ ID NO: 17713 - DNA, 19 bp, Artificial Sequence
  Synthetic
taccagcggcccatggtgc

SEQ ID NO: 17714 - DNA, 20 bp, Artificial Sequence
  Synthetic
ccgcgcacttttgccaagtc

SEQ ID NO: 17715 - DNA, 19 bp, Artificial Sequence
  Synthetic
tggcgcagttctggcacgg

SEQ ID NO: 17716 - DNA, 20 bp, Artificial Sequence
  Synthetic
agacgcgcgtactcggaaac

SEQ ID NO: 17717 - DNA, 22 bp, Artificial Sequence
  Synthetic
ccagacctccagcaacaccgtc

SEQ ID NO: 17718 - DNA, 19 bp, Artificial Sequence
  Synthetic
acggtttccacgccaccgc

SEQ ID NO: 17719 - DNA, 19 bp, Artificial Sequence
  Synthetic
ctgcgcgaagaactgggct

SEQ ID NO: 17720 - DNA, 20 bp, Artificial Sequence
  Synthetic
cgtggttggagcagcaccag

SEQ ID NO: 17721 - DNA, 19 bp, Artificial Sequence
  Synthetic
ttctggcggtgggtcccga

SEQ ID NO: 17722 - DNA, 20 bp, Artificial Sequence
  Synthetic
ggcgtccgaatggtgggtag

SEQ ID NO: 17723 - DNA, 21 bp, Artificial Sequence
  Synthetic
acgcggccattttgtgtttgg

SEQ ID NO: 17724 - DNA, 20 bp, Artificial Sequence
  Synthetic
tgtcaaccgtcgcatcacgc

SEQ ID NO: 17725 - DNA, 22 bp, Artificial Sequence
  Synthetic
cgttgtggtagaacggcaaccg

SEQ ID NO: 17726 - DNA, 21 bp, Artificial Sequence
  Synthetic
cgcagattctcggccaacagc

SEQ ID NO: 17727 - DNA, 20 bp, Artificial Sequence
  Synthetic
gcacccaggacctccggtac

SEQ ID NO: 17728 - DNA, 22 bp, Artificial Sequence
  Synthetic
ccgcagaaagtcgaagatgccc

SEQ ID NO: 17729 - DNA, 22 bp, Artificial Sequence
  Synthetic
gtgagcaccatcagcacctgat

SEQ ID NO: 17730 - DNA, 21 bp, Artificial Sequence
  Synthetic
ggctgcagcgctttcagaatt

SEQ ID NO: 17731 - DNA, 19 bp, Artificial Sequence
  Synthetic
ttcgggtagctgcaggccg

SEQ ID NO: 17732 - DNA, 21 bp, Artificial Sequence
  Synthetic
cggttgggcgcgttgatctag

SEQ ID NO: 17733 - DNA, 21 bp, Artificial Sequence
  Synthetic
cagtccgccgctcattttgtg

SEQ ID NO: 17734 - DNA, 19 bp, Artificial Sequence
  Synthetic
tgatgcgggtgcgtagggt

SEQ ID NO: 17735 - DNA, 19 bp, Artificial Sequence
  Synthetic
gaaagcgaagacggcgccc

SEQ ID NO: 17736 - DNA, 22 bp, Artificial Sequence
  Synthetic
gtcatggccaatcgtcgtctcc

SEQ ID NO: 17737 - DNA, 19 bp, Artificial Sequence
  Synthetic
ggacccgaaaacgagggcg

SEQ ID NO: 17738 - DNA, 22 bp, Artificial Sequence
  Synthetic
cgtgcaggatgacgtggattct

SEQ ID NO: 17739 - DNA, 21 bp, Artificial Sequence
  Synthetic
ggtgagagtagtggtggggct

SEQ ID NO: 17740 - DNA, 19 bp, Artificial Sequence
  Synthetic
gagaggaggagagccggca

SEQ ID NO: 17741 - DNA, 19 bp, Artificial Sequence
  Synthetic
cggcgtcggcgtttccaac

SEQ ID NO: 17742 - DNA, 20 bp, Artificial Sequence
  Synthetic
catctctaccgccgccgtgc

SEQ ID NO: 17743 - DNA, 21 bp, Artificial Sequence
  Synthetic
tgcgacgaacacgaagctctc

SEQ ID NO: 17744 - DNA, 20 bp, Artificial Sequence
  Synthetic
caccgacacagcagcaccag

SEQ ID NO: 17745 - DNA, 22 bp, Artificial Sequence
  Synthetic
gcgtccgacgatgtgctcttct

SEQ ID NO: 17746 - DNA, 22 bp, Artificial Sequence
  Synthetic
cgtcttttcggcgctcaacaag

SEQ ID NO: 17747 - DNA, 19 bp, Artificial Sequence
  Synthetic
acgcccgccagaagtacgc

SEQ ID NO: 17748 - DNA, 19 bp, Artificial Sequence
  Synthetic
tctgttggcggggctcacg

SEQ ID NO: 17749 - DNA, 20 bp, Artificial Sequence
  Synthetic
agaggctacccgaccgtagc

SEQ ID NO: 17750 - DNA, 20 bp, Artificial Sequence
  Synthetic
gacggtcgtggtctcctcgg

SEQ ID NO: 17751 - DNA, 21 bp, Artificial Sequence
  Synthetic
acagtacgacggcaacccaac

SEQ ID NO: 17752 - DNA, 21 bp, Artificial Sequence
  Synthetic
catcctgctgtcacacgacga

SEQ ID NO: 17753 - DNA, 18 bp, Artificial Sequence
  Synthetic
aagcgcgtgcccacccaa

SEQ ID NO: 17754 - DNA, 22 bp, Artificial Sequence
  Synthetic
acctggcatcgcagcctctttc

SEQ ID NO: 17755 - DNA, 19 bp, Artificial Sequence
  Synthetic
tggcttacgacgctgacgc

SEQ ID NO: 17756 - DNA, 22 bp, Artificial Sequence
  Synthetic
ggtcgaacctcataacggtggg

SEQ ID NO: 17757 - DNA, 22 bp, Artificial Sequence
  Synthetic
cttgcgcttaccgatccgctta

SEQ ID NO: 17758 - DNA, 19 bp, Artificial Sequence
  Synthetic
gctcactcaacaccgccgt

SEQ ID NO: 17759 - DNA, 22 bp, Artificial Sequence
  Synthetic
acgtgacgatcaaaagtgcccg

SEQ ID NO: 17760 - DNA, 19 bp, Artificial Sequence
  Synthetic
acgatgatggcccgcgacg

SEQ ID NO: 17761 - DNA, 22 bp, Artificial Sequence
  Synthetic
gcaaccagtgctccactacgtc

SEQ ID NO: 17762 - DNA, 19 bp, Artificial Sequence
  Synthetic
acatggacgccgcctctgc

SEQ ID NO: 17763 - DNA, 18 bp, Artificial Sequence
  Synthetic
atgcaaagacggcgcggg

SEQ ID NO: 17764 - DNA, 18 bp, Artificial Sequence
  Synthetic
tgttgtgtccgccgctgc

SEQ ID NO: 17765 - DNA, 20 bp, Artificial Sequence
  Synthetic
cccgggcactgatcctgacc

SEQ ID NO: 17766 - DNA, 20 bp, Artificial Sequence
  Synthetic
cacgctgaccggcgatcagg

SEQ ID NO: 17767 - DNA, 19 bp, Artificial Sequence
  Synthetic
ttggcccacgacgcctgac

SEQ ID NO: 17768 - DNA, 20 bp, Artificial Sequence
  Synthetic
gcgactcctggacctgcgta

SEQ ID NO: 17769 - DNA, 19 bp, Artificial Sequence
  Synthetic
agatgtggcaggcgcgtct

SEQ ID NO: 17770 - DNA, 19 bp, Artificial Sequence
  Synthetic
acaaccccacgggccgaag

SEQ ID NO: 17771 - DNA, 18 bp, Artificial Sequence
  Synthetic
tctcggtgctgggcgctt

SEQ ID NO: 17772 - DNA, 19 bp, Artificial Sequence
  Synthetic
agggactggaggtgcgcgt

SEQ ID NO: 17773 - DNA, 19 bp, Artificial Sequence
  Synthetic
cgctgtgctggcatcgagt

SEQ ID NO: 17774 - DNA, 22 bp, Artificial Sequence
  Synthetic
ccatgacctacgtgcgcaagtt

SEQ ID NO: 17775 - DNA, 20 bp, Artificial Sequence
  Synthetic
tcgctcgaccgttcgtacga

SEQ ID NO: 17776 - DNA, 22 bp, Artificial Sequence
  Synthetic
gcggtctccacgtcaggtacga

SEQ ID NO: 17777 - DNA, 18 bp, Artificial Sequence
  Synthetic
aacgcgctgcacgaccac

SEQ ID NO: 17778 - DNA, 20 bp, Artificial Sequence
  Synthetic
cggaacccgccatgcaacga

SEQ ID NO: 17779 - DNA, 22 bp, Artificial Sequence
  Synthetic
cgctcgagctcctgcctaaagt

SEQ ID NO: 17780 - DNA, 22 bp, Artificial Sequence
  Synthetic
tcccagtaacagacgacccagt

SEQ ID NO: 17781 - DNA, 22 bp, Artificial Sequence
  Synthetic
gccacgtggttttcgagaacgt

SEQ ID NO: 17782 - DNA, 19 bp, Artificial Sequence
  Synthetic
gggagcgcggtggaagaca

SEQ ID NO: 17783 - DNA, 19 bp, Artificial Sequence
  Synthetic
tctcccccgattccagcgt

SEQ ID NO: 17784 - DNA, 18 bp, Artificial Sequence
  Synthetic
cgctcatccgcgtgctct

SEQ ID NO: 17785 - DNA, 20 bp, Artificial Sequence
  Synthetic
cacggcgtgtccttgctacc

SEQ ID NO: 17786 - DNA, 19 bp, Artificial Sequence
  Synthetic
ttcacgtccgggtggctgc

SEQ ID NO: 17787 - DNA, 22 bp, Artificial Sequence
  Synthetic
ggcgctgatgatgttgacgtcg

SEQ ID NO: 17788 - DNA, 21 bp, Artificial Sequence
  Synthetic
agatgatgcaccccgaactcg

SEQ ID NO: 17789 - DNA, 19 bp, Artificial Sequence
  Synthetic
gcctaacctccgctcgcac

SEQ ID NO: 17790 - DNA, 22 bp, Artificial Sequence
  Synthetic
gcggaggaagattcgtctgagc

SEQ ID NO: 17791 - DNA, 19 bp, Artificial Sequence
  Synthetic
ggccgacgctggttctcct

SEQ ID NO: 17792 - DNA, 21 bp, Artificial Sequence
  Synthetic
ggtcgcagatgagcagcttct

SEQ ID NO: 17793 - DNA, 19 bp, Artificial Sequence
  Synthetic
ttctccaacgcgcggcagg

SEQ ID NO: 17794 - DNA, 22 bp, Artificial Sequence
  Synthetic
cgtccaggttactcggggaaca

SEQ ID NO: 17795 - DNA, 19 bp, Artificial Sequence
  Synthetic
tcgtcctccccttcgtccg

SEQ ID NO: 17796 - DNA, 22 bp, Artificial Sequence
  Synthetic
accactagcttggctacgtgga

SEQ ID NO: 17797 - DNA, 20 bp, Artificial Sequence
  Synthetic
tcgtcgcgctccagcacata

SEQ ID NO: 17798 - DNA, 21 bp, Artificial Sequence
  Synthetic
cgcgctctcttgaacacgaca

SEQ ID NO: 17799 - DNA, 21 bp, Artificial Sequence
  Synthetic
cggatctgcggctcaaacacc

SEQ ID NO: 17800 - DNA, 20 bp, Artificial Sequence
  Synthetic
gactttacggtgcgcggcga

SEQ ID NO: 17801 - DNA, 22 bp, Artificial Sequence
  Synthetic
tctgccgccaccaaaagatctg

SEQ ID NO: 17802 - DNA, 18 bp, Artificial Sequence
  Synthetic
tttccctaccgcgcgctg

SEQ ID NO: 17803 - DNA, 20 bp, Artificial Sequence
  Synthetic
tccacgatgtcggcgatgac

SEQ ID NO: 17804 - DNA, 21 bp, Artificial Sequence
  Synthetic
cccccagggcgttgtaaaagt

SEQ ID NO: 17805 - DNA, 20 bp, Artificial Sequence
  Synthetic
ggggatgtcgtgggtctcct

SEQ ID NO: 17806 - DNA, 22 bp, Artificial Sequence
  Synthetic
gcgcttgagaaaaatgtcgcgg

SEQ ID NO: 17807 - DNA, 20 bp, Artificial Sequence
  Synthetic
agccctcgagcgtgtacgtc

SEQ ID NO: 17808 - DNA, 19 bp, Artificial Sequence
  Synthetic
tgcagactcttgccctgcg

SEQ ID NO: 17809 - DNA, 21 bp, Artificial Sequence
  Synthetic
acagcctggatctcaccgtca

SEQ ID NO: 17810 - DNA, 20 bp, Artificial Sequence
  Synthetic
cgctggatgacggtgatgcg

SEQ ID NO: 17811 - DNA, 22 bp, Artificial Sequence
  Synthetic
actgctgtggtgttgccttctg

SEQ ID NO: 17812 - DNA, 22 bp, Artificial Sequence
  Synthetic
gccacgacaaacactaccgtcg

SEQ ID NO: 17813 - DNA, 19 bp, Artificial Sequence
  Synthetic
tgcatccgtccggtggtgc

SEQ ID NO: 17814 - DNA, 19 bp, Artificial Sequence
  Synthetic
ttccgtgctggcgatcgcg

SEQ ID NO: 17815 - DNA, 22 bp, Artificial Sequence
  Synthetic
tctacccaccctgcgagacatc

SEQ ID NO: 17816 - DNA, 19 bp, Artificial Sequence
  Synthetic
agtgtgccgcacaaggccg

SEQ ID NO: 17817 - DNA, 22 bp, Artificial Sequence
  Synthetic
cccctggtcttcaagcacactt

SEQ ID NO: 17818 - DNA, 20 bp, Artificial Sequence
  Synthetic
gagatgccaacagtgttgct

SEQ ID NO: 17819 - DNA, 21 bp, Artificial Sequence
  Synthetic
cgtacttttccactccaggcg

SEQ ID NO: 17820 - DNA, 22 bp, Artificial Sequence
  Synthetic
gttaggtcgctactcgctggga

SEQ ID NO: 17821 - DNA, 22 bp, Artificial Sequence
  Synthetic
gagcaagttaccatcccctgca

SEQ ID NO: 17822 - DNA, 19 bp, Artificial Sequence
  Synthetic
agggttgagggggccgttc

SEQ ID NO: 17823 - DNA, 18 bp, Artificial Sequence
  Synthetic
aacgacgacgcggttgcc

SEQ ID NO: 17824 - DNA, 19 bp, Artificial Sequence
  Synthetic
gccacaaaagccaccgcgg

SEQ ID NO: 17825 - DNA, 20 bp, Artificial Sequence
  Synthetic
tgcgcgctgctggtgtttta

SEQ ID NO: 17826 - DNA, 19 bp, Artificial Sequence
  Synthetic
acgaaggtccaagcggcgg

SEQ ID NO: 17827 - DNA, 22 bp, Artificial Sequence
  Synthetic
cgcgtgactctctgttcgatgg

SEQ ID NO: 17828 - DNA, 19 bp, Artificial Sequence
  Synthetic
cccaacggtcacacgtccg

SEQ ID NO: 17829 - DNA, 20 bp, Artificial Sequence
  Synthetic
caacgcggcacttccaacag

SEQ ID NO: 17830 - DNA, 19 bp, Artificial Sequence
  Synthetic
ttcgcacacccagcccctg

SEQ ID NO: 17831 - DNA, 19 bp, Artificial Sequence
  Synthetic
ccgacgtcccgcatccaac

SEQ ID NO: 17832 - DNA, 19 bp, Artificial Sequence
  Synthetic
gaacacgcgcaacagggcc

SEQ ID NO: 17833 - DNA, 20 bp, Artificial Sequence
  Synthetic
tatcgtcgggtcggctgtcc

SEQ ID NO: 17834 - DNA, 21 bp, Artificial Sequence
  Synthetic
cctcgtcatcctccgtgtcgg

SEQ ID NO: 17835 - DNA, 20 bp, Artificial Sequence
  Synthetic
ggcccactttcgggtggagg

SEQ ID NO: 17836 - DNA, 22 bp, Artificial Sequence
  Synthetic
ggtgccgaaatcaccgtgtgaa

SEQ ID NO: 17837 - DNA, 19 bp, Artificial Sequence
  Synthetic
atgtcgcgacacccgggtc

SEQ ID NO: 17838 - DNA, 25 bp, Artificial Sequence
  Synthetic
agaacatatataatcgccgtttcgt

SEQ ID NO: 17839 - DNA, 19 bp, Artificial Sequence
  Synthetic
agcacggggtactcgtggc

SEQ ID NO: 17840 - DNA, 22 bp, Artificial Sequence
  Synthetic
gaaggaaaccgaccccgaaact

SEQ ID NO: 17841 - DNA, 20 bp, Artificial Sequence
  Synthetic
ctcaacctgtgcgccacagc

SEQ ID NO: 17842 - DNA, 21 bp, Artificial Sequence
  Synthetic
ccctcactgggctacgagtgc

SEQ ID NO: 17843 - DNA, 20 bp, Artificial Sequence
  Synthetic
tcatctacgtgccccccggg

SEQ ID NO: 17844 - DNA, 19 bp, Artificial Sequence
  Synthetic
tcagcgaaaccggcacccg

SEQ ID NO: 17845 - DNA, 19 bp, Artificial Sequence
  Synthetic
ggctgtcatgggtctgcgc

SEQ ID NO: 17846 - DNA, 19 bp, Artificial Sequence
  Synthetic
atcgttcacgtcgccgccg

SEQ ID NO: 17847 - DNA, 18 bp, Artificial Sequence
  Synthetic
acagcagccgcgcttgtc

SEQ ID NO: 17848 - DNA, 21 bp, Artificial Sequence
  Synthetic
gcgtctacgtggtgatgctgc

SEQ ID NO: 17849 - DNA, 19 bp, Artificial Sequence
  Synthetic
aggcctggttacagcgcgg

SEQ ID NO: 17850 - DNA, 20 bp, Artificial Sequence
  Synthetic
gcaaccccgccaactggttc

SEQ ID NO: 17851 - DNA, 20 bp, Artificial Sequence
  Synthetic
tgttcgacagcggcgtagac

SEQ ID NO: 17852 - DNA, 21 bp, Artificial Sequence
  Synthetic
ggtcatgacaccgacgcgttg

SEQ ID NO: 17853 - DNA, 19 bp, Artificial Sequence
  Synthetic
gtcgctcggcattccgcac

SEQ ID NO: 17854 - DNA, 18 bp, Artificial Sequence
  Synthetic
agttgtgccgccggagct

SEQ ID NO: 17855 - DNA, 20 bp, Artificial Sequence
  Synthetic
aaccagatggcgacggacgt

SEQ ID NO: 17856 - DNA, 20 bp, Artificial Sequence
  Synthetic
tgctaaccacgcaaccggat

SEQ ID NO: 17857 - DNA, 18 bp, Artificial Sequence
  Synthetic
atcccggcaagttgcgcg

SEQ ID NO: 17858 - DNA, 20 bp, Artificial Sequence
  Synthetic
cgcctgctctctccaggtcc

SEQ ID NO: 17859 - DNA, 20 bp, Artificial Sequence
  Synthetic
gccttccagactgcacggcc

SEQ ID NO: 17860 - DNA, 20 bp, Artificial Sequence
  Synthetic
cagaaaacacccccccgccc

SEQ ID NO: 17861 - DNA, 25 bp, Artificial Sequence
  Synthetic
tcttccccatattccttcattgtct

SEQ ID NO: 17862 - DNA, 25 bp, Artificial Sequence
  Synthetic
tgtagtcgtatagatccggaagaaa

SEQ ID NO: 17863 - DNA, 20 bp, Artificial Sequence
  Synthetic
ttcgcctctctcggactgac

SEQ ID NO: 17864 - DNA, 23 bp, Artificial Sequence
  Synthetic
tcctcaaagtccaatttttccgg

SEQ ID NO: 17865 - DNA, 20 bp, Artificial Sequence
  Synthetic
caatgtgctcaattggggca

SEQ ID NO: 17866 - DNA, 24 bp, Artificial Sequence
  Synthetic
ccatactcacaaagttcaccacgt

SEQ ID NO: 17867 - DNA, 24 bp, Artificial Sequence
  Synthetic
tctctttgatagaagactcagcct

SEQ ID NO: 17868 - DNA, 22 bp, Artificial Sequence
  Synthetic
cagatgccctgatctcagtagc

SEQ ID NO: 17869 - DNA, 24 bp, Artificial Sequence
  Synthetic
cctctttgtcatacaggatcagct

SEQ ID NO: 17870 - DNA, 24 bp, Artificial Sequence
  Synthetic
ccattttcgcctctccagaaattc

SEQ ID NO: 17871 - DNA, 22 bp, Artificial Sequence
  Synthetic
ttgaagcaatttgaacccctct

SEQ ID NO: 17872 - DNA, 23 bp, Artificial Sequence
  Synthetic
gcatttcagttttcgcgcctaaa

SEQ ID NO: 17873 - DNA, 23 bp, Artificial Sequence
  Synthetic
tccaatatgtcgtcagcttcctg

SEQ ID NO: 17874 - DNA, 22 bp, Artificial Sequence
  Synthetic
ccgaatcgctacagggaaagcc

SEQ ID NO: 17875 - DNA, 20 bp, Artificial Sequence
  Synthetic
acatctacgcctcccagtca

SEQ ID NO: 17876 - DNA, 20 bp, Artificial Sequence
  Synthetic
tactgcaagagctggcgaac

SEQ ID NO: 17877 - DNA, 22 bp, Artificial Sequence
  Synthetic
gcgccagcgagtaaatgcaaac

SEQ ID NO: 17878 - DNA, 25 bp, Artificial Sequence
  Synthetic
gcgcatgaagtaatggttactgttt

SEQ ID NO: 17879 - DNA, 23 bp, Artificial Sequence
  Synthetic
aggcattttctgaagctgcatta

SEQ ID NO: 17880 - DNA, 25 bp, Artificial Sequence
  Synthetic
accccatttaaacacactctagaaa

SEQ ID NO: 17881 - DNA, 22 bp, Artificial Sequence
  Synthetic
ggcgagggtccaatagttgcat

SEQ ID NO: 17882 - DNA, 25 bp, Artificial Sequence
  Synthetic
aggctcatctttacaaaatactgga

SEQ ID NO: 17883 - DNA, 25 bp, Artificial Sequence
  Synthetic
tggttctccacaatatgaatccaag

SEQ ID NO: 17884 - DNA, 22 bp, Artificial Sequence
  Synthetic
tgggaagtctcagttgttgcgt

SEQ ID NO: 17885 - DNA, 22 bp, Artificial Sequence
  Synthetic
cgcaacgaggaagtttgctgga

SEQ ID NO: 17886 - DNA, 23 bp, Artificial Sequence
  Synthetic
ttaaatgccttcagtgtcctcac

SEQ ID NO: 17887 - DNA, 23 bp, Artificial Sequence
  Synthetic
tggtcagaattcctgtacgagga

SEQ ID NO: 17888 - DNA, 21 bp, Artificial Sequence
  Synthetic
gtgtactcacccaaccagttg

SEQ ID NO: 17889 - DNA, 22 bp, Artificial Sequence
  Synthetic
ccaccattttccccacctggaa

SEQ ID NO: 17890 - DNA, 20 bp, Artificial Sequence
  Synthetic
atgcatcggccctcacacac

SEQ ID NO: 17891 - DNA, 21 bp, Artificial Sequence
  Synthetic
ggttcttaccgtgcagatgca

SEQ ID NO: 17892 - DNA, 20 bp, Artificial Sequence
  Synthetic
ggacgtccctggacccttta

SEQ ID NO: 17893 - DNA, 25 bp, Artificial Sequence
  Synthetic
actttctactgcttaaccccagaaa

SEQ ID NO: 17894 - DNA, 22 bp, Artificial Sequence
  Synthetic
acactgcgcacgcttttacaaa

SEQ ID NO: 17895 - DNA, 20 bp, Artificial Sequence
  Synthetic
ctggacatgcaggtcgaggg

SEQ ID NO: 17896 - DNA, 20 bp, Artificial Sequence
  Synthetic
ttcctccgggagctcgtccg

SEQ ID NO: 17897 - DNA, 22 bp, Artificial Sequence
  Synthetic
cactattgaacgtgcgggacat

SEQ ID NO: 17898 - DNA, 22 bp, Artificial Sequence
  Synthetic
cgtcgcggcgaaatgattgaaa

SEQ ID NO: 17899 - DNA, 20 bp, Artificial Sequence
  Synthetic
ttgctcagcttcctggtact

SEQ ID NO: 17900 - DNA, 22 bp, Artificial Sequence
  Synthetic
accgctttgtagatgtggatga

SEQ ID NO: 17901 - DNA, 20 bp, Artificial Sequence
  Synthetic
gctgccggcatcacatggat

SEQ ID NO: 17902 - DNA, 21 bp, Artificial Sequence
  Synthetic
ggatcctgccggtttcgaacc

SEQ ID NO: 17903 - DNA, 22 bp, Artificial Sequence
  Synthetic
gcgaaacatgttctgacgaggc

SEQ ID NO: 17904 - DNA, 24 bp, Artificial Sequence
  Synthetic
agcttctacaaagtcccaaagatg

SEQ ID NO: 17905 - DNA, 19 bp, Artificial Sequence
  Synthetic
cgcttggctgccaccgtag

SEQ ID NO: 17906 - DNA, 24 bp, Artificial Sequence
  Synthetic
gctttgctatccaacaaagcattt

SEQ ID NO: 17907 - DNA, 25 bp, Artificial Sequence
  Synthetic
aaaagtaatcgggtccagactgata

SEQ ID NO: 17908 - DNA, 25 bp, Artificial Sequence
  Synthetic
gcatttgtaaagtattccccgttca

SEQ ID NO: 17909 - DNA, 20 bp, Artificial Sequence
  Synthetic
ttttgcgtcgctgccaacgt

SEQ ID NO: 17910 - DNA, 25 bp, Artificial Sequence
  Synthetic
ggcatgttggtatgtaagatggttt

SEQ ID NO: 17911 - DNA, 21 bp, Artificial Sequence
  Synthetic
ctaattgggtttcggggtccc

SEQ ID NO: 17912 - DNA, 22 bp, Artificial Sequence
  Synthetic
agttgtaactgcgtcctttggg

SEQ ID NO: 17913 - DNA, 22 bp, Artificial Sequence
  Synthetic
cgcactggatgttggctagacc

SEQ ID NO: 17914 - DNA, 20 bp, Artificial Sequence
  Synthetic
gctgcccgcatcatagctcg

SEQ ID NO: 17915 - DNA, 20 bp, Artificial Sequence
  Synthetic
aactcgacgccgtctgctga

SEQ ID NO: 17916 - DNA, 22 bp, Artificial Sequence
  Synthetic
cctctaacttttgccgcttagg

SEQ ID NO: 17917 - DNA, 22 bp, Artificial Sequence
  Synthetic
tgatggacctcgtctacggcta

SEQ ID NO: 17918 - DNA, 20 bp, Artificial Sequence
  Synthetic
aacggatccgggcacagttt

SEQ ID NO: 17919 - DNA, 21 bp, Artificial Sequence
  Synthetic
gccatcttgaaagcgctggtg

SEQ ID NO: 17920 - DNA, 22 bp, Artificial Sequence
  Synthetic
ccacgatccagtacccctcgaa

SEQ ID NO: 17921 - DNA, 22 bp, Artificial Sequence
  Synthetic
tgtttgctgcattgttagctga

SEQ ID NO: 17922 - DNA, 20 bp, Artificial Sequence
  Synthetic
actgcggaattccacaagga

SEQ ID NO: 17923 - DNA, 25 bp, Artificial Sequence
  Synthetic
ggtagttttatgtttcctggagtgt

SEQ ID NO: 17924 - DNA, 24 bp, Artificial Sequence
  Synthetic
agtgtgctctgaagaatcatgttt

SEQ ID NO: 17925 - DNA, 23 bp, Artificial Sequence
  Synthetic
aggtgccgtctaaatagggaatg

SEQ ID NO: 17926 - DNA, 25 bp, Artificial Sequence
  Synthetic
agttgttatgttgaaactctacggt

SEQ ID NO: 17927 - DNA, 22 bp, Artificial Sequence
  Synthetic
gggtccacagcctagatctcga

SEQ ID NO: 17928 - DNA, 22 bp, Artificial Sequence
  Synthetic
gaacatacaacaaaacaggccg

SEQ ID NO: 17929 - DNA, 22 bp, Artificial Sequence
  Synthetic
gctccccccctaggcttgttat

SEQ ID NO: 17930 - DNA, 21 bp, Artificial Sequence
  Synthetic
cttttatgctggccgactacc

SEQ ID NO: 17931 - DNA, 22 bp, Artificial Sequence
  Synthetic
ctgcgtgtgggagcataagtgt

SEQ ID NO: 17932 - DNA, 20 bp, Artificial Sequence
  Synthetic
gttgttgttcgcaatccggc

SEQ ID NO: 17933 - DNA, 20 bp, Artificial Sequence
  Synthetic
tcctcggggggagtctcgta

SEQ ID NO: 17934 - DNA, 25 bp, Artificial Sequence
  Synthetic
gacaggataggggtattttgtgatt

SEQ ID NO: 17935 - DNA, 21 bp, Artificial Sequence
  Synthetic
gcctccgggtcttgcaagttt

SEQ ID NO: 17936 - DNA, 20 bp, Artificial Sequence
  Synthetic
aagcattgctgccaaacacc

SEQ ID NO: 17937 - DNA, 20 bp, Artificial Sequence
  Synthetic
attgctgtcagactgcggtc

SEQ ID NO: 17938 - DNA, 20 bp, Artificial Sequence
  Synthetic
ttgcggctttcggggacatg

SEQ ID NO: 17939 - DNA, 20 bp, Artificial Sequence
  Synthetic
catgagcagtagccccgacg

SEQ ID NO: 17940 - DNA, 20 bp, Artificial Sequence
  Synthetic
tcgtgttcttgacctcgact

SEQ ID NO: 17941 - DNA, 22 bp, Artificial Sequence
  Synthetic
gagagcggcttgttctagcagt

SEQ ID NO: 17942 - DNA, 22 bp, Artificial Sequence
  Synthetic
cgggaacaggacaaatgcaata

SEQ ID NO: 17943 - DNA, 20 bp, Artificial Sequence
  Synthetic
aaatgcttgcgtacagggtg

SEQ ID NO: 17944 - DNA, 25 bp, Artificial Sequence
  Synthetic
agccagaaggtaaagaaaagagaaa

SEQ ID NO: 17945 - DNA, 24 bp, Artificial Sequence
  Synthetic
ccgtagtaccatcgactgacatta

SEQ ID NO: 17946 - DNA, 24 bp, Artificial Sequence
  Synthetic
gaaccgtcaccatactgtaagaaa

SEQ ID NO: 17947 - DNA, 25 bp, Artificial Sequence
  Synthetic
ttggatattcgggaagatcatcagt

SEQ ID NO: 17948 - DNA, 25 bp, Artificial Sequence
  Synthetic
tgttctttgcctggtaaagattcat

SEQ ID NO: 17949 - DNA, 24 bp, Artificial Sequence
  Synthetic
gtttgcaagtctgtcaggtttgac

SEQ ID NO: 17950 - DNA, 23 bp, Artificial Sequence
  Synthetic
aaggggctccaaaacattgatat

SEQ ID NO: 17951 - DNA, 22 bp, Artificial Sequence
  Synthetic
gggtaagagcgttgttgcgaac

SEQ ID NO: 17952 - DNA, 25 bp, Artificial Sequence
  Synthetic
gctcgcatcaaagggataattaaca

SEQ ID NO: 17953 - DNA, 25 bp, Artificial Sequence
  Synthetic
ggttgatgtgattaatcttccctgt

SEQ ID NO: 17954 - DNA, 24 bp, Artificial Sequence
  Synthetic
gcaatttgtgttttgtgtgtgttt

SEQ ID NO: 17955 - DNA, 25 bp, Artificial Sequence
  Synthetic
gatggacactgactgttgttacttt

SEQ ID NO: 17956 - DNA, 20 bp, Artificial Sequence
  Synthetic
gatgcttttgggacgctggt

SEQ ID NO: 17957 - DNA, 22 bp, Artificial Sequence
  Synthetic
aaagctacgttgagtacttcgg

SEQ ID NO: 17958 - DNA, 20 bp, Artificial Sequence
  Synthetic
tgccacctgcgagatttacg

SEQ ID NO: 17959 - DNA, 25 bp, Artificial Sequence
  Synthetic
tgctggcttctgatttgtatgattt

SEQ ID NO: 17960 - DNA, 20 bp, Artificial Sequence
  Synthetic
aagcatgtttcagaggtcgc

SEQ ID NO: 17961 - DNA, 21 bp, Artificial Sequence
  Synthetic
gcctaaacaagagggcgactc

SEQ ID NO: 17962 - DNA, 22 bp, Artificial Sequence
  Synthetic
cttctcgtaggcactttgcgga

SEQ ID NO: 17963 - DNA, 22 bp, Artificial Sequence
  Synthetic
agggagacatcaaggctgggtt

SEQ ID NO: 17964 - DNA, 22 bp, Artificial Sequence
  Synthetic
ccactgccaccaacaaacatcc

SEQ ID NO: 17965 - DNA, 20 bp, Artificial Sequence
  Synthetic
gtgcggtagctttaatggcc

SEQ ID NO: 17966 - DNA, 25 bp, Artificial Sequence
  Synthetic
tctttgttcttctgaagaaatggga

SEQ ID NO: 17967 - DNA, 21 bp, Artificial Sequence
  Synthetic
gtgtgaaattcgcccataggg

SEQ ID NO: 17968 - DNA, 20 bp, Artificial Sequence
  Synthetic
gcaggtattgggtggctctg

SEQ ID NO: 17969 - DNA, 24 bp, Artificial Sequence
  Synthetic
cctatggttccatgtacacacaac

SEQ ID NO: 17970 - DNA, 23 bp, Artificial Sequence
  Synthetic
acttgtcaccaatccattccaag

SEQ ID NO: 17971 - DNA, 24 bp, Artificial Sequence
  Synthetic
ggtctcttccatctggattttgac

SEQ ID NO: 17972 - DNA, 21 bp, Artificial Sequence
  Synthetic
ccccggagttgaatcatctcc

SEQ ID NO: 17973 - DNA, 25 bp, Artificial Sequence
  Synthetic
tccacatcattttcatctgtgacaa

SEQ ID NO: 17974 - DNA, 22 bp, Artificial Sequence
  Synthetic
ggttctttttcaccggggaata

SEQ ID NO: 17975 - DNA, 23 bp, Artificial Sequence
  Synthetic
aaacacccttctgaagttagctg

SEQ ID NO: 17976 - DNA, 20 bp, Artificial Sequence
  Synthetic
gaggccagaaacggctatct

SEQ ID NO: 17977 - DNA, 20 bp, Artificial Sequence
  Synthetic
gtcgtccaaggttgcaggtc

SEQ ID NO: 17978 - DNA, 25 bp, Artificial Sequence
  Synthetic
ctcctcctctgtaatctcatactca

SEQ ID NO: 17979 - DNA, 25 bp, Artificial Sequence
  Synthetic
ttctgcttcatggacaatataccaa

SEQ ID NO: 17980 - DNA, 24 bp, Artificial Sequence
  Synthetic
ggagttattttcacagcctgcaac

SEQ ID NO: 17981 - DNA, 25 bp, Artificial Sequence
  Synthetic
aactctctgttaacatagcatgctt

SEQ ID NO: 17982 - DNA, 24 bp, Artificial Sequence
  Synthetic
tcagaattgcttcttgaagtgcat

SEQ ID NO: 17983 - DNA, 25 bp, Artificial Sequence
  Synthetic
acagtccagttctgctaaatctttg

SEQ ID NO: 17984 - DNA, 22 bp, Artificial Sequence
  Synthetic
gggccctgattttccttctcgt

SEQ ID NO: 17985 - DNA, 25 bp, Artificial Sequence
  Synthetic
actcatgaataagaagttgcagcaa

SEQ ID NO: 17986 - DNA, 22 bp, Artificial Sequence
  Synthetic
tcagcaaacgatcagcaagagt

SEQ ID NO: 17987 - DNA, 25 bp, Artificial Sequence
  Synthetic
gatgttgttgggtctattgcatcta

SEQ ID NO: 17988 - DNA, 22 bp, Artificial Sequence
  Synthetic
gccaatgctatccgttttgtgg

SEQ ID NO: 17989 - DNA, 25 bp, Artificial Sequence
  Synthetic
agtaggtatttgctgaacccttcta

SEQ ID NO: 17990 - DNA, 25 bp, Artificial Sequence
  Synthetic
acttctagtttttattgtgcctcgg

SEQ ID NO: 17991 - DNA, 25 bp, Artificial Sequence
  Synthetic
gtctggcaaattgaatctaaacact

SEQ ID NO: 17992 - DNA, 25 bp, Artificial Sequence
  Synthetic
tccaaagaaaaacaagctatctcca

SEQ ID NO: 17993 - DNA, 21 bp, Artificial Sequence
  Synthetic
cctcaattccagagggaggtg

SEQ ID NO: 17994 - DNA, 23 bp, Artificial Sequence
  Synthetic
ccaaatgactcagagagactgga

SEQ ID NO: 17995 - DNA, 19 bp, Artificial Sequence
  Synthetic
gttggcagctgacgccggt

SEQ ID NO: 17996 - DNA, 20 bp, Artificial Sequence
  Synthetic
ttgcacagccagttgacgtt

SEQ ID NO: 17997 - DNA, 23 bp, Artificial Sequence
  Synthetic
tccatccgttataaaaaagcccg

SEQ ID NO: 17998 - DNA, 22 bp, Artificial Sequence
  Synthetic
gcacatacattgctccgtccct

SEQ ID NO: 17999 - DNA, 20 bp, Artificial Sequence
  Synthetic
tggaggtggccctgtatagg

SEQ ID NO: 18000 - DNA, 25 bp, Artificial Sequence
  Synthetic
gcttaaaaaatccttcccccattct

SEQ ID NO: 18001 - DNA, 25 bp, Artificial Sequence
  Synthetic
gcattgagagaagtaacagtagtct

SEQ ID NO: 18002 - DNA, 25 bp, Artificial Sequence
  Synthetic
gcagctgtaaaatcaactccttcat

SEQ ID NO: 18003 - DNA, 25 bp, Artificial Sequence
  Synthetic
ttaaacatgtcgcaaaccatttgat

SEQ ID NO: 18004 - DNA, 20 bp, Artificial Sequence
  Synthetic
tatggtcgttgcagacgtgg

SEQ ID NO: 18005 - DNA, 25 bp, Artificial Sequence
  Synthetic
gttgttgcatatccagcataatcaa

SEQ ID NO: 18006 - DNA, 24 bp, Artificial Sequence
  Synthetic
agctgtctactaattgctcatagc

SEQ ID NO: 18007 - DNA, 25 bp, Artificial Sequence
  Synthetic
gcactatagcttctaccataaacca

SEQ ID NO: 18008 - DNA, 20 bp, Artificial Sequence
  Synthetic
ctttccactgcctcggctat

SEQ ID NO: 18009 - DNA, 21 bp, Artificial Sequence
  Synthetic
tgctcccgtacactgtttgtg

SEQ ID NO: 18010 - DNA, 25 bp, Artificial Sequence
  Synthetic
actctcctcgcatatgtcattatca

SEQ ID NO: 18011 - DNA, 22 bp, Artificial Sequence
  Synthetic
cttcctcgtcctcagaatcctg

SEQ ID NO: 18012 - DNA, 25 bp, Artificial Sequence
  Synthetic
cggttccatactatactcagtcctt

SEQ ID NO: 18013 - DNA, 20 bp, Artificial Sequence
  Synthetic
gtttccactgtccacgggtc

SEQ ID NO: 18014 - DNA, 25 bp, Artificial Sequence
  Synthetic
tggtagggggtatttttacaacatc

SEQ ID NO: 18015 - DNA, 25 bp, Artificial Sequence
  Synthetic
ggttgttaatagcagccacaatagt

SEQ ID NO: 18016 - DNA, 21 bp, Artificial Sequence
  Synthetic
ctatataggcccacacgaggc

SEQ ID NO: 18017 - DNA, 25 bp, Artificial Sequence
  Synthetic
ggaaaagttatatcagggccagatt

SEQ ID NO: 18018 - DNA, 25 bp, Artificial Sequence
  Synthetic
gcatgataaaatatgttggtgcgag

SEQ ID NO: 18019 - DNA, 25 bp, Artificial Sequence
  Synthetic
ggaacatctgatttattggtctgca

SEQ ID NO: 18020 - DNA, 20 bp, Artificial Sequence
  Synthetic
gtccctgggctttttgtagc

SEQ ID NO: 18021 - DNA, 20 bp, Artificial Sequence
  Synthetic
taaggcaataccgcaccctg

SEQ ID NO: 18022 - DNA, 22 bp, Artificial Sequence
  Synthetic
tcaccggttccgaagaccacta

SEQ ID NO: 18023 - DNA, 22 bp, Artificial Sequence
  Synthetic
ctgcgcggcaacaagtaaactc

SEQ ID NO: 18024 - DNA, 20 bp, Artificial Sequence
  Synthetic
ctgacaccatgtgccagggc

SEQ ID NO: 18025 - DNA, 21 bp, Artificial Sequence
  Synthetic
cggtaggagtaagggccaccc

SEQ ID NO: 18026 - DNA, 22 bp, Artificial Sequence
  Synthetic
cccagtggcctccagagagtaa

SEQ ID NO: 18027 - DNA, 21 bp, Artificial Sequence
  Synthetic
gccttggccgtagctgtcaag

SEQ ID NO: 18028 - DNA, 22 bp, Artificial Sequence
  Synthetic
cggtactgttcatccacacgca

SEQ ID NO: 18029 - DNA, 22 bp, Artificial Sequence
  Synthetic
caggggtgatagctctacccga

SEQ ID NO: 18030 - DNA, 22 bp, Artificial Sequence
  Synthetic
caggagaaaacagggccacagc

SEQ ID NO: 18031 - DNA, 20 bp, Artificial Sequence
  Synthetic
aatcactgagtcgcgaggcc

SEQ ID NO: 18032 - DNA, 22 bp, Artificial Sequence
  Synthetic
cccttatgatgtctccgcacgc

SEQ ID NO: 18033 - DNA, 20 bp, Artificial Sequence
  Synthetic
accgcagtacccaggaagga

SEQ ID NO: 18034 - DNA, 20 bp, Artificial Sequence
  Synthetic
acgaagtctaccgccttggc

SEQ ID NO: 18035 - DNA, 21 bp, Artificial Sequence
  Synthetic
cgtggtgatggtcctgactcc

SEQ ID NO: 18036 - DNA, 22 bp, Artificial Sequence
  Synthetic
ccccccttgatcagctccagag

SEQ ID NO: 18037 - DNA, 20 bp, Artificial Sequence
  Synthetic
cctaccagtgcggcctctcc

SEQ ID NO: 18038 - DNA, 20 bp, Artificial Sequence
  Synthetic
tggagcgagccagaccttgg

SEQ ID NO: 18039 - DNA, 22 bp, Artificial Sequence
  Synthetic
ggtagagcacttcgcgatcagg

SEQ ID NO: 18040 - DNA, 22 bp, Artificial Sequence
  Synthetic
agggtttgttgggtggtcagag

SEQ ID NO: 18041 - DNA, 17 bp, Artificial Sequence
  Synthetic
tggcggcgcaaaatcgc

SEQ ID NO: 18042 - DNA, 21 bp, Artificial Sequence
  Synthetic
ggggatgcctggcattaaggg

SEQ ID NO: 18043 - DNA, 21 bp, Artificial Sequence
  Synthetic
gatgccgtccacttccgtgaa

SEQ ID NO: 18044 - DNA, 20 bp, Artificial Sequence
  Synthetic
acgtggcctgaagaagacgg

SEQ ID NO: 18045 - DNA, 19 bp, Artificial Sequence
  Synthetic
acagggggctgctttgccg

SEQ ID NO: 18046 - DNA, 22 bp, Artificial Sequence
  Synthetic
gccccagtccacgagtatgaca

SEQ ID NO: 18047 - DNA, 20 bp, Artificial Sequence
  Synthetic
ttgcgggaatggctccgaac

SEQ ID NO: 18048 - DNA, 22 bp, Artificial Sequence
  Synthetic
ggagtcaaagcagcgggtatca

SEQ ID NO: 18049 - DNA, 19 bp, Artificial Sequence
  Synthetic
ctacgccgtcgctctcagc

SEQ ID NO: 18050 - DNA, 20 bp, Artificial Sequence
  Synthetic
atcgagtttggcagcggcag

SEQ ID NO: 18051 - DNA, 25 bp, Artificial Sequence
  Synthetic
tgctgtgaccataagacaatatgaa

SEQ ID NO: 18052 - DNA, 22 bp, Artificial Sequence
  Synthetic
gcctcaacattgggtgaattca

SEQ ID NO: 18053 - DNA, 24 bp, Artificial Sequence
  Synthetic
cttgagtgcatctggtaatttcca

SEQ ID NO: 18054 - DNA, 24 bp, Artificial Sequence
  Synthetic
accaataaacaggtttgtcccaaa

SEQ ID NO: 18055 - DNA, 24 bp, Artificial Sequence
  Synthetic
cctgatgtccatggtattgtcatt

SEQ ID NO: 18056 - DNA, 21 bp, Artificial Sequence
  Synthetic
acctaagccttcagtgagtgc

SEQ ID NO: 18057 - DNA, 20 bp, Artificial Sequence
  Synthetic
tgccatgtgtaatcgcccac

SEQ ID NO: 18058 - DNA, 20 bp, Artificial Sequence
  Synthetic
gtagggtagtgctctgggtg

SEQ ID NO: 18059 - DNA, 25 bp, Artificial Sequence
  Synthetic
tggaatagtaaacacctgatgtacg

SEQ ID NO: 18060 - DNA, 25 bp, Artificial Sequence
  Synthetic
tgtcgtatgtcagcaaaacaaacat

SEQ ID NO: 18061 - DNA, 24 bp, Artificial Sequence
  Synthetic
ggagatccatcacatccaagtagt

SEQ ID NO: 18062 - DNA, 23 bp, Artificial Sequence
  Synthetic
cgtcccacaatggatgttgttaa

SEQ ID NO: 18063 - DNA, 25 bp, Artificial Sequence
  Synthetic
tgtgttagaatttgtggaggctaga

SEQ ID NO: 18064 - DNA, 25 bp, Artificial Sequence
  Synthetic
gggggtgctactcaaattaataagt

SEQ ID NO: 18065 - DNA, 25 bp, Artificial Sequence
  Synthetic
ccttgtcacctggaaaaacatcata

SEQ ID NO: 18066 - DNA, 25 bp, Artificial Sequence
  Synthetic
ggttgcctagtttcattctcatgtt

SEQ ID NO: 18067 - DNA, 20 bp, Artificial Sequence
  Synthetic
tctgggggtgtgatggttag

SEQ ID NO: 18068 - DNA, 20 bp, Artificial Sequence
  Synthetic
aacagcccatgggtccagct

SEQ ID NO: 18069 - DNA, 20 bp, Artificial Sequence
  Synthetic
actgagccctcctgcgacaa

SEQ ID NO: 18070 - DNA, 20 bp, Artificial Sequence
  Synthetic
gcaggcagcagtggatgtgt

SEQ ID NO: 18071 - DNA, 21 bp, Artificial Sequence
  Synthetic
cgatgagagcggaatgtcccg

SEQ ID NO: 18072 - DNA, 22 bp, Artificial Sequence
  Synthetic
accaggataccccgtggattgt

SEQ ID NO: 18073 - DNA, 24 bp, Artificial Sequence
  Synthetic
ggcgtaagataattcctgcagaaa

SEQ ID NO: 18074 - DNA, 24 bp, Artificial Sequence
  Synthetic
actctggctgtacaagaattacac

SEQ ID NO: 18075 - DNA, 23 bp, Artificial Sequence
  Synthetic
gctattccactgtcctcaaacag

SEQ ID NO: 18076 - DNA, 25 bp, Artificial Sequence
  Synthetic
tgtttgttttacaacccaatctggt

SEQ ID NO: 18077 - DNA, 25 bp, Artificial Sequence
  Synthetic
acaatctagtaatggctgaatccaa

SEQ ID NO: 18078 - DNA, 20 bp, Artificial Sequence
  Synthetic
ggtggggctgcttgatctcc

SEQ ID NO: 18079 - DNA, 21 bp, Artificial Sequence
  Synthetic
cctgatcgtggaacagatcga

SEQ ID NO: 18080 - DNA, 23 bp, Artificial Sequence
  Synthetic
catggaggtacccttaggaagtg

SEQ ID NO: 18081 - DNA, 22 bp, Artificial Sequence
  Synthetic
tccctccctaggtgtttgagca

SEQ ID NO: 18082 - DNA, 25 bp, Artificial Sequence
  Synthetic
tcatctatttcaaactgcgccatag

SEQ ID NO: 18083 - DNA, 22 bp, Artificial Sequence
  Synthetic
ctgtctagaggagttgtcagct

SEQ ID NO: 18084 - DNA, 25 bp, Artificial Sequence
  Synthetic
gggtcgaaagatacattttgcctat

SEQ ID NO: 18085 - DNA, 24 bp, Artificial Sequence
  Synthetic
tctgtataaaatccggccatttgc

SEQ ID NO: 18086 - DNA, 25 bp, Artificial Sequence
  Synthetic
cctcactagtaactagagaaccact

SEQ ID NO: 18087 - DNA, 25 bp, Artificial Sequence
  Synthetic
acctaaaggtgtctgatccaaatca

SEQ ID NO: 18088 - DNA, 25 bp, Artificial Sequence
  Synthetic
cgaagttaaagtgatagaacaccga

SEQ ID NO: 18089 - DNA, 22 bp, Artificial Sequence
  Synthetic
tgctggtgagagagaaaaggcc

SEQ ID NO: 18090 - DNA, 22 bp, Artificial Sequence
  Synthetic
gcgggtaggggcagtataccaa

SEQ ID NO: 18091 - DNA, 20 bp, Artificial Sequence
  Synthetic
acaggacctcaggcgggagg

SEQ ID NO: 18092 - DNA, 20 bp, Artificial Sequence
  Synthetic
agggcgtaggtgatggctcc

SEQ ID NO: 18093 - DNA, 20 bp, Artificial Sequence
  Synthetic
agcgacctcagaggcgttcc

SEQ ID NO: 18094 - DNA, 21 bp, Artificial Sequence
  Synthetic
aaaaccaacacccgtgggtca

SEQ ID NO: 18095 - DNA, 19 bp, Artificial Sequence
  Synthetic
tgccagggacgacgtagga

SEQ ID NO: 18096 - DNA, 21 bp, Artificial Sequence
  Synthetic
cagaggcggcataggtgagac

SEQ ID NO: 18097 - DNA, 22 bp, Artificial Sequence
  Synthetic
ccttagagccatccgggtaggt

SEQ ID NO: 18098 - DNA, 22 bp, Artificial Sequence
  Synthetic
gcagcctcaagcatctttgggt

SEQ ID NO: 18099 - DNA, 22 bp, Artificial Sequence
  Synthetic
gccagatttgctgtccgtgcaa

SEQ ID NO: 18100 - DNA, 18 bp, Artificial Sequence
  Synthetic
aatgacaacccggcgccc

SEQ ID NO: 18101 - DNA, 22 bp, Artificial Sequence
  Synthetic
ggaggacccgactagtggtctg

SEQ ID NO: 18102 - DNA, 20 bp, Artificial Sequence
  Synthetic
gagatgcccacctcgcgaag

SEQ ID NO: 18103 - DNA, 20 bp, Artificial Sequence
  Synthetic
aggtcgagctcaaggacggc

SEQ ID NO: 18104 - DNA, 22 bp, Artificial Sequence
  Synthetic
ccagggccccaattcttctcag

SEQ ID NO: 18105 - DNA, 19 bp, Artificial Sequence
  Synthetic
tgggcctggtcacgccaag

SEQ ID NO: 18106 - DNA, 21 bp, Artificial Sequence
  Synthetic
gggagacccgcgtgttggtat

SEQ ID NO: 18107 - DNA, 20 bp, Artificial Sequence
  Synthetic
agactgggccggtcgaagag

SEQ ID NO: 18108 - DNA, 22 bp, Artificial Sequence
  Synthetic
gcacccaggctagtggtgtaag

SEQ ID NO: 18109 - DNA, 20 bp, Artificial Sequence
  Synthetic
attggctgcatatcgacgac

SEQ ID NO: 18110 - DNA, 21 bp, Artificial Sequence
  Synthetic
ccaccaacgattcaggaacat

SEQ ID NO: 18111 - DNA, 23 bp, Artificial Sequence
  Synthetic
gcatgccagatttaccggttatg

SEQ ID NO: 18112 - DNA, 25 bp, Artificial Sequence
  Synthetic
aaactctttcatatgccgttcctat

SEQ ID NO: 18113 - DNA, 21 bp, Artificial Sequence
  Synthetic
acaacatccaacgccgtttta

SEQ ID NO: 18114 - DNA, 24 bp, Artificial Sequence
  Synthetic
aatcgagtcttttcgttcccataa

SEQ ID NO: 18115 - DNA, 22 bp, Artificial Sequence
  Synthetic
tgattaaacaatgggccgttga

SEQ ID NO: 18116 - DNA, 25 bp, Artificial Sequence
  Synthetic
ggaaagaccgtttgttttatagtgg

SEQ ID NO: 18117 - DNA, 22 bp, Artificial Sequence
  Synthetic
tgagtggattattcgacgggac

SEQ ID NO: 18118 - DNA, 24 bp, Artificial Sequence
  Synthetic
cctctatggttgacagcacatttc

SEQ ID NO: 18119 - DNA, 22 bp, Artificial Sequence
  Synthetic
acctcatcgaaatgcgtatagc

SEQ ID NO: 18120 - DNA, 20 bp, Artificial Sequence
  Synthetic
ttttcggtttaggcagccgg

SEQ ID NO: 18121 - DNA, 19 bp, Artificial Sequence
  Synthetic
tgtggccgcccggttttgg

SEQ ID NO: 18122 - DNA, 20 bp, Artificial Sequence
  Synthetic
cagtacgtgctgccgggttt

SEQ ID NO: 18123 - DNA, 20 bp, Artificial Sequence
  Synthetic
ccatccaacagggtgcggtt

SEQ ID NO: 18124 - DNA, 22 bp, Artificial Sequence
  Synthetic
aggaaacatgatgcccggggta

SEQ ID NO: 18125 - DNA, 25 bp, Artificial Sequence
  Synthetic
ccctgcttgcccatactatatgttt

SEQ ID NO: 18126 - DNA, 20 bp, Artificial Sequence
  Synthetic
gtgtcctgtgtcagctgctg

SEQ ID NO: 18127 - DNA, 20 bp, Artificial Sequence
  Synthetic
atctggcctggtgcaatagg

SEQ ID NO: 18128 - DNA, 22 bp, Artificial Sequence
  Synthetic
gttcgcattttggaccaacaag

SEQ ID NO: 18129 - DNA, 25 bp, Artificial Sequence
  Synthetic
tggaatattgctggtgatcctttcc

SEQ ID NO: 18130 - DNA, 24 bp, Artificial Sequence
  Synthetic
tctgtatgtcattgacagtccagc

SEQ ID NO: 18131 - DNA, 24 bp, Artificial Sequence
  Synthetic
tggttattttttgcactgcctctg

SEQ ID NO: 18132 - DNA, 25 bp, Artificial Sequence
  Synthetic
ccattgctctccaattactgtgata

SEQ ID NO: 18133 - DNA, 23 bp, Artificial Sequence
  Synthetic
actggccatcttcctgctaattt

SEQ ID NO: 18134 - DNA, 25 bp, Artificial Sequence
  Synthetic
gtgggatgtgtacttctgaacttat

SEQ ID NO: 18135 - DNA, 25 bp, Artificial Sequence
  Synthetic
gccaagtattgtagagatcctacct

SEQ ID NO: 18136 - DNA, 25 bp, Artificial Sequence
  Synthetic
gcagaattcttattatggcttccac

SEQ ID NO: 18137 - DNA, 21 bp, Artificial Sequence
  Synthetic
tgcttccttccacacaggtac

SEQ ID NO: 18138 - DNA, 25 bp, Artificial Sequence
  Synthetic
agttgatactactggcctaattcca

SEQ ID NO: 18139 - DNA, 25 bp, Artificial Sequence
  Synthetic
tctcttgttaatagcagccctgtaa

SEQ ID NO: 18140 - DNA, 22 bp, Artificial Sequence
  Synthetic
cgcctcaatagccctcagcaaa

SEQ ID NO: 18141 - DNA, 21 bp, Artificial Sequence
  Synthetic
gctcccaccctatctgctgct

SEQ ID NO: 18142 - DNA, 22 bp, Artificial Sequence
  Synthetic
agcaagctcgatgtcagcagtt

SEQ ID NO: 18143 - DNA, 22 bp, Artificial Sequence
  Synthetic
cgtcagagattcccacctcggt

SEQ ID NO: 18144 - DNA, 20 bp, Artificial Sequence
  Synthetic
ccaggggctcagtctggaca

SEQ ID NO: 18145 - DNA, 20 bp, Artificial Sequence
  Synthetic
cccccttcagcacctacgtg

SEQ ID NO: 18146 - DNA, 19 bp, Artificial Sequence
  Synthetic
tcttcgccgggctggacga

SEQ ID NO: 18147 - DNA, 19 bp, Artificial Sequence
  Synthetic
ttcgaggctgtgctgcgcg

SEQ ID NO: 18148 - DNA, 21 bp, Artificial Sequence
  Synthetic
cgcgtacatggccaagctcca

SEQ ID NO: 18149 - DNA, 19 bp, Artificial Sequence
  Synthetic
aggtcctggactgcgtggt

SEQ ID NO: 18150 - DNA, 19 bp, Artificial Sequence
  Synthetic
agctcgtgctcccagaggc

SEQ ID NO: 18151 - DNA, 20 bp, Artificial Sequence
  Synthetic
gctccggggacagttctcca

SEQ ID NO: 18152 - DNA, 21 bp, Artificial Sequence
  Synthetic
gggcaggactagctcgtcgtc

SEQ ID NO: 18153 - DNA, 20 bp, Artificial Sequence
  Synthetic
cgatacacggcaacccccgg

SEQ ID NO: 18154 - DNA, 21 bp, Artificial Sequence
  Synthetic
ctggtgttcgaactgggccac

SEQ ID NO: 18155 - DNA, 21 bp, Artificial Sequence
  Synthetic
tggagcttgtggccctacacc

SEQ ID NO: 18156 - DNA, 22 bp, Artificial Sequence
  Synthetic
gcaagggggagctgctgatcta

SEQ ID NO: 18157 - DNA, 20 bp, Artificial Sequence
  Synthetic
tgaccacatggggccggtac

SEQ ID NO: 18158 - DNA, 20 bp, Artificial Sequence
  Synthetic
gctgctgccgacacaacgtc

SEQ ID NO: 18159 - DNA, 19 bp, Artificial Sequence
  Synthetic
tcgggctggcggtcgatct

SEQ ID NO: 18160 - DNA, 20 bp, Artificial Sequence
  Synthetic
ccacgacatccgcggcttta

SEQ ID NO: 18161 - DNA, 20 bp, Artificial Sequence
  Synthetic
caaggcggcccacttggaat

SEQ ID NO: 18162 - DNA, 22 bp, Artificial Sequence
  Synthetic
acgaagtgaaccaactgccgaa

SEQ ID NO: 18163 - DNA, 18 bp, Artificial Sequence
  Synthetic
acgatcgtgctgcgcgag

SEQ ID NO: 18164 - DNA, 21 bp, Artificial Sequence
  Synthetic
gctgacgcgtgcttttgttcc

SEQ ID NO: 18165 - DNA, 21 bp, Artificial Sequence
  Synthetic
agagctacgcgtacctctgcc

SEQ ID NO: 18166 - DNA, 19 bp, Artificial Sequence
  Synthetic
ccaccaacgtgccctaccc

SEQ ID NO: 18167 - DNA, 19 bp, Artificial Sequence
  Synthetic
ttgtgcgggaggggcttgg

SEQ ID NO: 18168 - DNA, 21 bp, Artificial Sequence
  Synthetic
ccccgcgggatcggatacaag

SEQ ID NO: 18169 - DNA, 19 bp, Artificial Sequence
  Synthetic
tggcacaacagacccgcgg

SEQ ID NO: 18170 - DNA, 19 bp, Artificial Sequence
  Synthetic
ggtccatgttcgagggcgg

SEQ ID NO: 18171 - DNA, 21 bp, Artificial Sequence
  Synthetic
tcgaaggcggaatagtggcgc

SEQ ID NO: 18172 - DNA, 19 bp, Artificial Sequence
  Synthetic
tgcaggcggttgtcgaggc

SEQ ID NO: 18173 - DNA, 22 bp, Artificial Sequence
  Synthetic
cgtcagcaccttcatcgacctg

SEQ ID NO: 18174 - DNA, 21 bp, Artificial Sequence
  Synthetic
gccgcacctcaaggaggaact

SEQ ID NO: 18175 - DNA, 19 bp, Artificial Sequence
  Synthetic
tccagcgcaaccagctccc

SEQ ID NO: 18176 - DNA, 18 bp, Artificial Sequence
  Synthetic
agaagttctgccggcggc

SEQ ID NO: 18177 - DNA, 19 bp, Artificial Sequence
  Synthetic
aggttccgaacgccgtcgg

SEQ ID NO: 18178 - DNA, 19 bp, Artificial Sequence
  Synthetic
tctgcgccaagtgcctggg

SEQ ID NO: 18179 - DNA, 18 bp, Artificial Sequence
  Synthetic
acgccggtgttctgcacg

SEQ ID NO: 18180 - DNA, 21 bp, Artificial Sequence
  Synthetic
gctgatccacatgctggccat

SEQ ID NO: 18181 - DNA, 18 bp, Artificial Sequence
  Synthetic
acgtgagggctcgcagga

SEQ ID NO: 18182 - DNA, 22 bp, Artificial Sequence
  Synthetic
tccctcagatgatagggcgtgt

SEQ ID NO: 18183 - DNA, 21 bp, Artificial Sequence
  Synthetic
ggagtcgaggaccttcagggc

SEQ ID NO: 18184 - DNA, 22 bp, Artificial Sequence
  Synthetic
cctgcatgccaatgcccatgga

SEQ ID NO: 18185 - DNA, 21 bp, Artificial Sequence
  Synthetic
cggcgggatccatggcgatat

SEQ ID NO: 18186 - DNA, 21 bp, Artificial Sequence
  Synthetic
ccacgaacacgagctcggtct

SEQ ID NO: 18187 - DNA, 19 bp, Artificial Sequence
  Synthetic
tcatccacgacgccccgga

SEQ ID NO: 18188 - DNA, 19 bp, Artificial Sequence
  Synthetic
accgaggaggcgtgggtga

SEQ ID NO: 18189 - DNA, 20 bp, Artificial Sequence
  Synthetic
acggatcggcgggcaaaaac

SEQ ID NO: 18190 - DNA, 21 bp, Artificial Sequence
  Synthetic
gcgaatagctacggccgcttg

SEQ ID NO: 18191 - DNA, 19 bp, Artificial Sequence
  Synthetic
cccgtcggtcgcatacagc

SEQ ID NO: 18192 - DNA, 19 bp, Artificial Sequence
  Synthetic
tgcacaacgtacggggcgg

SEQ ID NO: 18193 - DNA, 21 bp, Artificial Sequence
  Synthetic
tgacatagtccccgcccaggc

SEQ ID NO: 18194 - DNA, 19 bp, Artificial Sequence
  Synthetic
gttggtcccgacgctcagc

SEQ ID NO: 18195 - DNA, 19 bp, Artificial Sequence
  Synthetic
tggtgaagggcgacgaacg

SEQ ID NO: 18196 - DNA, 19 bp, Artificial Sequence
  Synthetic
agctgcaccagggtctggc

SEQ ID NO: 18197 - DNA, 22 bp, Artificial Sequence
  Synthetic
cgtggcattcagacagtacggg

SEQ ID NO: 18198 - DNA, 21 bp, Artificial Sequence
  Synthetic
accacacgacatgcaggcttc

SEQ ID NO: 18199 - DNA, 18 bp, Artificial Sequence
  Synthetic
aagtcgacacaccgcgcg

SEQ ID NO: 18200 - DNA, 21 bp, Artificial Sequence
  Synthetic
cccgtgcatgaagacctggat

SEQ ID NO: 18201 - DNA, 20 bp, Artificial Sequence
  Synthetic
gcatcatcccgcccgcatcc

SEQ ID NO: 18202 - DNA, 19 bp, Artificial Sequence
  Synthetic
acgcgtggtaggtcgctgg

SEQ ID NO: 18203 - DNA, 22 bp, Artificial Sequence
  Synthetic
tgggatcggccatcttaagcga

SEQ ID NO: 18204 - DNA, 20 bp, Artificial Sequence
  Synthetic
ggcatgtaggagcacgctgc

SEQ ID NO: 18205 - DNA, 21 bp, Artificial Sequence
  Synthetic
ccaaaacaaaccggctggcgt

SEQ ID NO: 18206 - DNA, 22 bp, Artificial Sequence
  Synthetic
cgtgctggccccttgatacgat

SEQ ID NO: 18207 - DNA, 22 bp, Artificial Sequence
  Synthetic
ccagccttgcaagcactctagt

SEQ ID NO: 18208 - DNA, 25 bp, Artificial Sequence
  Synthetic
acagcaatacaatacagcaaacagt

SEQ ID NO: 18209 - DNA, 22 bp, Artificial Sequence
  Synthetic
ccgtatcccagtgttgcttgct

SEQ ID NO: 18210 - DNA, 25 bp, Artificial Sequence
  Synthetic
acctccatagcacttatctcactat

SEQ ID NO: 18211 - DNA, 25 bp, Artificial Sequence
  Synthetic
gcactggtttacaattatttctggc

SEQ ID NO: 18212 - DNA, 23 bp, Artificial Sequence
  Synthetic
gacaccgcttattcacatactgt

SEQ ID NO: 18213 - DNA, 25 bp, Artificial Sequence
  Synthetic
ggtgataaccaaaaatgtgacccat

SEQ ID NO: 18214 - DNA, 25 bp, Artificial Sequence
  Synthetic
cccatttccacaatacaacttctgt

SEQ ID NO: 18215 - DNA, 20 bp, Artificial Sequence
  Synthetic
ggggttctctccctcgtgga

SEQ ID NO: 18216 - DNA, 25 bp, Artificial Sequence
  Synthetic
tgcctagcaagcattgtttaatgat

SEQ ID NO: 18217 - DNA, 21 bp, Artificial Sequence
  Synthetic
cactggatatggacgggcgtc

SEQ ID NO: 18218 - DNA, 20 bp, Artificial Sequence
  Synthetic
gtcaattgtgtccccccggg

SEQ ID NO: 18219 - DNA, 21 bp, Artificial Sequence
  Synthetic
gccagtagtgcgcctctggta

SEQ ID NO: 18220 - DNA, 20 bp, Artificial Sequence
  Synthetic
gcgtagggtctcctctcaca

SEQ ID NO: 18221 - DNA, 21 bp, Artificial Sequence
  Synthetic
gcagcatggaggaaagtactg

SEQ ID NO: 18222 - DNA, 25 bp, Artificial Sequence
  Synthetic
agggattttcagcatcatcaaactt

SEQ ID NO: 18223 - DNA, 24 bp, Artificial Sequence
  Synthetic
actcatgtctgcatcctcaatgta

SEQ ID NO: 18224 - DNA, 25 bp, Artificial Sequence
  Synthetic
ggtgtgccttaaaaactcaaaaaac

SEQ ID NO: 18225 - DNA, 25 bp, Artificial Sequence
  Synthetic
acctcccaaaacttaagatctttgt

SEQ ID NO: 18226 - DNA, 22 bp, Artificial Sequence
  Synthetic
ggggctattggcaagacagacc

SEQ ID NO: 18227 - DNA, 22 bp, Artificial Sequence
  Synthetic
tctccttcacaatcggatgaca

SEQ ID NO: 18228 - DNA, 23 bp, Artificial Sequence
  Synthetic
ggtgatatgtgaacagcatgcag

SEQ ID NO: 18229 - DNA, 25 bp, Artificial Sequence
  Synthetic
aggagctctctcatacagattcatt

SEQ ID NO: 18230 - DNA, 24 bp, Artificial Sequence
  Synthetic
gatcagcaagtgtttcaccttcta

SEQ ID NO: 18231 - DNA, 20 bp, Artificial Sequence
  Synthetic
ttgaactgcgcgggaaactt

SEQ ID NO: 18232 - DNA, 25 bp, Artificial Sequence
  Synthetic
gctcaggaattgctgataaatccat

SEQ ID NO: 18233 - DNA, 25 bp, Artificial Sequence
  Synthetic
ggtttccttcacatattcatccgta

SEQ ID NO: 18234 - DNA, 21 bp, Artificial Sequence
  Synthetic
aggaccacccctatccatttg

SEQ ID NO: 18235 - DNA, 25 bp, Artificial Sequence
  Synthetic
tttctgtaaaaatcagcaagctgtt

SEQ ID NO: 18236 - DNA, 23 bp, Artificial Sequence
  Synthetic
ccgttgcgcactaaatagaagtg

SEQ ID NO: 18237 - DNA, 22 bp, Artificial Sequence
  Synthetic
gaagagtacgaacagcagtagc

SEQ ID NO: 18238 - DNA, 24 bp, Artificial Sequence
  Synthetic
gagagatacatgaaccgtctgtac

SEQ ID NO: 18239 - DNA, 24 bp, Artificial Sequence
  Synthetic
atagcgactacctgagaagtactt

SEQ ID NO: 18240 - DNA, 23 bp, Artificial Sequence
  Synthetic
tgctgaagctgttcgatgatcta

SEQ ID NO: 18241 - DNA, 25 bp, Artificial Sequence
  Synthetic
tgcccaagtatcattggttatttca

SEQ ID NO: 18242 - DNA, 20 bp, Artificial Sequence
  Synthetic
atgtggacggggtgttgctg

SEQ ID NO: 18243 - DNA, 21 bp, Artificial Sequence
  Synthetic
cccgttcgctgagttgatcga

SEQ ID NO: 18244 - DNA, 23 bp, Artificial Sequence
  Synthetic
agcgcgctttgatctatacattt

SEQ ID NO: 18245 - DNA, 25 bp, Artificial Sequence
  Synthetic
tggtacagtctccggtaaaggtata

SEQ ID NO: 18246 - DNA, 25 bp, Artificial Sequence
  Synthetic
tccgctgcatctgtatatatttcat

SEQ ID NO: 18247 - DNA, 25 bp, Artificial Sequence
  Synthetic
tgatcctattcaagggttgtaactc

SEQ ID NO: 18248 - DNA, 24 bp, Artificial Sequence
  Synthetic
ctctctaagatcccgctcaaactc

SEQ ID NO: 18249 - DNA, 25 bp, Artificial Sequence
  Synthetic
cctccccctaatccatctactatag

SEQ ID NO: 18250 - DNA, 21 bp, Artificial Sequence
  Synthetic
gatgacccgatgttcccaatc

SEQ ID NO: 18251 - DNA, 24 bp, Artificial Sequence
  Synthetic
agccaatatcacacatatccccat

SEQ ID NO: 18252 - DNA, 25 bp, Artificial Sequence
  Synthetic
tcacagttgaacattcacagtacat

SEQ ID NO: 18253 - DNA, 25 bp, Artificial Sequence
  Synthetic
tctgaacttgcacttacctttacaa

SEQ ID NO: 18254 - DNA, 25 bp, Artificial Sequence
  Synthetic
cgtagtgtagtttgatacagttcct

SEQ ID NO: 18255 - DNA, 24 bp, Artificial Sequence
  Synthetic
gtactgctctgacaccttggatat

SEQ ID NO: 18256 - DNA, 25 bp, Artificial Sequence
  Synthetic
acctttttgtcactaggaaggtcta

SEQ ID NO: 18257 - DNA, 23 bp, Artificial Sequence
  Synthetic
gctaacgaagtgtccatgtgttc

SEQ ID NO: 18258 - DNA, 25 bp, Artificial Sequence
  Synthetic
aggaaatcctcaaaatgaattccct

SEQ ID NO: 18259 - DNA, 25 bp, Artificial Sequence
  Synthetic
gacaaaacctcgttgcttaaaaggt

SEQ ID NO: 18260 - DNA, 22 bp, Artificial Sequence
  Synthetic
gactcaactcagcaacagtctg

SEQ ID NO: 18261 - DNA, 25 bp, Artificial Sequence
  Synthetic
gcagaaatatgatttcccagtgtca

SEQ ID NO: 18262 - DNA, 25 bp, Artificial Sequence
  Synthetic
ggatcttaaatcagtttctcccctt

SEQ ID NO: 18263 - DNA, 21 bp, Artificial Sequence
  Synthetic
tgctccggaggttcgttctcc

SEQ ID NO: 18264 - DNA, 25 bp, Artificial Sequence
  Synthetic
cgatctgctaatgtattgccttcta

SEQ ID NO: 18265 - DNA, 20 bp, Artificial Sequence
  Synthetic
tgcttctgcatgcacacttg

SEQ ID NO: 18266 - DNA, 25 bp, Artificial Sequence
  Synthetic
ggcgggattttcaaattcaaattga

SEQ ID NO: 18267 - DNA, 25 bp, Artificial Sequence
  Synthetic
aggctctataggttcaattgcacta

SEQ ID NO: 18268 - DNA, 20 bp, Artificial Sequence
  Synthetic
tttgccacaggtttagccgg

SEQ ID NO: 18269 - DNA, 25 bp, Artificial Sequence
  Synthetic
cgttcaggattgaaaattgactgat

SEQ ID NO: 18270 - DNA, 20 bp, Artificial Sequence
  Synthetic
taggtggacagtctcctgca

SEQ ID NO: 18271 - DNA, 20 bp, Artificial Sequence
  Synthetic
aatggcgagcatacgactgc

SEQ ID NO: 18272 - DNA, 25 bp, Artificial Sequence
  Synthetic
gacatcttgttgccaaagatgttat

SEQ ID NO: 18273 - DNA, 25 bp, Artificial Sequence
  Synthetic
ggctatgttccaaacaacttacctt

SEQ ID NO: 18274 - DNA, 23 bp, Artificial Sequence
  Synthetic
cccttatcaacaaaactgcttgc

SEQ ID NO: 18275 - DNA, 25 bp, Artificial Sequence
  Synthetic
gcaacaaaaaaaagccttacacctc

SEQ ID NO: 18276 - DNA, 24 bp, Artificial Sequence
  Synthetic
tccacaggttcatcgtctagtaaa

SEQ ID NO: 18277 - DNA, 22 bp, Artificial Sequence
  Synthetic
attcattatggcggttcccatg

SEQ ID NO: 18278 - DNA, 22 bp, Artificial Sequence
  Synthetic
gatggtgtttcggaactgatcg

SEQ ID NO: 18279 - DNA, 23 bp, Artificial Sequence
  Synthetic
ttgctgttccaccaattggttta

SEQ ID NO: 18280 - DNA, 20 bp, Artificial Sequence
  Synthetic
gtgcttgtactaggacccgc

SEQ ID NO: 18281 - DNA, 25 bp, Artificial Sequence
  Synthetic
cctgtgacttttggtacttctactt

SEQ ID NO: 18282 - DNA, 25 bp, Artificial Sequence
  Synthetic
ggccatatctaatctgttgtcttct

SEQ ID NO: 18283 - DNA, 25 bp, Artificial Sequence
  Synthetic
accgtcttcctaaataagactgact

SEQ ID NO: 18284 - DNA, 21 bp, Artificial Sequence
  Synthetic
aattgttgggtgcggtaagga

SEQ ID NO: 18285 - DNA, 25 bp, Artificial Sequence
  Synthetic
tgcatgtgtctaaatcttcttgtct

SEQ ID NO: 18286 - DNA, 21 bp, Artificial Sequence
  Synthetic
tggtgctatgtttcttggagc

SEQ ID NO: 18287 - DNA, 25 bp, Artificial Sequence
  Synthetic
ccgcttttaatgcatctgaaacatt

SEQ ID NO: 18288 - DNA, 20 bp, Artificial Sequence
  Synthetic
gcaggctaggacacggtcac

SEQ ID NO: 18289 - DNA, 20 bp, Artificial Sequence
  Synthetic
gtgaattcagtgctggtgcc

SEQ ID NO: 18290 - DNA, 25 bp, Artificial Sequence
  Synthetic
gccaaatactcccatgtccttaaga

SEQ ID NO: 18291 - DNA, 20 bp, Artificial Sequence
  Synthetic
tgttgtagatggcgtcgctg

SEQ ID NO: 18292 - DNA, 25 bp, Artificial Sequence
  Synthetic
ccagtaaattctgtgcacattggtg

SEQ ID NO: 18293 - DNA, 25 bp, Artificial Sequence
  Synthetic
accaatgtagagttttgtgccaaat

SEQ ID NO: 18294 - DNA, 25 bp, Artificial Sequence
  Synthetic
ggattgtaagccaatatcccataca

SEQ ID NO: 18295 - DNA, 25 bp, Artificial Sequence
  Synthetic
tgcgttcttgtttttgatttctgtc

SEQ ID NO: 18296 - DNA, 23 bp, Artificial Sequence
  Synthetic
ctttgccatgtgtaatcatccca

SEQ ID NO: 18297 - DNA, 20 bp, Artificial Sequence
  Synthetic
tgcttccacatgtttggctc

SEQ ID NO: 18298 - DNA, 23 bp, Artificial Sequence
  Synthetic
ggagtagtaaacaccggatgtgc

SEQ ID NO: 18299 - DNA, 22 bp, Artificial Sequence
  Synthetic
gcaaaacagacataaccgcctc

SEQ ID NO: 18300 - DNA, 25 bp, Artificial Sequence
  Synthetic
cgagtcatgtatggatgctatttgt

SEQ ID NO: 18301 - DNA, 25 bp, Artificial Sequence
  Synthetic
tggatgtagttagtgatttgccaga

SEQ ID NO: 18302 - DNA, 20 bp, Artificial Sequence
  Synthetic
agtggggggacttagagtgt

SEQ ID NO: 18303 - DNA, 24 bp, Artificial Sequence
  Synthetic
gtgttggtaagacacagatacgat

SEQ ID NO: 18304 - DNA, 25 bp, Artificial Sequence
  Synthetic
gccatggttattggtcctacatcta

SEQ ID NO: 18305 - DNA, 23 bp, Artificial Sequence
  Synthetic
cttggttttggtgggtgtgttta

SEQ ID NO: 18306 - DNA, 24 bp, Artificial Sequence
  Synthetic
cctccccatactctttcattgttt

SEQ ID NO: 18307 - DNA, 22 bp, Artificial Sequence
  Synthetic
attcggaagtctaagtggtcgt

SEQ ID NO: 18308 - DNA, 23 bp, Artificial Sequence
  Synthetic
ctcatgcttgcaatgtgttcaat

SEQ ID NO: 18309 - DNA, 23 bp, Artificial Sequence
  Synthetic
gtcagtgagagaaaactccatgc

SEQ ID NO: 18310 - DNA, 22 bp, Artificial Sequence
  Synthetic
tttgacagaggactcagcttca

SEQ ID NO: 18311 - DNA, 25 bp, Artificial Sequence
  Synthetic
ggattcttctcctgtcttcctgatg

SEQ ID NO: 18312 - DNA, 25 bp, Artificial Sequence
  Synthetic
catgttttagcctttcgaccttttc

SEQ ID NO: 18313 - DNA, 23 bp, Artificial Sequence
  Synthetic
ccaccattaaaggggcaattttg

SEQ ID NO: 18314 - DNA, 21 bp, Artificial Sequence
  Synthetic
ggcacatctccaaaagcgaag

SEQ ID NO: 18315 - DNA, 23 bp, Artificial Sequence
  Synthetic
cccgaccattgtgaattcctcat

SEQ ID NO: 18316 - DNA, 21 bp, Artificial Sequence
  Synthetic
aggacctttgcatccttttgg

SEQ ID NO: 18317 - DNA, 22 bp, Artificial Sequence
  Synthetic
cagcttttctgttccctgtgtt

SEQ ID NO: 18318 - DNA, 20 bp, Artificial Sequence
  Synthetic
catcctactctgcttcggcg

SEQ ID NO: 18319 - DNA, 25 bp, Artificial Sequence
  Synthetic
gctaccaaatcaaatttctcttgca

SEQ ID NO: 18320 - DNA, 25 bp, Artificial Sequence
  Synthetic
cgagactgtagaatcacaatcactt

SEQ ID NO: 18321 - DNA, 22 bp, Artificial Sequence
  Synthetic
gttcagcttcatcttcgcctaa

SEQ ID NO: 18322 - DNA, 22 bp, Artificial Sequence
  Synthetic
gctcagcgacagagttggtggt

SEQ ID NO: 18323 - DNA, 25 bp, Artificial Sequence
  Synthetic
gaagtcgttcaagtctcgatagacc

SEQ ID NO: 18324 - DNA, 20 bp, Artificial Sequence
  Synthetic
tgacctccaccacccttacc

SEQ ID NO: 18325 - DNA, 25 bp, Artificial Sequence
  Synthetic
acaccagttacttcagaaacaagat

SEQ ID NO: 18326 - DNA, 24 bp, Artificial Sequence
  Synthetic
gcgccttatattagcaggatgtat

SEQ ID NO: 18327 - DNA, 25 bp, Artificial Sequence
  Synthetic
cgtcattcaaaacgtcaaagtaagg

SEQ ID NO: 18328 - DNA, 25 bp, Artificial Sequence
  Synthetic
gggcataaacattaggattttccgt

SEQ ID NO: 18329 - DNA, 22 bp, Artificial Sequence
  Synthetic
ggaggctgcacgacactcatac

SEQ ID NO: 18330 - DNA, 19 bp, Artificial Sequence
  Synthetic
accaacgatctggccgccg

SEQ ID NO: 18331 - DNA, 20 bp, Artificial Sequence
  Synthetic
gctctcacgcaaggcacaca

SEQ ID NO: 18332 - DNA, 22 bp, Artificial Sequence
  Synthetic
ttcgggcactctcagaatgctc

SEQ ID NO: 18333 - DNA, 20 bp, Artificial Sequence
  Synthetic
gttccaagggcttgcatgcg

SEQ ID NO: 18334 - DNA, 21 bp, Artificial Sequence
  Synthetic
agagttcatccacgtgcaccc

SEQ ID NO: 18335 - DNA, 21 bp, Artificial Sequence
  Synthetic
gggcatggtggtaaagctgca

SEQ ID NO: 18336 - DNA, 19 bp, Artificial Sequence
  Synthetic
acaccaaccggcggtaccc

SEQ ID NO: 18337 - DNA, 19 bp, Artificial Sequence
  Synthetic
acgcagcggtgtctgcacc

SEQ ID NO: 18338 - DNA, 22 bp, Artificial Sequence
  Synthetic
agccagcaccgtgataaacagt

SEQ ID NO: 18339 - DNA, 18 bp, Artificial Sequence
  Synthetic
ttggccacgcccctcgta

SEQ ID NO: 18340 - DNA, 22 bp, Artificial Sequence
  Synthetic
ggagtggcactcgtcacagatg

SEQ ID NO: 18341 - DNA, 20 bp, Artificial Sequence
  Synthetic
cgcctgaggtggggatcaca

SEQ ID NO: 18342 - DNA, 20 bp, Artificial Sequence
  Synthetic
agcttcacagagcacgacgc

SEQ ID NO: 18343 - DNA, 22 bp, Artificial Sequence
  Synthetic
taggaggggggtaggacctgtg

SEQ ID NO: 18344 - DNA, 22 bp, Artificial Sequence
  Synthetic
cagcccaaggaccttttgcttg

SEQ ID NO: 18345 - DNA, 19 bp, Artificial Sequence
  Synthetic
aagctgtggacgcggaggg

SEQ ID NO: 18346 - DNA, 21 bp, Artificial Sequence
  Synthetic
gtttgatgcgtccgtctcggg

SEQ ID NO: 18347 - DNA, 22 bp, Artificial Sequence
  Synthetic
tccggggtcctgtgatcttcat

SEQ ID NO: 18348 - DNA, 22 bp, Artificial Sequence
  Synthetic
gcccacagagaagctcacctca

SEQ ID NO: 18349 - DNA, 22 bp, Artificial Sequence
  Synthetic
ggtggtctatggcactctgctg

SEQ ID NO: 18350 - DNA, 20 bp, Artificial Sequence
  Synthetic
gccggctattgaccctccga

SEQ ID NO: 18351 - DNA, 22 bp, Artificial Sequence
  Synthetic
acccgcacggataagtctggat

SEQ ID NO: 18352 - DNA, 20 bp, Artificial Sequence
  Synthetic
tggcacggcatctgcgatag

SEQ ID NO: 18353 - DNA, 22 bp, Artificial Sequence
  Synthetic
tggtacagtcacgggtgaggta

SEQ ID NO: 18354 - DNA, 20 bp, Artificial Sequence
  Synthetic
cgctcccaccctgttgagtt

SEQ ID NO: 18355 - DNA, 25 bp, Artificial Sequence
  Synthetic
gcaatgtaggcttcaatgttctcat

SEQ ID NO: 18356 - DNA, 25 bp, Artificial Sequence
  Synthetic
gtcaattcaacaactgcatggtagg

SEQ ID NO: 18357 - DNA, 25 bp, Artificial Sequence
  Synthetic
cgatgtgcttttccattatccattt

SEQ ID NO: 18358 - DNA, 20 bp, Artificial Sequence
  Synthetic
ggagtgatgcttctgcgatg

SEQ ID NO: 18359 - DNA, 24 bp, Artificial Sequence
  Synthetic
ctaaccatagcagagaccaaactg

SEQ ID NO: 18360 - DNA, 25 bp, Artificial Sequence
  Synthetic
tggttttttgggtcttttcactctt

SEQ ID NO: 18361 - DNA, 24 bp, Artificial Sequence
  Synthetic
gccaaatcttgtaagcatacagga

SEQ ID NO: 18362 - DNA, 21 bp, Artificial Sequence
  Synthetic
acacctgttccacaagtgtga

SEQ ID NO: 18363 - DNA, 25 bp, Artificial Sequence
  Synthetic
tcttctaggattccactgtcatcaa

SEQ ID NO: 18364 - DNA, 25 bp, Artificial Sequence
  Synthetic
ccaaacacatatgaagcatttccaa

SEQ ID NO: 18365 - DNA, 25 bp, Artificial Sequence
  Synthetic
gaaggttctgttggcacatctatat

SEQ ID NO: 18366 - DNA, 25 bp, Artificial Sequence
  Synthetic
cattgtattcagaaactaccagtgc

SEQ ID NO: 18367 - DNA, 25 bp, Artificial Sequence
  Synthetic
gcacagtccattctccagttttact

SEQ ID NO: 18368 - DNA, 24 bp, Artificial Sequence
  Synthetic
gcatttgcccctcctctaattata

SEQ ID NO: 18369 - DNA, 23 bp, Artificial Sequence
  Synthetic
tgccatctggaattactctgcta

SEQ ID NO: 18370 - DNA, 25 bp, Artificial Sequence
  Synthetic
cgtatcctattcaaaccttgactga

SEQ ID NO: 18371 - DNA, 25 bp, Artificial Sequence
  Synthetic
agcctcagtaaatgctgtattctgt

SEQ ID NO: 18372 - DNA, 25 bp, Artificial Sequence
  Synthetic
gaccaacaccttagattgatctaca

SEQ ID NO: 18373 - DNA, 25 bp, Artificial Sequence
  Synthetic
ccttgttctcgctttccataaaaga

SEQ ID NO: 18374 - DNA, 25 bp, Artificial Sequence
  Synthetic
cctgtagtggaattttacaaagctg

SEQ ID NO: 18375 - DNA, 23 bp, Artificial Sequence
  Synthetic
actcaagctgaagtgtgcaaatt

SEQ ID NO: 18376 - DNA, 25 bp, Artificial Sequence
  Synthetic
acgttatctccctcttaagtttcct

SEQ ID NO: 18377 - DNA, 25 bp, Artificial Sequence
  Synthetic
cgcatttgaaaaaaagacgatcaag

SEQ ID NO: 18378 - DNA, 25 bp, Artificial Sequence
  Synthetic
tcatctgatatagcatcccctgttt

SEQ ID NO: 18379 - DNA, 23 bp, Artificial Sequence
  Synthetic
ctgctgagtttccacttcagtat

SEQ ID NO: 18380 - DNA, 25 bp, Artificial Sequence
  Synthetic
tgtgttagtattttgtcctgacaca

SEQ ID NO: 18381 - DNA, 25 bp, Artificial Sequence
  Synthetic
gcacttccactgtatatccatgttt

SEQ ID NO: 18382 - DNA, 25 bp, Artificial Sequence
  Synthetic
aggtgtggtatcagttgaagtagta

SEQ ID NO: 18383 - DNA, 25 bp, Artificial Sequence
  Synthetic
gcttacaaccttagatactgggaca

SEQ ID NO: 18384 - DNA, 20 bp, Artificial Sequence
  Synthetic
ctacacaggcccaaaccagc

SEQ ID NO: 18385 - DNA, 24 bp, Artificial Sequence
  Synthetic
tcaccatcctgaataactgtgttt

SEQ ID NO: 18386 - DNA, 25 bp, Artificial Sequence
  Synthetic
cagtagacccagagcctttaatgta

SEQ ID NO: 18387 - DNA, 25 bp, Artificial Sequence
  Synthetic
ctgatctaggtctgcagaaaacttt

SEQ ID NO: 18388 - DNA, 25 bp, Artificial Sequence
  Synthetic
gcaggaaacgtacaagtttaaacca

SEQ ID NO: 18389 - DNA, 25 bp, Artificial Sequence
  Synthetic
tgtgcataactgtggtaactttctg

SEQ ID NO: 18390 - DNA, 25 bp, Artificial Sequence
  Synthetic
tctttgctttttgtccagatgtctt

SEQ ID NO: 18391 - DNA, 20 bp, Artificial Sequence
  Synthetic
gttctgcttgtccagctgga

SEQ ID NO: 18392 - DNA, 24 bp, Artificial Sequence
  Synthetic
tcgattttcggatcttccccatat

SEQ ID NO: 18393 - DNA, 24 bp, Artificial Sequence
  Synthetic
agtcatacagatccgggagaaatt

SEQ ID NO: 18394 - DNA, 24 bp, Artificial Sequence
  Synthetic
tcttcatgttctttgtccttggaa

SEQ ID NO: 18395 - DNA, 20 bp, Artificial Sequence
  Synthetic
ccgtctcatgcttgcaatgt

SEQ ID NO: 18396 - DNA, 23 bp, Artificial Sequence
  Synthetic
cttgggtcggtaagggaaaattc

SEQ ID NO: 18397 - DNA, 25 bp, Artificial Sequence
  Synthetic
tcaaagaattctttggtcaggtctt

SEQ ID NO: 18398 - DNA, 24 bp, Artificial Sequence
  Synthetic
ttctctgtgtgaccattttcttgg

SEQ ID NO: 18399 - DNA, 23 bp, Artificial Sequence
  Synthetic
gctttcttctcattccctccgac

SEQ ID NO: 18400 - DNA, 25 bp, Artificial Sequence
  Synthetic
tgtgtccgtaacttcatactcttac

SEQ ID NO: 18401 - DNA, 20 bp, Artificial Sequence
  Synthetic
tctgaggattggagtccgtc

SEQ ID NO: 18402 - DNA, 25 bp, Artificial Sequence
  Synthetic
ctggtccaagatcgttgtttatcat

SEQ ID NO: 18403 - DNA, 25 bp, Artificial Sequence
  Synthetic
atcaattcccatttcaagcagacct

SEQ ID NO: 18404 - DNA, 24 bp, Artificial Sequence
  Synthetic
caagagaaattcccaccagagttt

SEQ ID NO: 18405 - DNA, 25 bp, Artificial Sequence
  Synthetic
tcagatacctcgaaagactcctgat

SEQ ID NO: 18406 - DNA, 25 bp, Artificial Sequence
  Synthetic
cctcagcaggtatatcctcataaca

SEQ ID NO: 18407 - DNA, 25 bp, Artificial Sequence
  Synthetic
tgcctcatccacaatataccaatca

SEQ ID NO: 18408 - DNA, 20 bp, Artificial Sequence
  Synthetic
ggcagtctctgtggcacttg

SEQ ID NO: 18409 - DNA, 25 bp, Artificial Sequence
  Synthetic
ggcaagtagagcagatcttgtatta

SEQ ID NO: 18410 - DNA, 24 bp, Artificial Sequence
  Synthetic
aagtctaactggctccaaaacctt

SEQ ID NO: 18411 - DNA, 25 bp, Artificial Sequence
  Synthetic
tgaggccactaagataaagagtcat

SEQ ID NO: 18412 - DNA, 22 bp, Artificial Sequence
  Synthetic
cgatttcgggtggtgtctcgac

SEQ ID NO: 18413 - DNA, 25 bp, Artificial Sequence
  Synthetic
cgtcgtttacgtactcttaacatga

SEQ ID NO: 18414 - DNA, 22 bp, Artificial Sequence
  Synthetic
tgggaacgtgtgattgtacgtg

SEQ ID NO: 18415 - DNA, 21 bp, Artificial Sequence
  Synthetic
agaaacgtgtaggcctttcct

SEQ ID NO: 18416 - DNA, 25 bp, Artificial Sequence
  Synthetic
gccatcatttgaggagatagagcta

SEQ ID NO: 18417 - DNA, 24 bp, Artificial Sequence
  Synthetic
atgaactaatttgcgacgtttacg

SEQ ID NO: 18418 - DNA, 25 bp, Artificial Sequence
  Synthetic
ctggaaatctaacacgaaagactct

SEQ ID NO: 18419 - DNA, 20 bp, Artificial Sequence
  Synthetic
ttgaccagtgttccccagtg

SEQ ID NO: 18420 - DNA, 22 bp, Artificial Sequence
  Synthetic
cagtttttggaacagaacgctg

SEQ ID NO: 18421 - DNA, 25 bp, Artificial Sequence
  Synthetic
gtcatgaggctatatgactaggcaa

SEQ ID NO: 18422 - DNA, 22 bp, Artificial Sequence
  Synthetic
cagatgctctgatttctgtggc

SEQ ID NO: 18423 - DNA, 24 bp, Artificial Sequence
  Synthetic
cctccagaaatttcggtcattgat

SEQ ID NO: 18424 - DNA, 22 bp, Artificial Sequence
  Synthetic
gtcatgcccacttgctactgca

SEQ ID NO: 18425 - DNA, 20 bp, Artificial Sequence
  Synthetic
tggacccctcttgtggaaag

SEQ ID NO: 18426 - DNA, 25 bp, Artificial Sequence
  Synthetic
gagaacatgaaataaagggctctct

SEQ ID NO: 18427 - DNA, 25 bp, Artificial Sequence
  Synthetic
cgttgtattttaatacagccactgc

SEQ ID NO: 18428 - DNA, 22 bp, Artificial Sequence
  Synthetic
tctgcacacacacatcactttg

SEQ ID NO: 18429 - DNA, 24 bp, Artificial Sequence
  Synthetic
gatcccaaatcatctcaaacccat

SEQ ID NO: 18430 - DNA, 23 bp, Artificial Sequence
  Synthetic
gagttttcaaagatccctgggtg

SEQ ID NO: 18431 - DNA, 22 bp, Artificial Sequence
  Synthetic
gccttcttttcattccctccga

SEQ ID NO: 18432 - DNA, 24 bp, Artificial Sequence
  Synthetic
ctttccctaatcttgccatcttgt

SEQ ID NO: 18433 - DNA, 20 bp, Artificial Sequence
  Synthetic
gtccgtcccaccagtatgtg

SEQ ID NO: 18434 - DNA, 22 bp, Artificial Sequence
  Synthetic
accaatgctcatgtcagccgat

SEQ ID NO: 18435 - DNA, 20 bp, Artificial Sequence
  Synthetic
atcctcaaagcgcgccatag

SEQ ID NO: 18436 - DNA, 25 bp, Artificial Sequence
  Synthetic
tgtctccatacacagagtctgaata

SEQ ID NO: 18437 - DNA, 23 bp, Artificial Sequence
  Synthetic
ttggggctctaaatgcaatacaa

SEQ ID NO: 18438 - DNA, 20 bp, Artificial Sequence
  Synthetic
gcatcattgtggacctcctg

SEQ ID NO: 18439 - DNA, 20 bp, Artificial Sequence
  Synthetic
atacattgccgccatgttcg

SEQ ID NO: 18440 - DNA, 25 bp, Artificial Sequence
  Synthetic
acatctaaatcgtatccactgtgac

SEQ ID NO: 18441 - DNA, 22 bp, Artificial Sequence
  Synthetic
atgttcccttgctgcaaagaat

SEQ ID NO: 18442 - DNA, 23 bp, Artificial Sequence
  Synthetic
ccatgttcctgcatcagtcatat

SEQ ID NO: 18443 - DNA, 21 bp, Artificial Sequence
  Synthetic
ggtgctggaatacggtgaggg

SEQ ID NO: 18444 - DNA, 25 bp, Artificial Sequence
  Synthetic
tgccaggtggatgatatatctctat

SEQ ID NO: 18445 - DNA, 22 bp, Artificial Sequence
  Synthetic
ataccaatacccatgcatacgc

SEQ ID NO: 18446 - DNA, 25 bp, Artificial Sequence
  Synthetic
aacatcactacgaggatcaaatgtt

SEQ ID NO: 18447 - DNA, 22 bp, Artificial Sequence
  Synthetic
agggtccatgtcatctgcatat

SEQ ID NO: 18448 - DNA, 24 bp, Artificial Sequence
  Synthetic
cacagcccaaaatacataactgtg

SEQ ID NO: 18449 - DNA, 24 bp, Artificial Sequence
  Synthetic
tgctctattccaaaaatgcctagc

SEQ ID NO: 18450 - DNA, 25 bp, Artificial Sequence
  Synthetic
gagactgtgtagaagcacatattgt

SEQ ID NO: 18451 - DNA, 22 bp, Artificial Sequence
  Synthetic
tgctgtaaggtgtgcagtttta

SEQ ID NO: 18452 - DNA, 25 bp, Artificial Sequence
  Synthetic
cggtataagggaaagttgtgcttat

SEQ ID NO: 18453 - DNA, 25 bp, Artificial Sequence
  Synthetic
cgagttttcaaaaataccaggatgg

SEQ ID NO: 18454 - DNA, 20 bp, Artificial Sequence
  Synthetic
tctcattgcctccaactggc

SEQ ID NO: 18455 - DNA, 24 bp, Artificial Sequence
  Synthetic
ccatcccaccagtaagtagtcttg

SEQ ID NO: 18456 - DNA, 20 bp, Artificial Sequence
  Synthetic
ctgactcgttgctcccagac

SEQ ID NO: 18457 - DNA, 25 bp, Artificial Sequence
  Synthetic
actgctggggaagaatttttcaaat

SEQ ID NO: 18458 - DNA, 20 bp, Artificial Sequence
  Synthetic
acaggatccaccgcctttcg

SEQ ID NO: 18459 - DNA, 22 bp, Artificial Sequence
  Synthetic
ggagcccacaacaatagtgggc

SEQ ID NO: 18460 - DNA, 20 bp, Artificial Sequence
  Synthetic
ggctccgccaaacttcccaa

SEQ ID NO: 18461 - DNA, 20 bp, Artificial Sequence
  Synthetic
gtgcctcgcccaccactaaa

SEQ ID NO: 18462 - DNA, 22 bp, Artificial Sequence
  Synthetic
gccgacactgtgccaagaacct

SEQ ID NO: 18463 - DNA, 22 bp, Artificial Sequence
  Synthetic
gctcacagtcatgttgacccca

SEQ ID NO: 18464 - DNA, 22 bp, Artificial Sequence
  Synthetic
ggcggccctttttgacatggat

SEQ ID NO: 18465 - DNA, 22 bp, Artificial Sequence
  Synthetic
ggcggcgttactgactgaatca

SEQ ID NO: 18466 - DNA, 22 bp, Artificial Sequence
  Synthetic
agcatctggcagtgccgagaac

SEQ ID NO: 18467 - DNA, 20 bp, Artificial Sequence
  Synthetic
gcggttgcctatgggagtgt

SEQ ID NO: 18468 - DNA, 19 bp, Artificial Sequence
  Synthetic
ctggcttcacagcgacggg

SEQ ID NO: 18469 - DNA, 20 bp, Artificial Sequence
  Synthetic
ctggttgaccaccacctggc

SEQ ID NO: 18470 - DNA, 21 bp, Artificial Sequence
  Synthetic
gacccgattgccacgatgcaa

SEQ ID NO: 18471 - DNA, 22 bp, Artificial Sequence
  Synthetic
catgcccagaacactaacgccg

SEQ ID NO: 18472 - DNA, 22 bp, Artificial Sequence
  Synthetic
cgtcctctcgcactcaaccttt

SEQ ID NO: 18473 - DNA, 22 bp, Artificial Sequence
  Synthetic
ccagcgcggagtagtagtgtcc

SEQ ID NO: 18474 - DNA, 22 bp, Artificial Sequence
  Synthetic
ggcccccccacctgagtaataa

SEQ ID NO: 18475 - DNA, 19 bp, Artificial Sequence
  Synthetic
tcacaggggtagcgctccc

SEQ ID NO: 18476 - DNA, 22 bp, Artificial Sequence
  Synthetic
ccaccccgagaggtggattcct

SEQ ID NO: 18477 - DNA, 20 bp, Artificial Sequence
  Synthetic
gccaggcaggagatgatgca

SEQ ID NO: 18478 - DNA, 20 bp, Artificial Sequence
  Synthetic
agagggattttgaggcgcgg

SEQ ID NO: 18479 - DNA, 20 bp, Artificial Sequence
  Synthetic
cgtcaccgtaaccgtgccag

SEQ ID NO: 18480 - DNA, 21 bp, Artificial Sequence
  Synthetic
catcctccagagcctgcaagg

SEQ ID NO: 18481 - DNA, 22 bp, Artificial Sequence
  Synthetic
caatgtcccccactgtgtctgt

SEQ ID NO: 18482 - DNA, 22 bp, Artificial Sequence
  Synthetic
acagttatcgcagccggatgtt

SEQ ID NO: 18483 - DNA, 22 bp, Artificial Sequence
  Synthetic
gccgagcaacactcagctgtat

SEQ ID NO: 18484 - DNA, 22 bp, Artificial Sequence
  Synthetic
atccggtgatgaaccacttcgg

SEQ ID NO: 18485 - DNA, 24 bp, Artificial Sequence
  Synthetic
tgccacagaaattgcaaggtatta

SEQ ID NO: 18486 - DNA, 20 bp, Artificial Sequence
  Synthetic
attcccttccaggcgttcct

SEQ ID NO: 18487 - DNA, 25 bp, Artificial Sequence
  Synthetic
tgctccagttcagtatcatctaaca

SEQ ID NO: 18488 - DNA, 25 bp, Artificial Sequence
  Synthetic
gcagtgtaatgtatatctacgtccc

SEQ ID NO: 18489 - DNA, 23 bp, Artificial Sequence
  Synthetic
ggacccagatatagtcacaatgc

SEQ ID NO: 18490 - DNA, 25 bp, Artificial Sequence
  Synthetic
tggtatgctatatctgcttcgtcta

SEQ ID NO: 18491 - DNA, 24 bp, Artificial Sequence
  Synthetic
acactctacccttcaacactctta

SEQ ID NO: 18492 - DNA, 25 bp, Artificial Sequence
  Synthetic
gccttgtaaaaaaagatttccagct

SEQ ID NO: 18493 - DNA, 19 bp, Artificial Sequence
  Synthetic
gtcgcgggggtggtgtttg

SEQ ID NO: 18494 - DNA, 21 bp, Artificial Sequence
  Synthetic
ctccccttctgcaggtggttg

SEQ ID NO: 18495 - DNA, 24 bp, Artificial Sequence
  Synthetic
agcttcttccagtaatcttccaag

SEQ ID NO: 18496 - DNA, 22 bp, Artificial Sequence
  Synthetic
caggttgccataggccttatca

SEQ ID NO: 18497 - DNA, 22 bp, Artificial Sequence
  Synthetic
gcccctcaggtacaggatggat

SEQ ID NO: 18498 - DNA, 25 bp, Artificial Sequence
  Synthetic
ggttcttcaaagacatccagatcat

SEQ ID NO: 18499 - DNA, 25 bp, Artificial Sequence
  Synthetic
tttctgcattattacgtgactctgg

SEQ ID NO: 18500 - DNA, 25 bp, Artificial Sequence
  Synthetic
ggatcaaaagatgtatcctgtctgt

SEQ ID NO: 18501 - DNA, 25 bp, Artificial Sequence
  Synthetic
ccactaacagttgggaaatacatgg

SEQ ID NO: 18502 - DNA, 25 bp, Artificial Sequence
  Synthetic
cgttttgttcctctattagaccctt

SEQ ID NO: 18503 - DNA, 25 bp, Artificial Sequence
  Synthetic
tgggttggtacattcattgaaatgt

SEQ ID NO: 18504 - DNA, 25 bp, Artificial Sequence
  Synthetic
acataaggttctcttgtcacccaaa

SEQ ID NO: 18505 - DNA, 23 bp, Artificial Sequence
  Synthetic
ccccagtgacacaaacatgtaac

SEQ ID NO: 18506 - DNA, 20 bp, Artificial Sequence
  Synthetic
ataccgggggtaacaggagc

SEQ ID NO: 18507 - DNA, 22 bp, Artificial Sequence
  Synthetic
agcgcgaatctttcttgattgt

SEQ ID NO: 18508 - DNA, 25 bp, Artificial Sequence
  Synthetic
ggtgttttatcgattgttccggtat

SEQ ID NO: 18509 - DNA, 22 bp, Artificial Sequence
  Synthetic
gtccagctttgaccatcatctg

SEQ ID NO: 18510 - DNA, 25 bp, Artificial Sequence
  Synthetic
tgggattgactttgtttttgtctga

SEQ ID NO: 18511 - DNA, 23 bp, Artificial Sequence
  Synthetic
ccgaaagtggtgcatagtttctt

SEQ ID NO: 18512 - DNA, 25 bp, Artificial Sequence
  Synthetic
ctacagcaatttctccaatgacaac

SEQ ID NO: 18513 - DNA, 25 bp, Artificial Sequence
  Synthetic
gctctccaatcaataattgctcaaa

SEQ ID NO: 18514 - DNA, 25 bp, Artificial Sequence
  Synthetic
gttcattaaacaatgccagggaatt

SEQ ID NO: 18515 - DNA, 25 bp, Artificial Sequence
  Synthetic
tggctcatcatggagattgttatca

SEQ ID NO: 18516 - DNA, 25 bp, Artificial Sequence
  Synthetic
cacccaggataggttacatcatcta

SEQ ID NO: 18517 - DNA, 25 bp, Artificial Sequence
  Synthetic
tggatcttctttaggctctagatca

SEQ ID NO: 18518 - DNA, 21 bp, Artificial Sequence
  Synthetic
tcgtcttggggtttgcggtac

SEQ ID NO: 18519 - DNA, 25 bp, Artificial Sequence
  Synthetic
tgatgtggtgtctgttacaatgttt

SEQ ID NO: 18520 - DNA, 25 bp, Artificial Sequence
  Synthetic
tgctagtagttggtaagtcctcaat

SEQ ID NO: 18521 - DNA, 25 bp, Artificial Sequence
  Synthetic
tgcgtttcagtacactaggatgtat

SEQ ID NO: 18522 - DNA, 25 bp, Artificial Sequence
  Synthetic
tgtttggatctggaaattgtagtct

SEQ ID NO: 18523 - DNA, 20 bp, Artificial Sequence
  Synthetic
ccccatcctctgcttgcttt

SEQ ID NO: 18524 - DNA, 25 bp, Artificial Sequence
  Synthetic
aggccaaatactgatttcattcgta

SEQ ID NO: 18525 - DNA, 23 bp, Artificial Sequence
  Synthetic
tggctcctaatgccctatgtaaa

SEQ ID NO: 18526 - DNA, 25 bp, Artificial Sequence
  Synthetic
gctgtcctctttgatacaaaaatcg

SEQ ID NO: 18527 - DNA, 21 bp, Artificial Sequence
  Synthetic
gggaatgtggtgcttatggca

SEQ ID NO: 18528 - DNA, 22 bp, Artificial Sequence
  Synthetic
tcaaagatacctgggtgggatt

SEQ ID NO: 18529 - DNA, 25 bp, Artificial Sequence
  Synthetic
ggtcatgttgtctcttactctcctt

SEQ ID NO: 18530 - DNA, 20 bp, Artificial Sequence
  Synthetic
attacccccaaccggaagtc

SEQ ID NO: 18531 - DNA, 25 bp, Artificial Sequence
  Synthetic
tctcttactctcgaacatgtatcct

SEQ ID NO: 18532 - DNA, 21 bp, Artificial Sequence
  Synthetic
gcccatcccaccagtatgttg

SEQ ID NO: 18533 - DNA, 25 bp, Artificial Sequence
  Synthetic
ccaaggtcattgtttatcatgttgt

SEQ ID NO: 18534 - DNA, 25 bp, Artificial Sequence
  Synthetic
ggatgtgaaggttccggatattgta

SEQ ID NO: 18535 - DNA, 20 bp, Artificial Sequence
  Synthetic
ctcgaacaagttgcagcact

SEQ ID NO: 18536 - DNA, 23 bp, Artificial Sequence
  Synthetic
tcagtctccttcaaatctgtgct

SEQ ID NO: 18537 - DNA, 25 bp, Artificial Sequence
  Synthetic
tcagattctgctatgtcatcagttt

SEQ ID NO: 18538 - DNA, 20 bp, Artificial Sequence
  Synthetic
atgcaccgctgaaagtctcg

SEQ ID NO: 18539 - DNA, 25 bp, Artificial Sequence
  Synthetic
gctagtgacagaggaatgaatagtt

SEQ ID NO: 18540 - DNA, 24 bp, Artificial Sequence
  Synthetic
gcaatttagcatcacccctgtatc

SEQ ID NO: 18541 - DNA, 25 bp, Artificial Sequence
  Synthetic
tccaattcccaaattgccaaagtat

SEQ ID NO: 18542 - DNA, 20 bp, Artificial Sequence
  Synthetic
atcagttccacctgctgcag

SEQ ID NO: 18543 - DNA, 25 bp, Artificial Sequence
  Synthetic
aaacgttccaaaggtatctcttcat

SEQ ID NO: 18544 - DNA, 21 bp, Artificial Sequence
  Synthetic
cccgctcaaagtataggctca

SEQ ID NO: 18545 - DNA, 25 bp, Artificial Sequence
  Synthetic
gcgtgcatgaaagtaaacatcagtt

SEQ ID NO: 18546 - DNA, 24 bp, Artificial Sequence
  Synthetic
gatgaccagtagatccaacaccta

SEQ ID NO: 18547 - DNA, 25 bp, Artificial Sequence
  Synthetic
aggaaagtttgcattaccaaatcct

SEQ ID NO: 18548 - DNA, 25 bp, Artificial Sequence
  Synthetic
cgttacaaagcagattaacaggcaa

SEQ ID NO: 18549 - DNA, 25 bp, Artificial Sequence
  Synthetic
actgtccacaaatagacgtctttta

SEQ ID NO: 18550 - DNA, 20 bp, Artificial Sequence
  Synthetic
ctggtgtccccgtcgctttg

SEQ ID NO: 18551 - DNA, 25 bp, Artificial Sequence
  Synthetic
agcgatatctccagcattttaatgt

SEQ ID NO: 18552 - DNA, 24 bp, Artificial Sequence
  Synthetic
acaggttcaaccactatgtttggt

SEQ ID NO: 18553 - DNA, 20 bp, Artificial Sequence
  Synthetic
tataggggctgctggttgca

SEQ ID NO: 18554 - DNA, 23 bp, Artificial Sequence
  Synthetic
gctctactaaaagctcttggtgt

SEQ ID NO: 18555 - DNA, 25 bp, Artificial Sequence
  Synthetic
catgtgagttactgaaatcctctgt

SEQ ID NO: 18556 - DNA, 24 bp, Artificial Sequence
  Synthetic
ggcagccaatatgacatctgtaaa

SEQ ID NO: 18557 - DNA, 22 bp, Artificial Sequence
  Synthetic
accctattgcaacacgtttacg

SEQ ID NO: 18558 - DNA, 24 bp, Artificial Sequence
  Synthetic
caggatatacctatgaagggtggg

SEQ ID NO: 18559 - DNA, 25 bp, Artificial Sequence
  Synthetic
gcgacaaaaggtacaaggtagtcta

SEQ ID NO: 18560 - DNA, 25 bp, Artificial Sequence
  Synthetic
caaactctgcacactgaatctattc

SEQ ID NO: 18561 - DNA, 25 bp, Artificial Sequence
  Synthetic
ccactgttctcaaacaatcgtcttt

SEQ ID NO: 18562 - DNA, 25 bp, Artificial Sequence
  Synthetic
tgtagcatttccagttgtacactta

SEQ ID NO: 18563 - DNA, 25 bp, Artificial Sequence
  Synthetic
gttgaatccaaaaatgactgtgact

SEQ ID NO: 18564 - DNA, 20 bp, Artificial Sequence
  Synthetic
gcttcttgcacagcatcgaa

SEQ ID NO: 18565 - DNA, 25 bp, Artificial Sequence
  Synthetic
agaggtaacagagggagaaatagtt

SEQ ID NO: 18566 - DNA, 25 bp, Artificial Sequence
  Synthetic
caattgtctttgtgcagtgtcttta

SEQ ID NO: 18567 - DNA, 23 bp, Artificial Sequence
  Synthetic
ccttcatttagaggcaccaaagc

SEQ ID NO: 18568 - DNA, 23 bp, Artificial Sequence
  Synthetic
tgtacttgttgtacccgcctatt

SEQ ID NO: 18569 - DNA, 25 bp, Artificial Sequence
  Synthetic
agtggttgtgctatatctgttacaa

SEQ ID NO: 18570 - DNA, 24 bp, Artificial Sequence
  Synthetic
ggatctggcagcataacccttaat

SEQ ID NO: 18571 - DNA, 25 bp, Artificial Sequence
  Synthetic
tccccataggattcctttgtcattt

SEQ ID NO: 18572 - DNA, 25 bp, Artificial Sequence
  Synthetic
ggaacaaatgctaaattccagtctt

SEQ ID NO: 18573 - DNA, 25 bp, Artificial Sequence
  Synthetic
caatgaaacattaaggtgcaagcat

SEQ ID NO: 18574 - DNA, 20 bp, Artificial Sequence
  Synthetic
gcagttaccactcccggtac

SEQ ID NO: 18575 - DNA, 22 bp, Artificial Sequence
  Synthetic
aggcagtcccccgtgatagtct

SEQ ID NO: 18576 - DNA, 19 bp, Artificial Sequence
  Synthetic
gacgcaatggacccgaggg

SEQ ID NO: 18577 - DNA, 21 bp, Artificial Sequence
  Synthetic
gcgggagtcgtatctggcgat

SEQ ID NO: 18578 - DNA, 21 bp, Artificial Sequence
  Synthetic
ctggacaaggtcgccatctgc

SEQ ID NO: 18579 - DNA, 21 bp, Artificial Sequence
  Synthetic
ccccctgccttacgtggtctt

SEQ ID NO: 18580 - DNA, 19 bp, Artificial Sequence
  Synthetic
agagccaggaccaggacgc

SEQ ID NO: 18581 - DNA, 22 bp, Artificial Sequence
  Synthetic
cacgcctacctgaaggtgaccc

SEQ ID NO: 18582 - DNA, 19 bp, Artificial Sequence
  Synthetic
agacggcgtccctggagtc

SEQ ID NO: 18583 - DNA, 22 bp, Artificial Sequence
  Synthetic
ccaggtacatcagcagacaggc

SEQ ID NO: 18584 - DNA, 22 bp, Artificial Sequence
  Synthetic
tcgtcgtcgaacggttttacgt

SEQ ID NO: 18585 - DNA, 20 bp, Artificial Sequence
  Synthetic
gcggtggcgctgttcaagat

SEQ ID NO: 18586 - DNA, 21 bp, Artificial Sequence
  Synthetic
cccgatgacgtgctggaccta

SEQ ID NO: 18587 - DNA, 21 bp, Artificial Sequence
  Synthetic
cgtcagtttacggaccgcgtg

SEQ ID NO: 18588 - DNA, 22 bp, Artificial Sequence
  Synthetic
cgggaaaaactaccgcgctgat

SEQ ID NO: 18589 - DNA, 21 bp, Artificial Sequence
  Synthetic
ggacgtaaaccaggtgggcca

SEQ ID NO: 18590 - DNA, 19 bp, Artificial Sequence
  Synthetic
ctcgccgagctatgggcct

SEQ ID NO: 18591 - DNA, 19 bp, Artificial Sequence
  Synthetic
ggagggcgtaacgttccgc

SEQ ID NO: 18592 - DNA, 19 bp, Artificial Sequence
  Synthetic
gcccgttaaccccccacgt

SEQ ID NO: 18593 - DNA, 19 bp, Artificial Sequence
  Synthetic
actgtcgtcggtggcgctg

SEQ ID NO: 18594 - DNA, 22 bp, Artificial Sequence
  Synthetic
tcaaccccgccctacactacac

SEQ ID NO: 18595 - DNA, 19 bp, Artificial Sequence
  Synthetic
ttggtgagcgcctggacgc

SEQ ID NO: 18596 - DNA, 22 bp, Artificial Sequence
  Synthetic
cggtttgttggcgcctttatgg

SEQ ID NO: 18597 - DNA, 21 bp, Artificial Sequence
  Synthetic
ctcctgtgcaccctcacgttc

SEQ ID NO: 18598 - DNA, 21 bp, Artificial Sequence
  Synthetic
cttcctaacccagaccccggg

SEQ ID NO: 18599 - DNA, 20 bp, Artificial Sequence
  Synthetic
cccacccccgaaccatgaac

SEQ ID NO: 18600 - DNA, 19 bp, Artificial Sequence
  Synthetic
tcagaacgggccggtcgtc

SEQ ID NO: 18601 - DNA, 19 bp, Artificial Sequence
  Synthetic
aaggtcatccgaggcgccg

SEQ ID NO: 18602 - DNA, 20 bp, Artificial Sequence
  Synthetic
aaggctgccgctttacgagg

SEQ ID NO: 18603 - DNA, 19 bp, Artificial Sequence
  Synthetic
aatcgtggcgcggctcgtg

SEQ ID NO: 18604 - DNA, 20 bp, Artificial Sequence
  Synthetic
gcgcctgatcgtggagacgg

SEQ ID NO: 18605 - DNA, 22 bp, Artificial Sequence
  Synthetic
cgctttgtgactgagaacgtgc

SEQ ID NO: 18606 - DNA, 21 bp, Artificial Sequence
  Synthetic
ggctcgtggtccagtgcatca

SEQ ID NO: 18607 - DNA, 21 bp, Artificial Sequence
  Synthetic
gaccagatgctgcacgtgctg

SEQ ID NO: 18608 - DNA, 20 bp, Artificial Sequence
  Synthetic
ctcgtgcgctttctggagct

SEQ ID NO: 18609 - DNA, 19 bp, Artificial Sequence
  Synthetic
accttcagtccggacgggc

SEQ ID NO: 18610 - DNA, 19 bp, Artificial Sequence
  Synthetic
taagctccatcgcgggcgg

SEQ ID NO: 18611 - DNA, 19 bp, Artificial Sequence
  Synthetic
tcctggcccagcagaccca

SEQ ID NO: 18612 - DNA, 18 bp, Artificial Sequence
  Synthetic
tgctcgcgacgtcgggtt

SEQ ID NO: 18613 - DNA, 19 bp, Artificial Sequence
  Synthetic
tcgaccgcctggccaaacg

SEQ ID NO: 18614 - DNA, 19 bp, Artificial Sequence
  Synthetic
gtggcgtgaaactcccgca

SEQ ID NO: 18615 - DNA, 22 bp, Artificial Sequence
  Synthetic
ggagggggaaggaacgaaacac

SEQ ID NO: 18616 - DNA, 22 bp, Artificial Sequence
  Synthetic
gggaactcgggggtgatgaagt

SEQ ID NO: 18617 - DNA, 21 bp, Artificial Sequence
  Synthetic
tcttggacatacggccgtccc

SEQ ID NO: 18618 - DNA, 20 bp, Artificial Sequence
  Synthetic
gaggccaagctagccgaggc

SEQ ID NO: 18619 - DNA, 22 bp, Artificial Sequence
  Synthetic
acatcaccaccgtcagcacctt

SEQ ID NO: 18620 - DNA, 19 bp, Artificial Sequence
  Synthetic
accccaacgccatcgcctc

SEQ ID NO: 18621 - DNA, 20 bp, Artificial Sequence
  Synthetic
gcgacgcacatcaaggtggg

SEQ ID NO: 18622 - DNA, 18 bp, Artificial Sequence
  Synthetic
cgagatgctgcgctccga

SEQ ID NO: 18623 - DNA, 18 bp, Artificial Sequence
  Synthetic
ttccccaacggcaagccc

SEQ ID NO: 18624 - DNA, 22 bp, Artificial Sequence
  Synthetic
atcaattccaaccggtgctgcg

SEQ ID NO: 18625 - DNA, 19 bp, Artificial Sequence
  Synthetic
agtacgtggaccaggcggt

SEQ ID NO: 18626 - DNA, 22 bp, Artificial Sequence
  Synthetic
acaaggtaaccataggcggggc

SEQ ID NO: 18627 - DNA, 20 bp, Artificial Sequence
  Synthetic
caccatcaaggtcccccccg

SEQ ID NO: 18628 - DNA, 20 bp, Artificial Sequence
  Synthetic
cggtaaaacagagcggggcg

SEQ ID NO: 18629 - DNA, 20 bp, Artificial Sequence
  Synthetic
cgcgagcggatctgctttcg

SEQ ID NO: 18630 - DNA, 19 bp, Artificial Sequence
  Synthetic
atcttgtcgcccacggccg

SEQ ID NO: 18631 - DNA, 20 bp, Artificial Sequence
  Synthetic
ccacttacgggggccacatg

SEQ ID NO: 18632 - DNA, 22 bp, Artificial Sequence
  Synthetic
gctcttaacgaggctctctgcg

SEQ ID NO: 18633 - DNA, 20 bp, Artificial Sequence
  Synthetic
acatgctggccatcatcggc

SEQ ID NO: 18634 - DNA, 22 bp, Artificial Sequence
  Synthetic
ccgccaaccaagggctgataga

SEQ ID NO: 18635 - DNA, 19 bp, Artificial Sequence
  Synthetic
acacgttcttcgccggccc

SEQ ID NO: 18636 - DNA, 19 bp, Artificial Sequence
  Synthetic
tcgtggtcaccggtgctcg

SEQ ID NO: 18637 - DNA, 19 bp, Artificial Sequence
  Synthetic
ttccccgcccggtcgagtt

SEQ ID NO: 18638 - DNA, 21 bp, Artificial Sequence
  Synthetic
cggttcttggccctggtgagt

SEQ ID NO: 18639 - DNA, 19 bp, Artificial Sequence
  Synthetic
accccacagccaaacgcgg

SEQ ID NO: 18640 - DNA, 18 bp, Artificial Sequence
  Synthetic
tccacatcgcgcaggggt

SEQ ID NO: 18641 - DNA, 19 bp, Artificial Sequence
  Synthetic
tagcccgatgcccccgttg

SEQ ID NO: 18642 - DNA, 19 bp, Artificial Sequence
  Synthetic
aggttggagccggcgatgg

SEQ ID NO: 18643 - DNA, 21 bp, Artificial Sequence
  Synthetic
atcgccgacaggtttctggag

SEQ ID NO: 18644 - DNA, 19 bp, Artificial Sequence
  Synthetic
gccagtgacgtggacgcct

SEQ ID NO: 18645 - DNA, 21 bp, Artificial Sequence
  Synthetic
agtgttccaggggcaggaaca

SEQ ID NO: 18646 - DNA, 19 bp, Artificial Sequence
  Synthetic
tgggcgtggcactatcggc

SEQ ID NO: 18647 - DNA, 22 bp, Artificial Sequence
  Synthetic
ttccggaatttatacccgggcc

SEQ ID NO: 18648 - DNA, 20 bp, Artificial Sequence
  Synthetic
cacggggttacgcgggtagt

SEQ ID NO: 18649 - DNA, 19 bp, Artificial Sequence
  Synthetic
tgggcacgtacacccccct

SEQ ID NO: 18650 - DNA, 19 bp, Artificial Sequence
  Synthetic
acgcgcagactgtcgacgg

SEQ ID NO: 18651 - DNA, 21 bp, Artificial Sequence
  Synthetic
gggctgtcattcctcgggaac

SEQ ID NO: 18652 - DNA, 21 bp, Artificial Sequence
  Synthetic
tggtgaatccagacgtggtgc

SEQ ID NO: 18653 - DNA, 21 bp, Artificial Sequence
  Synthetic
gctcgacctctccacacctgc

SEQ ID NO: 18654 - DNA, 19 bp, Artificial Sequence
  Synthetic
agaacgactggcgcgccac

SEQ ID NO: 18655 - DNA, 21 bp, Artificial Sequence
  Synthetic
gagaaccgtggacgacgtacg

SEQ ID NO: 18656 - DNA, 19 bp, Artificial Sequence
  Synthetic
tgttggccccgacgctcag

SEQ ID NO: 18657 - DNA, 19 bp, Artificial Sequence
  Synthetic
accacacgagcacgaggcc

SEQ ID NO: 18658 - DNA, 19 bp, Artificial Sequence
  Synthetic
atcggcgttggtggagggc

SEQ ID NO: 18659 - DNA, 19 bp, Artificial Sequence
  Synthetic
attccaggtcgtcgcggcg

SEQ ID NO: 18660 - DNA, 18 bp, Artificial Sequence
  Synthetic
tttcggcctgccaggtgg

SEQ ID NO: 18661 - DNA, 19 bp, Artificial Sequence
  Synthetic
tcgaccgaacagccgtccg

SEQ ID NO: 18662 - DNA, 20 bp, Artificial Sequence
  Synthetic
tctggacacccccacggacc

SEQ ID NO: 18663 - DNA, 22 bp, Artificial Sequence
  Synthetic
tggggagtagggccttttccat

SEQ ID NO: 18664 - DNA, 19 bp, Artificial Sequence
  Synthetic
cgccctcgacgagtgggat

SEQ ID NO: 18665 - DNA, 18 bp, Artificial Sequence
  Synthetic
aaaccgccccccaagcct

SEQ ID NO: 18666 - DNA, 21 bp, Artificial Sequence
  Synthetic
actgaccctctgatcgccgtt

SEQ ID NO: 18667 - DNA, 19 bp, Artificial Sequence
  Synthetic
cagccccttggagagcacc

SEQ ID NO: 18668 - DNA, 19 bp, Artificial Sequence
  Synthetic
ggcagtgccgcattttggc

SEQ ID NO: 18669 - DNA, 20 bp, Artificial Sequence
  Synthetic
gggccccggggttttaagga

SEQ ID NO: 18670 - DNA, 19 bp, Artificial Sequence
  Synthetic
agtccaggcacgcgtcctc

SEQ ID NO: 18671 - DNA, 22 bp, Artificial Sequence
  Synthetic
ctcttccgcggtaaatcccgtg

SEQ ID NO: 18672 - DNA, 22 bp, Artificial Sequence
  Synthetic
cgccttcacgattacccgttgg

SEQ ID NO: 18673 - DNA, 20 bp, Artificial Sequence
  Synthetic
tgggttcaggcgcctactca

SEQ ID NO: 18674 - DNA, 19 bp, Artificial Sequence
  Synthetic
tcgcacgggccccttttgg

SEQ ID NO: 18675 - DNA, 19 bp, Artificial Sequence
  Synthetic
tggcggtgggagagtcggt

SEQ ID NO: 18676 - DNA, 20 bp, Artificial Sequence
  Synthetic
cgcgcatgcttcatgggtcc

SEQ ID NO: 18677 - DNA, 19 bp, Artificial Sequence
  Synthetic
gggtggcggcaagaacagc

SEQ ID NO: 18678 - DNA, 20 bp, Artificial Sequence
  Synthetic
gtgttgttgggtgccctccg

SEQ ID NO: 18679 - DNA, 21 bp, Artificial Sequence
  Synthetic
cccggcgtccacaaatgagtt

SEQ ID NO: 18680 - DNA, 18 bp, Artificial Sequence
  Synthetic
tttggcgcgtcaccgacc

SEQ ID NO: 18681 - DNA, 18 bp, Artificial Sequence
  Synthetic
aggccgctgtccgtctct

SEQ ID NO: 18682 - DNA, 21 bp, Artificial Sequence
  Synthetic
gcttcgaccgaaactggcgag

SEQ ID NO: 18683 - DNA, 19 bp, Artificial Sequence
  Synthetic
agccacatcaggagcgccc

SEQ ID NO: 18684 - DNA, 25 bp, Artificial Sequence
  Synthetic
tgttcccaatttgtaacatcaagct

SEQ ID NO: 18685 - DNA, 21 bp, Artificial Sequence
  Synthetic
attgtcaaccaactggtgcca

SEQ ID NO: 18686 - DNA, 22 bp, Artificial Sequence
  Synthetic
atcaggataacaggagcactcc

SEQ ID NO: 18687 - DNA, 25 bp, Artificial Sequence
  Synthetic
cctggaattagtgcttttggttctc

SEQ ID NO: 18688 - DNA, 22 bp, Artificial Sequence
  Synthetic
ttccgaaagcccaggatgatgg

SEQ ID NO: 18689 - DNA, 25 bp, Artificial Sequence
  Synthetic
cccataacatccaatgacataaccc

SEQ ID NO: 18690 - DNA, 20 bp, Artificial Sequence
  Synthetic
gtggtctccatgcgacgtgc

SEQ ID NO: 18691 - DNA, 21 bp, Artificial Sequence
  Synthetic
gttccccccagcaaagaattg

SEQ ID NO: 18692 - DNA, 22 bp, Artificial Sequence
  Synthetic
tggaaagattctgccccatgct

SEQ ID NO: 18693 - DNA, 23 bp, Artificial Sequence
  Synthetic
tgtggtttttgtcagtatctcgc

SEQ ID NO: 18694 - DNA, 22 bp, Artificial Sequence
  Synthetic
ccacgggtccatttctattcca

SEQ ID NO: 18695 - DNA, 22 bp, Artificial Sequence
  Synthetic
agatgctagtggatctgctgat

SEQ ID NO: 18696 - DNA, 25 bp, Artificial Sequence
  Synthetic
acccctcatgtactcttatcttcaa

SEQ ID NO: 18697 - DNA, 23 bp, Artificial Sequence
  Synthetic
aatgccttaaaagctgatgcatg

SEQ ID NO: 18698 - DNA, 22 bp, Artificial Sequence
  Synthetic
gtttcactgacctcctcaggag

SEQ ID NO: 18699 - DNA, 25 bp, Artificial Sequence
  Synthetic
caagtacgtctctcatttgttggaa

SEQ ID NO: 18700 - DNA, 20 bp, Artificial Sequence
  Synthetic
gaaaccctctcaagacggcg

SEQ ID NO: 18701 - DNA, 23 bp, Artificial Sequence
  Synthetic
cacacaaatcacgacgacagaaa

SEQ ID NO: 18702 - DNA, 25 bp, Artificial Sequence
  Synthetic
cgcgataatatcaatcttctcctca

SEQ ID NO: 18703 - DNA, 24 bp, Artificial Sequence
  Synthetic
gcaacaacaacgacacgaattact

SEQ ID NO: 18704 - DNA, 25 bp, Artificial Sequence
  Synthetic
tgtcgtctaacagatttgagatgtt

SEQ ID NO: 18705 - DNA, 25 bp, Artificial Sequence
  Synthetic
gatctctacctgcgacgtaaaagta

SEQ ID NO: 18706 - DNA, 24 bp, Artificial Sequence
  Synthetic
tgaggccttcttttctcccataat

SEQ ID NO: 18707 - DNA, 21 bp, Artificial Sequence
  Synthetic
tttcggtgggactggaaacgg

SEQ ID NO: 18708 - DNA, 25 bp, Artificial Sequence
  Synthetic
gttcctatacccagtcctccaaaat

SEQ ID NO: 18709 - DNA, 24 bp, Artificial Sequence
  Synthetic
agttgtaagtacaggtggttctgc

SEQ ID NO: 18710 - DNA, 24 bp, Artificial Sequence
  Synthetic
gatctggagtagcagctacattct

SEQ ID NO: 18711 - DNA, 20 bp, Artificial Sequence
  Synthetic
tcgcctgaatgttggcctat

SEQ ID NO: 18712 - DNA, 25 bp, Artificial Sequence
  Synthetic
ctgtaccagcatagaaaaacagact

SEQ ID NO: 18713 - DNA, 25 bp, Artificial Sequence
  Synthetic
ttaaataatggattgcctgttgtgg

SEQ ID NO: 18714 - DNA, 24 bp, Artificial Sequence
  Synthetic
caccaaagccaatgtcacacatat

SEQ ID NO: 18715 - DNA, 25 bp, Artificial Sequence
  Synthetic
tcgttcagtcatatctatttgccaa

SEQ ID NO: 18716 - DNA, 25 bp, Artificial Sequence
  Synthetic
agtacattcagagaccattcacagt

SEQ ID NO: 18717 - DNA, 22 bp, Artificial Sequence
  Synthetic
cctttggcgccaaaaacttacc

SEQ ID NO: 18718 - DNA, 25 bp, Artificial Sequence
  Synthetic
cgtcagaaattaagttagcaggcaa

SEQ ID NO: 18719 - DNA, 21 bp, Artificial Sequence
  Synthetic
gcttagatgctctctcaggcg

SEQ ID NO: 18720 - DNA, 22 bp, Artificial Sequence
  Synthetic
gcagagtcggaccccaatttcc

SEQ ID NO: 18721 - DNA, 20 bp, Artificial Sequence
  Synthetic
atcccccagacccttttcca

SEQ ID NO: 18722 - DNA, 25 bp, Artificial Sequence
  Synthetic
gctggatctctaaaggtgaatagtt

SEQ ID NO: 18723 - DNA, 25 bp, Artificial Sequence
  Synthetic
tctcttcaaatatgttgtccccaat

SEQ ID NO: 18724 - DNA, 24 bp, Artificial Sequence
  Synthetic
gctatttacatcacgctggaactg

SEQ ID NO: 18725 - DNA, 25 bp, Artificial Sequence
  Synthetic
cgctctgtcatatctaaagtccaga

SEQ ID NO: 18726 - DNA, 24 bp, Artificial Sequence
  Synthetic
caggagtttataggtcagaaccca

SEQ ID NO: 18727 - DNA, 23 bp, Artificial Sequence
  Synthetic
gccaatctggtattatcccttcc

SEQ ID NO: 18728 - DNA, 20 bp, Artificial Sequence
  Synthetic
ccagctcctcccatgtccct

SEQ ID NO: 18729 - DNA, 20 bp, Artificial Sequence
  Synthetic
gcgccaacctgctagggatt

SEQ ID NO: 18730 - DNA, 23 bp, Artificial Sequence
  Synthetic
cgggccgtaacctaactttttct

SEQ ID NO: 18731 - DNA, 20 bp, Artificial Sequence
  Synthetic
ccgcttgttgcacggggtag

SEQ ID NO: 18732 - DNA, 25 bp, Artificial Sequence
  Synthetic
gcctatacatccactggatctgttc

SEQ ID NO: 18733 - DNA, 22 bp, Artificial Sequence
  Synthetic
cgagtgtccctcctttccacag

SEQ ID NO: 18734 - DNA, 23 bp, Artificial Sequence
  Synthetic
gacatgcctaaggctgtcagaat

SEQ ID NO: 18735 - DNA, 24 bp, Artificial Sequence
  Synthetic
ccttttctttttggctagtcctgc

SEQ ID NO: 18736 - DNA, 24 bp, Artificial Sequence
  Synthetic
ccctaggccatttagaagttcttt

SEQ ID NO: 18737 - DNA, 25 bp, Artificial Sequence
  Synthetic
gttcctggctcaagataattttgtt

SEQ ID NO: 18738 - DNA, 25 bp, Artificial Sequence
  Synthetic
gcctggtataggatctcctactagg

SEQ ID NO: 18739 - DNA, 25 bp, Artificial Sequence
  Synthetic
gccttgacttactaaatggtctact

SEQ ID NO: 18740 - DNA, 22 bp, Artificial Sequence
  Synthetic
tgcgttattggccacctactgg

SEQ ID NO: 18741 - DNA, 25 bp, Artificial Sequence
  Synthetic
tcttgttctgtggtaatcatgttga

SEQ ID NO: 18742 - DNA, 25 bp, Artificial Sequence
  Synthetic
ggtaacatctgtccagaacttttct

SEQ ID NO: 18743 - DNA, 22 bp, Artificial Sequence
  Synthetic
acacctggaaaatgagctctcg

SEQ ID NO: 18744 - DNA, 25 bp, Artificial Sequence
  Synthetic
gggtgtctccatgtctattatggat

SEQ ID NO: 18745 - DNA, 21 bp, Artificial Sequence
  Synthetic
actcacttgtctggtgcagaa

SEQ ID NO: 18746 - DNA, 25 bp, Artificial Sequence
  Synthetic
gcttgacacatggttttattgatgt

SEQ ID NO: 18747 - DNA, 24 bp, Artificial Sequence
  Synthetic
gcaatgtctcatgtaacatgtgcc

SEQ ID NO: 18748 - DNA, 25 bp, Artificial Sequence
  Synthetic
gagagtgaaacactaatcctgacat

SEQ ID NO: 18749 - DNA, 25 bp, Artificial Sequence
  Synthetic
ttttccctactttatgccaggtatt

SEQ ID NO: 18750 - DNA, 22 bp, Artificial Sequence
  Synthetic
cgcacatccccatgaatttagc

SEQ ID NO: 18751 - DNA, 22 bp, Artificial Sequence
  Synthetic
cagccagtccctgattgctgtt

SEQ ID NO: 18752 - DNA, 25 bp, Artificial Sequence
  Synthetic
tgctgcctatacaaatctttctgtc

SEQ ID NO: 18753 - DNA, 20 bp, Artificial Sequence
  Synthetic
cagcatggagtcaaactgcc

SEQ ID NO: 18754 - DNA, 21 bp, Artificial Sequence
  Synthetic
agggaacacccaggctctacc

SEQ ID NO: 18755 - DNA, 20 bp, Artificial Sequence
  Synthetic
tcccagtgcagattcgatct

SEQ ID NO: 18756 - DNA, 25 bp, Artificial Sequence
  Synthetic
gcaggtttgacttcatggagtattg

SEQ ID NO: 18757 - DNA, 25 bp, Artificial Sequence
  Synthetic
actggatttattgctgtcttgttgt

SEQ ID NO: 18758 - DNA, 25 bp, Artificial Sequence
  Synthetic
tccaggtttttgtaccatgtaatca

SEQ ID NO: 18759 - DNA, 24 bp, Artificial Sequence
  Synthetic
tcctttaatagttttgcaggcggt

SEQ ID NO: 18760 - DNA, 25 bp, Artificial Sequence
  Synthetic
gctcttagatcatccactttttcgt

SEQ ID NO: 18761 - DNA, 20 bp, Artificial Sequence
  Synthetic
gcattaaaggtgccagcagc

SEQ ID NO: 18762 - DNA, 25 bp, Artificial Sequence
  Synthetic
gccccatggaatgttatttctcttt

SEQ ID NO: 18763 - DNA, 21 bp, Artificial Sequence
  Synthetic
tcgatccagccatctgctcca

SEQ ID NO: 18764 - DNA, 25 bp, Artificial Sequence
  Synthetic
cacaatatcaagtgcagtatcccaa

SEQ ID NO: 18765 - DNA, 24 bp, Artificial Sequence
  Synthetic
tccgcgcaataattcttcaaaaag

SEQ ID NO: 18766 - DNA, 25 bp, Artificial Sequence
  Synthetic
gcttgttatacaatgccagggaatt

SEQ ID NO: 18767 - DNA, 24 bp, Artificial Sequence
  Synthetic
tcttgtaactctaattgcactgca

SEQ ID NO: 18768 - DNA, 24 bp, Artificial Sequence
  Synthetic
tccattgtaatctgcatcaccttt

SEQ ID NO: 18769 - DNA, 25 bp, Artificial Sequence
  Synthetic
ggacaatcaccagtaaagcattgtt

SEQ ID NO: 18770 - DNA, 22 bp, Artificial Sequence
  Synthetic
accaataggctccacaggtact

SEQ ID NO: 18771 - DNA, 25 bp, Artificial Sequence
  Synthetic
gcctgaacgtggttcattatttaca

SEQ ID NO: 18772 - DNA, 23 bp, Artificial Sequence
  Synthetic
cgttcaactatttgggtgggagt

SEQ ID NO: 18773 - DNA, 21 bp, Artificial Sequence
  Synthetic
caccttcacggctcactctta

SEQ ID NO: 18774 - DNA, 20 bp, Artificial Sequence
  Synthetic
acatctgagcgtttgcgttt

SEQ ID NO: 18775 - DNA, 25 bp, Artificial Sequence
  Synthetic
tgggatctggacacagtaatctaaa

SEQ ID NO: 18776 - DNA, 25 bp, Artificial Sequence
  Synthetic
gtgcaacctactataaacacctgat

SEQ ID NO: 18777 - DNA, 24 bp, Artificial Sequence
  Synthetic
ctccggagatatcctttgacattt

SEQ ID NO: 18778 - DNA, 25 bp, Artificial Sequence
  Synthetic
cccaatcatctaacactgttggatt

SEQ ID NO: 18779 - DNA, 25 bp, Artificial Sequence
  Synthetic
cagtttttctggatactttcggaga

SEQ ID NO: 18780 - DNA, 21 bp, Artificial Sequence
  Synthetic
gacaaacagctttcgcaacag

SEQ ID NO: 18781 - DNA, 20 bp, Artificial Sequence
  Synthetic
atgactcctcctctggggtg

SEQ ID NO: 18782 - DNA, 23 bp, Artificial Sequence
  Synthetic
cctagtccactgtcctgaaacag

SEQ ID NO: 18783 - DNA, 24 bp, Artificial Sequence
  Synthetic
gcttgagaagccatttgatgattt

SEQ ID NO: 18784 - DNA, 25 bp, Artificial Sequence
  Synthetic
agtcattaattgctcttgtagtgca

SEQ ID NO: 18785 - DNA, 20 bp, Artificial Sequence
  Synthetic
ttttcctcttcggcctcggc

SEQ ID NO: 18786 - DNA, 21 bp, Artificial Sequence
  Synthetic
tgacatcttctggacagtccc

SEQ ID NO: 18787 - DNA, 25 bp, Artificial Sequence
  Synthetic
gcatctggagtgattggtagtactt

SEQ ID NO: 18788 - DNA, 25 bp, Artificial Sequence
  Synthetic
aggaacctgttgaacaaatctatga

SEQ ID NO: 18789 - DNA, 25 bp, Artificial Sequence
  Synthetic
gtgtcaggaatgttaacaaatgtgt

SEQ ID NO: 18790 - DNA, 24 bp, Artificial Sequence
  Synthetic
gcaaactggttaggatctggtaat

SEQ ID NO: 18791 - DNA, 25 bp, Artificial Sequence
  Synthetic
cccgccgtccataaaaaaataattt

SEQ ID NO: 18792 - DNA, 25 bp, Artificial Sequence
  Synthetic
ccagctgccagttttctaatattga

SEQ ID NO: 18793 - DNA, 22 bp, Artificial Sequence
  Synthetic
ggtcgggtatcaaatacagcag

SEQ ID NO: 18794 - DNA, 25 bp, Artificial Sequence
  Synthetic
cctgtcttcctgatgtgtacttctt

SEQ ID NO: 18795 - DNA, 21 bp, Artificial Sequence
  Synthetic
ggtccatttctgttccaccac

SEQ ID NO: 18796 - DNA, 25 bp, Artificial Sequence
  Synthetic
cctttgttattgtcagctgtgattc

SEQ ID NO: 18797 - DNA, 21 bp, Artificial Sequence
  Synthetic
cctgacaatgttcctagcagc

SEQ ID NO: 18798 - DNA, 25 bp, Artificial Sequence
  Synthetic
gtccaaccattgtgaattcctcata

SEQ ID NO: 18799 - DNA, 21 bp, Artificial Sequence
  Synthetic
ggagttggtgcatgggattca

SEQ ID NO: 18800 - DNA, 25 bp, Artificial Sequence
  Synthetic
tgtttcactaacttcttcaggggat

SEQ ID NO: 18801 - DNA, 21 bp, Artificial Sequence
  Synthetic
cccaaaacatcacgcatctgc

SEQ ID NO: 18802 - DNA, 21 bp, Artificial Sequence
  Synthetic
tcctgctgttccttcatctgg

SEQ ID NO: 18803 - DNA, 21 bp, Artificial Sequence
  Synthetic
actttggttccgtttgacacg

SEQ ID NO: 18804 - DNA, 25 bp, Artificial Sequence
  Synthetic
tcttcattcacgaatttcccaggat

SEQ ID NO: 18805 - DNA, 23 bp, Artificial Sequence
  Synthetic
ccagtttgtttccactcccatat

SEQ ID NO: 18806 - DNA, 22 bp, Artificial Sequence
  Synthetic
ttgtccctccactatgatagca

SEQ ID NO: 18807 - DNA, 25 bp, Artificial Sequence
  Synthetic
tctgaaaccataccaaccatcaatt

SEQ ID NO: 18808 - DNA, 22 bp, Artificial Sequence
  Synthetic
tgtccatttctgaatcagccag

SEQ ID NO: 18809 - DNA, 23 bp, Artificial Sequence
  Synthetic
acttgccattctgccttaacaag

SEQ ID NO: 18810 - DNA, 25 bp, Artificial Sequence
  Synthetic
gcttttgacatatagcacagcgaat

SEQ ID NO: 18811 - DNA, 25 bp, Artificial Sequence
  Synthetic
ttctgtaacgttgtatgtcctgttt

SEQ ID NO: 18812 - DNA, 21 bp, Artificial Sequence
  Synthetic
tttcctgattttcctgcaccc

SEQ ID NO: 18813 - DNA, 24 bp, Artificial Sequence
  Synthetic
gcgattcttgccacatttaaatct

SEQ ID NO: 18814 - DNA, 20 bp, Artificial Sequence
  Synthetic
cagcacgttgggcatattca

SEQ ID NO: 18815 - DNA, 20 bp, Artificial Sequence
  Synthetic
acgcatctaaacgtttggcc

SEQ ID NO: 18816 - DNA, 25 bp, Artificial Sequence
  Synthetic
gcgtccctgtttttttaaacacttt

SEQ ID NO: 18817 - DNA, 22 bp, Artificial Sequence
  Synthetic
ggtcggggtggggtctttgtat

SEQ ID NO: 18818 - DNA, 25 bp, Artificial Sequence
  Synthetic
cacgcagcaacaactataaacaata

SEQ ID NO: 18819 - DNA, 21 bp, Artificial Sequence
  Synthetic
ctaaaaaccacagcagcagcc

SEQ ID NO: 18820 - DNA, 25 bp, Artificial Sequence
  Synthetic
tgcagaggacgtaatattaaaccca

SEQ ID NO: 18821 - DNA, 21 bp, Artificial Sequence
  Synthetic
tgatggcctagtgattgggct

SEQ ID NO: 18822 - DNA, 23 bp, Artificial Sequence
  Synthetic
gaggaggcagataaaccttgttg

SEQ ID NO: 18823 - DNA, 25 bp, Artificial Sequence
  Synthetic
accatcctgaataacactgttttgt

SEQ ID NO: 18824 - DNA, 25 bp, Artificial Sequence
  Synthetic
cgtctagtatgtcaggattcatggt

SEQ ID NO: 18825 - DNA, 25 bp, Artificial Sequence
  Synthetic
gcatgtgcttgctaaatttaatgga

SEQ ID NO: 18826 - DNA, 25 bp, Artificial Sequence
  Synthetic
cttaattgaaatgtgtctgcctgtg

SEQ ID NO: 18827 - DNA, 25 bp, Artificial Sequence
  Synthetic
cactgtgccattgtcatatttttca

SEQ ID NO: 18828 - DNA, 22 bp, Artificial Sequence
  Synthetic
cctccgaccgtctcttcagtct

SEQ ID NO: 18829 - DNA, 20 bp, Artificial Sequence
  Synthetic
agacctgctgctggtactga

SEQ ID NO: 18830 - DNA, 25 bp, Artificial Sequence
  Synthetic
ccaactacttctgaaactggatcaa

SEQ ID NO: 18831 - DNA, 24 bp, Artificial Sequence
  Synthetic
caggccatttacaagtggagttaa

SEQ ID NO: 18832 - DNA, 20 bp, Artificial Sequence
  Synthetic
accactgggcgtcggataat

SEQ ID NO: 18833 - DNA, 20 bp, Artificial Sequence
  Synthetic
gggctagcacatcagcttcc

SEQ ID NO: 18834 - DNA, 25 bp, Artificial Sequence
  Synthetic
acgggaattaagtaatcccatctga

SEQ ID NO: 18835 - DNA, 22 bp, Artificial Sequence
  Synthetic
atgagtcagcaatgccttgttt

SEQ ID NO: 18836 - DNA, 23 bp, Artificial Sequence
  Synthetic
acgatcgttaacggttggatttg

SEQ ID NO: 18837 - DNA, 22 bp, Artificial Sequence
  Synthetic
gccgtagtgctggctagtacca

SEQ ID NO: 18838 - DNA, 25 bp, Artificial Sequence
  Synthetic
ccacaatatcaagtgcaatatccca

SEQ ID NO: 18839 - DNA, 21 bp, Artificial Sequence
  Synthetic
gagctctggattggcataagc

SEQ ID NO: 18840 - DNA, 25 bp, Artificial Sequence
  Synthetic
tgaccagaactatccagatctgtat

SEQ ID NO: 18841 - DNA, 25 bp, Artificial Sequence
  Synthetic
tgttgcatggctctattttgtacaa

SEQ ID NO: 18842 - DNA, 25 bp, Artificial Sequence
  Synthetic
tcttcccaagaatccatgatttgat

SEQ ID NO: 18843 - DNA, 22 bp, Artificial Sequence
  Synthetic
gaccacagtctcagctctacta

SEQ ID NO: 18844 - DNA, 25 bp, Artificial Sequence
  Synthetic
gtgttcctgatgattctgtctgtat

SEQ ID NO: 18845 - DNA, 25 bp, Artificial Sequence
  Synthetic
cctgcatgtcgatatagatcaggta

SEQ ID NO: 18846 - DNA, 24 bp, Artificial Sequence
  Synthetic
ttgactttgagtggtaatggttct

SEQ ID NO: 18847 - DNA, 20 bp, Artificial Sequence
  Synthetic
tggcatcgaacagcattcct

SEQ ID NO: 18848 - DNA, 23 bp, Artificial Sequence
  Synthetic
ttcccaactccttttgcgataat

SEQ ID NO: 18849 - DNA, 25 bp, Artificial Sequence
  Synthetic
gggatgatcagtctatccaataacc

SEQ ID NO: 18850 - DNA, 21 bp, Artificial Sequence
  Synthetic
tctgagtgttcagcagcctag

SEQ ID NO: 18851 - DNA, 25 bp, Artificial Sequence
  Synthetic
ctccttgattaggtggttgattgat

SEQ ID NO: 18852 - DNA, 25 bp, Artificial Sequence
  Synthetic
ccagtattccatctcgaatttggat

SEQ ID NO: 18853 - DNA, 20 bp, Artificial Sequence
  Synthetic
gaagaccagacgtgcacctc

SEQ ID NO: 18854 - DNA, 22 bp, Artificial Sequence
  Synthetic
aagacctccatacccgagaaat

SEQ ID NO: 18855 - DNA, 21 bp, Artificial Sequence
  Synthetic
tgactgggttcactctcgatt

SEQ ID NO: 18856 - DNA, 24 bp, Artificial Sequence
  Synthetic
gcagagtttgaaccgtaagcattt

SEQ ID NO: 18857 - DNA, 25 bp, Artificial Sequence
  Synthetic
ctctgaccaaaagacacatctagat

SEQ ID NO: 18858 - DNA, 25 bp, Artificial Sequence
  Synthetic
gcaggtattaaagaggcatattgca

SEQ ID NO: 18859 - DNA, 25 bp, Artificial Sequence
  Synthetic
ccttcctcctgataaatgaatccac

SEQ ID NO: 18860 - DNA, 25 bp, Artificial Sequence
  Synthetic
agtgtaaaatttgcacgtgtttgtg

SEQ ID NO: 18861 - DNA, 23 bp, Artificial Sequence
  Synthetic
ctacgactccagcatcaaagatg

SEQ ID NO: 18862 - DNA, 20 bp, Artificial Sequence
  Synthetic
aaaccattgctagcggcctc

SEQ ID NO: 18863 - DNA, 25 bp, Artificial Sequence
  Synthetic
cttagtaagccaagcacaaacgtaa

SEQ ID NO: 18864 - DNA, 25 bp, Artificial Sequence
  Synthetic
ccacaagtacattgaactaatgcac

SEQ ID NO: 18865 - DNA, 25 bp, Artificial Sequence
  Synthetic
atgttcctcttctacaaaagtggaa

SEQ ID NO: 18866 - DNA, 24 bp, Artificial Sequence
  Synthetic
acagcacagtcaaagacagtttga

SEQ ID NO: 18867 - DNA, 20 bp, Artificial Sequence
  Synthetic
agcagtgctacgttcaacac

SEQ ID NO: 18868 - DNA, 23 bp, Artificial Sequence
  Synthetic
tcctcaaaccaagactcgttact

SEQ ID NO: 18869 - DNA, 25 bp, Artificial Sequence
  Synthetic
agtgtctaaaaacgcattataggcc

SEQ ID NO: 18870 - DNA, 25 bp, Artificial Sequence
  Synthetic
gtcaaaatgtgtagggtctgcaatt

SEQ ID NO: 18871 - DNA, 25 bp, Artificial Sequence
  Synthetic
tcccagtcaccttcatgtttaattt

SEQ ID NO: 18872 - DNA, 25 bp, Artificial Sequence
  Synthetic
gcatagtcaccatcaagtataccag

SEQ ID NO: 18873 - DNA, 22 bp, Artificial Sequence
  Synthetic
agtgggcgtacaaaacaaaaca

SEQ ID NO: 18874 - DNA, 25 bp, Artificial Sequence
  Synthetic
gcgttcaacttctctttaacaacaa

SEQ ID NO: 18875 - DNA, 25 bp, Artificial Sequence
  Synthetic
tggttctattttaggttgctcaact

SEQ ID NO: 18876 - DNA, 22 bp, Artificial Sequence
  Synthetic
acgtgtgcatcgttgaacatta

SEQ ID NO: 18877 - DNA, 25 bp, Artificial Sequence
  Synthetic
cgacccaatcaacatctattgcttt

SEQ ID NO: 18878 - DNA, 25 bp, Artificial Sequence
  Synthetic
cctctaacacttctaacacgtgaat

SEQ ID NO: 18879 - DNA, 23 bp, Artificial Sequence
  Synthetic
agctgctgacgcttttaagttat

SEQ ID NO: 18880 - DNA, 25 bp, Artificial Sequence
  Synthetic
tggctaaattgacttaactcttggt

SEQ ID NO: 18881 - DNA, 25 bp, Artificial Sequence
  Synthetic
gggaatctcttaagtctagcactct

SEQ ID NO: 18882 - DNA, 25 bp, Artificial Sequence
  Synthetic
aacgatgtgcattagaaatagcact

SEQ ID NO: 18883 - DNA, 23 bp, Artificial Sequence
  Synthetic
gcgtgacagcttggttttcatta

SEQ ID NO: 18884 - DNA, 25 bp, Artificial Sequence
  Synthetic
gccagcgacagtattaacaatttca

SEQ ID NO: 18885 - DNA, 20 bp, Artificial Sequence
  Synthetic
attcacctacgcggcagtat

SEQ ID NO: 18886 - DNA, 25 bp, Artificial Sequence
  Synthetic
gcaattaaatatgcagcacaccaaa

SEQ ID NO: 18887 - DNA, 25 bp, Artificial Sequence
  Synthetic
ccagcctgtaatgtagaaccataac

SEQ ID NO: 18888 - DNA, 25 bp, Artificial Sequence
  Synthetic
ctaaaagaatgtctaggtgtgtgca

SEQ ID NO: 18889 - DNA, 25 bp, Artificial Sequence
  Synthetic
gcaaccacattaactgttaacatct

SEQ ID NO: 18890 - DNA, 25 bp, Artificial Sequence
  Synthetic
acccaaatagtggtggtataaacaa

SEQ ID NO: 18891 - DNA, 23 bp, Artificial Sequence
  Synthetic
accaatgtgtacaacgctcttta

SEQ ID NO: 18892 - DNA, 25 bp, Artificial Sequence
  Synthetic
ggctggactaacacagaaatcataa

SEQ ID NO: 18893 - DNA, 24 bp, Artificial Sequence
  Synthetic
gcccactcctttgaattagaagct

SEQ ID NO: 18894 - DNA, 25 bp, Artificial Sequence
  Synthetic
gcttgttcagccattctgttaattt

SEQ ID NO: 18895 - DNA, 25 bp, Artificial Sequence
  Synthetic
tgcacattcttaccatcattatcct

SEQ ID NO: 18896 - DNA, 25 bp, Artificial Sequence
  Synthetic
ccagagtcatgttcccatttaacat

SEQ ID NO: 18897 - DNA, 25 bp, Artificial Sequence
  Synthetic
acatctttacacaattgccaacagg

SEQ ID NO: 18898 - DNA, 24 bp, Artificial Sequence
  Synthetic
cccggactcgtttaaataactgtt

SEQ ID NO: 18899 - DNA, 25 bp, Artificial Sequence
  Synthetic
cagtctttttcatcaaagttacgca

SEQ ID NO: 18900 - DNA, 21 bp, Artificial Sequence
  Synthetic
tgacgtgcagtagggtattcc

SEQ ID NO: 18901 - DNA, 25 bp, Artificial Sequence
  Synthetic
cgggtacaccatcaataaacacttt

SEQ ID NO: 18902 - DNA, 25 bp, Artificial Sequence
  Synthetic
cccctgagaacgtaagaagtcataa

SEQ ID NO: 18903 - DNA, 20 bp, Artificial Sequence
  Synthetic
aagagacgccacccactgta

SEQ ID NO: 18904 - DNA, 25 bp, Artificial Sequence
  Synthetic
caatgtaaccaagtccagcataagt

SEQ ID NO: 18905 - DNA, 24 bp, Artificial Sequence
  Synthetic
ggtaggcatctatagccagagaaa

SEQ ID NO: 18906 - DNA, 25 bp, Artificial Sequence
  Synthetic
gcagaacttttgtacaaaccaaaga

SEQ ID NO: 18907 - DNA, 25 bp, Artificial Sequence
  Synthetic
accgtaatctactttctcaaacaca

SEQ ID NO: 18908 - DNA, 21 bp, Artificial Sequence
  Synthetic
tcgctccagggtaatacacac

SEQ ID NO: 18909 - DNA, 25 bp, Artificial Sequence
  Synthetic
tgttgaggatcaccaacatatacaa

SEQ ID NO: 18910 - DNA, 25 bp, Artificial Sequence
  Synthetic
cctggcagctacataattttgacta

SEQ ID NO: 18911 - DNA, 25 bp, Artificial Sequence
  Synthetic
agacaatgacaaataagtagtggca

SEQ ID NO: 18912 - DNA, 21 bp, Artificial Sequence
  Synthetic
tgccaacattgtcacctgtga

SEQ ID NO: 18913 - DNA, 25 bp, Artificial Sequence
  Synthetic
gctccaatcttaacaaaataacgca

SEQ ID NO: 18914 - DNA, 25 bp, Artificial Sequence
  Synthetic
gcccttgtttatggcattttcatta

SEQ ID NO: 18915 - DNA, 22 bp, Artificial Sequence
  Synthetic
cccaccatttacaccttcaagg

SEQ ID NO: 18916 - DNA, 23 bp, Artificial Sequence
  Synthetic
tctgtgaatgtctgccacaaatt

SEQ ID NO: 18917 - DNA, 20 bp, Artificial Sequence
  Synthetic
aagcttgtcaagggacgctc

SEQ ID NO: 18918 - DNA, 25 bp, Artificial Sequence
  Synthetic
cgaccttgggtataaaaaccatcat

SEQ ID NO: 18919 - DNA, 25 bp, Artificial Sequence
  Synthetic
caacagtcaaatccaaagacttcaa

SEQ ID NO: 18920 - DNA, 25 bp, Artificial Sequence
  Synthetic
gcacccaagtgtaacactctcatat

SEQ ID NO: 18921 - DNA, 25 bp, Artificial Sequence
  Synthetic
cgccaaaatacataatttgcgtgta

SEQ ID NO: 18922 - DNA, 25 bp, Artificial Sequence
  Synthetic
cgttgcaaacagagtaactagtgtt

SEQ ID NO: 18923 - DNA, 25 bp, Artificial Sequence
  Synthetic
acgtagtttcattgccaatagtagt

SEQ ID NO: 18924 - DNA, 22 bp, Artificial Sequence
  Synthetic
agcgacacaatagacacaggta

SEQ ID NO: 18925 - DNA, 25 bp, Artificial Sequence
  Synthetic
tgaagttgatgtgtacgtaattcca

SEQ ID NO: 18926 - DNA, 25 bp, Artificial Sequence
  Synthetic
gaaacattacgtggttgaacagcaa

SEQ ID NO: 18927 - DNA, 25 bp, Artificial Sequence
  Synthetic
gctaaggttgtagtcaccaaaacta

SEQ ID NO: 18928 - DNA, 25 bp, Artificial Sequence
  Synthetic
tgcctgaattgctaatgaaaatggt

SEQ ID NO: 18929 - DNA, 25 bp, Artificial Sequence
  Synthetic
ccaatctaccagtaatcagcctatc

SEQ ID NO: 18930 - DNA, 25 bp, Artificial Sequence
  Synthetic
tgccttctttgtaaagagcaagatt

SEQ ID NO: 18931 - DNA, 25 bp, Artificial Sequence
  Synthetic
gtgctaatttcactggtcaaattca

SEQ ID NO: 18932 - DNA, 24 bp, Artificial Sequence
  Synthetic
tgtggatcttttcaacgtcgtaat

SEQ ID NO: 18933 - DNA, 25 bp, Artificial Sequence
  Synthetic
aaaattacagcaatcaaagttgcgt

SEQ ID NO: 18934 - DNA, 23 bp, Artificial Sequence
  Synthetic
atcactataagcaccacacacca

SEQ ID NO: 18935 - DNA, 21 bp, Artificial Sequence
  Synthetic
agcccaggtgtcaaagattga

SEQ ID NO: 18936 - DNA, 21 bp, Artificial Sequence
  Synthetic
acgtagaaaacccagcctgtg

SEQ ID NO: 18937 - DNA, 25 bp, Artificial Sequence
  Synthetic
ttctgaaacgtttttgaacattcca

SEQ ID NO: 18938 - DNA, 23 bp, Artificial Sequence
  Synthetic
acctaaagatttaagagccgcag

SEQ ID NO: 18939 - DNA, 25 bp, Artificial Sequence
  Synthetic
ggccaaaacattgtgtgacattaga

SEQ ID NO: 18940 - DNA, 23 bp, Artificial Sequence
  Synthetic
gagatgggttgaattctagtgca

SEQ ID NO: 18941 - DNA, 23 bp, Artificial Sequence
  Synthetic
accactggcttaccattgtgtat

SEQ ID NO: 18942 - DNA, 20 bp, Artificial Sequence
  Synthetic
ccaggtgtggcaaatggaca

SEQ ID NO: 18943 - DNA, 21 bp, Artificial Sequence
  Synthetic
agaaacatctgtcccatcgct

SEQ ID NO: 18944 - DNA, 22 bp, Artificial Sequence
  Synthetic
gcgatgctaccttttccaccct

SEQ ID NO: 18945 - DNA, 25 bp, Artificial Sequence
  Synthetic
ggcattacaccctctgtaaagctaa

SEQ ID NO: 18946 - DNA, 25 bp, Artificial Sequence
  Synthetic
ggcgcatttcgtatcttttatacat

SEQ ID NO: 18947 - DNA, 20 bp, Artificial Sequence
  Synthetic
tccacttgtgcaccaccttt

SEQ ID NO: 18948 - DNA, 24 bp, Artificial Sequence
  Synthetic
gcagaagtgtcagaagcagattct

SEQ ID NO: 18949 - DNA, 25 bp, Artificial Sequence
  Synthetic
tcagctaatgtggtttgttctactt

SEQ ID NO: 18950 - DNA, 22 bp, Artificial Sequence
  Synthetic
cgtgtcgggggttaccacatct

SEQ ID NO: 18951 - DNA, 25 bp, Artificial Sequence
  Synthetic
acagaaatatatgatggggtggcat

SEQ ID NO: 18952 - DNA, 22 bp, Artificial Sequence
  Synthetic
tgacgtgggcggtttaagaagt

SEQ ID NO: 18953 - DNA, 20 bp, Artificial Sequence
  Synthetic
agaaacaccctgaaggcctg

SEQ ID NO: 18954 - DNA, 23 bp, Artificial Sequence
  Synthetic
ggtaaccacagtgacatctgaaa

SEQ ID NO: 18955 - DNA, 21 bp, Artificial Sequence
  Synthetic
ccaacgcaagcttgttaggat

SEQ ID NO: 18956 - DNA, 23 bp, Artificial Sequence
  Synthetic
gccatcccgtgtaaaaaagtgac

SEQ ID NO: 18957 - DNA, 20 bp, Artificial Sequence
  Synthetic
ggggtacaaagcctaactgc

SEQ ID NO: 18958 - DNA, 19 bp, Artificial Sequence
  Synthetic
tgcccatctccacgcgaag

SEQ ID NO: 18959 - DNA, 22 bp, Artificial Sequence
  Synthetic
tgcttgtgaggcatgactccag

SEQ ID NO: 18960 - DNA, 19 bp, Artificial Sequence
  Synthetic
gcgttcagcagcgcctcag

SEQ ID NO: 18961 - DNA, 22 bp, Artificial Sequence
  Synthetic
ccaccggcatagtgatggtcac

SEQ ID NO: 18962 - DNA, 22 bp, Artificial Sequence
  Synthetic
gccgtgctgcacctcaaacatt

SEQ ID NO: 18963 - DNA, 19 bp, Artificial Sequence
  Synthetic
acaaggcaggacgcagccc

SEQ ID NO: 18964 - DNA, 23 bp, Artificial Sequence
  Synthetic
ctacctgaactaagactgggtgt

SEQ ID NO: 18965 - DNA, 22 bp, Artificial Sequence
  Synthetic
cgaggcaggcttacatgggagt

SEQ ID NO: 18966 - DNA, 19 bp, Artificial Sequence
  Synthetic
cgggttggtccagggcctt

SEQ ID NO: 18967 - DNA, 20 bp, Artificial Sequence
  Synthetic
ctcgtctgggttcttggccc

SEQ ID NO: 18968 - DNA, 20 bp, Artificial Sequence
  Synthetic
aagaggcccctctccgcgag

SEQ ID NO: 18969 - DNA, 22 bp, Artificial Sequence
  Synthetic
cctctggtaggactgggcgacc

SEQ ID NO: 18970 - DNA, 21 bp, Artificial Sequence
  Synthetic
cgtaaacgcgctggactgaga

SEQ ID NO: 18971 - DNA, 22 bp, Artificial Sequence
  Synthetic
gccttcttaggagctgtccgag

SEQ ID NO: 18972 - DNA, 22 bp, Artificial Sequence
  Synthetic
gagttgagctgcctaccatgct

SEQ ID NO: 18973 - DNA, 22 bp, Artificial Sequence
  Synthetic
cctcgtcttcggtctcagcttc

SEQ ID NO: 18974 - DNA, 20 bp, Artificial Sequence
  Synthetic
aggggctggtctgtgacctg

SEQ ID NO: 18975 - DNA, 18 bp, Artificial Sequence
  Synthetic
agtccaggcccgggacat

SEQ ID NO: 18976 - DNA, 19 bp, Artificial Sequence
  Synthetic
agagcccagaccggtctcc

SEQ ID NO: 18977 - DNA, 22 bp, Artificial Sequence
  Synthetic
gcaacgtccaggagctgttctc

SEQ ID NO: 18978 - DNA, 19 bp, Artificial Sequence
  Synthetic
tcgtggtggaggctgccag

SEQ ID NO: 18979 - DNA, 19 bp, Artificial Sequence
  Synthetic
cacgttggaccccaagcgg

SEQ ID NO: 18980 - DNA, 19 bp, Artificial Sequence
  Synthetic
ggcggagagaatggaggcc

SEQ ID NO: 18981 - DNA, 18 bp, Artificial Sequence
  Synthetic
aatgcggccctgcacgtg

SEQ ID NO: 18982 - DNA, 22 bp, Artificial Sequence
  Synthetic
aaagctggaagcgcctcctatc

SEQ ID NO: 18983 - DNA, 22 bp, Artificial Sequence
  Synthetic
gccctcctttggggatgatgca

SEQ ID NO: 18984 - DNA, 19 bp, Artificial Sequence
  Synthetic
acccgtgggacaaacgccc

SEQ ID NO: 18985 - DNA, 19 bp, Artificial Sequence
  Synthetic
tccccccgccactactcca

SEQ ID NO: 18986 - DNA, 20 bp, Artificial Sequence
  Synthetic
ccgctttctggtctcgggtg

SEQ ID NO: 18987 - DNA, 20 bp, Artificial Sequence
  Synthetic
cggccgccttcatcgagttc

SEQ ID NO: 18988 - DNA, 22 bp, Artificial Sequence
  Synthetic
gcttgaagaagagctcggggac

SEQ ID NO: 18989 - DNA, 22 bp, Artificial Sequence
  Synthetic
acggcgcagttgacgatagaga

SEQ ID NO: 18990 - DNA, 19 bp, Artificial Sequence
  Synthetic
cgggaggcagatgttggcc

SEQ ID NO: 18991 - DNA, 20 bp, Artificial Sequence
  Synthetic
agacaacgtgggcctcaacg

SEQ ID NO: 18992 - DNA, 21 bp, Artificial Sequence
  Synthetic
cgagggtgtctctggccttgc

SEQ ID NO: 18993 - DNA, 21 bp, Artificial Sequence
  Synthetic
ctcatgagcaccctggcaaca

SEQ ID NO: 18994 - DNA, 19 bp, Artificial Sequence
  Synthetic
aatccgcatggagcccccg

SEQ ID NO: 18995 - DNA, 18 bp, Artificial Sequence
  Synthetic
tccaccacgtggcgggtt

SEQ ID NO: 18996 - DNA, 22 bp, Artificial Sequence
  Synthetic
ccttcagatatgccacccccca

SEQ ID NO: 18997 - DNA, 20 bp, Artificial Sequence
  Synthetic
cccgagggtcatgggctcat

SEQ ID NO: 18998 - DNA, 19 bp, Artificial Sequence
  Synthetic
tcagtcagggaagccgccg

SEQ ID NO: 18999 - DNA, 20 bp, Artificial Sequence
  Synthetic
cagcagcgtgttcacaaact

SEQ ID NO: 19000 - DNA, 20 bp, Artificial Sequence
  Synthetic
gcctgtgctaccggacacgg

SEQ ID NO: 19001 - DNA, 19 bp, Artificial Sequence
  Synthetic
aacggggtggatttggcgt

SEQ ID NO: 19002 - DNA, 21 bp, Artificial Sequence
  Synthetic
caccctcctcttgaacaggcc

SEQ ID NO: 19003 - DNA, 21 bp, Artificial Sequence
  Synthetic
ggacattgtccccccctgact

SEQ ID NO: 19004 - DNA, 19 bp, Artificial Sequence
  Synthetic
acttggctgaaccaccggc

SEQ ID NO: 19005 - DNA, 19 bp, Artificial Sequence
  Synthetic
ctgaagcccggtgcccaaa

SEQ ID NO: 19006 - DNA, 22 bp, Artificial Sequence
  Synthetic
agccagatgttcaggaaccaaa

SEQ ID NO: 19007 - DNA, 20 bp, Artificial Sequence
  Synthetic
gggaacagcaggggaggtcc

SEQ ID NO: 19008 - DNA, 22 bp, Artificial Sequence
  Synthetic
gctctcgctgtagtcagactcg

SEQ ID NO: 19009 - DNA, 19 bp, Artificial Sequence
  Synthetic
ttggtgctgtgcccctgcc

SEQ ID NO: 19010 - DNA, 18 bp, Artificial Sequence
  Synthetic
catgcaccaggggcagct

SEQ ID NO: 19011 - DNA, 19 bp, Artificial Sequence
  Synthetic
gcagcgggtcagcagtcat

SEQ ID NO: 19012 - DNA, 21 bp, Artificial Sequence
  Synthetic
gggaagagcacatgcagcctg

SEQ ID NO: 19013 - DNA, 21 bp, Artificial Sequence
  Synthetic
gctgatggtgcttgccggatg

SEQ ID NO: 19014 - DNA, 19 bp, Artificial Sequence
  Synthetic
atccgggccttgacgtggg

SEQ ID NO: 19015 - DNA, 21 bp, Artificial Sequence
  Synthetic
gctctacgccttcctccgcag

SEQ ID NO: 19016 - DNA, 21 bp, Artificial Sequence
  Synthetic
ggaccaacaacccccacctgt

SEQ ID NO: 19017 - DNA, 25 bp, Artificial Sequence
  Synthetic
gtctcagttgagcattcacctttta

SEQ ID NO: 19018 - DNA, 22 bp, Artificial Sequence
  Synthetic
tgccggactctgtcatccgtaa

SEQ ID NO: 19019 - DNA, 22 bp, Artificial Sequence
  Synthetic
ccgatccgacccgctctacttt

SEQ ID NO: 19020 - DNA, 22 bp, Artificial Sequence
  Synthetic
gcaaaaggggccctattctgct

SEQ ID NO: 19021 - DNA, 19 bp, Artificial Sequence
  Synthetic
gcacagtgcggctcaggct

SEQ ID NO: 19022 - DNA, 20 bp, Artificial Sequence
  Synthetic
caccgacaacgttctgcgcc

SEQ ID NO: 19023 - DNA, 19 bp, Artificial Sequence
  Synthetic
tcccttcgcaggagggcca

SEQ ID NO: 19024 - DNA, 19 bp, Artificial Sequence
  Synthetic
tcccgatggcaggtgcacg

SEQ ID NO: 19025 - DNA, 20 bp, Artificial Sequence
  Synthetic
ggggctccggtgcctttttc

SEQ ID NO: 19026 - DNA, 21 bp, Artificial Sequence
  Synthetic
gcacacgttgttttggcaata

SEQ ID NO: 19027 - DNA, 22 bp, Artificial Sequence
  Synthetic
cggccgtttcaaatgctgtgga

SEQ ID NO: 19028 - DNA, 18 bp, Artificial Sequence
  Synthetic
tgctgtccaccgccctgt

SEQ ID NO: 19029 - DNA, 22 bp, Artificial Sequence
  Synthetic
cggggtttacagtggcctcatt

SEQ ID NO: 19030 - DNA, 20 bp, Artificial Sequence
  Synthetic
gctgaagcggctaagtggga

SEQ ID NO: 19031 - DNA, 19 bp, Artificial Sequence
  Synthetic
tcccgctctgccagctcga

SEQ ID NO: 19032 - DNA, 22 bp, Artificial Sequence
  Synthetic
tgctcttcaaccttggcagtgt

SEQ ID NO: 19033 - DNA, 19 bp, Artificial Sequence
  Synthetic
aggcaggcgtccttgggtg

SEQ ID NO: 19034 - DNA, 20 bp, Artificial Sequence
  Synthetic
tggcgccctaagaccacctg

SEQ ID NO: 19035 - DNA, 18 bp, Artificial Sequence
  Synthetic
gcagcacacgcccccatt

SEQ ID NO: 19036 - DNA, 21 bp, Artificial Sequence
  Synthetic
aaggctggcaaagatccccag

SEQ ID NO: 19037 - DNA, 22 bp, Artificial Sequence
  Synthetic
tcagcctacaagagcacccaga

SEQ ID NO: 19038 - DNA, 22 bp, Artificial Sequence
  Synthetic
gccgagaagaccttctcctgcc

SEQ ID NO: 19039 - DNA, 22 bp, Artificial Sequence
  Synthetic
gccatcaagtgcacgtgcaacg

SEQ ID NO: 19040 - DNA, 20 bp, Artificial Sequence
  Synthetic
gccgggacaagctcagcctc

SEQ ID NO: 19041 - DNA, 20 bp, Artificial Sequence
  Synthetic
aggaggccgggcgctatagg

SEQ ID NO: 19042 - DNA, 21 bp, Artificial Sequence
  Synthetic
gggacgtggtctactgggagc

SEQ ID NO: 19043 - DNA, 20 bp, Artificial Sequence
  Synthetic
cgctgtgtgggcgagctgat

SEQ ID NO: 19044 - DNA, 22 bp, Artificial Sequence
  Synthetic
agctagagaaggagccccatgg

SEQ ID NO: 19045 - DNA, 22 bp, Artificial Sequence
  Synthetic
tgtggctgcgttacaccgatat

SEQ ID NO: 19046 - DNA, 22 bp, Artificial Sequence
  Synthetic
ccctggccacctaccctcttag

SEQ ID NO: 19047 - DNA, 22 bp, Artificial Sequence
  Synthetic
tcaaggcctccctgaggaagga

SEQ ID NO: 19048 - DNA, 21 bp, Artificial Sequence
  Synthetic
cctcccctacggttaccccac

SEQ ID NO: 19049 - DNA, 23 bp, Artificial Sequence
  Synthetic
cgagtcagccatggaagaagaaa

SEQ ID NO: 19050 - DNA, 25 bp, Artificial Sequence
  Synthetic
aggtagtactaaagcatgcaaatct

SEQ ID NO: 19051 - DNA, 25 bp, Artificial Sequence
  Synthetic
cgtttgtactggagaaccaactaac

SEQ ID NO: 19052 - DNA, 25 bp, Artificial Sequence
  Synthetic
tgaaagaagaaaatggcaactggtg

SEQ ID NO: 19053 - DNA, 24 bp, Artificial Sequence
  Synthetic
ggtctatttgtgtggcgagttttc

SEQ ID NO: 19054 - DNA, 23 bp, Artificial Sequence
  Synthetic
accatatctttgggcatctgatg

SEQ ID NO: 19055 - DNA, 22 bp, Artificial Sequence
  Synthetic
cgaaaacggtcgtgtaggtctt

SEQ ID NO: 19056 - DNA, 25 bp, Artificial Sequence
  Synthetic
aggttggggttcttcaatttcaaat

SEQ ID NO: 19057 - DNA, 25 bp, Artificial Sequence
  Synthetic
tgcctccatgaaagtaatatccagt

SEQ ID NO: 19058 - DNA, 25 bp, Artificial Sequence
  Synthetic
gcatttccaaatccaaattcacaca

SEQ ID NO: 19059 - DNA, 25 bp, Artificial Sequence
  Synthetic
tgcaggacattttgtagctaatgat

SEQ ID NO: 19060 - DNA, 25 bp, Artificial Sequence
  Synthetic
ggtatgttggcttggctttatactc

SEQ ID NO: 19061 - DNA, 25 bp, Artificial Sequence
  Synthetic
cgcatggtagcctatacatattgtg

SEQ ID NO: 19062 - DNA, 25 bp, Artificial Sequence
  Synthetic
gtcgatgaaatctcctggataacat

SEQ ID NO: 19063 - DNA, 25 bp, Artificial Sequence
  Synthetic
acttctttccctttcttgttcacat

SEQ ID NO: 19064 - DNA, 25 bp, Artificial Sequence
  Synthetic
agcataccttggtgctattagattt

SEQ ID NO: 19065 - DNA, 20 bp, Artificial Sequence
  Synthetic
aaccggcaatggctccaaat

SEQ ID NO: 19066 - DNA, 25 bp, Artificial Sequence
  Synthetic
cccattgattccaatttcactccat

SEQ ID NO: 19067 - DNA, 21 bp, Artificial Sequence
  Synthetic
acgtgccaagacttaccgtta

SEQ ID NO: 19068 - DNA, 21 bp, Artificial Sequence
  Synthetic
acaccaaatcctcctctgtcc

SEQ ID NO: 19069 - DNA, 25 bp, Artificial Sequence
  Synthetic
cctttccagctgtttctgaccttat

SEQ ID NO: 19070 - DNA, 24 bp, Artificial Sequence
  Synthetic
accagttgtatatcacccagcaaa

SEQ ID NO: 19071 - DNA, 22 bp, Artificial Sequence
  Synthetic
ccctgtacagcatctccatcat

SEQ ID NO: 19072 - DNA, 20 bp, Artificial Sequence
  Synthetic
ctgttgttggtggattggcc

SEQ ID NO: 19073 - DNA, 24 bp, Artificial Sequence
  Synthetic
tggtggcatataatgtagccaaat

SEQ ID NO: 19074 - DNA, 24 bp, Artificial Sequence
  Synthetic
agtcaaattgtgtagcatttgcag

SEQ ID NO: 19075 - DNA, 25 bp, Artificial Sequence
  Synthetic
ggtcagtaagttcaaattgtggttt

SEQ ID NO: 19076 - DNA, 22 bp, Artificial Sequence
  Synthetic
ccccaatcgcataactccattt

SEQ ID NO: 19077 - DNA, 20 bp, Artificial Sequence
  Synthetic
accccgacctggaaagggtg

SEQ ID NO: 19078 - DNA, 21 bp, Artificial Sequence
  Synthetic
ggtgggggtagtggagtctgc

SEQ ID NO: 19079 - DNA, 21 bp, Artificial Sequence
  Synthetic
gcacttaagcacattggcgtc

SEQ ID NO: 19080 - DNA, 25 bp, Artificial Sequence
  Synthetic
cgaaccatgttagttagtatgggtt

SEQ ID NO: 19081 - DNA, 21 bp, Artificial Sequence
  Synthetic
cctggcccttcccctaatgga

SEQ ID NO: 19082 - DNA, 25 bp, Artificial Sequence
  Synthetic
accttctgttacaactggagtatct

SEQ ID NO: 19083 - DNA, 25 bp, Artificial Sequence
  Synthetic
ggcgttgtacatctaaaaattgcct

SEQ ID NO: 19084 - DNA, 22 bp, Artificial Sequence
  Synthetic
actttcaactgggccttgtact

SEQ ID NO: 19085 - DNA, 25 bp, Artificial Sequence
  Synthetic
gcaaacggtcactaattgcatgata

SEQ ID NO: 19086 - DNA, 22 bp, Artificial Sequence
  Synthetic
acctgatgttccaacccctaaa

SEQ ID NO: 19087 - DNA, 25 bp, Artificial Sequence
  Synthetic
tgctggcaaaaagaaattatgatcc

SEQ ID NO: 19088 - DNA, 23 bp, Artificial Sequence
  Synthetic
aggggccgttttttatcgaaatt

SEQ ID NO: 19089 - DNA, 20 bp, Artificial Sequence
  Synthetic
atgcacagctagcgccatat

SEQ ID NO: 19090 - DNA, 22 bp, Artificial Sequence
  Synthetic
tgttgggatcttctggcctatt

SEQ ID NO: 19091 - DNA, 25 bp, Artificial Sequence
  Synthetic
gcttaatgccactgtatcgtttcaa

SEQ ID NO: 19092 - DNA, 24 bp, Artificial Sequence
  Synthetic
acacgttaacagtactcgattcct

SEQ ID NO: 19093 - DNA, 24 bp, Artificial Sequence
  Synthetic
cgttttgatttagcctcagtcttc

SEQ ID NO: 19094 - DNA, 23 bp, Artificial Sequence
  Synthetic
gtgaaatggcgaactgtttgttc

SEQ ID NO: 19095 - DNA, 25 bp, Artificial Sequence
  Synthetic
agaacggttaggattcgtttttctt

SEQ ID NO: 19096 - DNA, 25 bp, Artificial Sequence
  Synthetic
actcggagacaagtgatataatgga

SEQ ID NO: 19097 - DNA, 25 bp, Artificial Sequence
  Synthetic
ccatctttacatgagaaggcattcc

SEQ ID NO: 19098 - DNA, 23 bp, Artificial Sequence
  Synthetic
aaccatgatccaccatgttcaat

SEQ ID NO: 19099 - DNA, 25 bp, Artificial Sequence
  Synthetic
cgcaccttgacaaatcctttagaaa

SEQ ID NO: 19100 - DNA, 24 bp, Artificial Sequence
  Synthetic
agcatcaactgatgagccagaatc

SEQ ID NO: 19101 - DNA, 21 bp, Artificial Sequence
  Synthetic
agacaaagagtatgcagcggt

SEQ ID NO: 19102 - DNA, 24 bp, Artificial Sequence
  Synthetic
tgttccatagtcccttgtcgatat

SEQ ID NO: 19103 - DNA, 24 bp, Artificial Sequence
  Synthetic
atcaccctctacaaaaagctccta

SEQ ID NO: 19104 - DNA, 23 bp, Artificial Sequence
  Synthetic
cacagtatcgcaagttgaaggtt

SEQ ID NO: 19105 - DNA, 20 bp, Artificial Sequence
  Synthetic
tttgcaggcctgtagtccct

SEQ ID NO: 19106 - DNA, 22 bp, Artificial Sequence
  Synthetic
cccccgaaaagctctatccatg

SEQ ID NO: 19107 - DNA, 23 bp, Artificial Sequence
  Synthetic
gccaaccattgcttatccgaaat

SEQ ID NO: 19108 - DNA, 22 bp, Artificial Sequence
  Synthetic
cctttgctacctcttccatgga

SEQ ID NO: 19109 - DNA, 25 bp, Artificial Sequence
  Synthetic
ttttgctatccaatttcctgagtct

SEQ ID NO: 19110 - DNA, 25 bp, Artificial Sequence
  Synthetic
aaagcgttctagttgtgtgtgataa

SEQ ID NO: 19111 - DNA, 22 bp, Artificial Sequence
  Synthetic
gttcgcatattggaagacggag

SEQ ID NO: 19112 - DNA, 23 bp, Artificial Sequence
  Synthetic
aggtttaacaaaagccaaggagg

SEQ ID NO: 19113 - DNA, 24 bp, Artificial Sequence
  Synthetic
cggagtagagaaatcagcagactg

SEQ ID NO: 19114 - DNA, 23 bp, Artificial Sequence
  Synthetic
catgcaccaatagttacggtgtt

SEQ ID NO: 19115 - DNA, 25 bp, Artificial Sequence
  Synthetic
gcttgtgtgtcttttgtctttttca

SEQ ID NO: 19116 - DNA, 23 bp, Artificial Sequence
  Synthetic
gtttcacctcctaagaagaaccg

SEQ ID NO: 19117 - DNA, 23 bp, Artificial Sequence
  Synthetic
catcctgttcagctttacgaagg

SEQ ID NO: 19118 - DNA, 25 bp, Artificial Sequence
  Synthetic
ccttcggttatcggagtagttacaa

SEQ ID NO: 19119 - DNA, 25 bp, Artificial Sequence
  Synthetic
ggaagcagataatttagaggaagct

SEQ ID NO: 19120 - DNA, 24 bp, Artificial Sequence
  Synthetic
cctaagatagcgatcaaaggttga

SEQ ID NO: 19121 - DNA, 23 bp, Artificial Sequence
  Synthetic
gcaggtttagatgttgtgggttt

SEQ ID NO: 19122 - DNA, 25 bp, Artificial Sequence
  Synthetic
aatgttctaaaggggatgtggattt

SEQ ID NO: 19123 - DNA, 21 bp, Artificial Sequence
  Synthetic
ggagtggattcctcggttgtt

SEQ ID NO: 19124 - DNA, 25 bp, Artificial Sequence
  Synthetic
catgggtgatttcttctgggaatta

SEQ ID NO: 19125 - DNA, 23 bp, Artificial Sequence
  Synthetic
agaactgctgcctctaaaagatc

SEQ ID NO: 19126 - DNA, 25 bp, Artificial Sequence
  Synthetic
ctggtaaaagaagggctgtttgata

SEQ ID NO: 19127 - DNA, 20 bp, Artificial Sequence
  Synthetic
ggctgcagaggctattgaag

SEQ ID NO: 19128 - DNA, 20 bp, Artificial Sequence
  Synthetic
agacgtcacaggtgtggtaa

SEQ ID NO: 19129 - DNA, 24 bp, Artificial Sequence
  Synthetic
gattgctcctcagaggtattggta

SEQ ID NO: 19130 - DNA, 22 bp, Artificial Sequence
  Synthetic
tggtttcttgcccaagatctca

SEQ ID NO: 19131 - DNA, 24 bp, Artificial Sequence
  Synthetic
ttcacagatcctccgtaaagaatg

SEQ ID NO: 19132 - DNA, 24 bp, Artificial Sequence
  Synthetic
aggttatggaatcgcggttatcag

SEQ ID NO: 19133 - DNA, 20 bp, Artificial Sequence
  Synthetic
tggaatttctcgaggcgctc

SEQ ID NO: 19134 - DNA, 25 bp, Artificial Sequence
  Synthetic
gaagtggatactgagacagaaagtt

SEQ ID NO: 19135 - DNA, 22 bp, Artificial Sequence
  Synthetic
ggtgcatattacgctgtccttc

SEQ ID NO: 19136 - DNA, 20 bp, Artificial Sequence
  Synthetic
tggtcaaagacgcaagctgt

SEQ ID NO: 19137 - DNA, 22 bp, Artificial Sequence
  Synthetic
atgattttgttcgttggcggag

SEQ ID NO: 19138 - DNA, 24 bp, Artificial Sequence
  Synthetic
agctagcttcatggagtatgtcta

SEQ ID NO: 19139 - DNA, 22 bp, Artificial Sequence
  Synthetic
gggaaaggggttttcaagaaga

SEQ ID NO: 19140 - DNA, 22 bp, Artificial Sequence
  Synthetic
tttcaggaatttctgtcggtgg

SEQ ID NO: 19141 - DNA, 21 bp, Artificial Sequence
  Synthetic
agaaggaagaccgcaaaggaa

SEQ ID NO: 19142 - DNA, 24 bp, Artificial Sequence
  Synthetic
catggtagtcgtaaaagaaaggga

SEQ ID NO: 19143 - DNA, 20 bp, Artificial Sequence
  Synthetic
tagaggcccaggaatggaga

SEQ ID NO: 19144 - DNA, 21 bp, Artificial Sequence
  Synthetic
gctcagtatttagcagggcag

SEQ ID NO: 19145 - DNA, 24 bp, Artificial Sequence
  Synthetic
gttagcatggcaggagaatttctt

SEQ ID NO: 19146 - DNA, 24 bp, Artificial Sequence
  Synthetic
aggctgctaatatgtcttcacgtt

SEQ ID NO: 19147 - DNA, 20 bp, Artificial Sequence
  Synthetic
tcagaaagggctgaaggcag

SEQ ID NO: 19148 - DNA, 23 bp, Artificial Sequence
  Synthetic
agttgcacagaaataacagctcc

SEQ ID NO: 19149 - DNA, 23 bp, Artificial Sequence
  Synthetic
tgctttcgagaggatacaaaggg

SEQ ID NO: 19150 - DNA, 20 bp, Artificial Sequence
  Synthetic
taaggggtccccagacatgg

SEQ ID NO: 19151 - DNA, 20 bp, Artificial Sequence
  Synthetic
tggctcagtcggttcttcag

SEQ ID NO: 19152 - DNA, 21 bp, Artificial Sequence
  Synthetic
tctacggcgagcttgtttact

SEQ ID NO: 19153 - DNA, 25 bp, Artificial Sequence
  Synthetic
cttgaatttcgaaagaggatgttgc

SEQ ID NO: 19154 - DNA, 22 bp, Artificial Sequence
  Synthetic
ggttgtcagtaagatcgtcgga

SEQ ID NO: 19155 - DNA, 22 bp, Artificial Sequence
  Synthetic
acaggattcttgctttggcaga

SEQ ID NO: 19156 - DNA, 25 bp, Artificial Sequence
  Synthetic
cattgatcgttttgctagggatttc

SEQ ID NO: 19157 - DNA, 23 bp, Artificial Sequence
  Synthetic
cacgagtgtttgagtgctaagtc

SEQ ID NO: 19158 - DNA, 20 bp, Artificial Sequence
  Synthetic
gtaggggctcaaggacgaac

SEQ ID NO: 19159 - DNA, 23 bp, Artificial Sequence
  Synthetic
gattgtagagtgggatcagcaag

SEQ ID NO: 19160 - DNA, 25 bp, Artificial Sequence
  Synthetic
cctacctggttgattatggagaaat

SEQ ID NO: 19161 - DNA, 20 bp, Artificial Sequence
  Synthetic
aaagctcctttttcgtgccc

SEQ ID NO: 19162 - DNA, 22 bp, Artificial Sequence
  Synthetic
tcccattctcttcacgaggttt

SEQ ID NO: 19163 - DNA, 23 bp, Artificial Sequence
  Synthetic
tgttcaatgttcctttggagcag

SEQ ID NO: 19164 - DNA, 20 bp, Artificial Sequence
  Synthetic
cgtgcgtgctagaacttctt

SEQ ID NO: 19165 - DNA, 25 bp, Artificial Sequence
  Synthetic
gcatttgtacgttgatatcgagcat

SEQ ID NO: 19166 - DNA, 21 bp, Artificial Sequence
  Synthetic
gcatgcagggttgctatcaac

SEQ ID NO: 19167 - DNA, 22 bp, Artificial Sequence
  Synthetic
tggtataagaacggtcgtgtgc

SEQ ID NO: 19168 - DNA, 21 bp, Artificial Sequence
  Synthetic
gatggcgctattgcaaatgca

SEQ ID NO: 19169 - DNA, 25 bp, Artificial Sequence
  Synthetic
agaagaaaactccaatcaaaacgtg

SEQ ID NO: 19170 - DNA, 20 bp, Artificial Sequence
  Synthetic
ggcagctcctcaattccgag

SEQ ID NO: 19171 - DNA, 20 bp, Artificial Sequence
  Synthetic
gggaagcagaccagagaaga

SEQ ID NO: 19172 - DNA, 21 bp, Artificial Sequence
  Synthetic
tccccagggaatttctttgca

SEQ ID NO: 19173 - DNA, 23 bp, Artificial Sequence
  Synthetic
gggaggtaaatcaagactccgat

SEQ ID NO: 19174 - DNA, 24 bp, Artificial Sequence
  Synthetic
atcgtagagtcttgtatcacctga

SEQ ID NO: 19175 - DNA, 22 bp, Artificial Sequence
  Synthetic
ttacgctaaaaacgggcctatt

SEQ ID NO: 19176 - DNA, 22 bp, Artificial Sequence
  Synthetic
tcatcaagctatcggcgatgta

SEQ ID NO: 19177 - DNA, 21 bp, Artificial Sequence
  Synthetic
gcaagagcagcttctttgtct

SEQ ID NO: 19178 - DNA, 20 bp, Artificial Sequence
  Synthetic
ctccaggagttgcggataca

SEQ ID NO: 19179 - DNA, 25 bp, Artificial Sequence
  Synthetic
caatcaatgcagaattcgtcacaaa

SEQ ID NO: 19180 - DNA, 22 bp, Artificial Sequence
  Synthetic
gctatcgaagtggattgccgaa

SEQ ID NO: 19181 - DNA, 23 bp, Artificial Sequence
  Synthetic
cttcgtcaagggttcttgtgatt

SEQ ID NO: 19182 - DNA, 21 bp, Artificial Sequence
  Synthetic
ttgcgcatggatgactgttag

SEQ ID NO: 19183 - DNA, 25 bp, Artificial Sequence
  Synthetic
cgagcagcaagaaggaattaattgt

SEQ ID NO: 19184 - DNA, 22 bp, Artificial Sequence
  Synthetic
gctgtttcatctgcggaacttt

SEQ ID NO: 19185 - DNA, 25 bp, Artificial Sequence
  Synthetic
gagaagtctttattcaagccaaagg

SEQ ID NO: 19186 - DNA, 20 bp, Artificial Sequence
  Synthetic
aacagaaagcctgagccagc

SEQ ID NO: 19187 - DNA, 24 bp, Artificial Sequence
  Synthetic
gtcctccgctgatgatattagaag

SEQ ID NO: 19188 - DNA, 20 bp, Artificial Sequence
  Synthetic
cagcaaatggtgaatgctgc

SEQ ID NO: 19189 - DNA, 21 bp, Artificial Sequence
  Synthetic
tgcgagtgttatatgagcacg

SEQ ID NO: 19190 - DNA, 25 bp, Artificial Sequence
  Synthetic
tgtccatttatttggtcttggagtc

SEQ ID NO: 19191 - DNA, 22 bp, Artificial Sequence
  Synthetic
cgcttcatcgataggcatagcc

SEQ ID NO: 19192 - DNA, 25 bp, Artificial Sequence
  Synthetic
tccaagaattagacaaaagatcgca

SEQ ID NO: 19193 - DNA, 25 bp, Artificial Sequence
  Synthetic
caaccaccttgatgaaaaacaaagt

SEQ ID NO: 19194 - DNA, 25 bp, Artificial Sequence
  Synthetic
cgatgtagtattttgctcttgcctt

SEQ ID NO: 19195 - DNA, 23 bp, Artificial Sequence
  Synthetic
agctaatcactcacagcaccatc

SEQ ID NO: 19196 - DNA, 20 bp, Artificial Sequence
  Synthetic
taccgtcgtatgtcggctga

SEQ ID NO: 19197 - DNA, 23 bp, Artificial Sequence
  Synthetic
ctttccgactgcagttgatcatt

SEQ ID NO: 19198 - DNA, 25 bp, Artificial Sequence
  Synthetic
gttgttcttttgggtacaacaatct

SEQ ID NO: 19199 - DNA, 20 bp, Artificial Sequence
  Synthetic
caaaggagttgccggacctc

SEQ ID NO: 19200 - DNA, 25 bp, Artificial Sequence
  Synthetic
cgttgaaaccgattttgttgctaac

SEQ ID NO: 19201 - DNA, 20 bp, Artificial Sequence
  Synthetic
acctgcggaagaagctgttg

SEQ ID NO: 19202 - DNA, 25 bp, Artificial Sequence
  Synthetic
ggatcctaaatagcgcttcactaaa

SEQ ID NO: 19203 - DNA, 24 bp, Artificial Sequence
  Synthetic
tcacctaacctaggattatgcgtt

SEQ ID NO: 19204 - DNA, 21 bp, Artificial Sequence
  Synthetic
gccctttcccaactccttgag

SEQ ID NO: 19205 - DNA, 20 bp, Artificial Sequence
  Synthetic
ttaggcccagaggtcgattg

SEQ ID NO: 19206 - DNA, 24 bp, Artificial Sequence
  Synthetic
gtcaccggagcatcattatttact

SEQ ID NO: 19207 - DNA, 20 bp, Artificial Sequence
  Synthetic
gtgggagcgttcgagacatg

SEQ ID NO: 19208 - DNA, 23 bp, Artificial Sequence
  Synthetic
ggacaattccgcataatttcgga

SEQ ID NO: 19209 - DNA, 22 bp, Artificial Sequence
  Synthetic
caatgcaccccttctttctgat

SEQ ID NO: 19210 - DNA, 21 bp, Artificial Sequence
  Synthetic
ccaccttcaatcacagcactt

SEQ ID NO: 19211 - DNA, 22 bp, Artificial Sequence
  Synthetic
cgggatgattgaagtacagtcc

SEQ ID NO: 19212 - DNA, 22 bp, Artificial Sequence
  Synthetic
ccagtcctcttgtctttcgact

SEQ ID NO: 19213 - DNA, 24 bp, Artificial Sequence
  Synthetic
ctgttttattcttgcgtattggct

SEQ ID NO: 19214 - DNA, 21 bp, Artificial Sequence
  Synthetic
cggctttgcgcataaaaaaca

SEQ ID NO: 19215 - DNA, 24 bp, Artificial Sequence
  Synthetic
gcgattttaaccacaagcttcaaa

SEQ ID NO: 19216 - DNA, 24 bp, Artificial Sequence
  Synthetic
caaagttctggcattacagatcct

SEQ ID NO: 19217 - DNA, 23 bp, Artificial Sequence
  Synthetic
gccctgaagtcagattttcttgc

SEQ ID NO: 19218 - DNA, 20 bp, Artificial Sequence
  Synthetic
atgcagggttcgggaaaaca

SEQ ID NO: 19219 - DNA, 22 bp, Artificial Sequence
  Synthetic
cctccgtagacaaaaacaacgg

SEQ ID NO: 19220 - DNA, 24 bp, Artificial Sequence
  Synthetic
gcactctttaaatgattgctgcct

SEQ ID NO: 19221 - DNA, 20 bp, Artificial Sequence
  Synthetic
gagtttgggcaagccgatga

SEQ ID NO: 19222 - DNA, 20 bp, Artificial Sequence
  Synthetic
ctgttcgaaacgcatggcag

SEQ ID NO: 19223 - DNA, 22 bp, Artificial Sequence
  Synthetic
tcccaaccaactgcttaaacat

SEQ ID NO: 19224 - DNA, 24 bp, Artificial Sequence
  Synthetic
agtgattgttacctctttgcaacc

SEQ ID NO: 19225 - DNA, 21 bp, Artificial Sequence
  Synthetic
ccataggatctggaaccggag

SEQ ID NO: 19226 - DNA, 25 bp, Artificial Sequence
  Synthetic
actctttttagactctgtgcgtgtc

SEQ ID NO: 19227 - DNA, 24 bp, Artificial Sequence
  Synthetic
gccccaatcgaaaatctctcctat

SEQ ID NO: 19228 - DNA, 23 bp, Artificial Sequence
  Synthetic
tgggatgcgatcttctgtgtatt

SEQ ID NO: 19229 - DNA, 23 bp, Artificial Sequence
  Synthetic
aggagaacacataccctcttctt

SEQ ID NO: 19230 - DNA, 22 bp, Artificial Sequence
  Synthetic
tgaagaaccaggatccagctaa

SEQ ID NO: 19231 - DNA, 20 bp, Artificial Sequence
  Synthetic
gctcgcaatagcagttctcc

SEQ ID NO: 19232 - DNA, 20 bp, Artificial Sequence
  Synthetic
agagtgcgcaataaccaccc

SEQ ID NO: 19233 - DNA, 25 bp, Artificial Sequence
  Synthetic
gtcacgaatattttcctgagaagga

SEQ ID NO: 19234 - DNA, 21 bp, Artificial Sequence
  Synthetic
aagaccctgctttccctgtaa

SEQ ID NO: 19235 - DNA, 23 bp, Artificial Sequence
  Synthetic
ccaaagctccgtacactttttcc

SEQ ID NO: 19236 - DNA, 20 bp, Artificial Sequence
  Synthetic
atctcccgcagccatatcac

SEQ ID NO: 19237 - DNA, 22 bp, Artificial Sequence
  Synthetic
gtgtctcgaaaagctgcttcta

SEQ ID NO: 19238 - DNA, 23 bp, Artificial Sequence
  Synthetic
cgatttccctaacgcttccttat

SEQ ID NO: 19239 - DNA, 21 bp, Artificial Sequence
  Synthetic
accacaactcttgctcgctta

SEQ ID NO: 19240 - DNA, 25 bp, Artificial Sequence
  Synthetic
catccgcaaaagttactttgttttg

SEQ ID NO: 19241 - DNA, 22 bp, Artificial Sequence
  Synthetic
acaagcttgctgttaaactcct

SEQ ID NO: 19242 - DNA, 25 bp, Artificial Sequence
  Synthetic
gcgcattgaaactatgcagatcaat

SEQ ID NO: 19243 - DNA, 20 bp, Artificial Sequence
  Synthetic
tccagcacacatgagacagg

SEQ ID NO: 19244 - DNA, 25 bp, Artificial Sequence
  Synthetic
ccagaaagtttaatctgcgctcttt

SEQ ID NO: 19245 - DNA, 23 bp, Artificial Sequence
  Synthetic
cctactcatgcggaatgttttgg

SEQ ID NO: 19246 - DNA, 22 bp, Artificial Sequence
  Synthetic
cctaatccacaacgaggtcctg

SEQ ID NO: 19247 - DNA, 24 bp, Artificial Sequence
  Synthetic
ttcctcattatctttggtcttgcc

SEQ ID NO: 19248 - DNA, 20 bp, Artificial Sequence
  Synthetic
acaaaccgatcgcgaattgg

SEQ ID NO: 19249 - DNA, 20 bp, Artificial Sequence
  Synthetic
cgcaaatgattacgcccctc

SEQ ID NO: 19250 - DNA, 22 bp, Artificial Sequence
  Synthetic
gccctgatagaaggagctatgg

SEQ ID NO: 19251 - DNA, 20 bp, Artificial Sequence
  Synthetic
ttggaggtggcatcctttcc

SEQ ID NO: 19252 - DNA, 20 bp, Artificial Sequence
  Synthetic
accggccaaactccatcaag

SEQ ID NO: 19253 - DNA, 24 bp, Artificial Sequence
  Synthetic
ccagcagctacattgctactaaag

SEQ ID NO: 19254 - DNA, 25 bp, Artificial Sequence
  Synthetic
tgaatgcgcagatcgtatatctaaa

SEQ ID NO: 19255 - DNA, 22 bp, Artificial Sequence
  Synthetic
aggttttcatatgctggttccc

SEQ ID NO: 19256 - DNA, 22 bp, Artificial Sequence
  Synthetic
acccgctgctgaattattttgt

SEQ ID NO: 19257 - DNA, 23 bp, Artificial Sequence
  Synthetic
gacaaaccatgattcacctcgat

SEQ ID NO: 19258 - DNA, 20 bp, Artificial Sequence
  Synthetic
ccgcatctgtaagctcacag

SEQ ID NO: 19259 - DNA, 20 bp, Artificial Sequence
  Synthetic
tcatcttcccgacggatgct

SEQ ID NO: 19260 - DNA, 25 bp, Artificial Sequence
  Synthetic
gccagattcgccttatttcttcttt

SEQ ID NO: 19261 - DNA, 23 bp, Artificial Sequence
  Synthetic
tctccagaagttccgatcattga

SEQ ID NO: 19262 - DNA, 21 bp, Artificial Sequence
  Synthetic
ggcccagtacctgcttcttag

SEQ ID NO: 19263 - DNA, 23 bp, Artificial Sequence
  Synthetic
ccttggaaccgattcttacactg

SEQ ID NO: 19264 - DNA, 23 bp, Artificial Sequence
  Synthetic
tgtactttaacacagccactgcc

SEQ ID NO: 19265 - DNA, 25 bp, Artificial Sequence
  Synthetic
cactagaatcaggataacaggagca

SEQ ID NO: 19266 - DNA, 25 bp, Artificial Sequence
  Synthetic
aaaccgtttcttgaactaatgcttt

SEQ ID NO: 19267 - DNA, 22 bp, Artificial Sequence
  Synthetic
tcagaccgtgtttaaagaagcg

SEQ ID NO: 19268 - DNA, 22 bp, Artificial Sequence
  Synthetic
ttgtgtaggctgaagctactgt

SEQ ID NO: 19269 - DNA, 25 bp, Artificial Sequence
  Synthetic
tccacatccttggtaaaggtagtct

SEQ ID NO: 19270 - DNA, 23 bp, Artificial Sequence
  Synthetic
aagctgttgttgcaattttttgc

SEQ ID NO: 19271 - DNA, 25 bp, Artificial Sequence
  Synthetic
cctgttatctagtcctccaacaact

SEQ ID NO: 19272 - DNA, 20 bp, Artificial Sequence
  Synthetic
cctgacagcaactccctcat

SEQ ID NO: 19273 - DNA, 24 bp, Artificial Sequence
  Synthetic
tggttacagtggtatcagttccac

SEQ ID NO: 19274 - DNA, 25 bp, Artificial Sequence
  Synthetic
agcttcagatcttgcattttcaatt

SEQ ID NO: 19275 - DNA, 25 bp, Artificial Sequence
  Synthetic
cagatcaatttttgtgtcaagaggg

SEQ ID NO: 19276 - DNA, 25 bp, Artificial Sequence
  Synthetic
gttgaatagcttagtgacacctcct

SEQ ID NO: 19277 - DNA, 21 bp, Artificial Sequence
  Synthetic
tagcaacctccatggcctccg

SEQ ID NO: 19278 - DNA, 23 bp, Artificial Sequence
  Synthetic
ggaacactttcactgcctgtatt

SEQ ID NO: 19279 - DNA, 20 bp, Artificial Sequence
  Synthetic
tcaatgggctggacaaggtc

SEQ ID NO: 19280 - DNA, 25 bp, Artificial Sequence
  Synthetic
ccatctacatcactacaatcagctt

SEQ ID NO: 19281 - DNA, 24 bp, Artificial Sequence
  Synthetic
tgcgttgaggcgaaatagtaatag

SEQ ID NO: 19282 - DNA, 20 bp, Artificial Sequence
  Synthetic
caaagctgctactacgctgc

SEQ ID NO: 19283 - DNA, 21 bp, Artificial Sequence
  Synthetic
cattgaaacggtcgctgagag

SEQ ID NO: 19284 - DNA, 24 bp, Artificial Sequence
  Synthetic
gtgcgtcttgagcaaatctgatat

SEQ ID NO: 19285 - DNA, 20 bp, Artificial Sequence
  Synthetic
tttggatccccctggaggcg

SEQ ID NO: 19286 - DNA, 18 bp, Artificial Sequence
  Synthetic
tcccccgttcccttccgt

SEQ ID NO: 19287 - DNA, 25 bp, Artificial Sequence
  Synthetic
gaccatgtagtactgaagcaatcat

SEQ ID NO: 19288 - DNA, 20 bp, Artificial Sequence
  Synthetic
ggcaccaaagcaggcctaat

SEQ ID NO: 19289 - DNA, 25 bp, Artificial Sequence
  Synthetic
ccaagtctgctaacccttatatagc

SEQ ID NO: 19290 - DNA, 25 bp, Artificial Sequence
  Synthetic
tcgtttcttccattttaagctagga

SEQ ID NO: 19291 - DNA, 22 bp, Artificial Sequence
  Synthetic
tccctgacaccttaggcactaa

SEQ ID NO: 19292 - DNA, 25 bp, Artificial Sequence
  Synthetic
agcatggtgtacatcctaaaacaaa

SEQ ID NO: 19293 - DNA, 25 bp, Artificial Sequence
  Synthetic
ccatagaaaaaacatgagttgccat

SEQ ID NO: 19294 - DNA, 25 bp, Artificial Sequence
  Synthetic
ggccgattaaataattgtgcatcag

SEQ ID NO: 19295 - DNA, 24 bp, Artificial Sequence
  Synthetic
caccactatgaaaaatctacgccc

SEQ ID NO: 19296 - DNA, 21 bp, Artificial Sequence
  Synthetic
gctagactgcacacaacactc

SEQ ID NO: 19297 - DNA, 20 bp, Artificial Sequence
  Synthetic
atttccgggattgcacaggc

SEQ ID NO: 19298 - DNA, 25 bp, Artificial Sequence
  Synthetic
tgcaatctcataacataacgtggat

SEQ ID NO: 19299 - DNA, 25 bp, Artificial Sequence
  Synthetic
aatccaacctttaaaatcacacgag

SEQ ID NO: 19300 - DNA, 25 bp, Artificial Sequence
  Synthetic
gccacacttgtgttgaacataatca

SEQ ID NO: 19301 - DNA, 25 bp, Artificial Sequence
  Synthetic
ccaatcttaaaacaagaaaggccat

SEQ ID NO: 19302 - DNA, 24 bp, Artificial Sequence
  Synthetic
ccagccttggccatataaacatta

SEQ ID NO: 19303 - DNA, 25 bp, Artificial Sequence
  Synthetic
agtttcctcaccttctacatcatct

SEQ ID NO: 19304 - DNA, 25 bp, Artificial Sequence
  Synthetic
ccaaggtatcaacaaacaactgact

SEQ ID NO: 19305 - DNA, 21 bp, Artificial Sequence
  Synthetic
gccccctgtagagacataaca

SEQ ID NO: 19306 - DNA, 25 bp, Artificial Sequence
  Synthetic
tctgtttcgtaaacaatggaacgtc

SEQ ID NO: 19307 - DNA, 25 bp, Artificial Sequence
  Synthetic
aacaggcacaaacctattagtgaaa

SEQ ID NO: 19308 - DNA, 25 bp, Artificial Sequence
  Synthetic
tctggagcattaagcaagaaacatt

SEQ ID NO: 19309 - DNA, 23 bp, Artificial Sequence
  Synthetic
tgtaccaaaatgcataacagcgt

SEQ ID NO: 19310 - DNA, 25 bp, Artificial Sequence
  Synthetic
acaccatctactttctcgaatgttt

SEQ ID NO: 19311 - DNA, 25 bp, Artificial Sequence
  Synthetic
ccatcgtcaacatcatccactttta

SEQ ID NO: 19312 - DNA, 25 bp, Artificial Sequence
  Synthetic
ccagcaacctaaaactccaatgtaa

SEQ ID NO: 19313 - DNA, 25 bp, Artificial Sequence
  Synthetic
gcggcctcaacagtaataaaagtat

SEQ ID NO: 19314 - DNA, 25 bp, Artificial Sequence
  Synthetic
actgattaaaagcatccacagacca

SEQ ID NO: 19315 - DNA, 25 bp, Artificial Sequence
  Synthetic
accatatcgtaacactttggtaggg

SEQ ID NO: 19316 - DNA, 20 bp, Artificial Sequence
  Synthetic
acgcacgatacgtacaagcc

SEQ ID NO: 19317 - DNA, 25 bp, Artificial Sequence
  Synthetic
acaacaattacagcgagtatagcac

SEQ ID NO: 19318 - DNA, 25 bp, Artificial Sequence
  Synthetic
gttggtaaagcacatcactaccatt

SEQ ID NO: 19319 - DNA, 25 bp, Artificial Sequence
  Synthetic
cgcataaaaaggaacccttaatggt

SEQ ID NO: 19320 - DNA, 25 bp, Artificial Sequence
  Synthetic
acaaggtcagatttaacttggctaa

SEQ ID NO: 19321 - DNA, 25 bp, Artificial Sequence
  Synthetic
acagtgtaaaaagcacaggagttat

SEQ ID NO: 19322 - DNA, 25 bp, Artificial Sequence
  Synthetic
ccatgtgtaagtaccaaaaagggaa

SEQ ID NO: 19323 - DNA, 20 bp, Artificial Sequence
  Synthetic
acctccaatacccaacagct

SEQ ID NO: 19324 - DNA, 25 bp, Artificial Sequence
  Synthetic
tcaacgaagctagccatattaacaa

SEQ ID NO: 19325 - DNA, 25 bp, Artificial Sequence
  Synthetic
acccgcataggtaacatagacatta

SEQ ID NO: 19326 - DNA, 25 bp, Artificial Sequence
  Synthetic
cagcttgcaatctaactgtagaaga

SEQ ID NO: 19327 - DNA, 24 bp, Artificial Sequence
  Synthetic
cgtaatttgcacaacccatcaaca

SEQ ID NO: 19328 - DNA, 25 bp, Artificial Sequence
  Synthetic
gctgaaaacggcaacaattaacttt

SEQ ID NO: 19329 - DNA, 25 bp, Artificial Sequence
  Synthetic
agtgttaaaacgcctactaagccta

SEQ ID NO: 19330 - DNA, 25 bp, Artificial Sequence
  Synthetic
cagcagcatataaaagcaagtcttt

SEQ ID NO: 19331 - DNA, 25 bp, Artificial Sequence
  Synthetic
aatggatagccagcactcttatcat

SEQ ID NO: 19332 - DNA, 25 bp, Artificial Sequence
  Synthetic
ccaccataaaatttagtggtgccta

SEQ ID NO: 19333 - DNA, 25 bp, Artificial Sequence
  Synthetic
gcttctgaagagcacgtatactaag

SEQ ID NO: 19334 - DNA, 22 bp, Artificial Sequence
  Synthetic
caagcattgtgtgttgtgaaca

SEQ ID NO: 19335 - DNA, 24 bp, Artificial Sequence
  Synthetic
aaggactcatcagtgaacttttgt

SEQ ID NO: 19336 - DNA, 25 bp, Artificial Sequence
  Synthetic
cgctctgtacattcattagctagta

SEQ ID NO: 19337 - DNA, 25 bp, Artificial Sequence
  Synthetic
acgtctcaagcacactataaacact

SEQ ID NO: 19338 - DNA, 25 bp, Artificial Sequence
  Synthetic
acacatacttacgagtggtgtcatt

SEQ ID NO: 19339 - DNA, 25 bp, Artificial Sequence
  Synthetic
gcttagctgcaaagttctgactatt

SEQ ID NO: 19340 - DNA, 25 bp, Artificial Sequence
  Synthetic
ccgctataactcttgctacaatctt

SEQ ID NO: 19341 - DNA, 25 bp, Artificial Sequence
  Synthetic
cacaacaaaatcaattcctgtggaa

SEQ ID NO: 19342 - DNA, 22 bp, Artificial Sequence
  Synthetic
tcacgccctacttttgcaaagt

SEQ ID NO: 19343 - DNA, 24 bp, Artificial Sequence
  Synthetic
tggttgggcatcatagaacttaaa

SEQ ID NO: 19344 - DNA, 25 bp, Artificial Sequence
  Synthetic
atccatatacacacaaggcgtatct

SEQ ID NO: 19345 - DNA, 25 bp, Artificial Sequence
  Synthetic
tcgatcttagccacaactttatcat

SEQ ID NO: 19346 - DNA, 23 bp, Artificial Sequence
  Synthetic
tcgtggaaatgtaaacgccatta

SEQ ID NO: 19347 - DNA, 25 bp, Artificial Sequence
  Synthetic
ccaccaataatcttctggttgaagt

SEQ ID NO: 19348 - DNA, 20 bp, Artificial Sequence
  Synthetic
ggcttccagtcagatgcagc

SEQ ID NO: 19349 - DNA, 25 bp, Artificial Sequence
  Synthetic
tctgcattccaagaaaactctgtta

SEQ ID NO: 19350 - DNA, 20 bp, Artificial Sequence
  Synthetic
tgtgtggcgctgtttgtatt

SEQ ID NO: 19351 - DNA, 23 bp, Artificial Sequence
  Synthetic
tgatgaggggttgatggtgattt

SEQ ID NO: 19352 - DNA, 24 bp, Artificial Sequence
  Synthetic
aaggcgtaaaattaacaccctcat

SEQ ID NO: 19353 - DNA, 25 bp, Artificial Sequence
  Synthetic
acagattgctttcgtaggaacagtt

SEQ ID NO: 19354 - DNA, 24 bp, Artificial Sequence
  Synthetic
tgattgtacgtggttgtactacca

SEQ ID NO: 19355 - DNA, 25 bp, Artificial Sequence
  Synthetic
gcttactattacaagtcagaggcat

SEQ ID NO: 19356 - DNA, 23 bp, Artificial Sequence
  Synthetic
tcccaatttaatggagagggcac

SEQ ID NO: 19357 - DNA, 25 bp, Artificial Sequence
  Synthetic
tcgaggcttaaaaacagaatcttct

SEQ ID NO: 19358 - DNA, 20 bp, Artificial Sequence
  Synthetic
caagacccgaacagtgctca

SEQ ID NO: 19359 - DNA, 20 bp, Artificial Sequence
  Synthetic
agagttagcgtgaaaggccg

SEQ ID NO: 19360 - DNA, 24 bp, Artificial Sequence
  Synthetic
gacaaatgcagcacaatcaatagt

SEQ ID NO: 19361 - DNA, 22 bp, Artificial Sequence
  Synthetic
actttgcacacaaatgaggtcc

SEQ ID NO: 19362 - DNA, 25 bp, Artificial Sequence
  Synthetic
gcggtaagacgaccattaataagtc

SEQ ID NO: 19363 - DNA, 25 bp, Artificial Sequence
  Synthetic
ccactcttaggagctatacctctat

SEQ ID NO: 19364 - DNA, 25 bp, Artificial Sequence
  Synthetic
ccttgagattgatgtagctctgatt

SEQ ID NO: 19365 - DNA, 25 bp, Artificial Sequence
  Synthetic
acaagcatcttctaattctgagaca

SEQ ID NO: 19366 - DNA, 25 bp, Artificial Sequence
  Synthetic
ggcctaacatacattgttcctttca

SEQ ID NO: 19367 - DNA, 25 bp, Artificial Sequence
  Synthetic
gcttaccaggagtaaaagacatcct

SEQ ID NO: 19368 - DNA, 21 bp, Artificial Sequence
  Synthetic
agcgacccagtagactccgtc

SEQ ID NO: 19369 - DNA, 21 bp, Artificial Sequence
  Synthetic
cagccatgtcaggtgttacac

SEQ ID NO: 19370 - DNA, 22 bp, Artificial Sequence
  Synthetic
aacctaattgcgccgttatagc

SEQ ID NO: 19371 - DNA, 20 bp, Artificial Sequence
  Synthetic
ggttaccaccagatgccgac

SEQ ID NO: 19372 - DNA, 22 bp, Artificial Sequence
  Synthetic
actttctgcttgggcattagca

SEQ ID NO: 19373 - DNA, 22 bp, Artificial Sequence
  Synthetic
tccattcaagtcctccgatgag

SEQ ID NO: 19374 - DNA, 22 bp, Artificial Sequence
  Synthetic
ggtcaaggaatggggcatcacc

SEQ ID NO: 19375 - DNA, 22 bp, Artificial Sequence
  Synthetic
gcttgggaatgagcattaacca

SEQ ID NO: 19376 - DNA, 22 bp, Artificial Sequence
  Synthetic
tccattcaagtcctccgatgag

SEQ ID NO: 19377 - DNA, 22 bp, Artificial Sequence
  Synthetic
tggaggctgcacgacactcgta

SEQ ID NO: 19378 - DNA, 20 bp, Artificial Sequence
  Synthetic
ccaacgatctgtccgccacc

SEQ ID NO: 19379 - DNA, 21 bp, Artificial Sequence
  Synthetic
ccccatgaggtcggcgaatcc

SEQ ID NO: 19380 - DNA, 22 bp, Artificial Sequence
  Synthetic
tggggtccagcacgtagatgta

SEQ ID NO: 19381 - DNA, 20 bp, Artificial Sequence
  Synthetic
ccaccaccatacccacagcg

SEQ ID NO: 19382 - DNA, 22 bp, Artificial Sequence
  Synthetic
ggtctgtcatcagaaggaccgg

SEQ ID NO: 19383 - DNA, 20 bp, Artificial Sequence
  Synthetic
gccgctgggacttcagcagg

SEQ ID NO: 19384 - DNA, 21 bp, Artificial Sequence
  Synthetic
cgatcctcgatatcgcagcgc

SEQ ID NO: 19385 - DNA, 21 bp, Artificial Sequence
  Synthetic
cagcgtgaccaggttctccaa

SEQ ID NO: 19386 - DNA, 22 bp, Artificial Sequence
  Synthetic
gtggccactgctaggtctttga

SEQ ID NO: 19387 - DNA, 20 bp, Artificial Sequence
  Synthetic
aggaaggtctgggtagccgt

SEQ ID NO: 19388 - DNA, 22 bp, Artificial Sequence
  Synthetic
gaagggcacataacgggacctc

SEQ ID NO: 19389 - DNA, 20 bp, Artificial Sequence
  Synthetic
gtgcggatgttggggtcgat

SEQ ID NO: 19390 - DNA, 20 bp, Artificial Sequence
  Synthetic
tctacctcgacccgttcggc

SEQ ID NO: 19391 - DNA, 20 bp, Artificial Sequence
  Synthetic
gcgcacacagtggcttggta

SEQ ID NO: 19392 - DNA, 21 bp, Artificial Sequence
  Synthetic
gtctggaacgagtgctggctt

SEQ ID NO: 19393 - DNA, 22 bp, Artificial Sequence
  Synthetic
tttggttggtcgtcaggggact

SEQ ID NO: 19394 - DNA, 19 bp, Artificial Sequence
  Synthetic
tgtcggcgcagtatggctg

SEQ ID NO: 19395 - DNA, 21 bp, Artificial Sequence
  Synthetic
ggaaatgaagggcagcccagg

SEQ ID NO: 19396 - DNA, 21 bp, Artificial Sequence
  Synthetic
cttggcacggacacttgagct

SEQ ID NO: 19397 - DNA, 21 bp, Artificial Sequence
  Synthetic
gatgaggcctatgcgtctggc

SEQ ID NO: 19398 - DNA, 21 bp, Artificial Sequence
  Synthetic
gtccttttcctccgaggggga

SEQ ID NO: 19399 - DNA, 22 bp, Artificial Sequence
  Synthetic
cgccggtccaagaatacgacat

SEQ ID NO: 19400 - DNA, 21 bp, Artificial Sequence
  Synthetic
ccctgctggacaaggagcgaa

SEQ ID NO: 19401 - DNA, 22 bp, Artificial Sequence
  Synthetic
gcctccggttcaaggttacagc

SEQ ID NO: 19402 - DNA, 22 bp, Artificial Sequence
  Synthetic
tcagccaccacgaccaaatcat

SEQ ID NO: 19403 - DNA, 23 bp, Artificial Sequence
  Synthetic
ccacggtggtttttgtgagtatc

SEQ ID NO: 19404 - DNA, 24 bp, Artificial Sequence
  Synthetic
gtcattggtccattcctattccac

SEQ ID NO: 19405 - DNA, 24 bp, Artificial Sequence
  Synthetic
ttggttatcgttagttgcgattcc

SEQ ID NO: 19406 - DNA, 21 bp, Artificial Sequence
  Synthetic
gtgggtctgctgatactgcag

SEQ ID NO: 19407 - DNA, 25 bp, Artificial Sequence
  Synthetic
cctcatgcactcttatcttcaatgt

SEQ ID NO: 19408 - DNA, 25 bp, Artificial Sequence
  Synthetic
cgcatccttctgaaaatgtcttaaa

SEQ ID NO: 19409 - DNA, 20 bp, Artificial Sequence
  Synthetic
ttcactgacctcctcgggag

SEQ ID NO: 19410 - DNA, 24 bp, Artificial Sequence
  Synthetic
cctcatttgttggaacagagttct

SEQ ID NO: 19411 - DNA, 21 bp, Artificial Sequence
  Synthetic
tcccctcagaacagcggactc

SEQ ID NO: 19412 - DNA, 21 bp, Artificial Sequence
  Synthetic
gccaacctctcaggacagcct

SEQ ID NO: 19413 - DNA, 22 bp, Artificial Sequence
  Synthetic
tccgcacactttggtgaatcca

SEQ ID NO: 19414 - DNA, 20 bp, Artificial Sequence
  Synthetic
tgagctcggacctgtccctg

SEQ ID NO: 19415 - DNA, 22 bp, Artificial Sequence
  Synthetic
cgcaaagcagaagaacacgagg

SEQ ID NO: 19416 - DNA, 21 bp, Artificial Sequence
  Synthetic
ggtccgaagatggccaggagt

SEQ ID NO: 19417 - DNA, 22 bp, Artificial Sequence
  Synthetic
cacgtgatgagcttggtctcca

SEQ ID NO: 19418 - DNA, 20 bp, Artificial Sequence
  Synthetic
gcgatggtcctcgttccggc

SEQ ID NO: 19419 - DNA, 22 bp, Artificial Sequence
  Synthetic
acaccggggatctcatggttgt

SEQ ID NO: 19420 - DNA, 21 bp, Artificial Sequence
  Synthetic
taagcacctcctgagcacccg

SEQ ID NO: 19421 - DNA, 21 bp, Artificial Sequence
  Synthetic
agtaggccacggcattgatgc

SEQ ID NO: 19422 - DNA, 21 bp, Artificial Sequence
  Synthetic
acagaggacggacgagtcgaa

SEQ ID NO: 19423 - DNA, 20 bp, Artificial Sequence
  Synthetic
gggtgcgtcagggtgacttc

SEQ ID NO: 19424 - DNA, 22 bp, Artificial Sequence
  Synthetic
ggtgataacctctgcttggcgg

SEQ ID NO: 19425 - DNA, 22 bp, Artificial Sequence
  Synthetic
ccctgcaagaatgtccacgagg

SEQ ID NO: 19426 - DNA, 19 bp, Artificial Sequence
  Synthetic
tatggcagtgacgcgggcg

SEQ ID NO: 19427 - DNA, 22 bp, Artificial Sequence
  Synthetic
ctccacatgttcctgcaggtcc

SEQ ID NO: 19428 - DNA, 21 bp, Artificial Sequence
  Synthetic
aggtaattgcgaccccaccgg

SEQ ID NO: 19429 - DNA, 22 bp, Artificial Sequence
  Synthetic
cgaatctccgagacttccgcag

SEQ ID NO: 19430 - DNA, 20 bp, Artificial Sequence
  Synthetic
gactcaacgtcggagtcggg

SEQ ID NO: 19431 - DNA, 22 bp, Artificial Sequence
  Synthetic
gctgcaagcttcctctacggat

SEQ ID NO: 19432 - DNA, 20 bp, Artificial Sequence
  Synthetic
ggccatcttctcgcacacgc

SEQ ID NO: 19433 - DNA, 19 bp, Artificial Sequence
  Synthetic
ttgtcagtacgccgctcgc

SEQ ID NO: 19434 - DNA, 20 bp, Artificial Sequence
  Synthetic
gtcttgctgtctcccacgcg

SEQ ID NO: 19435 - DNA, 20 bp, Artificial Sequence
  Synthetic
tgtctccaagctcgcaaggg

SEQ ID NO: 19436 - DNA, 20 bp, Artificial Sequence
  Synthetic
tgcacccatggacatagctt

SEQ ID NO: 19437 - DNA, 24 bp, Artificial Sequence
  Synthetic
tgtagcatctgatcagctgtgtat

SEQ ID NO: 19438 - DNA, 20 bp, Artificial Sequence
  Synthetic
tggttccaccgcatctgtat

SEQ ID NO: 19439 - DNA, 22 bp, Artificial Sequence
  Synthetic
ccccagctttatggcgtctagc

SEQ ID NO: 19440 - DNA, 23 bp, Artificial Sequence
  Synthetic
cattggcatggtagcacttgtat

SEQ ID NO: 19441 - DNA, 25 bp, Artificial Sequence
  Synthetic
gctcatacaaaagtatgatttgcca

SEQ ID NO: 19442 - DNA, 25 bp, Artificial Sequence
  Synthetic
accttcgaaaaaagcatttccaatt

SEQ ID NO: 19443 - DNA, 23 bp, Artificial Sequence
  Synthetic
accctcgtatgagacttttcctg

SEQ ID NO: 19444 - DNA, 22 bp, Artificial Sequence
  Synthetic
tctttggacccttgtcgctgct

SEQ ID NO: 19445 - DNA, 21 bp, Artificial Sequence
  Synthetic
ccaaaacaaacacagcagcag

SEQ ID NO: 19446 - DNA, 22 bp, Artificial Sequence
  Synthetic
ggtggtgccctctactttggga

SEQ ID NO: 19447 - DNA, 22 bp, Artificial Sequence
  Synthetic
gttgtggcagaggatgtaactt

SEQ ID NO: 19448 - DNA, 23 bp, Artificial Sequence
  Synthetic
ggttccatttcaatgtcctcgat

SEQ ID NO: 19449 - DNA, 22 bp, Artificial Sequence
  Synthetic
tccgtgctgagaactttagaca

SEQ ID NO: 19450 - DNA, 25 bp, Artificial Sequence
  Synthetic
aggcacgtcagacttatttaattgt

SEQ ID NO: 19451 - DNA, 23 bp, Artificial Sequence
  Synthetic
gccataatatccggggtcaatgt

SEQ ID NO: 19452 - DNA, 25 bp, Artificial Sequence
  Synthetic
cacaggaacagcaattacacaaatt

SEQ ID NO: 19453 - DNA, 20 bp, Artificial Sequence
  Synthetic
atcgtacacctgtcccacag

SEQ ID NO: 19454 - DNA, 25 bp, Artificial Sequence
  Synthetic
atccatatcgtctatcaggttggac

SEQ ID NO: 19455 - DNA, 25 bp, Artificial Sequence
  Synthetic
gtcccagtttgtataaggaaacaca

SEQ ID NO: 19456 - DNA, 20 bp, Artificial Sequence
  Synthetic
ggggtagaggggtatgcggt

SEQ ID NO: 19457 - DNA, 22 bp, Artificial Sequence
  Synthetic
gttcccactgcttcaggagctg

SEQ ID NO: 19458 - DNA, 25 bp, Artificial Sequence
  Synthetic
ctaacgatgaataacctgtagtccc

SEQ ID NO: 19459 - DNA, 24 bp, Artificial Sequence
  Synthetic
tcctggatcagcagtgataactat

SEQ ID NO: 19460 - DNA, 23 bp, Artificial Sequence
  Synthetic
tcatcatcaaaggcgggattttc

SEQ ID NO: 19461 - DNA, 25 bp, Artificial Sequence
  Synthetic
catcaggtactataggtctgtcagt

SEQ ID NO: 19462 - DNA, 25 bp, Artificial Sequence
  Synthetic
cccttctacatattcatccgtactc

SEQ ID NO: 19463 - DNA, 25 bp, Artificial Sequence
  Synthetic
gggatgacctgatgtactaatacct

SEQ ID NO: 19464 - DNA, 25 bp, Artificial Sequence
  Synthetic
acatgtcaccatcctgaatagtagt

SEQ ID NO: 19465 - DNA, 25 bp, Artificial Sequence
  Synthetic
cctgctgagcaccataaataaagtt

SEQ ID NO: 19466 - DNA, 20 bp, Artificial Sequence
  Synthetic
tggcgccaaaaacttaccga

SEQ ID NO: 19467 - DNA, 21 bp, Artificial Sequence
  Synthetic
ggtctaccgttgtctgtctca

SEQ ID NO: 19468 - DNA, 24 bp, Artificial Sequence
  Synthetic
ccttttcaaacccttcagtatccc

SEQ ID NO: 19469 - DNA, 25 bp, Artificial Sequence
  Synthetic
catcgttcccttcaatttttctctt

SEQ ID NO: 19470 - DNA, 21 bp, Artificial Sequence
  Synthetic
agctctagtgggtttgatgca

SEQ ID NO: 19471 - DNA, 24 bp, Artificial Sequence
  Synthetic
gctttttttcaatatccccctgca

SEQ ID NO: 19472 - DNA, 25 bp, Artificial Sequence
  Synthetic
cattgatcaaaaaggtcattgctcc

SEQ ID NO: 19473 - DNA, 23 bp, Artificial Sequence
  Synthetic
acgttatcattagctgtgcttgt

SEQ ID NO: 19474 - DNA, 25 bp, Artificial Sequence
  Synthetic
ggtcagttttcataacctcttggtc

SEQ ID NO: 19475 - DNA, 25 bp, Artificial Sequence
  Synthetic
ggttttgaaatctccaagatcaggg

SEQ ID NO: 19476 - DNA, 25 bp, Artificial Sequence
  Synthetic
gcatggataacagggaatcttgttt

SEQ ID NO: 19477 - DNA, 25 bp, Artificial Sequence
  Synthetic
agcgacaatctatcttcacatgatt

SEQ ID NO: 19478 - DNA, 24 bp, Artificial Sequence
  Synthetic
cacaatggacaagaaaaaccatcc

SEQ ID NO: 19479 - DNA, 25 bp, Artificial Sequence
  Synthetic
caccaagaattattaacgccaagaa

SEQ ID NO: 19480 - DNA, 24 bp, Artificial Sequence
  Synthetic
caccacacttacccatgtacatat

SEQ ID NO: 19481 - DNA, 25 bp, Artificial Sequence
  Synthetic
cagctttaacaagtctagcaacatt

SEQ ID NO: 19482 - DNA, 25 bp, Artificial Sequence
  Synthetic
gcaacataagacaagctacattcac

SEQ ID NO: 19483 - DNA, 21 bp, Artificial Sequence
  Synthetic
acctgcacaattacagccaat

SEQ ID NO: 19484 - DNA, 25 bp, Artificial Sequence
  Synthetic
tgagcacaaatatcatgtccaacta

SEQ ID NO: 19485 - DNA, 25 bp, Artificial Sequence
  Synthetic
accagctttattacaaccatagaca

SEQ ID NO: 19486 - DNA, 25 bp, Artificial Sequence
  Synthetic
caacatctgaatcaatggaacaaca

SEQ ID NO: 19487 - DNA, 25 bp, Artificial Sequence
  Synthetic
agcattcttcataacaccatctgaa

SEQ ID NO: 19488 - DNA, 20 bp, Artificial Sequence
  Synthetic
acaagttgacagccctgcat

SEQ ID NO: 19489 - DNA, 25 bp, Artificial Sequence
  Synthetic
gcaataacattaacagtctggacgt

SEQ ID NO: 19490 - DNA, 24 bp, Artificial Sequence
  Synthetic
gttagtaagtgctaggtctgccat

SEQ ID NO: 19491 - DNA, 25 bp, Artificial Sequence
  Synthetic
gcaccaccataagaatcttggttaa

SEQ ID NO: 19492 - DNA, 25 bp, Artificial Sequence
  Synthetic
accattgaccatacaaatcttggtt

SEQ ID NO: 19493 - DNA, 25 bp, Artificial Sequence
  Synthetic
ggtgtgtgtcaacatctaagttcat

SEQ ID NO: 19494 - DNA, 25 bp, Artificial Sequence
  Synthetic
gtgggcagaacattacgtttagtat

SEQ ID NO: 19495 - DNA, 25 bp, Artificial Sequence
  Synthetic
cgggccaaaactaaactactaacaa

SEQ ID NO: 19496 - DNA, 25 bp, Artificial Sequence
  Synthetic
gctctatcaaaagaacactgtcagt

SEQ ID NO: 19497 - DNA, 25 bp, Artificial Sequence
  Synthetic
tgccagaacataatcatcaacttct

SEQ ID NO: 19498 - DNA, 25 bp, Artificial Sequence
  Synthetic
acaccaatggaacactataaacact

SEQ ID NO: 19499 - DNA, 23 bp, Artificial Sequence
  Synthetic
tgttccaatgttttcgcgagtag

SEQ ID NO: 19500 - DNA, 25 bp, Artificial Sequence
  Synthetic
aaacctttaggattgcctatgtcat

SEQ ID NO: 19501 - DNA, 25 bp, Artificial Sequence
  Synthetic
gcgcttcttaaaggaacgtaatcaa

SEQ ID NO: 19502 - DNA, 25 bp, Artificial Sequence
  Synthetic
caactttatccacaatcacaccatt

SEQ ID NO: 19503 - DNA, 25 bp, Artificial Sequence
  Synthetic
cgcatattaacaggaacagctaatg

SEQ ID NO: 19504 - DNA, 21 bp, Artificial Sequence
  Synthetic
accaataggacaggaagcaga

SEQ ID NO: 19505 - DNA, 25 bp, Artificial Sequence
  Synthetic
cgaagaggaagaagaaggtgagtta

SEQ ID NO: 19506 - DNA, 25 bp, Artificial Sequence
  Synthetic
gcagttaaacgaccattaataagcc

SEQ ID NO: 19507 - DNA, 25 bp, Artificial Sequence
  Synthetic
tgaccacgaataacagtagcagtta

SEQ ID NO: 19508 - DNA, 21 bp, Artificial Sequence
  Synthetic
ggtcagcccaagaagttttct

SEQ ID NO: 19509 - DNA, 23 bp, Artificial Sequence
  Synthetic
gcttttggcgaggttttgttaaa

SEQ ID NO: 19510 - DNA, 25 bp, Artificial Sequence
  Synthetic
agagtcaaactgttctggtaattgt

SEQ ID NO: 19511 - DNA, 25 bp, Artificial Sequence
  Synthetic
cctctccatactctttcattgcttt

SEQ ID NO: 19512 - DNA, 21 bp, Artificial Sequence
  Synthetic
cctctgttggccatttcttgt

SEQ ID NO: 19513 - DNA, 23 bp, Artificial Sequence
  Synthetic
gtttgattggtcttggtgttgtc

SEQ ID NO: 19514 - DNA, 25 bp, Artificial Sequence
  Synthetic
tcatgtttttagtccttgggatctt

SEQ ID NO: 19515 - DNA, 22 bp, Artificial Sequence
  Synthetic
ctcctcatgcttgcaatgtact

SEQ ID NO: 19516 - DNA, 20 bp, Artificial Sequence
  Synthetic
atgtggctcaagtctcgggt

SEQ ID NO: 19517 - DNA, 25 bp, Artificial Sequence
  Synthetic
ggccatgcttctgatttattctcaa

SEQ ID NO: 19518 - DNA, 23 bp, Artificial Sequence
  Synthetic
caccaaccattcttccaacagat

SEQ ID NO: 19519 - DNA, 22 bp, Artificial Sequence
  Synthetic
tctccagaagttccggtcatta

SEQ ID NO: 19520 - DNA, 20 bp, Artificial Sequence
  Synthetic
tgagtgcagaccgtgccaga

SEQ ID NO: 19521 - DNA, 25 bp, Artificial Sequence
  Synthetic
gggatcactcttgttcctctaatga

SEQ ID NO: 19522 - DNA, 20 bp, Artificial Sequence
  Synthetic
attccaaaggacgacgcgac

SEQ ID NO: 19523 - DNA, 20 bp, Artificial Sequence
  Synthetic
tggatggggtgtccggggag

SEQ ID NO: 19524 - DNA, 23 bp, Artificial Sequence
  Synthetic
gcctcttcttgaagtcgtctaag

SEQ ID NO: 19525 - DNA, 25 bp, Artificial Sequence
  Synthetic
ctcgctttcttcttataggcatgtt

SEQ ID NO: 19526 - DNA, 20 bp, Artificial Sequence
  Synthetic
ttaccaaaaggacgcccagt

SEQ ID NO: 19527 - DNA, 23 bp, Artificial Sequence
  Synthetic
catccaatacagcagaaacaccc

SEQ ID NO: 19528 - DNA, 25 bp, Artificial Sequence
  Synthetic
gtctccaatctttgtgtaggagtac

SEQ ID NO: 19529 - DNA, 22 bp, Artificial Sequence
  Synthetic
ctggagcatactcagttaaccg

SEQ ID NO: 19530 - DNA, 23 bp, Artificial Sequence
  Synthetic
gctggtgcacatcctacaataaa

SEQ ID NO: 19531 - DNA, 25 bp, Artificial Sequence
  Synthetic
tgtcatccgtaaataatctggccat

SEQ ID NO: 19532 - DNA, 25 bp, Artificial Sequence
  Synthetic
aaaagctaattgccattgatcaagt

SEQ ID NO: 19533 - DNA, 25 bp, Artificial Sequence
  Synthetic
ccatttagcaggcctatctgataca

SEQ ID NO: 19534 - DNA, 24 bp, Artificial Sequence
  Synthetic
caccaactgttactgaagaactga

SEQ ID NO: 19535 - DNA, 25 bp, Artificial Sequence
  Synthetic
gaaacaaacttccaaatgtgtgcat

SEQ ID NO: 19536 - DNA, 25 bp, Artificial Sequence
  Synthetic
accggttctctttgtaatcatacaa

SEQ ID NO: 19537 - DNA, 21 bp, Artificial Sequence
  Synthetic
tcggactgacgaaaggaatcc

SEQ ID NO: 19538 - DNA, 21 bp, Artificial Sequence
  Synthetic
gccatattttcaccgagtgcc

SEQ ID NO: 19539 - DNA, 25 bp, Artificial Sequence
  Synthetic
gctgtaaaatagttcctcctcatgc

SEQ ID NO: 19540 - DNA, 20 bp, Artificial Sequence
  Synthetic
tcccatttgtgtggctccag

SEQ ID NO: 19541 - DNA, 25 bp, Artificial Sequence
  Synthetic
gccatgtttccgatttgttttcaaa

SEQ ID NO: 19542 - DNA, 25 bp, Artificial Sequence
  Synthetic
acatgtctctcatactgagtagctt

SEQ ID NO: 19543 - DNA, 21 bp, Artificial Sequence
  Synthetic
cctaggcatcagcatgtacca

SEQ ID NO: 19544 - DNA, 25 bp, Artificial Sequence
  Synthetic
cgctcgaattgagttatcattccat

SEQ ID NO: 19545 - DNA, 25 bp, Artificial Sequence
  Synthetic
cactcttctctttctctggaaatgt

SEQ ID NO: 19546 - DNA, 24 bp, Artificial Sequence
  Synthetic
gtccagattgctcaagtttttcac

SEQ ID NO: 19547 - DNA, 20 bp, Artificial Sequence
  Synthetic
gcccatcccaccagtatgtg

SEQ ID NO: 19548 - DNA, 25 bp, Artificial Sequence
  Synthetic
tcatgtcagccgattcattaattcc

SEQ ID NO: 19549 - DNA, 25 bp, Artificial Sequence
  Synthetic
tggtacatttgttcatcctcaagaa

SEQ ID NO: 19550 - DNA, 23 bp, Artificial Sequence
  Synthetic
attgccaaattcagccatcctat

SEQ ID NO: 19551 - DNA, 25 bp, Artificial Sequence
  Synthetic
acacaatgtcatgtacagtaggttt

SEQ ID NO: 19552 - DNA, 22 bp, Artificial Sequence
  Synthetic
cctgtgcatgtaatagcgcttg

SEQ ID NO: 19553 - DNA, 22 bp, Artificial Sequence
  Synthetic
ctcaggtgtgtctcctgttact

SEQ ID NO: 19554 - DNA, 22 bp, Artificial Sequence
  Synthetic
acactggattgccattgctatc

SEQ ID NO: 19555 - DNA, 25 bp, Artificial Sequence
  Synthetic
aatttgaaatgttggtaccacgtgg

SEQ ID NO: 19556 - DNA, 21 bp, Artificial Sequence
  Synthetic
agcaattgcagtagcggatac

SEQ ID NO: 19557 - DNA, 25 bp, Artificial Sequence
  Synthetic
ccacagattcaattacaacaggtgg

SEQ ID NO: 19558 - DNA, 25 bp, Artificial Sequence
  Synthetic
tcccagatgtaggggtagtaataaa

SEQ ID NO: 19559 - DNA, 25 bp, Artificial Sequence
  Synthetic
ggcctatgtaaacgaacaatatcca

SEQ ID NO: 19560 - DNA, 24 bp, Artificial Sequence
  Synthetic
tcaggtaatgtaacccgaaacact

SEQ ID NO: 19561 - DNA, 25 bp, Artificial Sequence
  Synthetic
gggtttgtttataatccactgacac

SEQ ID NO: 19562 - DNA, 20 bp, Artificial Sequence
  Synthetic
ctgtccccatatgcatctgc

SEQ ID NO: 19563 - DNA, 24 bp, Artificial Sequence
  Synthetic
tcttgtgactaaaacatccgagct

SEQ ID NO: 19564 - DNA, 24 bp, Artificial Sequence
  Synthetic
tgcattgttgtttggtcctgatat

SEQ ID NO: 19565 - DNA, 20 bp, Artificial Sequence
  Synthetic
ccaattgtccctgcatgtgc

SEQ ID NO: 19566 - DNA, 23 bp, Artificial Sequence
  Synthetic
gctgtgcttattgtcctccctag

SEQ ID NO: 19567 - DNA, 21 bp, Artificial Sequence
  Synthetic
gccatatggtccacagtggtc

SEQ ID NO: 19568 - DNA, 25 bp, Artificial Sequence
  Synthetic
agggtaatgaactgtacttgttgtt

SEQ ID NO: 19569 - DNA, 20 bp, Artificial Sequence
  Synthetic
gtacgccaccatcaagggag

SEQ ID NO: 19570 - DNA, 21 bp, Artificial Sequence
  Synthetic
tgctaatgggtctgctgacac

SEQ ID NO: 19571 - DNA, 24 bp, Artificial Sequence
  Synthetic
tcccaaccattgtgaattcttcat

SEQ ID NO: 19572 - DNA, 25 bp, Artificial Sequence
  Synthetic
cccacatcattgatgacgaataagt

SEQ ID NO: 19573 - DNA, 22 bp, Artificial Sequence
  Synthetic
gcagcaaaggggagaagtttta

SEQ ID NO: 19574 - DNA, 25 bp, Artificial Sequence
  Synthetic
gtcttctttgcccaaaatgagaaat

SEQ ID NO: 19575 - DNA, 25 bp, Artificial Sequence
  Synthetic
tcttggtttggattccatcagaatt

SEQ ID NO: 19576 - DNA, 25 bp, Artificial Sequence
  Synthetic
agcgtgtcaactctaaataattgct

SEQ ID NO: 19577 - DNA, 25 bp, Artificial Sequence
  Synthetic
gacactctttgtggagaaatgtgaa

SEQ ID NO: 19578 - DNA, 22 bp, Artificial Sequence
  Synthetic
acttcttcaggagatgggacac

SEQ ID NO: 19579 - DNA, 24 bp, Artificial Sequence
  Synthetic
cagcttcacctaatggtctgtaac

SEQ ID NO: 19580 - DNA, 25 bp, Artificial Sequence
  Synthetic
ggtagcagtagagtcagtgattgta

SEQ ID NO: 19581 - DNA, 20 bp, Artificial Sequence
  Synthetic
gctacttctgccaagtcccg

SEQ ID NO: 19582 - DNA, 25 bp, Artificial Sequence
  Synthetic
cgttgtagctagtatgtcgtcaact

SEQ ID NO: 19583 - DNA, 25 bp, Artificial Sequence
  Synthetic
ctttgttaaagtaaggatggcctgt

SEQ ID NO: 19584 - DNA, 25 bp, Artificial Sequence
  Synthetic
ctgctttatcttcttgtaaacggct

SEQ ID NO: 19585 - DNA, 21 bp, Artificial Sequence
  Synthetic
ggtgttaagaatgcaccccca

SEQ ID NO: 19586 - DNA, 22 bp, Artificial Sequence
  Synthetic
gtttctaatgccctcctccgtg

SEQ ID NO: 19587 - DNA, 25 bp, Artificial Sequence
  Synthetic
gcattttcatccccattagtcaatg

SEQ ID NO: 19588 - DNA, 25 bp, Artificial Sequence
  Synthetic
cgcggaggatctgttattatttgat

SEQ ID NO: 19589 - DNA, 25 bp, Artificial Sequence
  Synthetic
aaagcacttctcatatacacatcca

SEQ ID NO: 19590 - DNA, 21 bp, Artificial Sequence
  Synthetic
gtttgtatgccctgccttctg

SEQ ID NO: 19591 - DNA, 25 bp, Artificial Sequence
  Synthetic
atgtctataaagtacaggccatccg

SEQ ID NO: 19592 - DNA, 25 bp, Artificial Sequence
  Synthetic
gctgtgctaatacactgaaataagc

SEQ ID NO: 19593 - DNA, 21 bp, Artificial Sequence
  Synthetic
tgggaacatagccagaggccc

SEQ ID NO: 19594 - DNA, 24 bp, Artificial Sequence
  Synthetic
aggatgcccatatacagagatgta

SEQ ID NO: 19595 - DNA, 23 bp, Artificial Sequence
  Synthetic
aggccacttcttgtacgaatagt

SEQ ID NO: 19596 - DNA, 23 bp, Artificial Sequence
  Synthetic
agccacaaagacatctgcaaaat

SEQ ID NO: 19597 - DNA, 24 bp, Artificial Sequence
  Synthetic
caaacaaggagtacagcctactac

SEQ ID NO: 19598 - DNA, 22 bp, Artificial Sequence
  Synthetic
gccagcgtctgacttaacattt

SEQ ID NO: 19599 - DNA, 25 bp, Artificial Sequence
  Synthetic
ccagtttgagataaaaatctgcgac

SEQ ID NO: 19600 - DNA, 24 bp, Artificial Sequence
  Synthetic
aatattacaaaacatcgctgccgg

SEQ ID NO: 19601 - DNA, 21 bp, Artificial Sequence
  Synthetic
cctcctcctcaggatcaccat

SEQ ID NO: 19602 - DNA, 25 bp, Artificial Sequence
  Synthetic
tgcccctcatttaattcaagagaat

SEQ ID NO: 19603 - DNA, 21 bp, Artificial Sequence
  Synthetic
tgtgacagcttccaaccttgg

SEQ ID NO: 19604 - DNA, 25 bp, Artificial Sequence
  Synthetic
taacccagttttcacaacatgatct

SEQ ID NO: 19605 - DNA, 25 bp, Artificial Sequence
  Synthetic
atgtcccagtttgtgaatatgtttg

SEQ ID NO: 19606 - DNA, 20 bp, Artificial Sequence
  Synthetic
tgctcgttggatcttcggcg

SEQ ID NO: 19607 - DNA, 25 bp, Artificial Sequence
  Synthetic
gctggtgtaatgtctaatgtagcaa

SEQ ID NO: 19608 - DNA, 20 bp, Artificial Sequence
  Synthetic
aggtgtactggtacgtggag

SEQ ID NO: 19609 - DNA, 24 bp, Artificial Sequence
  Synthetic
ctgcagatgtttctgaaaaccgag

SEQ ID NO: 19610 - DNA, 25 bp, Artificial Sequence
  Synthetic
tgttgcaaatatcagctgtgcatta

SEQ ID NO: 19611 - DNA, 21 bp, Artificial Sequence
  Synthetic
cgtttgcgtcgcctaagaaga

SEQ ID NO: 19612 - DNA, 25 bp, Artificial Sequence
  Synthetic
gctctgtctatcattgcaaatttgt

SEQ ID NO: 19613 - DNA, 25 bp, Artificial Sequence
  Synthetic
gcatttgttttggatccattgaaac

SEQ ID NO: 19614 - DNA, 24 bp, Artificial Sequence
  Synthetic
agtgtgccaagtgattgtttctta

SEQ ID NO: 19615 - DNA, 20 bp, Artificial Sequence
  Synthetic
ctgcccatctccacgcgaag

SEQ ID NO: 19616 - DNA, 22 bp, Artificial Sequence
  Synthetic
gccgtgctgcacctcaaacatt

SEQ ID NO: 19617 - DNA, 22 bp, Artificial Sequence
  Synthetic
ctgaactaagactgggtgtcca

SEQ ID NO: 19618 - DNA, 21 bp, Artificial Sequence
  Synthetic
cgaggcaggcttacatgggag

SEQ ID NO: 19619 - DNA, 19 bp, Artificial Sequence
  Synthetic
cgggctggtccagggactt

SEQ ID NO: 19620 - DNA, 19 bp, Artificial Sequence
  Synthetic
cgcagggcaagacgaggga

SEQ ID NO: 19621 - DNA, 21 bp, Artificial Sequence
  Synthetic
cacgctggagggacattgtcc

SEQ ID NO: 19622 - DNA, 25 bp, Artificial Sequence
  Synthetic
cccagctcattttggaaaataaaca

SEQ ID NO: 19623 - DNA, 19 bp, Artificial Sequence
  Synthetic
tgcgccgcctaatgcatcc

SEQ ID NO: 19624 - DNA, 19 bp, Artificial Sequence
  Synthetic
tccttcttccacggcgccg

SEQ ID NO: 19625 - DNA, 19 bp, Artificial Sequence
  Synthetic
tcgagctcgctggcgtgag

SEQ ID NO: 19626 - DNA, 20 bp, Artificial Sequence
  Synthetic
acttgtaggcccggggaccc

SEQ ID NO: 19627 - DNA, 22 bp, Artificial Sequence
  Synthetic
cccacaccatcagcagcgtctt

SEQ ID NO: 19628 - DNA, 20 bp, Artificial Sequence
  Synthetic
cccccatcactctcccaggc

SEQ ID NO: 19629 - DNA, 19 bp, Artificial Sequence
  Synthetic
actcggcctggtctcggct

SEQ ID NO: 19630 - DNA, 20 bp, Artificial Sequence
  Synthetic
ccctgcgacccccttaaccc

SEQ ID NO: 19631 - DNA, 19 bp, Artificial Sequence
  Synthetic
agcactcggcggggctttc

SEQ ID NO: 19632 - DNA, 21 bp, Artificial Sequence
  Synthetic
aattaggaaggcgctgggggc

SEQ ID NO: 19633 - DNA, 19 bp, Artificial Sequence
  Synthetic
cgtccctggccacgaagga

SEQ ID NO: 19634 - DNA, 20 bp, Artificial Sequence
  Synthetic
gcaaccaggcccactgcaag

SEQ ID NO: 19635 - DNA, 19 bp, Artificial Sequence
  Synthetic
agacccaccacctcgtgcc

SEQ ID NO: 19636 - DNA, 20 bp, Artificial Sequence
  Synthetic
cggaagaggaggaggaggcg

SEQ ID NO: 19637 - DNA, 20 bp, Artificial Sequence
  Synthetic
ggggtggtgaggatgcagct

SEQ ID NO: 19638 - DNA, 22 bp, Artificial Sequence
  Synthetic
cgttgcaggcctccttcaaaag

SEQ ID NO: 19639 - DNA, 19 bp, Artificial Sequence
  Synthetic
tcatccccctgcgtgtcgg

SEQ ID NO: 19640 - DNA, 19 bp, Artificial Sequence
  Synthetic
tgtcaaccggccccgcaac

SEQ ID NO: 19641 - DNA, 19 bp, Artificial Sequence
  Synthetic
tgcggcagaggctaagcgc

SEQ ID NO: 19642 - DNA, 20 bp, Artificial Sequence
  Synthetic
ctctccagtgcggtgttgct

SEQ ID NO: 19643 - DNA, 19 bp, Artificial Sequence
  Synthetic
tctcgtcccacctggcgga

SEQ ID NO: 19644 - DNA, 19 bp, Artificial Sequence
  Synthetic
tcacgtccctggccgagct

SEQ ID NO: 19645 - DNA, 21 bp, Artificial Sequence
  Synthetic
accgcgttaacatctcggcca

SEQ ID NO: 19646 - DNA, 22 bp, Artificial Sequence
  Synthetic
ggcttccgcctgttttgtttgt

SEQ ID NO: 19647 - DNA, 21 bp, Artificial Sequence
  Synthetic
cggagttgatgaaaggggccg

SEQ ID NO: 19648 - DNA, 20 bp, Artificial Sequence
  Synthetic
aactccacgctgcgtccatc

SEQ ID NO: 19649 - DNA, 19 bp, Artificial Sequence
  Synthetic
agacgaggcacaggcaccc

SEQ ID NO: 19650 - DNA, 22 bp, Artificial Sequence
  Synthetic
accggtgacaccaagtccatct

SEQ ID NO: 19651 - DNA, 22 bp, Artificial Sequence
  Synthetic
tgttcaggttttgctcaaggaa

SEQ ID NO: 19652 - DNA, 22 bp, Artificial Sequence
  Synthetic
cgccaaccaacacctccctcta

SEQ ID NO: 19653 - DNA, 22 bp, Artificial Sequence
  Synthetic
ggagtccggacagtttcatgct

SEQ ID NO: 19654 - DNA, 22 bp, Artificial Sequence
  Synthetic
ggcagacatccgcgattacctt

SEQ ID NO: 19655 - DNA, 19 bp, Artificial Sequence
  Synthetic
tggccctgatcctgagccg

SEQ ID NO: 19656 - DNA, 20 bp, Artificial Sequence
  Synthetic
tcacgtcctctaccccggcg

SEQ ID NO: 19657 - DNA, 22 bp, Artificial Sequence
  Synthetic
cgtgtgctgcctggaacacaat

SEQ ID NO: 19658 - DNA, 19 bp, Artificial Sequence
  Synthetic
actcgggagtctctggccc

SEQ ID NO: 19659 - DNA, 22 bp, Artificial Sequence
  Synthetic
accgtctatagcgcctttgggt

SEQ ID NO: 19660 - DNA, 22 bp, Artificial Sequence
  Synthetic
cgcgcaggcttactttttgcat

SEQ ID NO: 19661 - DNA, 22 bp, Artificial Sequence
  Synthetic
cagggggatctttacgtgggtg

SEQ ID NO: 19662 - DNA, 22 bp, Artificial Sequence
  Synthetic
acctgggcttatgcagacgagt

SEQ ID NO: 19663 - DNA, 20 bp, Artificial Sequence
  Synthetic
ggtggtctgccaaagctgct

SEQ ID NO: 19664 - DNA, 21 bp, Artificial Sequence
  Synthetic
ctgcgaagagcgtcactgtgt

SEQ ID NO: 19665 - DNA, 20 bp, Artificial Sequence
  Synthetic
tgttcaacgcggtcaaggcc

SEQ ID NO: 19666 - DNA, 20 bp, Artificial Sequence
  Synthetic
tggttggggctgcttcccag

SEQ ID NO: 19667 - DNA, 19 bp, Artificial Sequence
  Synthetic
aactgcgagggggcctggt

SEQ ID NO: 19668 - DNA, 21 bp, Artificial Sequence
  Synthetic
acaggcaactacatggggccg

SEQ ID NO: 19669 - DNA, 19 bp, Artificial Sequence
  Synthetic
caacccggcagagctccag

SEQ ID NO: 19670 - DNA, 22 bp, Artificial Sequence
  Synthetic
agcgtcccctgttaggtccttg

SEQ ID NO: 19671 - DNA, 21 bp, Artificial Sequence
  Synthetic
ggtcctaactggtcaggggca

SEQ ID NO: 19672 - DNA, 19 bp, Artificial Sequence
  Synthetic
agcagctggccccgaatcc

SEQ ID NO: 19673 - DNA, 19 bp, Artificial Sequence
  Synthetic
cctacacgaccgccaaggg

SEQ ID NO: 19674 - DNA, 20 bp, Artificial Sequence
  Synthetic
gttgagaccgtcctggcagg

SEQ ID NO: 19675 - DNA, 19 bp, Artificial Sequence
  Synthetic
ttccccaggcagtcccagc

SEQ ID NO: 19676 - DNA, 22 bp, Artificial Sequence
  Synthetic
cccggactcgttttacggactc

SEQ ID NO: 19677 - DNA, 22 bp, Artificial Sequence
  Synthetic
caacgggactgtcatggaaatt

SEQ ID NO: 19678 - DNA, 20 bp, Artificial Sequence
  Synthetic
gcggctgaacgtgactaccc

SEQ ID NO: 19679 - DNA, 19 bp, Artificial Sequence
  Synthetic
atcctgccagcgggagagg

SEQ ID NO: 19680 - DNA, 19 bp, Artificial Sequence
  Synthetic
tggaggggggccaaagagg

SEQ ID NO: 19681 - DNA, 22 bp, Artificial Sequence
  Synthetic
caccagtttctttccgcggtgg

SEQ ID NO: 19682 - DNA, 22 bp, Artificial Sequence
  Synthetic
ggcacaggagcgattaagtcct

SEQ ID NO: 19683 - DNA, 22 bp, Artificial Sequence
  Synthetic
tggccaacatgacttccgtcaa

SEQ ID NO: 19684 - DNA, 22 bp, Artificial Sequence
  Synthetic
cagatccacgaccgcatccagt

SEQ ID NO: 19685 - DNA, 19 bp, Artificial Sequence
  Synthetic
aggcgaccccatgatgcgg

SEQ ID NO: 19686 - DNA, 21 bp, Artificial Sequence
  Synthetic
ggggtgacgaggatggaaagg

SEQ ID NO: 19687 - DNA, 19 bp, Artificial Sequence
  Synthetic
tggctcgctgctgtgacgc

SEQ ID NO: 19688 - DNA, 20 bp, Artificial Sequence
  Synthetic
cgagggtgccgcctttgaga

SEQ ID NO: 19689 - DNA, 19 bp, Artificial Sequence
  Synthetic
tggcggtgccggtgaatcc

SEQ ID NO: 19690 - DNA, 19 bp, Artificial Sequence
  Synthetic
tggaggcctcgcacgagac

SEQ ID NO: 19691 - DNA, 20 bp, Artificial Sequence
  Synthetic
acaggaggtagcggtggggc

SEQ ID NO: 19692 - DNA, 21 bp, Artificial Sequence
  Synthetic
cgctcctttgtggcatcaccg

SEQ ID NO: 19693 - DNA, 18 bp, Artificial Sequence
  Synthetic
tggtttgcgaggctgggc

SEQ ID NO: 19694 - DNA, 21 bp, Artificial Sequence
  Synthetic
gctcatcatcagcgtcctgcg

SEQ ID NO: 19695 - DNA, 22 bp, Artificial Sequence
  Synthetic
gctacctcatgttcagggccat

SEQ ID NO: 19696 - DNA, 20 bp, Artificial Sequence
  Synthetic
cccttggtcacgcttggctg

SEQ ID NO: 19697 - DNA, 25 bp, Artificial Sequence
  Synthetic
tgccaatatctaagttgccttagtt

SEQ ID NO: 19698 - DNA, 22 bp, Artificial Sequence
  Synthetic
gctggcaaattgctcgtgacaa

SEQ ID NO: 19699 - DNA, 25 bp, Artificial Sequence
  Synthetic
ttgccgtaccaattccatatatgat

SEQ ID NO: 19700 - DNA, 25 bp, Artificial Sequence
  Synthetic
tggtggttctattagcatgtttgtt

SEQ ID NO: 19701 - DNA, 25 bp, Artificial Sequence
  Synthetic
gcatctttcacatatttggcttgac

SEQ ID NO: 19702 - DNA, 22 bp, Artificial Sequence
  Synthetic
aaccgtaataggctcatgcaaa

SEQ ID NO: 19703 - DNA, 21 bp, Artificial Sequence
  Synthetic
gcacgtgttgccagtgtttaa

SEQ ID NO: 19704 - DNA, 20 bp, Artificial Sequence
  Synthetic
attgcttaggcactgcgtcc

SEQ ID NO: 19705 - DNA, 22 bp, Artificial Sequence
  Synthetic
ggtgtcctgggtgctagacaca

SEQ ID NO: 19706 - DNA, 22 bp, Artificial Sequence
  Synthetic
ggcctctatgcccttaggaata

SEQ ID NO: 19707 - DNA, 20 bp, Artificial Sequence
  Synthetic
gctggttgtgtggtagtcac

SEQ ID NO: 19708 - DNA, 20 bp, Artificial Sequence
  Synthetic
tagtggcatgggaggtggaa

SEQ ID NO: 19709 - DNA, 21 bp, Artificial Sequence
  Synthetic
acttgcctggcgaataggaaa

SEQ ID NO: 19710 - DNA, 25 bp, Artificial Sequence
  Synthetic
gcattttcagtgtcattaagcttgt

SEQ ID NO: 19711 - DNA, 21 bp, Artificial Sequence
  Synthetic
ccaagggaacgtcagacctat

SEQ ID NO: 19712 - DNA, 24 bp, Artificial Sequence
  Synthetic
aaggcttgttaaacaactgtgact

SEQ ID NO: 19713 - DNA, 23 bp, Artificial Sequence
  Synthetic
aagactagcagtaggaggtggta

SEQ ID NO: 19714 - DNA, 20 bp, Artificial Sequence
  Synthetic
caccggacagggggggttat

SEQ ID NO: 19715 - DNA, 25 bp, Artificial Sequence
  Synthetic
tgcacggtgagtaacacatgtatta

SEQ ID NO: 19716 - DNA, 25 bp, Artificial Sequence
  Synthetic
ccaaactttgattcaccttttcctg

SEQ ID NO: 19717 - DNA, 25 bp, Artificial Sequence
  Synthetic
cgacaaactctcttctgctaaaaga

SEQ ID NO: 19718 - DNA, 25 bp, Artificial Sequence
  Synthetic
gctttattgcaatcctctgctaact

SEQ ID NO: 19719 - DNA, 25 bp, Artificial Sequence
  Synthetic
ggtaaccgtttctctactttttcct

SEQ ID NO: 19720 - DNA, 25 bp, Artificial Sequence
  Synthetic
gtcatttggcgcatttcatatcttt

SEQ ID NO: 19721 - DNA, 25 bp, Artificial Sequence
  Synthetic
tgaaacagtttttgggttgggtatt

SEQ ID NO: 19722 - DNA, 22 bp, Artificial Sequence
  Synthetic
cttcgtcctccagctcgaagac

SEQ ID NO: 19723 - DNA, 20 bp, Artificial Sequence
  Synthetic
gacgaaatccagtggcaccc

SEQ ID NO: 19724 - DNA, 25 bp, Artificial Sequence
  Synthetic
gctatgtcttcttggccatgtagaa

SEQ ID NO: 19725 - DNA, 24 bp, Artificial Sequence
  Synthetic
tggtaatgcaccttttgtgtcaaa

SEQ ID NO: 19726 - DNA, 25 bp, Artificial Sequence
  Synthetic
tctacgtttcaataaagcaggatgt

SEQ ID NO: 19727 - DNA, 24 bp, Artificial Sequence
  Synthetic
acctgcttaggatccatactaaga

SEQ ID NO: 19728 - DNA, 25 bp, Artificial Sequence
  Synthetic
cgctctgttaaatctacgttccaaa

SEQ ID NO: 19729 - DNA, 21 bp, Artificial Sequence
  Synthetic
aacacgcaggttatgttcagg

SEQ ID NO: 19730 - DNA, 21 bp, Artificial Sequence
  Synthetic
cctcgccaaagcccagctatt

SEQ ID NO: 19731 - DNA, 22 bp, Artificial Sequence
  Synthetic
tctccaccaccagccttactgt

SEQ ID NO: 19732 - DNA, 22 bp, Artificial Sequence
  Synthetic
tccatccccgggatgcctacta

SEQ ID NO: 19733 - DNA, 22 bp, Artificial Sequence
  Synthetic
gtcgcgtcaatatccacttgcg

SEQ ID NO: 19734 - DNA, 20 bp, Artificial Sequence
  Synthetic
tgacaccctctgcaactgtg

SEQ ID NO: 19735 - DNA, 25 bp, Artificial Sequence
  Synthetic
ccaattatttcactagcattgccca

SEQ ID NO: 19736 - DNA, 20 bp, Artificial Sequence
  Synthetic
tgctctgcccgtttgtaatg

SEQ ID NO: 19737 - DNA, 22 bp, Artificial Sequence
  Synthetic
gtggagttggcataggaaatca

SEQ ID NO: 19738 - DNA, 25 bp, Artificial Sequence
  Synthetic
acaggaaatgcattaggaaaggtaa

SEQ ID NO: 19739 - DNA, 24 bp, Artificial Sequence
  Synthetic
tcatcatcaccgctttgtacatat

SEQ ID NO: 19740 - DNA, 21 bp, Artificial Sequence
  Synthetic
ccgagtcgctgacgcttatgc

SEQ ID NO: 19741 - DNA, 20 bp, Artificial Sequence
  Synthetic
gccaggtggaggttactttg

SEQ ID NO: 19742 - DNA, 25 bp, Artificial Sequence
  Synthetic
ggaaggatagacagccaaaagaaga

SEQ ID NO: 19743 - DNA, 21 bp, Artificial Sequence
  Synthetic
cccccccatctctatcacgta

SEQ ID NO: 19744 - DNA, 21 bp, Artificial Sequence
  Synthetic
gggatgtatccagtgcgccca

SEQ ID NO: 19745 - DNA, 25 bp, Artificial Sequence
  Synthetic
caggattgtcataggtaacaagtgt

SEQ ID NO: 19746 - DNA, 25 bp, Artificial Sequence
  Synthetic
cactatagggttttttcctgattgc

SEQ ID NO: 19747 - DNA, 23 bp, Artificial Sequence
  Synthetic
ccatagtaagattgtcccgggtg

SEQ ID NO: 19748 - DNA, 20 bp, Artificial Sequence
  Synthetic
caccatatggctcagctgcc

SEQ ID NO: 19749 - DNA, 21 bp, Artificial Sequence
  Synthetic
gcagataccattgttagggcc

SEQ ID NO: 19750 - DNA, 21 bp, Artificial Sequence
  Synthetic
aaggaacccgtgtacagacac

SEQ ID NO: 19751 - DNA, 20 bp, Artificial Sequence
  Synthetic
ccgaaatcggtccgggggta

SEQ ID NO: 19752 - DNA, 21 bp, Artificial Sequence
  Synthetic
cgccatggctagacgctttct

SEQ ID NO: 19753 - DNA, 22 bp, Artificial Sequence
  Synthetic
cggcaacaagtatactccgcca

SEQ ID NO: 19754 - DNA, 22 bp, Artificial Sequence
  Synthetic
gtaccccatgaggtcggcaaag

SEQ ID NO: 19755 - DNA, 22 bp, Artificial Sequence
  Synthetic
ccggtatccagcactgagatgc

SEQ ID NO: 19756 - DNA, 22 bp, Artificial Sequence
  Synthetic
cccaatgagccccgctaatgat

SEQ ID NO: 19757 - DNA, 22 bp, Artificial Sequence
  Synthetic
tcgggacatcctgacgagttga

SEQ ID NO: 19758 - DNA, 21 bp, Artificial Sequence
  Synthetic
gctctagtacggcagggtggt

SEQ ID NO: 19759 - DNA, 22 bp, Artificial Sequence
  Synthetic
cgtggtggagtgcaacaaagga

SEQ ID NO: 19760 - DNA, 22 bp, Artificial Sequence
  Synthetic
cccttgatgtaccaagcagcca

SEQ ID NO: 19761 - DNA, 20 bp, Artificial Sequence
  Synthetic
gtaagcaggcccaagcaccg

SEQ ID NO: 19762 - DNA, 21 bp, Artificial Sequence
  Synthetic
gaggacctcccgaccaagtcg

SEQ ID NO: 19763 - DNA, 20 bp, Artificial Sequence
  Synthetic
cgtgagccggccagagtctt

SEQ ID NO: 19764 - DNA, 22 bp, Artificial Sequence
  Synthetic
caggtggtgtgctgttgtcact

SEQ ID NO: 19765 - DNA, 22 bp, Artificial Sequence
  Synthetic
ccacggcatggcattcatcaca

SEQ ID NO: 19766 - DNA, 22 bp, Artificial Sequence
  Synthetic
cgaccactacgtctccctgagt

SEQ ID NO: 19767 - DNA, 22 bp, Artificial Sequence
  Synthetic
ggtctccgatggtgtgagctca

SEQ ID NO: 19768 - DNA, 22 bp, Artificial Sequence
  Synthetic
cacgggatgtgtgagggtgacc

SEQ ID NO: 19769 - DNA, 22 bp, Artificial Sequence
  Synthetic
gcctgcacagtgggttgtatgt

SEQ ID NO: 19770 - DNA, 21 bp, Artificial Sequence
  Synthetic
cgacgagagcccccgaaatgc

SEQ ID NO: 19771 - DNA, 22 bp, Artificial Sequence
  Synthetic
cactggccctccgtgtaacaat

SEQ ID NO: 19772 - DNA, 22 bp, Artificial Sequence
  Synthetic
gcagtctccgccgtgatatgag

SEQ ID NO: 19773 - DNA, 21 bp, Artificial Sequence
  Synthetic
ccggtaaagctggtgggaacc

SEQ ID NO: 19774 - DNA, 19 bp, Artificial Sequence
  Synthetic
tccaagctccccctcgagg

SEQ ID NO: 19775 - DNA, 22 bp, Artificial Sequence
  Synthetic
ggaggccgctagcttaatgtcc

SEQ ID NO: 19776 - DNA, 22 bp, Artificial Sequence
  Synthetic
ccatcaccgcctgaggaagttt

SEQ ID NO: 19777 - DNA, 22 bp, Artificial Sequence
  Synthetic
ccctgcagctttacaagccgct

SEQ ID NO: 19778 - DNA, 22 bp, Artificial Sequence
  Synthetic
gtggtagggtctctggtcaggt

SEQ ID NO: 19779 - DNA, 22 bp, Artificial Sequence
  Synthetic
ccccaagttttctgagggctga

SEQ ID NO: 19780 - DNA, 20 bp, Artificial Sequence
  Synthetic
caggctgcataggcaaggcg

SEQ ID NO: 19781 - DNA, 20 bp, Artificial Sequence
  Synthetic
gcacgggcaactaccaccaa

SEQ ID NO: 19782 - DNA, 20 bp, Artificial Sequence
  Synthetic
acgtcaaaggctgccaccag

SEQ ID NO: 19783 - DNA, 21 bp, Artificial Sequence
  Synthetic
gctccgaccgaacaacaacca

SEQ ID NO: 19784 - DNA, 20 bp, Artificial Sequence
  Synthetic
aacagtaccgacaagcccgg

SEQ ID NO: 19785 - DNA, 20 bp, Artificial Sequence
  Synthetic
ccttggctttgcagcttggc

SEQ ID NO: 19786 - DNA, 20 bp, Artificial Sequence
  Synthetic
gaccgcgccccagtatttcg

SEQ ID NO: 19787 - DNA, 22 bp, Artificial Sequence
  Synthetic
cgcgcagtttgccgttgacttg

SEQ ID NO: 19788 - DNA, 20 bp, Artificial Sequence
  Synthetic
ggcgttaaaaagccgagcgg

SEQ ID NO: 19789 - DNA, 21 bp, Artificial Sequence
  Synthetic
cccgaatggcagatacaggca

SEQ ID NO: 19790 - DNA, 18 bp, Artificial Sequence
  Synthetic
attggcacgccgatccgc

SEQ ID NO: 19791 - DNA, 19 bp, Artificial Sequence
  Synthetic
tcgggctgcccatgaccct

SEQ ID NO: 19792 - DNA, 20 bp, Artificial Sequence
  Synthetic
cgcgcggcagttgatacagg

SEQ ID NO: 19793 - DNA, 20 bp, Artificial Sequence
  Synthetic
gccgccaaaggcaaaggacg

SEQ ID NO: 19794 - DNA, 22 bp, Artificial Sequence
  Synthetic
gcccatttgtaaccggttctgc

SEQ ID NO: 19795 - DNA, 19 bp, Artificial Sequence
  Synthetic
aacggcggcctgattaccg

SEQ ID NO: 19796 - DNA, 19 bp, Artificial Sequence
  Synthetic
agttgccgcacctgccctc

SEQ ID NO: 19797 - DNA, 19 bp, Artificial Sequence
  Synthetic
gaatcggggcgaactcggg

SEQ ID NO: 19798 - DNA, 20 bp, Artificial Sequence
  Synthetic
cgccagttgaccgaatcggg

SEQ ID NO: 19799 - DNA, 22 bp, Artificial Sequence
  Synthetic
cgcaaagactaccgcagcaacg

SEQ ID NO: 19800 - DNA, 19 bp, Artificial Sequence
  Synthetic
acttcctcgaccgcctcgc

SEQ ID NO: 19801 - DNA, 22 bp, Artificial Sequence
  Synthetic
gcatcctgctcgacaacatcct

SEQ ID NO: 19802 - DNA, 21 bp, Artificial Sequence
  Synthetic
cgaggctttgggcttgggtcc

SEQ ID NO: 19803 - DNA, 21 bp, Artificial Sequence
  Synthetic
gtccgcaacaaaatcgccctg

SEQ ID NO: 19804 - DNA, 20 bp, Artificial Sequence
  Synthetic
agacattgccctccccgagg

SEQ ID NO: 19805 - DNA, 19 bp, Artificial Sequence
  Synthetic
acggcggcgaagagaaagg

SEQ ID NO: 19806 - DNA, 18 bp, Artificial Sequence
  Synthetic
ttggcgttggctcaggcg

SEQ ID NO: 19807 - DNA, 22 bp, Artificial Sequence
  Synthetic
ggcaatttgttcggcaatggcg

SEQ ID NO: 19808 - DNA, 18 bp, Artificial Sequence
  Synthetic
tcgaagatgcctgcgccg

SEQ ID NO: 19809 - DNA, 20 bp, Artificial Sequence
  Synthetic
ccgacaccatccgcctgatg

SEQ ID NO: 19810 - DNA, 19 bp, Artificial Sequence
  Synthetic
cgtgtgcatcggtcctgcc

SEQ ID NO: 19811 - DNA, 19 bp, Artificial Sequence
  Synthetic
tgccgctcgccaaagtcgg

SEQ ID NO: 19812 - DNA, 20 bp, Artificial Sequence
  Synthetic
ttggaaatcgtccgcaccga

SEQ ID NO: 19813 - DNA, 20 bp, Artificial Sequence
  Synthetic
cgcctgaccatgctgttgcg

SEQ ID NO: 19814 - DNA, 22 bp, Artificial Sequence
  Synthetic
cgccgatgccgtacaagaaacc

SEQ ID NO: 19815 - DNA, 18 bp, Artificial Sequence
  Synthetic
agtcgcgcccgtcgacaa

SEQ ID NO: 19816 - DNA, 20 bp, Artificial Sequence
  Synthetic
gcgcaggtggggcaggtaat

SEQ ID NO: 19817 - DNA, 21 bp, Artificial Sequence
  Synthetic
gctgttttcgggcatctggct

SEQ ID NO: 19818 - DNA, 20 bp, Artificial Sequence
  Synthetic
ccgatcataccggtcgcgcc

SEQ ID NO: 19819 - DNA, 20 bp, Artificial Sequence
  Synthetic
ccgatttccaaaaccgcgcc

SEQ ID NO: 19820 - DNA, 19 bp, Artificial Sequence
  Synthetic
acggcagggcggggttttg

SEQ ID NO: 19821 - DNA, 22 bp, Artificial Sequence
  Synthetic
cctgtcgctcggtaaatcagcg

SEQ ID NO: 19822 - DNA, 18 bp, Artificial Sequence
  Synthetic
actgcttcgcgcgcttcg

SEQ ID NO: 19823 - DNA, 20 bp, Artificial Sequence
  Synthetic
gcgttcttccctgcgtttgc

SEQ ID NO: 19824 - DNA, 21 bp, Artificial Sequence
  Synthetic
tcgagcgggcaggctgaaatc

SEQ ID NO: 19825 - DNA, 19 bp, Artificial Sequence
  Synthetic
accgcgccatgctcttggc

SEQ ID NO: 19826 - DNA, 21 bp, Artificial Sequence
  Synthetic
cgcctcgcccgtatccatgta

SEQ ID NO: 19827 - DNA, 19 bp, Artificial Sequence
  Synthetic
ccgcagcattcccacgact

SEQ ID NO: 19828 - DNA, 20 bp, Artificial Sequence
  Synthetic
gcgcgtgaacacggcattcc

SEQ ID NO: 19829 - DNA, 20 bp, Artificial Sequence
  Synthetic
actctccgccctgctcgacc

SEQ ID NO: 19830 - DNA, 22 bp, Artificial Sequence
  Synthetic
ggctgaaaaacgccgtcgaact

SEQ ID NO: 19831 - DNA, 22 bp, Artificial Sequence
  Synthetic
ccatgctgaacaccgccctttc

SEQ ID NO: 19832 - DNA, 22 bp, Artificial Sequence
  Synthetic
tcaagacagaaagctcctgccg

SEQ ID NO: 19833 - DNA, 22 bp, Artificial Sequence
  Synthetic
cgctgttttacacgctgaccga

SEQ ID NO: 19834 - DNA, 19 bp, Artificial Sequence
  Synthetic
tgctgcactttccggcgaa

SEQ ID NO: 19835 - DNA, 22 bp, Artificial Sequence
  Synthetic
gggactgacggtgtcggtattg

SEQ ID NO: 19836 - DNA, 19 bp, Artificial Sequence
  Synthetic
aagctgcgcggtgctgacc

SEQ ID NO: 19837 - DNA, 19 bp, Artificial Sequence
  Synthetic
cctccgcaacgacctgacc

SEQ ID NO: 19838 - DNA, 19 bp, Artificial Sequence
  Synthetic
cgtgcgcgcctaccagatt

SEQ ID NO: 19839 - DNA, 19 bp, Artificial Sequence
  Synthetic
tatggctgcacggcgaggc

SEQ ID NO: 19840 - DNA, 22 bp, Artificial Sequence
  Synthetic
ggcacatttttcacgcttgcca

SEQ ID NO: 19841 - DNA, 22 bp, Artificial Sequence
  Synthetic
cccagcagtttcgccgttttgt

SEQ ID NO: 19842 - DNA, 20 bp, Artificial Sequence
  Synthetic
tgaccgccatgtacaagccg

SEQ ID NO: 19843 - DNA, 21 bp, Artificial Sequence
  Synthetic
cgccgtttatgacgcccccaa

SEQ ID NO: 19844 - DNA, 22 bp, Artificial Sequence
  Synthetic
gctcgcgcgaaaacttaaacca

SEQ ID NO: 19845 - DNA, 19 bp, Artificial Sequence
  Synthetic
gcctgccggggctacatca

SEQ ID NO: 19846 - DNA, 18 bp, Artificial Sequence
  Synthetic
gtcccgaaagccgctgca

SEQ ID NO: 19847 - DNA, 18 bp, Artificial Sequence
  Synthetic
ggcaaggtgcggcagctt

SEQ ID NO: 19848 - DNA, 21 bp, Artificial Sequence
  Synthetic
cgatgacggtggtggcaacca

SEQ ID NO: 19849 - DNA, 20 bp, Artificial Sequence
  Synthetic
atcagcatcggggcggtttc

SEQ ID NO: 19850 - DNA, 19 bp, Artificial Sequence
  Synthetic
acacccgaaacccgcagcg

SEQ ID NO: 19851 - DNA, 19 bp, Artificial Sequence
  Synthetic
gcttcaggacggcatcgcc

SEQ ID NO: 19852 - DNA, 19 bp, Artificial Sequence
  Synthetic
ccgccgacttccgcatacg

SEQ ID NO: 19853 - DNA, 20 bp, Artificial Sequence
  Synthetic
actttccaagtctgcgcggc

SEQ ID NO: 19854 - DNA, 20 bp, Artificial Sequence
  Synthetic
ggagtagcgttgggattcgc

SEQ ID NO: 19855 - DNA, 21 bp, Artificial Sequence
  Synthetic
ttccgacccattctccggaga

SEQ ID NO: 19856 - DNA, 22 bp, Artificial Sequence
  Synthetic
ggtaggatgcggatttcctgct

SEQ ID NO: 19857 - DNA, 22 bp, Artificial Sequence
  Synthetic
gcccacgtcgtttatccgcaag

SEQ ID NO: 19858 - DNA, 22 bp, Artificial Sequence
  Synthetic
gcaactgccttatgccctgacg

SEQ ID NO: 19859 - DNA, 20 bp, Artificial Sequence
  Synthetic
tatgctgccgattgccgccg

SEQ ID NO: 19860 - DNA, 19 bp, Artificial Sequence
  Synthetic
cgcccatgtgcgtgctgat

SEQ ID NO: 19861 - DNA, 21 bp, Artificial Sequence
  Synthetic
cgtcgacggtctgacacacct

SEQ ID NO: 19862 - DNA, 21 bp, Artificial Sequence
  Synthetic
gcaaatatacagccgcagcgg

SEQ ID NO: 19863 - DNA, 20 bp, Artificial Sequence
  Synthetic
tttccggttgccgatacgcc

SEQ ID NO: 19864 - DNA, 20 bp, Artificial Sequence
  Synthetic
gccattaccgccgaaccgag

SEQ ID NO: 19865 - DNA, 22 bp, Artificial Sequence
  Synthetic
cggtattcctgagcgtcggatc

SEQ ID NO: 19866 - DNA, 22 bp, Artificial Sequence
  Synthetic
cggcttggacgttgcacacttt

SEQ ID NO: 19867 - DNA, 20 bp, Artificial Sequence
  Synthetic
cgcgccctatcatgatgccg

SEQ ID NO: 19868 - DNA, 20 bp, Artificial Sequence
  Synthetic
acggcggcatggcaatactg

SEQ ID NO: 19869 - DNA, 19 bp, Artificial Sequence
  Synthetic
gaccaaagccgccaatgcc

SEQ ID NO: 19870 - DNA, 19 bp, Artificial Sequence
  Synthetic
agcttgcccggaaagccgc

SEQ ID NO: 19871 - DNA, 20 bp, Artificial Sequence
  Synthetic
gcaggtcgtcgtcgctgtac

SEQ ID NO: 19872 - DNA, 19 bp, Artificial Sequence
  Synthetic
tctgcctgtccctcagcgc

SEQ ID NO: 19873 - DNA, 21 bp, Artificial Sequence
  Synthetic
ccgtctgcaagcctacgaagg

SEQ ID NO: 19874 - DNA, 19 bp, Artificial Sequence
  Synthetic
ccacgttggcacgcctgtg

SEQ ID NO: 19875 - DNA, 21 bp, Artificial Sequence
  Synthetic
cgcaagaacacaggcaaagcc

SEQ ID NO: 19876 - DNA, 20 bp, Artificial Sequence
  Synthetic
cgctttgccgaactcgacgg

SEQ ID NO: 19877 - DNA, 19 bp, Artificial Sequence
  Synthetic
aaatcccgccctgctcgcc

SEQ ID NO: 19878 - DNA, 19 bp, Artificial Sequence
  Synthetic
ctgaccggcacacccacac

SEQ ID NO: 19879 - DNA, 19 bp, Artificial Sequence
  Synthetic
acgccgacgacctcgaagc

SEQ ID NO: 19880 - DNA, 22 bp, Artificial Sequence
  Synthetic
ccaaaaccgccgtcctacacca

SEQ ID NO: 19881 - DNA, 21 bp, Artificial Sequence
  Synthetic
caacagcatctccgtcagcga

SEQ ID NO: 19882 - DNA, 22 bp, Artificial Sequence
  Synthetic
gccatattcgcaggattgctgc

SEQ ID NO: 19883 - DNA, 20 bp, Artificial Sequence
  Synthetic
ccgacaaagaccgcgcatgg

SEQ ID NO: 19884 - DNA, 22 bp, Artificial Sequence
  Synthetic
catcacccgcatcggtttcaac

SEQ ID NO: 19885 - DNA, 22 bp, Artificial Sequence
  Synthetic
gctatcggagttggaccaggtg

SEQ ID NO: 19886 - DNA, 19 bp, Artificial Sequence
  Synthetic
agccggcggattctgcctg

SEQ ID NO: 19887 - DNA, 19 bp, Artificial Sequence
  Synthetic
accccggggcaaaccatcc

SEQ ID NO: 19888 - DNA, 25 bp, Artificial Sequence
  Synthetic
tccattatttaccaattcctcaccg

SEQ ID NO: 19889 - DNA, 19 bp, Artificial Sequence
  Synthetic
cgccgctacgccatcaacg

SEQ ID NO: 19890 - DNA, 22 bp, Artificial Sequence
  Synthetic
ggcgaacccaaacccagcatca

SEQ ID NO: 19891 - DNA, 22 bp, Artificial Sequence
  Synthetic
gggaaatctttacccacggcgg

SEQ ID NO: 19892 - DNA, 18 bp, Artificial Sequence
  Synthetic
acgcaccgttgccgacat

SEQ ID NO: 19893 - DNA, 19 bp, Artificial Sequence
  Synthetic
agcaggcgcgattaccggc

SEQ ID NO: 19894 - DNA, 19 bp, Artificial Sequence
  Synthetic
acgtcttgagcgtcggccc

SEQ ID NO: 19895 - DNA, 22 bp, Artificial Sequence
  Synthetic
ggcacaccaattgaaccttgcc

SEQ ID NO: 19896 - DNA, 20 bp, Artificial Sequence
  Synthetic
cgacgcactggtcggcaaag

SEQ ID NO: 19897 - DNA, 21 bp, Artificial Sequence
  Synthetic
cgacagcgcatcgaagccatg

SEQ ID NO: 19898 - DNA, 18 bp, Artificial Sequence
  Synthetic
gctgaccgccgacgatgt

SEQ ID NO: 19899 - DNA, 20 bp, Artificial Sequence
  Synthetic
accggttgccgccaaaaaag

SEQ ID NO: 19900 - DNA, 20 bp, Artificial Sequence
  Synthetic
gcgtcaaccgtatgccgctc

SEQ ID NO: 19901 - DNA, 20 bp, Artificial Sequence
  Synthetic
aaacccaagcccgaagacgc

SEQ ID NO: 19902 - DNA, 20 bp, Artificial Sequence
  Synthetic
tcctacggctggttcggctt

SEQ ID NO: 19903 - DNA, 19 bp, Artificial Sequence
  Synthetic
tcggcggcattgcccgatc

SEQ ID NO: 19904 - DNA, 21 bp, Artificial Sequence
  Synthetic
gatgggttggttcgatgccgt

SEQ ID NO: 19905 - DNA, 19 bp, Artificial Sequence
  Synthetic
ccttgccgtcgccatcctg

SEQ ID NO: 19906 - DNA, 20 bp, Artificial Sequence
  Synthetic
tacgccttttcggacggcgc

SEQ ID NO: 19907 - DNA, 19 bp, Artificial Sequence
  Synthetic
aactgaccgcgctgctcgg

SEQ ID NO: 19908 - DNA, 19 bp, Artificial Sequence
  Synthetic
accgactacgtcgtcgccg

SEQ ID NO: 19909 - DNA, 22 bp, Artificial Sequence
  Synthetic
gctccataagccctaccgcctg

SEQ ID NO: 19910 - DNA, 20 bp, Artificial Sequence
  Synthetic
cgatgccgaatacgaccgcc

SEQ ID NO: 19911 - DNA, 20 bp, Artificial Sequence
  Synthetic
ccgcactggacgcattctgc

SEQ ID NO: 19912 - DNA, 19 bp, Artificial Sequence
  Synthetic
ccatcccgggcatccgcta

SEQ ID NO: 19913 - DNA, 22 bp, Artificial Sequence
  Synthetic
gcgttttccatcggcatcgaac

SEQ ID NO: 19914 - DNA, 22 bp, Artificial Sequence
  Synthetic
ggaaaagctgtttgccaaccgg

SEQ ID NO: 19915 - DNA, 22 bp, Artificial Sequence
  Synthetic
ccgatacgcgccatcgatactt

SEQ ID NO: 19916 - DNA, 21 bp, Artificial Sequence
  Synthetic
acggaacagcagcaaaggctc

SEQ ID NO: 19917 - DNA, 20 bp, Artificial Sequence
  Synthetic
cgcgcagttgttccagcgat

SEQ ID NO: 19918 - DNA, 21 bp, Artificial Sequence
  Synthetic
caccctgtacgaaacgctcgc

SEQ ID NO: 19919 - DNA, 22 bp, Artificial Sequence
  Synthetic
gccataatgcgcgctttgtagg

SEQ ID NO: 19920 - DNA, 20 bp, Artificial Sequence
  Synthetic
tcggcggtggtgatgtgttc

SEQ ID NO: 19921 - DNA, 20 bp, Artificial Sequence
  Synthetic
ggtaacggcggcgaccaatg

SEQ ID NO: 19922 - DNA, 20 bp, Artificial Sequence
  Synthetic
tccatcgcgtccgccagtat

SEQ ID NO: 19923 - DNA, 19 bp, Artificial Sequence
  Synthetic
acatccacaccgccgagcg

SEQ ID NO: 19924 - DNA, 20 bp, Artificial Sequence
  Synthetic
gcggaagcggtcgacgtatc

SEQ ID NO: 19925 - DNA, 22 bp, Artificial Sequence
  Synthetic
ggcaggaaatcctatgccgtcg

SEQ ID NO: 19926 - DNA, 18 bp, Artificial Sequence
  Synthetic
ggaaaccgccgccgacaa

SEQ ID NO: 19927 - DNA, 19 bp, Artificial Sequence
  Synthetic
tgccggtggacattggtgc

SEQ ID NO: 19928 - DNA, 22 bp, Artificial Sequence
  Synthetic
cctgcatcagatagctgcggaa

SEQ ID NO: 19929 - DNA, 21 bp, Artificial Sequence
  Synthetic
cggcgcgaatttaaacggaaa

SEQ ID NO: 19930 - DNA, 20 bp, Artificial Sequence
  Synthetic
atccccaatatgccgtcagc

SEQ ID NO: 19931 - DNA, 18 bp, Artificial Sequence
  Synthetic
tgggacagctcggggcaa

SEQ ID NO: 19932 - DNA, 19 bp, Artificial Sequence
  Synthetic
ctcgcgcatatggacgcgg

SEQ ID NO: 19933 - DNA, 22 bp, Artificial Sequence
  Synthetic
gcgtctgcctcgatacccaaac

SEQ ID NO: 19934 - DNA, 19 bp, Artificial Sequence
  Synthetic
tccacgcgcctgccagttg

SEQ ID NO: 19935 - DNA, 20 bp, Artificial Sequence
  Synthetic
tgaggctgttgcggacggat

SEQ ID NO: 19936 - DNA, 20 bp, Artificial Sequence
  Synthetic
ttcaagacgacggcggactg

SEQ ID NO: 19937 - DNA, 18 bp, Artificial Sequence
  Synthetic
tccatcgcgcgcggctat

SEQ ID NO: 19938 - DNA, 22 bp, Artificial Sequence
  Synthetic
gcctgcttccggccattctgat

SEQ ID NO: 19939 - DNA, 19 bp, Artificial Sequence
  Synthetic
acgacgtttccggcctgcc

SEQ ID NO: 19940 - DNA, 20 bp, Artificial Sequence
  Synthetic
ggtgtacggaatcgtcgccg

SEQ ID NO: 19941 - DNA, 20 bp, Artificial Sequence
  Synthetic
ttcggttcgggcttgttggg

SEQ ID NO: 19942 - DNA, 21 bp, Artificial Sequence
  Synthetic
tggcgcacggcatcgatatgt

SEQ ID NO: 19943 - DNA, 20 bp, Artificial Sequence
  Synthetic
tttccgtggcgatgtcgtaa

SEQ ID NO: 19944 - DNA, 20 bp, Artificial Sequence
  Synthetic
ttgacggccttccattttgg

SEQ ID NO: 19945 - DNA, 24 bp, Artificial Sequence
  Synthetic
ccctttggatattgcgctcaattt

SEQ ID NO: 19946 - DNA, 20 bp, Artificial Sequence
  Synthetic
cacagcattcccggggtgtc

SEQ ID NO: 19947 - DNA, 22 bp, Artificial Sequence
  Synthetic
cctcaggcaaatacgcggacaa

SEQ ID NO: 19948 - DNA, 21 bp, Artificial Sequence
  Synthetic
tgccgtctgaagcaccgtttg

SEQ ID NO: 19949 - DNA, 19 bp, Artificial Sequence
  Synthetic
cgcgccacccatgcattgg

SEQ ID NO: 19950 - DNA, 25 bp, Artificial Sequence
  Synthetic
gttgatttgaaaaaaatgccgtctg

SEQ ID NO: 19951 - DNA, 22 bp, Artificial Sequence
  Synthetic
acacccgaccaccaaaagctgg

SEQ ID NO: 19952 - DNA, 25 bp, Artificial Sequence
  Synthetic
gtctgaatgtttcgacaatccgatt

SEQ ID NO: 19953 - DNA, 20 bp, Artificial Sequence
  Synthetic
cacaaccgccgacatcaagc

SEQ ID NO: 19954 - DNA, 22 bp, Artificial Sequence
  Synthetic
gtcaattcgcaccggactgcgt

SEQ ID NO: 19955 - DNA, 19 bp, Artificial Sequence
  Synthetic
tcctcaggctccgccacac

SEQ ID NO: 19956 - DNA, 25 bp, Artificial Sequence
  Synthetic
cattggcaaaaatagcagcacaata

SEQ ID NO: 19957 - DNA, 19 bp, Artificial Sequence
  Synthetic
cgcaccttcgggcagactg

SEQ ID NO: 19958 - DNA, 19 bp, Artificial Sequence
  Synthetic
ttgccggttcggaagccgc

SEQ ID NO: 19959 - DNA, 21 bp, Artificial Sequence
  Synthetic
cgcatgaagattggcttccgc

SEQ ID NO: 19960 - DNA, 22 bp, Artificial Sequence
  Synthetic
cgcttcaaggtagccttttgcc

SEQ ID NO: 19961 - DNA, 19 bp, Artificial Sequence
  Synthetic
ggcgtgttggttgatgccg

SEQ ID NO: 19962 - DNA, 25 bp, Artificial Sequence
  Synthetic
gcgaaagtttccgtaaaaatatcgg

SEQ ID NO: 19963 - DNA, 20 bp, Artificial Sequence
  Synthetic
ccgccgcccaagattggaat

SEQ ID NO: 19964 - DNA, 22 bp, Artificial Sequence
  Synthetic
acttcaaactgcgcggacaacc

SEQ ID NO: 19965 - DNA, 22 bp, Artificial Sequence
  Synthetic
cgccgtacctatgcgtgtgaaa

SEQ ID NO: 19966 - DNA, 20 bp, Artificial Sequence
  Synthetic
acggtttcgtcgacggcacg

SEQ ID NO: 19967 - DNA, 22 bp, Artificial Sequence
  Synthetic
gctctacttcgcagccgtcaac

SEQ ID NO: 19968 - DNA, 22 bp, Artificial Sequence
  Synthetic
tggtattcgtcatcggcatcgc

SEQ ID NO: 19969 - DNA, 22 bp, Artificial Sequence
  Synthetic
gcatttccaatcccgacaccgt

SEQ ID NO: 19970 - DNA, 20 bp, Artificial Sequence
  Synthetic
catcgtcaggcgagcaaccg

SEQ ID NO: 19971 - DNA, 22 bp, Artificial Sequence
  Synthetic
atcggacgaattggcacggatt

SEQ ID NO: 19972 - DNA, 19 bp, Artificial Sequence
  Synthetic
tgctcgacaacggcgttcc

SEQ ID NO: 19973 - DNA, 19 bp, Artificial Sequence
  Synthetic
cgtcgccgccataaaacgc

SEQ ID NO: 19974 - DNA, 19 bp, Artificial Sequence
  Synthetic
atccgcagcccgacggttc

SEQ ID NO: 19975 - DNA, 19 bp, Artificial Sequence
  Synthetic
attgcgcgacatcgtccga

SEQ ID NO: 19976 - DNA, 22 bp, Artificial Sequence
  Synthetic
cgcccgataaagctgcgtaagt

SEQ ID NO: 19977 - DNA, 22 bp, Artificial Sequence
  Synthetic
gcccgaaccgatgaagcaatcc

SEQ ID NO: 19978 - DNA, 20 bp, Artificial Sequence
  Synthetic
gccgattttgcctttgccgc

SEQ ID NO: 19979 - DNA, 21 bp, Artificial Sequence
  Synthetic
acgaagtggaagccgtgttgg

SEQ ID NO: 19980 - DNA, 19 bp, Artificial Sequence
  Synthetic
agtcgaacccgccgccaag

SEQ ID NO: 19981 - DNA, 22 bp, Artificial Sequence
  Synthetic
tcttcgcggaagatttcgcctt

SEQ ID NO: 19982 - DNA, 19 bp, Artificial Sequence
  Synthetic
agtccgctacacgcaaggc

SEQ ID NO: 19983 - DNA, 21 bp, Artificial Sequence
  Synthetic
ggcttccaacgcgtcatccag

SEQ ID NO: 19984 - DNA, 20 bp, Artificial Sequence
  Synthetic
tgtcttcggcaaccacaccg

SEQ ID NO: 19985 - DNA, 20 bp, Artificial Sequence
  Synthetic
gcgcattttgcccgaacgca

SEQ ID NO: 19986 - DNA, 20 bp, Artificial Sequence
  Synthetic
aacggtctttgaggcggctg

SEQ ID NO: 19987 - DNA, 18 bp, Artificial Sequence
  Synthetic
aagctcggcggcgcaaag

SEQ ID NO: 19988 - DNA, 20 bp, Artificial Sequence
  Synthetic
cgaagccccggaatttgcct

SEQ ID NO: 19989 - DNA, 20 bp, Artificial Sequence
  Synthetic
gccaaaccgccgtggacatc

SEQ ID NO: 19990 - DNA, 22 bp, Artificial Sequence
  Synthetic
cggaattccgcgcatttgcaga

SEQ ID NO: 19991 - DNA, 22 bp, Artificial Sequence
  Synthetic
ctgccctttctgcaaagccgtt

SEQ ID NO: 19992 - DNA, 21 bp, Artificial Sequence
  Synthetic
gaacaggtattccggcgcgga

SEQ ID NO: 19993 - DNA, 20 bp, Artificial Sequence
  Synthetic
atcggcaggctgaaacactc

SEQ ID NO: 19994 - DNA, 19 bp, Artificial Sequence
  Synthetic
gcgcgctggatgccaaagt

SEQ ID NO: 19995 - DNA, 18 bp, Artificial Sequence
  Synthetic
gcgtgctgctgccggaaa

SEQ ID NO: 19996 - DNA, 21 bp, Artificial Sequence
  Synthetic
gctgaccactgaaaacacgcc

SEQ ID NO: 19997 - DNA, 23 bp, Artificial Sequence
  Synthetic
accgtcatatgccttattgtcgt

SEQ ID NO: 19998 - DNA, 22 bp, Artificial Sequence
  Synthetic
gcccggtcaaaagcgcaaaaag

SEQ ID NO: 19999 - DNA, 21 bp, Artificial Sequence
  Synthetic
agctacaccccgaaacatccg

SEQ ID NO: 20000 - DNA, 19 bp, Artificial Sequence
  Synthetic
gcacggcgatgcggaagtg

SEQ ID NO: 20001 - DNA, 21 bp, Artificial Sequence
  Synthetic
gcggcggcggtttttgtagat

SEQ ID NO: 20002 - DNA, 19 bp, Artificial Sequence
  Synthetic
ccagcggtttgcaatcgcc

SEQ ID NO: 20003 - DNA, 20 bp, Artificial Sequence
  Synthetic
taccgcgtctttgccgactg

SEQ ID NO: 20004 - DNA, 22 bp, Artificial Sequence
  Synthetic
ccgatacggggtaaggcaggat

SEQ ID NO: 20005 - DNA, 19 bp, Artificial Sequence
  Synthetic
gtttgcgccgccgtctttg

SEQ ID NO: 20006 - DNA, 21 bp, Artificial Sequence
  Synthetic
gttcctcgtaggctgcctgcg

SEQ ID NO: 20007 - DNA, 20 bp, Artificial Sequence
  Synthetic
ggtcgtacagggcgttgccg

SEQ ID NO: 20008 - DNA, 25 bp, Artificial Sequence
  Synthetic
agtgccatttcattctaacttcctt

SEQ ID NO: 20009 - DNA, 22 bp, Artificial Sequence
  Synthetic
gcttcatctgctttgtgcgggt

SEQ ID NO: 20010 - DNA, 21 bp, Artificial Sequence
  Synthetic
cgaccacatcggacaatcccg

SEQ ID NO: 20011 - DNA, 22 bp, Artificial Sequence
  Synthetic
gtttccgttcgggcaatggttc

SEQ ID NO: 20012 - DNA, 20 bp, Artificial Sequence
  Synthetic
gcccgtcgtcttccacgttg

SEQ ID NO: 20013 - DNA, 22 bp, Artificial Sequence
  Synthetic
ggcggttacttttttgcctgcc

SEQ ID NO: 20014 - DNA, 18 bp, Artificial Sequence
  Synthetic
gcagcttcggcttcggct

SEQ ID NO: 20015 - DNA, 20 bp, Artificial Sequence
  Synthetic
cgcccgatataggcttccgc

SEQ ID NO: 20016 - DNA, 19 bp, Artificial Sequence
  Synthetic
cgttgacactgcccgcgaa

SEQ ID NO: 20017 - DNA, 19 bp, Artificial Sequence
  Synthetic
ccctgcgtttcaagcccga

SEQ ID NO: 20018 - DNA, 19 bp, Artificial Sequence
  Synthetic
tccaatacgccgcccaggg

SEQ ID NO: 20019 - DNA, 21 bp, Artificial Sequence
  Synthetic
ccgcctgataaatgttgcgcg

SEQ ID NO: 20020 - DNA, 18 bp, Artificial Sequence
  Synthetic
tcaaacccgcgttgcgcc

SEQ ID NO: 20021 - DNA, 18 bp, Artificial Sequence
  Synthetic
atcgcggctgtcctgctc

SEQ ID NO: 20022 - DNA, 19 bp, Artificial Sequence
  Synthetic
cgggcgtgtgtctgaaccg

SEQ ID NO: 20023 - DNA, 22 bp, Artificial Sequence
  Synthetic
cgaacgggaacacatccgcctt

SEQ ID NO: 20024 - DNA, 20 bp, Artificial Sequence
  Synthetic
cggcaagaagcggcggtatg

SEQ ID NO: 20025 - DNA, 22 bp, Artificial Sequence
  Synthetic
cggacaggagggcgtttgatgt

SEQ ID NO: 20026 - DNA, 19 bp, Artificial Sequence
  Synthetic
gcgggggcttcgagtttcg

SEQ ID NO: 20027 - DNA, 19 bp, Artificial Sequence
  Synthetic
acaccgccgcaccgtatcc

SEQ ID NO: 20028 - DNA, 18 bp, Artificial Sequence
  Synthetic
ttcccaccgcttccccga

SEQ ID NO: 20029 - DNA, 19 bp, Artificial Sequence
  Synthetic
tccgggcggttttggcgtg

SEQ ID NO: 20030 - DNA, 22 bp, Artificial Sequence
  Synthetic
gccttgagcttgtcgattgccg

SEQ ID NO: 20031 - DNA, 21 bp, Artificial Sequence
  Synthetic
cgcccatcaaccccatcactg

SEQ ID NO: 20032 - DNA, 22 bp, Artificial Sequence
  Synthetic
gcgaagtgggcgaactgatcgt

SEQ ID NO: 20033 - DNA, 18 bp, Artificial Sequence
  Synthetic
ttttggcgggcgcggtgt

SEQ ID NO: 20034 - DNA, 20 bp, Artificial Sequence
  Synthetic
ggctggcaggcgagttttct

SEQ ID NO: 20035 - DNA, 20 bp, Artificial Sequence
  Synthetic
cgacaggggttctttttgct

SEQ ID NO: 20036 - DNA, 20 bp, Artificial Sequence
  Synthetic
ttttcgcaaatcttccgccc

SEQ ID NO: 20037 - DNA, 19 bp, Artificial Sequence
  Synthetic
caggaaatcatcgcgcgcg

SEQ ID NO: 20038 - DNA, 19 bp, Artificial Sequence
  Synthetic
gcacatcgcccccgaaacc

SEQ ID NO: 20039 - DNA, 19 bp, Artificial Sequence
  Synthetic
actgccgacgtgcttgccc

SEQ ID NO: 20040 - DNA, 19 bp, Artificial Sequence
  Synthetic
cgccgacgcccgatttcac

SEQ ID NO: 20041 - DNA, 22 bp, Artificial Sequence
  Synthetic
cggaagacaaatccatgccgcc

SEQ ID NO: 20042 - DNA, 19 bp, Artificial Sequence
  Synthetic
atcagcgcgggcttgtgcc

SEQ ID NO: 20043 - DNA, 21 bp, Artificial Sequence
  Synthetic
cttgcattggaagccttgggc

SEQ ID NO: 20044 - DNA, 21 bp, Artificial Sequence
  Synthetic
gctggccggaaaccatatctc

SEQ ID NO: 20045 - DNA, 19 bp, Artificial Sequence
  Synthetic
tccacccgcacccgacctt

SEQ ID NO: 20046 - DNA, 19 bp, Artificial Sequence
  Synthetic
ccgtacgacgctgaacggc

SEQ ID NO: 20047 - DNA, 20 bp, Artificial Sequence
  Synthetic
ggcatcagcagctccacgct

SEQ ID NO: 20048 - DNA, 20 bp, Artificial Sequence
  Synthetic
ctccgatcggcaactggcaa

SEQ ID NO: 20049 - DNA, 21 bp, Artificial Sequence
  Synthetic
aaggcgcatctgctcgatgtg

SEQ ID NO: 20050 - DNA, 20 bp, Artificial Sequence
  Synthetic
cgccgcgttcgtactgcatg

SEQ ID NO: 20051 - DNA, 19 bp, Artificial Sequence
  Synthetic
atcaggctgcggtgggagc

SEQ ID NO: 20052 - DNA, 18 bp, Artificial Sequence
  Synthetic
aaggcggtgcggacgttg

SEQ ID NO: 20053 - DNA, 22 bp, Artificial Sequence
  Synthetic
cggtgaaacacggcatttggtt

SEQ ID NO: 20054 - DNA, 18 bp, Artificial Sequence
  Synthetic
ggcgggcggcaaagtgtt

SEQ ID NO: 20055 - DNA, 20 bp, Artificial Sequence
  Synthetic
gcagcagcaatgtcggcatt

SEQ ID NO: 20056 - DNA, 20 bp, Artificial Sequence
  Synthetic
cccgcccataaagccatcgg

SEQ ID NO: 20057 - DNA, 20 bp, Artificial Sequence
  Synthetic
gctcgacagccttgccgaca

SEQ ID NO: 20058 - DNA, 19 bp, Artificial Sequence
  Synthetic
tgtttgccgcgctgatccg

SEQ ID NO: 20059 - DNA, 22 bp, Artificial Sequence
  Synthetic
cgacaggcagggagtcggcata

SEQ ID NO: 20060 - DNA, 20 bp, Artificial Sequence
  Synthetic
cggtgtcaacgataaggcac

SEQ ID NO: 20061 - DNA, 22 bp, Artificial Sequence
  Synthetic
accgtaaacgcaggtctgaaat

SEQ ID NO: 20062 - DNA, 22 bp, Artificial Sequence
  Synthetic
gcagcgcaacctcaaaccgaaa

SEQ ID NO: 20063 - DNA, 20 bp, Artificial Sequence
  Synthetic
cgacatctcgacggcaaccg

SEQ ID NO: 20064 - DNA, 20 bp, Artificial Sequence
  Synthetic
cgcccttgcccaacgctata

SEQ ID NO: 20065 - DNA, 19 bp, Artificial Sequence
  Synthetic
tggaaatccgcggcgcagg

SEQ ID NO: 20066 - DNA, 20 bp, Artificial Sequence
  Synthetic
cgaccacgcttctggtcgag

SEQ ID NO: 20067 - DNA, 18 bp, Artificial Sequence
  Synthetic
tcgccctgcacaagctcg

SEQ ID NO: 20068 - DNA, 21 bp, Artificial Sequence
  Synthetic
tgttgttcgtaccggttgcca

SEQ ID NO: 20069 - DNA, 19 bp, Artificial Sequence
  Synthetic
tcctcgccgcctacatcca

SEQ ID NO: 20070 - DNA, 19 bp, Artificial Sequence
  Synthetic
tacagcacccgccacctgc

SEQ ID NO: 20071 - DNA, 22 bp, Artificial Sequence
  Synthetic
cgatctcatccgtatcgccccg

SEQ ID NO: 20072 - DNA, 20 bp, Artificial Sequence
  Synthetic
ggtatcgccgtcggtatggc

SEQ ID NO: 20073 - DNA, 20 bp, Artificial Sequence
  Synthetic
gcaacgacgaactggcgcac

SEQ ID NO: 20074 - DNA, 22 bp, Artificial Sequence
  Synthetic
ccaagttcgcccaatacctgct

SEQ ID NO: 20075 - DNA, 21 bp, Artificial Sequence
  Synthetic
cgggcatcgttgcttttcatt

SEQ ID NO: 20076 - DNA, 22 bp, Artificial Sequence
  Synthetic
tgcccctgcccgatgacataat

SEQ ID NO: 20077 - DNA, 22 bp, Artificial Sequence
  Synthetic
cgcagtcaggggcagaaacttc

SEQ ID NO: 20078 - DNA, 19 bp, Artificial Sequence
  Synthetic
atggtaggcagcacgcgcg

SEQ ID NO: 20079 - DNA, 20 bp, Artificial Sequence
  Synthetic
cggcgcattggcaaaaggtc

SEQ ID NO: 20080 - DNA, 22 bp, Artificial Sequence
  Synthetic
cggcgtttcaaggtggttacga

SEQ ID NO: 20081 - DNA, 22 bp, Artificial Sequence
  Synthetic
cgcacgaccggttcttcgttaa

SEQ ID NO: 20082 - DNA, 19 bp, Artificial Sequence
  Synthetic
ggcgggaatggcggcaaat

SEQ ID NO: 20083 - DNA, 20 bp, Artificial Sequence
  Synthetic
ccagaccgatatgccgtcgc

SEQ ID NO: 20084 - DNA, 18 bp, Artificial Sequence
  Synthetic
ggtttgcgcccgcatgtg

SEQ ID NO: 20085 - DNA, 19 bp, Artificial Sequence
  Synthetic
aaccaccccgacccctgtg

SEQ ID NO: 20086 - DNA, 22 bp, Artificial Sequence
  Synthetic
gcagcgaacacgatacccgtat

SEQ ID NO: 20087 - DNA, 20 bp, Artificial Sequence
  Synthetic
ggcaaagcaaccttagccgc

SEQ ID NO: 20088 - DNA, 18 bp, Artificial Sequence
  Synthetic
atcaccgcgccgctgcaa

SEQ ID NO: 20089 - DNA, 25 bp, Artificial Sequence
  Synthetic
accgcctttaaacaattgaaagaaa

SEQ ID NO: 20090 - DNA, 22 bp, Artificial Sequence
  Synthetic
tcgacattaccgaacaccgcaa

SEQ ID NO: 20091 - DNA, 22 bp, Artificial Sequence
  Synthetic
ccagcttcgccgacatcttctt

SEQ ID NO: 20092 - DNA, 21 bp, Artificial Sequence
  Synthetic
aatcccgccgaagaaaccgat

SEQ ID NO: 20093 - DNA, 19 bp, Artificial Sequence
  Synthetic
tccacccacggcgcattcg

SEQ ID NO: 20094 - DNA, 18 bp, Artificial Sequence
  Synthetic
agcgcgccaaatcgaccg

SEQ ID NO: 20095 - DNA, 21 bp, Artificial Sequence
  Synthetic
cggatagacaagttcgcccgc

SEQ ID NO: 20096 - DNA, 22 bp, Artificial Sequence
  Synthetic
gcgtgccattatgggtttccac

SEQ ID NO: 20097 - DNA, 21 bp, Artificial Sequence
  Synthetic
aaatgccggcgatgaaggtca

SEQ ID NO: 20098 - DNA, 19 bp, Artificial Sequence
  Synthetic
ttgtcttgcccacgcccgg

SEQ ID NO: 20099 - DNA, 19 bp, Artificial Sequence
  Synthetic
ggatttgcgcgcccaagct

SEQ ID NO: 20100 - DNA, 21 bp, Artificial Sequence
  Synthetic
tctttgacgaagcggcgcatt

SEQ ID NO: 20101 - DNA, 21 bp, Artificial Sequence
  Synthetic
ccaaagcccttgatcgcgtcc

SEQ ID NO: 20102 - DNA, 18 bp, Artificial Sequence
  Synthetic
gattcccgccgccgtcat

SEQ ID NO: 20103 - DNA, 21 bp, Artificial Sequence
  Synthetic
tgcctgaaacggctaaatcct

SEQ ID NO: 20104 - DNA, 23 bp, Artificial Sequence
  Synthetic
cctgcactcatcaatcctgattt

SEQ ID NO: 20105 - DNA, 22 bp, Artificial Sequence
  Synthetic
gccatttgccgatgattggggc

SEQ ID NO: 20106 - DNA, 19 bp, Artificial Sequence
  Synthetic
tgttgtcgttgtgggcggg

SEQ ID NO: 20107 - DNA, 20 bp, Artificial Sequence
  Synthetic
ccgggtttcacatcgccgta

SEQ ID NO: 20108 - DNA, 22 bp, Artificial Sequence
  Synthetic
ggaacacggcatcgacacactc

SEQ ID NO: 20109 - DNA, 18 bp, Artificial Sequence
  Synthetic
gcgcatcgatttgggcgc

SEQ ID NO: 20110 - DNA, 20 bp, Artificial Sequence
  Synthetic
cgtatgtccggcgcgtcagg

SEQ ID NO: 20111 - DNA, 19 bp, Artificial Sequence
  Synthetic
cagcgcgaagtgttggcgg

SEQ ID NO: 20112 - DNA, 20 bp, Artificial Sequence
  Synthetic
cgtgccacttgttgccgtcg

SEQ ID NO: 20113 - DNA, 20 bp, Artificial Sequence
  Synthetic
gagccgtccacgttggagac

SEQ ID NO: 20114 - DNA, 20 bp, Artificial Sequence
  Synthetic
atttcgtggtgtccgggcag

SEQ ID NO: 20115 - DNA, 21 bp, Artificial Sequence
  Synthetic
cactcttcgccattcccgcga

SEQ ID NO: 20116 - DNA, 19 bp, Artificial Sequence
  Synthetic
caacgtcggcgcactggac

SEQ ID NO: 20117 - DNA, 19 bp, Artificial Sequence
  Synthetic
acggacgcgggcaagacac

SEQ ID NO: 20118 - DNA, 20 bp, Artificial Sequence
  Synthetic
acgagtgcggctacggaatc

SEQ ID NO: 20119 - DNA, 22 bp, Artificial Sequence
  Synthetic
cgcgggaatccggtaaccgaaa

SEQ ID NO: 20120 - DNA, 19 bp, Artificial Sequence
  Synthetic
acgcctacctgctgaccgg

SEQ ID NO: 20121 - DNA, 22 bp, Artificial Sequence
  Synthetic
gttccacacgctcaacaaagcc

SEQ ID NO: 20122 - DNA, 21 bp, Artificial Sequence
  Synthetic
aagtcatgctccatgccgtca

SEQ ID NO: 20123 - DNA, 20 bp, Artificial Sequence
  Synthetic
tggctgcggtacacaatgcc

SEQ ID NO: 20124 - DNA, 20 bp, Artificial Sequence
  Synthetic
gcatcgccaaccgcctgttg

SEQ ID NO: 20125 - DNA, 22 bp, Artificial Sequence
  Synthetic
gcgcaccttatcgccgaacaaa

SEQ ID NO: 20126 - DNA, 20 bp, Artificial Sequence
  Synthetic
agctgatgcggcagatggtg

SEQ ID NO: 20127 - DNA, 20 bp, Artificial Sequence
  Synthetic
ccttcatcgcccgatacggc

SEQ ID NO: 20128 - DNA, 24 bp, Artificial Sequence
  Synthetic
cgaatgctgcaaatttgtttgatg

SEQ ID NO: 20129 - DNA, 22 bp, Artificial Sequence
  Synthetic
ccaagccaaaccggtaacctgt

SEQ ID NO: 20130 - DNA, 21 bp, Artificial Sequence
  Synthetic
gcgtgggtcattttggcgttg

SEQ ID NO: 20131 - DNA, 23 bp, Artificial Sequence
  Synthetic
atgaccaaggacaaaatggactt

SEQ ID NO: 20132 - DNA, 21 bp, Artificial Sequence
  Synthetic
cgccaagcgtaaaccattcat

SEQ ID NO: 20133 - DNA, 23 bp, Artificial Sequence
  Synthetic
gctttggttccttcacatgtcag

SEQ ID NO: 20134 - DNA, 23 bp, Artificial Sequence
  Synthetic
acacggtgcttgatacctttcaa

SEQ ID NO: 20135 - DNA, 21 bp, Artificial Sequence
  Synthetic
ggactactgtggctaccgtaa

SEQ ID NO: 20136 - DNA, 24 bp, Artificial Sequence
  Synthetic
ctgaatttttcagttgcctcacct

SEQ ID NO: 20137 - DNA, 24 bp, Artificial Sequence
  Synthetic
ttgtctgtttgggtgtatgaatca

SEQ ID NO: 20138 - DNA, 25 bp, Artificial Sequence
  Synthetic
gccaaagtaaatggtactaaagctg

SEQ ID NO: 20139 - DNA, 22 bp, Artificial Sequence
  Synthetic
accgcccggacagcttttgata

SEQ ID NO: 20140 - DNA, 22 bp, Artificial Sequence
  Synthetic
cgtggaagaaggcggcaaggta

SEQ ID NO: 20141 - DNA, 21 bp, Artificial Sequence
  Synthetic
ctttggcagtggcgatgttgc

SEQ ID NO: 20142 - DNA, 20 bp, Artificial Sequence
  Synthetic
ccgtcggcaatcagcggaac

SEQ ID NO: 20143 - DNA, 20 bp, Artificial Sequence
  Synthetic
cttggctcatcgcgcccaag

SEQ ID NO: 20144 - DNA, 19 bp, Artificial Sequence
  Synthetic
cgttcgatgcgcccctgat

SEQ ID NO: 20145 - DNA, 19 bp, Artificial Sequence
  Synthetic
acgggtttgacgatgcccg

SEQ ID NO: 20146 - DNA, 20 bp, Artificial Sequence
  Synthetic
ccgatgaccttgcccgcttc

SEQ ID NO: 20147 - DNA, 20 bp, Artificial Sequence
  Synthetic
cgcttcggtcaggcagttca

SEQ ID NO: 20148 - DNA, 18 bp, Artificial Sequence
  Synthetic
tcgtccacgcctgcggtt

SEQ ID NO: 20149 - DNA, 20 bp, Artificial Sequence
  Synthetic
atcctcgccgtcctcgagcc

SEQ ID NO: 20150 - DNA, 19 bp, Artificial Sequence
  Synthetic
atatgccggactcgcgccg

SEQ ID NO: 20151 - DNA, 20 bp, Artificial Sequence
  Synthetic
acacggtgagggacgaagcc

SEQ ID NO: 20152 - DNA, 19 bp, Artificial Sequence
  Synthetic
ttgtgcggacgcgtggtcg

SEQ ID NO: 20153 - DNA, 21 bp, Artificial Sequence
  Synthetic
ccggacagatattgccggtgt

SEQ ID NO: 20154 - DNA, 18 bp, Artificial Sequence
  Synthetic
agccgtggtcgaagccga

SEQ ID NO: 20155 - DNA, 21 bp, Artificial Sequence
  Synthetic
gcaattccaccatccccaccg

SEQ ID NO: 20156 - DNA, 18 bp, Artificial Sequence
  Synthetic
acctaccgccgccgcaat

SEQ ID NO: 20157 - DNA, 20 bp, Artificial Sequence
  Synthetic
tatcggcatcaggcagcagc

SEQ ID NO: 20158 - DNA, 19 bp, Artificial Sequence
  Synthetic
ggcggcatcgaaggcttcg

SEQ ID NO: 20159 - DNA, 20 bp, Artificial Sequence
  Synthetic
gctgcgtgaggactcggtcg

SEQ ID NO: 20160 - DNA, 20 bp, Artificial Sequence
  Synthetic
caaaccgcaaaccgtccgca

SEQ ID NO: 20161 - DNA, 20 bp, Artificial Sequence
  Synthetic
aggacggggtgctgaaacac

SEQ ID NO: 20162 - DNA, 20 bp, Artificial Sequence
  Synthetic
tctgttcattgtcccgcgcc

SEQ ID NO: 20163 - DNA, 22 bp, Artificial Sequence
  Synthetic
gcgtgcggattgaaatgcatct

SEQ ID NO: 20164 - DNA, 21 bp, Artificial Sequence
  Synthetic
ggtatccgaacacctgccgac

SEQ ID NO: 20165 - DNA, 22 bp, Artificial Sequence
  Synthetic
tggttttgtctgcctatgccgt

SEQ ID NO: 20166 - DNA, 21 bp, Artificial Sequence
  Synthetic
tgcgagaattggcggaggaaa

SEQ ID NO: 20167 - DNA, 19 bp, Artificial Sequence
  Synthetic
gcgcatcgtcatccggcat

SEQ ID NO: 20168 - DNA, 20 bp, Artificial Sequence
  Synthetic
gcctcgctgccttcgagatt

SEQ ID NO: 20169 - DNA, 20 bp, Artificial Sequence
  Synthetic
acgacggacagcaaaacgcc

SEQ ID NO: 20170 - DNA, 20 bp, Artificial Sequence
  Synthetic
aaagccgcgagtggtcatgg

SEQ ID NO: 20171 - DNA, 23 bp, Artificial Sequence
  Synthetic
gttcagacggcattttgtatgga

SEQ ID NO: 20172 - DNA, 19 bp, Artificial Sequence
  Synthetic
tcttcgaggcgttcgcggg

SEQ ID NO: 20173 - DNA, 22 bp, Artificial Sequence
  Synthetic
cgggtaatctttccgaaaccgt

SEQ ID NO: 20174 - DNA, 21 bp, Artificial Sequence
  Synthetic
agcctgctttgcgtatccacg

SEQ ID NO: 20175 - DNA, 22 bp, Artificial Sequence
  Synthetic
aggtattcgagataggcgcggg

SEQ ID NO: 20176 - DNA, 19 bp, Artificial Sequence
  Synthetic
acgaatcgccgtcttgcgc

SEQ ID NO: 20177 - DNA, 18 bp, Artificial Sequence
  Synthetic
acccccaagccgcattgg

SEQ ID NO: 20178 - DNA, 20 bp, Artificial Sequence
  Synthetic
tttgccgtcttcgatgccca

SEQ ID NO: 20179 - DNA, 20 bp, Artificial Sequence
  Synthetic
ttgccgaagccagatcgcac

SEQ ID NO: 20180 - DNA, 20 bp, Artificial Sequence
  Synthetic
tcgaccaaatcgccgatggg

SEQ ID NO: 20181 - DNA, 19 bp, Artificial Sequence
  Synthetic
tcctttcgggcgcgagact

SEQ ID NO: 20182 - DNA, 19 bp, Artificial Sequence
  Synthetic
tccgcatcagccacatcgg

SEQ ID NO: 20183 - DNA, 22 bp, Artificial Sequence
  Synthetic
ccgataccacacccgaatacgc

SEQ ID NO: 20184 - DNA, 18 bp, Artificial Sequence
  Synthetic
tgggcaagccattccgcc

SEQ ID NO: 20185 - DNA, 18 bp, Artificial Sequence
  Synthetic
cctcaaccgccgcatgca

SEQ ID NO: 20186 - DNA, 20 bp, Artificial Sequence
  Synthetic
ccgctgattgcaccgctcat

SEQ ID NO: 20187 - DNA, 21 bp, Artificial Sequence
  Synthetic
caccgtaagcgagcgtcaact

SEQ ID NO: 20188 - DNA, 20 bp, Artificial Sequence
  Synthetic
ggtactgcttcctttgccgg

SEQ ID NO: 20189 - DNA, 21 bp, Artificial Sequence
  Synthetic
ccttcggcgtgcatttggaca

SEQ ID NO: 20190 - DNA, 22 bp, Artificial Sequence
  Synthetic
cgatgtttgggcaaagtggctg

SEQ ID NO: 20191 - DNA, 19 bp, Artificial Sequence
  Synthetic
tcaggtgcgcgctcatcgg

SEQ ID NO: 20192 - DNA, 20 bp, Artificial Sequence
  Synthetic
acatcaatgccaagccgggc

SEQ ID NO: 20193 - DNA, 19 bp, Artificial Sequence
  Synthetic
tcacccacgccgtgctgtc

SEQ ID NO: 20194 - DNA, 18 bp, Artificial Sequence
  Synthetic
tccgcgccggctttttcg

SEQ ID NO: 20195 - DNA, 20 bp, Artificial Sequence
  Synthetic
gcaaagagtttcggggcggc

SEQ ID NO: 20196 - DNA, 20 bp, Artificial Sequence
  Synthetic
cggatatttctgcctgcccg

SEQ ID NO: 20197 - DNA, 19 bp, Artificial Sequence
  Synthetic
ccgtctggttgcgttggcg

SEQ ID NO: 20198 - DNA, 21 bp, Artificial Sequence
  Synthetic
cgggaactgggtgtgggaaat

SEQ ID NO: 20199 - DNA, 22 bp, Artificial Sequence
  Synthetic
aaagtgcgtcaaggcagagtct

SEQ ID NO: 20200 - DNA, 19 bp, Artificial Sequence
  Synthetic
aaatcccgtcccgcacgcg

SEQ ID NO: 20201 - DNA, 20 bp, Artificial Sequence
  Synthetic
tgcgccccctcatgattgag

SEQ ID NO: 20202 - DNA, 18 bp, Artificial Sequence
  Synthetic
tgccgcgcacgatgcttg

SEQ ID NO: 20203 - DNA, 19 bp, Artificial Sequence
  Synthetic
acgtcggtcagggcaacgc

SEQ ID NO: 20204 - DNA, 20 bp, Artificial Sequence
  Synthetic
atggttttgcccggcgagtc

SEQ ID NO: 20205 - DNA, 22 bp, Artificial Sequence
  Synthetic
gggcgaggaatagtcgatgacg

SEQ ID NO: 20206 - DNA, 22 bp, Artificial Sequence
  Synthetic
cgtagaagcggctgaacagggt

SEQ ID NO: 20207 - DNA, 22 bp, Artificial Sequence
  Synthetic
ggtcagcagtgccaaaacccaa

SEQ ID NO: 20208 - DNA, 20 bp, Artificial Sequence
  Synthetic
aaacggcatattcgcccgcg

SEQ ID NO: 20209 - DNA, 23 bp, Artificial Sequence
  Synthetic
cgtacccgaaaacgaatacatcg

SEQ ID NO: 20210 - DNA, 19 bp, Artificial Sequence
  Synthetic
ggtttggcggcggaaaccg

SEQ ID NO: 20211 - DNA, 23 bp, Artificial Sequence
  Synthetic
gcatcgtattgactgcctttcaa

SEQ ID NO: 20212 - DNA, 20 bp, Artificial Sequence
  Synthetic
ccaattcgtgcgtgtcttca

SEQ ID NO: 20213 - DNA, 20 bp, Artificial Sequence
  Synthetic
aaccgaagtcaaaccgccgg

SEQ ID NO: 20214 - DNA, 24 bp, Artificial Sequence
  Synthetic
cacagggtcaaaatacagttcagt

SEQ ID NO: 20215 - DNA, 22 bp, Artificial Sequence
  Synthetic
ggacagtttggcagacggtgtg

SEQ ID NO: 20216 - DNA, 21 bp, Artificial Sequence
  Synthetic
gtgccaccgtcttttttgtga

SEQ ID NO: 20217 - DNA, 22 bp, Artificial Sequence
  Synthetic
tcgggcttttggtcattttcag

SEQ ID NO: 20218 - DNA, 21 bp, Artificial Sequence
  Synthetic
ccgtcttggttttccagtgca

SEQ ID NO: 20219 - DNA, 22 bp, Artificial Sequence
  Synthetic
tcgaattgcagcgtgaatgcgc

SEQ ID NO: 20220 - DNA, 19 bp, Artificial Sequence
  Synthetic
tcggtggtccgctcggaag

SEQ ID NO: 20221 - DNA, 20 bp, Artificial Sequence
  Synthetic
atccattccctctcccgtgg

SEQ ID NO: 20222 - DNA, 23 bp, Artificial Sequence
  Synthetic
ctcaaaaaataccagcccgagag

SEQ ID NO: 20223 - DNA, 22 bp, Artificial Sequence
  Synthetic
gcgcgttgagatagacggcgag

SEQ ID NO: 20224 - DNA, 21 bp, Artificial Sequence
  Synthetic
gcggagaactgtttgaccgcg

SEQ ID NO: 20225 - DNA, 21 bp, Artificial Sequence
  Synthetic
acgccgtctgaaaaaaccttt

SEQ ID NO: 20226 - DNA, 20 bp, Artificial Sequence
  Synthetic
gccatgcgcccaaacagatg

SEQ ID NO: 20227 - DNA, 22 bp, Artificial Sequence
  Synthetic
gcgcctgctgcttaagatatgc

SEQ ID NO: 20228 - DNA, 19 bp, Artificial Sequence
  Synthetic
tttccagtcgccgccgtct

SEQ ID NO: 20229 - DNA, 22 bp, Artificial Sequence
  Synthetic
aaacacccgcttcaaaacccac

SEQ ID NO: 20230 - DNA, 18 bp, Artificial Sequence
  Synthetic
tttgaccgcgccgacacg

SEQ ID NO: 20231 - DNA, 20 bp, Artificial Sequence
  Synthetic
aaacggcggtcgattttgtc

SEQ ID NO: 20232 - DNA, 18 bp, Artificial Sequence
  Synthetic
tgccgcccgtgcaaactg

SEQ ID NO: 20233 - DNA, 22 bp, Artificial Sequence
  Synthetic
acgaaccgttgggctacatcaa

SEQ ID NO: 20234 - DNA, 22 bp, Artificial Sequence
  Synthetic
tcttcgccgtaaattaccgcca

SEQ ID NO: 20235 - DNA, 21 bp, Artificial Sequence
  Synthetic
ccgaacttgctgtccactccg

SEQ ID NO: 20236 - DNA, 19 bp, Artificial Sequence
  Synthetic
ggaatgtgccgctgccgaa

SEQ ID NO: 20237 - DNA, 21 bp, Artificial Sequence
  Synthetic
cctgttgggtttgcgcgatga

SEQ ID NO: 20238 - DNA, 22 bp, Artificial Sequence
  Synthetic
tcttgatgggcgtcttgcgtat

SEQ ID NO: 20239 - DNA, 20 bp, Artificial Sequence
  Synthetic
atcagaagcggtagcgcacg

SEQ ID NO: 20240 - DNA, 22 bp, Artificial Sequence
  Synthetic
ccgataagtttccgtgcggaca

SEQ ID NO: 20241 - DNA, 21 bp, Artificial Sequence
  Synthetic
ctcttgtcgtgcggacggttt

SEQ ID NO: 20242 - DNA, 20 bp, Artificial Sequence
  Synthetic
aaacgatacggcaagcgcga

SEQ ID NO: 20243 - DNA, 20 bp, Artificial Sequence
  Synthetic
cctgtcaagcccgtgtgcag

SEQ ID NO: 20244 - DNA, 22 bp, Artificial Sequence
  Synthetic
ggcggatgatacggaggctttg

SEQ ID NO: 20245 - DNA, 19 bp, Artificial Sequence
  Synthetic
gcgggggtgcgaaggaaat

SEQ ID NO: 20246 - DNA, 19 bp, Artificial Sequence
  Synthetic
gcgcgtttccccgttgacg

SEQ ID NO: 20247 - DNA, 20 bp, Artificial Sequence
  Synthetic
tcggggataaggcgggcgag

SEQ ID NO: 20248 - DNA, 20 bp, Artificial Sequence
  Synthetic
gcgacgcggctttcgaacag

SEQ ID NO: 20249 - DNA, 20 bp, Artificial Sequence
  Synthetic
ggcttatccggtgatggcgg

SEQ ID NO: 20250 - DNA, 22 bp, Artificial Sequence
  Synthetic
cccgtgatgaagtcccgggatt

SEQ ID NO: 20251 - DNA, 18 bp, Artificial Sequence
  Synthetic
acgagctgggcggtgtgt

SEQ ID NO: 20252 - DNA, 20 bp, Artificial Sequence
  Synthetic
gcggttacggaggcggacaa

SEQ ID NO: 20253 - DNA, 21 bp, Artificial Sequence
  Synthetic
ctgttgtcgcagcgtgtggag

SEQ ID NO: 20254 - DNA, 19 bp, Artificial Sequence
  Synthetic
ttgcggaatcggcgggcag

SEQ ID NO: 20255 - DNA, 19 bp, Artificial Sequence
  Synthetic
gggctgtacgcgcttaccg

SEQ ID NO: 20256 - DNA, 19 bp, Artificial Sequence
  Synthetic
acgagaagggggcggcttt

SEQ ID NO: 20257 - DNA, 20 bp, Artificial Sequence
  Synthetic
accaactcctaccgcagcca

SEQ ID NO: 20258 - DNA, 22 bp, Artificial Sequence
  Synthetic
gcggaagtatggtacaggcggt

SEQ ID NO: 20259 - DNA, 19 bp, Artificial Sequence
  Synthetic
gggcaatgcacgccgaaca

SEQ ID NO: 20260 - DNA, 20 bp, Artificial Sequence
  Synthetic
gccgcctgcccgatattggg

SEQ ID NO: 20261 - DNA, 18 bp, Artificial Sequence
  Synthetic
atcgggcgttcgggcatc

SEQ ID NO: 20262 - DNA, 22 bp, Artificial Sequence
  Synthetic
cggcctgtaaattccgcgtacg

SEQ ID NO: 20263 - DNA, 19 bp, Artificial Sequence
  Synthetic
ttacggcccggaccaacgc

SEQ ID NO: 20264 - DNA, 19 bp, Artificial Sequence
  Synthetic
gcggtccgcagtcgcattt

SEQ ID NO: 20265 - DNA, 20 bp, Artificial Sequence
  Synthetic
cgaagtatcgcccgccgaaa

SEQ ID NO: 20266 - DNA, 25 bp, Artificial Sequence
  Synthetic
aggttatccaaaaggtttacagcct

SEQ ID NO: 20267 - DNA, 19 bp, Artificial Sequence
  Synthetic
aacagcctgctgtcgcccg

SEQ ID NO: 20268 - DNA, 20 bp, Artificial Sequence
  Synthetic
atacgcggcggcaaagaaca

SEQ ID NO: 20269 - DNA, 22 bp, Artificial Sequence
  Synthetic
cggctgttgaccaaaatctgcg

SEQ ID NO: 20270 - DNA, 18 bp, Artificial Sequence
  Synthetic
cgcgcagggtgttgcctt

SEQ ID NO: 20271 - DNA, 19 bp, Artificial Sequence
  Synthetic
tggtggacaattccgcgcc

SEQ ID NO: 20272 - DNA, 21 bp, Artificial Sequence
  Synthetic
acgtaaaacctgcaatgcgcc

SEQ ID NO: 20273 - DNA, 22 bp, Artificial Sequence
  Synthetic
gtcgccttcgatgatgacggtt

SEQ ID NO: 20274 - DNA, 20 bp, Artificial Sequence
  Synthetic
cgatggttggcaaccgtgcg

SEQ ID NO: 20275 - DNA, 21 bp, Artificial Sequence
  Synthetic
attaatacgccccagccgccc

SEQ ID NO: 20276 - DNA, 20 bp, Artificial Sequence
  Synthetic
ataggcagaatgaccgcagc

SEQ ID NO: 20277 - DNA, 20 bp, Artificial Sequence
  Synthetic
accggagtggacgaacctct

SEQ ID NO: 20278 - DNA, 18 bp, Artificial Sequence
  Synthetic
cgcaagctgtttcggcgg

SEQ ID NO: 20279 - DNA, 20 bp, Artificial Sequence
  Synthetic
cggtcgaggaggcaatccgt

SEQ ID NO: 20280 - DNA, 21 bp, Artificial Sequence
  Synthetic
gcaccttcgtcgcggatttcg

SEQ ID NO: 20281 - DNA, 19 bp, Artificial Sequence
  Synthetic
ttggtcgccgagctgccag

SEQ ID NO: 20282 - DNA, 19 bp, Artificial Sequence
  Synthetic
accatttggtcgcggtggg

SEQ ID NO: 20283 - DNA, 22 bp, Artificial Sequence
  Synthetic
cgatttgcccgtttacgccctg

SEQ ID NO: 20284 - DNA, 22 bp, Artificial Sequence
  Synthetic
acaggatggatttcgcccagcc

SEQ ID NO: 20285 - DNA, 19 bp, Artificial Sequence
  Synthetic
ggacgacttcgcgttccgc

SEQ ID NO: 20286 - DNA, 20 bp, Artificial Sequence
  Synthetic
acgagggcatgacgaccgtg

SEQ ID NO: 20287 - DNA, 22 bp, Artificial Sequence
  Synthetic
gctacggcaatcagtgtcaggt

SEQ ID NO: 20288 - DNA, 19 bp, Artificial Sequence
  Synthetic
atgccgtgcagggcttggg

SEQ ID NO: 20289 - DNA, 22 bp, Artificial Sequence
  Synthetic
cggcccattcgtcttggttgat

SEQ ID NO: 20290 - DNA, 18 bp, Artificial Sequence
  Synthetic
cgttgcgcggcagcttgt

SEQ ID NO: 20291 - DNA, 19 bp, Artificial Sequence
  Synthetic
ccgggtgcaagcagggttt

SEQ ID NO: 20292 - DNA, 23 bp, Artificial Sequence
  Synthetic
gaggcaaccggcaattattatga

SEQ ID NO: 20293 - DNA, 22 bp, Artificial Sequence
  Synthetic
cgggcgttgtgtgttttgttgt

SEQ ID NO: 20294 - DNA, 21 bp, Artificial Sequence
  Synthetic
gcaggttgtcggctttgacgt

SEQ ID NO: 20295 - DNA, 20 bp, Artificial Sequence
  Synthetic
cgtacatcacgccggtcagg

SEQ ID NO: 20296 - DNA, 19 bp, Artificial Sequence
  Synthetic
cttggcaggcttcgcagcg

SEQ ID NO: 20297 - DNA, 18 bp, Artificial Sequence
  Synthetic
aaaggcagacgcggtcgc

SEQ ID NO: 20298 - DNA, 18 bp, Artificial Sequence
  Synthetic
tgggcgcgcaagaagtcg

SEQ ID NO: 20299 - DNA, 20 bp, Artificial Sequence
  Synthetic
acgtgcagcaggcggatttg

SEQ ID NO: 20300 - DNA, 20 bp, Artificial Sequence
  Synthetic
gcggtgtggcgcaggaattg

SEQ ID NO: 20301 - DNA, 21 bp, Artificial Sequence
  Synthetic
acatcggcagcatcctcgaaa

SEQ ID NO: 20302 - DNA, 19 bp, Artificial Sequence
  Synthetic
acggtttgcaggcagtcgc

SEQ ID NO: 20303 - DNA, 20 bp, Artificial Sequence
  Synthetic
ccgatgacccagaagccgac

SEQ ID NO: 20304 - DNA, 19 bp, Artificial Sequence
  Synthetic
aactcgccttcgcctgcgg

SEQ ID NO: 20305 - DNA, 22 bp, Artificial Sequence
  Synthetic
cggggaaggaaataccgatggg

SEQ ID NO: 20306 - DNA, 19 bp, Artificial Sequence
  Synthetic
tccattttggtcggcggcg

SEQ ID NO: 20307 - DNA, 22 bp, Artificial Sequence
  Synthetic
ggcgcggatgcacttgaagaag

SEQ ID NO: 20308 - DNA, 22 bp, Artificial Sequence
  Synthetic
ccagtatttcagacggccccgc

SEQ ID NO: 20309 - DNA, 21 bp, Artificial Sequence
  Synthetic
tttggcaaaaccgggcggaac

SEQ ID NO: 20310 - DNA, 22 bp, Artificial Sequence
  Synthetic
cgggcaggttgagggtgaaatc

SEQ ID NO: 20311 - DNA, 20 bp, Artificial Sequence
  Synthetic
cctgccggattgcttgtccg

SEQ ID NO: 20312 - DNA, 18 bp, Artificial Sequence
  Synthetic
cgacttcgatgccgccgt

SEQ ID NO: 20313 - DNA, 20 bp, Artificial Sequence
  Synthetic
tgccttggaacatccccatc

SEQ ID NO: 20314 - DNA, 22 bp, Artificial Sequence
  Synthetic
ggaaaggtaaaacacgacgcgc

SEQ ID NO: 20315 - DNA, 21 bp, Artificial Sequence
  Synthetic
cccaggtcttttgcgtcgtcc

SEQ ID NO: 20316 - DNA, 22 bp, Artificial Sequence
  Synthetic
ggcgtattcgagataggcgcgt

SEQ ID NO: 20317 - DNA, 22 bp, Artificial Sequence
  Synthetic
gcgggttgagggtggaaaagaa

SEQ ID NO: 20318 - DNA, 22 bp, Artificial Sequence
  Synthetic
gcacggtcgatgtatctgaccg

SEQ ID NO: 20319 - DNA, 19 bp, Artificial Sequence
  Synthetic
cggcaaggtgttcgccgag

SEQ ID NO: 20320 - DNA, 24 bp, Artificial Sequence
  Synthetic
cgggttcttgccatcaaatttaac

SEQ ID NO: 20321 - DNA, 23 bp, Artificial Sequence
  Synthetic
agttcaaaggctacacgtcaaat

SEQ ID NO: 20322 - DNA, 20 bp, Artificial Sequence
  Synthetic
acaagtaatcccgcgtcccg

SEQ ID NO: 20323 - DNA, 25 bp, Artificial Sequence
  Synthetic
ccgtccgttctaaaatttgaccaat

SEQ ID NO: 20324 - DNA, 21 bp, Artificial Sequence
  Synthetic
ggttcgggctttcacaacgga

SEQ ID NO: 20325 - DNA, 20 bp, Artificial Sequence
  Synthetic
gacttggggcttctggctgc

SEQ ID NO: 20326 - DNA, 19 bp, Artificial Sequence
  Synthetic
tatggcaatcggcgcctgc

SEQ ID NO: 20327 - DNA, 22 bp, Artificial Sequence
  Synthetic
cggctcagggattcgacaatgt

SEQ ID NO: 20328 - DNA, 22 bp, Artificial Sequence
  Synthetic
ctcgccggacaattcattgctg

SEQ ID NO: 20329 - DNA, 20 bp, Artificial Sequence
  Synthetic
gctcgggcttttaccgcgtc

SEQ ID NO: 20330 - DNA, 22 bp, Artificial Sequence
  Synthetic
acggctttttctttgggctcgg

SEQ ID NO: 20331 - DNA, 22 bp, Artificial Sequence
  Synthetic
cggatatcgagctgcacagccg

SEQ ID NO: 20332 - DNA, 20 bp, Artificial Sequence
  Synthetic
ccaccacacgccatgtcgaa

SEQ ID NO: 20333 - DNA, 19 bp, Artificial Sequence
  Synthetic
tggttcgagggcaggctgg

SEQ ID NO: 20334 - DNA, 19 bp, Artificial Sequence
  Synthetic
tggcggcaaccttcggtac

SEQ ID NO: 20335 - DNA, 20 bp, Artificial Sequence
  Synthetic
caatccctgcgtgcttcggg

SEQ ID NO: 20336 - DNA, 22 bp, Artificial Sequence
  Synthetic
tccactgcttgccctcaacaag

SEQ ID NO: 20337 - DNA, 19 bp, Artificial Sequence
  Synthetic
tcgccagcttgcctgtccg

SEQ ID NO: 20338 - DNA, 21 bp, Artificial Sequence
  Synthetic
cccgttgcgtttcggaatgcc

SEQ ID NO: 20339 - DNA, 21 bp, Artificial Sequence
  Synthetic
gttggaagtttgacgggggct

SEQ ID NO: 20340 - DNA, 25 bp, Artificial Sequence
  Synthetic
tccgttcaattgcttatttgttcaa

SEQ ID NO: 20341 - DNA, 20 bp, Artificial Sequence
  Synthetic
ctgcctgcgggaatgtcgaa

SEQ ID NO: 20342 - DNA, 22 bp, Artificial Sequence
  Synthetic
acggacagatggatcggcattt

SEQ ID NO: 20343 - DNA, 19 bp, Artificial Sequence
  Synthetic
tatgcggcggcagggcttc

SEQ ID NO: 20344 - DNA, 18 bp, Artificial Sequence
  Synthetic
tacagttccgcgccgcac

SEQ ID NO: 20345 - DNA, 21 bp, Artificial Sequence
  Synthetic
cggcttgaccacccagaactg

SEQ ID NO: 20346 - DNA, 20 bp, Artificial Sequence
  Synthetic
attgctcaacgccgcttcga

SEQ ID NO: 20347 - DNA, 19 bp, Artificial Sequence
  Synthetic
tgctcttctcgccgacagc

SEQ ID NO: 20348 - DNA, 19 bp, Artificial Sequence
  Synthetic
ggcggtcgcttcgtccaac

SEQ ID NO: 20349 - DNA, 19 bp, Artificial Sequence
  Synthetic
cgctgtgggtgtcggtcag

SEQ ID NO: 20350 - DNA, 21 bp, Artificial Sequence
  Synthetic
ggttcgatcatcagcgtgccg

SEQ ID NO: 20351 - DNA, 19 bp, Artificial Sequence
  Synthetic
cgcgagagtacggatgcgc

SEQ ID NO: 20352 - DNA, 19 bp, Artificial Sequence
  Synthetic
agacaagggtgcggcagcc

SEQ ID NO: 20353 - DNA, 19 bp, Artificial Sequence
  Synthetic
gcgcagggacgcatcgtta

SEQ ID NO: 20354 - DNA, 20 bp, Artificial Sequence
  Synthetic
ccacacaagccatcctgccc

SEQ ID NO: 20355 - DNA, 19 bp, Artificial Sequence
  Synthetic
agcgcacacccaaacctgg

SEQ ID NO: 20356 - DNA, 20 bp, Artificial Sequence
  Synthetic
aagtcatcgacaacgcggcg

SEQ ID NO: 20357 - DNA, 20 bp, Artificial Sequence
  Synthetic
tgggcttgaaagtcgtgcgc

SEQ ID NO: 20358 - DNA, 21 bp, Artificial Sequence
  Synthetic
gcctgtaccgttgccgtcatg

SEQ ID NO: 20359 - DNA, 22 bp, Artificial Sequence
  Synthetic
gcccaagcccttatcctgcaaa

SEQ ID NO: 20360 - DNA, 19 bp, Artificial Sequence
  Synthetic
tgggacgaaacccggggct

SEQ ID NO: 20361 - DNA, 19 bp, Artificial Sequence
  Synthetic
ggcggacgcgttgaaggtg

SEQ ID NO: 20362 - DNA, 18 bp, Artificial Sequence
  Synthetic
aaggcgtggctttcggcg

SEQ ID NO: 20363 - DNA, 19 bp, Artificial Sequence
  Synthetic
agccgtgcgctatacccgc

SEQ ID NO: 20364 - DNA, 20 bp, Artificial Sequence
  Synthetic
tgaatggttgtggcagcccg

SEQ ID NO: 20365 - DNA, 20 bp, Artificial Sequence
  Synthetic
cggcttgggacattgcctcc

SEQ ID NO: 20366 - DNA, 20 bp, Artificial Sequence
  Synthetic
gcggtcggacacgtcaaact

SEQ ID NO: 20367 - DNA, 18 bp, Artificial Sequence
  Synthetic
cccggtgccgtgcagatt

SEQ ID NO: 20368 - DNA, 19 bp, Artificial Sequence
  Synthetic
agccggggcggaagtttcc

SEQ ID NO: 20369 - DNA, 21 bp, Artificial Sequence
  Synthetic
gcgcagacgttttctgacggc

SEQ ID NO: 20370 - DNA, 19 bp, Artificial Sequence
  Synthetic
gccaatatcggtgcggcgc

SEQ ID NO: 20371 - DNA, 22 bp, Artificial Sequence
  Synthetic
agcagcagctacaatgtcggac

SEQ ID NO: 20372 - DNA, 20 bp, Artificial Sequence
  Synthetic
cctcgaatggggcggacagt

SEQ ID NO: 20373 - DNA, 20 bp, Artificial Sequence
  Synthetic
cgacatccgcaccgcattgg

SEQ ID NO: 20374 - DNA, 22 bp, Artificial Sequence
  Synthetic
gaccgaagaccaaggcttcgtt

SEQ ID NO: 20375 - DNA, 21 bp, Artificial Sequence
  Synthetic
ccgaaacctatatcggggcgc

SEQ ID NO: 20376 - DNA, 20 bp, Artificial Sequence
  Synthetic
ccaaacatcccgccaaaggc

SEQ ID NO: 20377 - DNA, 21 bp, Artificial Sequence
  Synthetic
ccgcttcctcgacagcgaaag

SEQ ID NO: 20378 - DNA, 21 bp, Artificial Sequence
  Synthetic
cgacggtcggagaatgggtgg

SEQ ID NO: 20379 - DNA, 21 bp, Artificial Sequence
  Synthetic
cctggaagcaggcggtagacc

SEQ ID NO: 20380 - DNA, 20 bp, Artificial Sequence
  Synthetic
gggcaacgtcatcgaagcgg

SEQ ID NO: 20381 - DNA, 20 bp, Artificial Sequence
  Synthetic
tttggggcggcaagttcgtg

SEQ ID NO: 20382 - DNA, 21 bp, Artificial Sequence
  Synthetic
gccgctattccgacgaatggc

SEQ ID NO: 20383 - DNA, 20 bp, Artificial Sequence
  Synthetic
atgcggcaggtttgatggat

SEQ ID NO: 20384 - DNA, 21 bp, Artificial Sequence
  Synthetic
gcgttttgctggcggatgtag

SEQ ID NO: 20385 - DNA, 18 bp, Artificial Sequence
  Synthetic
tcgcgcaaaagcccggag

SEQ ID NO: 20386 - DNA, 21 bp, Artificial Sequence
  Synthetic
ccgaatacgccgacaccgacg

SEQ ID NO: 20387 - DNA, 20 bp, Artificial Sequence
  Synthetic
gggcaacataagcggcggac

SEQ ID NO: 20388 - DNA, 22 bp, Artificial Sequence
  Synthetic
cgccgtctttgcctacacccat

SEQ ID NO: 20389 - DNA, 21 bp, Artificial Sequence
  Synthetic
accacggcaggttacggattg

SEQ ID NO: 20390 - DNA, 22 bp, Artificial Sequence
  Synthetic
gttccgctgattaaggccttgc

SEQ ID NO: 20391 - DNA, 18 bp, Artificial Sequence
  Synthetic
ccgaaccgtgcctgctgt

SEQ ID NO: 20392 - DNA, 19 bp, Artificial Sequence
  Synthetic
cgccgaagaacagtccggt

SEQ ID NO: 20393 - DNA, 20 bp, Artificial Sequence
  Synthetic
tggcaatgctgtcttcgcgg

SEQ ID NO: 20394 - DNA, 19 bp, Artificial Sequence
  Synthetic
ttgtccgcacgaaccgccg

SEQ ID NO: 20395 - DNA, 18 bp, Artificial Sequence
  Synthetic
gcgcgctttggcaaacga

SEQ ID NO: 20396 - DNA, 18 bp, Artificial Sequence
  Synthetic
tgcccgcgccgattttgg

SEQ ID NO: 20397 - DNA, 22 bp, Artificial Sequence
  Synthetic
acagataacctgcggcggcaaa

SEQ ID NO: 20398 - DNA, 19 bp, Artificial Sequence
  Synthetic
gccttgccgaacgcgaacg

SEQ ID NO: 20399 - DNA, 20 bp, Artificial Sequence
  Synthetic
cgtgttgcacagccggatgg

SEQ ID NO: 20400 - DNA, 19 bp, Artificial Sequence
  Synthetic
agcagcgcgtctccatcgc

SEQ ID NO: 20401 - DNA, 21 bp, Artificial Sequence
  Synthetic
cgtcgtcgccgtagacatcaa

SEQ ID NO: 20402 - DNA, 22 bp, Artificial Sequence
  Synthetic
cccttctgccttctggacgaag

SEQ ID NO: 20403 - DNA, 22 bp, Artificial Sequence
  Synthetic
ccctgatcaacgccaaacgcta

SEQ ID NO: 20404 - DNA, 19 bp, Artificial Sequence
  Synthetic
tggcggaagagcagaccgt

SEQ ID NO: 20405 - DNA, 21 bp, Artificial Sequence
  Synthetic
gcaggcggcatggctttcaga

SEQ ID NO: 20406 - DNA, 20 bp, Artificial Sequence
  Synthetic
agcaggaagccgccgacttt

SEQ ID NO: 20407 - DNA, 19 bp, Artificial Sequence
  Synthetic
cgaggcaaaccgcatccgc

SEQ ID NO: 20408 - DNA, 20 bp, Artificial Sequence
  Synthetic
ggcaaaactgcccgccacat

SEQ ID NO: 20409 - DNA, 22 bp, Artificial Sequence
  Synthetic
ggcgatttgctgctgaatcgga

SEQ ID NO: 20410 - DNA, 22 bp, Artificial Sequence
  Synthetic
gccttcttcgacttggctgtcg

SEQ ID NO: 20411 - DNA, 20 bp, Artificial Sequence
  Synthetic
tgctctacctggccgggttt

SEQ ID NO: 20412 - DNA, 22 bp, Artificial Sequence
  Synthetic
cacttgcccgcttttttgcagc

SEQ ID NO: 20413 - DNA, 22 bp, Artificial Sequence
  Synthetic
gatgttttcggggaacacggct

SEQ ID NO: 20414 - DNA, 19 bp, Artificial Sequence
  Synthetic
cggtcatcagggcggtgtc

SEQ ID NO: 20415 - DNA, 21 bp, Artificial Sequence
  Synthetic
gtaggtctcggtgtcatcgcc

SEQ ID NO: 20416 - DNA, 20 bp, Artificial Sequence
  Synthetic
acgtgattgccgaacagggc

SEQ ID NO: 20417 - DNA, 20 bp, Artificial Sequence
  Synthetic
aaagcaggtgccaaccgctt

SEQ ID NO: 20418 - DNA, 18 bp, Artificial Sequence
  Synthetic
acgccaccgacaccacca

SEQ ID NO: 20419 - DNA, 21 bp, Artificial Sequence
  Synthetic
ccgccgcgaaaaactggaaac

SEQ ID NO: 20420 - DNA, 21 bp, Artificial Sequence
  Synthetic
cggcgtatcgctcaaaatgcc

SEQ ID NO: 20421 - DNA, 18 bp, Artificial Sequence
  Synthetic
tgccgccgcattgctgac

SEQ ID NO: 20422 - DNA, 19 bp, Artificial Sequence
  Synthetic
caaaccgaaagcgcgggcc

SEQ ID NO: 20423 - DNA, 20 bp, Artificial Sequence
  Synthetic
ggcacaccaaaaatcatggc

SEQ ID NO: 20424 - DNA, 22 bp, Artificial Sequence
  Synthetic
gctgctgattatctgccgtaaa

SEQ ID NO: 20425 - DNA, 21 bp, Artificial Sequence
  Synthetic
cggtgtgccattggtagattt

SEQ ID NO: 20426 - DNA, 23 bp, Artificial Sequence
  Synthetic
gtcccacaattcaaaaccgtctt

SEQ ID NO: 20427 - DNA, 25 bp, Artificial Sequence
  Synthetic
ggctgtttttcaggttgcttaattt

SEQ ID NO: 20428 - DNA, 21 bp, Artificial Sequence
  Synthetic
tttgagcttgtcagcagccga

SEQ ID NO: 20429 - DNA, 23 bp, Artificial Sequence
  Synthetic
tgccaaacaccgacataatcatc

SEQ ID NO: 20430 - DNA, 25 bp, Artificial Sequence
  Synthetic
cgcttgtttacgagttttcaaacaa

SEQ ID NO: 20431 - DNA, 20 bp, Artificial Sequence
  Synthetic
gccctgccacaaacagattt

SEQ ID NO: 20432 - DNA, 24 bp, Artificial Sequence
  Synthetic
gtggcaatgaatggaatattgtcc

SEQ ID NO: 20433 - DNA, 21 bp, Artificial Sequence
  Synthetic
agactgttcccgataactcgc

SEQ ID NO: 20434 - DNA, 25 bp, Artificial Sequence
  Synthetic
gccttaatccaacaaaaaatgacga

SEQ ID NO: 20435 - DNA, 21 bp, Artificial Sequence
  Synthetic
agcgcgttattgttcaacagc

SEQ ID NO: 20436 - DNA, 22 bp, Artificial Sequence
  Synthetic
gtcggtgtgattgccgccatta

SEQ ID NO: 20437 - DNA, 19 bp, Artificial Sequence
  Synthetic
tatcgacctgcgccgccct

SEQ ID NO: 20438 - DNA, 24 bp, Artificial Sequence
  Synthetic
cagaaatcggttattgacgaagtg

SEQ ID NO: 20439 - DNA, 18 bp, Artificial Sequence
  Synthetic
tgcggtgatgtcggcagg

SEQ ID NO: 20440 - DNA, 19 bp, Artificial Sequence
  Synthetic
ggcgcgtaccgttttggca

SEQ ID NO: 20441 - DNA, 19 bp, Artificial Sequence
  Synthetic
gcgtcggcgtggatggaga

SEQ ID NO: 20442 - DNA, 22 bp, Artificial Sequence
  Synthetic
gcttctcttcggcaggattgga

SEQ ID NO: 20443 - DNA, 19 bp, Artificial Sequence
  Synthetic
aggtcgaggcgggcgaaac

SEQ ID NO: 20444 - DNA, 19 bp, Artificial Sequence
  Synthetic
cgacgcattgggcaagccc

SEQ ID NO: 20445 - DNA, 22 bp, Artificial Sequence
  Synthetic
acgccgaacaaatcaggcagtt

SEQ ID NO: 20446 - DNA, 19 bp, Artificial Sequence
  Synthetic
atggatgggcggatggcgg

SEQ ID NO: 20447 - DNA, 22 bp, Artificial Sequence
  Synthetic
gcggcaatcaagcatttcggac

SEQ ID NO: 20448 - DNA, 19 bp, Artificial Sequence
  Synthetic
tgcccccgttttggctgcc

SEQ ID NO: 20449 - DNA, 22 bp, Artificial Sequence
  Synthetic
cgcaccggcattcacatctgtt

SEQ ID NO: 20450 - DNA, 22 bp, Artificial Sequence
  Synthetic
tcttgatgggcgtcttgcgtat

SEQ ID NO: 20451 - DNA, 21 bp, Artificial Sequence
  Synthetic
cggggaatcagaagcggtagc

SEQ ID NO: 20452 - DNA, 18 bp, Artificial Sequence
  Synthetic
acgcggggtttgggcaac

SEQ ID NO: 20453 - DNA, 20 bp, Artificial Sequence
  Synthetic
cccaaagccgttcccgttgc

SEQ ID NO: 20454 - DNA, 22 bp, Artificial Sequence
  Synthetic
acacgccgtcgatttggtgatt

SEQ ID NO: 20455 - DNA, 19 bp, Artificial Sequence
  Synthetic
tttcccggcctgcccaacg

SEQ ID NO: 20456 - DNA, 20 bp, Artificial Sequence
  Synthetic
gaagtgcgcttcgggcatcc

SEQ ID NO: 20457 - DNA, 20 bp, Artificial Sequence
  Synthetic
ccgattacaccgcctccagc

SEQ ID NO: 20458 - DNA, 18 bp, Artificial Sequence
  Synthetic
tgcgtccgccggcgattt

SEQ ID NO: 20459 - DNA, 22 bp, Artificial Sequence
  Synthetic
ccaaatgcctgacggtgcagtg

SEQ ID NO: 20460 - DNA, 21 bp, Artificial Sequence
  Synthetic
tcgaatttttcggcgagggcg

SEQ ID NO: 20461 - DNA, 20 bp, Artificial Sequence
  Synthetic
gcggtttggaagcggaaacc

SEQ ID NO: 20462 - DNA, 22 bp, Artificial Sequence
  Synthetic
cccgatacggttgaggtcgtcc

SEQ ID NO: 20463 - DNA, 22 bp, Artificial Sequence
  Synthetic
gcgacatcaagttgccaaacgg

SEQ ID NO: 20464 - DNA, 19 bp, Artificial Sequence
  Synthetic
tcgggcgcggagagtggtt

SEQ ID NO: 20465 - DNA, 18 bp, Artificial Sequence
  Synthetic
gatgcgccgcaaatccgc

SEQ ID NO: 20466 - DNA, 16 bp, Artificial Sequence
  Synthetic
aaaacggcgggcgcgt

SEQ ID NO: 20467 - DNA, 21 bp, Artificial Sequence
  Synthetic
ccgcaaacccacctcgtcaaa

SEQ ID NO: 20468 - DNA, 22 bp, Artificial Sequence
  Synthetic
tgagtttgaacgatgtggcgga

SEQ ID NO: 20469 - DNA, 22 bp, Artificial Sequence
  Synthetic
gggcgcggataaagtcgtcgta

SEQ ID NO: 20470 - DNA, 20 bp, Artificial Sequence
  Synthetic
ccgtcaacaaggcgcaacag

SEQ ID NO: 20471 - DNA, 18 bp, Artificial Sequence
  Synthetic
agcgaacagcggcgcaac

SEQ ID NO: 20472 - DNA, 21 bp, Artificial Sequence
  Synthetic
gcacacgtcatcggatttacc

SEQ ID NO: 20473 - DNA, 22 bp, Artificial Sequence
  Synthetic
gcgcacacgaattaagcatcga

SEQ ID NO: 20474 - DNA, 21 bp, Artificial Sequence
  Synthetic
tgaagaaaaggcgggcgagcc

SEQ ID NO: 20475 - DNA, 22 bp, Artificial Sequence
  Synthetic
tgccgtctgaaacacattaagg

SEQ ID NO: 20476 - DNA, 22 bp, Artificial Sequence
  Synthetic
ccgttttggaacgcgtcatcgc

SEQ ID NO: 20477 - DNA, 21 bp, Artificial Sequence
  Synthetic
cggaaatgccgttgccttcgt

SEQ ID NO: 20478 - DNA, 19 bp, Artificial Sequence
  Synthetic
tcgcgcacttcggcaatgg

SEQ ID NO: 20479 - DNA, 21 bp, Artificial Sequence
  Synthetic
ggtttgttcggcaggtttggc

SEQ ID NO: 20480 - DNA, 19 bp, Artificial Sequence
  Synthetic
gttgatcaggcgcgccact

SEQ ID NO: 20481 - DNA, 20 bp, Artificial Sequence
  Synthetic
ccgagtaggaagccagcggg

SEQ ID NO: 20482 - DNA, 21 bp, Artificial Sequence
  Synthetic
tccccagttgtggtagcggta

SEQ ID NO: 20483 - DNA, 19 bp, Artificial Sequence
  Synthetic
tgccgctgtgggtcagtgc

SEQ ID NO: 20484 - DNA, 20 bp, Artificial Sequence
  Synthetic
gctgccggtggcgaaggtaa

SEQ ID NO: 20485 - DNA, 22 bp, Artificial Sequence
  Synthetic
cctcgcctttcagacgatggat

SEQ ID NO: 20486 - DNA, 20 bp, Artificial Sequence
  Synthetic
ggcggcttcgtcgcacaaac

SEQ ID NO: 20487 - DNA, 19 bp, Artificial Sequence
  Synthetic
tgccgacggacgaacgctg

SEQ ID NO: 20488 - DNA, 19 bp, Artificial Sequence
  Synthetic
cgcacgcgaacagggcttg

SEQ ID NO: 20489 - DNA, 18 bp, Artificial Sequence
  Synthetic
attgccgccgcccaacaa

SEQ ID NO: 20490 - DNA, 21 bp, Artificial Sequence
  Synthetic
tgtttgtgctggcgtttgtgc

SEQ ID NO: 20491 - DNA, 22 bp, Artificial Sequence
  Synthetic
gaacaaaagctgctccgtcccg

SEQ ID NO: 20492 - DNA, 22 bp, Artificial Sequence
  Synthetic
tctcaatctgcaggtgctgaaa

SEQ ID NO: 20493 - DNA, 20 bp, Artificial Sequence
  Synthetic
gtctgtgcctgtgtcctgca

SEQ ID NO: 20494 - DNA, 20 bp, Artificial Sequence
  Synthetic
ggcaatcccgccgatgttca

SEQ ID NO: 20495 - DNA, 19 bp, Artificial Sequence
  Synthetic
cggagagcgcgtcggattt

SEQ ID NO: 20496 - DNA, 22 bp, Artificial Sequence
  Synthetic
cacagtttcggcaaggctttcc

SEQ ID NO: 20497 - DNA, 20 bp, Artificial Sequence
  Synthetic
cgtattgaccgcaccggcag

SEQ ID NO: 20498 - DNA, 19 bp, Artificial Sequence
  Synthetic
ctgggtgtcggctacctgc

SEQ ID NO: 20499 - DNA, 19 bp, Artificial Sequence
  Synthetic
gcaaccatggcctcgaccg

SEQ ID NO: 20500 - DNA, 22 bp, Artificial Sequence
  Synthetic
ggcaggcactttaatcatggcg

SEQ ID NO: 20501 - DNA, 22 bp, Artificial Sequence
  Synthetic
ggcgacaacttggatatgggca

SEQ ID NO: 20502 - DNA, 20 bp, Artificial Sequence
  Synthetic
aaaagctgcacgcggtttgc

SEQ ID NO: 20503 - DNA, 22 bp, Artificial Sequence
  Synthetic
cgggcgaggttttgggtgtaac

SEQ ID NO: 20504 - DNA, 20 bp, Artificial Sequence
  Synthetic
cgcccaaacactgctgcaaa

SEQ ID NO: 20505 - DNA, 22 bp, Artificial Sequence
  Synthetic
ttggtgcaacgcctctacacat

SEQ ID NO: 20506 - DNA, 22 bp, Artificial Sequence
  Synthetic
acggctacaacgaggtcaacct

SEQ ID NO: 20507 - DNA, 20 bp, Artificial Sequence
  Synthetic
ccgacggataagcgacgtgc

SEQ ID NO: 20508 - DNA, 21 bp, Artificial Sequence
  Synthetic
tatgcgggctttttccacgcc

SEQ ID NO: 20509 - DNA, 19 bp, Artificial Sequence
  Synthetic
tggacgcttggcaaccggc

SEQ ID NO: 20510 - DNA, 21 bp, Artificial Sequence
  Synthetic
gcgaatgtctgccatgttcgg

SEQ ID NO: 20511 - DNA, 19 bp, Artificial Sequence
  Synthetic
cgctcctgaccgccctgtt

SEQ ID NO: 20512 - DNA, 22 bp, Artificial Sequence
  Synthetic
gtacaagtaatcccgcgtcccg

SEQ ID NO: 20513 - DNA, 19 bp, Artificial Sequence
  Synthetic
ccgacaaacaggccgcacc

SEQ ID NO: 20514 - DNA, 19 bp, Artificial Sequence
  Synthetic
agggccgcaccaaatcggc

SEQ ID NO: 20515 - DNA, 23 bp, Artificial Sequence
  Synthetic
gccattaaaagaccagggcattc

SEQ ID NO: 20516 - DNA, 22 bp, Artificial Sequence
  Synthetic
tgctgattgtcgtattcggcgg

SEQ ID NO: 20517 - DNA, 20 bp, Artificial Sequence
  Synthetic
agtcgcgcatgtgcctgaaa

SEQ ID NO: 20518 - DNA, 22 bp, Artificial Sequence
  Synthetic
ggaagaaacggcaatgacggct

SEQ ID NO: 20519 - DNA, 21 bp, Artificial Sequence
  Synthetic
gtggacgatgcctacgaagcc

SEQ ID NO: 20520 - DNA, 21 bp, Artificial Sequence
  Synthetic
tgccgcaactgccacttcaaa

SEQ ID NO: 20521 - DNA, 20 bp, Artificial Sequence
  Synthetic
caggttcggtcgtcgtgtcc

SEQ ID NO: 20522 - DNA, 22 bp, Artificial Sequence
  Synthetic
gccgcacccaccatcattgaag

SEQ ID NO: 20523 - DNA, 19 bp, Artificial Sequence
  Synthetic
ggtgggcggacgctattcc

SEQ ID NO: 20524 - DNA, 20 bp, Artificial Sequence
  Synthetic
cgctgcatacggctttgcgc

SEQ ID NO: 20525 - DNA, 19 bp, Artificial Sequence
  Synthetic
ccgattccgccggtcagtc

SEQ ID NO: 20526 - DNA, 24 bp, Artificial Sequence
  Synthetic
ccgcgtacatactcaactccataa

SEQ ID NO: 20527 - DNA, 20 bp, Artificial Sequence
  Synthetic
cccgaggttgaagccgtgtg

SEQ ID NO: 20528 - DNA, 19 bp, Artificial Sequence
  Synthetic
gcacacatggcggctgcac

SEQ ID NO: 20529 - DNA, 21 bp, Artificial Sequence
  Synthetic
cgaaaagcgtgccgccttgtg

SEQ ID NO: 20530 - DNA, 21 bp, Artificial Sequence
  Synthetic
gcgttcttcccactgctgcaa

SEQ ID NO: 20531 - DNA, 25 bp, Artificial Sequence
  Synthetic
gcttgaaaaaacgtgttttaaggga

SEQ ID NO: 20532 - DNA, 22 bp, Artificial Sequence
  Synthetic
cggaaaaaatgtcggggatggc

SEQ ID NO: 20533 - DNA, 20 bp, Artificial Sequence
  Synthetic
cctgtccggcatccagacag

SEQ ID NO: 20534 - DNA, 22 bp, Artificial Sequence
  Synthetic
cgcatcatcagcgtgttgtcgg

SEQ ID NO: 20535 - DNA, 22 bp, Artificial Sequence
  Synthetic
ggcagaaaaaatccgcgctcaa

SEQ ID NO: 20536 - DNA, 19 bp, Artificial Sequence
  Synthetic
cgaagtcagcaccgcgcct

SEQ ID NO: 20537 - DNA, 19 bp, Artificial Sequence
  Synthetic
gccattcgatgacggcggc

SEQ ID NO: 20538 - DNA, 19 bp, Artificial Sequence
  Synthetic
ttgccgccgcgttgttcta

SEQ ID NO: 20539 - DNA, 20 bp, Artificial Sequence
  Synthetic
tttgagtgccgacgagaacc

SEQ ID NO: 20540 - DNA, 22 bp, Artificial Sequence
  Synthetic
gccgccgatttggatgtcactt

SEQ ID NO: 20541 - DNA, 22 bp, Artificial Sequence
  Synthetic
cgtcatcctgcccaaacttgcc

SEQ ID NO: 20542 - DNA, 21 bp, Artificial Sequence
  Synthetic
tcggtagggctgaacattgcc

SEQ ID NO: 20543 - DNA, 21 bp, Artificial Sequence
  Synthetic
gctcaaacccggacaggtcgg

SEQ ID NO: 20544 - DNA, 20 bp, Artificial Sequence
  Synthetic
cggcgcggaaagtaccatcc

SEQ ID NO: 20545 - DNA, 22 bp, Artificial Sequence
  Synthetic
cattgccgaaaaagtccgccag

SEQ ID NO: 20546 - DNA, 19 bp, Artificial Sequence
  Synthetic
gtcaaagctgccgccacgg

SEQ ID NO: 20547 - DNA, 18 bp, Artificial Sequence
  Synthetic
accgaacaaggcggacgg

SEQ ID NO: 20548 - DNA, 19 bp, Artificial Sequence
  Synthetic
accctcggttcgacctgcc

SEQ ID NO: 20549 - DNA, 20 bp, Artificial Sequence
  Synthetic
tttgcaccctgcggcaaatg

SEQ ID NO: 20550 - DNA, 22 bp, Artificial Sequence
  Synthetic
cggtgtttgccgcgtatcgaat

SEQ ID NO: 20551 - DNA, 22 bp, Artificial Sequence
  Synthetic
gctttcgtcggagaggacggta

SEQ ID NO: 20552 - DNA, 21 bp, Artificial Sequence
  Synthetic
gctccctgcttagcggaacgg

SEQ ID NO: 20553 - DNA, 19 bp, Artificial Sequence
  Synthetic
gcgtttccggcccgaacag

SEQ ID NO: 20554 - DNA, 19 bp, Artificial Sequence
  Synthetic
gggcggcggtaaaggcgtt

SEQ ID NO: 20555 - DNA, 19 bp, Artificial Sequence
  Synthetic
tcttctgcaaccgcccgcg

SEQ ID NO: 20556 - DNA, 19 bp, Artificial Sequence
  Synthetic
ccattgccgccagttccca

SEQ ID NO: 20557 - DNA, 18 bp, Artificial Sequence
  Synthetic
tttgggcgcgcaccgtaa

SEQ ID NO: 20558 - DNA, 20 bp, Artificial Sequence
  Synthetic
ctgccactcgacgtgttcgc

SEQ ID NO: 20559 - DNA, 22 bp, Artificial Sequence
  Synthetic
cgttttttgcgggtgctggctt

SEQ ID NO: 20560 - DNA, 18 bp, Artificial Sequence
  Synthetic
agctggcggcaggtttcg

SEQ ID NO: 20561 - DNA, 22 bp, Artificial Sequence
  Synthetic
cgccattacctacgcgctgatg

SEQ ID NO: 20562 - DNA, 19 bp, Artificial Sequence
  Synthetic
gcattacggcgcgttggca

SEQ ID NO: 20563 - DNA, 20 bp, Artificial Sequence
  Synthetic
atcggcacaattcccgctgc

SEQ ID NO: 20564 - DNA, 20 bp, Artificial Sequence
  Synthetic
gacggaaggggagggcaaag

SEQ ID NO: 20565 - DNA, 22 bp, Artificial Sequence
  Synthetic
agcgcgatgatttggatgctga

SEQ ID NO: 20566 - DNA, 20 bp, Artificial Sequence
  Synthetic
aggggagggcgttcagacgg

SEQ ID NO: 20567 - DNA, 19 bp, Artificial Sequence
  Synthetic
tttccgcacacgcccagcc

SEQ ID NO: 20568 - DNA, 21 bp, Artificial Sequence
  Synthetic
ccgtgcgcgaaaaaagcaacc

SEQ ID NO: 20569 - DNA, 19 bp, Artificial Sequence
  Synthetic
agtccggatgccaagccgc

SEQ ID NO: 20570 - DNA, 18 bp, Artificial Sequence
  Synthetic
gtgtgggcggcgttgttg

SEQ ID NO: 20571 - DNA, 22 bp, Artificial Sequence
  Synthetic
tgtgtaatcacgatgccgccga

SEQ ID NO: 20572 - DNA, 20 bp, Artificial Sequence
  Synthetic
gcgggattggtttcggtggg

SEQ ID NO: 20573 - DNA, 20 bp, Artificial Sequence
  Synthetic
gcatattggtgcgcggatcg

SEQ ID NO: 20574 - DNA, 20 bp, Artificial Sequence
  Synthetic
gcttcggtctcggaagcagg

SEQ ID NO: 20575 - DNA, 20 bp, Artificial Sequence
  Synthetic
gtcccaaaactggctgccca

SEQ ID NO: 20576 - DNA, 21 bp, Artificial Sequence
  Synthetic
caagaaatcctcgccgtcggc

SEQ ID NO: 20577 - DNA, 18 bp, Artificial Sequence
  Synthetic
tccacgaaaccggccacg

SEQ ID NO: 20578 - DNA, 19 bp, Artificial Sequence
  Synthetic
ggcatcaccgaacgcgtcg

SEQ ID NO: 20579 - DNA, 22 bp, Artificial Sequence
  Synthetic
ccgccggagattttgtagctgt

SEQ ID NO: 20580 - DNA, 20 bp, Artificial Sequence
  Synthetic
cgttggtcggggcggtaacg

SEQ ID NO: 20581 - DNA, 19 bp, Artificial Sequence
  Synthetic
acgccgacttcgccctgac

SEQ ID NO: 20582 - DNA, 18 bp, Artificial Sequence
  Synthetic
gggctttttcggcggcga

SEQ ID NO: 20583 - DNA, 21 bp, Artificial Sequence
  Synthetic
gcttccgatggcggcttacgg

SEQ ID NO: 20584 - DNA, 19 bp, Artificial Sequence
  Synthetic
agacggagttggggcagcc

SEQ ID NO: 20585 - DNA, 21 bp, Artificial Sequence
  Synthetic
tgcgttcgttgcgtttgaggt

SEQ ID NO: 20586 - DNA, 21 bp, Artificial Sequence
  Synthetic
cggaagttgtcgcgcattgtg

SEQ ID NO: 20587 - DNA, 21 bp, Artificial Sequence
  Synthetic
ggtcatccgatggcacagctt

SEQ ID NO: 20588 - DNA, 19 bp, Artificial Sequence
  Synthetic
cgcgtgcgtttgaggtggt

SEQ ID NO: 20589 - DNA, 21 bp, Artificial Sequence
  Synthetic
ccaaagcgggtttcaggcgtt

SEQ ID NO: 20590 - DNA, 21 bp, Artificial Sequence
  Synthetic
caggaaggtggcgacatcgac

SEQ ID NO: 20591 - DNA, 17 bp, Artificial Sequence
  Synthetic
tcgttgcggctgccgtt

SEQ ID NO: 20592 - DNA, 20 bp, Artificial Sequence
  Synthetic
agcggatcggcaatgctgac

SEQ ID NO: 20593 - DNA, 19 bp, Artificial Sequence
  Synthetic
ttcccgtgcctgttccgcc

SEQ ID NO: 20594 - DNA, 19 bp, Artificial Sequence
  Synthetic
accgcgctcgatttggcgg

SEQ ID NO: 20595 - DNA, 22 bp, Artificial Sequence
  Synthetic
ccgatgtggattttgccggaca

SEQ ID NO: 20596 - DNA, 22 bp, Artificial Sequence
  Synthetic
cggcgtaacaaatcgtgcaggt

SEQ ID NO: 20597 - DNA, 18 bp, Artificial Sequence
  Synthetic
acgctgtgctgggtgcga

SEQ ID NO: 20598 - DNA, 22 bp, Artificial Sequence
  Synthetic
gacggtaaatttggcggcttcg

SEQ ID NO: 20599 - DNA, 20 bp, Artificial Sequence
  Synthetic
gcgccgatgaggacgttcat

SEQ ID NO: 20600 - DNA, 22 bp, Artificial Sequence
  Synthetic
gaccatgcgtgcgttgatttgg

SEQ ID NO: 20601 - DNA, 19 bp, Artificial Sequence
  Synthetic
gccggatttcgctgccgtt

SEQ ID NO: 20602 - DNA, 22 bp, Artificial Sequence
  Synthetic
cgcatattggtgctgagccaga

SEQ ID NO: 20603 - DNA, 21 bp, Artificial Sequence
  Synthetic
cgcggatggctttctcgactt

SEQ ID NO: 20604 - DNA, 19 bp, Artificial Sequence
  Synthetic
tgccgctgaaatacgcgca

SEQ ID NO: 20605 - DNA, 22 bp, Artificial Sequence
  Synthetic
cgactttgacgggcaggtagtt

SEQ ID NO: 20606 - DNA, 20 bp, Artificial Sequence
  Synthetic
cgatgtgtccgaccgtaccg

SEQ ID NO: 20607 - DNA, 19 bp, Artificial Sequence
  Synthetic
accactgcagtcgccacgc

SEQ ID NO: 20608 - DNA, 21 bp, Artificial Sequence
  Synthetic
tcgtgaaatactcgcgcgtcc

SEQ ID NO: 20609 - DNA, 19 bp, Artificial Sequence
  Synthetic
gtttcggggaaacgggcga

SEQ ID NO: 20610 - DNA, 25 bp, Artificial Sequence
  Synthetic
gctactcgtgctaaattgatttgtg

SEQ ID NO: 20611 - DNA, 23 bp, Artificial Sequence
  Synthetic
ggagttaaccatggctgaacaaa

SEQ ID NO: 20612 - DNA, 20 bp, Artificial Sequence
  Synthetic
agctgctgttcggtgttcaa

SEQ ID NO: 20613 - DNA, 25 bp, Artificial Sequence
  Synthetic
gcaaacagatttaaggcaaaacaac

SEQ ID NO: 20614 - DNA, 19 bp, Artificial Sequence
  Synthetic
aaagcctcgccctcctgcc

SEQ ID NO: 20615 - DNA, 20 bp, Artificial Sequence
  Synthetic
cggttacctgacccgtcgtc

SEQ ID NO: 20616 - DNA, 21 bp, Artificial Sequence
  Synthetic
caacctctgggcggtaaagct

SEQ ID NO: 20617 - DNA, 22 bp, Artificial Sequence
  Synthetic
cgataccgatgccgtctgaacc

SEQ ID NO: 20618 - DNA, 19 bp, Artificial Sequence
  Synthetic
ggcagaaatggggcgcgaa

SEQ ID NO: 20619 - DNA, 22 bp, Artificial Sequence
  Synthetic
cgtgcgggttcgactttaacct

SEQ ID NO: 20620 - DNA, 20 bp, Artificial Sequence
  Synthetic
gcaaaaagaagccgcgtggg

SEQ ID NO: 20621 - DNA, 20 bp, Artificial Sequence
  Synthetic
ccagcggctgtatcgaacgg

SEQ ID NO: 20622 - DNA, 19 bp, Artificial Sequence
  Synthetic
tgtgggagtgggcgaacgc

SEQ ID NO: 20623 - DNA, 21 bp, Artificial Sequence
  Synthetic
ggcggtttcggcggaacacat

SEQ ID NO: 20624 - DNA, 19 bp, Artificial Sequence
  Synthetic
gtcgtggtcggtgctggtt

SEQ ID NO: 20625 - DNA, 18 bp, Artificial Sequence
  Synthetic
gcgcgcggtcgttgatgt

SEQ ID NO: 20626 - DNA, 25 bp, Artificial Sequence
  Synthetic
gctttctgttgaaatggagtctgat

SEQ ID NO: 20627 - DNA, 18 bp, Artificial Sequence
  Synthetic
acgtggtgaaagccggcg

SEQ ID NO: 20628 - DNA, 19 bp, Artificial Sequence
  Synthetic
atccatcggcgtggggcag

SEQ ID NO: 20629 - DNA, 20 bp, Artificial Sequence
  Synthetic
ggaatgcccgaaagcagcct

SEQ ID NO: 20630 - DNA, 20 bp, Artificial Sequence
  Synthetic
ggctggacgatacgcagctg

SEQ ID NO: 20631 - DNA, 22 bp, Artificial Sequence
  Synthetic
tgcgatgaagctgtggaaggaa

SEQ ID NO: 20632 - DNA, 21 bp, Artificial Sequence
  Synthetic
cgaccttggacggcaaagtca

SEQ ID NO: 20633 - DNA, 20 bp, Artificial Sequence
  Synthetic
aaagcccttccttcgacagc

SEQ ID NO: 20634 - DNA, 19 bp, Artificial Sequence
  Synthetic
cagccgttacctcggggga

SEQ ID NO: 20635 - DNA, 22 bp, Artificial Sequence
  Synthetic
tccacgatacggtcgacggttt

SEQ ID NO: 20636 - DNA, 21 bp, Artificial Sequence
  Synthetic
ccatactttccctgctgcgga

SEQ ID NO: 20637 - DNA, 19 bp, Artificial Sequence
  Synthetic
gggttcgcctagctgccag

SEQ ID NO: 20638 - DNA, 21 bp, Artificial Sequence
  Synthetic
aggatgatggcggtgctgtac

SEQ ID NO: 20639 - DNA, 19 bp, Artificial Sequence
  Synthetic
ggtggcggatgtcgggact

SEQ ID NO: 20640 - DNA, 21 bp, Artificial Sequence
  Synthetic
acgcctgattcgaggttcagc

SEQ ID NO: 20641 - DNA, 19 bp, Artificial Sequence
  Synthetic
agtacggtgccggcgatgc

SEQ ID NO: 20642 - DNA, 21 bp, Artificial Sequence
  Synthetic
ggagatgtagccggtcagggc

SEQ ID NO: 20643 - DNA, 19 bp, Artificial Sequence
  Synthetic
tgcggagggtgccgagttc

SEQ ID NO: 20644 - DNA, 19 bp, Artificial Sequence
  Synthetic
ttccctttgagccggggcg

SEQ ID NO: 20645 - DNA, 22 bp, Artificial Sequence
  Synthetic
cgcgctgttctttgaacgacga

SEQ ID NO: 20646 - DNA, 20 bp, Artificial Sequence
  Synthetic
atcaatacgccggcgcaggc

SEQ ID NO: 20647 - DNA, 21 bp, Artificial Sequence
  Synthetic
ggcaacgtcggcgatgtcttt

SEQ ID NO: 20648 - DNA, 21 bp, Artificial Sequence
  Synthetic
cttcggcacactgcttaccct

SEQ ID NO: 20649 - DNA, 22 bp, Artificial Sequence
  Synthetic
ggcttcgttggggatggagatt

SEQ ID NO: 20650 - DNA, 20 bp, Artificial Sequence
  Synthetic
tttccccgaaaccctgccag

SEQ ID NO: 20651 - DNA, 19 bp, Artificial Sequence
  Synthetic
aagtcggcgcgggcaaagg

SEQ ID NO: 20652 - DNA, 20 bp, Artificial Sequence
  Synthetic
tccacaggtttgttcaagcc

SEQ ID NO: 20653 - DNA, 20 bp, Artificial Sequence
  Synthetic
tctgcaatctgttccgcacg

SEQ ID NO: 20654 - DNA, 21 bp, Artificial Sequence
  Synthetic
gcctgttttaatcggatcggt

SEQ ID NO: 20655 - DNA, 25 bp, Artificial Sequence
  Synthetic
cctttttttcaaatgcgccaactta

SEQ ID NO: 20656 - DNA, 20 bp, Artificial Sequence
  Synthetic
ccgtcggcatcaccctcatc

SEQ ID NO: 20657 - DNA, 21 bp, Artificial Sequence
  Synthetic
gcgcggtgttcgacaaatacc

SEQ ID NO: 20658 - DNA, 20 bp, Artificial Sequence
  Synthetic
agcctcccttcccgacttgg

SEQ ID NO: 20659 - DNA, 21 bp, Artificial Sequence
  Synthetic
cgggcaggctttgggtttgaa

SEQ ID NO: 20660 - DNA, 19 bp, Artificial Sequence
  Synthetic
tcaagggcggccgcctttc

SEQ ID NO: 20661 - DNA, 22 bp, Artificial Sequence
  Synthetic
agctgtttaaagaccgcctgct

SEQ ID NO: 20662 - DNA, 20 bp, Artificial Sequence
  Synthetic
aaatcccgtcctggttcggc

SEQ ID NO: 20663 - DNA, 22 bp, Artificial Sequence
  Synthetic
cgcgcaggttatttcttcacgc

SEQ ID NO: 20664 - DNA, 21 bp, Artificial Sequence
  Synthetic
cccggctcggatgtcgatttg

SEQ ID NO: 20665 - DNA, 19 bp, Artificial Sequence
  Synthetic
tttcggcagcaccccttcc

SEQ ID NO: 20666 - DNA, 23 bp, Artificial Sequence
  Synthetic
tgatggagcacctactagtatgg

SEQ ID NO: 20667 - DNA, 19 bp, Artificial Sequence
  Synthetic
caaaccgcctcgcgcaaac

SEQ ID NO: 20668 - DNA, 21 bp, Artificial Sequence
  Synthetic
ccagcaggttgccgaaaatgc

SEQ ID NO: 20669 - DNA, 20 bp, Artificial Sequence
  Synthetic
cccaacccgaacaccaccac

SEQ ID NO: 20670 - DNA, 22 bp, Artificial Sequence
  Synthetic
tgcgccaaaacaaccaaaccaa

SEQ ID NO: 20671 - DNA, 19 bp, Artificial Sequence
  Synthetic
gcaccgcccgcattcagga

SEQ ID NO: 20672 - DNA, 19 bp, Artificial Sequence
  Synthetic
ctttggcgaggcagacgcg

SEQ ID NO: 20673 - DNA, 19 bp, Artificial Sequence
  Synthetic
gggtggatttgccggcgtt

SEQ ID NO: 20674 - DNA, 21 bp, Artificial Sequence
  Synthetic
gtgtttgaggaagcggtggcc

SEQ ID NO: 20675 - DNA, 21 bp, Artificial Sequence
  Synthetic
cgcggttgctccaccatgtat

SEQ ID NO: 20676 - DNA, 19 bp, Artificial Sequence
  Synthetic
gcggcgaatacatcagcgc

SEQ ID NO: 20677 - DNA, 20 bp, Artificial Sequence
  Synthetic
gcgggcgcgaaaaatatgcg

SEQ ID NO: 20678 - DNA, 19 bp, Artificial Sequence
  Synthetic
aagttgccgccgccgatat

SEQ ID NO: 20679 - DNA, 20 bp, Artificial Sequence
  Synthetic
cgttgagctgctgcggcttc

SEQ ID NO: 20680 - DNA, 22 bp, Artificial Sequence
  Synthetic
agcgaacccaactcatactgcg

SEQ ID NO: 20681 - DNA, 21 bp, Artificial Sequence
  Synthetic
cacggaaaccgacctgtcgtc

SEQ ID NO: 20682 - DNA, 19 bp, Artificial Sequence
  Synthetic
tatgcgccccgccgaatcc

SEQ ID NO: 20683 - DNA, 22 bp, Artificial Sequence
  Synthetic
caaacacggcaggcttctttcc

SEQ ID NO: 20684 - DNA, 19 bp, Artificial Sequence
  Synthetic
acaccgccgtctcacgcag

SEQ ID NO: 20685 - DNA, 19 bp, Artificial Sequence
  Synthetic
accccggctacatcgccag

SEQ ID NO: 20686 - DNA, 19 bp, Artificial Sequence
  Synthetic
atcccccgagcacaccagc

SEQ ID NO: 20687 - DNA, 19 bp, Artificial Sequence
  Synthetic
tgcaggaaaacggcagcct

SEQ ID NO: 20688 - DNA, 19 bp, Artificial Sequence
  Synthetic
tttcctggctgccgctggc

SEQ ID NO: 20689 - DNA, 18 bp, Artificial Sequence
  Synthetic
cagcacgggtacgctgct

SEQ ID NO: 20690 - DNA, 22 bp, Artificial Sequence
  Synthetic
ccagacgggcgaggtaaaccat

SEQ ID NO: 20691 - DNA, 20 bp, Artificial Sequence
  Synthetic
cgcggataggcgtttttgcg

SEQ ID NO: 20692 - DNA, 20 bp, Artificial Sequence
  Synthetic
ctgccgagcaggtctttggc

SEQ ID NO: 20693 - DNA, 22 bp, Artificial Sequence
  Synthetic
gccatacctttgctgttgccga

SEQ ID NO: 20694 - DNA, 18 bp, Artificial Sequence
  Synthetic
aaccggcatcgcccaacg

SEQ ID NO: 20695 - DNA, 19 bp, Artificial Sequence
  Synthetic
ggcaggctggcggtttacc

SEQ ID NO: 20696 - DNA, 22 bp, Artificial Sequence
  Synthetic
tgccattacgtcgtcgttgact

SEQ ID NO: 20697 - DNA, 20 bp, Artificial Sequence
  Synthetic
ttccaagttgcgttgggcgt

SEQ ID NO: 20698 - DNA, 21 bp, Artificial Sequence
  Synthetic
ggtcaggtgcaccatcagcag

SEQ ID NO: 20699 - DNA, 21 bp, Artificial Sequence
  Synthetic
tccgcacacacttccaaggtt

SEQ ID NO: 20700 - DNA, 21 bp, Artificial Sequence
  Synthetic
gccccatcatggttttgggct

SEQ ID NO: 20701 - DNA, 22 bp, Artificial Sequence
  Synthetic
gccgctgttcgaacgcaaatcc

SEQ ID NO: 20702 - DNA, 19 bp, Artificial Sequence
  Synthetic
agtctgcgcccaaatcggc

SEQ ID NO: 20703 - DNA, 20 bp, Artificial Sequence
  Synthetic
ttgccgcatcgaagttcggc

SEQ ID NO: 20704 - DNA, 25 bp, Artificial Sequence
  Synthetic
tgacatttttagaatgatgccgtct

SEQ ID NO: 20705 - DNA, 21 bp, Artificial Sequence
  Synthetic
gcggacgtgatggcgaaaatg

SEQ ID NO: 20706 - DNA, 22 bp, Artificial Sequence
  Synthetic
gccctcgccgaagtagtcgttg

SEQ ID NO: 20707 - DNA, 18 bp, Artificial Sequence
  Synthetic
cggacgcttgcagcacct

SEQ ID NO: 20708 - DNA, 18 bp, Artificial Sequence
  Synthetic
aattgcgcgtccggccag

SEQ ID NO: 20709 - DNA, 19 bp, Artificial Sequence
  Synthetic
cgtcaacgccgccaacgac

SEQ ID NO: 20710 - DNA, 18 bp, Artificial Sequence
  Synthetic
ccccgtgttgccgcaaac

SEQ ID NO: 20711 - DNA, 21 bp, Artificial Sequence
  Synthetic
gcaaaatcaaacgcgtgcgcc

SEQ ID NO: 20712 - DNA, 20 bp, Artificial Sequence
  Synthetic
acgcataccgccgacctttc

SEQ ID NO: 20713 - DNA, 19 bp, Artificial Sequence
  Synthetic
cctcggctgcgccaatttg

SEQ ID NO: 20714 - DNA, 22 bp, Artificial Sequence
  Synthetic
cggcaagcaggaaaaaaacgct

SEQ ID NO: 20715 - DNA, 18 bp, Artificial Sequence
  Synthetic
ctgccgcatctgtgccca

SEQ ID NO: 20716 - DNA, 20 bp, Artificial Sequence
  Synthetic
gtacgttccacgccgtttct

SEQ ID NO: 20717 - DNA, 19 bp, Artificial Sequence
  Synthetic
acaagccccgattccccgg

SEQ ID NO: 20718 - DNA, 21 bp, Artificial Sequence
  Synthetic
catcgttgccgggtattgccc

SEQ ID NO: 20719 - DNA, 22 bp, Artificial Sequence
  Synthetic
ccaaatccgccaactctaccga

SEQ ID NO: 20720 - DNA, 19 bp, Artificial Sequence
  Synthetic
tcgccttgggctgacgcag

SEQ ID NO: 20721 - DNA, 20 bp, Artificial Sequence
  Synthetic
gcgcccgaaaaacagcttgc

SEQ ID NO: 20722 - DNA, 19 bp, Artificial Sequence
  Synthetic
acattccggaccgcccctc

SEQ ID NO: 20723 - DNA, 21 bp, Artificial Sequence
  Synthetic
gcataccgcccgccaaaaaga

SEQ ID NO: 20724 - DNA, 21 bp, Artificial Sequence
  Synthetic
gtccagccacgtctttaccgc

SEQ ID NO: 20725 - DNA, 19 bp, Artificial Sequence
  Synthetic
ggcttccaaaccagccgcc

SEQ ID NO: 20726 - DNA, 22 bp, Artificial Sequence
  Synthetic
tgcaccgatatgcccgaactct

SEQ ID NO: 20727 - DNA, 20 bp, Artificial Sequence
  Synthetic
gcaaccgcagcaactacgcc

SEQ ID NO: 20728 - DNA, 22 bp, Artificial Sequence
  Synthetic
ccgtcggacaactcgtcttctt

SEQ ID NO: 20729 - DNA, 19 bp, Artificial Sequence
  Synthetic
aaccaggcaggccggcttg

SEQ ID NO: 20730 - DNA, 19 bp, Artificial Sequence
  Synthetic
ttgcgacaggacgggcagc

SEQ ID NO: 20731 - DNA, 19 bp, Artificial Sequence
  Synthetic
cgcgacattctgcgcggag

SEQ ID NO: 20732 - DNA, 21 bp, Artificial Sequence
  Synthetic
cgagttccacacccaagccaa

SEQ ID NO: 20733 - DNA, 19 bp, Artificial Sequence
  Synthetic
cggtatgttcggcggcgtt

SEQ ID NO: 20734 - DNA, 19 bp, Artificial Sequence
  Synthetic
ggcgcgccatccatgttcc

SEQ ID NO: 20735 - DNA, 18 bp, Artificial Sequence
  Synthetic
gcctccgtcggcgcattt

SEQ ID NO: 20736 - DNA, 21 bp, Artificial Sequence
  Synthetic
gccgtctgaaagccgtttgcg

SEQ ID NO: 20737 - DNA, 20 bp, Artificial Sequence
  Synthetic
cgtccgaagcgtttggcgta

SEQ ID NO: 20738 - DNA, 22 bp, Artificial Sequence
  Synthetic
tccggctacaagtgataaggtg

SEQ ID NO: 20739 - DNA, 21 bp, Artificial Sequence
  Synthetic
ccggctgacgattttggggct

SEQ ID NO: 20740 - DNA, 20 bp, Artificial Sequence
  Synthetic
tcgccgcaaaattccgaccc

SEQ ID NO: 20741 - DNA, 20 bp, Artificial Sequence
  Synthetic
cgctgcaaacccacggcaaa

SEQ ID NO: 20742 - DNA, 22 bp, Artificial Sequence
  Synthetic
cgggttactttggcagggtcga

SEQ ID NO: 20743 - DNA, 21 bp, Artificial Sequence
  Synthetic
tggcataatcgagcagcagca

SEQ ID NO: 20744 - DNA, 20 bp, Artificial Sequence
  Synthetic
gcctgcgtaattccggcaac

SEQ ID NO: 20745 - DNA, 20 bp, Artificial Sequence
  Synthetic
ccatacagccggccgccttc

SEQ ID NO: 20746 - DNA, 22 bp, Artificial Sequence
  Synthetic
gagggttttgtcaccggagagg

SEQ ID NO: 20747 - DNA, 19 bp, Artificial Sequence
  Synthetic
acatcggcatcagcgcggg

SEQ ID NO: 20748 - DNA, 20 bp, Artificial Sequence
  Synthetic
cgacctgcgccaaatcggta

SEQ ID NO: 20749 - DNA, 19 bp, Artificial Sequence
  Synthetic
acgcgggcttcagctacgg

SEQ ID NO: 20750 - DNA, 19 bp, Artificial Sequence
  Synthetic
gtcatcgacagcgaccccg

SEQ ID NO: 20751 - DNA, 22 bp, Artificial Sequence
  Synthetic
cgttcaacgtcgtcatccgcac

SEQ ID NO: 20752 - DNA, 19 bp, Artificial Sequence
  Synthetic
cagacccgaaaaaccgcgc

SEQ ID NO: 20753 - DNA, 21 bp, Artificial Sequence
  Synthetic
cggcatttccacgccgcaatc

SEQ ID NO: 20754 - DNA, 21 bp, Artificial Sequence
  Synthetic
ccgtcaaagccgttgccgaaa

SEQ ID NO: 20755 - DNA, 22 bp, Artificial Sequence
  Synthetic
ggggttttcaggcggcatgaaa

SEQ ID NO: 20756 - DNA, 20 bp, Artificial Sequence
  Synthetic
cagccaggcaaacgccatca

SEQ ID NO: 20757 - DNA, 19 bp, Artificial Sequence
  Synthetic
tcagggtaacgcctgccgc

SEQ ID NO: 20758 - DNA, 19 bp, Artificial Sequence
  Synthetic
ccgcgttcgaccacggttt

SEQ ID NO: 20759 - DNA, 18 bp, Artificial Sequence
  Synthetic
ttgccgccgcattgggca

SEQ ID NO: 20760 - DNA, 21 bp, Artificial Sequence
  Synthetic
gcggtagtagccgtagcggat

SEQ ID NO: 20761 - DNA, 19 bp, Artificial Sequence
  Synthetic
gctgatggtgcgcgaaacg

SEQ ID NO: 20762 - DNA, 19 bp, Artificial Sequence
  Synthetic
tgcctgcccttccaatgcc

SEQ ID NO: 20763 - DNA, 20 bp, Artificial Sequence
  Synthetic
ccccaaatgccgaccagggt

SEQ ID NO: 20764 - DNA, 18 bp, Artificial Sequence
  Synthetic
acgcgtttgttggcggcg

SEQ ID NO: 20765 - DNA, 21 bp, Artificial Sequence
  Synthetic
gggcatcgccgtattggtacg

SEQ ID NO: 20766 - DNA, 19 bp, Artificial Sequence
  Synthetic
ggcaaatgccgtctgcgcg

SEQ ID NO: 20767 - DNA, 22 bp, Artificial Sequence
  Synthetic
ggcgcgtatgtgctgcacctta

SEQ ID NO: 20768 - DNA, 19 bp, Artificial Sequence
  Synthetic
gcccgaagaaacccgccaa

SEQ ID NO: 20769 - DNA, 21 bp, Artificial Sequence
  Synthetic
cgcgccattttgaaagacgcg

SEQ ID NO: 20770 - DNA, 19 bp, Artificial Sequence
  Synthetic
gccgacggcgtatgtgcat

SEQ ID NO: 20771 - DNA, 21 bp, Artificial Sequence
  Synthetic
cccctgatcaaccacggcttt

SEQ ID NO: 20772 - DNA, 21 bp, Artificial Sequence
  Synthetic
gccaaagaagccggagccaaa

SEQ ID NO: 20773 - DNA, 19 bp, Artificial Sequence
  Synthetic
ttcggcaaccccgcaaccg

SEQ ID NO: 20774 - DNA, 25 bp, Artificial Sequence
  Synthetic
gtgctaaatctaccaagttgcaaat

SEQ ID NO: 20775 - DNA, 21 bp, Artificial Sequence
  Synthetic
tggtaaggtgtcacttgctcc

SEQ ID NO: 20776 - DNA, 25 bp, Artificial Sequence
  Synthetic
tgcttagtctttctttttctggaga

SEQ ID NO: 20777 - DNA, 25 bp, Artificial Sequence
  Synthetic
gtaacccagctaggcaatttgttat

SEQ ID NO: 20778 - DNA, 22 bp, Artificial Sequence
  Synthetic
cgatgcccatttgtattgcaac

SEQ ID NO: 20779 - DNA, 25 bp, Artificial Sequence
  Synthetic
tcctggcatcttcaaaaaacaatag

SEQ ID NO: 20780 - DNA, 24 bp, Artificial Sequence
  Synthetic
tccatctatacctccagcacttta

SEQ ID NO: 20781 - DNA, 23 bp, Artificial Sequence
  Synthetic
gaacaatagatgaagcaccaggc

SEQ ID NO: 20782 - DNA, 25 bp, Artificial Sequence
  Synthetic
tggaacctgtgttgtgtatctagta

SEQ ID NO: 20783 - DNA, 23 bp, Artificial Sequence
  Synthetic
ccctgtgtgtctgtagtggtaac

SEQ ID NO: 20784 - DNA, 25 bp, Artificial Sequence
  Synthetic
caaactaaccgttctctttgaggat

SEQ ID NO: 20785 - DNA, 25 bp, Artificial Sequence
  Synthetic
tgacgagcataaagttgttctcttt

SEQ ID NO: 20786 - DNA, 25 bp, Artificial Sequence
  Synthetic
gggatccattgcattaatatgagct

SEQ ID NO: 20787 - DNA, 25 bp, Artificial Sequence
  Synthetic
aagcagtcaggatattcaagtacaa

SEQ ID NO: 20788 - DNA, 24 bp, Artificial Sequence
  Synthetic
tcttctccatactctttcattgcc

SEQ ID NO: 20789 - DNA, 25 bp, Artificial Sequence
  Synthetic
tccttgtaatcatacaaatctggca

SEQ ID NO: 20790 - DNA, 21 bp, Artificial Sequence
  Synthetic
ctgaaaacaaggaggcccatc

SEQ ID NO: 20791 - DNA, 24 bp, Artificial Sequence
  Synthetic
agctgactcgttttcttcatgttt

SEQ ID NO: 20792 - DNA, 23 bp, Artificial Sequence
  Synthetic
tctcatgcttgcaatgtgttcaa

SEQ ID NO: 20793 - DNA, 21 bp, Artificial Sequence
  Synthetic
tcacaaagtttaccacgtcgg

SEQ ID NO: 20794 - DNA, 25 bp, Artificial Sequence
  Synthetic
gtctttctctttgacagaggactcg

SEQ ID NO: 20795 - DNA, 21 bp, Artificial Sequence
  Synthetic
tctgttcgctgaaggggtcct

SEQ ID NO: 20796 - DNA, 20 bp, Artificial Sequence
  Synthetic
tggctccactggtccccaat

SEQ ID NO: 20797 - DNA, 20 bp, Artificial Sequence
  Synthetic
gacgcacgtccactcggatg

SEQ ID NO: 20798 - DNA, 21 bp, Artificial Sequence
  Synthetic
catgcaaggagtcccggagtc

SEQ ID NO: 20799 - DNA, 21 bp, Artificial Sequence
  Synthetic
ccaggggaggattcaccgaca

SEQ ID NO: 20800 - DNA, 23 bp, Artificial Sequence
  Synthetic
aggatcctcgaacatagctgttt

SEQ ID NO: 20801 - DNA, 25 bp, Artificial Sequence
  Synthetic
ggcatttgacatctatgacacctta

SEQ ID NO: 20802 - DNA, 20 bp, Artificial Sequence
  Synthetic
gttcgtagcagcgtaggtca

SEQ ID NO: 20803 - DNA, 24 bp, Artificial Sequence
  Synthetic
ctcctcatttgtaccttcacagtc

SEQ ID NO: 20804 - DNA, 22 bp, Artificial Sequence
  Synthetic
ttaaattgcgcactgcctttgt

SEQ ID NO: 20805 - DNA, 24 bp, Artificial Sequence
  Synthetic
ccaaatctaatctggaccaggtgg

SEQ ID NO: 20806 - DNA, 25 bp, Artificial Sequence
  Synthetic
cgtgtttattaacgactgcaatgct

SEQ ID NO: 20807 - DNA, 25 bp, Artificial Sequence
  Synthetic
cgtaatactgcttatatgccccttg

SEQ ID NO: 20808 - DNA, 21 bp, Artificial Sequence
  Synthetic
cggtggtgtcaggtccactga

SEQ ID NO: 20809 - DNA, 24 bp, Artificial Sequence
  Synthetic
aggggctccagattgtataatact

SEQ ID NO: 20810 - DNA, 20 bp, Artificial Sequence
  Synthetic
agatgtaagggccggacgat

SEQ ID NO: 20811 - DNA, 24 bp, Artificial Sequence
  Synthetic
atgttgtaggggaatatgacatgc

SEQ ID NO: 20812 - DNA, 23 bp, Artificial Sequence
  Synthetic
gcatacgtttacggcgtttatgg

SEQ ID NO: 20813 - DNA, 20 bp, Artificial Sequence
  Synthetic
aggatcaggtaggtgcactc

SEQ ID NO: 20814 - DNA, 25 bp, Artificial Sequence
  Synthetic
cacgttgtgtctgtgtatttttaca

SEQ ID NO: 20815 - DNA, 25 bp, Artificial Sequence
  Synthetic
cccccgccttattataaaaatgtct

SEQ ID NO: 20816 - DNA, 25 bp, Artificial Sequence
  Synthetic
acacaccttacataacataccacaa

SEQ ID NO: 20817 - DNA, 20 bp, Artificial Sequence
  Synthetic
ctccacccttctgcagacgg

SEQ ID NO: 20818 - DNA, 22 bp, Artificial Sequence
  Synthetic
ggaccctatcaggcagtacggt

SEQ ID NO: 20819 - DNA, 22 bp, Artificial Sequence
  Synthetic
ccagcaagcgtactatctggca

SEQ ID NO: 20820 - DNA, 20 bp, Artificial Sequence
  Synthetic
tgtacggattggcgggaacc

SEQ ID NO: 20821 - DNA, 23 bp, Artificial Sequence
  Synthetic
caccagggattgtataggggtac

SEQ ID NO: 20822 - DNA, 25 bp, Artificial Sequence
  Synthetic
gtggaattcacagggtcataaaagt

SEQ ID NO: 20823 - DNA, 22 bp, Artificial Sequence
  Synthetic
agctgaagcaggcgtaaccaaa

SEQ ID NO: 20824 - DNA, 21 bp, Artificial Sequence
  Synthetic
cgatgctgcactggatgttaa

SEQ ID NO: 20825 - DNA, 22 bp, Artificial Sequence
  Synthetic
gcatagccaaccctgcgaaaac

SEQ ID NO: 20826 - DNA, 22 bp, Artificial Sequence
  Synthetic
ccagctccacatggtggttgat

SEQ ID NO: 20827 - DNA, 23 bp, Artificial Sequence
  Synthetic
tgggggcaattaaaatttgcact

SEQ ID NO: 20828 - DNA, 21 bp, Artificial Sequence
  Synthetic
ggtgtagggattactccaggg

SEQ ID NO: 20829 - DNA, 24 bp, Artificial Sequence
  Synthetic
agtttgagcttctgttgatgacaa

SEQ ID NO: 20830 - DNA, 25 bp, Artificial Sequence
  Synthetic
cccaagaaaggtgttaagtttttca

SEQ ID NO: 20831 - DNA, 22 bp, Artificial Sequence
  Synthetic
ggccactcacccatcaagcatt

SEQ ID NO: 20832 - DNA, 20 bp, Artificial Sequence
  Synthetic
tcagttgggtccggtctagc

SEQ ID NO: 20833 - DNA, 22 bp, Artificial Sequence
  Synthetic
ggtggtgaaggagggaggtttg

SEQ ID NO: 20834 - DNA, 24 bp, Artificial Sequence
  Synthetic
cagttttgaagctaatcacgtcgg

SEQ ID NO: 20835 - DNA, 20 bp, Artificial Sequence
  Synthetic
gtccagaacagccttgcggg

SEQ ID NO: 20836 - DNA, 22 bp, Artificial Sequence
  Synthetic
cctcgggtgtgatggtactgtc

SEQ ID NO: 20837 - DNA, 22 bp, Artificial Sequence
  Synthetic
gcgctcttccaaattacggtgc

SEQ ID NO: 20838 - DNA, 22 bp, Artificial Sequence
  Synthetic
gcagatcttctacaggcaccgt

SEQ ID NO: 20839 - DNA, 20 bp, Artificial Sequence
  Synthetic
aaagtggtgtaccgagccac

SEQ ID NO: 20840 - DNA, 22 bp, Artificial Sequence
  Synthetic
ggcttcacccgaaacggttctg

SEQ ID NO: 20841 - DNA, 23 bp, Artificial Sequence
  Synthetic
cagtggttatcaggatggcaatt

SEQ ID NO: 20842 - DNA, 25 bp, Artificial Sequence
  Synthetic
ggaaagcctaatcgaattgtcctta

SEQ ID NO: 20843 - DNA, 20 bp, Artificial Sequence
  Synthetic
acacaaacatgcagccatgc

SEQ ID NO: 20844 - DNA, 20 bp, Artificial Sequence
  Synthetic
gaggatagcaggagcactcc

SEQ ID NO: 20845 - DNA, 20 bp, Artificial Sequence
  Synthetic
tccatcatcaaaggcccagc

SEQ ID NO: 20846 - DNA, 25 bp, Artificial Sequence
  Synthetic
atcgtacttttcagcagtatccaat

SEQ ID NO: 20847 - DNA, 25 bp, Artificial Sequence
  Synthetic
tgaagtagcaaaaacacacactctt

SEQ ID NO: 20848 - DNA, 25 bp, Artificial Sequence
  Synthetic
tgtgaagcattatccacatcatcaa

SEQ ID NO: 20849 - DNA, 24 bp, Artificial Sequence
  Synthetic
tgtacctgagaaacatttgcagtt

SEQ ID NO: 20850 - DNA, 25 bp, Artificial Sequence
  Synthetic
tcgtctaacaagccaattttaccat

SEQ ID NO: 20851 - DNA, 21 bp, Artificial Sequence
  Synthetic
gcgatggggtcttggagtacc

SEQ ID NO: 20852 - DNA, 20 bp, Artificial Sequence
  Synthetic
cttgtcgcgcaagtagtcga

SEQ ID NO: 20853 - DNA, 25 bp, Artificial Sequence
  Synthetic
ggaagtgcttcaggaattggtttta

SEQ ID NO: 20854 - DNA, 21 bp, Artificial Sequence
  Synthetic
gaaagtaggatccggtgcagc

SEQ ID NO: 20855 - DNA, 25 bp, Artificial Sequence
  Synthetic
gcattaggattttctgtgtcaagca

SEQ ID NO: 20856 - DNA, 25 bp, Artificial Sequence
  Synthetic
cctgatttgtcctgttgtaatcgtc

SEQ ID NO: 20857 - DNA, 21 bp, Artificial Sequence
  Synthetic
cagaaccggtatgcaatagcc

SEQ ID NO: 20858 - DNA, 24 bp, Artificial Sequence
  Synthetic
ctgatgatctttcgacgatgtagg

SEQ ID NO: 20859 - DNA, 23 bp, Artificial Sequence
  Synthetic
cgaaaagaatgctctttcccctg

SEQ ID NO: 20860 - DNA, 24 bp, Artificial Sequence
  Synthetic
tgaaagaacgtgtccataccatgg

SEQ ID NO: 20861 - DNA, 20 bp, Artificial Sequence
  Synthetic
taccagccagcgactagtcc

SEQ ID NO: 20862 - DNA, 25 bp, Artificial Sequence
  Synthetic
atgctcatcgagtgttttttgattt

SEQ ID NO: 20863 - DNA, 22 bp, Artificial Sequence
  Synthetic
cggttccgcagaccactatggc

SEQ ID NO: 20864 - DNA, 22 bp, Artificial Sequence
  Synthetic
gcggcaacaagtaaactccacc

SEQ ID NO: 20865 - DNA, 21 bp, Artificial Sequence
  Synthetic
tgacagcgtgggggtgatttg

SEQ ID NO: 20866 - DNA, 21 bp, Artificial Sequence
  Synthetic
acagtatgggtgcggccatca

SEQ ID NO: 20867 - DNA, 20 bp, Artificial Sequence
  Synthetic
ttggtcgaatgcggcaaggg

SEQ ID NO: 20868 - DNA, 22 bp, Artificial Sequence
  Synthetic
acaaaccccgtggagttcatcc

SEQ ID NO: 20869 - DNA, 20 bp, Artificial Sequence
  Synthetic
gtgtggtggtgtgcaggagc

SEQ ID NO: 20870 - DNA, 19 bp, Artificial Sequence
  Synthetic
cccatgattccctgcggcc

SEQ ID NO: 20871 - DNA, 21 bp, Artificial Sequence
  Synthetic
ccacccttaacctgcaacggg

SEQ ID NO: 20872 - DNA, 22 bp, Artificial Sequence
  Synthetic
cgcggagaatacgatgggttct

SEQ ID NO: 20873 - DNA, 21 bp, Artificial Sequence
  Synthetic
gccccatggaagagtgtccac

SEQ ID NO: 20874 - DNA, 20 bp, Artificial Sequence
  Synthetic
aacacctaccacatgcccgg

SEQ ID NO: 20875 - DNA, 21 bp, Artificial Sequence
  Synthetic
ctccggtcctgatgttggggt

SEQ ID NO: 20876 - DNA, 22 bp, Artificial Sequence
  Synthetic
acgcccagactggtcaattgtt

SEQ ID NO: 20877 - DNA, 20 bp, Artificial Sequence
  Synthetic
tctccctgtacggcccctac

SEQ ID NO: 20878 - DNA, 22 bp, Artificial Sequence
  Synthetic
gagtggggccagttaaagtcgg

SEQ ID NO: 20879 - DNA, 20 bp, Artificial Sequence
  Synthetic
aagaggggaggtcaccgcgg

SEQ ID NO: 20880 - DNA, 18 bp, Artificial Sequence
  Synthetic
atgtggcgccgcagaacg

SEQ ID NO: 20881 - DNA, 20 bp, Artificial Sequence
  Synthetic
aagggcactccggggagttg

SEQ ID NO: 20882 - DNA, 20 bp, Artificial Sequence
  Synthetic
acgccatccagctccgtgaa

SEQ ID NO: 20883 - DNA, 20 bp, Artificial Sequence
  Synthetic
gcaggtggccttgagagagg

SEQ ID NO: 20884 - DNA, 19 bp, Artificial Sequence
  Synthetic
gcaggtggtatcgggcagc

SEQ ID NO: 20885 - DNA, 22 bp, Artificial Sequence
  Synthetic
gccccagtccaggtgtatgaca

SEQ ID NO: 20886 - DNA, 22 bp, Artificial Sequence
  Synthetic
cgccgtatccgtacttggaacg

SEQ ID NO: 20887 - DNA, 22 bp, Artificial Sequence
  Synthetic
gtcgtcaccacataccaggagc

SEQ ID NO: 20888 - DNA, 21 bp, Artificial Sequence
  Synthetic
gcactatccgagcccacaagg

SEQ ID NO: 20889 - DNA, 20 bp, Artificial Sequence
  Synthetic
atggcggccctacctccctg

SEQ ID NO: 20890 - DNA, 20 bp, Artificial Sequence
  Synthetic
tactgcgtaggtgcactagg

SEQ ID NO: 20891 - DNA, 22 bp, Artificial Sequence
  Synthetic
ggtgttcacgtgcctccgatag

SEQ ID NO: 20892 - DNA, 25 bp, Artificial Sequence
  Synthetic
gtggttgaatgactttgacttttga

SEQ ID NO: 20893 - DNA, 25 bp, Artificial Sequence
  Synthetic
cgcttattatagcagccaacatagg

SEQ ID NO: 20894 - DNA, 20 bp, Artificial Sequence
  Synthetic
tccaagcaccttttacgggc

SEQ ID NO: 20895 - DNA, 25 bp, Artificial Sequence
  Synthetic
gaccaccagttacatatgccataat

SEQ ID NO: 20896 - DNA, 22 bp, Artificial Sequence
  Synthetic
acctaagttgagtgatcgcaac

SEQ ID NO: 20897 - DNA, 21 bp, Artificial Sequence
  Synthetic
caggagacaatgcgcagtatt

SEQ ID NO: 20898 - DNA, 21 bp, Artificial Sequence
  Synthetic
tgcatcgtcctcttcttcctc

SEQ ID NO: 20899 - DNA, 25 bp, Artificial Sequence
  Synthetic
aggtgtatgttagcagcatttacaa

SEQ ID NO: 20900 - DNA, 22 bp, Artificial Sequence
  Synthetic
aagactgaagtggtttagcacc

SEQ ID NO: 20901 - DNA, 22 bp, Artificial Sequence
  Synthetic
tcacctaccatgtaaggtgcat

SEQ ID NO: 20902 - DNA, 25 bp, Artificial Sequence
  Synthetic
gctctaacatccatgcatataggca

SEQ ID NO: 20903 - DNA, 24 bp, Artificial Sequence
  Synthetic
tgatgacgaagtgaggtatccatt

SEQ ID NO: 20904 - DNA, 24 bp, Artificial Sequence
  Synthetic
agcttcactacgtagtgtgtcatc

SEQ ID NO: 20905 - DNA, 25 bp, Artificial Sequence
  Synthetic
ggtagtagttttctgaccacaatgt

SEQ ID NO: 20906 - DNA, 23 bp, Artificial Sequence
  Synthetic
tggtcctttgtactctgacatct

SEQ ID NO: 20907 - DNA, 22 bp, Artificial Sequence
  Synthetic
ccactacatcgccattcaagtc

SEQ ID NO: 20908 - DNA, 25 bp, Artificial Sequence
  Synthetic
tggtttaagtatgacattgcctaca

SEQ ID NO: 20909 - DNA, 25 bp, Artificial Sequence
  Synthetic
ggaaaagaaccttcacagaaatcca

SEQ ID NO: 20910 - DNA, 21 bp, Artificial Sequence
  Synthetic
ctaaccattgcagaaacgggt

SEQ ID NO: 20911 - DNA, 23 bp, Artificial Sequence
  Synthetic
gtcagtagggttgattggtcttt

SEQ ID NO: 20912 - DNA, 25 bp, Artificial Sequence
  Synthetic
gcaacaagtgccttaagtttttcca

SEQ ID NO: 20913 - DNA, 25 bp, Artificial Sequence
  Synthetic
gcagctgttcagataaagacatgta

SEQ ID NO: 20914 - DNA, 25 bp, Artificial Sequence
  Synthetic
accagcatgtttatttgcaaaacaa

SEQ ID NO: 20915 - DNA, 25 bp, Artificial Sequence
  Synthetic
tctggacgaagctcactataagaaa

SEQ ID NO: 20916 - DNA, 20 bp, Artificial Sequence
  Synthetic
ccaccagccactactgaagc

SEQ ID NO: 20917 - DNA, 25 bp, Artificial Sequence
  Synthetic
cgctacgcaattttaggtacatttc

SEQ ID NO: 20918 - DNA, 20 bp, Artificial Sequence
  Synthetic
aaccactctgcagaacagca

SEQ ID NO: 20919 - DNA, 25 bp, Artificial Sequence
  Synthetic
cggacaaatttatacttgggtgtct

SEQ ID NO: 20920 - DNA, 25 bp, Artificial Sequence
  Synthetic
acatgatcttgtgtcaaaggttcat

SEQ ID NO: 20921 - DNA, 24 bp, Artificial Sequence
  Synthetic
gaccactgtgtactttgaacaaga

SEQ ID NO: 20922 - DNA, 25 bp, Artificial Sequence
  Synthetic
cgacaccagaatagttagaggttac

SEQ ID NO: 20923 - DNA, 25 bp, Artificial Sequence
  Synthetic
cctccaatacccaacaacttaatgt

SEQ ID NO: 20924 - DNA, 25 bp, Artificial Sequence
  Synthetic
acaacctattaatgtctacagcacc

SEQ ID NO: 20925 - DNA, 24 bp, Artificial Sequence
  Synthetic
gcactagttacttttgccctcttg

SEQ ID NO: 20926 - DNA, 22 bp, Artificial Sequence
  Synthetic
gtcgtagtgctactggactcag

SEQ ID NO: 20927 - DNA, 24 bp, Artificial Sequence
  Synthetic
gcaggtacttctgtagcatttcca

SEQ ID NO: 20928 - DNA, 22 bp, Artificial Sequence
  Synthetic
gggtcattagcacaagtggtag

SEQ ID NO: 20929 - DNA, 25 bp, Artificial Sequence
  Synthetic
ccatgtcaccatctactctaaactt

SEQ ID NO: 20930 - DNA, 20 bp, Artificial Sequence
  Synthetic
cctacaatgcctgcatcacg

SEQ ID NO: 20931 - DNA, 25 bp, Artificial Sequence
  Synthetic
ggatacacctatcatccaaacagtt

SEQ ID NO: 20932 - DNA, 25 bp, Artificial Sequence
  Synthetic
tgacagtttgaaaagcaacattgtt

SEQ ID NO: 20933 - DNA, 23 bp, Artificial Sequence
  Synthetic
acagatagagacaccagctacgg

SEQ ID NO: 20934 - DNA, 23 bp, Artificial Sequence
  Synthetic
cgttagctaacctgtagaaacgg

SEQ ID NO: 20935 - DNA, 25 bp, Artificial Sequence
  Synthetic
cggcatcatcagaaagaatcatcat

SEQ ID NO: 20936 - DNA, 25 bp, Artificial Sequence
  Synthetic
agacatcagcatactcctgattagg

SEQ ID NO: 20937 - DNA, 25 bp, Artificial Sequence
  Synthetic
gcaaacatagggattaacagacaac

SEQ ID NO: 20938 - DNA, 20 bp, Artificial Sequence
  Synthetic
ttcctcagtggctttgagcg

SEQ ID NO: 20939 - DNA, 22 bp, Artificial Sequence
  Synthetic
gtgttgggtacaagccagtaat

SEQ ID NO: 20940 - DNA, 25 bp, Artificial Sequence
  Synthetic
agcattgacaacactcaagtcataa

SEQ ID NO: 20941 - DNA, 25 bp, Artificial Sequence
  Synthetic
tgattgcagatgaaacatcatgtgt

SEQ ID NO: 20942 - DNA, 25 bp, Artificial Sequence
  Synthetic
cgacgtggtatttctagacttgtaa

SEQ ID NO: 20943 - DNA, 20 bp, Artificial Sequence
  Synthetic
aaagccaatccacgcacgaa

SEQ ID NO: 20944 - DNA, 20 bp, Artificial Sequence
  Synthetic
gtaagctcaaagccatgcgc

SEQ ID NO: 20945 - DNA, 23 bp, Artificial Sequence
  Synthetic
caatgcagacttcacaaccatgt

SEQ ID NO: 20946 - DNA, 23 bp, Artificial Sequence
  Synthetic
catcacagcctggtaagttcaag

SEQ ID NO: 20947 - DNA, 25 bp, Artificial Sequence
  Synthetic
cctggtaaatgtattccacaggtta

SEQ ID NO: 20948 - DNA, 25 bp, Artificial Sequence
  Synthetic
acaagacagtaagtgaagaacaagc

SEQ ID NO: 20949 - DNA, 25 bp, Artificial Sequence
  Synthetic
cctcgagcttatatcgctgtatgaa

SEQ ID NO: 20950 - DNA, 25 bp, Artificial Sequence
  Synthetic
ccaaagcatgaatgaaatttcagca

SEQ ID NO: 20951 - DNA, 25 bp, Artificial Sequence
  Synthetic
ccaattaaagtagaatctgcgtcgg

SEQ ID NO: 20952 - DNA, 23 bp, Artificial Sequence
  Synthetic
tgccaagatagttagccccaatt

SEQ ID NO: 20953 - DNA, 21 bp, Artificial Sequence
  Synthetic
tgtctgtgtacccatgggttt

SEQ ID NO: 20954 - DNA, 25 bp, Artificial Sequence
  Synthetic
acttgagcataaatgtagttggctt

SEQ ID NO: 20955 - DNA, 25 bp, Artificial Sequence
  Synthetic
gcaaagatcattcaacttagtggca

SEQ ID NO: 20956 - DNA, 25 bp, Artificial Sequence
  Synthetic
gccaataacaattaagagcaggtgg

SEQ ID NO: 20957 - DNA, 25 bp, Artificial Sequence
  Synthetic
agcatttgttccaggtgtaattaca

SEQ ID NO: 20958 - DNA, 25 bp, Artificial Sequence
  Synthetic
agcaatggtgttattagagtaagca

SEQ ID NO: 20959 - DNA, 24 bp, Artificial Sequence
  Synthetic
gcattcgccatattgcttcatgaa

SEQ ID NO: 20960 - DNA, 25 bp, Artificial Sequence
  Synthetic
tgcagttgatgttgttgtaagtgat

SEQ ID NO: 20961 - DNA, 23 bp, Artificial Sequence
  Synthetic
ggacataaggtggtagccctttc

SEQ ID NO: 20962 - DNA, 25 bp, Artificial Sequence
  Synthetic
gctcttctttgaatgagtcaagctc

SEQ ID NO: 20963 - DNA, 20 bp, Artificial Sequence
  Synthetic
aagagcatgcacccttgagg

SEQ ID NO: 20964 - DNA, 23 bp, Artificial Sequence
  Synthetic
gcaaatgaactggaagcccttat

SEQ ID NO: 20965 - DNA, 25 bp, Artificial Sequence
  Synthetic
gtgaaatagccatgtacaacgacat

SEQ ID NO: 20966 - DNA, 25 bp, Artificial Sequence
  Synthetic
gcaagaataccacgaaagcaagaaa

SEQ ID NO: 20967 - DNA, 25 bp, Artificial Sequence
  Synthetic
cctgttccgattagaataggcaaat

SEQ ID NO: 20968 - DNA, 20 bp, Artificial Sequence
  Synthetic
acagcgccctagggagtgtc

SEQ ID NO: 20969 - DNA, 24 bp, Artificial Sequence
  Synthetic
cctgatagtgatatagctcgcaag

SEQ ID NO: 20970 - DNA, 25 bp, Artificial Sequence
  Synthetic
acatgaggtttattagatgcacagc

SEQ ID NO: 20971 - DNA, 22 bp, Artificial Sequence
  Synthetic
ccattgcgtcctccattctggt

SEQ ID NO: 20972 - DNA, 22 bp, Artificial Sequence
  Synthetic
tgccaatgtggtctttgggtgt

SEQ ID NO: 20973 - DNA, 25 bp, Artificial Sequence
  Synthetic
agcagatttcttagtgacagtttgg

SEQ ID NO: 20974 - DNA, 23 bp, Artificial Sequence
  Synthetic
gttcagcagtatgacgttgtctt

SEQ ID NO: 20975 - DNA, 25 bp, Artificial Sequence
  Synthetic
cctacttgtgctgtttagttacgag

SEQ ID NO: 20976 - DNA, 21 bp, Artificial Sequence
  Synthetic
gggaagggtgggaaaaactgg

SEQ ID NO: 20977 - DNA, 21 bp, Artificial Sequence
  Synthetic
caagaagggtgagcaggcagc

SEQ ID NO: 20978 - DNA, 25 bp, Artificial Sequence
  Synthetic
gcacccatgatgacaatctatacac

SEQ ID NO: 20979 - DNA, 22 bp, Artificial Sequence
  Synthetic
cacaagcttcaactgttggtga

SEQ ID NO: 20980 - DNA, 20 bp, Artificial Sequence
  Synthetic
agggcatcaggcaatttcca

SEQ ID NO: 20981 - DNA, 25 bp, Artificial Sequence
  Synthetic
ccaactgtcatcactaggtctttta

SEQ ID NO: 20982 - DNA, 25 bp, Artificial Sequence
  Synthetic
ctgagtggtactaaacacaacctta

SEQ ID NO: 20983 - DNA, 25 bp, Artificial Sequence
  Synthetic
ggttgtgaggcaatatctactggta

SEQ ID NO: 20984 - DNA, 22 bp, Artificial Sequence
  Synthetic
ccccacatcccacactaaatgt

SEQ ID NO: 20985 - DNA, 23 bp, Artificial Sequence
  Synthetic
tgtgagtactccttcttgtgtgt

SEQ ID NO: 20986 - DNA, 25 bp, Artificial Sequence
  Synthetic
ttcctgattgccatgtgtaatcatc

SEQ ID NO: 20987 - DNA, 24 bp, Artificial Sequence
  Synthetic
cgaggacaccatgcttttatatgt

SEQ ID NO: 20988 - DNA, 25 bp, Artificial Sequence
  Synthetic
tcacatcattaccttcagtgtttgt

SEQ ID NO: 20989 - DNA, 25 bp, Artificial Sequence
  Synthetic
cacactggaattttctcaggtcaat

SEQ ID NO: 20990 - DNA, 25 bp, Artificial Sequence
  Synthetic
acgcacagagtttctctttaagaaa

SEQ ID NO: 20991 - DNA, 23 bp, Artificial Sequence
  Synthetic
tttaggatctgggggcaaagaat

SEQ ID NO: 20992 - DNA, 25 bp, Artificial Sequence
  Synthetic
tgaagatactgttggtggtgttagt

SEQ ID NO: 20993 - DNA, 24 bp, Artificial Sequence
  Synthetic
accctgaagtgtacagaacaattt

SEQ ID NO: 20994 - DNA, 25 bp, Artificial Sequence
  Synthetic
gcaaatcataggaatcagagacctt

SEQ ID NO: 20995 - DNA, 22 bp, Artificial Sequence
  Synthetic
ccttgtacaaaacacccccaca

SEQ ID NO: 20996 - DNA, 25 bp, Artificial Sequence
  Synthetic
gtgactatacctgggtttttgtgga

SEQ ID NO: 20997 - DNA, 25 bp, Artificial Sequence
  Synthetic
ctcatcagctctgaatcctctttta

SEQ ID NO: 20998 - DNA, 25 bp, Artificial Sequence
  Synthetic
ggtagaagcactaacacacagtcta

SEQ ID NO: 20999 - DNA, 25 bp, Artificial Sequence
  Synthetic
cttcacaagctacctgtacattaga

SEQ ID NO: 21000 - DNA, 25 bp, Artificial Sequence
  Synthetic
ccatcaaatgcatttctcatatgca

SEQ ID NO: 21001 - DNA, 25 bp, Artificial Sequence
  Synthetic
tgtgatgtgatctctaaggtctgta

SEQ ID NO: 21002 - DNA, 25 bp, Artificial Sequence
  Synthetic
tgacaggagcaagaatagttttgtt

SEQ ID NO: 21003 - DNA, 20 bp, Artificial Sequence
  Synthetic
ttcacagtcatgccccaacc

SEQ ID NO: 21004 - DNA, 23 bp, Artificial Sequence
  Synthetic
ggaagatgctccaggttctactg

SEQ ID NO: 21005 - DNA, 24 bp, Artificial Sequence
  Synthetic
ctctgtgattggtacctgctctat

SEQ ID NO: 21006 - DNA, 25 bp, Artificial Sequence
  Synthetic
tcggggacaaatacctttaaaactg

SEQ ID NO: 21007 - DNA, 23 bp, Artificial Sequence
  Synthetic
gacgttccctgtctgaattgtat

SEQ ID NO: 21008 - DNA, 25 bp, Artificial Sequence
  Synthetic
gctgttctcgctttccaaaaaagaa

SEQ ID NO: 21009 - DNA, 25 bp, Artificial Sequence
  Synthetic
gccattcttccaatattctgggatt

SEQ ID NO: 21010 - DNA, 24 bp, Artificial Sequence
  Synthetic
tgaccccatgagtcagataaaaca

SEQ ID NO: 21011 - DNA, 24 bp, Artificial Sequence
  Synthetic
gaaggtaacaccaactcttccaaa

SEQ ID NO: 21012 - DNA, 25 bp, Artificial Sequence
  Synthetic
ccaatctgcagtttgtaattcaaga

SEQ ID NO: 21013 - DNA, 25 bp, Artificial Sequence
  Synthetic
agtctcggactcaaatctacaagat

SEQ ID NO: 21014 - DNA, 22 bp, Artificial Sequence
  Synthetic
tgatcctgcagtacatcgaaac

SEQ ID NO: 21015 - DNA, 25 bp, Artificial Sequence
  Synthetic
tggaactagtaacgacagaggaaat

SEQ ID NO: 21016 - DNA, 22 bp, Artificial Sequence
  Synthetic
ggctcttggttctctggtggtt

SEQ ID NO: 21017 - DNA, 25 bp, Artificial Sequence
  Synthetic
cctctggatttatcacatccaaagg

SEQ ID NO: 21018 - DNA, 24 bp, Artificial Sequence
  Synthetic
ggtttgaacctgttgtacaaaacg

SEQ ID NO: 21019 - DNA, 25 bp, Artificial Sequence
  Synthetic
gttgaaaaaggtccagttggctatc

SEQ ID NO: 21020 - DNA, 23 bp, Artificial Sequence
  Synthetic
tgctttgccttctccatcttcta

SEQ ID NO: 21021 - DNA, 25 bp, Artificial Sequence
  Synthetic
acatcttctcatttttctctcagct

SEQ ID NO: 21022 - DNA, 23 bp, Artificial Sequence
  Synthetic
tgtctttgctgtgttcatagctg

SEQ ID NO: 21023 - DNA, 25 bp, Artificial Sequence
  Synthetic
agtttccatctgttcataagatcgt

SEQ ID NO: 21024 - DNA, 25 bp, Artificial Sequence
  Synthetic
tcctctttgtcatacagaatcagct

SEQ ID NO: 21025 - DNA, 20 bp, Artificial Sequence
  Synthetic
tgagtgcagaccgtgccaga

SEQ ID NO: 21026 - DNA, 24 bp, Artificial Sequence
  Synthetic
ctgatgaagcttgagactctcaga

SEQ ID NO: 21027 - DNA, 25 bp, Artificial Sequence
  Synthetic
cccaaaagagctctttcatttgatc

SEQ ID NO: 21028 - DNA, 25 bp, Artificial Sequence
  Synthetic
gccaccccaaataaacaaaggatta

SEQ ID NO: 21029 - DNA, 20 bp, Artificial Sequence
  Synthetic
tccatcttgctttctggcgc

SEQ ID NO: 21030 - DNA, 25 bp, Artificial Sequence
  Synthetic
gaggcgtgtataaaaagaaatgtgt

SEQ ID NO: 21031 - DNA, 25 bp, Artificial Sequence
  Synthetic
cagtaccttccattgattagccttt

SEQ ID NO: 21032 - DNA, 25 bp, Artificial Sequence
  Synthetic
gcaaaaggataattagcagcttctg

SEQ ID NO: 21033 - DNA, 25 bp, Artificial Sequence
  Synthetic
tgcaaaacattaaactctgctactg

SEQ ID NO: 21034 - DNA, 25 bp, Artificial Sequence
  Synthetic
ttcagtaagaccgatagcttccaaa

SEQ ID NO: 21035 - DNA, 25 bp, Artificial Sequence
  Synthetic
agccataaaaccaatattgtgcttt

SEQ ID NO: 21036 - DNA, 25 bp, Artificial Sequence
  Synthetic
ccaactttgattcggttaaattcct

SEQ ID NO: 21037 - DNA, 24 bp, Artificial Sequence
  Synthetic
caaagaagcaagcctaagcctaaa

SEQ ID NO: 21038 - DNA, 25 bp, Artificial Sequence
  Synthetic
gcctgcaaaatcttacctaagtcat

SEQ ID NO: 21039 - DNA, 22 bp, Artificial Sequence
  Synthetic
agcacaacaaaacaagccattt

SEQ ID NO: 21040 - DNA, 25 bp, Artificial Sequence
  Synthetic
cacaaaacctttcaagagacgtttg

SEQ ID NO: 21041 - DNA, 23 bp, Artificial Sequence
  Synthetic
gcaattaatggctgatttgcgga

SEQ ID NO: 21042 - DNA, 25 bp, Artificial Sequence
  Synthetic
cccaaatctacggctgataaagatt

SEQ ID NO: 21043 - DNA, 20 bp, Artificial Sequence
  Synthetic
tacgagatccccaacgttgg

SEQ ID NO: 21044 - DNA, 20 bp, Artificial Sequence
  Synthetic
gcagggcgtaactttgctaa

SEQ ID NO: 21045 - DNA, 24 bp, Artificial Sequence
  Synthetic
gcaatagctcctccattgacatta

SEQ ID NO: 21046 - DNA, 22 bp, Artificial Sequence
  Synthetic
accagtgcatcaattaacgctt

SEQ ID NO: 21047 - DNA, 25 bp, Artificial Sequence
  Synthetic
tgaggttaatcgaccaaaatcttct

SEQ ID NO: 21048 - DNA, 25 bp, Artificial Sequence
  Synthetic
gagcaacccttcaagataaacatct

SEQ ID NO: 21049 - DNA, 25 bp, Artificial Sequence
  Synthetic
gcttcttttgtagctactagtgtcg

SEQ ID NO: 21050 - DNA, 20 bp, Artificial Sequence
  Synthetic
acaatggggcatttccgatg

SEQ ID NO: 21051 - DNA, 24 bp, Artificial Sequence
  Synthetic
gaccttgaaagtggcaaagtttta

SEQ ID NO: 21052 - DNA, 25 bp, Artificial Sequence
  Synthetic
gcatttttattaccacaagctgcca

SEQ ID NO: 21053 - DNA, 25 bp, Artificial Sequence
  Synthetic
ccagtcacaaaatcttctgctgtta

SEQ ID NO: 21054 - DNA, 25 bp, Artificial Sequence
  Synthetic
caacattcttagcatcccagtagtt

SEQ ID NO: 21055 - DNA, 25 bp, Artificial Sequence
  Synthetic
acgaaaatccttgttgttaagagct

SEQ ID NO: 21056 - DNA, 25 bp, Artificial Sequence
  Synthetic
ctaattgaactgggaaggttacacc

SEQ ID NO: 21057 - DNA, 20 bp, Artificial Sequence
  Synthetic
tgtgtcatcagccagctgta

SEQ ID NO: 21058 - DNA, 20 bp, Artificial Sequence
  Synthetic
ggtgtccactcttgtgcctg

SEQ ID NO: 21059 - DNA, 22 bp, Artificial Sequence
  Synthetic
tgcttggggtaatggctcactg

SEQ ID NO: 21060 - DNA, 23 bp, Artificial Sequence
  Synthetic
cattggattgtaggcatggtttg

SEQ ID NO: 21061 - DNA, 22 bp, Artificial Sequence
  Synthetic
tctgtaatactgccgcgatctg

SEQ ID NO: 21062 - DNA, 20 bp, Artificial Sequence
  Synthetic
caggttttcgaggtgttgca

SEQ ID NO: 21063 - DNA, 24 bp, Artificial Sequence
  Synthetic
cagttggatgagttaggatcatcc

SEQ ID NO: 21064 - DNA, 25 bp, Artificial Sequence
  Synthetic
ggtttgaccatagagtcatattggt

SEQ ID NO: 21065 - DNA, 25 bp, Artificial Sequence
  Synthetic
ccaaaatcatctgattgagcagcta

SEQ ID NO: 21066 - DNA, 23 bp, Artificial Sequence
  Synthetic
ggacgtaattgccctcactattg

SEQ ID NO: 21067 - DNA, 25 bp, Artificial Sequence
  Synthetic
gctgctggtgttttagcaatgataa

SEQ ID NO: 21068 - DNA, 25 bp, Artificial Sequence
  Synthetic
cttctgtgccatacataccatagtt

SEQ ID NO: 21069 - DNA, 25 bp, Artificial Sequence
  Synthetic
aggaatagctcgctctttagggtaa

SEQ ID NO: 21070 - DNA, 21 bp, Artificial Sequence
  Synthetic
tgaaactgattggggctaacg

SEQ ID NO: 21071 - DNA, 23 bp, Artificial Sequence
  Synthetic
tgccttcaaaaatggcagctaaa

SEQ ID NO: 21072 - DNA, 25 bp, Artificial Sequence
  Synthetic
gctccgtatggtaaatagcttgtaa

SEQ ID NO: 21073 - DNA, 25 bp, Artificial Sequence
  Synthetic
gccgattagccttaagtttggttaa

SEQ ID NO: 21074 - DNA, 25 bp, Artificial Sequence
  Synthetic
cgtcatacaacctggtaaataaggt

SEQ ID NO: 21075 - DNA, 22 bp, Artificial Sequence
  Synthetic
ggcttatgcgcttgtttgtaag

SEQ ID NO: 21076 - DNA, 25 bp, Artificial Sequence
  Synthetic
ccgatttttacacacagttgtccta

SEQ ID NO: 21077 - DNA, 25 bp, Artificial Sequence
  Synthetic
agctaattgaacatctgctccaaca

SEQ ID NO: 21078 - DNA, 25 bp, Artificial Sequence
  Synthetic
aatcagattggcctttggtaattgt

SEQ ID NO: 21079 - DNA, 25 bp, Artificial Sequence
  Synthetic
gtgattcttgaagagtaccagcttt

SEQ ID NO: 21080 - DNA, 25 bp, Artificial Sequence
  Synthetic
cggtaccagtcttttctttgttgta

SEQ ID NO: 21081 - DNA, 24 bp, Artificial Sequence
  Synthetic
cacctccccataaaaatcccattt

SEQ ID NO: 21082 - DNA, 25 bp, Artificial Sequence
  Synthetic
cggtatattaagcgacataccagtc

SEQ ID NO: 21083 - DNA, 25 bp, Artificial Sequence
  Synthetic
gcgtcgtaaatggtattggattgat

SEQ ID NO: 21084 - DNA, 25 bp, Artificial Sequence
  Synthetic
ggtgattgacatgttcttgagtcaa

SEQ ID NO: 21085 - DNA, 25 bp, Artificial Sequence
  Synthetic
ggcaacaaatcagcaatcttgttaa

SEQ ID NO: 21086 - DNA, 25 bp, Artificial Sequence
  Synthetic
gatcgcctttgttactagattctct

SEQ ID NO: 21087 - DNA, 25 bp, Artificial Sequence
  Synthetic
ccacatatttgctttcttctagggt

SEQ ID NO: 21088 - DNA, 25 bp, Artificial Sequence
  Synthetic
ggtctaaaagagcaactcgattcaa

SEQ ID NO: 21089 - DNA, 22 bp, Artificial Sequence
  Synthetic
gccccaaagccttagaaagatt

SEQ ID NO: 21090 - DNA, 24 bp, Artificial Sequence
  Synthetic
cccttaagcatggtgataccgttt

SEQ ID NO: 21091 - DNA, 25 bp, Artificial Sequence
  Synthetic
ggtctccatgcaaatgagtaatgaa

SEQ ID NO: 21092 - DNA, 25 bp, Artificial Sequence
  Synthetic
cgtctagggttccttctaagtcttt

SEQ ID NO: 21093 - DNA, 21 bp, Artificial Sequence
  Synthetic
gcttcatgagcgatttgtgct

SEQ ID NO: 21094 - DNA, 21 bp, Artificial Sequence
  Synthetic
tccaactcgaggcattctttg

SEQ ID NO: 21095 - DNA, 21 bp, Artificial Sequence
  Synthetic
tccgataagggcaaacttggt

SEQ ID NO: 21096 - DNA, 25 bp, Artificial Sequence
  Synthetic
ccgctgttaaaaactcatctaaggc

SEQ ID NO: 21097 - DNA, 22 bp, Artificial Sequence
  Synthetic
ttaggcgtgtcaagaagacctt

SEQ ID NO: 21098 - DNA, 23 bp, Artificial Sequence
  Synthetic
tgagggcttcaactaaagcatcc

SEQ ID NO: 21099 - DNA, 21 bp, Artificial Sequence
  Synthetic
agccccatcagcaatcatttg

SEQ ID NO: 21100 - DNA, 25 bp, Artificial Sequence
  Synthetic
caaacgtcttgtgttacctcttgat

SEQ ID NO: 21101 - DNA, 21 bp, Artificial Sequence
  Synthetic
tgacatcgtgtacgcgtacaa

SEQ ID NO: 21102 - DNA, 23 bp, Artificial Sequence
  Synthetic
gttcacaaatcgcacctgctaaa

SEQ ID NO: 21103 - DNA, 25 bp, Artificial Sequence
  Synthetic
aagagattgctcaatagcttgtgtt

SEQ ID NO: 21104 - DNA, 23 bp, Artificial Sequence
  Synthetic
ggaaaagccaagaaatctgctgg

SEQ ID NO: 21105 - DNA, 23 bp, Artificial Sequence
  Synthetic
agcacccgcattcataaaaacag

SEQ ID NO: 21106 - DNA, 25 bp, Artificial Sequence
  Synthetic
gccctttaagatttgcttccatgat

SEQ ID NO: 21107 - DNA, 24 bp, Artificial Sequence
  Synthetic
ggttacttgattttcgttgtgcag

SEQ ID NO: 21108 - DNA, 24 bp, Artificial Sequence
  Synthetic
ggccttcaattcccttgtcaaatt

SEQ ID NO: 21109 - DNA, 22 bp, Artificial Sequence
  Synthetic
agcaacacgttggcaaaccatt

SEQ ID NO: 21110 - DNA, 22 bp, Artificial Sequence
  Synthetic
tattgccaccccatttgccatt

SEQ ID NO: 21111 - DNA, 25 bp, Artificial Sequence
  Synthetic
tggaggaattatggaaaatcaggaa

SEQ ID NO: 21112 - DNA, 23 bp, Artificial Sequence
  Synthetic
ttacctttcctttgcctacgttg

SEQ ID NO: 21113 - DNA, 25 bp, Artificial Sequence
  Synthetic
cggaagaaaaagatggtattgatgc

SEQ ID NO: 21114 - DNA, 25 bp, Artificial Sequence
  Synthetic
acaggctggtaccaattactcatta

SEQ ID NO: 21115 - DNA, 25 bp, Artificial Sequence
  Synthetic
ccagttacgtctttggaaaatgttt

SEQ ID NO: 21116 - DNA, 24 bp, Artificial Sequence
  Synthetic
gaatgtgccaagttgcaaaaatct

SEQ ID NO: 21117 - DNA, 23 bp, Artificial Sequence
  Synthetic
cttagtgactacacgcccaaaag

SEQ ID NO: 21118 - DNA, 20 bp, Artificial Sequence
  Synthetic
tgacgtgacagtcgaaagca

SEQ ID NO: 21119 - DNA, 24 bp, Artificial Sequence
  Synthetic
aggtctgcgctaagatatggtata

SEQ ID NO: 21120 - DNA, 21 bp, Artificial Sequence
  Synthetic
gaaggagatttcggacgaacc

SEQ ID NO: 21121 - DNA, 25 bp, Artificial Sequence
  Synthetic
tgcatttaatcttggagagcaagaa

SEQ ID NO: 21122 - DNA, 25 bp, Artificial Sequence
  Synthetic
tgctcttcctagatctcaaaaaagg

SEQ ID NO: 21123 - DNA, 21 bp, Artificial Sequence
  Synthetic
ggtggcggtgtagtggtttta

SEQ ID NO: 21124 - DNA, 22 bp, Artificial Sequence
  Synthetic
tgcagccttgcttgttaaacaa

SEQ ID NO: 21125 - DNA, 25 bp, Artificial Sequence
  Synthetic
aggaactatcatatcaggaggtctt

SEQ ID NO: 21126 - DNA, 25 bp, Artificial Sequence
  Synthetic
actcgaaaccatacagaagaaatga

SEQ ID NO: 21127 - DNA, 25 bp, Artificial Sequence
  Synthetic
cgcgaaatgctaagattatcggtaa

SEQ ID NO: 21128 - DNA, 25 bp, Artificial Sequence
  Synthetic
tcagccttctatcttgattttgcta

SEQ ID NO: 21129 - DNA, 23 bp, Artificial Sequence
  Synthetic
gcagatattcttcgactttgggt

SEQ ID NO: 21130 - DNA, 24 bp, Artificial Sequence
  Synthetic
ccaaatggcgagtttacaaaagaa

SEQ ID NO: 21131 - DNA, 24 bp, Artificial Sequence
  Synthetic
tctgtttctgatttccgtcaagat

SEQ ID NO: 21132 - DNA, 21 bp, Artificial Sequence
  Synthetic
gttacccttgagtcagggaca

SEQ ID NO: 21133 - DNA, 25 bp, Artificial Sequence
  Synthetic
cgattcaacctctttatactacgcc

SEQ ID NO: 21134 - DNA, 25 bp, Artificial Sequence
  Synthetic
cgtaaggagatggatttagcagaat

SEQ ID NO: 21135 - DNA, 20 bp, Artificial Sequence
  Synthetic
aaacagcctttccaatgcgc

SEQ ID NO: 21136 - DNA, 25 bp, Artificial Sequence
  Synthetic
agaggtaaatctcagtgaaacacaa

SEQ ID NO: 21137 - DNA, 25 bp, Artificial Sequence
  Synthetic
aggattaaaccgagtataagcgtag

SEQ ID NO: 21138 - DNA, 20 bp, Artificial Sequence
  Synthetic
ccttttcacggcggtaacac

SEQ ID NO: 21139 - DNA, 22 bp, Artificial Sequence
  Synthetic
gccccctgtgagataaggtagt

SEQ ID NO: 21140 - DNA, 22 bp, Artificial Sequence
  Synthetic
tggacttaccgctggtgtacca

SEQ ID NO: 21141 - DNA, 22 bp, Artificial Sequence
  Synthetic
gggcttagtgatccggtggtac

SEQ ID NO: 21142 - DNA, 22 bp, Artificial Sequence
  Synthetic
cgcagtgaataggcccaagcaa

SEQ ID NO: 21143 - DNA, 20 bp, Artificial Sequence
  Synthetic
gagtccggctaagcagtgag

SEQ ID NO: 21144 - DNA, 22 bp, Artificial Sequence
  Synthetic
tgtaccggggctaaaacagttt

SEQ ID NO: 21145 - DNA, 22 bp, Artificial Sequence
  Synthetic
cctacaacaagttcgagcccgt

SEQ ID NO: 21146 - DNA, 20 bp, Artificial Sequence
  Synthetic
tgagaggtcttgtggggcct

SEQ ID NO: 21147 - DNA, 25 bp, Artificial Sequence
  Synthetic
cgaaacgtaaagaagaagttgacct

SEQ ID NO: 21148 - DNA, 20 bp, Artificial Sequence
  Synthetic
gcagacaaccaaccagctgt

SEQ ID NO: 21149 - DNA, 24 bp, Artificial Sequence
  Synthetic
tgcaggattgtcattgtcagaaat

SEQ ID NO: 21150 - DNA, 24 bp, Artificial Sequence
  Synthetic
tccttgaattaggtgatggtgtct

SEQ ID NO: 21151 - DNA, 25 bp, Artificial Sequence
  Synthetic
tcgtacaactccttcagtagtatca

SEQ ID NO: 21152 - DNA, 25 bp, Artificial Sequence
  Synthetic
ccagcgatggtagttgtttataact

SEQ ID NO: 21153 - DNA, 21 bp, Artificial Sequence
  Synthetic
tcgttctcaggatctggcaaa

SEQ ID NO: 21154 - DNA, 25 bp, Artificial Sequence
  Synthetic
cgtaggtctgttagtttggtaaaca

SEQ ID NO: 21155 - DNA, 25 bp, Artificial Sequence
  Synthetic
gcagtttgctattccaagaaacttt

SEQ ID NO: 21156 - DNA, 23 bp, Artificial Sequence
  Synthetic
tggcaaaactagagaagttggga

SEQ ID NO: 21157 - DNA, 23 bp, Artificial Sequence
  Synthetic
gtcacatcacctcgtctatcacg

SEQ ID NO: 21158 - DNA, 20 bp, Artificial Sequence
  Synthetic
atttggtgagcacgagggat

SEQ ID NO: 21159 - DNA, 25 bp, Artificial Sequence
  Synthetic
acgatcgctggattctaaatttttg

SEQ ID NO: 21160 - DNA, 20 bp, Artificial Sequence
  Synthetic
ttgccgtattgctgttccgt

SEQ ID NO: 21161 - DNA, 25 bp, Artificial Sequence
  Synthetic
tctggtagtttttctttgaccttct

SEQ ID NO: 21162 - DNA, 25 bp, Artificial Sequence
  Synthetic
cataggctggcgatcaataaagatc

SEQ ID NO: 21163 - DNA, 25 bp, Artificial Sequence
  Synthetic
gagtttatcaaacgcttgaaaggct

SEQ ID NO: 21164 - DNA, 24 bp, Artificial Sequence
  Synthetic
agggtttgattttgccaaatcttg

SEQ ID NO: 21165 - DNA, 24 bp, Artificial Sequence
  Synthetic
cccgttcaaattggctcttgtatt

SEQ ID NO: 21166 - DNA, 20 bp, Artificial Sequence
  Synthetic
ggcttcttgttcagggaggg

SEQ ID NO: 21167 - DNA, 20 bp, Artificial Sequence
  Synthetic
acatgatgcgctcagaaggg

SEQ ID NO: 21168 - DNA, 25 bp, Artificial Sequence
  Synthetic
cagaaaaagcagctgaattggtaca

SEQ ID NO: 21169 - DNA, 25 bp, Artificial Sequence
  Synthetic
aggaccgtcatgaatactaaaatgt

SEQ ID NO: 21170 - DNA, 20 bp, Artificial Sequence
  Synthetic
attgcggtgtgaagacctgc

SEQ ID NO: 21171 - DNA, 25 bp, Artificial Sequence
  Synthetic
tccctacctagaagtttgtacttgt

SEQ ID NO: 21172 - DNA, 24 bp, Artificial Sequence
  Synthetic
gccaaatcgtaaacaacgttggaa

SEQ ID NO: 21173 - DNA, 23 bp, Artificial Sequence
  Synthetic
agaagcttcgcaatcactatcaa

SEQ ID NO: 21174 - DNA, 25 bp, Artificial Sequence
  Synthetic
cgatcagtgggttattggttatacg

SEQ ID NO: 21175 - DNA, 21 bp, Artificial Sequence
  Synthetic
agcgtgacaaccaatccattg

SEQ ID NO: 21176 - DNA, 25 bp, Artificial Sequence
  Synthetic
agtgaaaatccgactttcagaagtt

SEQ ID NO: 21177 - DNA, 22 bp, Artificial Sequence
  Synthetic
gcattagcaaaggcggtagccg

SEQ ID NO: 21178 - DNA, 21 bp, Artificial Sequence
  Synthetic
atgcaacggcggatgttgttg

SEQ ID NO: 21179 - DNA, 20 bp, Artificial Sequence
  Synthetic
gtccggcaacaacgcctcag

SEQ ID NO: 21180 - DNA, 21 bp, Artificial Sequence
  Synthetic
gggcatggggcaaggatttgc

SEQ ID NO: 21181 - DNA, 21 bp, Artificial Sequence
  Synthetic
gtgagggcgtactcatcggtg

SEQ ID NO: 21182 - DNA, 22 bp, Artificial Sequence
  Synthetic
tgacacccaatcccgacactgt

SEQ ID NO: 21183 - DNA, 22 bp, Artificial Sequence
  Synthetic
gcgcggatggtccaattatcca

SEQ ID NO: 21184 - DNA, 20 bp, Artificial Sequence
  Synthetic
ccaagatgcaggcgggggag

SEQ ID NO: 21185 - DNA, 22 bp, Artificial Sequence
  Synthetic
cctcataaactgccgccccatc

SEQ ID NO: 21186 - DNA, 21 bp, Artificial Sequence
  Synthetic
actcctgataggccacctgca

SEQ ID NO: 21187 - DNA, 22 bp, Artificial Sequence
  Synthetic
gccctccattgcgccttaagtt

SEQ ID NO: 21188 - DNA, 22 bp, Artificial Sequence
  Synthetic
actgtagccgccattctgttgg

SEQ ID NO: 21189 - DNA, 20 bp, Artificial Sequence
  Synthetic
gcctgtggccgaatgcttcg

SEQ ID NO: 21190 - DNA, 20 bp, Artificial Sequence
  Synthetic
aacagacggagcgactcccg

SEQ ID NO: 21191 - DNA, 21 bp, Artificial Sequence
  Synthetic
cgaacggagcaggtggtacaa

SEQ ID NO: 21192 - DNA, 22 bp, Artificial Sequence
  Synthetic
ctgcgtacgagccaacatcact

SEQ ID NO: 21193 - DNA, 19 bp, Artificial Sequence
  Synthetic
ttgagggccagaccaggct

SEQ ID NO: 21194 - DNA, 19 bp, Artificial Sequence
  Synthetic
attggtccgttggggcggg

SEQ ID NO: 21195 - DNA, 20 bp, Artificial Sequence
  Synthetic
ccaccgacgtggggactgtt

SEQ ID NO: 21196 - DNA, 22 bp, Artificial Sequence
  Synthetic
gcgatattcaacctggagggcg

SEQ ID NO: 21197 - DNA, 22 bp, Artificial Sequence
  Synthetic
ctctgcagagggcaaggtcacc

SEQ ID NO: 21198 - DNA, 25 bp, Artificial Sequence
  Synthetic
ctatcagagtcagtggtgttgtaat

SEQ ID NO: 21199 - DNA, 25 bp, Artificial Sequence
  Synthetic
cctaaccagtttacaaacttgacga

SEQ ID NO: 21200 - DNA, 21 bp, Artificial Sequence
  Synthetic
ccaaaagcaacaaaacggcat

SEQ ID NO: 21201 - DNA, 25 bp, Artificial Sequence
  Synthetic
ccacaattgcatttaacaaaagcat

SEQ ID NO: 21202 - DNA, 25 bp, Artificial Sequence
  Synthetic
gctagcagcaaatttaacatcttct

SEQ ID NO: 21203 - DNA, 25 bp, Artificial Sequence
  Synthetic
caacaatcttacctttagggcaaac

SEQ ID NO: 21204 - DNA, 25 bp, Artificial Sequence
  Synthetic
gctcccaaacattataacagtcctt

SEQ ID NO: 21205 - DNA, 25 bp, Artificial Sequence
  Synthetic
caagcaattttaccaaaacacgtct

SEQ ID NO: 21206 - DNA, 25 bp, Artificial Sequence
  Synthetic
gcaacttaatatgttgcccaatgac

SEQ ID NO: 21207 - DNA, 25 bp, Artificial Sequence
  Synthetic
acaacactcacctttttgaaaaagt

SEQ ID NO: 21208 - DNA, 25 bp, Artificial Sequence
  Synthetic
agaaacacagtttacaaggtgtgaa

SEQ ID NO: 21209 - DNA, 25 bp, Artificial Sequence
  Synthetic
cacacaacgaccaagatttttatca

SEQ ID NO: 21210 - DNA, 25 bp, Artificial Sequence
  Synthetic
tggagctacagataagacagtatca

SEQ ID NO: 21211 - DNA, 23 bp, Artificial Sequence
  Synthetic
aaccatctttaagcacactagca

SEQ ID NO: 21212 - DNA, 25 bp, Artificial Sequence
  Synthetic
caaacttagcctcatgccattgatt

SEQ ID NO: 21213 - DNA, 25 bp, Artificial Sequence
  Synthetic
acacgtccatcattaacataccatt

SEQ ID NO: 21214 - DNA, 24 bp, Artificial Sequence
  Synthetic
gcataatctaacatagccttggct

SEQ ID NO: 21215 - DNA, 24 bp, Artificial Sequence
  Synthetic
gacactgaaaaattatgcaaacgc

SEQ ID NO: 21216 - DNA, 25 bp, Artificial Sequence
  Synthetic
actaggttggtcatcaaaattacca

SEQ ID NO: 21217 - DNA, 25 bp, Artificial Sequence
  Synthetic
tgaagtccattagcaaccatgtatt

SEQ ID NO: 21218 - DNA, 25 bp, Artificial Sequence
  Synthetic
ggcacgcttcaattgtttaataagt

SEQ ID NO: 21219 - DNA, 25 bp, Artificial Sequence
  Synthetic
gaacaggtctaccatcattgtcttt

SEQ ID NO: 21220 - DNA, 25 bp, Artificial Sequence
  Synthetic
tccagaattaacagccaattcagtt

SEQ ID NO: 21221 - DNA, 25 bp, Artificial Sequence
  Synthetic
caacaaccacaaacattacacacat

SEQ ID NO: 21222 - DNA, 24 bp, Artificial Sequence
  Synthetic
gccaaagcaccagaaaagttaagt

SEQ ID NO: 21223 - DNA, 23 bp, Artificial Sequence
  Synthetic
acgcatttaagcatagctctagc

SEQ ID NO: 21224 - DNA, 25 bp, Artificial Sequence
  Synthetic
cctaactgagtgtgtgttaacatct

SEQ ID NO: 21225 - DNA, 25 bp, Artificial Sequence
  Synthetic
gcacgttctttaccactaatagcat

SEQ ID NO: 21226 - DNA, 25 bp, Artificial Sequence
  Synthetic
gcctataaaacctatctgttgcagt

SEQ ID NO: 21227 - DNA, 25 bp, Artificial Sequence
  Synthetic
ggtaccatctttgtcaactatttgc

SEQ ID NO: 21228 - DNA, 24 bp, Artificial Sequence
  Synthetic
ccagcagcttgcaatattgtagaa

SEQ ID NO: 21229 - DNA, 25 bp, Artificial Sequence
  Synthetic
gctagaatacttctcttggtttgca

SEQ ID NO: 21230 - DNA, 22 bp, Artificial Sequence
  Synthetic
gccacaaacatgagcactttca

SEQ ID NO: 21231 - DNA, 21 bp, Artificial Sequence
  Synthetic
ggaaccaacataaccccactg

SEQ ID NO: 21232 - DNA, 25 bp, Artificial Sequence
  Synthetic
tgggttgcataatcataatccaaca

SEQ ID NO: 21233 - DNA, 25 bp, Artificial Sequence
  Synthetic
gcaacattagtaggcaatgttgttt

SEQ ID NO: 21234 - DNA, 23 bp, Artificial Sequence
  Synthetic
caccacaacatccacctataagg

SEQ ID NO: 21235 - DNA, 21 bp, Artificial Sequence
  Synthetic
acacctttgtcagaaccagca

SEQ ID NO: 21236 - DNA, 25 bp, Artificial Sequence
  Synthetic
gttgaagaattgtcaggaacaccta

SEQ ID NO: 21237 - DNA, 25 bp, Artificial Sequence
  Synthetic
tggcacataaaaagtacgagttaca

SEQ ID NO: 21238 - DNA, 20 bp, Artificial Sequence
  Synthetic
agaccccgtccactagtgtg

SEQ ID NO: 21239 - DNA, 25 bp, Artificial Sequence
  Synthetic
atgagtagtgttgatagtgctgttt

SEQ ID NO: 21240 - DNA, 25 bp, Artificial Sequence
  Synthetic
agtctcaggcaaaacattatcatca

SEQ ID NO: 21241 - DNA, 22 bp, Artificial Sequence
  Synthetic
gtctggttggttacatggtgtc

SEQ ID NO: 21242 - DNA, 25 bp, Artificial Sequence
  Synthetic
gctaaacaacaaatcttccaaagca

SEQ ID NO: 21243 - DNA, 25 bp, Artificial Sequence
  Synthetic
gcctgaattgaattagaaatggcct

SEQ ID NO: 21244 - DNA, 20 bp, Artificial Sequence
  Synthetic
ggttgacgcagaacatagcc

SEQ ID NO: 21245 - DNA, 25 bp, Artificial Sequence
  Synthetic
caacaaaacacaagaagactcaaca

SEQ ID NO: 21246 - DNA, 25 bp, Artificial Sequence
  Synthetic
ggcacactactattagacatcgttt

SEQ ID NO: 21247 - DNA, 24 bp, Artificial Sequence
  Synthetic
gcagccatcaccggtaagtaataa

SEQ ID NO: 21248 - DNA, 24 bp, Artificial Sequence
  Synthetic
ggaaatttcttcctagcagctctg

SEQ ID NO: 21249 - DNA, 22 bp, Artificial Sequence
  Synthetic
cgtttgcgattaccaagactgg

SEQ ID NO: 21250 - DNA, 25 bp, Artificial Sequence
  Synthetic
ggtgacttcgactggttatcaaaac

SEQ ID NO: 21251 - DNA, 25 bp, Artificial Sequence
  Synthetic
cagtgctaacctcactatcaaagaa

SEQ ID NO: 21252 - DNA, 25 bp, Artificial Sequence
  Synthetic
cggtacctcataagactcctgataa

SEQ ID NO: 21253 - DNA, 24 bp, Artificial Sequence
  Synthetic
tcaccaagtgaggtttcctctaac

SEQ ID NO: 21254 - DNA, 23 bp, Artificial Sequence
  Synthetic
acaggttttgttgctcttgtacg

SEQ ID NO: 21255 - DNA, 25 bp, Artificial Sequence
  Synthetic
ccccatgtaaaaacagttgaagaca

SEQ ID NO: 21256 - DNA, 25 bp, Artificial Sequence
  Synthetic
gcgaaatggaaaagaacttgttctt

SEQ ID NO: 21257 - DNA, 20 bp, Artificial Sequence
  Synthetic
aacctcaagtgtgctgccac

SEQ ID NO: 21258 - DNA, 20 bp, Artificial Sequence
  Synthetic
tgctgggcggtgtcactctc

SEQ ID NO: 21259 - DNA, 23 bp, Artificial Sequence
  Synthetic
caagaaacttctctcgttgagcc

SEQ ID NO: 21260 - DNA, 25 bp, Artificial Sequence
  Synthetic
tcagcaattgttgtatgctcaattt

SEQ ID NO: 21261 - DNA, 25 bp, Artificial Sequence
  Synthetic
gttggtattgggaagtctctaccta

SEQ ID NO: 21262 - DNA, 21 bp, Artificial Sequence
  Synthetic
ctaccaaggggatatcctcgc

SEQ ID NO: 21263 - DNA, 22 bp, Artificial Sequence
  Synthetic
cactggtgtctgagcaagagca

SEQ ID NO: 21264 - DNA, 25 bp, Artificial Sequence
  Synthetic
tggaactaatgactgttgtttgact

SEQ ID NO: 21265 - DNA, 23 bp, Artificial Sequence
  Synthetic
gttgcatggtagaagagattggt

SEQ ID NO: 21266 - DNA, 25 bp, Artificial Sequence
  Synthetic
ttgtctagaatctccatttgcatga

SEQ ID NO: 21267 - DNA, 25 bp, Artificial Sequence
  Synthetic
gcttgaacaacatctaaagggacat

SEQ ID NO: 21268 - DNA, 22 bp, Artificial Sequence
  Synthetic
tcgctgaagccagtaagatcta

SEQ ID NO: 21269 - DNA, 25 bp, Artificial Sequence
  Synthetic
gggattaacaaaaagaaaggacagc

SEQ ID NO: 21270 - DNA, 20 bp, Artificial Sequence
  Synthetic
gttggcaaaccgtctttggg

SEQ ID NO: 21271 - DNA, 22 bp, Artificial Sequence
  Synthetic
cagttctctgatggagagcaga

SEQ ID NO: 21272 - DNA, 22 bp, Artificial Sequence
  Synthetic
ggaatttccctgactttgtggt

SEQ ID NO: 21273 - DNA, 23 bp, Artificial Sequence
  Synthetic
tgtcaacttcatttggcaacgat

SEQ ID NO: 21274 - DNA, 25 bp, Artificial Sequence
  Synthetic
gcaatatccattcaggtgtttttcc

SEQ ID NO: 21275 - DNA, 25 bp, Artificial Sequence
  Synthetic
gctgcaaccaaaaatgacttttact

SEQ ID NO: 21276 - DNA, 25 bp, Artificial Sequence
  Synthetic
gcacttgctcttgttttattaaggt

SEQ ID NO: 21277 - DNA, 24 bp, Artificial Sequence
  Synthetic
cctctaccagttccaataccaaga

SEQ ID NO: 21278 - DNA, 24 bp, Artificial Sequence
  Synthetic
ggaagatcagaagcagggtgaatt

SEQ ID NO: 21279 - DNA, 20 bp, Artificial Sequence
  Synthetic
gtgtcaaagctggatgcacg

SEQ ID NO: 21280 - DNA, 25 bp, Artificial Sequence
  Synthetic
ctcctgctttgtcatgatcactatt

SEQ ID NO: 21281 - DNA, 25 bp, Artificial Sequence
  Synthetic
gggcacatcagataaatttccttgt

SEQ ID NO: 21282 - DNA, 25 bp, Artificial Sequence
  Synthetic
tgggaacagcaaaataattgtctgt

SEQ ID NO: 21283 - DNA, 25 bp, Artificial Sequence
  Synthetic
cataccgtacttaaggagtcacatc

SEQ ID NO: 21284 - DNA, 22 bp, Artificial Sequence
  Synthetic
gacccacctcaatttgtgttgt

SEQ ID NO: 21285 - DNA, 22 bp, Artificial Sequence
  Synthetic
gctcaaacccttcaattccagc

SEQ ID NO: 21286 - DNA, 20 bp, Artificial Sequence
  Synthetic
gggtgcttgaggaaggttcc

SEQ ID NO: 21287 - DNA, 20 bp, Artificial Sequence
  Synthetic
gactcccaccgcagtttcag

SEQ ID NO: 21288 - DNA, 25 bp, Artificial Sequence
  Synthetic
gggaaaatttagcctatagcctagg

SEQ ID NO: 21289 - DNA, 20 bp, Artificial Sequence
  Synthetic
acactgcaaggtgacgttcc

SEQ ID NO: 21290 - DNA, 25 bp, Artificial Sequence
  Synthetic
gcagtcctatcaactgattgaatca

SEQ ID NO: 21291 - DNA, 25 bp, Artificial Sequence
  Synthetic
atgccaaatcttgcatatgtatggt

SEQ ID NO: 21292 - DNA, 25 bp, Artificial Sequence
  Synthetic
accaaactctaattgtcaattccca

SEQ ID NO: 21293 - DNA, 25 bp, Artificial Sequence
  Synthetic
atgagtaattttgatcccaccaccc

SEQ ID NO: 21294 - DNA, 25 bp, Artificial Sequence
  Synthetic
gccaggaacaaaacaaaacagtaat

SEQ ID NO: 21295 - DNA, 25 bp, Artificial Sequence
  Synthetic
cgttagaaggagaggtcaatctgtt

SEQ ID NO: 21296 - DNA, 21 bp, Artificial Sequence
  Synthetic
tgttgtgatagctcccacagg

SEQ ID NO: 21297 - DNA, 25 bp, Artificial Sequence
  Synthetic
tgaaacaagttgaaaaaccacctca

SEQ ID NO: 21298 - DNA, 25 bp, Artificial Sequence
  Synthetic
gcttcctgcattctatatgactctc

SEQ ID NO: 21299 - DNA, 25 bp, Artificial Sequence
  Synthetic
aatccaaacctccttaaagctctag

SEQ ID NO: 21300 - DNA, 22 bp, Artificial Sequence
  Synthetic
cctcatctgttgtgttttggcc

SEQ ID NO: 21301 - DNA, 25 bp, Artificial Sequence
  Synthetic
caacccacttgtgattagtaacaga

SEQ ID NO: 21302 - DNA, 24 bp, Artificial Sequence
  Synthetic
caactccaaactgaaccaagttct

SEQ ID NO: 21303 - DNA, 22 bp, Artificial Sequence
  Synthetic
tgcccaagattgcattctgtat

SEQ ID NO: 21304 - DNA, 25 bp, Artificial Sequence
  Synthetic
gccattggatcaatttcagctttag

SEQ ID NO: 21305 - DNA, 25 bp, Artificial Sequence
  Synthetic
gcaataaaccattttcatccaacca

SEQ ID NO: 21306 - DNA, 25 bp, Artificial Sequence
  Synthetic
cctgtatggaaacctggattcaaat

SEQ ID NO: 21307 - DNA, 20 bp, Artificial Sequence
  Synthetic
ttgccgtgctgttgtcattt

SEQ ID NO: 21308 - DNA, 22 bp, Artificial Sequence
  Synthetic
tttgctgcgttcaacaaaaagg

SEQ ID NO: 21309 - DNA, 25 bp, Artificial Sequence
  Synthetic
cccccaaatgtacagtttgtcaaat

SEQ ID NO: 21310 - DNA, 24 bp, Artificial Sequence
  Synthetic
cgtattttgaagtaaccccgagga

SEQ ID NO: 21311 - DNA, 25 bp, Artificial Sequence
  Synthetic
ccattttctatgaaacccgcgattg

SEQ ID NO: 21312 - DNA, 23 bp, Artificial Sequence
  Synthetic
cgcgttgtatgaccagagatcta

SEQ ID NO: 21313 - DNA, 25 bp, Artificial Sequence
  Synthetic
aggatccaatctttgtatcctgact

SEQ ID NO: 21314 - DNA, 25 bp, Artificial Sequence
  Synthetic
tccatctcaacaatgaacagagatc

SEQ ID NO: 21315 - DNA, 25 bp, Artificial Sequence
  Synthetic
tcgtcccttgactgttttttcataa

SEQ ID NO: 21316 - DNA, 20 bp, Artificial Sequence
  Synthetic
caggtcaatgggcaggacaa

SEQ ID NO: 21317 - DNA, 25 bp, Artificial Sequence
  Synthetic
acacccttctttaggatcaatacct

SEQ ID NO: 21318 - DNA, 22 bp, Artificial Sequence
  Synthetic
gctaagctgctgcaactctttc

SEQ ID NO: 21319 - DNA, 25 bp, Artificial Sequence
  Synthetic
cccgacaacaagtcttattgctatt

SEQ ID NO: 21320 - DNA, 20 bp, Artificial Sequence
  Synthetic
tgaagccacccatgaccatg

SEQ ID NO: 21321 - DNA, 20 bp, Artificial Sequence
  Synthetic
atgtgccagctgccttacag

SEQ ID NO: 21322 - DNA, 20 bp, Artificial Sequence
  Synthetic
actgaaggtgcaacagggtc

SEQ ID NO: 21323 - DNA, 20 bp, Artificial Sequence
  Synthetic
ttgagtgccaacctgtgctc

SEQ ID NO: 21324 - DNA, 23 bp, Artificial Sequence
  Synthetic
accacaatgatgacatctgcaaa

SEQ ID NO: 21325 - DNA, 22 bp, Artificial Sequence
  Synthetic
cggtaagtgtaccctaaaggcc

SEQ ID NO: 21326 - DNA, 20 bp, Artificial Sequence
  Synthetic
ccaatgttcccccaagcagg

SEQ ID NO: 21327 - DNA, 25 bp, Artificial Sequence
  Synthetic
cctctacaaaacatatgtctggcat

SEQ ID NO: 21328 - DNA, 25 bp, Artificial Sequence
  Synthetic
caatgtcacagtagttaccaggatg

SEQ ID NO: 21329 - DNA, 21 bp, Artificial Sequence
  Synthetic
cagcagaaagccggattgaat

SEQ ID NO: 21330 - DNA, 22 bp, Artificial Sequence
  Synthetic
tgacacaaacatgcaaccatgc

SEQ ID NO: 21331 - DNA, 22 bp, Artificial Sequence
  Synthetic
tcgaggataacaggaacactcc

SEQ ID NO: 21332 - DNA, 20 bp, Artificial Sequence
  Synthetic
tcccatccacacgtcatctc

SEQ ID NO: 21333 - DNA, 18 bp, Artificial Sequence
  Synthetic
gctgctccagcgtgtcgt

SEQ ID NO: 21334 - DNA, 21 bp, Artificial Sequence
  Synthetic
gctctcccactccaacacggg

SEQ ID NO: 21335 - DNA, 22 bp, Artificial Sequence
  Synthetic
tgcggagatgtggagagaaacg

SEQ ID NO: 21336 - DNA, 22 bp, Artificial Sequence
  Synthetic
acgtatacgaagggtggctcgt

SEQ ID NO: 21337 - DNA, 18 bp, Artificial Sequence
  Synthetic
tccgttgtgctcgacgcc

SEQ ID NO: 21338 - DNA, 22 bp, Artificial Sequence
  Synthetic
gcgtatcctcgtctgccctctg

SEQ ID NO: 21339 - DNA, 22 bp, Artificial Sequence
  Synthetic
gcggggctttctttgagttcgc

SEQ ID NO: 21340 - DNA, 19 bp, Artificial Sequence
  Synthetic
tctcgccgaggacgcgttc

SEQ ID NO: 21341 - DNA, 21 bp, Artificial Sequence
  Synthetic
ataccattcccaaccatccct

SEQ ID NO: 21342 - DNA, 20 bp, Artificial Sequence
  Synthetic
tggttaagctgggcgattgt

SEQ ID NO: 21343 - DNA, 20 bp, Artificial Sequence
  Synthetic
tgtgagtcaaaacggaggct

SEQ ID NO: 21344 - DNA, 21 bp, Artificial Sequence
  Synthetic
ccatttcccacaaagtctgcc

SEQ ID NO: 21345 - DNA, 22 bp, Artificial Sequence
  Synthetic
tgcaagtttgtaaggcgtgttt

SEQ ID NO: 21346 - DNA, 25 bp, Artificial Sequence
  Synthetic
cctctatgttgcgaaagtatgcttt

SEQ ID NO: 21347 - DNA, 23 bp, Artificial Sequence
  Synthetic
tctgcggtaaacctgtactagat

SEQ ID NO: 21348 - DNA, 20 bp, Artificial Sequence
  Synthetic
cagtgcgacacaactaacga

SEQ ID NO: 21349 - DNA, 21 bp, Artificial Sequence
  Synthetic
cgccccggctttataacattt

SEQ ID NO: 21350 - DNA, 21 bp, Artificial Sequence
  Synthetic
gttgctgtccggttgtaacat

SEQ ID NO: 21351 - DNA, 20 bp, Artificial Sequence
  Synthetic
ttttccccccctgatcggag

SEQ ID NO: 21352 - DNA, 20 bp, Artificial Sequence
  Synthetic
accctcgggaaggttctctt

SEQ ID NO: 21353 - DNA, 20 bp, Artificial Sequence
  Synthetic
atcgcgcaatcgaaccattc

SEQ ID NO: 21354 - DNA, 23 bp, Artificial Sequence
  Synthetic
gcaatgtgatcaacgacgtttta

SEQ ID NO: 21355 - DNA, 24 bp, Artificial Sequence
  Synthetic
caaagcaattcctctatcgcagaa

SEQ ID NO: 21356 - DNA, 22 bp, Artificial Sequence
  Synthetic
cctgtaaactggtctgcttgca

SEQ ID NO: 21357 - DNA, 22 bp, Artificial Sequence
  Synthetic
aatctctaacccgtcatctcca

SEQ ID NO: 21358 - DNA, 25 bp, Artificial Sequence
  Synthetic
cacaaatcatcgtcgaacaataagg

SEQ ID NO: 21359 - DNA, 22 bp, Artificial Sequence
  Synthetic
gattccgccgtactgaaaaaac

SEQ ID NO: 21360 - DNA, 21 bp, Artificial Sequence
  Synthetic
ggcagaacagagaccccccct

SEQ ID NO: 21361 - DNA, 19 bp, Artificial Sequence
  Synthetic
cgcgaagtgttccgcgacg

SEQ ID NO: 21362 - DNA, 20 bp, Artificial Sequence
  Synthetic
gggcgttcgttccgcacata

SEQ ID NO: 21363 - DNA, 19 bp, Artificial Sequence
  Synthetic
gcgatctccacctcgcgtg

SEQ ID NO: 21364 - DNA, 21 bp, Artificial Sequence
  Synthetic
aggaaaacgagtacgcgcacc

SEQ ID NO: 21365 - DNA, 24 bp, Artificial Sequence
  Synthetic
ccgacttcgataaacctcttggtt

SEQ ID NO: 21366 - DNA, 25 bp, Artificial Sequence
  Synthetic
tcctttttcaatttcttcttcccct

SEQ ID NO: 21367 - DNA, 22 bp, Artificial Sequence
  Synthetic
tggaacttctggtagctcatgg

SEQ ID NO: 21368 - DNA, 20 bp, Artificial Sequence
  Synthetic
catctcctgtggcccacttg

SEQ ID NO: 21369 - DNA, 25 bp, Artificial Sequence
  Synthetic
agggagccaattttaaagacagtat

SEQ ID NO: 21370 - DNA, 25 bp, Artificial Sequence
  Synthetic
tgagtcccaatactgaaagttttgg

SEQ ID NO: 21371 - DNA, 25 bp, Artificial Sequence
  Synthetic
gaaggttaacagagtgtgttactgt

SEQ ID NO: 21372 - DNA, 20 bp, Artificial Sequence
  Synthetic
tcctgggtaacacgttccat

SEQ ID NO: 21373 - DNA, 23 bp, Artificial Sequence
  Synthetic
agagactttgttggtcagcacta

SEQ ID NO: 21374 - DNA, 25 bp, Artificial Sequence
  Synthetic
cgtggactggtgtatctgaaatgat

SEQ ID NO: 21375 - DNA, 20 bp, Artificial Sequence
  Synthetic
tctaccatccctgtccaccc

SEQ ID NO: 21376 - DNA, 19 bp, Artificial Sequence
  Synthetic
agcacgagccaaggggacg

SEQ ID NO: 21377 - DNA, 19 bp, Artificial Sequence
  Synthetic
aggtgcgtacacggccacc

SEQ ID NO: 21378 - DNA, 20 bp, Artificial Sequence
  Synthetic
tcgttcaggtcaagcgccag

SEQ ID NO: 21379 - DNA, 21 bp, Artificial Sequence
  Synthetic
gcaggagtcggtcgatcgtct

SEQ ID NO: 21380 - DNA, 19 bp, Artificial Sequence
  Synthetic
gccggcgagcgtttgcttg

SEQ ID NO: 21381 - DNA, 20 bp, Artificial Sequence
  Synthetic
ctcatacgccacggggtccc

SEQ ID NO: 21382 - DNA, 19 bp, Artificial Sequence
  Synthetic
gcctccgctgcctatcgga

SEQ ID NO: 21383 - DNA, 20 bp, Artificial Sequence
  Synthetic
ggagaagaggtggcggctca

SEQ ID NO: 21384 - DNA, 19 bp, Artificial Sequence
  Synthetic
ttgcgtcgcttcgagcccg

SEQ ID NO: 21385 - DNA, 21 bp, Artificial Sequence
  Synthetic
gccaagctgtctcgcggatac

SEQ ID NO: 21386 - DNA, 20 bp, Artificial Sequence
  Synthetic
gtatgacggccccagattcg

SEQ ID NO: 21387 - DNA, 21 bp, Artificial Sequence
  Synthetic
atgagaacagctgctctctgt

SEQ ID NO: 21388 - DNA, 22 bp, Artificial Sequence
  Synthetic
cgtctgactgtttgcgattctg

SEQ ID NO: 21389 - DNA, 20 bp, Artificial Sequence
  Synthetic
cgtgcctgctttttagcgtg

SEQ ID NO: 21390 - DNA, 21 bp, Artificial Sequence
  Synthetic
tctcggattgcgtcgttatga

SEQ ID NO: 21391 - DNA, 23 bp, Artificial Sequence
  Synthetic
gcccagagagattgcaactactt

SEQ ID NO: 21392 - DNA, 20 bp, Artificial Sequence
  Synthetic
cggcccattggaacgaacat

SEQ ID NO: 21393 - DNA, 25 bp, Artificial Sequence
  Synthetic
cggtatacgcgtttagtagaatgct

SEQ ID NO: 21394 - DNA, 20 bp, Artificial Sequence
  Synthetic
gcgtgtttagtgggtgcagt

SEQ ID NO: 21395 - DNA, 24 bp, Artificial Sequence
  Synthetic
tcagacctctcatcgttcacataa

SEQ ID NO: 21396 - DNA, 22 bp, Artificial Sequence
  Synthetic
tggaagtccgacagatgcaata

SEQ ID NO: 21397 - DNA, 24 bp, Artificial Sequence
  Synthetic
agtcttagtgaggactgactttga

SEQ ID NO: 21398 - DNA, 24 bp, Artificial Sequence
  Synthetic
tcagacatgggaagcaagatacaa

SEQ ID NO: 21399 - DNA, 21 bp, Artificial Sequence
  Synthetic
acacaaggcaattttagccct

SEQ ID NO: 21400 - DNA, 21 bp, Artificial Sequence
  Synthetic
cgcccatatgctaaacgaacg

SEQ ID NO: 21401 - DNA, 25 bp, Artificial Sequence
  Synthetic
ggactagtgttcgcattagagaatc

SEQ ID NO: 21402 - DNA, 21 bp, Artificial Sequence
  Synthetic
cggcctggaatacaagaccat

SEQ ID NO: 21403 - DNA, 22 bp, Artificial Sequence
  Synthetic
accatgacctcgagaatctctc

SEQ ID NO: 21404 - DNA, 22 bp, Artificial Sequence
  Synthetic
agacgttcgagacctgttcaaa

SEQ ID NO: 21405 - DNA, 23 bp, Artificial Sequence
  Synthetic
acaaccattgagtgagaatacgc

SEQ ID NO: 21406 - DNA, 19 bp, Artificial Sequence
  Synthetic
cgagccaaggggacgatcc

SEQ ID NO: 21407 - DNA, 21 bp, Artificial Sequence
  Synthetic
cgtctccgatccgtcaggacc

SEQ ID NO: 21408 - DNA, 21 bp, Artificial Sequence
  Synthetic
tctcgctccgcttggttttcc

SEQ ID NO: 21409 - DNA, 21 bp, Artificial Sequence
  Synthetic
gtctgcggaccccgatgtaaa

SEQ ID NO: 21410 - DNA, 20 bp, Artificial Sequence
  Synthetic
cctcgccttgcaaactccgt

SEQ ID NO: 21411 - DNA, 25 bp, Artificial Sequence
  Synthetic
ccctcttgagcttcctatacagttt

SEQ ID NO: 21412 - DNA, 23 bp, Artificial Sequence
  Synthetic
agcgacggtaaatgcatttgaaa

SEQ ID NO: 21413 - DNA, 22 bp, Artificial Sequence
  Synthetic
ccgatcaaggaatggggcatca

SEQ ID NO: 21414 - DNA, 25 bp, Artificial Sequence
  Synthetic
ggcctattatcttttgcctaggcat

SEQ ID NO: 21415 - DNA, 25 bp, Artificial Sequence
  Synthetic
agtttctccaagcgaatctctgtat

SEQ ID NO: 21416 - DNA, 23 bp, Artificial Sequence
  Synthetic
ccagatcaggttttttgggttgg

SEQ ID NO: 21417 - DNA, 24 bp, Artificial Sequence
  Synthetic
tcttcttccactgttggtgcatat

SEQ ID NO: 21418 - DNA, 21 bp, Artificial Sequence
  Synthetic
ggttgctcacgctgtctattg

SEQ ID NO: 21419 - DNA, 21 bp, Artificial Sequence
  Synthetic
tctgtacctgaatcgtctgcc

SEQ ID NO: 21420 - DNA, 25 bp, Artificial Sequence
  Synthetic
cggactaagttgctgtataacatca

SEQ ID NO: 21421 - DNA, 22 bp, Artificial Sequence
  Synthetic
tgccgcactactgtttctctat

SEQ ID NO: 21422 - DNA, 22 bp, Artificial Sequence
  Synthetic
cccattatcatatgcccactgc

SEQ ID NO: 21423 - DNA, 20 bp, Artificial Sequence
  Synthetic
tcctggcacaaatctaggcg

SEQ ID NO: 21424 - DNA, 25 bp, Artificial Sequence
  Synthetic
cgtccatggctctaagttatattca

SEQ ID NO: 21425 - DNA, 24 bp, Artificial Sequence
  Synthetic
tgtttccagtgtccacgtattttc

SEQ ID NO: 21426 - DNA, 25 bp, Artificial Sequence
  Synthetic
ggtgtgtggtagatgtaacatgtac

SEQ ID NO: 21427 - DNA, 22 bp, Artificial Sequence
  Synthetic
cacaggcaaatatggtgtacct

SEQ ID NO: 21428 - DNA, 25 bp, Artificial Sequence
  Synthetic
ctctgtattgatgtccagacacttt

SEQ ID NO: 21429 - DNA, 25 bp, Artificial Sequence
  Synthetic
acccataccccaatattctccaata

SEQ ID NO: 21430 - DNA, 25 bp, Artificial Sequence
  Synthetic
cacacatacacaatcatcgttttgt

SEQ ID NO: 21431 - DNA, 25 bp, Artificial Sequence
  Synthetic
agtgtaattaaaggtgtggcaacct

SEQ ID NO: 21432 - DNA, 25 bp, Artificial Sequence
  Synthetic
tggtcgctcttctgtattttcaaat

SEQ ID NO: 21433 - DNA, 21 bp, Artificial Sequence
  Synthetic
gccccgtacactgaacaattg

SEQ ID NO: 21434 - DNA, 25 bp, Artificial Sequence
  Synthetic
caggtcaatctcagtttgtggtata

SEQ ID NO: 21435 - DNA, 24 bp, Artificial Sequence
  Synthetic
cgttttaatttctgcagcgtctgt

SEQ ID NO: 21436 - DNA, 23 bp, Artificial Sequence
  Synthetic
cacatccatatcacttcctgacc

SEQ ID NO: 21437 - DNA, 25 bp, Artificial Sequence
  Synthetic
ccactgcaccattttagatagttca

SEQ ID NO: 21438 - DNA, 22 bp, Artificial Sequence
  Synthetic
tgtactattggcttccagtccc

SEQ ID NO: 21439 - DNA, 25 bp, Artificial Sequence
  Synthetic
ggaccatgtcctttcaaaaaaacat

SEQ ID NO: 21440 - DNA, 22 bp, Artificial Sequence
  Synthetic
acgttttatggccgtcatgtat

SEQ ID NO: 21441 - DNA, 20 bp, Artificial Sequence
  Synthetic
cgggctctgtggttctggga

SEQ ID NO: 21442 - DNA, 25 bp, Artificial Sequence
  Synthetic
gcacagtttacatttgtccaatgat

SEQ ID NO: 21443 - DNA, 25 bp, Artificial Sequence
  Synthetic
gcaaaaacacaaaactaacacacaa

SEQ ID NO: 21444 - DNA, 20 bp, Artificial Sequence
  Synthetic
tacctcaccagtttggggga

SEQ ID NO: 21445 - DNA, 20 bp, Artificial Sequence
  Synthetic
atcaggatcaggtgccacac

SEQ ID NO: 21446 - DNA, 21 bp, Artificial Sequence
  Synthetic
gccataacgcaaatgtggagc

SEQ ID NO: 21447 - DNA, 22 bp, Artificial Sequence
  Synthetic
tgtcctctaagctagtggcaac

SEQ ID NO: 21448 - DNA, 23 bp, Artificial Sequence
  Synthetic
gtaaaagcatagttggcagccta

SEQ ID NO: 21449 - DNA, 20 bp, Artificial Sequence
  Synthetic
gaggggagggaaaaactggc

SEQ ID NO: 21450 - DNA, 22 bp, Artificial Sequence
  Synthetic
aggctggaccactgttaccagt

SEQ ID NO: 21451 - DNA, 22 bp, Artificial Sequence
  Synthetic
gcctcaacagatggtgattgta

SEQ ID NO: 21452 - DNA, 23 bp, Artificial Sequence
  Synthetic
caccagaaaattcagcacacatg

SEQ ID NO: 21453 - DNA, 25 bp, Artificial Sequence
  Synthetic
caaaggctgtgatgtaatgtctact

SEQ ID NO: 21454 - DNA, 21 bp, Artificial Sequence
  Synthetic
tccaacatcccacacaacatg

SEQ ID NO: 21455 - DNA, 24 bp, Artificial Sequence
  Synthetic
tgtcctgtccattatagtcagtgt

SEQ ID NO: 21456 - DNA, 25 bp, Artificial Sequence
  Synthetic
ccagaatattgacatattggtgcct

SEQ ID NO: 21457 - DNA, 25 bp, Artificial Sequence
  Synthetic
cagcacagtgaaattgtctaagatc

SEQ ID NO: 21458 - DNA, 22 bp, Artificial Sequence
  Synthetic
tggtgaaccattgcaaccaatt

SEQ ID NO: 21459 - DNA, 25 bp, Artificial Sequence
  Synthetic
tgtctccttcttttgtcttcttcca

SEQ ID NO: 21460 - DNA, 25 bp, Artificial Sequence
  Synthetic
cctcagcttgtacttacctggataa

SEQ ID NO: 21461 - DNA, 25 bp, Artificial Sequence
  Synthetic
agcaacgaatagtaatgctctgtaa

SEQ ID NO: 21462 - DNA, 25 bp, Artificial Sequence
  Synthetic
tgaaccatctgtactttcatcgaaa

SEQ ID NO: 21463 - DNA, 25 bp, Artificial Sequence
  Synthetic
tgcctcaattacttcttctaaagca

SEQ ID NO: 21464 - DNA, 25 bp, Artificial Sequence
  Synthetic
accatttgactgcaatctctaacat

SEQ ID NO: 21465 - DNA, 25 bp, Artificial Sequence
  Synthetic
ggtagtttaatttgttgtgggactc

SEQ ID NO: 21466 - DNA, 25 bp, Artificial Sequence
  Synthetic
ctcagaggcatactgtgatttactt

SEQ ID NO: 21467 - DNA, 22 bp, Artificial Sequence
  Synthetic
ggcctcctctcaggggaattga

SEQ ID NO: 21468 - DNA, 24 bp, Artificial Sequence
  Synthetic
cacgtttatttctacctgctctgt

SEQ ID NO: 21469 - DNA, 21 bp, Artificial Sequence
  Synthetic
tggattaccccctacaccacc

SEQ ID NO: 21470 - DNA, 20 bp, Artificial Sequence
  Synthetic
agtctgcatcaggagcagct

SEQ ID NO: 21471 - DNA, 25 bp, Artificial Sequence
  Synthetic
gctctgtttgtgatggtataatggt

SEQ ID NO: 21472 - DNA, 25 bp, Artificial Sequence
  Synthetic
tgggtatgtgttaggattttcaaca

SEQ ID NO: 21473 - DNA, 25 bp, Artificial Sequence
  Synthetic
gggaagcaagtttattatcctgctt

SEQ ID NO: 21474 - DNA, 25 bp, Artificial Sequence
  Synthetic
gcgtaagggtcagttttttccttat

SEQ ID NO: 21475 - DNA, 19 bp, Artificial Sequence
  Synthetic
actgtcgccagtggggtgc

SEQ ID NO: 21476 - DNA, 25 bp, Artificial Sequence
  Synthetic
acactatttgtcaccataagcaagt

SEQ ID NO: 21477 - DNA, 23 bp, Artificial Sequence
  Synthetic
tgcttcaacagttggtgacatta

SEQ ID NO: 21478 - DNA, 21 bp, Artificial Sequence
  Synthetic
acagattttgcccgaagatgc

SEQ ID NO: 21479 - DNA, 25 bp, Artificial Sequence
  Synthetic
agggtcccattacaattaaagaagg

SEQ ID NO: 21480 - DNA, 20 bp, Artificial Sequence
  Synthetic
cttggcagccgtgttggtaa

SEQ ID NO: 21481 - DNA, 25 bp, Artificial Sequence
  Synthetic
gtggtagaaaagagagtgttgctaa

SEQ ID NO: 21482 - DNA, 24 bp, Artificial Sequence
  Synthetic
accttgtctatgtagtcctcaact

SEQ ID NO: 21483 - DNA, 25 bp, Artificial Sequence
  Synthetic
catgctcttggaagtttatatccca

SEQ ID NO: 21484 - DNA, 25 bp, Artificial Sequence
  Synthetic
tctggggacatcataaccatcataa

SEQ ID NO: 21485 - DNA, 25 bp, Artificial Sequence
  Synthetic
tcagtcctgtggttaataaagtgtt

SEQ ID NO: 21486 - DNA, 25 bp, Artificial Sequence
  Synthetic
gtcgtgtgcttctaatttaactggt

SEQ ID NO: 21487 - DNA, 23 bp, Artificial Sequence
  Synthetic
gctaccaaaggcactccctaatt

SEQ ID NO: 21488 - DNA, 25 bp, Artificial Sequence
  Synthetic
ggtctagtgatgtttaaccactgac

SEQ ID NO: 21489 - DNA, 25 bp, Artificial Sequence
  Synthetic
acttcttgttgatcatacccatcaa

SEQ ID NO: 21490 - DNA, 25 bp, Artificial Sequence
  Synthetic
ggtacccttgcaagatcttaagatc

SEQ ID NO: 21491 - DNA, 23 bp, Artificial Sequence
  Synthetic
ccaagccctgaaatatagctgtt

SEQ ID NO: 21492 - DNA, 23 bp, Artificial Sequence
  Synthetic
actcaggtttcttcttgggtgta

SEQ ID NO: 21493 - DNA, 24 bp, Artificial Sequence
  Synthetic
cctatgatattacctgtgttggcc

SEQ ID NO: 21494 - DNA, 22 bp, Artificial Sequence
  Synthetic
gtgaggtctacttccaatcgtg

SEQ ID NO: 21495 - DNA, 25 bp, Artificial Sequence
  Synthetic
ccttgtgtctttagtagcgttgttt

SEQ ID NO: 21496 - DNA, 23 bp, Artificial Sequence
  Synthetic
gcatgcatttgtgaccaaaacac

SEQ ID NO: 21497 - DNA, 25 bp, Artificial Sequence
  Synthetic
tgcattgagtaaacaggatgtatca

SEQ ID NO: 21498 - DNA, 25 bp, Artificial Sequence
  Synthetic
cttctcttgtcttcctgatgtgtat

SEQ ID NO: 21499 - DNA, 20 bp, Artificial Sequence
  Synthetic
ttgtcggcccattcctgttc

SEQ ID NO: 21500 - DNA, 25 bp, Artificial Sequence
  Synthetic
ggagctcttctttcttctcttttgt

SEQ ID NO: 21501 - DNA, 25 bp, Artificial Sequence
  Synthetic
tgtgaattcttcatacccctcatgt

SEQ ID NO: 21502 - DNA, 21 bp, Artificial Sequence
  Synthetic
cctcaggagttgatgcatggg

SEQ ID NO: 21503 - DNA, 25 bp, Artificial Sequence
  Synthetic
tgtttcactaacctcttcaggagat

SEQ ID NO: 21504 - DNA, 20 bp, Artificial Sequence
  Synthetic
gacttgcttccgggctaggc

SEQ ID NO: 21505 - DNA, 21 bp, Artificial Sequence
  Synthetic
ggatttaacacggacgcggaa

SEQ ID NO: 21506 - DNA, 20 bp, Artificial Sequence
  Synthetic
cttcgtttgggtcgttctcc

SEQ ID NO: 21507 - DNA, 22 bp, Artificial Sequence
  Synthetic
ggtctgttcccggtgatattga

SEQ ID NO: 21508 - DNA, 22 bp, Artificial Sequence
  Synthetic
cccacgtcctgcaacaaatcct

SEQ ID NO: 21509 - DNA, 20 bp, Artificial Sequence
  Synthetic
gtctccaaaacccggagcac

SEQ ID NO: 21510 - DNA, 20 bp, Artificial Sequence
  Synthetic
tctgtccccgctgcctcatc

SEQ ID NO: 21511 - DNA, 20 bp, Artificial Sequence
  Synthetic
cttgcaatctgggcgcaggg

SEQ ID NO: 21512 - DNA, 22 bp, Artificial Sequence
  Synthetic
cggtacagactcccaggtagca

SEQ ID NO: 21513 - DNA, 21 bp, Artificial Sequence
  Synthetic
gatgccgttcaggttcaccct

SEQ ID NO: 21514 - DNA, 19 bp, Artificial Sequence
  Synthetic
tgctggaagcactgggcgc

SEQ ID NO: 21515 - DNA, 20 bp, Artificial Sequence
  Synthetic
cacctctaccgggtcctgga

SEQ ID NO: 21516 - DNA, 20 bp, Artificial Sequence
  Synthetic
tgcacaacatgaacccccgg

SEQ ID NO: 21517 - DNA, 19 bp, Artificial Sequence
  Synthetic
aaccgggtgcggcaagtcc

SEQ ID NO: 21518 - DNA, 22 bp, Artificial Sequence
  Synthetic
ccccgaaacgaggaagtctgct

SEQ ID NO: 21519 - DNA, 21 bp, Artificial Sequence
  Synthetic
ctgtacgccctgcaatccctc

SEQ ID NO: 21520 - DNA, 22 bp, Artificial Sequence
  Synthetic
gccttcgtctcagagtggtccg

SEQ ID NO: 21521 - DNA, 21 bp, Artificial Sequence
  Synthetic
tgacaacctgagtgccgaggt

SEQ ID NO: 21522 - DNA, 19 bp, Artificial Sequence
  Synthetic
cgcgtcaggattgtgcccg

SEQ ID NO: 21523 - DNA, 19 bp, Artificial Sequence
  Synthetic
tacgtgcgcgccagcatcc

SEQ ID NO: 21524 - DNA, 20 bp, Artificial Sequence
  Synthetic
cgctcaagcttacgccctcc

SEQ ID NO: 21525 - DNA, 22 bp, Artificial Sequence
  Synthetic
cgcccgcgattcatggaactat

SEQ ID NO: 21526 - DNA, 19 bp, Artificial Sequence
  Synthetic
ccccaagctggtcgccctt

SEQ ID NO: 21527 - DNA, 22 bp, Artificial Sequence
  Synthetic
cgccactcctgaagttcctcct

SEQ ID NO: 21528 - DNA, 20 bp, Artificial Sequence
  Synthetic
gttcaaagtcacggggcccg

SEQ ID NO: 21529 - DNA, 19 bp, Artificial Sequence
  Synthetic
cgccgtctttacgcggcac

SEQ ID NO: 21530 - DNA, 20 bp, Artificial Sequence
  Synthetic
ccaccgcccccagaggaaat

SEQ ID NO: 21531 - DNA, 21 bp, Artificial Sequence
  Synthetic
cggtcgatcttgacgcgctta

SEQ ID NO: 21532 - DNA, 19 bp, Artificial Sequence
  Synthetic
gctcaggggcgttggggtt

SEQ ID NO: 21533 - DNA, 19 bp, Artificial Sequence
  Synthetic
atgctcgaggacctggccc

SEQ ID NO: 21534 - DNA, 19 bp, Artificial Sequence
  Synthetic
ctcgaaccggggtacacgc

SEQ ID NO: 21535 - DNA, 19 bp, Artificial Sequence
  Synthetic
aaaagggggctcgctcgcc

SEQ ID NO: 21536 - DNA, 22 bp, Artificial Sequence
  Synthetic
ggtgcgcacgtggttgttgaaa

SEQ ID NO: 21537 - DNA, 22 bp, Artificial Sequence
  Synthetic
gggcacgtacggcgtcttgtaa

SEQ ID NO: 21538 - DNA, 22 bp, Artificial Sequence
  Synthetic
gggcttgctgctgggacatcta

SEQ ID NO: 21539 - DNA, 19 bp, Artificial Sequence
  Synthetic
gctgttgtagcggcccacg

SEQ ID NO: 21540 - DNA, 22 bp, Artificial Sequence
  Synthetic
cccgcgtaggttcttgaaagcc

SEQ ID NO: 21541 - DNA, 22 bp, Artificial Sequence
  Synthetic
cgtactgcggcggaattttctg

SEQ ID NO: 21542 - DNA, 21 bp, Artificial Sequence
  Synthetic
cgggagccaatgcgggttcaa

SEQ ID NO: 21543 - DNA, 22 bp, Artificial Sequence
  Synthetic
agcgtaggtcttccagcggttt

SEQ ID NO: 21544 - DNA, 21 bp, Artificial Sequence
  Synthetic
catcacgctctcgtacgaggg

SEQ ID NO: 21545 - DNA, 22 bp, Artificial Sequence
  Synthetic
ggtcccagcccagcttgaaatt

SEQ ID NO: 21546 - DNA, 25 bp, Artificial Sequence
  Synthetic
aggagcattaactttagcagcattt

SEQ ID NO: 21547 - DNA, 21 bp, Artificial Sequence
  Synthetic
gctgggtggagcgaaaggtga

SEQ ID NO: 21548 - DNA, 20 bp, Artificial Sequence
  Synthetic
tgcccagggccttgtagacg

SEQ ID NO: 21549 - DNA, 22 bp, Artificial Sequence
  Synthetic
gcgtcagcgactacggagtcaa

SEQ ID NO: 21550 - DNA, 19 bp, Artificial Sequence
  Synthetic
tttccgcgcctgggtctgg

SEQ ID NO: 21551 - DNA, 19 bp, Artificial Sequence
  Synthetic
caacacgcgctgcaccctg

SEQ ID NO: 21552 - DNA, 19 bp, Artificial Sequence
  Synthetic
ggtgtccagcacgtcctcc

SEQ ID NO: 21553 - DNA, 19 bp, Artificial Sequence
  Synthetic
aggctcggtggccgtggat

SEQ ID NO: 21554 - DNA, 22 bp, Artificial Sequence
  Synthetic
cggcgggatcttcctcggtaat

SEQ ID NO: 21555 - DNA, 21 bp, Artificial Sequence
  Synthetic
cgttccaggtgcccatgaacg

SEQ ID NO: 21556 - DNA, 22 bp, Artificial Sequence
  Synthetic
gcatcttccatctccaccaccg

SEQ ID NO: 21557 - DNA, 19 bp, Artificial Sequence
  Synthetic
tgccagttctgggcctggc

SEQ ID NO: 21558 - DNA, 22 bp, Artificial Sequence
  Synthetic
ggagccaccgtggggtttctaa

SEQ ID NO: 21559 - DNA, 22 bp, Artificial Sequence
  Synthetic
aattgttatgtcagcgcctccc

SEQ ID NO: 21560 - DNA, 23 bp, Artificial Sequence
  Synthetic
acccagagaatctagcaaaagct

SEQ ID NO: 21561 - DNA, 20 bp, Artificial Sequence
  Synthetic
tggtgttggtgggcagtgtg

SEQ ID NO: 21562 - DNA, 20 bp, Artificial Sequence
  Synthetic
gttgcccagggaactctgca

SEQ ID NO: 21563 - DNA, 22 bp, Artificial Sequence
  Synthetic
acgctgcgcttaatctcgaact

SEQ ID NO: 21564 - DNA, 19 bp, Artificial Sequence
  Synthetic
cctggcgcatggtaggtgc

SEQ ID NO: 21565 - DNA, 20 bp, Artificial Sequence
  Synthetic
gtagacggcctcgatgacgc

SEQ ID NO: 21566 - DNA, 19 bp, Artificial Sequence
  Synthetic
tctgcttaagccggcggtc

SEQ ID NO: 21567 - DNA, 22 bp, Artificial Sequence
  Synthetic
gcacctgtggcgattgtagcat

SEQ ID NO: 21568 - DNA, 22 bp, Artificial Sequence
  Synthetic
ccccgagattgctgttcccaaa

SEQ ID NO: 21569 - DNA, 20 bp, Artificial Sequence
  Synthetic
tacccgaatatgcagcgcgg

SEQ ID NO: 21570 - DNA, 21 bp, Artificial Sequence
  Synthetic
gctcaagtgtctgcacgggac

SEQ ID NO: 21571 - DNA, 20 bp, Artificial Sequence
  Synthetic
tgctgatggaacgctaccgc

SEQ ID NO: 21572 - DNA, 22 bp, Artificial Sequence
  Synthetic
cgaggaggacgtggttccactg

SEQ ID NO: 21573 - DNA, 22 bp, Artificial Sequence
  Synthetic
tcctgtgggggttctagacgag

SEQ ID NO: 21574 - DNA, 20 bp, Artificial Sequence
  Synthetic
tcgacgctgcgcttaagcac

SEQ ID NO: 21575 - DNA, 22 bp, Artificial Sequence
  Synthetic
tgtagtgcagggtctcctcgac

SEQ ID NO: 21576 - DNA, 22 bp, Artificial Sequence
  Synthetic
gcccgtccacaacgttttaagg

SEQ ID NO: 21577 - DNA, 19 bp, Artificial Sequence
  Synthetic
actcaagcagcccctcgcc

SEQ ID NO: 21578 - DNA, 21 bp, Artificial Sequence
  Synthetic
gatcgtgccctgggtgatgac

SEQ ID NO: 21579 - DNA, 20 bp, Artificial Sequence
  Synthetic
acgaggaggcttgaccggag

SEQ ID NO: 21580 - DNA, 22 bp, Artificial Sequence
  Synthetic
gctgacctcgactctgctgaaa

SEQ ID NO: 21581 - DNA, 22 bp, Artificial Sequence
  Synthetic
gccagctggacacctgagttag

SEQ ID NO: 21582 - DNA, 20 bp, Artificial Sequence
  Synthetic
ggcctggggagcctgaaaag

SEQ ID NO: 21583 - DNA, 25 bp, Artificial Sequence
  Synthetic
tccagagtagagtcttatttcagct

SEQ ID NO: 21584 - DNA, 25 bp, Artificial Sequence
  Synthetic
caccagggaaaggataattagcaaa

SEQ ID NO: 21585 - DNA, 24 bp, Artificial Sequence
  Synthetic
acctgacataaagcaggccataat

SEQ ID NO: 21586 - DNA, 23 bp, Artificial Sequence
  Synthetic
agctatgcttgatttgtgggttt

SEQ ID NO: 21587 - DNA, 25 bp, Artificial Sequence
  Synthetic
ctttgagcagtattaccttgtccaa

SEQ ID NO: 21588 - DNA, 25 bp, Artificial Sequence
  Synthetic
gaggttctttggtatgtggcttaat

SEQ ID NO: 21589 - DNA, 25 bp, Artificial Sequence
  Synthetic
acaaagtacaaaagaaccacgagaa

SEQ ID NO: 21590 - DNA, 21 bp, Artificial Sequence
  Synthetic
gcagacaatgctgcagacgca

SEQ ID NO: 21591 - DNA, 25 bp, Artificial Sequence
  Synthetic
cgagatcaaaacaggggtagatcat

SEQ ID NO: 21592 - DNA, 22 bp, Artificial Sequence
  Synthetic
cccgtctgctgggtgatgacta

SEQ ID NO: 21593 - DNA, 20 bp, Artificial Sequence
  Synthetic
tgagtgacagaaccccaggg

SEQ ID NO: 21594 - DNA, 25 bp, Artificial Sequence
  Synthetic
aaatgctaccaagtctccattatca

SEQ ID NO: 21595 - DNA, 25 bp, Artificial Sequence
  Synthetic
gccaaggtagatgtttccataaact

SEQ ID NO: 21596 - DNA, 21 bp, Artificial Sequence
  Synthetic
aaggccacccgtactgagaga

SEQ ID NO: 21597 - DNA, 25 bp, Artificial Sequence
  Synthetic
tgggctgctgaataacataatgatt

SEQ ID NO: 21598 - DNA, 23 bp, Artificial Sequence
  Synthetic
cctgggatatgatcctgaccaca

SEQ ID NO: 21599 - DNA, 22 bp, Artificial Sequence
  Synthetic
ggcagcattaactggatgggga

SEQ ID NO: 21600 - DNA, 25 bp, Artificial Sequence
  Synthetic
tggacttacaccaacaatttgtaga

SEQ ID NO: 21601 - DNA, 25 bp, Artificial Sequence
  Synthetic
cctggctttatcacttacattttgg

SEQ ID NO: 21602 - DNA, 21 bp, Artificial Sequence
  Synthetic
ccgatgtgatttttgccggaa

SEQ ID NO: 21603 - DNA, 24 bp, Artificial Sequence
  Synthetic
cgtcagtgtaagttgcctttaagt

SEQ ID NO: 21604 - DNA, 21 bp, Artificial Sequence
  Synthetic
gatgctctcacttctcctgga

SEQ ID NO: 21605 - DNA, 25 bp, Artificial Sequence
  Synthetic
caggatatccatatgtctgaagcaa

SEQ ID NO: 21606 - DNA, 20 bp, Artificial Sequence
  Synthetic
agctccacagtgctggatag

SEQ ID NO: 21607 - DNA, 21 bp, Artificial Sequence
  Synthetic
ccagttcttgttgtcccgatc

SEQ ID NO: 21608 - DNA, 24 bp, Artificial Sequence
  Synthetic
cattctcatagtcagcatcactgc

SEQ ID NO: 21609 - DNA, 22 bp, Artificial Sequence
  Synthetic
cttctccaatttctgtgggctt

SEQ ID NO: 21610 - DNA, 25 bp, Artificial Sequence
  Synthetic
gttgatcaaggattctagcatgtgt

SEQ ID NO: 21611 - DNA, 25 bp, Artificial Sequence
  Synthetic
cttgggttggtaatgacatcagtta

SEQ ID NO: 21612 - DNA, 23 bp, Artificial Sequence
  Synthetic
gctgctgactcttcgttctttga

SEQ ID NO: 21613 - DNA, 24 bp, Artificial Sequence
  Synthetic
tgtctttcccttttgtgaagactg

SEQ ID NO: 21614 - DNA, 24 bp, Artificial Sequence
  Synthetic
gagaggttctactgtcccattttc

SEQ ID NO: 21615 - DNA, 23 bp, Artificial Sequence
  Synthetic
ggagcatggatcgaatctaccat

SEQ ID NO: 21616 - DNA, 24 bp, Artificial Sequence
  Synthetic
ttgagttcggtaatgcaagatctg

SEQ ID NO: 21617 - DNA, 25 bp, Artificial Sequence
  Synthetic
tccattaaaggatagcaaactgctt

SEQ ID NO: 21618 - DNA, 24 bp, Artificial Sequence
  Synthetic
gctgagctttttgagactcttgtc

SEQ ID NO: 21619 - DNA, 25 bp, Artificial Sequence
  Synthetic
gcaccaaagaatctagtttgtggat

SEQ ID NO: 21620 - DNA, 25 bp, Artificial Sequence
  Synthetic
acctgttcagtgtaaatgatgtcat

SEQ ID NO: 21621 - DNA, 25 bp, Artificial Sequence
  Synthetic
gaatgtaactcctcttgagcgatct

SEQ ID NO: 21622 - DNA, 25 bp, Artificial Sequence
  Synthetic
gactggattgtctttaaccctaagt

SEQ ID NO: 21623 - DNA, 21 bp, Artificial Sequence
  Synthetic
cagaaatcgtgtgggtccaga

SEQ ID NO: 21624 - DNA, 23 bp, Artificial Sequence
  Synthetic
tcctgcagctattacagaacatg

SEQ ID NO: 21625 - DNA, 25 bp, Artificial Sequence
  Synthetic
cgtaccctaggaaaatgagtgtatt

SEQ ID NO: 21626 - DNA, 23 bp, Artificial Sequence
  Synthetic
agtgccaacctgaagatctagta

SEQ ID NO: 21627 - DNA, 22 bp, Artificial Sequence
  Synthetic
tggtgggattaacacgtgatgt

SEQ ID NO: 21628 - DNA, 25 bp, Artificial Sequence
  Synthetic
cggataaggttcaaaagtgtaacga

SEQ ID NO: 21629 - DNA, 20 bp, Artificial Sequence
  Synthetic
cgagtcgtccagctgaagac

SEQ ID NO: 21630 - DNA, 25 bp, Artificial Sequence
  Synthetic
cccattttcactgaataactcacct

SEQ ID NO: 21631 - DNA, 25 bp, Artificial Sequence
  Synthetic
tgctatagcttgattgtctccttgt

SEQ ID NO: 21632 - DNA, 25 bp, Artificial Sequence
  Synthetic
gctgtagacatatagttgaaccctc

SEQ ID NO: 21633 - DNA, 25 bp, Artificial Sequence
  Synthetic
gtggattggtcttccataagttaga

SEQ ID NO: 21634 - DNA, 25 bp, Artificial Sequence
  Synthetic
ttctctaaacttaagttagccctgg

SEQ ID NO: 21635 - DNA, 20 bp, Artificial Sequence
  Synthetic
tccctctgacgtttaacccg

SEQ ID NO: 21636 - DNA, 23 bp, Artificial Sequence
  Synthetic
agcatactatcggcatcaggatc

SEQ ID NO: 21637 - DNA, 25 bp, Artificial Sequence
  Synthetic
ggtaagttccaatgctttcaaacaa

SEQ ID NO: 21638 - DNA, 24 bp, Artificial Sequence
  Synthetic
aggatctccagtataagggaatgt

SEQ ID NO: 21639 - DNA, 25 bp, Artificial Sequence
  Synthetic
gtttgtccactcttgtttgttgaat

SEQ ID NO: 21640 - DNA, 25 bp, Artificial Sequence
  Synthetic
tggtcatgttgtctcttactcttct

SEQ ID NO: 21641 - DNA, 24 bp, Artificial Sequence
  Synthetic
ccttcttttcattacctccaaccg

SEQ ID NO: 21642 - DNA, 24 bp, Artificial Sequence
  Synthetic
tcgaacatgtaacctttccctagt

SEQ ID NO: 21643 - DNA, 20 bp, Artificial Sequence
  Synthetic
agtccgtcccaccagtatgt

SEQ ID NO: 21644 - DNA, 24 bp, Artificial Sequence
  Synthetic
agccgattcattaattccagacac

SEQ ID NO: 21645 - DNA, 21 bp, Artificial Sequence
  Synthetic
gcctcccctgatagtcttcat

SEQ ID NO: 21646 - DNA, 25 bp, Artificial Sequence
  Synthetic
actgctagggaagaatttctcaaat

SEQ ID NO: 21647 - DNA, 25 bp, Artificial Sequence
  Synthetic
tgcagagcaggaaaatattagttgg

SEQ ID NO: 21648 - DNA, 22 bp, Artificial Sequence
  Synthetic
ccgtcctgttgtctgttccaca

SEQ ID NO: 21649 - DNA, 22 bp, Artificial Sequence
  Synthetic
acgcacactatcctcctcctct

SEQ ID NO: 21650 - DNA, 25 bp, Artificial Sequence
  Synthetic
gctagtccaaataggtccttgaatt

SEQ ID NO: 21651 - DNA, 25 bp, Artificial Sequence
  Synthetic
ggtatgtttaacagttttcccatgc

SEQ ID NO: 21652 - DNA, 23 bp, Artificial Sequence
  Synthetic
cctcatttcccagcaatgcatat

SEQ ID NO: 21653 - DNA, 22 bp, Artificial Sequence
  Synthetic
gcaaaatagcgacttccctgtg

SEQ ID NO: 21654 - DNA, 24 bp, Artificial Sequence
  Synthetic
ggtctagtaatttctcctggcacg

SEQ ID NO: 21655 - DNA, 21 bp, Artificial Sequence
  Synthetic
tttccaaagaggtggtttgca

SEQ ID NO: 21656 - DNA, 25 bp, Artificial Sequence
  Synthetic
gcacaacaatcctacatatatggca

SEQ ID NO: 21657 - DNA, 20 bp, Artificial Sequence
  Synthetic
tacagtaggaggccgggtgc

SEQ ID NO: 21658 - DNA, 22 bp, Artificial Sequence
  Synthetic
cccctgcctgaggaggttcaat

SEQ ID NO: 21659 - DNA, 22 bp, Artificial Sequence
  Synthetic
ggcaccaaaggctgtaactcca

SEQ ID NO: 21660 - DNA, 25 bp, Artificial Sequence
  Synthetic
gcaacaaataaaaatcagagccctg

SEQ ID NO: 21661 - DNA, 21 bp, Artificial Sequence
  Synthetic
gtgtttttcttgccctgcagc

SEQ ID NO: 21662 - DNA, 25 bp, Artificial Sequence
  Synthetic
agcagccatttgtaaataatcagga

SEQ ID NO: 21663 - DNA, 21 bp, Artificial Sequence
  Synthetic
ataccattgttgtggccctgg

SEQ ID NO: 21664 - DNA, 25 bp, Artificial Sequence
  Synthetic
ggactgcaaaaacctatatgtgtct

SEQ ID NO: 21665 - DNA, 23 bp, Artificial Sequence
  Synthetic
acatgcacaacaacagcatacag

SEQ ID NO: 21666 - DNA, 22 bp, Artificial Sequence
  Synthetic
acagaaatggggaagctgcaca

SEQ ID NO: 21667 - DNA, 25 bp, Artificial Sequence
  Synthetic
cacagtaattgcacaacatgtcaaa

SEQ ID NO: 21668 - DNA, 23 bp, Artificial Sequence
  Synthetic
gctgttatattgcgggcataagt

SEQ ID NO: 21669 - DNA, 25 bp, Artificial Sequence
  Synthetic
tctgtatagtttgagcgttgaaaga

SEQ ID NO: 21670 - DNA, 19 bp, Artificial Sequence
  Synthetic
ggacatgggctgccagacc

SEQ ID NO: 21671 - DNA, 19 bp, Artificial Sequence
  Synthetic
acgggattggtcggccgaa

SEQ ID NO: 21672 - DNA, 20 bp, Artificial Sequence
  Synthetic
taagcaaaggggggatgggt

SEQ ID NO: 21673 - DNA, 20 bp, Artificial Sequence
  Synthetic
tatcccgcatgtaagctggc

SEQ ID NO: 21674 - DNA, 18 bp, Artificial Sequence
  Synthetic
tacaccatgcgcggcggt

SEQ ID NO: 21675 - DNA, 19 bp, Artificial Sequence
  Synthetic
tacgtgcaggcgccacacg

SEQ ID NO: 21676 - DNA, 21 bp, Artificial Sequence
  Synthetic
gctggacacgcccatctcctc

SEQ ID NO: 21677 - DNA, 21 bp, Artificial Sequence
  Synthetic
gcagcacgcaaaagagcaggt

SEQ ID NO: 21678 - DNA, 19 bp, Artificial Sequence
  Synthetic
ccccattgacgcgtctgcc

SEQ ID NO: 21679 - DNA, 21 bp, Artificial Sequence
  Synthetic
ccgaacagaagatgggacgcc

SEQ ID NO: 21680 - DNA, 22 bp, Artificial Sequence
  Synthetic
accgcatctcttggcgtttacc

SEQ ID NO: 21681 - DNA, 20 bp, Artificial Sequence
  Synthetic
acaggcaaaacacgccgtgg

SEQ ID NO: 21682 - DNA, 18 bp, Artificial Sequence
  Synthetic
cgcgcttcagtgcaccgt

SEQ ID NO: 21683 - DNA, 23 bp, Artificial Sequence
  Synthetic
cactgataacatgtaactccgcc

SEQ ID NO: 21684 - DNA, 22 bp, Artificial Sequence
  Synthetic
ggtcacgggcgtgttcagtaat

SEQ ID NO: 21685 - DNA, 20 bp, Artificial Sequence
  Synthetic
cctgccgttgttctttgcgg

SEQ ID NO: 21686 - DNA, 19 bp, Artificial Sequence
  Synthetic
tttgtgggagcgtccggcc

SEQ ID NO: 21687 - DNA, 19 bp, Artificial Sequence
  Synthetic
cggcaccgttgtcgcagta

SEQ ID NO: 21688 - DNA, 19 bp, Artificial Sequence
  Synthetic
ggcttctggttgggcgagc

SEQ ID NO: 21689 - DNA, 22 bp, Artificial Sequence
  Synthetic
ccccgtgttgttctgccgtatt

SEQ ID NO: 21690 - DNA, 20 bp, Artificial Sequence
  Synthetic
gcccgggtatgcgaaaccat

SEQ ID NO: 21691 - DNA, 19 bp, Artificial Sequence
  Synthetic
tgcacctctggcgccacag

SEQ ID NO: 21692 - DNA, 19 bp, Artificial Sequence
  Synthetic
tcagggcgcgtctggtctc

SEQ ID NO: 21693 - DNA, 22 bp, Artificial Sequence
  Synthetic
gtgaatgagggcgcatctacct

SEQ ID NO: 21694 - DNA, 19 bp, Artificial Sequence
  Synthetic
acgcctctgaggacgctgc

SEQ ID NO: 21695 - DNA, 21 bp, Artificial Sequence
  Synthetic
ggccaccgcgtccttcatttc

SEQ ID NO: 21696 - DNA, 22 bp, Artificial Sequence
  Synthetic
cctgttggacgatctcgcacat

SEQ ID NO: 21697 - DNA, 21 bp, Artificial Sequence
  Synthetic
ggcgatgtgctgggggtgata

SEQ ID NO: 21698 - DNA, 21 bp, Artificial Sequence
  Synthetic
cgcgtgaggtgaggtggacat

SEQ ID NO: 21699 - DNA, 19 bp, Artificial Sequence
  Synthetic
ttggggtaacggcgggcac

SEQ ID NO: 21700 - DNA, 18 bp, Artificial Sequence
  Synthetic
tgcgagcaggagggacct

SEQ ID NO: 21701 - DNA, 20 bp, Artificial Sequence
  Synthetic
tccctgggcaggcggaatag

SEQ ID NO: 21702 - DNA, 21 bp, Artificial Sequence
  Synthetic
gcagcagcaggatgagcagca

SEQ ID NO: 21703 - DNA, 22 bp, Artificial Sequence
  Synthetic
gcactcttaccccccgtaacca

SEQ ID NO: 21704 - DNA, 19 bp, Artificial Sequence
  Synthetic
tgtcagaggtgctgcgggc

SEQ ID NO: 21705 - DNA, 21 bp, Artificial Sequence
  Synthetic
ccccggacgtaaaggtcgaag

SEQ ID NO: 21706 - DNA, 19 bp, Artificial Sequence
  Synthetic
ttctgccgggagctgggag

SEQ ID NO: 21707 - DNA, 20 bp, Artificial Sequence
  Synthetic
catgctggccgagagggtgg

SEQ ID NO: 21708 - DNA, 22 bp, Artificial Sequence
  Synthetic
gcgcatcttggagaccctgaag

SEQ ID NO: 21709 - DNA, 25 bp, Artificial Sequence
  Synthetic
ccaaaccatactctttgcaaagcaa

SEQ ID NO: 21710 - DNA, 19 bp, Artificial Sequence
  Synthetic
ccgcactcaaccaccagcc

SEQ ID NO: 21711 - DNA, 20 bp, Artificial Sequence
  Synthetic
tcccccgttacctcctctgg

SEQ ID NO: 21712 - DNA, 20 bp, Artificial Sequence
  Synthetic
catggccgtcttgtaccagt

SEQ ID NO: 21713 - DNA, 25 bp, Artificial Sequence
  Synthetic
cgccttttaggaacaatttaaaggc

SEQ ID NO: 21714 - DNA, 25 bp, Artificial Sequence
  Synthetic
gttgttatcattaggggtggacact

SEQ ID NO: 21715 - DNA, 20 bp, Artificial Sequence
  Synthetic
gagggcaggcacagctgtac

SEQ ID NO: 21716 - DNA, 19 bp, Artificial Sequence
  Synthetic
ttcgtcgtccgaggcgctg

SEQ ID NO: 21717 - DNA, 25 bp, Artificial Sequence
  Synthetic
cccttaggtatactgactcttgtca

SEQ ID NO: 21718 - DNA, 25 bp, Artificial Sequence
  Synthetic
acaaacggacataaaacatcaacaa

SEQ ID NO: 21719 - DNA, 22 bp, Artificial Sequence
  Synthetic
gggtctgtaacggtggaggttg

SEQ ID NO: 21720 - DNA, 22 bp, Artificial Sequence
  Synthetic
gcaatggctgaaggacatccga

SEQ ID NO: 21721 - DNA, 24 bp, Artificial Sequence
  Synthetic
ccgtactgatcacctttgaaacag

SEQ ID NO: 21722 - DNA, 23 bp, Artificial Sequence
  Synthetic
gacttatttgactgcagagtggc

SEQ ID NO: 21723 - DNA, 23 bp, Artificial Sequence
  Synthetic
gggttatcttgcacagttggaag

SEQ ID NO: 21724 - DNA, 25 bp, Artificial Sequence
  Synthetic
acagttacagaacacacaacacatg

SEQ ID NO: 21725 - DNA, 20 bp, Artificial Sequence
  Synthetic
ttgctttcttgcagcagctg

SEQ ID NO: 21726 - DNA, 22 bp, Artificial Sequence
  Synthetic
ggcaatctggagagacagactc

SEQ ID NO: 21727 - DNA, 25 bp, Artificial Sequence
  Synthetic
tctgtagcatcatctataagcccaa

SEQ ID NO: 21728 - DNA, 20 bp, Artificial Sequence
  Synthetic
ggaacatgctgcaggcctag

SEQ ID NO: 21729 - DNA, 22 bp, Artificial Sequence
  Synthetic
ggtttctccggtttgtgcaacc

SEQ ID NO: 21730 - DNA, 25 bp, Artificial Sequence
  Synthetic
ggccaccaaagtatactaaactact

SEQ ID NO: 21731 - DNA, 25 bp, Artificial Sequence
  Synthetic
gttctgtagttatgtcaaagcctgt

SEQ ID NO: 21732 - DNA, 20 bp, Artificial Sequence
  Synthetic
aggatctggagcagcagttg

SEQ ID NO: 21733 - DNA, 22 bp, Artificial Sequence
  Synthetic
tgagggtgagacacaaagagtc

SEQ ID NO: 21734 - DNA, 25 bp, Artificial Sequence
  Synthetic
gccgtggaagtatatttctgtttct

SEQ ID NO: 21735 - DNA, 25 bp, Artificial Sequence
  Synthetic
cgtttaacttatttagcaaggggtg

SEQ ID NO: 21736 - DNA, 25 bp, Artificial Sequence
  Synthetic
cccaaatccaatatcacacatgtct

SEQ ID NO: 21737 - DNA, 20 bp, Artificial Sequence
  Synthetic
gcctgagtaccttgaccagg

SEQ ID NO: 21738 - DNA, 25 bp, Artificial Sequence
  Synthetic
tctgatagatccacatcccaaaagt

SEQ ID NO: 21739 - DNA, 21 bp, Artificial Sequence
  Synthetic
cgtgttgagacagcaccattt

SEQ ID NO: 21740 - DNA, 25 bp, Artificial Sequence
  Synthetic
gcttcccttgagcaatcaaatcaaa

SEQ ID NO: 21741 - DNA, 24 bp, Artificial Sequence
  Synthetic
ctgaaatgttggacccatcagtac

SEQ ID NO: 21742 - DNA, 25 bp, Artificial Sequence
  Synthetic
cctgttcagaagaatttgcagtttc

SEQ ID NO: 21743 - DNA, 23 bp, Artificial Sequence
  Synthetic
gatgttgcactttggtgattcac

SEQ ID NO: 21744 - DNA, 21 bp, Artificial Sequence
  Synthetic
gcgtcacctcctcgctttctc

SEQ ID NO: 21745 - DNA, 25 bp, Artificial Sequence
  Synthetic
ggcaatgtggtagtgactaaaaaca

SEQ ID NO: 21746 - DNA, 25 bp, Artificial Sequence
  Synthetic
ccaaaatagaccacacttccaaaca

SEQ ID NO: 21747 - DNA, 24 bp, Artificial Sequence
  Synthetic
gggggtctagcactgttactatat

SEQ ID NO: 21748 - DNA, 25 bp, Artificial Sequence
  Synthetic
accaaaagactgtgcatctacaaat

SEQ ID NO: 21749 - DNA, 22 bp, Artificial Sequence
  Synthetic
ccatagtgacgtcctcctcaaa

SEQ ID NO: 21750 - DNA, 25 bp, Artificial Sequence
  Synthetic
aggttgcacaggaatataaggtgta

SEQ ID NO: 21751 - DNA, 25 bp, Artificial Sequence
  Synthetic
tcaaagaaaggatgtccaactgtta

SEQ ID NO: 21752 - DNA, 25 bp, Artificial Sequence
  Synthetic
ggattttctgtatcctgcaatttgt

SEQ ID NO: 21753 - DNA, 25 bp, Artificial Sequence
  Synthetic
cgaaccactcggaattgtaaagtaa

SEQ ID NO: 21754 - DNA, 25 bp, Artificial Sequence
  Synthetic
ccacatgagtcaagtcaacatcatt

SEQ ID NO: 21755 - DNA, 25 bp, Artificial Sequence
  Synthetic
cccctgatgtgagtaatagggttaa

SEQ ID NO: 21756 - DNA, 22 bp, Artificial Sequence
  Synthetic
ttcctttgatctctccgaacct

SEQ ID NO: 21757 - DNA, 20 bp, Artificial Sequence
  Synthetic
accatcatggcatgcggatc

SEQ ID NO: 21758 - DNA, 21 bp, Artificial Sequence
  Synthetic
gctccactcttcctgttggaa

SEQ ID NO: 21759 - DNA, 21 bp, Artificial Sequence
  Synthetic
tccaagccacttgtctccatt

SEQ ID NO: 21760 - DNA, 25 bp, Artificial Sequence
  Synthetic
caagtatcttttccaccatcgtgta

SEQ ID NO: 21761 - DNA, 21 bp, Artificial Sequence
  Synthetic
cgcccgattgaaacttaccgt

SEQ ID NO: 21762 - DNA, 25 bp, Artificial Sequence
  Synthetic
ctggccaaactcttcttgtagtatt

SEQ ID NO: 21763 - DNA, 23 bp, Artificial Sequence
  Synthetic
tgaggacacaagaattgcagttc

SEQ ID NO: 21764 - DNA, 21 bp, Artificial Sequence
  Synthetic
ctcaaattcctgctggcgaag

SEQ ID NO: 21765 - DNA, 23 bp, Artificial Sequence
  Synthetic
aggtcaaattgcatagcatctgc

SEQ ID NO: 21766 - DNA, 25 bp, Artificial Sequence
  Synthetic
gtgtccaaagcctttcaaaaaaaga

SEQ ID NO: 21767 - DNA, 20 bp, Artificial Sequence
  Synthetic
cggaggtacgggttgatacc

SEQ ID NO: 21768 - DNA, 25 bp, Artificial Sequence
  Synthetic
ttccatccttataatatgcacctgc

SEQ ID NO: 21769 - DNA, 20 bp, Artificial Sequence
  Synthetic
ggtgtctcgtcgacggtgtc

SEQ ID NO: 21770 - DNA, 22 bp, Artificial Sequence
  Synthetic
ggaccctctggatcctctggaa

SEQ ID NO: 21771 - DNA, 22 bp, Artificial Sequence
  Synthetic
gctagcctcctccagtaacctt

SEQ ID NO: 21772 - DNA, 21 bp, Artificial Sequence
  Synthetic
tccacctattggttgaccacc

SEQ ID NO: 21773 - DNA, 25 bp, Artificial Sequence
  Synthetic
tgctacgtccctttcaaatatttgt

SEQ ID NO: 21774 - DNA, 25 bp, Artificial Sequence
  Synthetic
accagaatgttcccctaatagtgat

SEQ ID NO: 21775 - DNA, 25 bp, Artificial Sequence
  Synthetic
cacagcataaccttccaaatcttgt

SEQ ID NO: 21776 - DNA, 20 bp, Artificial Sequence
  Synthetic
tccgtgctttgtacccttgc

SEQ ID NO: 21777 - DNA, 20 bp, Artificial Sequence
  Synthetic
aacacctaaaggctggccac

SEQ ID NO: 21778 - DNA, 22 bp, Artificial Sequence
  Synthetic
gcagtattgggtatcgcatccc

SEQ ID NO: 21779 - DNA, 25 bp, Artificial Sequence
  Synthetic
gctcatatggatctttcctttctgg

SEQ ID NO: 21780 - DNA, 25 bp, Artificial Sequence
  Synthetic
gctttcaatgtgatgtttttgtcca

SEQ ID NO: 21781 - DNA, 24 bp, Artificial Sequence
  Synthetic
gccccaacagtaagaatgcatttc

SEQ ID NO: 21782 - DNA, 25 bp, Artificial Sequence
  Synthetic
agcttctcttaaaggttgagcaatt

SEQ ID NO: 21783 - DNA, 25 bp, Artificial Sequence
  Synthetic
cctctggagtgtcatcaatggataa

SEQ ID NO: 21784 - DNA, 25 bp, Artificial Sequence
  Synthetic
gcaactgtaggttccgtagaacttt

SEQ ID NO: 21785 - DNA, 25 bp, Artificial Sequence
  Synthetic
gcatacttggatttagccaaacttt

SEQ ID NO: 21786 - DNA, 25 bp, Artificial Sequence
  Synthetic
cagtccatgtaccagtttttccata

SEQ ID NO: 21787 - DNA, 23 bp, Artificial Sequence
  Synthetic
agtgacgctagtgtcaagcaata

SEQ ID NO: 21788 - DNA, 22 bp, Artificial Sequence
  Synthetic
agggcggagagatagaccaaca

SEQ ID NO: 21789 - DNA, 25 bp, Artificial Sequence
  Synthetic
tgtgcttagtactttgtcagtgtta

SEQ ID NO: 21790 - DNA, 20 bp, Artificial Sequence
  Synthetic
cacgtacccttttgacctgg

SEQ ID NO: 21791 - DNA, 20 bp, Artificial Sequence
  Synthetic
cagggatactgtcgccaaca

SEQ ID NO: 21792 - DNA, 24 bp, Artificial Sequence
  Synthetic
gcgtctttaggacagatagtagct

SEQ ID NO: 21793 - DNA, 23 bp, Artificial Sequence
  Synthetic
ggttacaatggtcacagcatgtg

SEQ ID NO: 21794 - DNA, 22 bp, Artificial Sequence
  Synthetic
tgaagagtgccagggaatttcc

SEQ ID NO: 21795 - DNA, 25 bp, Artificial Sequence
  Synthetic
gcactcttctacctgtgatagttca

SEQ ID NO: 21796 - DNA, 25 bp, Artificial Sequence
  Synthetic
gcactagccatttgatgattaacaa

SEQ ID NO: 21797 - DNA, 21 bp, Artificial Sequence
  Synthetic
ccttcccacttcttcagcaga

SEQ ID NO: 21798 - DNA, 23 bp, Artificial Sequence
  Synthetic
ccaaatggtctgtagccagtagc

SEQ ID NO: 21799 - DNA, 23 bp, Artificial Sequence
  Synthetic
tcttcagcagttattgtaggccc

SEQ ID NO: 21800 - DNA, 25 bp, Artificial Sequence
  Synthetic
ggcctactcaggtaattgatatctc

SEQ ID NO: 21801 - DNA, 25 bp, Artificial Sequence
  Synthetic
acaaagggttttctgaatctccata

SEQ ID NO: 21802 - DNA, 25 bp, Artificial Sequence
  Synthetic
tgctgatctgtcttgagaaaatgtt

SEQ ID NO: 21803 - DNA, 25 bp, Artificial Sequence
  Synthetic
tggtactttacaaagacgaaagact

SEQ ID NO: 21804 - DNA, 25 bp, Artificial Sequence
  Synthetic
acatgagtcagtattttgcaaacac

SEQ ID NO: 21805 - DNA, 24 bp, Artificial Sequence
  Synthetic
ccgccaaattttgagtcagtcaaa

SEQ ID NO: 21806 - DNA, 22 bp, Artificial Sequence
  Synthetic
gcttttctgctgcatccaacaa

SEQ ID NO: 21807 - DNA, 20 bp, Artificial Sequence
  Synthetic
atcgacgagctccagagtcg

SEQ ID NO: 21808 - DNA, 25 bp, Artificial Sequence
  Synthetic
tgagttagtgtctacctgtgtaaga

SEQ ID NO: 21809 - DNA, 25 bp, Artificial Sequence
  Synthetic
gcagctgattgatgttctaccaata

SEQ ID NO: 21810 - DNA, 20 bp, Artificial Sequence
  Synthetic
tcggtgtcggtggtcccacc

SEQ ID NO: 21811 - DNA, 22 bp, Artificial Sequence
  Synthetic
ggatcccgagcttcttcttgta

SEQ ID NO: 21812 - DNA, 25 bp, Artificial Sequence
  Synthetic
ggtgtagatggtgtcaatggtctat

SEQ ID NO: 21813 - DNA, 25 bp, Artificial Sequence
  Synthetic
actacagtaggtgtactttctggta

SEQ ID NO: 21814 - DNA, 25 bp, Artificial Sequence
  Synthetic
cttgtttttggtgggttaatagagc

SEQ ID NO: 21815 - DNA, 25 bp, Artificial Sequence
  Synthetic
gtttgtttgggatcaaaagacacat

SEQ ID NO: 21816 - DNA, 24 bp, Artificial Sequence
  Synthetic
ggccatttgcaagtactgtgaata

SEQ ID NO: 21817 - DNA, 25 bp, Artificial Sequence
  Synthetic
agcgtttacctaaagaaaactgtga

SEQ ID NO: 21818 - DNA, 21 bp, Artificial Sequence
  Synthetic
tcataggtaaacaggggtgcg

SEQ ID NO: 21819 - DNA, 25 bp, Artificial Sequence
  Synthetic
cctcttgttaaaacttgacctacct

SEQ ID NO: 21820 - DNA, 25 bp, Artificial Sequence
  Synthetic
cccatcagtttccatctgttcataa

SEQ ID NO: 21821 - DNA, 25 bp, Artificial Sequence
  Synthetic
ccctctcaatatcaatgcagatctt

SEQ ID NO: 21822 - DNA, 25 bp, Artificial Sequence
  Synthetic
ccctctgatgaagcttaacaatctt

SEQ ID NO: 21823 - DNA, 20 bp, Artificial Sequence
  Synthetic
ccagtgaatgctgccatgat

SEQ ID NO: 21824 - DNA, 20 bp, Artificial Sequence
  Synthetic
aagccatgggtacactgtcc

SEQ ID NO: 21825 - DNA, 23 bp, Artificial Sequence
  Synthetic
aggtcaatttcagtttgcggtac

SEQ ID NO: 21826 - DNA, 23 bp, Artificial Sequence
  Synthetic
gcagcgtctgtgtatctgcatat

SEQ ID NO: 21827 - DNA, 25 bp, Artificial Sequence
  Synthetic
gcctatatccatatcactgtctgct

SEQ ID NO: 21828 - DNA, 23 bp, Artificial Sequence
  Synthetic
cgtcattatcaaatgcccattgc

SEQ ID NO: 21829 - DNA, 25 bp, Artificial Sequence
  Synthetic
gaagtcgaccccttgatatcttaaa

SEQ ID NO: 21830 - DNA, 21 bp, Artificial Sequence
  Synthetic
cccatatgcacttcccatgtg

SEQ ID NO: 21831 - DNA, 25 bp, Artificial Sequence
  Synthetic
gcaaagcaaaaacacaaaactaaca

SEQ ID NO: 21832 - DNA, 25 bp, Artificial Sequence
  Synthetic
gccctacacaaagcaaaagtgtaat

SEQ ID NO: 21833 - DNA, 24 bp, Artificial Sequence
  Synthetic
cctcaataactgggggttcaacaa

SEQ ID NO: 21834 - DNA, 20 bp, Artificial Sequence
  Synthetic
gtcaggatcaggtgccacac

SEQ ID NO: 21835 - DNA, 25 bp, Artificial Sequence
  Synthetic
gcctacgccttaaaaagtatacagg

SEQ ID NO: 21836 - DNA, 25 bp, Artificial Sequence
  Synthetic
catctgttttggaattaccagcctt

SEQ ID NO: 21837 - DNA, 22 bp, Artificial Sequence
  Synthetic
tttgtgttcctagtggtgtcca

SEQ ID NO: 21838 - DNA, 20 bp, Artificial Sequence
  Synthetic
ctaagcttgtggcagctggg

SEQ ID NO: 21839 - DNA, 20 bp, Artificial Sequence
  Synthetic
tgcgtttggctgatggtgta

SEQ ID NO: 21840 - DNA, 21 bp, Artificial Sequence
  Synthetic
aaaagggtggaggacataggg

SEQ ID NO: 21841 - DNA, 24 bp, Artificial Sequence
  Synthetic
ccaacagcagtaaagtatgctgat

SEQ ID NO: 21842 - DNA, 25 bp, Artificial Sequence
  Synthetic
cctcaggattgggaaaaaacatttc

SEQ ID NO: 21843 - DNA, 24 bp, Artificial Sequence
  Synthetic
actcgtaacatgtaaggtcagtct

SEQ ID NO: 21844 - DNA, 23 bp, Artificial Sequence
  Synthetic
cccaattacctgaatcagccatc

SEQ ID NO: 21845 - DNA, 25 bp, Artificial Sequence
  Synthetic
tgagataggtcaaattgacagtcct

SEQ ID NO: 21846 - DNA, 20 bp, Artificial Sequence
  Synthetic
tgtccagcatgcaggtgttg

SEQ ID NO: 21847 - DNA, 25 bp, Artificial Sequence
  Synthetic
tgccttccagttttcattagtaagt

SEQ ID NO: 21848 - DNA, 21 bp, Artificial Sequence
  Synthetic
tcgtgatactgcaaggcttgg

SEQ ID NO: 21849 - DNA, 22 bp, Artificial Sequence
  Synthetic
attgccctcaacctttggaatt

SEQ ID NO: 21850 - DNA, 20 bp, Artificial Sequence
  Synthetic
ggcactatggaggtaggacc

SEQ ID NO: 21851 - DNA, 25 bp, Artificial Sequence
  Synthetic
aagcaggcctatgtaactttacaat

SEQ ID NO: 21852 - DNA, 25 bp, Artificial Sequence
  Synthetic
gccacatctgcaaaaaaatatgaca

SEQ ID NO: 21853 - DNA, 22 bp, Artificial Sequence
  Synthetic
gtaccccaatgttcccctaagg

SEQ ID NO: 21854 - DNA, 25 bp, Artificial Sequence
  Synthetic
gccctgttaaataggtgtctaacaa

SEQ ID NO: 21855 - DNA, 22 bp, Artificial Sequence
  Synthetic
aagcggtcgcagaataacttta

SEQ ID NO: 21856 - DNA, 24 bp, Artificial Sequence
  Synthetic
tccattattgtgtcaacctgctct

SEQ ID NO: 21857 - DNA, 20 bp, Artificial Sequence
  Synthetic
gaggtcattggctggactgg

SEQ ID NO: 21858 - DNA, 25 bp, Artificial Sequence
  Synthetic
gtgaatcccccacagtactaaaaga

SEQ ID NO: 21859 - DNA, 25 bp, Artificial Sequence
  Synthetic
ccctttcttgacaattttgtatgca

SEQ ID NO: 21860 - DNA, 25 bp, Artificial Sequence
  Synthetic
catcctccctctataaaacctgcta

SEQ ID NO: 21861 - DNA, 25 bp, Artificial Sequence
  Synthetic
aagttcagcattataagtccagaca

SEQ ID NO: 21862 - DNA, 25 bp, Artificial Sequence
  Synthetic
cccattgattccaattttactccac

SEQ ID NO: 21863 - DNA, 25 bp, Artificial Sequence
  Synthetic
catcagtctccatctgttcgtaaga

SEQ ID NO: 21864 - DNA, 25 bp, Artificial Sequence
  Synthetic
ctcttctgtatataggtcctccagt

SEQ ID NO: 21865 - DNA, 24 bp, Artificial Sequence
  Synthetic
aattccatcaccattgttccaact

SEQ ID NO: 21866 - DNA, 25 bp, Artificial Sequence
  Synthetic
ccctttgatgaagctcaatactctt

SEQ ID NO: 21867 - DNA, 25 bp, Artificial Sequence
  Synthetic
ctcctcggttactaattcatcacat

SEQ ID NO: 21868 - DNA, 21 bp, Artificial Sequence
  Synthetic
gttgcagtcttgggctcaaat

SEQ ID NO: 21869 - DNA, 23 bp, Artificial Sequence
  Synthetic
acatcattactgtaacgcccgtc

SEQ ID NO: 21870 - DNA, 23 bp, Artificial Sequence
  Synthetic
cccatctactagtggttgcaacc

SEQ ID NO: 21871 - DNA, 20 bp, Artificial Sequence
  Synthetic
ccatctgagctgtcgtctgg

SEQ ID NO: 21872 - DNA, 25 bp, Artificial Sequence
  Synthetic
actgcattgtcctcattatttccat

SEQ ID NO: 21873 - DNA, 24 bp, Artificial Sequence
  Synthetic
gtgtctattaggcagtcgatgtcc

SEQ ID NO: 21874 - DNA, 25 bp, Artificial Sequence
  Synthetic
ggccatataccgatatgtaagaagg

SEQ ID NO: 21875 - DNA, 21 bp, Artificial Sequence
  Synthetic
agccatcaacaatagaggcca

SEQ ID NO: 21876 - DNA, 23 bp, Artificial Sequence
  Synthetic
accatccacaacaataggaggtt

SEQ ID NO: 21877 - DNA, 23 bp, Artificial Sequence
  Synthetic
caaccaacaacaaacaactgtgt

SEQ ID NO: 21878 - DNA, 24 bp, Artificial Sequence
  Synthetic
gcaaaatataaagagggagccagc

SEQ ID NO: 21879 - DNA, 22 bp, Artificial Sequence
  Synthetic
ccttttccttaggaggctctgc

SEQ ID NO: 21880 - DNA, 24 bp, Artificial Sequence
  Synthetic
gaacatacctgctggcaaaattgg

SEQ ID NO: 21881 - DNA, 21 bp, Artificial Sequence
  Synthetic
gtccgtctctctgttttggcc

SEQ ID NO: 21882 - DNA, 24 bp, Artificial Sequence
  Synthetic
ttagcagaaatggttcaatggtgt

SEQ ID NO: 21883 - DNA, 23 bp, Artificial Sequence
  Synthetic
cttgttggctgttcatggatact

SEQ ID NO: 21884 - DNA, 20 bp, Artificial Sequence
  Synthetic
ggtttgcaaccccttcctag

SEQ ID NO: 21885 - DNA, 19 bp, Artificial Sequence
  Synthetic
ctcccacccaggcggcata

SEQ ID NO: 21886 - DNA, 21 bp, Artificial Sequence
  Synthetic
ctgctggagaagtgggaagcg

SEQ ID NO: 21887 - DNA, 25 bp, Artificial Sequence
  Synthetic
aaagcagtttctaagtagtgtgtct

SEQ ID NO: 21888 - DNA, 23 bp, Artificial Sequence
  Synthetic
aagaatcaggtcctagcactagc

SEQ ID NO: 21889 - DNA, 25 bp, Artificial Sequence
  Synthetic
cggacattaagtagaccaacattca

SEQ ID NO: 21890 - DNA, 22 bp, Artificial Sequence
  Synthetic
agatgcattagctgagtctgct

SEQ ID NO: 21891 - DNA, 25 bp, Artificial Sequence
  Synthetic
ttgttcaataaatatgctgacgtgg

SEQ ID NO: 21892 - DNA, 23 bp, Artificial Sequence
  Synthetic
ttgctccctacacgtattttcca

SEQ ID NO: 21893 - DNA, 25 bp, Artificial Sequence
  Synthetic
ctatggatctgtctgaaagactgtc

SEQ ID NO: 21894 - DNA, 20 bp, Artificial Sequence
  Synthetic
gctgtggacagtgtggtcag

SEQ ID NO: 21895 - DNA, 25 bp, Artificial Sequence
  Synthetic
actgaaaaatgagaggtaatgctcc

SEQ ID NO: 21896 - DNA, 21 bp, Artificial Sequence
  Synthetic
atcctgtgcaagaaaccgtgg

SEQ ID NO: 21897 - DNA, 24 bp, Artificial Sequence
  Synthetic
ctaaaagtccagaagttgcagttg

SEQ ID NO: 21898 - DNA, 25 bp, Artificial Sequence
  Synthetic
acctaaaacatccagaaggagatgg

SEQ ID NO: 21899 - DNA, 22 bp, Artificial Sequence
  Synthetic
aggagagtcctgctaggagacg

SEQ ID NO: 21900 - DNA, 22 bp, Artificial Sequence
  Synthetic
gcttgggatccgccaataattc

SEQ ID NO: 21901 - DNA, 23 bp, Artificial Sequence
  Synthetic
gacccacaattcctgttgacact

SEQ ID NO: 21902 - DNA, 24 bp, Artificial Sequence
  Synthetic
ttagcaatgcagaagaaggtgtag

SEQ ID NO: 21903 - DNA, 25 bp, Artificial Sequence
  Synthetic
ctgaatttgaaattgaagcccctcc

SEQ ID NO: 21904 - DNA, 25 bp, Artificial Sequence
  Synthetic
taggacgtcctagatacagtgaaac

SEQ ID NO: 21905 - DNA, 23 bp, Artificial Sequence
  Synthetic
cgcaaacgaaaacgaatagctat

SEQ ID NO: 21906 - DNA, 22 bp, Artificial Sequence
  Synthetic
agttcctcatgtctcaggaagt

SEQ ID NO: 21907 - DNA, 25 bp, Artificial Sequence
  Synthetic
acccaactatttattgtaggctgtg

SEQ ID NO: 21908 - DNA, 24 bp, Artificial Sequence
  Synthetic
tagtggttctctagtttccagtga

SEQ ID NO: 21909 - DNA, 21 bp, Artificial Sequence
  Synthetic
tagtggtctgcggaaccggtg

SEQ ID NO: 21910 - DNA, 20 bp, Artificial Sequence
  Synthetic
ggccctagattgggtgtgcg

SEQ ID NO: 21911 - DNA, 19 bp, Artificial Sequence
  Synthetic
ccagggctctggcacatgg

SEQ ID NO: 21912 - DNA, 20 bp, Artificial Sequence
  Synthetic
ccactttggcggtccgctat

SEQ ID NO: 21913 - DNA, 20 bp, Artificial Sequence
  Synthetic
ttgccgcttacgctgtgaga

SEQ ID NO: 21914 - DNA, 22 bp, Artificial Sequence
  Synthetic
cagtgactttgaccaggggtgg

SEQ ID NO: 21915 - DNA, 21 bp, Artificial Sequence
  Synthetic
cccagggtgcccagagtaaca

SEQ ID NO: 21916 - DNA, 22 bp, Artificial Sequence
  Synthetic
tgctccattccactacggagct

SEQ ID NO: 21917 - DNA, 22 bp, Artificial Sequence
  Synthetic
gggaacccatggtatctggtgg

SEQ ID NO: 21918 - DNA, 20 bp, Artificial Sequence
  Synthetic
tccctcctctcaaccctcgg

SEQ ID NO: 21919 - DNA, 22 bp, Artificial Sequence
  Synthetic
cgttgcagtcgagcccgtgata

SEQ ID NO: 21920 - DNA, 22 bp, Artificial Sequence
  Synthetic
tccacctcaacgcagaccttcc

SEQ ID NO: 21921 - DNA, 21 bp, Artificial Sequence
  Synthetic
gcccccaaagtcattgcgttg

SEQ ID NO: 21922 - DNA, 20 bp, Artificial Sequence
  Synthetic
accacgggggctcccataac

SEQ ID NO: 21923 - DNA, 22 bp, Artificial Sequence
  Synthetic
aaatgtgatgagcttgccggga

SEQ ID NO: 21924 - DNA, 21 bp, Artificial Sequence
  Synthetic
gctctcagagacgtgggagga

SEQ ID NO: 21925 - DNA, 22 bp, Artificial Sequence
  Synthetic
tggaagagtgctccaaagctcc

SEQ ID NO: 21926 - DNA, 22 bp, Artificial Sequence
  Synthetic
agtcaacatcctgggtgggtgg

SEQ ID NO: 21927 - DNA, 21 bp, Artificial Sequence
  Synthetic
ggcataccggcactagtgagg

SEQ ID NO: 21928 - DNA, 22 bp, Artificial Sequence
  Synthetic
ggcatcatgaacaccaagtgcc

SEQ ID NO: 21929 - DNA, 22 bp, Artificial Sequence
  Synthetic
tccttcccccgaattcttcagc

SEQ ID NO: 21930 - DNA, 19 bp, Artificial Sequence
  Synthetic
tccaccacccaggcggaag

SEQ ID NO: 21931 - DNA, 22 bp, Artificial Sequence
  Synthetic
ctacaggacatgaccaccccga

SEQ ID NO: 21932 - DNA, 22 bp, Artificial Sequence
  Synthetic
tatcagtgctgcaacctcgacc

SEQ ID NO: 21933 - DNA, 22 bp, Artificial Sequence
  Synthetic
cgagagcaagggagtcgaacgg

SEQ ID NO: 21934 - DNA, 20 bp, Artificial Sequence
  Synthetic
ctggccggctcgatctttcg

SEQ ID NO: 21935 - DNA, 25 bp, Artificial Sequence
  Synthetic
aagaatgaacatcttcccctaatgt

SEQ ID NO: 21936 - DNA, 21 bp, Artificial Sequence
  Synthetic
tcttgggagtggagtcaatga

SEQ ID NO: 21937 - DNA, 24 bp, Artificial Sequence
  Synthetic
cgtgattagaacacacgagtactc

SEQ ID NO: 21938 - DNA, 23 bp, Artificial Sequence
  Synthetic
gacaaattgactcaggggagaca

SEQ ID NO: 21939 - DNA, 23 bp, Artificial Sequence
  Synthetic
agaaggccaaactatcaaatgca

SEQ ID NO: 21940 - DNA, 25 bp, Artificial Sequence
  Synthetic
gcacaaacagccatacaattattca

SEQ ID NO: 21941 - DNA, 24 bp, Artificial Sequence
  Synthetic
acaacataatggaccctgagtaca

SEQ ID NO: 21942 - DNA, 23 bp, Artificial Sequence
  Synthetic
tttgaggcttgctttaacagtgc

SEQ ID NO: 21943 - DNA, 25 bp, Artificial Sequence
  Synthetic
attggataccatgccaataattcca

SEQ ID NO: 21944 - DNA, 20 bp, Artificial Sequence
  Synthetic
ttgtgttacccaggcagctt

SEQ ID NO: 21945 - DNA, 25 bp, Artificial Sequence
  Synthetic
aaatgctaataatttggggagtgca

SEQ ID NO: 21946 - DNA, 25 bp, Artificial Sequence
  Synthetic
catgaagacagaaggaacacttgag

SEQ ID NO: 21947 - DNA, 23 bp, Artificial Sequence
  Synthetic
aggaatggttgatggttggtatg

SEQ ID NO: 21948 - DNA, 25 bp, Artificial Sequence
  Synthetic
gactgatgatcacagacatgagacc

SEQ ID NO: 21949 - DNA, 25 bp, Artificial Sequence
  Synthetic
acactcaacaaagatcaacttctgt

SEQ ID NO: 21950 - DNA, 22 bp, Artificial Sequence
  Synthetic
gccaacagcttctatgaagtgt

SEQ ID NO: 21951 - DNA, 23 bp, Artificial Sequence
  Synthetic
acagaggtacaccaaggaatcaa

SEQ ID NO: 21952 - DNA, 25 bp, Artificial Sequence
  Synthetic
atcagaactgaagcattaatgacca

SEQ ID NO: 21953 - DNA, 22 bp, Artificial Sequence
  Synthetic
caactcacccatccaaccaaac

SEQ ID NO: 21954 - DNA, 23 bp, Artificial Sequence
  Synthetic
aaactcaagaagtgcagtgctag

SEQ ID NO: 21955 - DNA, 25 bp, Artificial Sequence
  Synthetic
tactgttagtcatcacagtgactga

SEQ ID NO: 21956 - DNA, 24 bp, Artificial Sequence
  Synthetic
atccacatggggcaaataatcatt

SEQ ID NO: 21957 - DNA, 25 bp, Artificial Sequence
  Synthetic
gcacaaatcacattatccattctgg

SEQ ID NO: 21958 - DNA, 22 bp, Artificial Sequence
  Synthetic
agcatatgcagcaacaatccaa

SEQ ID NO: 21959 - DNA, 20 bp, Artificial Sequence
  Synthetic
ccctccactcaacctcctcc

SEQ ID NO: 21960 - DNA, 21 bp, Artificial Sequence
  Synthetic
caatccttgctgcagtcacac

SEQ ID NO: 21961 - DNA, 23 bp, Artificial Sequence
  Synthetic
agtgtcttaaccagcaaagtgtt

SEQ ID NO: 21962 - DNA, 24 bp, Artificial Sequence
  Synthetic
tcttcccactagctgaaacatgta

SEQ ID NO: 21963 - DNA, 25 bp, Artificial Sequence
  Synthetic
gcacctaatcatgttcttacaatgg

SEQ ID NO: 21964 - DNA, 20 bp, Artificial Sequence
  Synthetic
gccatgagcaaactcctcac

SEQ ID NO: 21965 - DNA, 24 bp, Artificial Sequence
  Synthetic
tgtaggtagaatgtttgcaatgca

SEQ ID NO: 21966 - DNA, 22 bp, Artificial Sequence
  Synthetic
gaacctacatatcctcacgggc

SEQ ID NO: 21967 - DNA, 25 bp, Artificial Sequence
  Synthetic
tacagtcagtagtagaccatgtgaa

SEQ ID NO: 21968 - DNA, 20 bp, Artificial Sequence
  Synthetic
cctcccgggagagccatagt

SEQ ID NO: 21969 - DNA, 22 bp, Artificial Sequence
  Synthetic
caggggccctagattgggtgtg

SEQ ID NO: 21970 - DNA, 19 bp, Artificial Sequence
  Synthetic
cgcatggcgtccgggttct

SEQ ID NO: 21971 - DNA, 18 bp, Artificial Sequence
  Synthetic
ggtgttgggtggcggtga

SEQ ID NO: 21972 - DNA, 22 bp, Artificial Sequence
  Synthetic
tcatggacatgatcgctggtgc

SEQ ID NO: 21973 - DNA, 22 bp, Artificial Sequence
  Synthetic
tcagttatgccaacggaagcgg

SEQ ID NO: 21974 - DNA, 20 bp, Artificial Sequence
  Synthetic
gcccccttgtgtcatcggag

SEQ ID NO: 21975 - DNA, 19 bp, Artificial Sequence
  Synthetic
agcccgttgctgctgtcca

SEQ ID NO: 21976 - DNA, 22 bp, Artificial Sequence
  Synthetic
cctcgtgttcttctgctttgcg

SEQ ID NO: 21977 - DNA, 21 bp, Artificial Sequence
  Synthetic
aaagtcccctacttcgtgcgc

SEQ ID NO: 21978 - DNA, 22 bp, Artificial Sequence
  Synthetic
ggagaccaagctcatcacgtgg

SEQ ID NO: 21979 - DNA, 21 bp, Artificial Sequence
  Synthetic
ggaacgaggaccatcgcatca

SEQ ID NO: 21980 - DNA, 22 bp, Artificial Sequence
  Synthetic
tccctgtggagaacctagggac

SEQ ID NO: 21981 - DNA, 21 bp, Artificial Sequence
  Synthetic
cgggtgctcaggaggtgctta

SEQ ID NO: 21982 - DNA, 20 bp, Artificial Sequence
  Synthetic
gaagctggtcgcattgggca

SEQ ID NO: 21983 - DNA, 22 bp, Artificial Sequence
  Synthetic
tctgtgagtgctatgacgcggg

SEQ ID NO: 21984 - DNA, 21 bp, Artificial Sequence
  Synthetic
tgaagtcaccctgacgcaccc

SEQ ID NO: 21985 - DNA, 21 bp, Artificial Sequence
  Synthetic
gtcccgccatgcagaggttat

SEQ ID NO: 21986 - DNA, 19 bp, Artificial Sequence
  Synthetic
tgtgggtgctggcctagct

SEQ ID NO: 21987 - DNA, 19 bp, Artificial Sequence
  Synthetic
cgcccgcgtcactgccata

SEQ ID NO: 21988 - DNA, 22 bp, Artificial Sequence
  Synthetic
ctgcaggaacatgtggagtggg

SEQ ID NO: 21989 - DNA, 21 bp, Artificial Sequence
  Synthetic
gcaattaccttgcgagcccga

SEQ ID NO: 21990 - DNA, 21 bp, Artificial Sequence
  Synthetic
tgtggcagaggaggatgagcg

SEQ ID NO: 21991 - DNA, 22 bp, Artificial Sequence
  Synthetic
acgacaacatcctctgagcccg

SEQ ID NO: 21992 - DNA, 22 bp, Artificial Sequence
  Synthetic
agactgcaagttctggacagcc

SEQ ID NO: 21993 - DNA, 20 bp, Artificial Sequence
  Synthetic
gcgtgtgcgagaagatggcc

SEQ ID NO: 21994 - DNA, 21 bp, Artificial Sequence
  Synthetic
ttcaaggggggaaaactgcgg

SEQ ID NO: 21995 - DNA, 20 bp, Artificial Sequence
  Synthetic
cgcgtgggagacagcaagac

SEQ ID NO: 21996 - DNA, 22 bp, Artificial Sequence
  Synthetic
tgcctcagaaaacttggggtcc

SEQ ID NO: 21997 - DNA, 23 bp, Artificial Sequence
  Synthetic
agatccgaaaatcgaaacgaaca

SEQ ID NO: 21998 - DNA, 25 bp, Artificial Sequence
  Synthetic
gtatgactacaaggagaaccgattt

SEQ ID NO: 21999 - DNA, 23 bp, Artificial Sequence
  Synthetic
aagaacatgaggaaaacaagcca

SEQ ID NO: 22000 - DNA, 24 bp, Artificial Sequence
  Synthetic
atgagaaggaactatttcacagcg

SEQ ID NO: 22001 - DNA, 20 bp, Artificial Sequence
  Synthetic
tggagccacacagatgggaa

SEQ ID NO: 22002 - DNA, 23 bp, Artificial Sequence
  Synthetic
aatcagaaacatggccaattgga

SEQ ID NO: 22003 - DNA, 23 bp, Artificial Sequence
  Synthetic
tttgcatcagaatagaccaggca

SEQ ID NO: 22004 - DNA, 24 bp, Artificial Sequence
  Synthetic
agaagcagtaatgagaatgggaga

SEQ ID NO: 22005 - DNA, 20 bp, Artificial Sequence
  Synthetic
agccgcgtactctagctgat

SEQ ID NO: 22006 - DNA, 22 bp, Artificial Sequence
  Synthetic
gcagggagcaattagaagactc

SEQ ID NO: 22007 - DNA, 24 bp, Artificial Sequence
  Synthetic
aattgtagaacgtaaaacagggga

SEQ ID NO: 22008 - DNA, 22 bp, Artificial Sequence
  Synthetic
ggggctatatccctaggacggc

SEQ ID NO: 22009 - DNA, 25 bp, Artificial Sequence
  Synthetic
tgtgctttgatagaaaacatcgagc

SEQ ID NO: 22010 - DNA, 21 bp, Artificial Sequence
  Synthetic
ccaggaaaggcttctagacct

SEQ ID NO: 22011 - DNA, 22 bp, Artificial Sequence
  Synthetic
cgtggacattacaggacacatg

SEQ ID NO: 22012 - DNA, 25 bp, Artificial Sequence
  Synthetic
aaaaggaagcatctaagtatgggga

SEQ ID NO: 22013 - DNA, 24 bp, Artificial Sequence
  Synthetic
agatgttaccctacactttgagca

SEQ ID NO: 22014 - DNA, 22 bp, Artificial Sequence
  Synthetic
atttccacaaacacccattgct

SEQ ID NO: 22015 - DNA, 25 bp, Artificial Sequence
  Synthetic
atcctgattaccttaaaatggctgc

SEQ ID NO: 22016 - DNA, 23 bp, Artificial Sequence
  Synthetic
cccagggtcaaaacaatggtatt

SEQ ID NO: 22017 - DNA, 22 bp, Artificial Sequence
  Synthetic
ccccagctacaagtagtttgga

SEQ ID NO: 22018 - DNA, 20 bp, Artificial Sequence
  Synthetic
actacgtccgccgtctaggt

SEQ ID NO: 22019 - DNA, 19 bp, Artificial Sequence
  Synthetic
cgggattcgagcgcccctt

SEQ ID NO: 22020 - DNA, 19 bp, Artificial Sequence
  Synthetic
cgccgtcatcctccaccca

SEQ ID NO: 22021 - DNA, 22 bp, Artificial Sequence
  Synthetic
aagacctccaagacctcctgca

SEQ ID NO: 22022 - DNA, 22 bp, Artificial Sequence
  Synthetic
ccttcctgggcctctatcctcc

SEQ ID NO: 22023 - DNA, 20 bp, Artificial Sequence
  Synthetic
cttccggtgcgggaaagcag

SEQ ID NO: 22024 - DNA, 20 bp, Artificial Sequence
  Synthetic
tacaggcgccagctgtcctt

SEQ ID NO: 22025 - DNA, 20 bp, Artificial Sequence
  Synthetic
gacctgcgggccactaactc

SEQ ID NO: 22026 - DNA, 20 bp, Artificial Sequence
  Synthetic
ctggcccatatcctgcagcc

SEQ ID NO: 22027 - DNA, 22 bp, Artificial Sequence
  Synthetic
aggcatactgatccccgagacc

SEQ ID NO: 22028 - DNA, 20 bp, Artificial Sequence
  Synthetic
ggggcagctacttgcctcag

SEQ ID NO: 22029 - DNA, 21 bp, Artificial Sequence
  Synthetic
acctgatcccatctccaggct

SEQ ID NO: 22030 - DNA, 24 bp, Artificial Sequence
  Synthetic
gctattcgccatactacccatgtc

SEQ ID NO: 22031 - DNA, 21 bp, Artificial Sequence
  Synthetic
agttctgcccagtggatcccg

SEQ ID NO: 22032 - DNA, 21 bp, Artificial Sequence
  Synthetic
gttcatggaccctcgacctgc

SEQ ID NO: 22033 - DNA, 22 bp, Artificial Sequence
  Synthetic
cagcccctactggaaatttcag

SEQ ID NO: 22034 - DNA, 19 bp, Artificial Sequence
  Synthetic
gagcagtaccggtggcggt

SEQ ID NO: 22035 - DNA, 22 bp, Artificial Sequence
  Synthetic
atcctccttctcctgcagcaac

SEQ ID NO: 22036 - DNA, 22 bp, Artificial Sequence
  Synthetic
tcgcttcctcttctcctcagcc

SEQ ID NO: 22037 - DNA, 21 bp, Artificial Sequence
  Synthetic
tatcagcccacttcccagggt

SEQ ID NO: 22038 - DNA, 22 bp, Artificial Sequence
  Synthetic
acccttaaggtccttaccccgc

SEQ ID NO: 22039 - DNA, 20 bp, Artificial Sequence
  Synthetic
tcaaaccaaggcctaccacc

SEQ ID NO: 22040 - DNA, 22 bp, Artificial Sequence
  Synthetic
taagctcagacctccgggaagc

SEQ ID NO: 22041 - DNA, 18 bp, Artificial Sequence
  Synthetic
acgccggttgagtcgcgt

SEQ ID NO: 22042 - DNA, 23 bp, Artificial Sequence
  Synthetic
agaagtacacatcagggagacag

SEQ ID NO: 22043 - DNA, 25 bp, Artificial Sequence
  Synthetic
aagtcgaaaggttaaaacatggaac

SEQ ID NO: 22044 - DNA, 25 bp, Artificial Sequence
  Synthetic
tggttgcatacatgttagagagaga

SEQ ID NO: 22045 - DNA, 20 bp, Artificial Sequence
  Synthetic
attggagatgtgccacagca

SEQ ID NO: 22046 - DNA, 23 bp, Artificial Sequence
  Synthetic
ggaaaagggcaacagctatactc

SEQ ID NO: 22047 - DNA, 25 bp, Artificial Sequence
  Synthetic
aattggggaattgaacatatcgaca

SEQ ID NO: 22048 - DNA, 21 bp, Artificial Sequence
  Synthetic
acaggggacagagaaactgac

SEQ ID NO: 22049 - DNA, 24 bp, Artificial Sequence
  Synthetic
tgtacttgggacatttgataccac

SEQ ID NO: 22050 - DNA, 20 bp, Artificial Sequence
  Synthetic
gtggagtccgctgttctgag

SEQ ID NO: 22051 - DNA, 21 bp, Artificial Sequence
  Synthetic
tatcagaatggaccaggcgat

SEQ ID NO: 22052 - DNA, 23 bp, Artificial Sequence
  Synthetic
aacacagttcgagtctctgaaac

SEQ ID NO: 22053 - DNA, 22 bp, Artificial Sequence
  Synthetic
acaggaacaggatacaccatgg

SEQ ID NO: 22054 - DNA, 21 bp, Artificial Sequence
  Synthetic
ctaactcaaggtcgccagact

SEQ ID NO: 22055 - DNA, 25 bp, Artificial Sequence
  Synthetic
agagcactgacattaaatacgatga

SEQ ID NO: 22056 - DNA, 23 bp, Artificial Sequence
  Synthetic
ctttcacaatcactggggacaac

SEQ ID NO: 22057 - DNA, 21 bp, Artificial Sequence
  Synthetic
gctagcaagcattgacctgaa

SEQ ID NO: 22058 - DNA, 23 bp, Artificial Sequence
  Synthetic
ctcatagtgaatgcaccaaacca

SEQ ID NO: 22059 - DNA, 22 bp, Artificial Sequence
  Synthetic
cccagatggctcttcaattgtt

SEQ ID NO: 22060 - DNA, 19 bp, Artificial Sequence
  Synthetic
gacggcctcgctgactgga

SEQ ID NO: 22061 - DNA, 22 bp, Artificial Sequence
  Synthetic
tattgccacgcatccggatcac

SEQ ID NO: 22062 - DNA, 19 bp, Artificial Sequence
  Synthetic
acgccgtccaacttcacgc

SEQ ID NO: 22063 - DNA, 22 bp, Artificial Sequence
  Synthetic
tccaataaacccatcccctcgc

SEQ ID NO: 22064 - DNA, 22 bp, Artificial Sequence
  Synthetic
gggacggaggagagacgatgca

SEQ ID NO: 22065 - DNA, 25 bp, Artificial Sequence
  Synthetic
atacaccacatcgttggataatacg

SEQ ID NO: 22066 - DNA, 22 bp, Artificial Sequence
  Synthetic
cgttatcatctgctcccgctgc

SEQ ID NO: 22067 - DNA, 22 bp, Artificial Sequence
  Synthetic
cggattccaagtcagagcggcg

SEQ ID NO: 22068 - DNA, 19 bp, Artificial Sequence
  Synthetic
tcagccacgacgcgagtga

SEQ ID NO: 22069 - DNA, 21 bp, Artificial Sequence
  Synthetic
tctcatcaccgagaccgcggg

SEQ ID NO: 22070 - DNA, 19 bp, Artificial Sequence
  Synthetic
cgcccgatccctccaggtt

SEQ ID NO: 22071 - DNA, 20 bp, Artificial Sequence
  Synthetic
catcgggtagacggcgctag

SEQ ID NO: 22072 - DNA, 19 bp, Artificial Sequence
  Synthetic
ggaggaaactgccgcggga

SEQ ID NO: 22073 - DNA, 22 bp, Artificial Sequence
  Synthetic
gcacgctgcatggctaaatacc

SEQ ID NO: 22074 - DNA, 20 bp, Artificial Sequence
  Synthetic
gcatgaactgcccgtggtgg

SEQ ID NO: 22075 - DNA, 18 bp, Artificial Sequence
  Synthetic
tgaggttgcgggccaggt

SEQ ID NO: 22076 - DNA, 20 bp, Artificial Sequence
  Synthetic
tctgagcgagtcccttgcgc

SEQ ID NO: 22077 - DNA, 19 bp, Artificial Sequence
  Synthetic
cgcaagtaatgggtgcgcg

SEQ ID NO: 22078 - DNA, 22 bp, Artificial Sequence
  Synthetic
cgagagcccgtcgtgatagtcc

SEQ ID NO: 22079 - DNA, 19 bp, Artificial Sequence
  Synthetic
acatgcgccctgggtctga

SEQ ID NO: 22080 - DNA, 18 bp, Artificial Sequence
  Synthetic
cgtgcgccacgccaagat

SEQ ID NO: 22081 - DNA, 22 bp, Artificial Sequence
  Synthetic
caggcggtgcagatcggttttc

SEQ ID NO: 22082 - DNA, 22 bp, Artificial Sequence
  Synthetic
cgggtacgacctgcgatttagc

SEQ ID NO: 22083 - DNA, 20 bp, Artificial Sequence
  Synthetic
ccgctggtcggtttctgact

SEQ ID NO: 22084 - DNA, 19 bp, Artificial Sequence
  Synthetic
gcgctccacgatctcggca

SEQ ID NO: 22085 - DNA, 21 bp, Artificial Sequence
  Synthetic
accaggacaaggtggtgagct

SEQ ID NO: 22086 - DNA, 20 bp, Artificial Sequence
  Synthetic
ggccttggtggacttccagg

SEQ ID NO: 22087 - DNA, 22 bp, Artificial Sequence
  Synthetic
agagggctcatccgactctgcc

SEQ ID NO: 22088 - DNA, 20 bp, Artificial Sequence
  Synthetic
caggggcgagtccgtcgtca

SEQ ID NO: 22089 - DNA, 22 bp, Artificial Sequence
  Synthetic
tcgcgcatagtgtggaagtggt

SEQ ID NO: 22090 - DNA, 21 bp, Artificial Sequence
  Synthetic
cccctccgtattcttgtcgcg

SEQ ID NO: 22091 - DNA, 20 bp, Artificial Sequence
  Synthetic
tgctgggcgccaggaaaaac

SEQ ID NO: 22092 - DNA, 20 bp, Artificial Sequence
  Synthetic
acctgacggtgaaccaccca

SEQ ID NO: 22093 - DNA, 21 bp, Artificial Sequence
  Synthetic
cggcagcagtacacgtcgagc

SEQ ID NO: 22094 - DNA, 20 bp, Artificial Sequence
  Synthetic
cgtcgggcacagacccatgg

SEQ ID NO: 22095 - DNA, 19 bp, Artificial Sequence
  Synthetic
gcgtagttgcgcaggccct

SEQ ID NO: 22096 - DNA, 21 bp, Artificial Sequence
  Synthetic
cgtaattcaccacgggcacgc

SEQ ID NO: 22097 - DNA, 21 bp, Artificial Sequence
  Synthetic
actgacagttgcgcaatccga

SEQ ID NO: 22098 - DNA, 18 bp, Artificial Sequence
  Synthetic
gcgcgttgccccaaacca

SEQ ID NO: 22099 - DNA, 18 bp, Artificial Sequence
  Synthetic
acaagccccagcaaccgg

SEQ ID NO: 22100 - DNA, 18 bp, Artificial Sequence
  Synthetic
aagctacagcgctcgcgg

SEQ ID NO: 22101 - DNA, 19 bp, Artificial Sequence
  Synthetic
gggccacgctgacggcttt

SEQ ID NO: 22102 - DNA, 18 bp, Artificial Sequence
  Synthetic
cggcttgaacgagcgcct

SEQ ID NO: 22103 - DNA, 18 bp, Artificial Sequence
  Synthetic
gcgctacgaacccgcaca

SEQ ID NO: 22104 - DNA, 18 bp, Artificial Sequence
  Synthetic
tacgcgcacgccaaaccg

SEQ ID NO: 22105 - DNA, 19 bp, Artificial Sequence
  Synthetic
ggcttcggcgtgcagctgt

SEQ ID NO: 22106 - DNA, 20 bp, Artificial Sequence
  Synthetic
gttggacgacaacgccaagc

SEQ ID NO: 22107 - DNA, 19 bp, Artificial Sequence
  Synthetic
gtgcagcagcgcctacaga

SEQ ID NO: 22108 - DNA, 22 bp, Artificial Sequence
  Synthetic
tcaaccaggacttgctgtcggc

SEQ ID NO: 22109 - DNA, 19 bp, Artificial Sequence
  Synthetic
tgaccacccccgacgccaa

SEQ ID NO: 22110 - DNA, 21 bp, Artificial Sequence
  Synthetic
cggaagcaggacccactaccg

SEQ ID NO: 22111 - DNA, 22 bp, Artificial Sequence
  Synthetic
caaacagctgtcgcggtactcg

SEQ ID NO: 22112 - DNA, 19 bp, Artificial Sequence
  Synthetic
cgccacagcagagccagca

SEQ ID NO: 22113 - DNA, 22 bp, Artificial Sequence
  Synthetic
agctcgatgttgaacaccgacg

SEQ ID NO: 22114 - DNA, 22 bp, Artificial Sequence
  Synthetic
tcgttttcctcctctccgtcgt

SEQ ID NO: 22115 - DNA, 22 bp, Artificial Sequence
  Synthetic
accagtctcagtctcagcagca

SEQ ID NO: 22116 - DNA, 22 bp, Artificial Sequence
  Synthetic
ctgttgctctcctctaccccgc

SEQ ID NO: 22117 - DNA, 19 bp, Artificial Sequence
  Synthetic
ccactactgccggagccga

SEQ ID NO: 22118 - DNA, 21 bp, Artificial Sequence
  Synthetic
atagcggcgttaggtgacacg

SEQ ID NO: 22119 - DNA, 19 bp, Artificial Sequence
  Synthetic
gttgcgcacccgtaagccg

SEQ ID NO: 22120 - DNA, 22 bp, Artificial Sequence
  Synthetic
gctgctgttgctgctgttgttg

SEQ ID NO: 22121 - DNA, 20 bp, Artificial Sequence
  Synthetic
ggggatctcctcacgcacgc

SEQ ID NO: 22122 - DNA, 21 bp, Artificial Sequence
  Synthetic
gccacaaagtcgcttttgccg

SEQ ID NO: 22123 - DNA, 19 bp, Artificial Sequence
  Synthetic
cctcgcacagccgatgcac

SEQ ID NO: 22124 - DNA, 19 bp, Artificial Sequence
  Synthetic
gcgatcaccacgctcgagg

SEQ ID NO: 22125 - DNA, 19 bp, Artificial Sequence
  Synthetic
cagccagaccgctagccga

SEQ ID NO: 22126 - DNA, 19 bp, Artificial Sequence
  Synthetic
acccggcgtgtcgactcgt

SEQ ID NO: 22127 - DNA, 19 bp, Artificial Sequence
  Synthetic
gcggactgcaccgggatga

SEQ ID NO: 22128 - DNA, 19 bp, Artificial Sequence
  Synthetic
cgaccgcgcggctgatgat

SEQ ID NO: 22129 - DNA, 22 bp, Artificial Sequence
  Synthetic
tgaagaaatagaccgggtgccg

SEQ ID NO: 22130 - DNA, 19 bp, Artificial Sequence
  Synthetic
gaggccacggcgcagaaga

SEQ ID NO: 22131 - DNA, 19 bp, Artificial Sequence
  Synthetic
cgcgccggtactcgagcaa

SEQ ID NO: 22132 - DNA, 19 bp, Artificial Sequence
  Synthetic
agcggctgctggaagaggg

SEQ ID NO: 22133 - DNA, 22 bp, Artificial Sequence
  Synthetic
cacctggacatctaccgtcgcc

SEQ ID NO: 22134 - DNA, 19 bp, Artificial Sequence
  Synthetic
tgcctcagctgttaccgcg

SEQ ID NO: 22135 - DNA, 19 bp, Artificial Sequence
  Synthetic
gctggtgcggcttttccac

SEQ ID NO: 22136 - DNA, 19 bp, Artificial Sequence
  Synthetic
ctcggtgagcgggtagcga

SEQ ID NO: 22137 - DNA, 19 bp, Artificial Sequence
  Synthetic
cagggccagggacagcctt

SEQ ID NO: 22138 - DNA, 19 bp, Artificial Sequence
  Synthetic
cgcaccctctgagtgctgc

SEQ ID NO: 22139 - DNA, 19 bp, Artificial Sequence
  Synthetic
ccgtcttatcccgtgccgc

SEQ ID NO: 22140 - DNA, 19 bp, Artificial Sequence
  Synthetic
cgtaaggaaaccgcggcgg

SEQ ID NO: 22141 - DNA, 20 bp, Artificial Sequence
  Synthetic
acagtccggcttgggtgtcc

SEQ ID NO: 22142 - DNA, 19 bp, Artificial Sequence
  Synthetic
cgcggagggtgattcgcac

SEQ ID NO: 22143 - DNA, 22 bp, Artificial Sequence
  Synthetic
agttgttgaggtccaccagcag

SEQ ID NO: 22144 - DNA, 19 bp, Artificial Sequence
  Synthetic
agacgaccggcttccagcg

SEQ ID NO: 22145 - DNA, 18 bp, Artificial Sequence
  Synthetic
gcttgcccgacgcgtgaa

SEQ ID NO: 22146 - DNA, 21 bp, Artificial Sequence
  Synthetic
gcacgttgaccgacacgttct

SEQ ID NO: 22147 - DNA, 19 bp, Artificial Sequence
  Synthetic
gctgttgcgacggcgaatg

SEQ ID NO: 22148 - DNA, 19 bp, Artificial Sequence
  Synthetic
ccggagcgtggcggtacaa

SEQ ID NO: 22149 - DNA, 19 bp, Artificial Sequence
  Synthetic
cgtgtcgtacgcgcaccgt

SEQ ID NO: 22150 - DNA, 22 bp, Artificial Sequence
  Synthetic
tcagctccgaggctaggttagc

SEQ ID NO: 22151 - DNA, 22 bp, Artificial Sequence
  Synthetic
gaggcccatgatgagtagtcgc

SEQ ID NO: 22152 - DNA, 19 bp, Artificial Sequence
  Synthetic
gcggccggcatcaggagaa

SEQ ID NO: 22153 - DNA, 21 bp, Artificial Sequence
  Synthetic
ccgatagcggttcctcagcca

SEQ ID NO: 22154 - DNA, 19 bp, Artificial Sequence
  Synthetic
agggtggtccgcgttccgt

SEQ ID NO: 22155 - DNA, 20 bp, Artificial Sequence
  Synthetic
ccgaccagttctccatcgcg

SEQ ID NO: 22156 - DNA, 19 bp, Artificial Sequence
  Synthetic
cccgtggccgtaccctgtt

SEQ ID NO: 22157 - DNA, 21 bp, Artificial Sequence
  Synthetic
cacgcatgtgctacgcggatt

SEQ ID NO: 22158 - DNA, 19 bp, Artificial Sequence
  Synthetic
cgacgagcgcgggtcacaa

SEQ ID NO: 22159 - DNA, 19 bp, Artificial Sequence
  Synthetic
ctgacgccacgccgccatt

SEQ ID NO: 22160 - DNA, 19 bp, Artificial Sequence
  Synthetic
tgctgctctgcacgctctg

SEQ ID NO: 22161 - DNA, 19 bp, Artificial Sequence
  Synthetic
gcgtcgcccttctccgtga

SEQ ID NO: 22162 - DNA, 22 bp, Artificial Sequence
  Synthetic
cgtcgtggagacaagcaacacc

SEQ ID NO: 22163 - DNA, 20 bp, Artificial Sequence
  Synthetic
gtgctcagcggcgtgtacag

SEQ ID NO: 22164 - DNA, 18 bp, Artificial Sequence
  Synthetic
ggtagcgcttgcggcaca

SEQ ID NO: 22165 - DNA, 20 bp, Artificial Sequence
  Synthetic
gcagcggcgagaggagagga

SEQ ID NO: 22166 - DNA, 22 bp, Artificial Sequence
  Synthetic
tcctctcagtttccccgtctcc

SEQ ID NO: 22167 - DNA, 19 bp, Artificial Sequence
  Synthetic
gtggtgccgtccacgtcgt

SEQ ID NO: 22168 - DNA, 19 bp, Artificial Sequence
  Synthetic
gcacgcgcgtttccccgta

SEQ ID NO: 22169 - DNA, 19 bp, Artificial Sequence
  Synthetic
cggcaagctcacgcactgc

SEQ ID NO: 22170 - DNA, 19 bp, Artificial Sequence
  Synthetic
cggaacgtgacggttgccg

SEQ ID NO: 22171 - DNA, 20 bp, Artificial Sequence
  Synthetic
tgacgacggggaggatgacg

SEQ ID NO: 22172 - DNA, 22 bp, Artificial Sequence
  Synthetic
atcggctcgtatcccgaagtgc

SEQ ID NO: 22173 - DNA, 19 bp, Artificial Sequence
  Synthetic
ccgtcctggcacgcctctt

SEQ ID NO: 22174 - DNA, 19 bp, Artificial Sequence
  Synthetic
cccggcgtgctgttggtct

SEQ ID NO: 22175 - DNA, 20 bp, Artificial Sequence
  Synthetic
agagcctcacctgcgtgacg

SEQ ID NO: 22176 - DNA, 20 bp, Artificial Sequence
  Synthetic
gagcacttgcggctccatga

SEQ ID NO: 22177 - DNA, 19 bp, Artificial Sequence
  Synthetic
gcccgtcgtagcgcagaat

SEQ ID NO: 22178 - DNA, 20 bp, Artificial Sequence
  Synthetic
caacgccgcgtgtaacttcc

SEQ ID NO: 22179 - DNA, 20 bp, Artificial Sequence
  Synthetic
atatgtgggagcgcaaggcc

SEQ ID NO: 22180 - DNA, 20 bp, Artificial Sequence
  Synthetic
gcgactttaccgcgaacgcc

SEQ ID NO: 22181 - DNA, 21 bp, Artificial Sequence
  Synthetic
tgcctgtccaaccaccatgac

SEQ ID NO: 22182 - DNA, 20 bp, Artificial Sequence
  Synthetic
gctcatgcagcgtctcacgg

SEQ ID NO: 22183 - DNA, 20 bp, Artificial Sequence
  Synthetic
acaccagcgacaacgtgctc

SEQ ID NO: 22184 - DNA, 18 bp, Artificial Sequence
  Synthetic
cgtgtgcaccaccgtgga

SEQ ID NO: 22185 - DNA, 20 bp, Artificial Sequence
  Synthetic
cgtgcaccacggtgaacacg

SEQ ID NO: 22186 - DNA, 19 bp, Artificial Sequence
  Synthetic
ggcgctgtgtccgagctca

SEQ ID NO: 22187 - DNA, 22 bp, Artificial Sequence
  Synthetic
ccaggtgagaaagagaagccgc

SEQ ID NO: 22188 - DNA, 20 bp, Artificial Sequence
  Synthetic
cggcagcggtggtactggta

SEQ ID NO: 22189 - DNA, 19 bp, Artificial Sequence
  Synthetic
gtccagaacgcggttggga

SEQ ID NO: 22190 - DNA, 22 bp, Artificial Sequence
  Synthetic
catgttgccgtgtgacgagacg

SEQ ID NO: 22191 - DNA, 22 bp, Artificial Sequence
  Synthetic
tgggcgatgcacaactctttct

SEQ ID NO: 22192 - DNA, 19 bp, Artificial Sequence
  Synthetic
ggtggtggtgggcatcgtg

SEQ ID NO: 22193 - DNA, 22 bp, Artificial Sequence
  Synthetic
gtcgcctcggtagctcagtagt

SEQ ID NO: 22194 - DNA, 24 bp, Artificial Sequence
  Synthetic
cgataggcggctataagatagaga

SEQ ID NO: 22195 - DNA, 20 bp, Artificial Sequence
  Synthetic
tatggttcttaggcgcgcat

SEQ ID NO: 22196 - DNA, 18 bp, Artificial Sequence
  Synthetic
ccggcgtgcagcaaggtt

SEQ ID NO: 22197 - DNA, 19 bp, Artificial Sequence
  Synthetic
tccctcggcgaccaacacc

SEQ ID NO: 22198 - DNA, 21 bp, Artificial Sequence
  Synthetic
gtagcgggagatacggcgttc

SEQ ID NO: 22199 - DNA, 21 bp, Artificial Sequence
  Synthetic
gctatcgtcgccggtttcggg

SEQ ID NO: 22200 - DNA, 20 bp, Artificial Sequence
  Synthetic
tcggcgttttcgggaagggc

SEQ ID NO: 22201 - DNA, 20 bp, Artificial Sequence
  Synthetic
cgacgcgatcacggtaaccc

SEQ ID NO: 22202 - DNA, 22 bp, Artificial Sequence
  Synthetic
gcgttgtctcgcctatcagcgt

SEQ ID NO: 22203 - DNA, 20 bp, Artificial Sequence
  Synthetic
tacgagaccccgaggtacgc

SEQ ID NO: 22204 - DNA, 20 bp, Artificial Sequence
  Synthetic
cggaacggcgtttcactgcc

SEQ ID NO: 22205 - DNA, 19 bp, Artificial Sequence
  Synthetic
gcgtggcagggctggaaga

SEQ ID NO: 22206 - DNA, 19 bp, Artificial Sequence
  Synthetic
accggtgtggaagccgagg

SEQ ID NO: 22207 - DNA, 20 bp, Artificial Sequence
  Synthetic
acatgggccatgtgtggtgg

SEQ ID NO: 22208 - DNA, 22 bp, Artificial Sequence
  Synthetic
ctccgggttcctgccttttcca

SEQ ID NO: 22209 - DNA, 22 bp, Artificial Sequence
  Synthetic
aacaacgcagactgctgaaggc

SEQ ID NO: 22210 - DNA, 19 bp, Artificial Sequence
  Synthetic
agcttctccccgactccgc

SEQ ID NO: 22211 - DNA, 22 bp, Artificial Sequence
  Synthetic
cgataccaccacattcaggggc

SEQ ID NO: 22212 - DNA, 19 bp, Artificial Sequence
  Synthetic
gggactttccacacggcgg

SEQ ID NO: 22213 - DNA, 22 bp, Artificial Sequence
  Synthetic
tcgacgacaggtgcggattagt

SEQ ID NO: 22214 - DNA, 21 bp, Artificial Sequence
  Synthetic
caacaataccgccctacgttg

SEQ ID NO: 22215 - DNA, 22 bp, Artificial Sequence
  Synthetic
ggacgtaacattcggacacgga

SEQ ID NO: 22216 - DNA, 19 bp, Artificial Sequence
  Synthetic
ggcgacgacagttccgtgg

SEQ ID NO: 22217 - DNA, 19 bp, Artificial Sequence
  Synthetic
ccggcggtggtgaacgaga

SEQ ID NO: 22218 - DNA, 21 bp, Artificial Sequence
  Synthetic
gtaacccagccaaaccagcgc

SEQ ID NO: 22219 - DNA, 19 bp, Artificial Sequence
  Synthetic
ccgtgccatcggtgggtac

SEQ ID NO: 22220 - DNA, 22 bp, Artificial Sequence
  Synthetic
gcgagaaccggtcgctcatagc

SEQ ID NO: 22221 - DNA, 20 bp, Artificial Sequence
  Synthetic
ggaggctatatgaccgcgcg

SEQ ID NO: 22222 - DNA, 21 bp, Artificial Sequence
  Synthetic
ccttcatcgcgtttgccgtgc

SEQ ID NO: 22223 - DNA, 22 bp, Artificial Sequence
  Synthetic
aaacgggcgcggttttataggc

SEQ ID NO: 22224 - DNA, 22 bp, Artificial Sequence
  Synthetic
agctgatgcatttccagcgacg

SEQ ID NO: 22225 - DNA, 21 bp, Artificial Sequence
  Synthetic
ttctctgtggtcggcgagtct

SEQ ID NO: 22226 - DNA, 20 bp, Artificial Sequence
  Synthetic
gcagtgctacggtggttccc

SEQ ID NO: 22227 - DNA, 21 bp, Artificial Sequence
  Synthetic
tggtaaagtgaagacgcgccg

SEQ ID NO: 22228 - DNA, 19 bp, Artificial Sequence
  Synthetic
gtgacgcagcagcatcgct

SEQ ID NO: 22229 - DNA, 22 bp, Artificial Sequence
  Synthetic
acacctggtcgacgtggttacg

SEQ ID NO: 22230 - DNA, 20 bp, Artificial Sequence
  Synthetic
gtcagggccagaacccgcag

SEQ ID NO: 22231 - DNA, 21 bp, Artificial Sequence
  Synthetic
ccctgctgttggctacctctc

SEQ ID NO: 22232 - DNA, 20 bp, Artificial Sequence
  Synthetic
cgcatctgctcgccgtagat

SEQ ID NO: 22233 - DNA, 19 bp, Artificial Sequence
  Synthetic
acgagcacgcttccgaggg

SEQ ID NO: 22234 - DNA, 19 bp, Artificial Sequence
  Synthetic
gaccgagccagagggacct

SEQ ID NO: 22235 - DNA, 20 bp, Artificial Sequence
  Synthetic
cgtggaaaaccacccggcag

SEQ ID NO: 22236 - DNA, 21 bp, Artificial Sequence
  Synthetic
cgggggggtgaaatttggagt

SEQ ID NO: 22237 - DNA, 22 bp, Artificial Sequence
  Synthetic
aagttcgctgcaatatgcacac

SEQ ID NO: 22238 - DNA, 25 bp, Artificial Sequence
  Synthetic
aggaaaaccgattcactgaaattgg

SEQ ID NO: 22239 - DNA, 20 bp, Artificial Sequence
  Synthetic
aatcacagggaccatgcgta

SEQ ID NO: 22240 - DNA, 23 bp, Artificial Sequence
  Synthetic
ctgcaaagatattggcgatctga

SEQ ID NO: 22241 - DNA, 21 bp, Artificial Sequence
  Synthetic
cattgcagggccactgagtac

SEQ ID NO: 22242 - DNA, 21 bp, Artificial Sequence
  Synthetic
ttctcccttactgacccaagg

SEQ ID NO: 22243 - DNA, 21 bp, Artificial Sequence
  Synthetic
aaacagatcggagacatggcc

SEQ ID NO: 22244 - DNA, 21 bp, Artificial Sequence
  Synthetic
agaatggttagcggcattggg

SEQ ID NO: 22245 - DNA, 20 bp, Artificial Sequence
  Synthetic
gcgacaagcgaacaatggag

SEQ ID NO: 22246 - DNA, 25 bp, Artificial Sequence
  Synthetic
agaaggacaagaattgcatatgaga

SEQ ID NO: 22247 - DNA, 23 bp, Artificial Sequence
  Synthetic
atgagaacatggaagcaatggac

SEQ ID NO: 22248 - DNA, 22 bp, Artificial Sequence
  Synthetic
ggaagtgaaaattgatgacggc

SEQ ID NO: 22249 - DNA, 25 bp, Artificial Sequence
  Synthetic
tttggtggacaacttttttaacgag

SEQ ID NO: 22250 - DNA, 22 bp, Artificial Sequence
  Synthetic
aagacgagcaagacgagaacgg

SEQ ID NO: 22251 - DNA, 25 bp, Artificial Sequence
  Synthetic
agaggaagaaagagaacaaacagtg

SEQ ID NO: 22252 - DNA, 23 bp, Artificial Sequence
  Synthetic
aaacacttcaggtttttggaggt

SEQ ID NO: 22253 - DNA, 20 bp, Artificial Sequence
  Synthetic
ctgccgacgttgcaagagga

SEQ ID NO: 22254 - DNA, 25 bp, Artificial Sequence
  Synthetic
tataggtaacggggcaatagttgag

SEQ ID NO: 22255 - DNA, 25 bp, Artificial Sequence
  Synthetic
tgaagggaatggctattttaaagca

SEQ ID NO: 22256 - DNA, 22 bp, Artificial Sequence
  Synthetic
tgatgatactcgacatcgttgc

SEQ ID NO: 22257 - DNA, 21 bp, Artificial Sequence
  Synthetic
cgcttctacggctcgcagtat

SEQ ID NO: 22258 - DNA, 21 bp, Artificial Sequence
  Synthetic
gcattaggccatctttgggat

SEQ ID NO: 22259 - DNA, 21 bp, Artificial Sequence
  Synthetic
cgaaaacggtgtagccagtac

SEQ ID NO: 22260 - DNA, 20 bp, Artificial Sequence
  Synthetic
ttaacgaggtgcagctgccg

SEQ ID NO: 22261 - DNA, 20 bp, Artificial Sequence
  Synthetic
gggtttggctggctgttgct

SEQ ID NO: 22262 - DNA, 20 bp, Artificial Sequence
  Synthetic
ggcgtacagttttggagcca

SEQ ID NO: 22263 - DNA, 24 bp, Artificial Sequence
  Synthetic
ctctgacacaaaagctctagtcca

SEQ ID NO: 22264 - DNA, 25 bp, Artificial Sequence
  Synthetic
acgtgtcagtttctataaacgatga

SEQ ID NO: 22265 - DNA, 21 bp, Artificial Sequence
  Synthetic
tgcgctcgtcagatagcaagc

SEQ ID NO: 22266 - DNA, 21 bp, Artificial Sequence
  Synthetic
agtaggatagcacctgccgcc

SEQ ID NO: 22267 - DNA, 25 bp, Artificial Sequence
  Synthetic
agcatataaaactgatttaccgcct

SEQ ID NO: 22268 - DNA, 23 bp, Artificial Sequence
  Synthetic
aagcggttattgattacctgagc

SEQ ID NO: 22269 - DNA, 23 bp, Artificial Sequence
  Synthetic
agagtctttttcccattggtccc

SEQ ID NO: 22270 - DNA, 20 bp, Artificial Sequence
  Synthetic
gcatcgttgcacgggctgta

SEQ ID NO: 22271 - DNA, 21 bp, Artificial Sequence
  Synthetic
cggaaacgggaaatcagggcg

SEQ ID NO: 22272 - DNA, 19 bp, Artificial Sequence
  Synthetic
ggttcgggtcctgcgggaa

SEQ ID NO: 22273 - DNA, 23 bp, Artificial Sequence
  Synthetic
gctgcaaggtcattagatatccg

SEQ ID NO: 22274 - DNA, 21 bp, Artificial Sequence
  Synthetic
gctcgaccgttttcacgtggt

SEQ ID NO: 22275 - DNA, 24 bp, Artificial Sequence
  Synthetic
ttgaagtaagctgttttaagccca

SEQ ID NO: 22276 - DNA, 24 bp, Artificial Sequence
  Synthetic
taagctcctgcattaatggtgtag

SEQ ID NO: 22277 - DNA, 22 bp, Artificial Sequence
  Synthetic
tgttgctcgcataaattcgcgg

SEQ ID NO: 22278 - DNA, 22 bp, Artificial Sequence
  Synthetic
gctatgagcacaagtgaggcgc

SEQ ID NO: 22279 - DNA, 20 bp, Artificial Sequence
  Synthetic
gacaacagcggggaggaagc

SEQ ID NO: 22280 - DNA, 25 bp, Artificial Sequence
  Synthetic
tgtacataatccagcaagtaaaccc

SEQ ID NO: 22281 - DNA, 22 bp, Artificial Sequence
  Synthetic
tgctgacgtcactggcgatgac

SEQ ID NO: 22282 - DNA, 20 bp, Artificial Sequence
  Synthetic
catccgcaaagatgaggctg

SEQ ID NO: 22283 - DNA, 20 bp, Artificial Sequence
  Synthetic
caaacgtccaggcagggttt

SEQ ID NO: 22284 - DNA, 21 bp, Artificial Sequence
  Synthetic
ccccctcctggattttacact

SEQ ID NO: 22285 - DNA, 22 bp, Artificial Sequence
  Synthetic
cacatgcgggggatgaaggaag

SEQ ID NO: 22286 - DNA, 25 bp, Artificial Sequence
  Synthetic
gtttaccaccaaatttaaggccagg

SEQ ID NO: 22287 - DNA, 23 bp, Artificial Sequence
  Synthetic
aactccgggagtgtacactaatg

SEQ ID NO: 22288 - DNA, 21 bp, Artificial Sequence
  Synthetic
tatcgcagctggtatttggca

SEQ ID NO: 22289 - DNA, 21 bp, Artificial Sequence
  Synthetic
cgtacgcggacattaccgagc

SEQ ID NO: 22290 - DNA, 19 bp, Artificial Sequence
  Synthetic
gctgcggccgcaacagcta

SEQ ID NO: 22291 - DNA, 21 bp, Artificial Sequence
  Synthetic
cgcccagacgtagggtacagt

SEQ ID NO: 22292 - DNA, 22 bp, Artificial Sequence
  Synthetic
acgtactagagcacatgaaggt

SEQ ID NO: 22293 - DNA, 19 bp, Artificial Sequence
  Synthetic
cgccgtagacgtcgacgca

SEQ ID NO: 22294 - DNA, 22 bp, Artificial Sequence
  Synthetic
ccaaccaaaggagaaaagcggc

SEQ ID NO: 22295 - DNA, 20 bp, Artificial Sequence
  Synthetic
cactccctcgatgatgccgc

SEQ ID NO: 22296 - DNA, 22 bp, Artificial Sequence
  Synthetic
ttaagccctattccggaaccgc

SEQ ID NO: 22297 - DNA, 24 bp, Artificial Sequence
  Synthetic
ctgctcaagttgtgttctataccg

SEQ ID NO: 22298 - DNA, 23 bp, Artificial Sequence
  Synthetic
cgttcgcgttattgagaatcacg

SEQ ID NO: 22299 - DNA, 24 bp, Artificial Sequence
  Synthetic
aacaagaacacctacgagtacatg

SEQ ID NO: 22300 - DNA, 21 bp, Artificial Sequence
  Synthetic
gggaaatgatcttcgggtgga

SEQ ID NO: 22301 - DNA, 24 bp, Artificial Sequence
  Synthetic
gtgtcaatcatgtttgactcctcc

SEQ ID NO: 22302 - DNA, 20 bp, Artificial Sequence
  Synthetic
ggatacctgggccccactat

SEQ ID NO: 22303 - DNA, 22 bp, Artificial Sequence
  Synthetic
tttccgggttttgtgtctcgcg

SEQ ID NO: 22304 - DNA, 25 bp, Artificial Sequence
  Synthetic
atggataaaaatcccactatggacc

SEQ ID NO: 22305 - DNA, 20 bp, Artificial Sequence
  Synthetic
ccacagctggcgcacaagtt

SEQ ID NO: 22306 - DNA, 24 bp, Artificial Sequence
  Synthetic
gctatttgagccttcattccttca

SEQ ID NO: 22307 - DNA, 21 bp, Artificial Sequence
  Synthetic
accggtgggttcccaggaatt

SEQ ID NO: 22308 - DNA, 24 bp, Artificial Sequence
  Synthetic
acattcttttcattttcgtcgctg

SEQ ID NO: 22309 - DNA, 20 bp, Artificial Sequence
  Synthetic
aaaacgctgggctcgaggac

SEQ ID NO: 22310 - DNA, 20 bp, Artificial Sequence
  Synthetic
ttcttgctttaagggctggc

SEQ ID NO: 22311 - DNA, 22 bp, Artificial Sequence
  Synthetic
atggaaagccggttgtaagcga

SEQ ID NO: 22312 - DNA, 25 bp, Artificial Sequence
  Synthetic
aaccttcgagaactaaacaaactgt

SEQ ID NO: 22313 - DNA, 24 bp, Artificial Sequence
  Synthetic
ttcacgacgaacctaagacttacc

SEQ ID NO: 22314 - DNA, 22 bp, Artificial Sequence
  Synthetic
cgcagcaacgctcaaagaaaca

SEQ ID NO: 22315 - DNA, 22 bp, Artificial Sequence
  Synthetic
tgtagcctgctttcagcactgc

SEQ ID NO: 22316 - DNA, 20 bp, Artificial Sequence
  Synthetic
ccgcagctgtctctacctca

SEQ ID NO: 22317 - DNA, 22 bp, Artificial Sequence
  Synthetic
ttaaccctccctcttggccagc

SEQ ID NO: 22318 - DNA, 25 bp, Artificial Sequence
  Synthetic
tgaagatttctgctgtcatttgtgt

SEQ ID NO: 22319 - DNA, 24 bp, Artificial Sequence
  Synthetic
ttgttgctccagttattgacaaac

SEQ ID NO: 22320 - DNA, 22 bp, Artificial Sequence
  Synthetic
gtatgctcaaacagccgaaaga

SEQ ID NO: 22321 - DNA, 20 bp, Artificial Sequence
  Synthetic
atacggtaagggcagcccaa

SEQ ID NO: 22322 - DNA, 23 bp, Artificial Sequence
  Synthetic
ttctcatctttttatgcctgcca

SEQ ID NO: 22323 - DNA, 21 bp, Artificial Sequence
  Synthetic
cccccaggatgatttacccct

SEQ ID NO: 22324 - DNA, 20 bp, Artificial Sequence
  Synthetic
tcaactgtgctacacgctgc

SEQ ID NO: 22325 - DNA, 25 bp, Artificial Sequence
  Synthetic
aaatggaaggtcagattcttcttcc

SEQ ID NO: 22326 - DNA, 25 bp, Artificial Sequence
  Synthetic
tcacaaggtcttaaactttcttgga

SEQ ID NO: 22327 - DNA, 22 bp, Artificial Sequence
  Synthetic
aatggtgagctccgatgggttg

SEQ ID NO: 22328 - DNA, 22 bp, Artificial Sequence
  Synthetic
ctgtccttaagacggggattgg

SEQ ID NO: 22329 - DNA, 20 bp, Artificial Sequence
  Synthetic
ctggttccccaagcttcgtg

SEQ ID NO: 22330 - DNA, 24 bp, Artificial Sequence
  Synthetic
tacactatacgcgtggttaaactg

SEQ ID NO: 22331 - DNA, 20 bp, Artificial Sequence
  Synthetic
cgcccaaggattctctcgtt

SEQ ID NO: 22332 - DNA, 23 bp, Artificial Sequence
  Synthetic
ccagctgacatacactgtagtga

SEQ ID NO: 22333 - DNA, 20 bp, Artificial Sequence
  Synthetic
ttcctcacagggcggtagtt

SEQ ID NO: 22334 - DNA, 20 bp, Artificial Sequence
  Synthetic
ccgctgtgctggtgaaagat

SEQ ID NO: 22335 - DNA, 22 bp, Artificial Sequence
  Synthetic
gcaaagaaagttcacctccagg

SEQ ID NO: 22336 - DNA, 21 bp, Artificial Sequence
  Synthetic
ctggcaaacgggtggaaaaac

SEQ ID NO: 22337 - DNA, 20 bp, Artificial Sequence
  Synthetic
catagccccaggtcccgtaa

SEQ ID NO: 22338 - DNA, 20 bp, Artificial Sequence
  Synthetic
gcctatggctggtcgctcaa

SEQ ID NO: 22339 - DNA, 22 bp, Artificial Sequence
  Synthetic
gttgaggcttgtgggttttccg

SEQ ID NO: 22340 - DNA, 20 bp, Artificial Sequence
  Synthetic
gcctgagcaccagttggctt

SEQ ID NO: 22341 - DNA, 21 bp, Artificial Sequence
  Synthetic
gaatgcctagtggggctaacc

SEQ ID NO: 22342 - DNA, 23 bp, Artificial Sequence
  Synthetic
acagaaggtggctttatcacatt

SEQ ID NO: 22343 - DNA, 25 bp, Artificial Sequence
  Synthetic
tcaagagctggaaaataaacttcca

SEQ ID NO: 22344 - DNA, 25 bp, Artificial Sequence
  Synthetic
gtaccaattacaacaagcaaaagcc

SEQ ID NO: 22345 - DNA, 20 bp, Artificial Sequence
  Synthetic
gatggtgactgcaggtggag

SEQ ID NO: 22346 - DNA, 22 bp, Artificial Sequence
  Synthetic
atccaagttcattgactggctg

SEQ ID NO: 22347 - DNA, 23 bp, Artificial Sequence
  Synthetic
tttgtcagatggtttcaagcact

SEQ ID NO: 22348 - DNA, 25 bp, Artificial Sequence
  Synthetic
cattgtagatcttcttagtgcctcc

SEQ ID NO: 22349 - DNA, 25 bp, Artificial Sequence
  Synthetic
ataacgattttgtggctagatcgaa

SEQ ID NO: 22350 - DNA, 20 bp, Artificial Sequence
  Synthetic
cgctgtgttgacccagaaag

SEQ ID NO: 22351 - DNA, 24 bp, Artificial Sequence
  Synthetic
gtaatctctatgctggcttccatg

SEQ ID NO: 22352 - DNA, 23 bp, Artificial Sequence
  Synthetic
atggattgacaataacacctgct

SEQ ID NO: 22353 - DNA, 22 bp, Artificial Sequence
  Synthetic
ttctgcagacgattcgacattt

SEQ ID NO: 22354 - DNA, 25 bp, Artificial Sequence
  Synthetic
tcggtggttccatttagaatagaca

SEQ ID NO: 22355 - DNA, 25 bp, Artificial Sequence
  Synthetic
tgcactgacagtatagatacgttgg

SEQ ID NO: 22356 - DNA, 24 bp, Artificial Sequence
  Synthetic
tgaaagacacagcaaaaggagatt

SEQ ID NO: 22357 - DNA, 21 bp, Artificial Sequence
  Synthetic
ctgtttttggacaaacaccgg

SEQ ID NO: 22358 - DNA, 24 bp, Artificial Sequence
  Synthetic
ctcatattgagtcacaggagagca

SEQ ID NO: 22359 - DNA, 25 bp, Artificial Sequence
  Synthetic
ggactgtgcattttaaaacccaagt

SEQ ID NO: 22360 - DNA, 20 bp, Artificial Sequence
  Synthetic
gtcaggagaaaccccccgca

SEQ ID NO: 22361 - DNA, 21 bp, Artificial Sequence
  Synthetic
actgtttggaactgggttgga

SEQ ID NO: 22362 - DNA, 25 bp, Artificial Sequence
  Synthetic
gggaagtgtaatatacctaggaggc

SEQ ID NO: 22363 - DNA, 24 bp, Artificial Sequence
  Synthetic
ttctgttgtgccattagaggatct

SEQ ID NO: 22364 - DNA, 20 bp, Artificial Sequence
  Synthetic
gagcctcagcaactccacat

SEQ ID NO: 22365 - DNA, 21 bp, Artificial Sequence
  Synthetic
cccagctttactgacacagcc

SEQ ID NO: 22366 - DNA, 20 bp, Artificial Sequence
  Synthetic
aattgggcaggcggttcatt

SEQ ID NO: 22367 - DNA, 24 bp, Artificial Sequence
  Synthetic
atgattctgatcatgaacgcctag

SEQ ID NO: 22368 - DNA, 25 bp, Artificial Sequence
  Synthetic
agaagagaacaactatatgccagac

SEQ ID NO: 22369 - DNA, 23 bp, Artificial Sequence
  Synthetic
tagagctacaagatgccctacac

SEQ ID NO: 22370 - DNA, 24 bp, Artificial Sequence
  Synthetic
gtccgcaccccaataattatttgc

SEQ ID NO: 22371 - DNA, 21 bp, Artificial Sequence
  Synthetic
acagaccacgatccccacacc

SEQ ID NO: 22372 - DNA, 23 bp, Artificial Sequence
  Synthetic
gccttaaccacaaattctttggc

SEQ ID NO: 22373 - DNA, 22 bp, Artificial Sequence
  Synthetic
tgccagcctattcacatacctg

SEQ ID NO: 22374 - DNA, 20 bp, Artificial Sequence
  Synthetic
atcacatgagaacggcgcga

SEQ ID NO: 22375 - DNA, 24 bp, Artificial Sequence
  Synthetic
atgtcacatggatcatcaaccaaa

SEQ ID NO: 22376 - DNA, 23 bp, Artificial Sequence
  Synthetic
attgtgtaatggaggcagaaaca

SEQ ID NO: 22377 - DNA, 24 bp, Artificial Sequence
  Synthetic
caggatgaacagtgatcagtttgc

SEQ ID NO: 22378 - DNA, 23 bp, Artificial Sequence
  Synthetic
aacagcttatcaccttctactgc

SEQ ID NO: 22379 - DNA, 20 bp, Artificial Sequence
  Synthetic
aagcgtgtttgaatcagcgg

SEQ ID NO: 22380 - DNA, 20 bp, Artificial Sequence
  Synthetic
gaccagttgtgcaagacgtt

SEQ ID NO: 22381 - DNA, 25 bp, Artificial Sequence
  Synthetic
aacaagacatcttagacgtgctaat

SEQ ID NO: 22382 - DNA, 23 bp, Artificial Sequence
  Synthetic
cagaagatgaggtggacgaagtg

SEQ ID NO: 22383 - DNA, 24 bp, Artificial Sequence
  Synthetic
cccaacaggtacacaaatatcaga

SEQ ID NO: 22384 - DNA, 20 bp, Artificial Sequence
  Synthetic
tccacgattggacgccatta

SEQ ID NO: 22385 - DNA, 21 bp, Artificial Sequence
  Synthetic
caggcacagcaggaatattgg

SEQ ID NO: 22386 - DNA, 24 bp, Artificial Sequence
  Synthetic
gcatttgaatatgcacaaagggga

SEQ ID NO: 22387 - DNA, 21 bp, Artificial Sequence
  Synthetic
atggaagcaatagccaagcgt

SEQ ID NO: 22388 - DNA, 25 bp, Artificial Sequence
  Synthetic
aacaagttatgaaatgtggcaaaca

SEQ ID NO: 22389 - DNA, 20 bp, Artificial Sequence
  Synthetic
accagcaccaaagacggaac

SEQ ID NO: 22390 - DNA, 24 bp, Artificial Sequence
  Synthetic
ctgggatttatgtcactgcaccta

SEQ ID NO: 22391 - DNA, 25 bp, Artificial Sequence
  Synthetic
aactctacttgtgtgttactgtccc

SEQ ID NO: 22392 - DNA, 20 bp, Artificial Sequence
  Synthetic
ccaggtgcaggttacagacc

SEQ ID NO: 22393 - DNA, 21 bp, Artificial Sequence
  Synthetic
tactgcacctatgggaacacc

SEQ ID NO: 22394 - DNA, 23 bp, Artificial Sequence
  Synthetic
cagcagttctagacttcttgcag

SEQ ID NO: 22395 - DNA, 25 bp, Artificial Sequence
  Synthetic
tccagattatttacaaatggctgca

SEQ ID NO: 22396 - DNA, 25 bp, Artificial Sequence
  Synthetic
acaatggtatttgttggggtaatca

SEQ ID NO: 22397 - DNA, 24 bp, Artificial Sequence
  Synthetic
cttttatgcactgtagccaactct

SEQ ID NO: 22398 - DNA, 22 bp, Artificial Sequence
  Synthetic
tggattaacccgctcaatgccc

SEQ ID NO: 22399 - DNA, 19 bp, Artificial Sequence
  Synthetic
cccagattgggtgtgcgcg

SEQ ID NO: 22400 - DNA, 21 bp, Artificial Sequence
  Synthetic
ggctttggaggacgggatcaa

SEQ ID NO: 22401 - DNA, 19 bp, Artificial Sequence
  Synthetic
tcgcagcgccatacatcgg

SEQ ID NO: 22402 - DNA, 20 bp, Artificial Sequence
  Synthetic
cctcgtgggggtggcctatt

SEQ ID NO: 22403 - DNA, 20 bp, Artificial Sequence
  Synthetic
cccactcggggtcgctaaca

SEQ ID NO: 22404 - DNA, 21 bp, Artificial Sequence
  Synthetic
gttcaccaaaacctgtggcgc

SEQ ID NO: 22405 - DNA, 21 bp, Artificial Sequence
  Synthetic
ccactacagcgtggcagatcc

SEQ ID NO: 22406 - DNA, 22 bp, Artificial Sequence
  Synthetic
ttctgatgctgcctgagagggc

SEQ ID NO: 22407 - DNA, 22 bp, Artificial Sequence
  Synthetic
tcttgcagtcctggtctgtcca

SEQ ID NO: 22408 - DNA, 20 bp, Artificial Sequence
  Synthetic
cctgtttcggccaggttggg

SEQ ID NO: 22409 - DNA, 20 bp, Artificial Sequence
  Synthetic
taacggcgtgatgtggaccg

SEQ ID NO: 22410 - DNA, 22 bp, Artificial Sequence
  Synthetic
cactgacaactcaacaccccca

SEQ ID NO: 22411 - DNA, 21 bp, Artificial Sequence
  Synthetic
ggtgcgccaatcacgtactca

SEQ ID NO: 22412 - DNA, 22 bp, Artificial Sequence
  Synthetic
aaagtgcgatgaactggccaga

SEQ ID NO: 22413 - DNA, 21 bp, Artificial Sequence
  Synthetic
gggaggttgggcacataccgg

SEQ ID NO: 22414 - DNA, 21 bp, Artificial Sequence
  Synthetic
ccaagctgggacaccatgtgg

SEQ ID NO: 22415 - DNA, 22 bp, Artificial Sequence
  Synthetic
aacacctcccactagtcgagca

SEQ ID NO: 22416 - DNA, 22 bp, Artificial Sequence
  Synthetic
gattcgcgactccgatgcttct

SEQ ID NO: 22417 - DNA, 19 bp, Artificial Sequence
  Synthetic
gaaggggccgtgcagtgga

SEQ ID NO: 22418 - DNA, 22 bp, Artificial Sequence
  Synthetic
aggctataagggagagtggcgc

SEQ ID NO: 22419 - DNA, 21 bp, Artificial Sequence
  Synthetic
ccacgcccctaagtgcaaacc

SEQ ID NO: 22420 - DNA, 21 bp, Artificial Sequence
  Synthetic
gtaccgctccccatgactccc

SEQ ID NO: 22421 - DNA, 22 bp, Artificial Sequence
  Synthetic
tccctctcccaggaggaaacgg

SEQ ID NO: 22422 - DNA, 20 bp, Artificial Sequence
  Synthetic
gcttgtaacaccttgcgcgg

SEQ ID NO: 22423 - DNA, 22 bp, Artificial Sequence
  Synthetic
taaccacatcagctccgtgtgg

SEQ ID NO: 22424 - DNA, 22 bp, Artificial Sequence
  Synthetic
accgaaaaggacatcagggtcg

SEQ ID NO: 22425 - DNA, 19 bp, Artificial Sequence
  Synthetic
aggaggacaaccgagccct

SEQ ID NO: 22426 - DNA, 22 bp, Artificial Sequence
  Synthetic
atcgggttggtttacggtaggc

SEQ ID NO: 22427 - DNA, 24 bp, Artificial Sequence
  Synthetic
atacatatactgtgatcatgggcg

SEQ ID NO: 22428 - DNA, 23 bp, Artificial Sequence
  Synthetic
gagtacaacaaatcacactcggg

SEQ ID NO: 22429 - DNA, 20 bp, Artificial Sequence
  Synthetic
tatgggtgtgttcgggcaaa

SEQ ID NO: 22430 - DNA, 25 bp, Artificial Sequence
  Synthetic
gatggggtcttcaaaactactcttc

SEQ ID NO: 22431 - DNA, 24 bp, Artificial Sequence
  Synthetic
actgatccagatacatacaccagt

SEQ ID NO: 22432 - DNA, 23 bp, Artificial Sequence
  Synthetic
gttgagaaaacgaaacagacggt

SEQ ID NO: 22433 - DNA, 21 bp, Artificial Sequence
  Synthetic
aagtgcttcaaaccccagtgt

SEQ ID NO: 22434 - DNA, 21 bp, Artificial Sequence
  Synthetic
acatcaatagggcgcacaaat

SEQ ID NO: 22435 - DNA, 24 bp, Artificial Sequence
  Synthetic
attaccccataatttgcgaaaagc

SEQ ID NO: 22436 - DNA, 21 bp, Artificial Sequence
  Synthetic
gttggagtgtatcgcagagga

SEQ ID NO: 22437 - DNA, 25 bp, Artificial Sequence
  Synthetic
tgtacatttccaaacactttcaggt

SEQ ID NO: 22438 - DNA, 24 bp, Artificial Sequence
  Synthetic
tgcaattgcagaacacttcaattc

SEQ ID NO: 22439 - DNA, 21 bp, Artificial Sequence
  Synthetic
ctaagccccccaacaatcttg

SEQ ID NO: 22440 - DNA, 24 bp, Artificial Sequence
  Synthetic
atgattatgcaacaaaaactgggc

SEQ ID NO: 22441 - DNA, 24 bp, Artificial Sequence
  Synthetic
aacctgctgtattgagtgacaatg

SEQ ID NO: 22442 - DNA, 24 bp, Artificial Sequence
  Synthetic
acaaagcattccatcaaaatcccg

SEQ ID NO: 22443 - DNA, 25 bp, Artificial Sequence
  Synthetic
aagagatacttcaagcctgatcaac

SEQ ID NO: 22444 - DNA, 22 bp, Artificial Sequence
  Synthetic
tcattggtcgagagaaccacgc

SEQ ID NO: 22445 - DNA, 22 bp, Artificial Sequence
  Synthetic
ttgcagatgcagcaagtgtgga

SEQ ID NO: 22446 - DNA, 21 bp, Artificial Sequence
  Synthetic
agtggaacgtggacgacctca

SEQ ID NO: 22447 - DNA, 21 bp, Artificial Sequence
  Synthetic
ccggggttgagtgtgactgtt

SEQ ID NO: 22448 - DNA, 20 bp, Artificial Sequence
  Synthetic
aagtgaaaacaacgcggcgc

SEQ ID NO: 22449 - DNA, 25 bp, Artificial Sequence
  Synthetic
aagcaattgagtcttgtatggaagg

SEQ ID NO: 22450 - DNA, 22 bp, Artificial Sequence
  Synthetic
caggctttgtgtagttgcaaca

SEQ ID NO: 22451 - DNA, 24 bp, Artificial Sequence
  Synthetic
agaagatgaagctacaaatgctgc

SEQ ID NO: 22452 - DNA, 22 bp, Artificial Sequence
  Synthetic
catcagctagcttcacaggcag

SEQ ID NO: 22453 - DNA, 24 bp, Artificial Sequence
  Synthetic
agtaggatttttggatgatgccac

SEQ ID NO: 22454 - DNA, 20 bp, Artificial Sequence
  Synthetic
acctacaccaagaccccgca

SEQ ID NO: 22455 - DNA, 25 bp, Artificial Sequence
  Synthetic
tgaaagacttgaagaggaagctagg

SEQ ID NO: 22456 - DNA, 21 bp, Artificial Sequence
  Synthetic
tcgcagacgaataaaacgagc

SEQ ID NO: 22457 - DNA, 22 bp, Artificial Sequence
  Synthetic
taggccacgtcctaccataccc

SEQ ID NO: 22458 - DNA, 24 bp, Artificial Sequence
  Synthetic
gggacctttaagaagtacaccttt

SEQ ID NO: 22459 - DNA, 24 bp, Artificial Sequence
  Synthetic
tattgcatttacagaacagccacg

SEQ ID NO: 22460 - DNA, 25 bp, Artificial Sequence
  Synthetic
atcagatgttcattgttggttgtgc

SEQ ID NO: 22461 - DNA, 25 bp, Artificial Sequence
  Synthetic
agatgtttcttttatggcaagaggg

SEQ ID NO: 22462 - DNA, 23 bp, Artificial Sequence
  Synthetic
taataggccattttgggtgcaca

SEQ ID NO: 22463 - DNA, 23 bp, Artificial Sequence
  Synthetic
tgtaccaactaggaatgctcaca

SEQ ID NO: 22464 - DNA, 22 bp, Artificial Sequence
  Synthetic
cgaaatcggtcgcttgtatagc

SEQ ID NO: 22465 - DNA, 22 bp, Artificial Sequence
  Synthetic
aacctaatgcaacctcgccagc

SEQ ID NO: 22466 - DNA, 19 bp, Artificial Sequence
  Synthetic
gggccggctgctaattgcc

SEQ ID NO: 22467 - DNA, 19 bp, Artificial Sequence
  Synthetic
ccccctggcacataccgca

SEQ ID NO: 22468 - DNA, 22 bp, Artificial Sequence
  Synthetic
tgttccttacccccggtctacc

SEQ ID NO: 22469 - DNA, 22 bp, Artificial Sequence
  Synthetic
ttaccatctgccaccagcggta

SEQ ID NO: 22470 - DNA, 21 bp, Artificial Sequence
  Synthetic
ggactgcgattcgtaaggcgg

SEQ ID NO: 22471 - DNA, 21 bp, Artificial Sequence
  Synthetic
ctgccctccaaccgctttacc

SEQ ID NO: 22472 - DNA, 19 bp, Artificial Sequence
  Synthetic
ctgggctggaggtgcgcta

SEQ ID NO: 22473 - DNA, 19 bp, Artificial Sequence
  Synthetic
attcgccggctcgctgttt

SEQ ID NO: 22474 - DNA, 20 bp, Artificial Sequence
  Synthetic
gacttgctcccgcctcggta

SEQ ID NO: 22475 - DNA, 22 bp, Artificial Sequence
  Synthetic
cttgactcagccacagacgtcg

SEQ ID NO: 22476 - DNA, 20 bp, Artificial Sequence
  Synthetic
gatgaggccccgtcccttcc

SEQ ID NO: 22477 - DNA, 21 bp, Artificial Sequence
  Synthetic
ggtcgttgttctggggtgagc

SEQ ID NO: 22478 - DNA, 22 bp, Artificial Sequence
  Synthetic
tccttgctggtggcgaaattgg

SEQ ID NO: 22479 - DNA, 20 bp, Artificial Sequence
  Synthetic
gtaaccgcgacgtgtccagg

SEQ ID NO: 22480 - DNA, 19 bp, Artificial Sequence
  Synthetic
gaagcagctccgcctcgct

SEQ ID NO: 22481 - DNA, 19 bp, Artificial Sequence
  Synthetic
gccgctgcctcacgtcgta

SEQ ID NO: 22482 - DNA, 21 bp, Artificial Sequence
  Synthetic
ttactccagcactgcccgtca

SEQ ID NO: 22483 - DNA, 22 bp, Artificial Sequence
  Synthetic
ttggttaatgtagcgaccggcg

SEQ ID NO: 22484 - DNA, 20 bp, Artificial Sequence
  Synthetic
ggccccgtctctatttccgc

SEQ ID NO: 22485 - DNA, 20 bp, Artificial Sequence
  Synthetic
acttgacgttcgtaatgggc

SEQ ID NO: 22486 - DNA, 24 bp, Artificial Sequence
  Synthetic
tctcgtgtatgtctaacgatgttc

SEQ ID NO: 22487 - DNA, 23 bp, Artificial Sequence
  Synthetic
gtattaacgcattgcccagttga

SEQ ID NO: 22488 - DNA, 20 bp, Artificial Sequence
  Synthetic
acaaacaatggtagaccgcg

SEQ ID NO: 22489 - DNA, 25 bp, Artificial Sequence
  Synthetic
gttgcaaaaacaaagacagtttgaa

SEQ ID NO: 22490 - DNA, 20 bp, Artificial Sequence
  Synthetic
ccagctccggattatgtggt

SEQ ID NO: 22491 - DNA, 20 bp, Artificial Sequence
  Synthetic
cgatgaacaccgttttgcac

SEQ ID NO: 22492 - DNA, 20 bp, Artificial Sequence
  Synthetic
ggcaccactggattccgttt

SEQ ID NO: 22493 - DNA, 22 bp, Artificial Sequence
  Synthetic
ctagctcctgcaaactttctgg

SEQ ID NO: 22494 - DNA, 20 bp, Artificial Sequence
  Synthetic
gtgtgcacaccgttgcattt

SEQ ID NO: 22495 - DNA, 23 bp, Artificial Sequence
  Synthetic
ctgcttcttccggtgaatattca

SEQ ID NO: 22496 - DNA, 22 bp, Artificial Sequence
  Synthetic
caccgttgcctttactgtaagt

SEQ ID NO: 22497 - DNA, 21 bp, Artificial Sequence
  Synthetic
actctgggaatcggggggagg

SEQ ID NO: 22498 - DNA, 20 bp, Artificial Sequence
  Synthetic
ccggtattcacggggcgaca

SEQ ID NO: 22499 - DNA, 19 bp, Artificial Sequence
  Synthetic
cgatccgggccaagggctt

SEQ ID NO: 22500 - DNA, 20 bp, Artificial Sequence
  Synthetic
tgggcgggtatcatcggtct

SEQ ID NO: 22501 - DNA, 24 bp, Artificial Sequence
  Synthetic
agctagaacgattcgcagttaatc

SEQ ID NO: 22502 - DNA, 21 bp, Artificial Sequence
  Synthetic
agcaatcaggtcagccaaaat

SEQ ID NO: 22503 - DNA, 22 bp, Artificial Sequence
  Synthetic
gagagaaccaaggggaagtgac

SEQ ID NO: 22504 - DNA, 20 bp, Artificial Sequence
  Synthetic
ggaccagcggctacactaga

SEQ ID NO: 22505 - DNA, 25 bp, Artificial Sequence
  Synthetic
gtagcatgacaaaaatcttagagcc

SEQ ID NO: 22506 - DNA, 24 bp, Artificial Sequence
  Synthetic
gttagtggggaaattgaattgggc

SEQ ID NO: 22507 - DNA, 24 bp, Artificial Sequence
  Synthetic
aaactgcccatacaaaaggaaaca

SEQ ID NO: 22508 - DNA, 23 bp, Artificial Sequence
  Synthetic
ctagtgattttaacctgccacct

SEQ ID NO: 22509 - DNA, 25 bp, Artificial Sequence
  Synthetic
atacatactgacaatggcagcaatt

SEQ ID NO: 22510 - DNA, 25 bp, Artificial Sequence
  Synthetic
aggggatgctagattggtaataaca

SEQ ID NO: 22511 - DNA, 25 bp, Artificial Sequence
  Synthetic
aacaccaaaaaagataaagccacct

SEQ ID NO: 22512 - DNA, 25 bp, Artificial Sequence
  Synthetic
acaactgctgtttatccattttcag

SEQ ID NO: 22513 - DNA, 23 bp, Artificial Sequence
  Synthetic
acagaggtacataatgtttgggc

SEQ ID NO: 22514 - DNA, 23 bp, Artificial Sequence
  Synthetic
ctgctgttaaatggcagtctagc

SEQ ID NO: 22515 - DNA, 25 bp, Artificial Sequence
  Synthetic
tggtggtaatagcaacaatgagtcc

SEQ ID NO: 22516 - DNA, 22 bp, Artificial Sequence
  Synthetic
gttgcaactcacagtctggggc

SEQ ID NO: 22517 - DNA, 22 bp, Artificial Sequence
  Synthetic
agcagctaccaatgctgcttgt

SEQ ID NO: 22518 - DNA, 20 bp, Artificial Sequence
  Synthetic
agggactttccgctggggac

SEQ ID NO: 22519 - DNA, 20 bp, Artificial Sequence
  Synthetic
acgaccttcaccgcgactcc

SEQ ID NO: 22520 - DNA, 20 bp, Artificial Sequence
  Synthetic
gagcgcgtgatggtcatcgc

SEQ ID NO: 22521 - DNA, 20 bp, Artificial Sequence
  Synthetic
cgctctcaaacacctccccg

SEQ ID NO: 22522 - DNA, 22 bp, Artificial Sequence
  Synthetic
taacgtcaaggtcgtcgtcggg

SEQ ID NO: 22523 - DNA, 19 bp, Artificial Sequence
  Synthetic
ggtccgaaacgtcccgtcg

SEQ ID NO: 22524 - DNA, 22 bp, Artificial Sequence
  Synthetic
tccttgtgggacgagaacagcc

SEQ ID NO: 22525 - DNA, 19 bp, Artificial Sequence
  Synthetic
cgttgagggtctgcacgca

SEQ ID NO: 22526 - DNA, 22 bp, Artificial Sequence
  Synthetic
ggtgcgctgcttcaagattctg

SEQ ID NO: 22527 - DNA, 19 bp, Artificial Sequence
  Synthetic
ccacgccctcgctgttcgt

SEQ ID NO: 22528 - DNA, 22 bp, Artificial Sequence
  Synthetic
cactggtacatggcccactacc

SEQ ID NO: 22529 - DNA, 19 bp, Artificial Sequence
  Synthetic
gagcgcggccccagactta

SEQ ID NO: 22530 - DNA, 22 bp, Artificial Sequence
  Synthetic
ctgcatgtagcggtcgtagtgg

SEQ ID NO: 22531 - DNA, 19 bp, Artificial Sequence
  Synthetic
gctctccggcggcgttgat

SEQ ID NO: 22532 - DNA, 20 bp, Artificial Sequence
  Synthetic
gagagtccgtacccgcccca

SEQ ID NO: 22533 - DNA, 19 bp, Artificial Sequence
  Synthetic
ggggtgagcgagtggagca

SEQ ID NO: 22534 - DNA, 19 bp, Artificial Sequence
  Synthetic
cggagaacgcgaggcccat

SEQ ID NO: 22535 - DNA, 19 bp, Artificial Sequence
  Synthetic
cgtgcttcagggggcggtt

SEQ ID NO: 22536 - DNA, 19 bp, Artificial Sequence
  Synthetic
cgaagagcgcactccccca

SEQ ID NO: 22537 - DNA, 22 bp, Artificial Sequence
  Synthetic
aaaggcgccaacaaacctagga

SEQ ID NO: 22538 - DNA, 18 bp, Artificial Sequence
  Synthetic
gcgggacttcgcccagtt

SEQ ID NO: 22539 - DNA, 21 bp, Artificial Sequence
  Synthetic
gtttgcctccagccacaacac

SEQ ID NO: 22540 - DNA, 20 bp, Artificial Sequence
  Synthetic
ggacaaggccgggtcccgta

SEQ ID NO: 22541 - DNA, 22 bp, Artificial Sequence
  Synthetic
ctcccggaaggtattgctcgca

SEQ ID NO: 22542 - DNA, 20 bp, Artificial Sequence
  Synthetic
cggcgtagatgcgcttctcc

SEQ ID NO: 22543 - DNA, 19 bp, Artificial Sequence
  Synthetic
ccggcggacgcgactaaca

SEQ ID NO: 22544 - DNA, 20 bp, Artificial Sequence
  Synthetic
caagggggtgtgggtgacga

SEQ ID NO: 22545 - DNA, 19 bp, Artificial Sequence
  Synthetic
gtccgccgggatgtcggat

SEQ ID NO: 22546 - DNA, 21 bp, Artificial Sequence
  Synthetic
cgtactaccctttcgacgcgc

SEQ ID NO: 22547 - DNA, 19 bp, Artificial Sequence
  Synthetic
gtgcgccgtgctgtgtctg

SEQ ID NO: 22548 - DNA, 20 bp, Artificial Sequence
  Synthetic
gctgggcatgctgatcccgg

SEQ ID NO: 22549 - DNA, 19 bp, Artificial Sequence
  Synthetic
gtgacgtcggcgcgactca

SEQ ID NO: 22550 - DNA, 19 bp, Artificial Sequence
  Synthetic
aggagccccacgttctcga

SEQ ID NO: 22551 - DNA, 19 bp, Artificial Sequence
  Synthetic
gggcggtccagaaccactg

SEQ ID NO: 22552 - DNA, 19 bp, Artificial Sequence
  Synthetic
acaacccccacctcgctca

SEQ ID NO: 22553 - DNA, 22 bp, Artificial Sequence
  Synthetic
agcgacgtcgagtttaactgca

SEQ ID NO: 22554 - DNA, 20 bp, Artificial Sequence
  Synthetic
ggaacgcgtaatcggccacc

SEQ ID NO: 22555 - DNA, 21 bp, Artificial Sequence
  Synthetic
ttcggtgctgtttcaggggtt

SEQ ID NO: 22556 - DNA, 19 bp, Artificial Sequence
  Synthetic
gctttgtgcgcatgccccg

SEQ ID NO: 22557 - DNA, 20 bp, Artificial Sequence
  Synthetic
cttcgcccaccgattcctgt

SEQ ID NO: 22558 - DNA, 18 bp, Artificial Sequence
  Synthetic
gtatgcgacgcggctggt

SEQ ID NO: 22559 - DNA, 18 bp, Artificial Sequence
  Synthetic
tggtggcggcgcacaaca

SEQ ID NO: 22560 - DNA, 19 bp, Artificial Sequence
  Synthetic
cacacggcgtgcctgaaga

SEQ ID NO: 22561 - DNA, 20 bp, Artificial Sequence
  Synthetic
gcgagcaccgaccccctaga

SEQ ID NO: 22562 - DNA, 22 bp, Artificial Sequence
  Synthetic
aggacgtctccaagctctccga

SEQ ID NO: 22563 - DNA, 19 bp, Artificial Sequence
  Synthetic
gcgacgtccggcgacatag

SEQ ID NO: 22564 - DNA, 19 bp, Artificial Sequence
  Synthetic
cgctatcgtcggctgcggt

SEQ ID NO: 22565 - DNA, 20 bp, Artificial Sequence
  Synthetic
caggtcgaggatcgcgtcgc

SEQ ID NO: 22566 - DNA, 19 bp, Artificial Sequence
  Synthetic
gggggcggagtcgttcaac

SEQ ID NO: 22567 - DNA, 22 bp, Artificial Sequence
  Synthetic
tgcgttatcacctcctcgctcg

SEQ ID NO: 22568 - DNA, 19 bp, Artificial Sequence
  Synthetic
cggctccctgacgatgcgt

SEQ ID NO: 22569 - DNA, 22 bp, Artificial Sequence
  Synthetic
ttttcgagaagaaggcgtcgcg

SEQ ID NO: 22570 - DNA, 20 bp, Artificial Sequence
  Synthetic
cgcctatgcgcgtccctgtg

SEQ ID NO: 22571 - DNA, 20 bp, Artificial Sequence
  Synthetic
acgacgatgcatgttcggcg

SEQ ID NO: 22572 - DNA, 20 bp, Artificial Sequence
  Synthetic
gttcgaggcggatccggtca

SEQ ID NO: 22573 - DNA, 18 bp, Artificial Sequence
  Synthetic
tggcaggccgaaaacgcc

SEQ ID NO: 22574 - DNA, 20 bp, Artificial Sequence
  Synthetic
cggtcgtagtccaacgtgcc

SEQ ID NO: 22575 - DNA, 18 bp, Artificial Sequence
  Synthetic
gcatgccccgcaaaacgc

SEQ ID NO: 22576 - DNA, 20 bp, Artificial Sequence
  Synthetic
atgcagaaggggtgcaggca

SEQ ID NO: 22577 - DNA, 19 bp, Artificial Sequence
  Synthetic
ggggcggggtttgttgtga

SEQ ID NO: 22578 - DNA, 19 bp, Artificial Sequence
  Synthetic
ctccccagagcctgctggt

SEQ ID NO: 22579 - DNA, 22 bp, Artificial Sequence
  Synthetic
tttcgcgggaagaaccttccgg

SEQ ID NO: 22580 - DNA, 20 bp, Artificial Sequence
  Synthetic
ccatcggaggccccccagat

SEQ ID NO: 22581 - DNA, 19 bp, Artificial Sequence
  Synthetic
gggtggcgctctctgccaa

SEQ ID NO: 22582 - DNA, 20 bp, Artificial Sequence
  Synthetic
cgatcctgccgctcgttcga

SEQ ID NO: 22583 - DNA, 21 bp, Artificial Sequence
  Synthetic
acgaagtgtcttgtgcagcca

SEQ ID NO: 22584 - DNA, 24 bp, Artificial Sequence
  Synthetic
aatcgtgcgtaaattgctataccc

SEQ ID NO: 22585 - DNA, 22 bp, Artificial Sequence
  Synthetic
caggcactcctggtcaacagtc

SEQ ID NO: 22586 - DNA, 20 bp, Artificial Sequence
  Synthetic
tttgctgcgacaacaatgcc

SEQ ID NO: 22587 - DNA, 23 bp, Artificial Sequence
  Synthetic
gtggtgtctaatcagcagacaga

SEQ ID NO: 22588 - DNA, 20 bp, Artificial Sequence
  Synthetic
tggaccatggggaagctgat

SEQ ID NO: 22589 - DNA, 21 bp, Artificial Sequence
  Synthetic
gggcacggtgctgtctaatag

SEQ ID NO: 22590 - DNA, 25 bp, Artificial Sequence
  Synthetic
tgaatggtataaagctagaggtggc

SEQ ID NO: 22591 - DNA, 22 bp, Artificial Sequence
  Synthetic
aaggtactacgaccgcaggggt

SEQ ID NO: 22592 - DNA, 21 bp, Artificial Sequence
  Synthetic
aagggttaaacgcgctaatcc

SEQ ID NO: 22593 - DNA, 22 bp, Artificial Sequence
  Synthetic
ggtccccgggatattttgccaa

SEQ ID NO: 22594 - DNA, 20 bp, Artificial Sequence
  Synthetic
ggcgaggaggagactgcctt

SEQ ID NO: 22595 - DNA, 20 bp, Artificial Sequence
  Synthetic
gttagtcgcctggggcaacg

SEQ ID NO: 22596 - DNA, 24 bp, Artificial Sequence
  Synthetic
ttgagcaagacataggactaaccg

SEQ ID NO: 22597 - DNA, 21 bp, Artificial Sequence
  Synthetic
cactgaccgtttgcttactgt

SEQ ID NO: 22598 - DNA, 21 bp, Artificial Sequence
  Synthetic
actgaccaaggttcagactca

SEQ ID NO: 22599 - DNA, 22 bp, Artificial Sequence
  Synthetic
cataggcctgggaaacttgaat

SEQ ID NO: 22600 - DNA, 21 bp, Artificial Sequence
  Synthetic
gaggagtttcagcttgccttt

SEQ ID NO: 22601 - DNA, 24 bp, Artificial Sequence
  Synthetic
tgatctacgggatcgtatgacaga

SEQ ID NO: 22602 - DNA, 22 bp, Artificial Sequence
  Synthetic
actgaaacggtgtgtactgcca

SEQ ID NO: 22603 - DNA, 25 bp, Artificial Sequence
  Synthetic
agaatgcacctgttttaattgtggt

SEQ ID NO: 22604 - DNA, 24 bp, Artificial Sequence
  Synthetic
tcgaaaaaacatcaaaagacgctt

SEQ ID NO: 22605 - DNA, 25 bp, Artificial Sequence
  Synthetic
ttgctttctcaaattgaacattgga

SEQ ID NO: 22606 - DNA, 25 bp, Artificial Sequence
  Synthetic
acttgggaaatttgggtattggtac

SEQ ID NO: 22607 - DNA, 23 bp, Artificial Sequence
  Synthetic
tacacaaatcccgcctttgatcc

SEQ ID NO: 22608 - DNA, 23 bp, Artificial Sequence
  Synthetic
agaactacagcctttagggtctt

SEQ ID NO: 22609 - DNA, 25 bp, Artificial Sequence
  Synthetic
tgttggacatccatactttgaagtg

SEQ ID NO: 22610 - DNA, 25 bp, Artificial Sequence
  Synthetic
aatccaaatcagtatcctccagagg

SEQ ID NO: 22611 - DNA, 23 bp, Artificial Sequence
  Synthetic
ggtcttagcctggtttggagaag

SEQ ID NO: 22612 - DNA, 23 bp, Artificial Sequence
  Synthetic
ctggaaaggtttgtgtagacagt

SEQ ID NO: 22613 - DNA, 20 bp, Artificial Sequence
  Synthetic
tgctgtttgcagaacttggt

SEQ ID NO: 22614 - DNA, 21 bp, Artificial Sequence
  Synthetic
agctgattgatgatgccgatg

SEQ ID NO: 22615 - DNA, 23 bp, Artificial Sequence
  Synthetic
agaaacatctgtggtggaaaagc

SEQ ID NO: 22616 - DNA, 23 bp, Artificial Sequence
  Synthetic
acaatgggcatttgacaatgaca

SEQ ID NO: 22617 - DNA, 23 bp, Artificial Sequence
  Synthetic
agacttgagaaaagaggatggcg

SEQ ID NO: 22618 - DNA, 20 bp, Artificial Sequence
  Synthetic
cgcagagcctcagccctaga

SEQ ID NO: 22619 - DNA, 22 bp, Artificial Sequence
  Synthetic
cgcgacttcaacgacttcaagc

SEQ ID NO: 22620 - DNA, 21 bp, Artificial Sequence
  Synthetic
aaacgggacactgctgaaaat

SEQ ID NO: 22621 - DNA, 23 bp, Artificial Sequence
  Synthetic
gtggtacaacccactgttaaacc

SEQ ID NO: 22622 - DNA, 21 bp, Artificial Sequence
  Synthetic
aactctaggggctacaggagg

SEQ ID NO: 22623 - DNA, 23 bp, Artificial Sequence
  Synthetic
tctttgcaaagaactagcacacc

SEQ ID NO: 22624 - DNA, 20 bp, Artificial Sequence
  Synthetic
tgctccagatcccgccttta

SEQ ID NO: 22625 - DNA, 25 bp, Artificial Sequence
  Synthetic
ttgatgtttttggtgacttcagtga

SEQ ID NO: 22626 - DNA, 25 bp, Artificial Sequence
  Synthetic
aattaggtgacactgaaaatcctgc

SEQ ID NO: 22627 - DNA, 22 bp, Artificial Sequence
  Synthetic
ttggggctgcaaacttcaaaac

SEQ ID NO: 22628 - DNA, 25 bp, Artificial Sequence
  Synthetic
tgctttaattctactgactcatggg

SEQ ID NO: 22629 - DNA, 22 bp, Artificial Sequence
  Synthetic
agactgactcaaatctggcagc

SEQ ID NO: 22630 - DNA, 25 bp, Artificial Sequence
  Synthetic
aaatggactacatcaaggaaggaaa

SEQ ID NO: 22631 - DNA, 25 bp, Artificial Sequence
  Synthetic
tactggagtgagcaagaagaattct

SEQ ID NO: 22632 - DNA, 25 bp, Artificial Sequence
  Synthetic
ttcaggatgtaagctttcaacatcc

SEQ ID NO: 22633 - DNA, 25 bp, Artificial Sequence
  Synthetic
gaagggtttagtgtttgtgaaaacg

SEQ ID NO: 22634 - DNA, 24 bp, Artificial Sequence
  Synthetic
aagaatctagctgatgtggtatgc

SEQ ID NO: 22635 - DNA, 21 bp, Artificial Sequence
  Synthetic
atctgatgaggagacccagga

SEQ ID NO: 22636 - DNA, 23 bp, Artificial Sequence
  Synthetic
caaggcttcaagcagtttcaatt

SEQ ID NO: 22637 - DNA, 25 bp, Artificial Sequence
  Synthetic
aatacgtttttttgggggaaaagtt

SEQ ID NO: 22638 - DNA, 24 bp, Artificial Sequence
  Synthetic
attgggagctggttagaaaagagc

SEQ ID NO: 22639 - DNA, 22 bp, Artificial Sequence
  Synthetic
agaagaagaacagccaccgacg

SEQ ID NO: 22640 - DNA, 22 bp, Artificial Sequence
  Synthetic
attgctgcgcatttttggtagt

SEQ ID NO: 22641 - DNA, 24 bp, Artificial Sequence
  Synthetic
agagagctcactacctacagaatc

SEQ ID NO: 22642 - DNA, 25 bp, Artificial Sequence
  Synthetic
ctggtgatgtaagtcttgaatttgc

SEQ ID NO: 22643 - DNA, 25 bp, Artificial Sequence
  Synthetic
ctaatttaggggagtttagtgggga

SEQ ID NO: 22644 - DNA, 25 bp, Artificial Sequence
  Synthetic
ttggaactcagttacattttcatgc

SEQ ID NO: 22645 - DNA, 25 bp, Artificial Sequence
  Synthetic
aaggtattcaaattggtagaggtgg

SEQ ID NO: 22646 - DNA, 24 bp, Artificial Sequence
  Synthetic
taatgctgttattcaggacggaac

SEQ ID NO: 22647 - DNA, 23 bp, Artificial Sequence
  Synthetic
tatggctcgtgaaggtaaaatgg

SEQ ID NO: 22648 - DNA, 24 bp, Artificial Sequence
  Synthetic
ctactgaaaatcctgctccagaaa

SEQ ID NO: 22649 - DNA, 20 bp, Artificial Sequence
  Synthetic
tctctcgaacggaagcggta

SEQ ID NO: 22650 - DNA, 25 bp, Artificial Sequence
  Synthetic
gtgcagaaattgtaagtcatgaagg

SEQ ID NO: 22651 - DNA, 22 bp, Artificial Sequence
  Synthetic
aacttctgcttcaattcgcaca

SEQ ID NO: 22652 - DNA, 24 bp, Artificial Sequence
  Synthetic
ggaaattccctggcactatacaac

SEQ ID NO: 22653 - DNA, 21 bp, Artificial Sequence
  Synthetic
cccataacactgcgttgttgg

SEQ ID NO: 22654 - DNA, 23 bp, Artificial Sequence
  Synthetic
tcaagaggaagctagggatccac

SEQ ID NO: 22655 - DNA, 24 bp, Artificial Sequence
  Synthetic
gcaaaggtcctgaaataactgtga

SEQ ID NO: 22656 - DNA, 25 bp, Artificial Sequence
  Synthetic
aagaattatcaatcaagggcaacga

SEQ ID NO: 22657 - DNA, 25 bp, Artificial Sequence
  Synthetic
atagggttttcagatttcatttgcc

SEQ ID NO: 22658 - DNA, 24 bp, Artificial Sequence
  Synthetic
atggagcctaagcaaaatcaattg

SEQ ID NO: 22659 - DNA, 25 bp, Artificial Sequence
  Synthetic
tcagattggaatgttaaatgggagc

SEQ ID NO: 22660 - DNA, 25 bp, Artificial Sequence
  Synthetic
atttggccagtattaatacccacac

SEQ ID NO: 22661 - DNA, 22 bp, Artificial Sequence
  Synthetic
aaaacgtcaacaaaagccaggt

SEQ ID NO: 22662 - DNA, 25 bp, Artificial Sequence
  Synthetic
attcctaactttgatggaaacgtct

SEQ ID NO: 22663 - DNA, 24 bp, Artificial Sequence
  Synthetic
attcgttatggctaccgatgaaat

SEQ ID NO: 22664 - DNA, 20 bp, Artificial Sequence
  Synthetic
ggcggccaacccagcttatg

SEQ ID NO: 22665 - DNA, 23 bp, Artificial Sequence
  Synthetic
cgaatgttgaagcatgtggttac

SEQ ID NO: 22666 - DNA, 25 bp, Artificial Sequence
  Synthetic
ttaccattcacttggtagaacaggt

SEQ ID NO: 22667 - DNA, 20 bp, Artificial Sequence
  Synthetic
tggacggaactcttctaggc

SEQ ID NO: 22668 - DNA, 21 bp, Artificial Sequence
  Synthetic
ccacaagggttacccactact

SEQ ID NO: 22669 - DNA, 25 bp, Artificial Sequence
  Synthetic
ttgggtgaaatagctcagtactaca

SEQ ID NO: 22670 - DNA, 23 bp, Artificial Sequence
  Synthetic
cattccatggacatcaggtgtac

SEQ ID NO: 22671 - DNA, 22 bp, Artificial Sequence
  Synthetic
gctggcttggataatcacagga

SEQ ID NO: 22672 - DNA, 20 bp, Artificial Sequence
  Synthetic
tgcttctaaccccagtgtgt

SEQ ID NO: 22673 - DNA, 22 bp, Artificial Sequence
  Synthetic
tggattccaagagcacctagag

SEQ ID NO: 22674 - DNA, 25 bp, Artificial Sequence
  Synthetic
acaggaagttctatcccatcatttg

SEQ ID NO: 22675 - DNA, 25 bp, Artificial Sequence
  Synthetic
agacaattggatttcattgctgatg

SEQ ID NO: 22676 - DNA, 25 bp, Artificial Sequence
  Synthetic
aatcccactcaagagaaaagagagc

SEQ ID NO: 22677 - DNA, 20 bp, Artificial Sequence
  Synthetic
cgcgcattggcagaacattt

SEQ ID NO: 22678 - DNA, 22 bp, Artificial Sequence
  Synthetic
atcttgaacccagaagctctga

SEQ ID NO: 22679 - DNA, 22 bp, Artificial Sequence
  Synthetic
atgcccaaccaggtgataatgt

SEQ ID NO: 22680 - DNA, 23 bp, Artificial Sequence
  Synthetic
atacaccaacaaccaggatgatc

SEQ ID NO: 22681 - DNA, 25 bp, Artificial Sequence
  Synthetic
agtgtgttttacaatgtgttccctg

SEQ ID NO: 22682 - DNA, 25 bp, Artificial Sequence
  Synthetic
aaatcgaaacaaacaaatttgcagc

SEQ ID NO: 22683 - DNA, 20 bp, Artificial Sequence
  Synthetic
cctgttctcagcggtccaaa

SEQ ID NO: 22684 - DNA, 25 bp, Artificial Sequence
  Synthetic
aggaattatttcacatcagaggtgt

SEQ ID NO: 22685 - DNA, 24 bp, Artificial Sequence
  Synthetic
ccaagacttgaaccacacaaatgg

SEQ ID NO: 22686 - DNA, 25 bp, Artificial Sequence
  Synthetic
aagacatgaccaaagagttctttga

SEQ ID NO: 22687 - DNA, 22 bp, Artificial Sequence
  Synthetic
tgcccttaggatgaagtggatg

SEQ ID NO: 22688 - DNA, 20 bp, Artificial Sequence
  Synthetic
ggccccgttcacttcagaaa

SEQ ID NO: 22689 - DNA, 22 bp, Artificial Sequence
  Synthetic
acatgttggagagagaactggt

SEQ ID NO: 22690 - DNA, 20 bp, Artificial Sequence
  Synthetic
agtacacagattggcgggat

SEQ ID NO: 22691 - DNA, 22 bp, Artificial Sequence
  Synthetic
cgaagagcaacagccattctaa

SEQ ID NO: 22692 - DNA, 24 bp, Artificial Sequence
  Synthetic
gtttcaaaactggggaattgaacc

SEQ ID NO: 22693 - DNA, 22 bp, Artificial Sequence
  Synthetic
attcatcgtccatgatgtggga

SEQ ID NO: 22694 - DNA, 25 bp, Artificial Sequence
  Synthetic
ctcttctctaactgtgaatgtgagg

SEQ ID NO: 22695 - DNA, 22 bp, Artificial Sequence
  Synthetic
agtgagagggtattggagaggc

SEQ ID NO: 22696 - DNA, 25 bp, Artificial Sequence
  Synthetic
gacgatgagaattttcaagaacagg

SEQ ID NO: 22697 - DNA, 24 bp, Artificial Sequence
  Synthetic
tttctgaacaggtagaagtgcaaa

SEQ ID NO: 22698 - DNA, 20 bp, Artificial Sequence
  Synthetic
gggccctccagatccaccga

SEQ ID NO: 22699 - DNA, 20 bp, Artificial Sequence
  Synthetic
ggaggctcgggatccgtata

SEQ ID NO: 22700 - DNA, 22 bp, Artificial Sequence
  Synthetic
ggatacacaccttttggaggca

SEQ ID NO: 22701 - DNA, 22 bp, Artificial Sequence
  Synthetic
tggtgaacatccttccgttaca

SEQ ID NO: 22702 - DNA, 21 bp, Artificial Sequence
  Synthetic
aaacgcaaacactcctcctct

SEQ ID NO: 22703 - DNA, 25 bp, Artificial Sequence
  Synthetic
taaagcaatagaggttccaaaggtg

SEQ ID NO: 22704 - DNA, 23 bp, Artificial Sequence
  Synthetic
ctgcagaggtagatgacagtaga

SEQ ID NO: 22705 - DNA, 20 bp, Artificial Sequence
  Synthetic
cctcccgggagagccatagt

SEQ ID NO: 22706 - DNA, 20 bp, Artificial Sequence
  Synthetic
ggtgtgcgcgccacaagaaa

SEQ ID NO: 22707 - DNA, 22 bp, Artificial Sequence
  Synthetic
ttcacgctgctggcatcctgtt

SEQ ID NO: 22708 - DNA, 20 bp, Artificial Sequence
  Synthetic
cggtcactggggtgtcctga

SEQ ID NO: 22709 - DNA, 22 bp, Artificial Sequence
  Synthetic
tggggccctataacccacaagt

SEQ ID NO: 22710 - DNA, 21 bp, Artificial Sequence
  Synthetic
gcttcaccaagacctgcggag

SEQ ID NO: 22711 - DNA, 22 bp, Artificial Sequence
  Synthetic
cctctacggagtctcctcgagc

SEQ ID NO: 22712 - DNA, 22 bp, Artificial Sequence
  Synthetic
tggaccctcatcttcctgtgct

SEQ ID NO: 22713 - DNA, 22 bp, Artificial Sequence
  Synthetic
gtggcgacatcttgaggggtct

SEQ ID NO: 22714 - DNA, 21 bp, Artificial Sequence
  Synthetic
aagggcccgtatgccagatgt

SEQ ID NO: 22715 - DNA, 21 bp, Artificial Sequence
  Synthetic
ggccctggacttcatccctgt

SEQ ID NO: 22716 - DNA, 22 bp, Artificial Sequence
  Synthetic
cagacccaacgacggtgcttgg

SEQ ID NO: 22717 - DNA, 20 bp, Artificial Sequence
  Synthetic
gacggacgcccttatgaccg

SEQ ID NO: 22718 - DNA, 20 bp, Artificial Sequence
  Synthetic
cacggggtgcgcatggtatg

SEQ ID NO: 22719 - DNA, 22 bp, Artificial Sequence
  Synthetic
ctgggggctgtccaaaatgaga

SEQ ID NO: 22720 - DNA, 22 bp, Artificial Sequence
  Synthetic
tgcagaagaactgaaacccgct

SEQ ID NO: 22721 - DNA, 19 bp, Artificial Sequence
  Synthetic
tcgtcgtgagcggcttagc

SEQ ID NO: 22722 - DNA, 22 bp, Artificial Sequence
  Synthetic
gttacgcaggctacaccagtgg

SEQ ID NO: 22723 - DNA, 21 bp, Artificial Sequence
  Synthetic
tgtgcagcaacacttggcatg

SEQ ID NO: 22724 - DNA, 21 bp, Artificial Sequence
  Synthetic
tgttgtggggtctcagctccc

SEQ ID NO: 22725 - DNA, 20 bp, Artificial Sequence
  Synthetic
gttccctcctgctctcccga

SEQ ID NO: 22726 - DNA, 22 bp, Artificial Sequence
  Synthetic
catctcctgacccgacaacagc

SEQ ID NO: 22727 - DNA, 22 bp, Artificial Sequence
  Synthetic
tgcgagaagatggcactctacg

SEQ ID NO: 22728 - DNA, 22 bp, Artificial Sequence
  Synthetic
gtggggtgctcactaccagttt

SEQ ID NO: 22729 - DNA, 20 bp, Artificial Sequence
  Synthetic
gcgagctgcttgggagacag

SEQ ID NO: 22730 - DNA, 20 bp, Artificial Sequence
  Synthetic
ggcgccacccttaagagctt

SEQ ID NO: 22731 - DNA, 22 bp, Artificial Sequence
  Synthetic
gtaaggaagtgggccttaatgg

SEQ ID NO: 22732 - DNA, 22 bp, Artificial Sequence
  Synthetic
aagccgctcaagaattgttcaa

SEQ ID NO: 22733 - DNA, 24 bp, Artificial Sequence
  Synthetic
aattggagttcttatagctgacgc

SEQ ID NO: 22734 - DNA, 25 bp, Artificial Sequence
  Synthetic
aaagcctcagataaccaacaagatg

SEQ ID NO: 22735 - DNA, 24 bp, Artificial Sequence
  Synthetic
ccaccctcttaagttgagaaacag

SEQ ID NO: 22736 - DNA, 24 bp, Artificial Sequence
  Synthetic
tatcagcagattggaagaagaagg

SEQ ID NO: 22737 - DNA, 25 bp, Artificial Sequence
  Synthetic
tttggagagaaggaagatgttatgc

SEQ ID NO: 22738 - DNA, 24 bp, Artificial Sequence
  Synthetic
agagttacttctgatccacgaagg

SEQ ID NO: 22739 - DNA, 22 bp, Artificial Sequence
  Synthetic
ccatagcggttcagaaaatggc

SEQ ID NO: 22740 - DNA, 22 bp, Artificial Sequence
  Synthetic
ccagattgggttgctagacaaa

SEQ ID NO: 22741 - DNA, 25 bp, Artificial Sequence
  Synthetic
agggtagtatgctttaaattcccaa

SEQ ID NO: 22742 - DNA, 25 bp, Artificial Sequence
  Synthetic
aacaagcaatttccataagtctgac

SEQ ID NO: 22743 - DNA, 24 bp, Artificial Sequence
  Synthetic
aaaacctacactatctcccctccc

SEQ ID NO: 22744 - DNA, 23 bp, Artificial Sequence
  Synthetic
aaaacgcattccagcagtaaaca

SEQ ID NO: 22745 - DNA, 23 bp, Artificial Sequence
  Synthetic
taggcctactgttcctgtagagc

SEQ ID NO: 22746 - DNA, 24 bp, Artificial Sequence
  Synthetic
ttttacaacaaccaaccagaaacg

SEQ ID NO: 22747 - DNA, 25 bp, Artificial Sequence
  Synthetic
tggttttacgtactggtagtagaca

SEQ ID NO: 22748 - DNA, 24 bp, Artificial Sequence
  Synthetic
agtttcaggcaatcagtttagagt

SEQ ID NO: 22749 - DNA, 24 bp, Artificial Sequence
  Synthetic
atatgccagacatttttggacacg

SEQ ID NO: 22750 - DNA, 24 bp, Artificial Sequence
  Synthetic
atcaatgctatgaatccaggcatt

SEQ ID NO: 22751 - DNA, 23 bp, Artificial Sequence
  Synthetic
cacttgtccatttgtgtcattcg

SEQ ID NO: 22752 - DNA, 22 bp, Artificial Sequence
  Synthetic
tccatggggccaaagaaatagc

SEQ ID NO: 22753 - DNA, 22 bp, Artificial Sequence
  Synthetic
ctatcgactcttcaaacacggc

SEQ ID NO: 22754 - DNA, 25 bp, Artificial Sequence
  Synthetic
cgagaacgaaaatgacagtgataca

SEQ ID NO: 22755 - DNA, 20 bp, Artificial Sequence
  Synthetic
tacaggtagaagggcgccat

SEQ ID NO: 22756 - DNA, 24 bp, Artificial Sequence
  Synthetic
acagacctacgtgaccatatagac

SEQ ID NO: 22757 - DNA, 24 bp, Artificial Sequence
  Synthetic
tggagacatatgcaatacaatgca

SEQ ID NO: 22758 - DNA, 21 bp, Artificial Sequence
  Synthetic
aatcccactttcactgaccca

SEQ ID NO: 22759 - DNA, 21 bp, Artificial Sequence
  Synthetic
acggatgaatatgttgcacgc

SEQ ID NO: 22760 - DNA, 20 bp, Artificial Sequence
  Synthetic
gtgttgaggtaggtcgtggt

SEQ ID NO: 22761 - DNA, 23 bp, Artificial Sequence
  Synthetic
tatggttgatactggctttggtg

SEQ ID NO: 22762 - DNA, 25 bp, Artificial Sequence
  Synthetic
tttcctacacctagtggttctatgg

SEQ ID NO: 22763 - DNA, 25 bp, Artificial Sequence
  Synthetic
taggacgcaaatttttactacaagc

SEQ ID NO: 22764 - DNA, 20 bp, Artificial Sequence
  Synthetic
atgcgtgccaaatccctgtt

SEQ ID NO: 22765 - DNA, 22 bp, Artificial Sequence
  Synthetic
agaatgtgtgtactgcaagcaa

SEQ ID NO: 22766 - DNA, 24 bp, Artificial Sequence
  Synthetic
ttccataatataaggggtcggtgg

SEQ ID NO: 22767 - DNA, 25 bp, Artificial Sequence
  Synthetic
cggacagagcccattacaatattgt

SEQ ID NO: 22768 - DNA, 24 bp, Artificial Sequence
  Synthetic
atatgcacacacttagaagtctgc

SEQ ID NO: 22769 - DNA, 25 bp, Artificial Sequence
  Synthetic
aggaaaaccgtttcattgaaattgg

SEQ ID NO: 22770 - DNA, 22 bp, Artificial Sequence
  Synthetic
aacaagccaattaaagtgggca

SEQ ID NO: 22771 - DNA, 21 bp, Artificial Sequence
  Synthetic
ttttacagcagaggtgtccca

SEQ ID NO: 22772 - DNA, 25 bp, Artificial Sequence
  Synthetic
gttggaaccacataaatgggaaaag

SEQ ID NO: 22773 - DNA, 23 bp, Artificial Sequence
  Synthetic
aatcagaaacatggccaattgga

SEQ ID NO: 22774 - DNA, 25 bp, Artificial Sequence
  Synthetic
acaaagactgaacaaaaggagctac

SEQ ID NO: 22775 - DNA, 24 bp, Artificial Sequence
  Synthetic
aattggcaaatgttgtgaggaaga

SEQ ID NO: 22776 - DNA, 20 bp, Artificial Sequence
  Synthetic
agtaccagcggaaatgctcg

SEQ ID NO: 22777 - DNA, 21 bp, Artificial Sequence
  Synthetic
tgacttcgccctcatagtgaa

SEQ ID NO: 22778 - DNA, 20 bp, Artificial Sequence
  Synthetic
cccaaatggcccttcagcta

SEQ ID NO: 22779 - DNA, 22 bp, Artificial Sequence
  Synthetic
ggatgaagactaccaaggcagg

SEQ ID NO: 22780 - DNA, 25 bp, Artificial Sequence
  Synthetic
agatggacctgacatctgtacattc

SEQ ID NO: 22781 - DNA, 25 bp, Artificial Sequence
  Synthetic
attggtttaaggtgtgttacatgca

SEQ ID NO: 22782 - DNA, 25 bp, Artificial Sequence
  Synthetic
aggaggagtctgaatatccatatgc

SEQ ID NO: 22783 - DNA, 23 bp, Artificial Sequence
  Synthetic
cgggatgatgatgagagcgaatt

SEQ ID NO: 22784 - DNA, 20 bp, Artificial Sequence
  Synthetic
tgcaatagcctcagtcccag

SEQ ID NO: 22785 - DNA, 24 bp, Artificial Sequence
  Synthetic
cacagtaggtgtcagttttactga

SEQ ID NO: 22786 - DNA, 22 bp, Artificial Sequence
  Synthetic
aagtgaccaagaagacgaggag

SEQ ID NO: 22787 - DNA, 25 bp, Artificial Sequence
  Synthetic
gactcacaatatggttctgaacagt

SEQ ID NO: 22788 - DNA, 18 bp, Artificial Sequence
  Synthetic
ccggctgttcgcaagcga

SEQ ID NO: 22789 - DNA, 24 bp, Artificial Sequence
  Synthetic
agctgctccacaagatatttatcc

SEQ ID NO: 22790 - DNA, 25 bp, Artificial Sequence
  Synthetic
tcctttattcaggatcacagctagt

SEQ ID NO: 22791 - DNA, 24 bp, Artificial Sequence
  Synthetic
tagacgctattatgaacaagtgcc

SEQ ID NO: 22792 - DNA, 24 bp, Artificial Sequence
  Synthetic
ttgagttacaaacactgggtgaag

SEQ ID NO: 22793 - DNA, 20 bp, Artificial Sequence
  Synthetic
cagatggctgtttggcttcc

SEQ ID NO: 22794 - DNA, 22 bp, Artificial Sequence
  Synthetic
cctaaccgatttgcctttggag

SEQ ID NO: 22795 - DNA, 21 bp, Artificial Sequence
  Synthetic
tgtgcaggaacacagtttcag

SEQ ID NO: 22796 - DNA, 25 bp, Artificial Sequence
  Synthetic
tttcagaaaacgtagatcctccaat

SEQ ID NO: 22797 - DNA, 21 bp, Artificial Sequence
  Synthetic
tggcatgcaattggtatgtgg

SEQ ID NO: 22798 - DNA, 24 bp, Artificial Sequence
  Synthetic
tcggaagaatgattggtggaatcg

SEQ ID NO: 22799 - DNA, 22 bp, Artificial Sequence
  Synthetic
ggtgaaaatggacgaaggacaa

SEQ ID NO: 22800 - DNA, 22 bp, Artificial Sequence
  Synthetic
agggaagggtactcactggtcg

SEQ ID NO: 22801 - DNA, 25 bp, Artificial Sequence
  Synthetic
ttgcttcaaatgagaatgtggaaac

SEQ ID NO: 22802 - DNA, 24 bp, Artificial Sequence
  Synthetic
acttggaatgcaggaccttttttc

SEQ ID NO: 22803 - DNA, 24 bp, Artificial Sequence
  Synthetic
ttgaggacacaagagtctgaatgt

SEQ ID NO: 22804 - DNA, 22 bp, Artificial Sequence
  Synthetic
gacaattggcatggttcgaacc

SEQ ID NO: 22805 - DNA, 24 bp, Artificial Sequence
  Synthetic
aatggatggacagagactgatagt

SEQ ID NO: 22806 - DNA, 23 bp, Artificial Sequence
  Synthetic
gtgtcttgaaacgatggaagttg

SEQ ID NO: 22807 - DNA, 23 bp, Artificial Sequence
  Synthetic
aattggcaaatgtcgtgaggaag

SEQ ID NO: 22808 - DNA, 25 bp, Artificial Sequence
  Synthetic
atgttcgaaagtaagagcatgaagc

SEQ ID NO: 22809 - DNA, 23 bp, Artificial Sequence
  Synthetic
tccaatcctctgatgatttcgct

SEQ ID NO: 22810 - DNA, 21 bp, Artificial Sequence
  Synthetic
ggacaacgaccttggaccagc

SEQ ID NO: 22811 - DNA, 20 bp, Artificial Sequence
  Synthetic
caacacggcgaccctacaag

SEQ ID NO: 22812 - DNA, 25 bp, Artificial Sequence
  Synthetic
ttggaaaaactaactaacactgggt

SEQ ID NO: 22813 - DNA, 23 bp, Artificial Sequence
  Synthetic
aattccggttgaccttctatgtc

SEQ ID NO: 22814 - DNA, 20 bp, Artificial Sequence
  Synthetic
acgaaagtttgcaggaggca

SEQ ID NO: 22815 - DNA, 21 bp, Artificial Sequence
  Synthetic
ggcagtacggaggctatagac

SEQ ID NO: 22816 - DNA, 22 bp, Artificial Sequence
  Synthetic
agatgaagggggagattggaga

SEQ ID NO: 22817 - DNA, 23 bp, Artificial Sequence
  Synthetic
ggcatacagacattaaaccacca

SEQ ID NO: 22818 - DNA, 22 bp, Artificial Sequence
  Synthetic
gacaaaaccgctacctgtgtaa

SEQ ID NO: 22819 - DNA, 20 bp, Artificial Sequence
  Synthetic
gggcaccgcaaagacctacg

SEQ ID NO: 22820 - DNA, 20 bp, Artificial Sequence
  Synthetic
ttggacaggtgcaggcaatg

SEQ ID NO: 22821 - DNA, 23 bp, Artificial Sequence
  Synthetic
attgtggtaataacgtcccctgc

SEQ ID NO: 22822 - DNA, 21 bp, Artificial Sequence
  Synthetic
tatccgtctacataggcctgc

SEQ ID NO: 22823 - DNA, 20 bp, Artificial Sequence
  Synthetic
gcctgtaccatcgcgttcta

SEQ ID NO: 22824 - DNA, 20 bp, Artificial Sequence
  Synthetic
attggggaacactgggctaa

SEQ ID NO: 22825 - DNA, 22 bp, Artificial Sequence
  Synthetic
ggtactatgggtgacactgtgc

SEQ ID NO: 22826 - DNA, 22 bp, Artificial Sequence
  Synthetic
ctgtacctgggcaatatgatgc

SEQ ID NO: 22827 - DNA, 23 bp, Artificial Sequence
  Synthetic
tcctacaatcctccattttgctg

SEQ ID NO: 22828 - DNA, 21 bp, Artificial Sequence
  Synthetic
gagaccctccttacagccatg

SEQ ID NO: 22829 - DNA, 22 bp, Artificial Sequence
  Synthetic
tgaaacgatggaggttgttcag

SEQ ID NO: 22830 - DNA, 24 bp, Artificial Sequence
  Synthetic
gaaagcaaagttggcaaatgttgt

SEQ ID NO: 22831 - DNA, 24 bp, Artificial Sequence
  Synthetic
tcttcaatcctctgacgattttgc

SEQ ID NO: 22832 - DNA, 24 bp, Artificial Sequence
  Synthetic
cggacatgagtattggagttactg

SEQ ID NO: 22833 - DNA, 23 bp, Artificial Sequence
  Synthetic
acagaagaccagtcgggatatcc

SEQ ID NO: 22834 - DNA, 22 bp, Artificial Sequence
  Synthetic
ggtggtaaatcccagcacaggt

SEQ ID NO: 22835 - DNA, 22 bp, Artificial Sequence
  Synthetic
gagttcctctagggatggccga

SEQ ID NO: 22836 - DNA, 19 bp, Artificial Sequence
  Synthetic
ccggtggcctcagctgctt

SEQ ID NO: 22837 - DNA, 22 bp, Artificial Sequence
  Synthetic
agggtggcatcttcgacaactg

SEQ ID NO: 22838 - DNA, 19 bp, Artificial Sequence
  Synthetic
cagtggggctccgcgtact

SEQ ID NO: 22839 - DNA, 22 bp, Artificial Sequence
  Synthetic
taggaggttattggcacgccct

SEQ ID NO: 22840 - DNA, 21 bp, Artificial Sequence
  Synthetic
tcttcagtggtcagcgtcggt

SEQ ID NO: 22841 - DNA, 21 bp, Artificial Sequence
  Synthetic
tgcttcgctggttccgacttg

SEQ ID NO: 22842 - DNA, 18 bp, Artificial Sequence
  Synthetic
cgtgctggtggcgatgca

SEQ ID NO: 22843 - DNA, 20 bp, Artificial Sequence
  Synthetic
gccggcctttgtgcaaactg

SEQ ID NO: 22844 - DNA, 22 bp, Artificial Sequence
  Synthetic
aggactgtgccatagttcggga

SEQ ID NO: 22845 - DNA, 21 bp, Artificial Sequence
  Synthetic
ccattgccaatgggggctacc

SEQ ID NO: 22846 - DNA, 22 bp, Artificial Sequence
  Synthetic
ctccctagggaggctcagacca

SEQ ID NO: 22847 - DNA, 19 bp, Artificial Sequence
  Synthetic
gtgcccggttgctggcgaa

SEQ ID NO: 22848 - DNA, 20 bp, Artificial Sequence
  Synthetic
ctgggtgtgtcggcagtgac

SEQ ID NO: 22849 - DNA, 19 bp, Artificial Sequence
  Synthetic
ggcaggtaccgtgcgctct

SEQ ID NO: 22850 - DNA, 22 bp, Artificial Sequence
  Synthetic
ggaacatgtggccccccatcac

SEQ ID NO: 22851 - DNA, 20 bp, Artificial Sequence
  Synthetic
tgtgaagccggtggcggaag

SEQ ID NO: 22852 - DNA, 20 bp, Artificial Sequence
  Synthetic
cggcctctttcctgctggga

SEQ ID NO: 22853 - DNA, 21 bp, Artificial Sequence
  Synthetic
gcgctcggcgttctactctgg

SEQ ID NO: 22854 - DNA, 22 bp, Artificial Sequence
  Synthetic
gatggggtgcagcaaaggatgg

SEQ ID NO: 22855 - DNA, 21 bp, Artificial Sequence
  Synthetic
cgtctagcgcctacgacctga

SEQ ID NO: 22856 - DNA, 20 bp, Artificial Sequence
  Synthetic
ctgctgtgtccctactgccc

SEQ ID NO: 22857 - DNA, 22 bp, Artificial Sequence
  Synthetic
agctggtgtgcaggagagaaga

SEQ ID NO: 22858 - DNA, 22 bp, Artificial Sequence
  Synthetic
tcgacgaacatgacatgcaggt

SEQ ID NO: 22859 - DNA, 22 bp, Artificial Sequence
  Synthetic
cttggctgaatgtgttgctggg

SEQ ID NO: 22860 - DNA, 22 bp, Artificial Sequence
  Synthetic
gagttggtgatgtgccaggtcc

SEQ ID NO: 22861 - DNA, 24 bp, Artificial Sequence
  Synthetic
atttggaagcttgtgaattcgact

SEQ ID NO: 22862 - DNA, 25 bp, Artificial Sequence
  Synthetic
aggcagtgtaagcatttttatcatg

SEQ ID NO: 22863 - DNA, 23 bp, Artificial Sequence
  Synthetic
ggcaattccctggaactatttca

SEQ ID NO: 22864 - DNA, 22 bp, Artificial Sequence
  Synthetic
tgcgttctagcaacaaaaaagc

SEQ ID NO: 22865 - DNA, 22 bp, Artificial Sequence
  Synthetic
gtgggataggtgcaatgtcatt

SEQ ID NO: 22866 - DNA, 20 bp, Artificial Sequence
  Synthetic
caaggcttgctcccgaagac

SEQ ID NO: 22867 - DNA, 24 bp, Artificial Sequence
  Synthetic
ctaaaagtcagttttggctgcaac

SEQ ID NO: 22868 - DNA, 24 bp, Artificial Sequence
  Synthetic
tttggacacaattagacctgagtg

SEQ ID NO: 22869 - DNA, 20 bp, Artificial Sequence
  Synthetic
ccccaccacctccacaaccg

SEQ ID NO: 22870 - DNA, 19 bp, Artificial Sequence
  Synthetic
gtggaaggtcacccaggcg

SEQ ID NO: 22871 - DNA, 20 bp, Artificial Sequence
  Synthetic
gcgaccccccagtaatcatt

SEQ ID NO: 22872 - DNA, 25 bp, Artificial Sequence
  Synthetic
atgctgcttttgctactaacatact

SEQ ID NO: 22873 - DNA, 22 bp, Artificial Sequence
  Synthetic
ccactagcacaggttccagtgc

SEQ ID NO: 22874 - DNA, 25 bp, Artificial Sequence
  Synthetic
tccagacagagattttcttgatgtt

SEQ ID NO: 22875 - DNA, 25 bp, Artificial Sequence
  Synthetic
agtcattatacaccctcatgacagt

SEQ ID NO: 22876 - DNA, 25 bp, Artificial Sequence
  Synthetic
ccaaatgtttattgtaggatgcaca

SEQ ID NO: 22877 - DNA, 25 bp, Artificial Sequence
  Synthetic
atccagtgatgctcaattgtttaac

SEQ ID NO: 22878 - DNA, 25 bp, Artificial Sequence
  Synthetic
caaacgtaaaaattgaggtctgacc

SEQ ID NO: 22879 - DNA, 20 bp, Artificial Sequence
  Synthetic
tcgaacaatcaagcagtgcc

SEQ ID NO: 22880 - DNA, 22 bp, Artificial Sequence
  Synthetic
atcgtgcggtcttggtaaatgt

SEQ ID NO: 22881 - DNA, 25 bp, Artificial Sequence
  Synthetic
atgcgactgctagcatcatttatga

SEQ ID NO: 22882 - DNA, 24 bp, Artificial Sequence
  Synthetic
ccagaagttagatgtgtttgcaga

SEQ ID NO: 22883 - DNA, 24 bp, Artificial Sequence
  Synthetic
ctggttatgagactttcagggtcg

SEQ ID NO: 22884 - DNA, 21 bp, Artificial Sequence
  Synthetic
aagaactgactcccggaacca

SEQ ID NO: 22885 - DNA, 25 bp, Artificial Sequence
  Synthetic
ctaattcaaaatgcacaagctgtgg

SEQ ID NO: 22886 - DNA, 25 bp, Artificial Sequence
  Synthetic
tgagattccaattaagcagaccatc

SEQ ID NO: 22887 - DNA, 24 bp, Artificial Sequence
  Synthetic
tctctcctatcattgttggcaact

SEQ ID NO: 22888 - DNA, 25 bp, Artificial Sequence
  Synthetic
actttgtcgatttgaaaatgagagg

SEQ ID NO: 22889 - DNA, 20 bp, Artificial Sequence
  Synthetic
ccctccgtgctcgaagattt

SEQ ID NO: 22890 - DNA, 24 bp, Artificial Sequence
  Synthetic
tgaaacggaggatcataactctgc

SEQ ID NO: 22891 - DNA, 22 bp, Artificial Sequence
  Synthetic
agcattgcctacagatatgcca

SEQ ID NO: 22892 - DNA, 22 bp, Artificial Sequence
  Synthetic
cgaggcgcattagatggtaatg

SEQ ID NO: 22893 - DNA, 22 bp, Artificial Sequence
  Synthetic
agatgaatcaggccgatttgac

SEQ ID NO: 22894 - DNA, 21 bp, Artificial Sequence
  Synthetic
aaaaggcgaagagggaggagc

SEQ ID NO: 22895 - DNA, 24 bp, Artificial Sequence
  Synthetic
tctccagaaaatggggttgcaatt

SEQ ID NO: 22896 - DNA, 24 bp, Artificial Sequence
  Synthetic
cccctattgaacgtctacaatcct

SEQ ID NO: 22897 - DNA, 25 bp, Artificial Sequence
  Synthetic
tttcagatgtcttggacaaagtcag

SEQ ID NO: 22898 - DNA, 24 bp, Artificial Sequence
  Synthetic
aatttgctatcacagatgcatgtg

SEQ ID NO: 22899 - DNA, 23 bp, Artificial Sequence
  Synthetic
agacaggatatggcatttgaccc

SEQ ID NO: 22900 - DNA, 25 bp, Artificial Sequence
  Synthetic
aaatgggcaaggatatttatggtga

SEQ ID NO: 22901 - DNA, 25 bp, Artificial Sequence
  Synthetic
atggtgttttatggggtaatgactg

SEQ ID NO: 22902 - DNA, 22 bp, Artificial Sequence
  Synthetic
aacatgccctcaaactttggtt

SEQ ID NO: 22903 - DNA, 21 bp, Artificial Sequence
  Synthetic
ggagatcctccatacagccat

SEQ ID NO: 22904 - DNA, 24 bp, Artificial Sequence
  Synthetic
gaactcatgccttgaaacaatgga

SEQ ID NO: 22905 - DNA, 25 bp, Artificial Sequence
  Synthetic
aatggtcacacaaagaacaataggg

SEQ ID NO: 22906 - DNA, 22 bp, Artificial Sequence
  Synthetic
ccaaactggcaaatgttgtgag

SEQ ID NO: 22907 - DNA, 22 bp, Artificial Sequence
  Synthetic
tgaagctccgaacacaaatacc

SEQ ID NO: 22908 - DNA, 22 bp, Artificial Sequence
  Synthetic
tccaatcctccgacgattttgc

SEQ ID NO: 22909 - DNA, 21 bp, Artificial Sequence
  Synthetic
cccagatggctctccaattgt

SEQ ID NO: 22910 - DNA, 23 bp, Artificial Sequence
  Synthetic
tgaagtctgcttaaagtgggagc

SEQ ID NO: 22911 - DNA, 25 bp, Artificial Sequence
  Synthetic
ccctagtagttcatataggagaccg

SEQ ID NO: 22912 - DNA, 24 bp, Artificial Sequence
  Synthetic
tggagcctcagagagctaaaaatt

SEQ ID NO: 22913 - DNA, 25 bp, Artificial Sequence
  Synthetic
aaggtcaccattcaagattgattct

SEQ ID NO: 22914 - DNA, 25 bp, Artificial Sequence
  Synthetic
aacaccagaaagacaatccaaaagg

SEQ ID NO: 22915 - DNA, 20 bp, Artificial Sequence
  Synthetic
tcctcaaggagtgcgtttgg

SEQ ID NO: 22916 - DNA, 25 bp, Artificial Sequence
  Synthetic
gcttttaaaaatcctgaacaaaggc

SEQ ID NO: 22917 - DNA, 20 bp, Artificial Sequence
  Synthetic
caggaagaggaactgggggt

SEQ ID NO: 22918 - DNA, 22 bp, Artificial Sequence
  Synthetic
caacagatgttggtgctgttgg

SEQ ID NO: 22919 - DNA, 25 bp, Artificial Sequence
  Synthetic
tcaaacctttgacattttagagcca

SEQ ID NO: 22920 - DNA, 21 bp, Artificial Sequence
  Synthetic
cgccattgcaggaatttgctg

SEQ ID NO: 22921 - DNA, 24 bp, Artificial Sequence
  Synthetic
agtgagcgtttactaattgtggga

SEQ ID NO: 22922 - DNA, 25 bp, Artificial Sequence
  Synthetic
gttggagacacagaaaatcctagct

SEQ ID NO: 22923 - DNA, 22 bp, Artificial Sequence
  Synthetic
aactacaacaggacagagcagg

SEQ ID NO: 22924 - DNA, 21 bp, Artificial Sequence
  Synthetic
aggatttgtcacaagaggcgg

SEQ ID NO: 22925 - DNA, 24 bp, Artificial Sequence
  Synthetic
ggactaggaaatgaagctgaagat

SEQ ID NO: 22926 - DNA, 21 bp, Artificial Sequence
  Synthetic
cgtcgacgcctagaagacgac

SEQ ID NO: 22927 - DNA, 23 bp, Artificial Sequence
  Synthetic
gcaaactaaaatacaggggcatg

SEQ ID NO: 22928 - DNA, 21 bp, Artificial Sequence
  Synthetic
aattggtgccaatagacgccc

SEQ ID NO: 22929 - DNA, 20 bp, Artificial Sequence
  Synthetic
cctagacgggtagcgactag

SEQ ID NO: 22930 - DNA, 25 bp, Artificial Sequence
  Synthetic
tgtacaatagaagagtcagacaggt

SEQ ID NO: 22931 - DNA, 22 bp, Artificial Sequence
  Synthetic
tcgtccttaatactggctctcg

SEQ ID NO: 22932 - DNA, 24 bp, Artificial Sequence
  Synthetic
tgcttctggtaaggtgtatcttcc

SEQ ID NO: 22933 - DNA, 24 bp, Artificial Sequence
  Synthetic
acttctaagtcttccaaacgcaaa

SEQ ID NO: 22934 - DNA, 20 bp, Artificial Sequence
  Synthetic
gactcacagccaacctctct

SEQ ID NO: 22935 - DNA, 24 bp, Artificial Sequence
  Synthetic
ttcaggatcttgcatcgtttgaac

SEQ ID NO: 22936 - DNA, 25 bp, Artificial Sequence
  Synthetic
atcagattttatgtaagtgccagcg

SEQ ID NO: 22937 - DNA, 23 bp, Artificial Sequence
  Synthetic
cagtgcagaaaatgaagctgaag

SEQ ID NO: 22938 - DNA, 23 bp, Artificial Sequence
  Synthetic
gcataatgccagagtggataaca

SEQ ID NO: 22939 - DNA, 25 bp, Artificial Sequence
  Synthetic
tgatgttacatatgcatgttggagt

SEQ ID NO: 22940 - DNA, 25 bp, Artificial Sequence
  Synthetic
aaatgctgcaaaagacattgataca

SEQ ID NO: 22941 - DNA, 20 bp, Artificial Sequence
  Synthetic
ctctcccactgcctggaaac

SEQ ID NO: 22942 - DNA, 25 bp, Artificial Sequence
  Synthetic
gacactgtcacactaccaaaaggaa

SEQ ID NO: 22943 - DNA, 22 bp, Artificial Sequence
  Synthetic
ttttcctgatgtcaccgttgtt

SEQ ID NO: 22944 - DNA, 25 bp, Artificial Sequence
  Synthetic
tacactttttaaatcagccttcccg

SEQ ID NO: 22945 - DNA, 25 bp, Artificial Sequence
  Synthetic
cccacaaacaaatataattcctggc

SEQ ID NO: 22946 - DNA, 23 bp, Artificial Sequence
  Synthetic
aatccagaaactcaacggctagt

SEQ ID NO: 22947 - DNA, 22 bp, Artificial Sequence
  Synthetic
ctatggaaaacgagagcagctg

SEQ ID NO: 22948 - DNA, 23 bp, Artificial Sequence
  Synthetic
acaaccaacatccagtattgagg

SEQ ID NO: 22949 - DNA, 22 bp, Artificial Sequence
  Synthetic
tgtttgactcatggggtcagtc

SEQ ID NO: 22950 - DNA, 24 bp, Artificial Sequence
  Synthetic
ttcaggtacgtctttattgttgcc

SEQ ID NO: 22951 - DNA, 22 bp, Artificial Sequence
  Synthetic
gcccatcctggacatggagacg

SEQ ID NO: 22952 - DNA, 22 bp, Artificial Sequence
  Synthetic
ctcaagttttcgcacccgtcgc

SEQ ID NO: 22953 - DNA, 20 bp, Artificial Sequence
  Synthetic
gattccattcggggtgccgc

SEQ ID NO: 22954 - DNA, 19 bp, Artificial Sequence
  Synthetic
taaggccctgggagcgcgt

SEQ ID NO: 22955 - DNA, 21 bp, Artificial Sequence
  Synthetic
gcctcttccagtaactcggcc

SEQ ID NO: 22956 - DNA, 21 bp, Artificial Sequence
  Synthetic
gcgagtagttggtgatgcggc

SEQ ID NO: 22957 - DNA, 20 bp, Artificial Sequence
  Synthetic
gagcttggccatgtacgcgc

SEQ ID NO: 22958 - DNA, 19 bp, Artificial Sequence
  Synthetic
gtcggcgagcccacacaca

SEQ ID NO: 22959 - DNA, 19 bp, Artificial Sequence
  Synthetic
agaactgcccccgaagcca

SEQ ID NO: 22960 - DNA, 19 bp, Artificial Sequence
  Synthetic
gttcgtcctgccccactgg

SEQ ID NO: 22961 - DNA, 20 bp, Artificial Sequence
  Synthetic
gtggtccgtctcgctaacgg

SEQ ID NO: 22962 - DNA, 21 bp, Artificial Sequence
  Synthetic
ccgaaggtcctcccagatccc

SEQ ID NO: 22963 - DNA, 20 bp, Artificial Sequence
  Synthetic
gcagaaccgggccacgatct

SEQ ID NO: 22964 - DNA, 18 bp, Artificial Sequence
  Synthetic
attggcgcgcggaccaca

SEQ ID NO: 22965 - DNA, 21 bp, Artificial Sequence
  Synthetic
tgcactttgcgtgtctggtgt

SEQ ID NO: 22966 - DNA, 20 bp, Artificial Sequence
  Synthetic
cgtgtcgtcgaatgccaggc

SEQ ID NO: 22967 - DNA, 19 bp, Artificial Sequence
  Synthetic
ggtgcggtgcctgccgata

SEQ ID NO: 22968 - DNA, 21 bp, Artificial Sequence
  Synthetic
gaatgggagctcgggtccaca

SEQ ID NO: 22969 - DNA, 21 bp, Artificial Sequence
  Synthetic
atcgccttgtgtgtgtgctgg

SEQ ID NO: 22970 - DNA, 19 bp, Artificial Sequence
  Synthetic
ggcgaacacggggctgcat

SEQ ID NO: 22971 - DNA, 19 bp, Artificial Sequence
  Synthetic
cgccggatcgaggtaccgt

SEQ ID NO: 22972 - DNA, 20 bp, Artificial Sequence
  Synthetic
aggatcttgggtgctgacgc

SEQ ID NO: 22973 - DNA, 19 bp, Artificial Sequence
  Synthetic
tcagggggtgcgtcacgct

SEQ ID NO: 22974 - DNA, 19 bp, Artificial Sequence
  Synthetic
ggccacctgacacagaggc

SEQ ID NO: 22975 - DNA, 20 bp, Artificial Sequence
  Synthetic
tgtgggtgtgtaggcgatgc

SEQ ID NO: 22976 - DNA, 19 bp, Artificial Sequence
  Synthetic
aagtctgcgggggagcggt

SEQ ID NO: 22977 - DNA, 21 bp, Artificial Sequence
  Synthetic
atggtcgccgtcattatggcc

SEQ ID NO: 22978 - DNA, 21 bp, Artificial Sequence
  Synthetic
cgctctccatcctgcatcagg

SEQ ID NO: 22979 - DNA, 19 bp, Artificial Sequence
  Synthetic
caggggcgatggaagcgga

SEQ ID NO: 22980 - DNA, 20 bp, Artificial Sequence
  Synthetic
tccaggcagcgatgtttggc

SEQ ID NO: 22981 - DNA, 19 bp, Artificial Sequence
  Synthetic
gtcctgtcggacgacggtg

SEQ ID NO: 22982 - DNA, 19 bp, Artificial Sequence
  Synthetic
gccagggcgcagaagacgt

SEQ ID NO: 22983 - DNA, 19 bp, Artificial Sequence
  Synthetic
cgctcaaacgccccgagga

SEQ ID NO: 22984 - DNA, 22 bp, Artificial Sequence
  Synthetic
acagggtgttgcaatacgaccc

SEQ ID NO: 22985 - DNA, 18 bp, Artificial Sequence
  Synthetic
ggcggcgaacaaggcaca

SEQ ID NO: 22986 - DNA, 19 bp, Artificial Sequence
  Synthetic
gctacgccaccaccatgca

SEQ ID NO: 22987 - DNA, 19 bp, Artificial Sequence
  Synthetic
cttcgaccggggtctcgga

SEQ ID NO: 22988 - DNA, 19 bp, Artificial Sequence
  Synthetic
gccccgttaggcgccagaa

SEQ ID NO: 22989 - DNA, 22 bp, Artificial Sequence
  Synthetic
tgtgtctgtcctccggaagggc

SEQ ID NO: 22990 - DNA, 18 bp, Artificial Sequence
  Synthetic
cggcacgctgttgacgct

SEQ ID NO: 22991 - DNA, 19 bp, Artificial Sequence
  Synthetic
ccccgcgtcagacaaaccc

SEQ ID NO: 22992 - DNA, 21 bp, Artificial Sequence
  Synthetic
ccgggacttttggatgtcgcc

SEQ ID NO: 22993 - DNA, 22 bp, Artificial Sequence
  Synthetic
ccttcatgacggcgctggtact

SEQ ID NO: 22994 - DNA, 19 bp, Artificial Sequence
  Synthetic
gtcaaagtcgccgccctcc

SEQ ID NO: 22995 - DNA, 19 bp, Artificial Sequence
  Synthetic
cggctcagctggtgggagt

SEQ ID NO: 22996 - DNA, 18 bp, Artificial Sequence
  Synthetic
tcagcttgcgggcctcgt

SEQ ID NO: 22997 - DNA, 20 bp, Artificial Sequence
  Synthetic
tgtacctgcgggcgaagatg

SEQ ID NO: 22998 - DNA, 20 bp, Artificial Sequence
  Synthetic
tccacctcctgccacttggt

SEQ ID NO: 22999 - DNA, 19 bp, Artificial Sequence
  Synthetic
gatggccgcgtggaactgc

SEQ ID NO: 23000 - DNA, 18 bp, Artificial Sequence
  Synthetic
tgcgaaagttgcgcccct

SEQ ID NO: 23001 - DNA, 19 bp, Artificial Sequence
  Synthetic
gcagggtctcgagttcggc

SEQ ID NO: 23002 - DNA, 20 bp, Artificial Sequence
  Synthetic
ccgagcctcccaggtgcaga

SEQ ID NO: 23003 - DNA, 21 bp, Artificial Sequence
  Synthetic
gttgccgtcttgggctttgtc

SEQ ID NO: 23004 - DNA, 19 bp, Artificial Sequence
  Synthetic
cgtctacgtccgaagcggg

SEQ ID NO: 23005 - DNA, 20 bp, Artificial Sequence
  Synthetic
gattccccagagcagccccg

SEQ ID NO: 23006 - DNA, 18 bp, Artificial Sequence
  Synthetic
acatctcgcgcgcgctgt

SEQ ID NO: 23007 - DNA, 22 bp, Artificial Sequence
  Synthetic
ggtccgggtaaaacaacagccg

SEQ ID NO: 23008 - DNA, 21 bp, Artificial Sequence
  Synthetic
caggaggctgggatcgaaggc

SEQ ID NO: 23009 - DNA, 20 bp, Artificial Sequence
  Synthetic
ggatcagctgctttgtgcgc

SEQ ID NO: 23010 - DNA, 20 bp, Artificial Sequence
  Synthetic
cgtcaggacggagagccagg

SEQ ID NO: 23011 - DNA, 20 bp, Artificial Sequence
  Synthetic
gtgcggggcattgtgtctcc

SEQ ID NO: 23012 - DNA, 19 bp, Artificial Sequence
  Synthetic
gatcccccccgcgttccat

SEQ ID NO: 23013 - DNA, 19 bp, Artificial Sequence
  Synthetic
ggtaggccgcgctacacgt

SEQ ID NO: 23014 - DNA, 20 bp, Artificial Sequence
  Synthetic
gaggccctcttgcacgaacg

SEQ ID NO: 23015 - DNA, 19 bp, Artificial Sequence
  Synthetic
gggtggttccgccttgcgt

SEQ ID NO: 23016 - DNA, 18 bp, Artificial Sequence
  Synthetic
aaaagccagcgcgggtgg

SEQ ID NO: 23017 - DNA, 20 bp, Artificial Sequence
  Synthetic
tgcgtgcaggcgtttaacga

SEQ ID NO: 23018 - DNA, 21 bp, Artificial Sequence
  Synthetic
ctgcaccgagatcgtccatcc

SEQ ID NO: 23019 - DNA, 21 bp, Artificial Sequence
  Synthetic
atcaggggccgtgatatgccg

SEQ ID NO: 23020 - DNA, 20 bp, Artificial Sequence
  Synthetic
ctcctcgtccgtccggcact

SEQ ID NO: 23021 - DNA, 21 bp, Artificial Sequence
  Synthetic
ttcagtcggtatcgctggcgc

SEQ ID NO: 23022 - DNA, 19 bp, Artificial Sequence
  Synthetic
ccacgttcgagctcggggt

SEQ ID NO: 23023 - DNA, 20 bp, Artificial Sequence
  Synthetic
ggggacacgggctaccctca

SEQ ID NO: 23024 - DNA, 22 bp, Artificial Sequence
  Synthetic
tgtctggttcgaggacgaccac

SEQ ID NO: 23025 - DNA, 19 bp, Artificial Sequence
  Synthetic
ggccgtgaatcccccgtca

SEQ ID NO: 23026 - DNA, 20 bp, Artificial Sequence
  Synthetic
gtgtcccgcggggagaaagg

SEQ ID NO: 23027 - DNA, 18 bp, Artificial Sequence
  Synthetic
tggtcgccaccacgcatt

SEQ ID NO: 23028 - DNA, 18 bp, Artificial Sequence
  Synthetic
actcgttggcgcgctgaa

SEQ ID NO: 23029 - DNA, 20 bp, Artificial Sequence
  Synthetic
gcggcccgggagagaagaga

SEQ ID NO: 23030 - DNA, 20 bp, Artificial Sequence
  Synthetic
aggttcaccatgcaggcgtg

SEQ ID NO: 23031 - DNA, 19 bp, Artificial Sequence
  Synthetic
taacgatgcggggggtggc

SEQ ID NO: 23032 - DNA, 21 bp, Artificial Sequence
  Synthetic
cgcctgtgcgtgtccttgtgt

SEQ ID NO: 23033 - DNA, 19 bp, Artificial Sequence
  Synthetic
ccgtcttcggtgccagtcc

SEQ ID NO: 23034 - DNA, 20 bp, Artificial Sequence
  Synthetic
tgtttggcgtcgtgagtccc

SEQ ID NO: 23035 - DNA, 19 bp, Artificial Sequence
  Synthetic
ggacagcagcggggagtgt

SEQ ID NO: 23036 - DNA, 18 bp, Artificial Sequence
  Synthetic
cggccatgcacaccagca

SEQ ID NO: 23037 - DNA, 19 bp, Artificial Sequence
  Synthetic
acgaacggccacgacagtg

SEQ ID NO: 23038 - DNA, 21 bp, Artificial Sequence
  Synthetic
ataacgacaaacggcccctcg

SEQ ID NO: 23039 - DNA, 22 bp, Artificial Sequence
  Synthetic
tccaagccagccaagttaacgg

SEQ ID NO: 23040 - DNA, 22 bp, Artificial Sequence
  Synthetic
ccccggtgtcgttcaacaaaga

SEQ ID NO: 23041 - DNA, 22 bp, Artificial Sequence
  Synthetic
tctggacatgtcggcggaatcc

SEQ ID NO: 23042 - DNA, 19 bp, Artificial Sequence
  Synthetic
ttcttgcggaccacggccc

SEQ ID NO: 23043 - DNA, 19 bp, Artificial Sequence
  Synthetic
tcctccgcaaacaggcccg

SEQ ID NO: 23044 - DNA, 19 bp, Artificial Sequence
  Synthetic
gcaggaagctccacagggc

SEQ ID NO: 23045 - DNA, 20 bp, Artificial Sequence
  Synthetic
gtcgttcggggtgctcgttg

SEQ ID NO: 23046 - DNA, 20 bp, Artificial Sequence
  Synthetic
ccccggagacccccaaacct

SEQ ID NO: 23047 - DNA, 20 bp, Artificial Sequence
  Synthetic
ctggacgccatggacaggga

SEQ ID NO: 23048 - DNA, 21 bp, Artificial Sequence
  Synthetic
gtggtacacgagcacgagcca

SEQ ID NO: 23049 - DNA, 20 bp, Artificial Sequence
  Synthetic
ccgcagatcgcagcggtctc

SEQ ID NO: 23050 - DNA, 22 bp, Artificial Sequence
  Synthetic
tcagatcacccgcatcatccga

SEQ ID NO: 23051 - DNA, 19 bp, Artificial Sequence
  Synthetic
tcagccttaccacgcccga

SEQ ID NO: 23052 - DNA, 20 bp, Artificial Sequence
  Synthetic
acttccgggcctcagaaccc

SEQ ID NO: 23053 - DNA, 19 bp, Artificial Sequence
  Synthetic
gggacctgcggccaacaca

SEQ ID NO: 23054 - DNA, 22 bp, Artificial Sequence
  Synthetic
cgggctaaccaggaaatccgtg

SEQ ID NO: 23055 - DNA, 20 bp, Artificial Sequence
  Synthetic
cccgacggcgtagtggagga

SEQ ID NO: 23056 - DNA, 20 bp, Artificial Sequence
  Synthetic
cgccagcctgtttgtcctgg

SEQ ID NO: 23057 - DNA, 21 bp, Artificial Sequence
  Synthetic
gtataccctgtccgtgggcga

SEQ ID NO: 23058 - DNA, 22 bp, Artificial Sequence
  Synthetic
actcggaaagcgaagacgaggc

SEQ ID NO: 23059 - DNA, 22 bp, Artificial Sequence
  Synthetic
gctccgctaaaagaccgcatcg

SEQ ID NO: 23060 - DNA, 25 bp, Artificial Sequence
  Synthetic
ttcaattcagacagggaatcaacac

SEQ ID NO: 23061 - DNA, 20 bp, Artificial Sequence
  Synthetic
ggggctgtggctgtattgaa

SEQ ID NO: 23062 - DNA, 20 bp, Artificial Sequence
  Synthetic
gctggcgaaatcacatgtgt

SEQ ID NO: 23063 - DNA, 22 bp, Artificial Sequence
  Synthetic
agcggctttgaaatgatttggg

SEQ ID NO: 23064 - DNA, 22 bp, Artificial Sequence
  Synthetic
attcctatgggagtgggcctca

SEQ ID NO: 23065 - DNA, 21 bp, Artificial Sequence
  Synthetic
tccttgccacaagaacacatc

SEQ ID NO: 23066 - DNA, 22 bp, Artificial Sequence
  Synthetic
gaacgcccaccaaatattgccc

SEQ ID NO: 23067 - DNA, 24 bp, Artificial Sequence
  Synthetic
tttggaagatccagcgtctagaga

SEQ ID NO: 23068 - DNA, 22 bp, Artificial Sequence
  Synthetic
ctttcccgaccaccagttggat

SEQ ID NO: 23069 - DNA, 25 bp, Artificial Sequence
  Synthetic
gtggaccatatggccataattaaga

SEQ ID NO: 23070 - DNA, 24 bp, Artificial Sequence
  Synthetic
caagtacggtccattacccaaaag

SEQ ID NO: 23071 - DNA, 20 bp, Artificial Sequence
  Synthetic
attggagatgtgccacagca

SEQ ID NO: 23072 - DNA, 22 bp, Artificial Sequence
  Synthetic
atgaggagttcacaatggtggg

SEQ ID NO: 23073 - DNA, 22 bp, Artificial Sequence
  Synthetic
ttcagaaagatgcgaaagtgct

SEQ ID NO: 23074 - DNA, 22 bp, Artificial Sequence
  Synthetic
attcatcgtcgatgatgtggga

SEQ ID NO: 23075 - DNA, 20 bp, Artificial Sequence
  Synthetic
ggacatttgacaccacccag

SEQ ID NO: 23076 - DNA, 24 bp, Artificial Sequence
  Synthetic
aggtaaggaagacagaagatacgg

SEQ ID NO: 23077 - DNA, 25 bp, Artificial Sequence
  Synthetic
gaaagcgtctgagtttagtatggaa

SEQ ID NO: 23078 - DNA, 25 bp, Artificial Sequence
  Synthetic
tctggttctaaatttcaactggtgc

SEQ ID NO: 23079 - DNA, 24 bp, Artificial Sequence
  Synthetic
actgaaactggcattagagcattt

SEQ ID NO: 23080 - DNA, 21 bp, Artificial Sequence
  Synthetic
gtgatgaggtggatcagggga

SEQ ID NO: 23081 - DNA, 24 bp, Artificial Sequence
  Synthetic
gttagtacgcctgaagaaaatggc

SEQ ID NO: 23082 - DNA, 20 bp, Artificial Sequence
  Synthetic
ccgttacctgtagcagcagt

SEQ ID NO: 23083 - DNA, 22 bp, Artificial Sequence
  Synthetic
accgtatcccaatcggaaagcc

SEQ ID NO: 23084 - DNA, 20 bp, Artificial Sequence
  Synthetic
aaagggttcagggggtgcta

SEQ ID NO: 23085 - DNA, 25 bp, Artificial Sequence
  Synthetic
agatcctatatcagacgttacagca

SEQ ID NO: 23086 - DNA, 25 bp, Artificial Sequence
  Synthetic
ttgcagatgttatcacagtacacag

SEQ ID NO: 23087 - DNA, 23 bp, Artificial Sequence
  Synthetic
aactgcaattgtagatgcagtgg

SEQ ID NO: 23088 - DNA, 22 bp, Artificial Sequence
  Synthetic
aacgcttactacaagtaggcca

SEQ ID NO: 23089 - DNA, 22 bp, Artificial Sequence
  Synthetic
atcctctggctcaaacagatga

SEQ ID NO: 23090 - DNA, 25 bp, Artificial Sequence
  Synthetic
cttgcaatttcagaacatttcagca

SEQ ID NO: 23091 - DNA, 24 bp, Artificial Sequence
  Synthetic
atcaatttccactaggtagacggt

SEQ ID NO: 23092 - DNA, 25 bp, Artificial Sequence
  Synthetic
tttgtctgaataaattgctgatgcg

SEQ ID NO: 23093 - DNA, 25 bp, Artificial Sequence
  Synthetic
aacggtctcttagagtcaaacaagg

SEQ ID NO: 23094 - DNA, 23 bp, Artificial Sequence
  Synthetic
agtcattgtcaccagatgctact

SEQ ID NO: 23095 - DNA, 25 bp, Artificial Sequence
  Synthetic
tagtggagttgttgaagatgaagct

SEQ ID NO: 23096 - DNA, 22 bp, Artificial Sequence
  Synthetic
accaactccttcggaagtggga

SEQ ID NO: 23097 - DNA, 25 bp, Artificial Sequence
  Synthetic
ttggatatagaccattaggatccgc

SEQ ID NO: 23098 - DNA, 24 bp, Artificial Sequence
  Synthetic
aactgatgtaggtggtgttagtgg

SEQ ID NO: 23099 - DNA, 23 bp, Artificial Sequence
  Synthetic
ttaaatttcagttttccgcggga

SEQ ID NO: 23100 - DNA, 21 bp, Artificial Sequence
  Synthetic
ctgcgccaaatccagcttttg

SEQ ID NO: 23101 - DNA, 22 bp, Artificial Sequence
  Synthetic
aagtcagttttccttgggtcga

SEQ ID NO: 23102 - DNA, 22 bp, Artificial Sequence
  Synthetic
ggtcagtcatttggtcagcaga

SEQ ID NO: 23103 - DNA, 23 bp, Artificial Sequence
  Synthetic
gaattatactcatgggccaggag

SEQ ID NO: 23104 - DNA, 21 bp, Artificial Sequence
  Synthetic
ttcagtcgctctgcggagagg

SEQ ID NO: 23105 - DNA, 22 bp, Artificial Sequence
  Synthetic
aagaggactgagaagccctgga

SEQ ID NO: 23106 - DNA, 25 bp, Artificial Sequence
  Synthetic
acaggttaaaacatattgtgtgggc

SEQ ID NO: 23107 - DNA, 22 bp, Artificial Sequence
  Synthetic
tggcaactatgtccatgtgcca

SEQ ID NO: 23108 - DNA, 24 bp, Artificial Sequence
  Synthetic
cagaagatggatccaaatagggct

SEQ ID NO: 23109 - DNA, 22 bp, Artificial Sequence
  Synthetic
gtgccgagcacctagaagacag

SEQ ID NO: 23110 - DNA, 23 bp, Artificial Sequence
  Synthetic
ttaccagttgccaagatagagcc

SEQ ID NO: 23111 - DNA, 25 bp, Artificial Sequence
  Synthetic
agatgtaggggatgcctatttttcc

SEQ ID NO: 23112 - DNA, 24 bp, Artificial Sequence
  Synthetic
tctactccagatgagaagttccaa

SEQ ID NO: 23113 - DNA, 24 bp, Artificial Sequence
  Synthetic
tagaggcaacaatccaaaaaagcc

SEQ ID NO: 23114 - DNA, 23 bp, Artificial Sequence
  Synthetic
gcagagaccttctacacagatgg

SEQ ID NO: 23115 - DNA, 23 bp, Artificial Sequence
  Synthetic
attcctggaaaagatagagcccg

SEQ ID NO: 23116 - DNA, 20 bp, Artificial Sequence
  Synthetic
gcacacagacaatggcccca

SEQ ID NO: 23117 - DNA, 25 bp, Artificial Sequence
  Synthetic
tttccaggtctattacagagaaggc

SEQ ID NO: 23118 - DNA, 20 bp, Artificial Sequence
  Synthetic
ccagactgtgcagacatcct

SEQ ID NO: 23119 - DNA, 23 bp, Artificial Sequence
  Synthetic
ggcaaaggtcctggagatattgg

SEQ ID NO: 23120 - DNA, 20 bp, Artificial Sequence
  Synthetic
aggcgccagagagctcatta

SEQ ID NO: 23121 - DNA, 21 bp, Artificial Sequence
  Synthetic
atggagcctggtaggaatcag

SEQ ID NO: 23122 - DNA, 25 bp, Artificial Sequence
  Synthetic
acacctctatgtgtggcaatgaatt

SEQ ID NO: 23123 - DNA, 25 bp, Artificial Sequence
  Synthetic
gagtcatgtgataagcactattggg

SEQ ID NO: 23124 - DNA, 22 bp, Artificial Sequence
  Synthetic
agccaatcaacacaaggcctag

SEQ ID NO: 23125 - DNA, 20 bp, Artificial Sequence
  Synthetic
cctcctagggaaggggagtt

SEQ ID NO: 23126 - DNA, 24 bp, Artificial Sequence
  Synthetic
aatgactctttatcgcctgactgg

SEQ ID NO: 23127 - DNA, 21 bp, Artificial Sequence
  Synthetic
agacttaaggcggcccaactg

SEQ ID NO: 23128 - DNA, 25 bp, Artificial Sequence
  Synthetic
acctaataggagttcctgttacacc

SEQ ID NO: 23129 - DNA, 22 bp, Artificial Sequence
  Synthetic
gtttgggcacaagtcaggattg

SEQ ID NO: 23130 - DNA, 21 bp, Artificial Sequence
  Synthetic
cagtacttggccggtactggg

SEQ ID NO: 23131 - DNA, 23 bp, Artificial Sequence
  Synthetic
aacatcgtcaaactcacctcatg

SEQ ID NO: 23132 - DNA, 25 bp, Artificial Sequence
  Synthetic
acatctggatgctttcctataatgc

SEQ ID NO: 23133 - DNA, 24 bp, Artificial Sequence
  Synthetic
accatacatttgttcagaagggga

SEQ ID NO: 23134 - DNA, 25 bp, Artificial Sequence
  Synthetic
aggaacaattgtttatcaaagaggc

SEQ ID NO: 23135 - DNA, 23 bp, Artificial Sequence
  Synthetic
aagaggtttcttcggagctattg

SEQ ID NO: 23136 - DNA, 24 bp, Artificial Sequence
  Synthetic
taagctcacaaatagagcttgcag

SEQ ID NO: 23137 - DNA, 25 bp, Artificial Sequence
  Synthetic
tgctgcatctttaaatgatgatggc

SEQ ID NO: 23138 - DNA, 20 bp, Artificial Sequence
  Synthetic
aaggaggtcgcactcagcta

SEQ ID NO: 23139 - DNA, 20 bp, Artificial Sequence
  Synthetic
cggaagccatggaggttgct

SEQ ID NO: 23140 - DNA, 25 bp, Artificial Sequence
  Synthetic
tcttgatcgtcttttcttcaaatgc

SEQ ID NO: 23141 - DNA, 24 bp, Artificial Sequence
  Synthetic
aggccattttcatcatgggagatc

SEQ ID NO: 23142 - DNA, 25 bp, Artificial Sequence
  Synthetic
actgaggaatgtgatttagccttac

SEQ ID NO: 23143 - DNA, 20 bp, Artificial Sequence
  Synthetic
agaggaagcagatggagagc

SEQ ID NO: 23144 - DNA, 24 bp, Artificial Sequence
  Synthetic
accttttatgaggaggttacagga

SEQ ID NO: 23145 - DNA, 25 bp, Artificial Sequence
  Synthetic
aaaattgaaggagatacatgggcag

SEQ ID NO: 23146 - DNA, 24 bp, Artificial Sequence
  Synthetic
ggcagggccatctgttatagattt

SEQ ID NO: 23147 - DNA, 23 bp, Artificial Sequence
  Synthetic
tcttcaactacacatcctgaccc

SEQ ID NO: 23148 - DNA, 23 bp, Artificial Sequence
  Synthetic
ctgtttgaacaggttcctacacg

SEQ ID NO: 23149 - DNA, 25 bp, Artificial Sequence
  Synthetic
ctcgtgcatctataactaccagaag

SEQ ID NO: 23150 - DNA, 23 bp, Artificial Sequence
  Synthetic
ttttgcagatgactgtctggatg

SEQ ID NO: 23151 - DNA, 24 bp, Artificial Sequence
  Synthetic
agagacagagaacgcttagtatgg

SEQ ID NO: 23152 - DNA, 22 bp, Artificial Sequence
  Synthetic
tcctccatggggtgaatattgg

SEQ ID NO: 23153 - DNA, 20 bp, Artificial Sequence
  Synthetic
ttttgggcgtaaggagcagc

SEQ ID NO: 23154 - DNA, 22 bp, Artificial Sequence
  Synthetic
tttagcatttgtacccccacca

SEQ ID NO: 23155 - DNA, 25 bp, Artificial Sequence
  Synthetic
aagcgcaaaaggtctaagtaatttc

SEQ ID NO: 23156 - DNA, 25 bp, Artificial Sequence
  Synthetic
ttaacggcgaaatatgaatcagaga

SEQ ID NO: 23157 - DNA, 24 bp, Artificial Sequence
  Synthetic
ccttaccaggttgacactatttgt

SEQ ID NO: 23158 - DNA, 25 bp, Artificial Sequence
  Synthetic
agactttatcagatgaaactgtggc

SEQ ID NO: 23159 - DNA, 20 bp, Artificial Sequence
  Synthetic
aagtcaaatggtgcagtggg

SEQ ID NO: 23160 - DNA, 23 bp, Artificial Sequence
  Synthetic
aattgggacccaccgatttatcc

SEQ ID NO: 23161 - DNA, 20 bp, Artificial Sequence
  Synthetic
acaaccgcagacgacaagcc

SEQ ID NO: 23162 - DNA, 22 bp, Artificial Sequence
  Synthetic
aagttgaaggaacaacatgggc

SEQ ID NO: 23163 - DNA, 25 bp, Artificial Sequence
  Synthetic
agaagaaggaattccagatgttggg

SEQ ID NO: 23164 - DNA, 21 bp, Artificial Sequence
  Synthetic
actcgttctgctgaccttttc

SEQ ID NO: 23165 - DNA, 24 bp, Artificial Sequence
  Synthetic
agtgataaataacaccggcctacc

SEQ ID NO: 23166 - DNA, 25 bp, Artificial Sequence
  Synthetic
tcctgaaagagaacgtttagtttgg

SEQ ID NO: 23167 - DNA, 25 bp, Artificial Sequence
  Synthetic
atgccagacatttcttttgtaagga

SEQ ID NO: 23168 - DNA, 24 bp, Artificial Sequence
  Synthetic
tcctcctcaaggattggaggatac

SEQ ID NO: 23169 - DNA, 20 bp, Artificial Sequence
  Synthetic
aacaaccggttctggtcgtt

SEQ ID NO: 23170 - DNA, 24 bp, Artificial Sequence
  Synthetic
agaagaatcccgctcttagaatga

SEQ ID NO: 23171 - DNA, 25 bp, Artificial Sequence
  Synthetic
agtacagtccattatccaaaggtgt

SEQ ID NO: 23172 - DNA, 24 bp, Artificial Sequence
  Synthetic
aatattgctcctttaatggtggca

SEQ ID NO: 23173 - DNA, 22 bp, Artificial Sequence
  Synthetic
agagcaacagtatcagcagacc

SEQ ID NO: 23174 - DNA, 23 bp, Artificial Sequence
  Synthetic
gaagagcaacagccattctaaga

SEQ ID NO: 23175 - DNA, 23 bp, Artificial Sequence
  Synthetic
tgagacactttcaaaaggatgca

SEQ ID NO: 23176 - DNA, 23 bp, Artificial Sequence
  Synthetic
cagggaatggaaaagttgacgat

SEQ ID NO: 23177 - DNA, 25 bp, Artificial Sequence
  Synthetic
acgttcgacactgttcaaataatca

SEQ ID NO: 23178 - DNA, 23 bp, Artificial Sequence
  Synthetic
agagtctgcagtattgagaggat

SEQ ID NO: 23179 - DNA, 25 bp, Artificial Sequence
  Synthetic
aacacattaactgaaagaggagtgg

SEQ ID NO: 23180 - DNA, 25 bp, Artificial Sequence
  Synthetic
tgaggcaaattctcagagaatcagg

SEQ ID NO: 23181 - DNA, 25 bp, Artificial Sequence
  Synthetic
atcaacaatcttttgtaccgagtcc

SEQ ID NO: 23182 - DNA, 25 bp, Artificial Sequence
  Synthetic
cttgccatttcagaacatagatagc

SEQ ID NO: 23183 - DNA, 20 bp, Artificial Sequence
  Synthetic
caccagaatgcacagggaga

SEQ ID NO: 23184 - DNA, 24 bp, Artificial Sequence
  Synthetic
aactgtacgaacgagtgaaaagac

SEQ ID NO: 23185 - DNA, 20 bp, Artificial Sequence
  Synthetic
acttctgcctcatcacagcc

SEQ ID NO: 23186 - DNA, 24 bp, Artificial Sequence
  Synthetic
tatcgccaagtgagaaagatcatc

SEQ ID NO: 23187 - DNA, 22 bp, Artificial Sequence
  Synthetic
gtgtggttgtacacagtgtgga

SEQ ID NO: 23188 - DNA, 23 bp, Artificial Sequence
  Synthetic
agggtggtggaattgcttaagtg

SEQ ID NO: 23189 - DNA, 23 bp, Artificial Sequence
  Synthetic
accacagtgtctaaaggaatgtg

SEQ ID NO: 23190 - DNA, 22 bp, Artificial Sequence
  Synthetic
acacagatagtaatgcagctgc

SEQ ID NO: 23191 - DNA, 21 bp, Artificial Sequence
  Synthetic
aacatgtgcagcactggaagt

SEQ ID NO: 23192 - DNA, 23 bp, Artificial Sequence
  Synthetic
actgtggaggttgtattcgatgg

SEQ ID NO: 23193 - DNA, 20 bp, Artificial Sequence
  Synthetic
ccccgccgcgaaaacgatac

SEQ ID NO: 23194 - DNA, 23 bp, Artificial Sequence
  Synthetic
tgtgttgtgtgtgtggattagtt

SEQ ID NO: 23195 - DNA, 25 bp, Artificial Sequence
  Synthetic
ttaaactactgcagacatacgtgtg

SEQ ID NO: 23196 - DNA, 23 bp, Artificial Sequence
  Synthetic
ggacatttctcctcccaccaata

SEQ ID NO: 23197 - DNA, 25 bp, Artificial Sequence
  Synthetic
aggctatagaattgcaacctttagg

SEQ ID NO: 23198 - DNA, 21 bp, Artificial Sequence
  Synthetic
ctcctgtttccaaggtggtca

SEQ ID NO: 23199 - DNA, 23 bp, Artificial Sequence
  Synthetic
tatggcagatgtagggtttggag

SEQ ID NO: 23200 - DNA, 23 bp, Artificial Sequence
  Synthetic
attggaatgttggtgtagctcca

SEQ ID NO: 23201 - DNA, 25 bp, Artificial Sequence
  Synthetic
tgtactgccaaatggtattgctaag

SEQ ID NO: 23202 - DNA, 22 bp, Artificial Sequence
  Synthetic
aaatggttcaatgggcgtatga

SEQ ID NO: 23203 - DNA, 24 bp, Artificial Sequence
  Synthetic
aaatgttgtagggaatgtgatggt

SEQ ID NO: 23204 - DNA, 22 bp, Artificial Sequence
  Synthetic
gattcctcaagaagcggcagga

SEQ ID NO: 23205 - DNA, 24 bp, Artificial Sequence
  Synthetic
caagagttgagcgacttaaagcag

SEQ ID NO: 23206 - DNA, 21 bp, Artificial Sequence
  Synthetic
tgtaggtgagcatcccaatgt

SEQ ID NO: 23207 - DNA, 25 bp, Artificial Sequence
  Synthetic
tggggacagattgtttttttatggt

SEQ ID NO: 23208 - DNA, 23 bp, Artificial Sequence
  Synthetic
tcgttagttagcagcgaatctca

SEQ ID NO: 23209 - DNA, 22 bp, Artificial Sequence
  Synthetic
attaatgcaatggactctcgca

SEQ ID NO: 23210 - DNA, 23 bp, Artificial Sequence
  Synthetic
aagcgaccacggaatatctatga

SEQ ID NO: 23211 - DNA, 25 bp, Artificial Sequence
  Synthetic
ttaccctcctattatttgcccacaa

SEQ ID NO: 23212 - DNA, 20 bp, Artificial Sequence
  Synthetic
aagctggcaagaacaacacc

SEQ ID NO: 23213 - DNA, 22 bp, Artificial Sequence
  Synthetic
atggctggatcaagtgagcagg

SEQ ID NO: 23214 - DNA, 24 bp, Artificial Sequence
  Synthetic
tcttcaaatgcatttatcgtcgct

SEQ ID NO: 23215 - DNA, 25 bp, Artificial Sequence
  Synthetic
acctaacaacaaatggaagtaatgc

SEQ ID NO: 23216 - DNA, 25 bp, Artificial Sequence
  Synthetic
aagctatcactagtatctcagggtt

SEQ ID NO: 23217 - DNA, 23 bp, Artificial Sequence
  Synthetic
atatgttccagctaggacaagca

SEQ ID NO: 23218 - DNA, 23 bp, Artificial Sequence
  Synthetic
atcaactaatatctcctcggccc

SEQ ID NO: 23219 - DNA, 22 bp, Artificial Sequence
  Synthetic
gaggaatctccagaagcatcac

SEQ ID NO: 23220 - DNA, 24 bp, Artificial Sequence
  Synthetic
aatcctcatcatggaatctcacca

SEQ ID NO: 23221 - DNA, 25 bp, Artificial Sequence
  Synthetic
atacactagagaacgatgtgcaagt

SEQ ID NO: 23222 - DNA, 23 bp, Artificial Sequence
  Synthetic
gaacagagaaaagcagtacccca

SEQ ID NO: 23223 - DNA, 21 bp, Artificial Sequence
  Synthetic
acaaagttgctcttgctcctc

SEQ ID NO: 23224 - DNA, 24 bp, Artificial Sequence
  Synthetic
aatctctacttcaatctggacgca

SEQ ID NO: 23225 - DNA, 25 bp, Artificial Sequence
  Synthetic
tgtgatagtaaccaatcaggaatcc

SEQ ID NO: 23226 - DNA, 25 bp, Artificial Sequence
  Synthetic
agaatggtatattcctcttcccagc

SEQ ID NO: 23227 - DNA, 25 bp, Artificial Sequence
  Synthetic
agtacaataggtatcaacggaatgc

SEQ ID NO: 23228 - DNA, 22 bp, Artificial Sequence
  Synthetic
aagcataccaatcacggaaagg

SEQ ID NO: 23229 - DNA, 25 bp, Artificial Sequence
  Synthetic
acccaaaaataaggttaatgccagg

SEQ ID NO: 23230 - DNA, 25 bp, Artificial Sequence
  Synthetic
atgagaatgtaatctgcaacacaac

SEQ ID NO: 23231 - DNA, 24 bp, Artificial Sequence
  Synthetic
acttactcaacagcaactgaaaga

SEQ ID NO: 23232 - DNA, 25 bp, Artificial Sequence
  Synthetic
aaacgctgttgattattaccagagc

SEQ ID NO: 23233 - DNA, 25 bp, Artificial Sequence
  Synthetic
tagacgaaacaagatcagcatcttc

SEQ ID NO: 23234 - DNA, 23 bp, Artificial Sequence
  Synthetic
cagtgttgggggattcaattaca

SEQ ID NO: 23235 - DNA, 23 bp, Artificial Sequence
  Synthetic
aagtggacttgaaacacctgacc

SEQ ID NO: 23236 - DNA, 25 bp, Artificial Sequence
  Synthetic
gtctcaaaattttaacaccggtagc

SEQ ID NO: 23237 - DNA, 22 bp, Artificial Sequence
  Synthetic
atttgggttgcaacagtttgga

SEQ ID NO: 23238 - DNA, 21 bp, Artificial Sequence
  Synthetic
tagggcatgccgatttgtttc

SEQ ID NO: 23239 - DNA, 25 bp, Artificial Sequence
  Synthetic
cgtaagcccttagattacaaacgtc

SEQ ID NO: 23240 - DNA, 21 bp, Artificial Sequence
  Synthetic
ccaagtcttggtctgttggtg

SEQ ID NO: 23241 - DNA, 25 bp, Artificial Sequence
  Synthetic
ggatacattctgcttcaatgtacgc

SEQ ID NO: 23242 - DNA, 24 bp, Artificial Sequence
  Synthetic
tgaaacttgtactattgccggtaa

SEQ ID NO: 23243 - DNA, 25 bp, Artificial Sequence
  Synthetic
acttacaatcgccaacaattattcc

SEQ ID NO: 23244 - DNA, 25 bp, Artificial Sequence
  Synthetic
tgattacagggcttttatcagtgtt

SEQ ID NO: 23245 - DNA, 25 bp, Artificial Sequence
  Synthetic
ggtttctactgttaaaattggtggc

SEQ ID NO: 23246 - DNA, 23 bp, Artificial Sequence
  Synthetic
agatgcagagtttgtagaaccag

SEQ ID NO: 23247 - DNA, 25 bp, Artificial Sequence
  Synthetic
ttcaatcagcactttctgttgtttc

SEQ ID NO: 23248 - DNA, 25 bp, Artificial Sequence
  Synthetic
tatgcagttttttaaaatgggccga

SEQ ID NO: 23249 - DNA, 22 bp, Artificial Sequence
  Synthetic
aggcgtttccttatggtacttg

SEQ ID NO: 23250 - DNA, 24 bp, Artificial Sequence
  Synthetic
cttcctcgttcatgacaatgtagc

SEQ ID NO: 23251 - DNA, 25 bp, Artificial Sequence
  Synthetic
aaccagtgtccgtaattaaagttgc

SEQ ID NO: 23252 - DNA, 23 bp, Artificial Sequence
  Synthetic
ataccagctgactacatcttgcc

SEQ ID NO: 23253 - DNA, 24 bp, Artificial Sequence
  Synthetic
agatgctgttacttttgcaacagt

SEQ ID NO: 23254 - DNA, 25 bp, Artificial Sequence
  Synthetic
gctattatagtcagtgtcgaacagc

SEQ ID NO: 23255 - DNA, 25 bp, Artificial Sequence
  Synthetic
gttcttaaatctaagtggtggctgc

SEQ ID NO: 23256 - DNA, 21 bp, Artificial Sequence
  Synthetic
tttggatgttgtgtggaagca

SEQ ID NO: 23257 - DNA, 24 bp, Artificial Sequence
  Synthetic
acacaattgtcaatggtgtgcaac

SEQ ID NO: 23258 - DNA, 24 bp, Artificial Sequence
  Synthetic
aacaactttgtcagttcgtatgct

SEQ ID NO: 23259 - DNA, 20 bp, Artificial Sequence
  Synthetic
ctggtgatgctggccattca

SEQ ID NO: 23260 - DNA, 25 bp, Artificial Sequence
  Synthetic
ttttacactacaagctgcttttggt

SEQ ID NO: 23261 - DNA, 22 bp, Artificial Sequence
  Synthetic
gtgttgaatccaatgcaggtgt

SEQ ID NO: 23262 - DNA, 21 bp, Artificial Sequence
  Synthetic
ttttgctccatggtggttgtg

SEQ ID NO: 23263 - DNA, 20 bp, Artificial Sequence
  Synthetic
tttgcgcaaaatggcacaac

SEQ ID NO: 23264 - DNA, 25 bp, Artificial Sequence
  Synthetic
ctggtgaaggttttaacatcttagc

SEQ ID NO: 23265 - DNA, 25 bp, Artificial Sequence
  Synthetic
ttatgctgctatattgaatggttgc

SEQ ID NO: 23266 - DNA, 23 bp, Artificial Sequence
  Synthetic
taaccctggttttcttactccgt

SEQ ID NO: 23267 - DNA, 25 bp, Artificial Sequence
  Synthetic
gcacttatttgttctcactcattgc

SEQ ID NO: 23268 - DNA, 25 bp, Artificial Sequence
  Synthetic
tatggttgctaatggtttgaatgca

SEQ ID NO: 23269 - DNA, 21 bp, Artificial Sequence
  Synthetic
aacttgtgtgacgaccctgaa

SEQ ID NO: 23270 - DNA, 23 bp, Artificial Sequence
  Synthetic
tgctgcagctatgtacaaagaag

SEQ ID NO: 23271 - DNA, 25 bp, Artificial Sequence
  Synthetic
agatgttacaaaggaaaaccaggaa

SEQ ID NO: 23272 - DNA, 24 bp, Artificial Sequence
  Synthetic
tacagttgaattggaaccaccttg

SEQ ID NO: 23273 - DNA, 22 bp, Artificial Sequence
  Synthetic
gactaatggttctggtagcggt

SEQ ID NO: 23274 - DNA, 20 bp, Artificial Sequence
  Synthetic
ctagtgccgctcgactagag

SEQ ID NO: 23275 - DNA, 25 bp, Artificial Sequence
  Synthetic
ggagatattggttcttactggttgt

SEQ ID NO: 23276 - DNA, 23 bp, Artificial Sequence
  Synthetic
tgatgcctgttatgggtatgact

SEQ ID NO: 23277 - DNA, 21 bp, Artificial Sequence
  Synthetic
agttgctactgctggttacca

SEQ ID NO: 23278 - DNA, 25 bp, Artificial Sequence
  Synthetic
tttcgatgagggttcagaattaaca

SEQ ID NO: 23279 - DNA, 25 bp, Artificial Sequence
  Synthetic
tgtctgaaatccatagtagctacca

SEQ ID NO: 23280 - DNA, 25 bp, Artificial Sequence
  Synthetic
agccactttgtattatcagaatggt

SEQ ID NO: 23281 - DNA, 25 bp, Artificial Sequence
  Synthetic
ttgtctaagcatcctaaacctgagt

SEQ ID NO: 23282 - DNA, 23 bp, Artificial Sequence
  Synthetic
tttgggttccatggacattgatg

SEQ ID NO: 23283 - DNA, 25 bp, Artificial Sequence
  Synthetic
atacggttacttacaaatccactgc

SEQ ID NO: 23284 - DNA, 20 bp, Artificial Sequence
  Synthetic
cgctctgtgcaaaagctgtc

SEQ ID NO: 23285 - DNA, 21 bp, Artificial Sequence
  Synthetic
gcttccagctcctagagttct

SEQ ID NO: 23286 - DNA, 25 bp, Artificial Sequence
  Synthetic
tttaggcttacaaactcagacagtg

SEQ ID NO: 23287 - DNA, 21 bp, Artificial Sequence
  Synthetic
aagactagtggtgacttggct

SEQ ID NO: 23288 - DNA, 25 bp, Artificial Sequence
  Synthetic
tgtacctctacaagttggtttttcc

SEQ ID NO: 23289 - DNA, 23 bp, Artificial Sequence
  Synthetic
acattgccaatgtggtactgttg

SEQ ID NO: 23290 - DNA, 20 bp, Artificial Sequence
  Synthetic
gtcgcactgtgcagagtcat

SEQ ID NO: 23291 - DNA, 21 bp, Artificial Sequence
  Synthetic
tcatgcatttcacactcctgc

SEQ ID NO: 23292 - DNA, 25 bp, Artificial Sequence
  Synthetic
agagaacattgcttttaacgttgtt

SEQ ID NO: 23293 - DNA, 25 bp, Artificial Sequence
  Synthetic
ctgtttgtggttatacagactttgc

SEQ ID NO: 23294 - DNA, 20 bp, Artificial Sequence
  Synthetic
acaagactttttgcctcgca

SEQ ID NO: 23295 - DNA, 25 bp, Artificial Sequence
  Synthetic
ccaaggttcatgaggtcataattga

SEQ ID NO: 23296 - DNA, 22 bp, Artificial Sequence
  Synthetic
tggctctgattatggtgttgca

SEQ ID NO: 23297 - DNA, 25 bp, Artificial Sequence
  Synthetic
aactccactgttatgagtttgtcct

SEQ ID NO: 23298 - DNA, 25 bp, Artificial Sequence
  Synthetic
aaatgtatttgctgttgagagtggt

SEQ ID NO: 23299 - DNA, 20 bp, Artificial Sequence
  Synthetic
ctgcttttgtgggtgcacta

SEQ ID NO: 23300 - DNA, 24 bp, Artificial Sequence
  Synthetic
acgtttattgtgttgtacgttgac

SEQ ID NO: 23301 - DNA, 23 bp, Artificial Sequence
  Synthetic
ggcaccatctactctatcactcc

SEQ ID NO: 23302 - DNA, 23 bp, Artificial Sequence
  Synthetic
agtgtttcagctatcgtcacagc

SEQ ID NO: 23303 - DNA, 20 bp, Artificial Sequence
  Synthetic
agcgtcatacctagcttgcc

SEQ ID NO: 23304 - DNA, 22 bp, Artificial Sequence
  Synthetic
atgttgcattgcagactgatgt

SEQ ID NO: 23305 - DNA, 25 bp, Artificial Sequence
  Synthetic
ctgctttgaatgtattcgtttctca

SEQ ID NO: 23306 - DNA, 25 bp, Artificial Sequence
  Synthetic
tcacatctcgcataatgtttgaacc

SEQ ID NO: 23307 - DNA, 25 bp, Artificial Sequence
  Synthetic
acactgttcaaaaattgcaaactct

SEQ ID NO: 23308 - DNA, 25 bp, Artificial Sequence
  Synthetic
tacagtaatggctctaggtttgttc

SEQ ID NO: 23309 - DNA, 22 bp, Artificial Sequence
  Synthetic
ttttccatacagcttggcactg

SEQ ID NO: 23310 - DNA, 25 bp, Artificial Sequence
  Synthetic
aagctttgtttcacttgccatatgt

SEQ ID NO: 23311 - DNA, 23 bp, Artificial Sequence
  Synthetic
aattgggattctaattgggcctt

SEQ ID NO: 23312 - DNA, 25 bp, Artificial Sequence
  Synthetic
acgagtaaaacacggtgatttttct

SEQ ID NO: 23313 - DNA, 20 bp, Artificial Sequence
  Synthetic
gaaagggcaaacgggtggat

SEQ ID NO: 23314 - DNA, 23 bp, Artificial Sequence
  Synthetic
tttgacaagcctcaggaaaaaga

SEQ ID NO: 23315 - DNA, 21 bp, Artificial Sequence
  Synthetic
ccagagaccttgaccacaact

SEQ ID NO: 23316 - DNA, 21 bp, Artificial Sequence
  Synthetic
aacttcacctgcaactgctga

SEQ ID NO: 23317 - DNA, 22 bp, Artificial Sequence
  Synthetic
actgaacctaggtgaacgctag

SEQ ID NO: 23318 - DNA, 25 bp, Artificial Sequence
  Synthetic
cttttagtatttggcttccgtcctt

SEQ ID NO: 23319 - DNA, 20 bp, Artificial Sequence
  Synthetic
ggaaatccccatgcactgtt

SEQ ID NO: 23320 - DNA, 21 bp, Artificial Sequence
  Synthetic
aatggggaacaggagcagcag

SEQ ID NO: 23321 - DNA, 25 bp, Artificial Sequence
  Synthetic
agaagcaaactatgttaaaccacca

SEQ ID NO: 23322 - DNA, 25 bp, Artificial Sequence
  Synthetic
aggacaatggataaaaaagtgtggg

SEQ ID NO: 23323 - DNA, 25 bp, Artificial Sequence
  Synthetic
agtgctatatgacaacgaggaaaat

SEQ ID NO: 23324 - DNA, 21 bp, Artificial Sequence
  Synthetic
cactatccgtcgagacttgca

SEQ ID NO: 23325 - DNA, 22 bp, Artificial Sequence
  Synthetic
aaatggattgccagtgtggtgt

SEQ ID NO: 23326 - DNA, 22 bp, Artificial Sequence
  Synthetic
gcttccattgttcccctggagg

SEQ ID NO: 23327 - DNA, 22 bp, Artificial Sequence
  Synthetic
cagccgcagaggttattattgg

SEQ ID NO: 23328 - DNA, 22 bp, Artificial Sequence
  Synthetic
cgcctttgaggaggaggtaacc

SEQ ID NO: 23329 - DNA, 21 bp, Artificial Sequence
  Synthetic
atctcctgccttggaaactgt

SEQ ID NO: 23330 - DNA, 25 bp, Artificial Sequence
  Synthetic
tccggtaaattatatttgccaccct

SEQ ID NO: 23331 - DNA, 22 bp, Artificial Sequence
  Synthetic
aatcctgagtctgaacgtttgg

SEQ ID NO: 23332 - DNA, 25 bp, Artificial Sequence
  Synthetic
tggtgacaagattccagaacaaaat

SEQ ID NO: 23333 - DNA, 22 bp, Artificial Sequence
  Synthetic
ccatctattggggatgcgtaca

SEQ ID NO: 23334 - DNA, 21 bp, Artificial Sequence
  Synthetic
ggcagtttggcttcgaggtgc

SEQ ID NO: 23335 - DNA, 19 bp, Artificial Sequence
  Synthetic
tcctgtcacaccccaccgt

SEQ ID NO: 23336 - DNA, 21 bp, Artificial Sequence
  Synthetic
agcatgtgccccaatcttgga

SEQ ID NO: 23337 - DNA, 21 bp, Artificial Sequence
  Synthetic
tccgactacctcccggagatg

SEQ ID NO: 23338 - DNA, 19 bp, Artificial Sequence
  Synthetic
ccagagacggtgttgcgcc

SEQ ID NO: 23339 - DNA, 18 bp, Artificial Sequence
  Synthetic
tgggtgcaaggctcgtgc

SEQ ID NO: 23340 - DNA, 20 bp, Artificial Sequence
  Synthetic
acacccagttatgcagtgcc

SEQ ID NO: 23341 - DNA, 21 bp, Artificial Sequence
  Synthetic
gtaggtgcctccagagcccct

SEQ ID NO: 23342 - DNA, 19 bp, Artificial Sequence
  Synthetic
ccggtatcgggccagaggt

SEQ ID NO: 23343 - DNA, 21 bp, Artificial Sequence
  Synthetic
tccgtagaagggtcctcgtcc

SEQ ID NO: 23344 - DNA, 19 bp, Artificial Sequence
  Synthetic
tgggccctcaagtccagcc

SEQ ID NO: 23345 - DNA, 20 bp, Artificial Sequence
  Synthetic
gggccaagaacccagacgag

SEQ ID NO: 23346 - DNA, 22 bp, Artificial Sequence
  Synthetic
aagccagacagcagccaattgt

SEQ ID NO: 23347 - DNA, 19 bp, Artificial Sequence
  Synthetic
accggtcgcccagtcctac

SEQ ID NO: 23348 - DNA, 20 bp, Artificial Sequence
  Synthetic
cccgtcttactgcccagcct

SEQ ID NO: 23349 - DNA, 21 bp, Artificial Sequence
  Synthetic
cgagttacgctccttggaggg

SEQ ID NO: 23350 - DNA, 19 bp, Artificial Sequence
  Synthetic
tgaccctcgcgccccatct

SEQ ID NO: 23351 - DNA, 22 bp, Artificial Sequence
  Synthetic
cacaaagctgtgtgacggtccc

SEQ ID NO: 23352 - DNA, 19 bp, Artificial Sequence
  Synthetic
cggaagccctcgtttcggc

SEQ ID NO: 23353 - DNA, 20 bp, Artificial Sequence
  Synthetic
gtggattcgggggaagctgg

SEQ ID NO: 23354 - DNA, 18 bp, Artificial Sequence
  Synthetic
tcttgagctggcgcgggt

SEQ ID NO: 23355 - DNA, 20 bp, Artificial Sequence
  Synthetic
gccagagccaacctcagctc

SEQ ID NO: 23356 - DNA, 19 bp, Artificial Sequence
  Synthetic
gcaccaccatcgtccacga

SEQ ID NO: 23357 - DNA, 20 bp, Artificial Sequence
  Synthetic
gaccggacggccacgttgtg

SEQ ID NO: 23358 - DNA, 21 bp, Artificial Sequence
  Synthetic
cgtcgtccaggaccaagggga

SEQ ID NO: 23359 - DNA, 20 bp, Artificial Sequence
  Synthetic
ccgaagggaggtgatgggga

SEQ ID NO: 23360 - DNA, 22 bp, Artificial Sequence
  Synthetic
gagggggaatcgtcggttaggg

SEQ ID NO: 23361 - DNA, 22 bp, Artificial Sequence
  Synthetic
aacgctcttttccttcaccgct

SEQ ID NO: 23362 - DNA, 19 bp, Artificial Sequence
  Synthetic
gtggccaggcccaacgact

SEQ ID NO: 23363 - DNA, 22 bp, Artificial Sequence
  Synthetic
agaaggggctgtggacataggc

SEQ ID NO: 23364 - DNA, 19 bp, Artificial Sequence
  Synthetic
gacacgccctggtcggact

SEQ ID NO: 23365 - DNA, 19 bp, Artificial Sequence
  Synthetic
ccggcagccccttcatcct

SEQ ID NO: 23366 - DNA, 19 bp, Artificial Sequence
  Synthetic
cgctgcctggtgaatgcgc

SEQ ID NO: 23367 - DNA, 19 bp, Artificial Sequence
  Synthetic
gctcggtagcagcggactc

SEQ ID NO: 23368 - DNA, 21 bp, Artificial Sequence
  Synthetic
cctgccattcccagccactcc

SEQ ID NO: 23369 - DNA, 20 bp, Artificial Sequence
  Synthetic
gagggccagatgcaggagct

SEQ ID NO: 23370 - DNA, 19 bp, Artificial Sequence
  Synthetic
ttcagctgctggacacgca

SEQ ID NO: 23371 - DNA, 19 bp, Artificial Sequence
  Synthetic
ggcgaggcgttgtggcaca

SEQ ID NO: 23372 - DNA, 22 bp, Artificial Sequence
  Synthetic
gccaggtggattttgagctccg

SEQ ID NO: 23373 - DNA, 22 bp, Artificial Sequence
  Synthetic
ggcatagaggcctaggtccaca

SEQ ID NO: 23374 - DNA, 22 bp, Artificial Sequence
  Synthetic
agcccaggaccagttctactcc

SEQ ID NO: 23375 - DNA, 24 bp, Artificial Sequence
  Synthetic
agatggggatatttaaaaggggca

SEQ ID NO: 23376 - DNA, 19 bp, Artificial Sequence
  Synthetic
acctacgcccttgccccct

SEQ ID NO: 23377 - DNA, 21 bp, Artificial Sequence
  Synthetic
ctcccagtcagatgtccgtgc

SEQ ID NO: 23378 - DNA, 19 bp, Artificial Sequence
  Synthetic
gccaggatgccaccgaggt

SEQ ID NO: 23379 - DNA, 20 bp, Artificial Sequence
  Synthetic
acccggtccttgtgactgct

SEQ ID NO: 23380 - DNA, 22 bp, Artificial Sequence
  Synthetic
atgacccaacgaaacagtcccg

SEQ ID NO: 23381 - DNA, 19 bp, Artificial Sequence
  Synthetic
catggtcgggctcgggaga

SEQ ID NO: 23382 - DNA, 24 bp, Artificial Sequence
  Synthetic
ggggcattaactaagcttatgagc

SEQ ID NO: 23383 - DNA, 22 bp, Artificial Sequence
  Synthetic
ccagtttgccccatcgtttccc

SEQ ID NO: 23384 - DNA, 20 bp, Artificial Sequence
  Synthetic
cgaggatgaagcaacccccg

SEQ ID NO: 23385 - DNA, 20 bp, Artificial Sequence
  Synthetic
gctccgccacgtattccccg

SEQ ID NO: 23386 - DNA, 22 bp, Artificial Sequence
  Synthetic
tctctcaggacctcaaaggcgg

SEQ ID NO: 23387 - DNA, 20 bp, Artificial Sequence
  Synthetic
atgtggcggctcttgaaccc

SEQ ID NO: 23388 - DNA, 19 bp, Artificial Sequence
  Synthetic
cccggccatctttgccgga

SEQ ID NO: 23389 - DNA, 20 bp, Artificial Sequence
  Synthetic
ggggacacggagcctgacca

SEQ ID NO: 23390 - DNA, 22 bp, Artificial Sequence
  Synthetic
gatctcgtcccagttttgcggc

SEQ ID NO: 23391 - DNA, 19 bp, Artificial Sequence
  Synthetic
gcccccggccatactccaa

SEQ ID NO: 23392 - DNA, 19 bp, Artificial Sequence
  Synthetic
gcccatcatcccccgagca

SEQ ID NO: 23393 - DNA, 22 bp, Artificial Sequence
  Synthetic
catcgcaatcatgaagtcctcc

SEQ ID NO: 23394 - DNA, 20 bp, Artificial Sequence
  Synthetic
ggaccacgggtgtcaccagc

SEQ ID NO: 23395 - DNA, 22 bp, Artificial Sequence
  Synthetic
aatcccatgtcagggttggggt

SEQ ID NO: 23396 - DNA, 18 bp, Artificial Sequence
  Synthetic
cccgtgccgcagcgtaaa

SEQ ID NO: 23397 - DNA, 22 bp, Artificial Sequence
  Synthetic
gtgacgatgccatcaaccagct

SEQ ID NO: 23398 - DNA, 19 bp, Artificial Sequence
  Synthetic
aaacaccccccccactggc

SEQ ID NO: 23399 - DNA, 21 bp, Artificial Sequence
  Synthetic
ggggcacctaaagacccccct

SEQ ID NO: 23400 - DNA, 22 bp, Artificial Sequence
  Synthetic
tgtcttccacaccatccacagc

SEQ ID NO: 23401 - DNA, 19 bp, Artificial Sequence
  Synthetic
cggagccccaagccacctt

SEQ ID NO: 23402 - DNA, 20 bp, Artificial Sequence
  Synthetic
tcttcatacaggcccgcaat

SEQ ID NO: 23403 - DNA, 20 bp, Artificial Sequence
  Synthetic
cctggtccagcgttgcctcc

SEQ ID NO: 23404 - DNA, 22 bp, Artificial Sequence
  Synthetic
ttggtatagggcaaggttgggc

SEQ ID NO: 23405 - DNA, 19 bp, Artificial Sequence
  Synthetic
ccttggggtagccgacggt

SEQ ID NO: 23406 - DNA, 22 bp, Artificial Sequence
  Synthetic
tgggcagcatgcttggataact

SEQ ID NO: 23407 - DNA, 19 bp, Artificial Sequence
  Synthetic
ccgaaagggccaggtcgga

SEQ ID NO: 23408 - DNA, 21 bp, Artificial Sequence
  Synthetic
atttccgtcagccagggtgac

SEQ ID NO: 23409 - DNA, 20 bp, Artificial Sequence
  Synthetic
tcacctggatcccctcaccg

SEQ ID NO: 23410 - DNA, 22 bp, Artificial Sequence
  Synthetic
ggatcgattggaaaagggccca

SEQ ID NO: 23411 - DNA, 19 bp, Artificial Sequence
  Synthetic
gccagcaggtaaggcaggc

SEQ ID NO: 23412 - DNA, 22 bp, Artificial Sequence
  Synthetic
ctagattcagcgatcccccggt

SEQ ID NO: 23413 - DNA, 19 bp, Artificial Sequence
  Synthetic
gagcttgcggctgagctcc

SEQ ID NO: 23414 - DNA, 20 bp, Artificial Sequence
  Synthetic
ctccagggagatgggggcca

SEQ ID NO: 23415 - DNA, 22 bp, Artificial Sequence
  Synthetic
cagctgctgcttgtcgaggatg

SEQ ID NO: 23416 - DNA, 22 bp, Artificial Sequence
  Synthetic
acacggcgtacatgtcgatggg

SEQ ID NO: 23417 - DNA, 20 bp, Artificial Sequence
  Synthetic
cccctgtcgaccagaggacg

SEQ ID NO: 23418 - DNA, 19 bp, Artificial Sequence
  Synthetic
gcaggcacagggtctcggt

SEQ ID NO: 23419 - DNA, 20 bp, Artificial Sequence
  Synthetic
ccagcagggcacagaggtga

SEQ ID NO: 23420 - DNA, 22 bp, Artificial Sequence
  Synthetic
ttccttcagcgtctatgcccag

SEQ ID NO: 23421 - DNA, 20 bp, Artificial Sequence
  Synthetic
cgggcctctggaccctcaca

SEQ ID NO: 23422 - DNA, 20 bp, Artificial Sequence
  Synthetic
agatgtagccgcacggaccc

SEQ ID NO: 23423 - DNA, 19 bp, Artificial Sequence
  Synthetic
tgagccggcagaggaccag

SEQ ID NO: 23424 - DNA, 20 bp, Artificial Sequence
  Synthetic
cgggtgaggcggctaagagg

SEQ ID NO: 23425 - DNA, 25 bp, Artificial Sequence
  Synthetic
ttcgagtatccttctttgatgttcg

SEQ ID NO: 23426 - DNA, 24 bp, Artificial Sequence
  Synthetic
cttagtgaagagtctttgtcacca

SEQ ID NO: 23427 - DNA, 20 bp, Artificial Sequence
  Synthetic
cccgcgattggaagctgtat

SEQ ID NO: 23428 - DNA, 25 bp, Artificial Sequence
  Synthetic
ttcctttaagttcggtgattatcca

SEQ ID NO: 23429 - DNA, 21 bp, Artificial Sequence
  Synthetic
tgtcccccaaggaagagctac

SEQ ID NO: 23430 - DNA, 25 bp, Artificial Sequence
  Synthetic
ttccacttctcttagttctcaaagg

SEQ ID NO: 23431 - DNA, 20 bp, Artificial Sequence
  Synthetic
tgcaagcaggcccatagatg

SEQ ID NO: 23432 - DNA, 25 bp, Artificial Sequence
  Synthetic
acacctttagacagagttcagagag

SEQ ID NO: 23433 - DNA, 22 bp, Artificial Sequence
  Synthetic
cagaacggttgcttatggttgg

SEQ ID NO: 23434 - DNA, 25 bp, Artificial Sequence
  Synthetic
tgagtcttttcaacaagacagagct

SEQ ID NO: 23435 - DNA, 24 bp, Artificial Sequence
  Synthetic
gatgttattccagcagaaaagcct

SEQ ID NO: 23436 - DNA, 25 bp, Artificial Sequence
  Synthetic
ctgaagccatttgcacttatcttct

SEQ ID NO: 23437 - DNA, 21 bp, Artificial Sequence
  Synthetic
ttcaaccgacactgttgacac

SEQ ID NO: 23438 - DNA, 20 bp, Artificial Sequence
  Synthetic
gctgagggagcaattgagct

SEQ ID NO: 23439 - DNA, 23 bp, Artificial Sequence
  Synthetic
ccttgtactgtggggtattcatc

SEQ ID NO: 23440 - DNA, 20 bp, Artificial Sequence
  Synthetic
ttcgcactgagtagaggctt

SEQ ID NO: 23441 - DNA, 20 bp, Artificial Sequence
  Synthetic
ttgaagggggatggactgga

SEQ ID NO: 23442 - DNA, 25 bp, Artificial Sequence
  Synthetic
ctatcagattctggcgatctactca

SEQ ID NO: 23443 - DNA, 23 bp, Artificial Sequence
  Synthetic
aggtggttatttgatcgttggga

SEQ ID NO: 23444 - DNA, 22 bp, Artificial Sequence
  Synthetic
atggactctgtagtagctgtgc

SEQ ID NO: 23445 - DNA, 20 bp, Artificial Sequence
  Synthetic
attgtgcagacactgtgggt

SEQ ID NO: 23446 - DNA, 20 bp, Artificial Sequence
  Synthetic
gaggcagacttcgccatgag

SEQ ID NO: 23447 - DNA, 21 bp, Artificial Sequence
  Synthetic
aaactcccgcgaactgttttg

SEQ ID NO: 23448 - DNA, 21 bp, Artificial Sequence
  Synthetic
ctcagggaactaagggcttgg

SEQ ID NO: 23449 - DNA, 24 bp, Artificial Sequence
  Synthetic
aacgtaggcaaaagtagagaaact

SEQ ID NO: 23450 - DNA, 25 bp, Artificial Sequence
  Synthetic
ttgatgaagctaccattgcatatca

SEQ ID NO: 23451 - DNA, 23 bp, Artificial Sequence
  Synthetic
aaaaggctttggacacagttaga

SEQ ID NO: 23452 - DNA, 21 bp, Artificial Sequence
  Synthetic
taccaacctgtacctccgttg

SEQ ID NO: 23453 - DNA, 20 bp, Artificial Sequence
  Synthetic
cgccaacaacatcgcgactc

SEQ ID NO: 23454 - DNA, 21 bp, Artificial Sequence
  Synthetic
gacaggcgaaggggaagggga

SEQ ID NO: 23455 - DNA, 22 bp, Artificial Sequence
  Synthetic
agtactacgtggtcatgggtag

SEQ ID NO: 23456 - DNA, 23 bp, Artificial Sequence
  Synthetic
cgtactaaacgtgcctctgttac

SEQ ID NO: 23457 - DNA, 21 bp, Artificial Sequence
  Synthetic
agttcgccctggggtgatacc

SEQ ID NO: 23458 - DNA, 22 bp, Artificial Sequence
  Synthetic
ggctcgtctgccattttagagg

SEQ ID NO: 23459 - DNA, 23 bp, Artificial Sequence
  Synthetic
acagaaacacctcagggatatgt

SEQ ID NO: 23460 - DNA, 20 bp, Artificial Sequence
  Synthetic
acctgatggtttggaggtgg

SEQ ID NO: 23461 - DNA, 25 bp, Artificial Sequence
  Synthetic
gtgggtcatccatattatgatgtcc

SEQ ID NO: 23462 - DNA, 25 bp, Artificial Sequence
  Synthetic
ggttagagacacagaaaactctagc

SEQ ID NO: 23463 - DNA, 25 bp, Artificial Sequence
  Synthetic
gtgatcaacaacaacgaacaatagc

SEQ ID NO: 23464 - DNA, 21 bp, Artificial Sequence
  Synthetic
cttctgtatgcctcttgggga

SEQ ID NO: 23465 - DNA, 20 bp, Artificial Sequence
  Synthetic
cctgagctcacctatgtccg

SEQ ID NO: 23466 - DNA, 24 bp, Artificial Sequence
  Synthetic
ggagatcccaaaagattttcaacg

SEQ ID NO: 23467 - DNA, 21 bp, Artificial Sequence
  Synthetic
agtctgctcctaagcctgaaa

SEQ ID NO: 23468 - DNA, 24 bp, Artificial Sequence
  Synthetic
cttccctgaaggttgagacaattt

SEQ ID NO: 23469 - DNA, 23 bp, Artificial Sequence
  Synthetic
aaatccatctacgtgcatttcct

SEQ ID NO: 23470 - DNA, 24 bp, Artificial Sequence
  Synthetic
aacggtttcaataaaaagctgtgc

SEQ ID NO: 23471 - DNA, 20 bp, Artificial Sequence
  Synthetic
gtacagctcacagttggcgt

SEQ ID NO: 23472 - DNA, 23 bp, Artificial Sequence
  Synthetic
caaggcagcgtggaattatacaa

SEQ ID NO: 23473 - DNA, 22 bp, Artificial Sequence
  Synthetic
gatctttatgctctgggggttg

SEQ ID NO: 23474 - DNA, 25 bp, Artificial Sequence
  Synthetic
tctgtttctgtctataaccgaagtc

SEQ ID NO: 23475 - DNA, 20 bp, Artificial Sequence
  Synthetic
gctgttgccgagggaagaaa

SEQ ID NO: 23476 - DNA, 21 bp, Artificial Sequence
  Synthetic
ttgcctgaatgagagtggact

SEQ ID NO: 23477 - DNA, 23 bp, Artificial Sequence
  Synthetic
tcaaacagcatgatgtccgatag

SEQ ID NO: 23478 - DNA, 24 bp, Artificial Sequence
  Synthetic
ataccctgtcagaaatacacgagc

SEQ ID NO: 23479 - DNA, 20 bp, Artificial Sequence
  Synthetic
gcagactttctgggggagga

SEQ ID NO: 23480 - DNA, 23 bp, Artificial Sequence
  Synthetic
tgatgagttgcgtaattggatgc

SEQ ID NO: 23481 - DNA, 20 bp, Artificial Sequence
  Synthetic
tgcttgcgaaaggtgtgtac

SEQ ID NO: 23482 - DNA, 20 bp, Artificial Sequence
  Synthetic
aaaggagaacctcgagcctt

SEQ ID NO: 23483 - DNA, 21 bp, Artificial Sequence
  Synthetic
ttagctcccaggttacgtcat

SEQ ID NO: 23484 - DNA, 25 bp, Artificial Sequence
  Synthetic
tatcgatgtttctcgcttaacagaa

SEQ ID NO: 23485 - DNA, 22 bp, Artificial Sequence
  Synthetic
ccgctttcctgtgtgtaatcat

SEQ ID NO: 23486 - DNA, 25 bp, Artificial Sequence
  Synthetic
gatcttcagttacaacttgacagct

SEQ ID NO: 23487 - DNA, 22 bp, Artificial Sequence
  Synthetic
aacgacctcggtacaaaaaccc

SEQ ID NO: 23488 - DNA, 21 bp, Artificial Sequence
  Synthetic
gcaaaacatctccttcctgca

SEQ ID NO: 23489 - DNA, 20 bp, Artificial Sequence
  Synthetic
gaagctgacttcgccgatct

SEQ ID NO: 23490 - DNA, 21 bp, Artificial Sequence
  Synthetic
cgtatccttgccggtattcac

SEQ ID NO: 23491 - DNA, 22 bp, Artificial Sequence
  Synthetic
tgcacaagctttactgaacact

SEQ ID NO: 23492 - DNA, 21 bp, Artificial Sequence
  Synthetic
cactgttcgcggttacaaacc

SEQ ID NO: 23493 - DNA, 20 bp, Artificial Sequence
  Synthetic
tctagggatttggcctccac

SEQ ID NO: 23494 - DNA, 21 bp, Artificial Sequence
  Synthetic
aggtttagggcttcttcctgc

SEQ ID NO: 23495 - DNA, 23 bp, Artificial Sequence
  Synthetic
caagtagcgaaaaatccaacagc

SEQ ID NO: 23496 - DNA, 20 bp, Artificial Sequence
  Synthetic
ctgctcagctcttgcggtta

SEQ ID NO: 23497 - DNA, 24 bp, Artificial Sequence
  Synthetic
tttgtcacgaatatagccactgat

SEQ ID NO: 23498 - DNA, 24 bp, Artificial Sequence
  Synthetic
agatcctctaaatttgaacctccg

SEQ ID NO: 23499 - DNA, 23 bp, Artificial Sequence
  Synthetic
tccagacatagcaacaatgacag

SEQ ID NO: 23500 - DNA, 25 bp, Artificial Sequence
  Synthetic
tgatggttacttcctcaaaacaaga

SEQ ID NO: 23501 - DNA, 20 bp, Artificial Sequence
  Synthetic
tcagaaccctgacggattgt

SEQ ID NO: 23502 - DNA, 20 bp, Artificial Sequence
  Synthetic
ggctgcatcgtctcgagaac

SEQ ID NO: 23503 - DNA, 25 bp, Artificial Sequence
  Synthetic
tctccagcagcaaaaactaaaattc

SEQ ID NO: 23504 - DNA, 24 bp, Artificial Sequence
  Synthetic
tgtacggaagaagaattgaggtct

SEQ ID NO: 23505 - DNA, 20 bp, Artificial Sequence
  Synthetic
caacgttctctcctgcacga

SEQ ID NO: 23506 - DNA, 23 bp, Artificial Sequence
  Synthetic
caagtagtcattgctatgctcga

SEQ ID NO: 23507 - DNA, 20 bp, Artificial Sequence
  Synthetic
agccgataatgctcgctcac

SEQ ID NO: 23508 - DNA, 23 bp, Artificial Sequence
  Synthetic
gtccttcctgtttagggaaacga

SEQ ID NO: 23509 - DNA, 23 bp, Artificial Sequence
  Synthetic
cattctgtggcttctgcattaga

SEQ ID NO: 23510 - DNA, 24 bp, Artificial Sequence
  Synthetic
tacgatccaaattgagaaccttgc

SEQ ID NO: 23511 - DNA, 24 bp, Artificial Sequence
  Synthetic
tcttactagctccttgtcgagaac

SEQ ID NO: 23512 - DNA, 20 bp, Artificial Sequence
  Synthetic
aatgccgctcgagtcaatgt

SEQ ID NO: 23513 - DNA, 20 bp, Artificial Sequence
  Synthetic
cgacaacccacgatcttgct

SEQ ID NO: 23514 - DNA, 20 bp, Artificial Sequence
  Synthetic
tcgctcccactaatgcaact

SEQ ID NO: 23515 - DNA, 24 bp, Artificial Sequence
  Synthetic
aaacagtgaggacgacaaagtaaa

SEQ ID NO: 23516 - DNA, 24 bp, Artificial Sequence
  Synthetic
gcaatcgctaaaacaatcgattgc

SEQ ID NO: 23517 - DNA, 25 bp, Artificial Sequence
  Synthetic
gtaggtaaaacctcgtttggtcaac

SEQ ID NO: 23518 - DNA, 20 bp, Artificial Sequence
  Synthetic
caggctgcacaccatcacta

SEQ ID NO: 23519 - DNA, 23 bp, Artificial Sequence
  Synthetic
ggaactgaccctataaggaatgc

SEQ ID NO: 23520 - DNA, 23 bp, Artificial Sequence
  Synthetic
gacaaccatttttgctttgctgt

SEQ ID NO: 23521 - DNA, 24 bp, Artificial Sequence
  Synthetic
cgatcaaatcgcaaacaaacactt

SEQ ID NO: 23522 - DNA, 22 bp, Artificial Sequence
  Synthetic
gcgaacgtttacaaatggctcc

SEQ ID NO: 23523 - DNA, 25 bp, Artificial Sequence
  Synthetic
atctgtgcagcttaaaacctaatgt

SEQ ID NO: 23524 - DNA, 20 bp, Artificial Sequence
  Synthetic
ggcttctgtcaccttgctca

SEQ ID NO: 23525 - DNA, 20 bp, Artificial Sequence
  Synthetic
ccgcacaagaaagccctctt

SEQ ID NO: 23526 - DNA, 25 bp, Artificial Sequence
  Synthetic
ctgtcaattctacattatgtgcagc

SEQ ID NO: 23527 - DNA, 24 bp, Artificial Sequence
  Synthetic
gaagctggttctacaacagaaact

SEQ ID NO: 23528 - DNA, 22 bp, Artificial Sequence
  Synthetic
gctcaaagtccaaaaaaacgca

SEQ ID NO: 23529 - DNA, 20 bp, Artificial Sequence
  Synthetic
gcctgaccccagaaaccatt

SEQ ID NO: 23530 - DNA, 23 bp, Artificial Sequence
  Synthetic
tcgtttccttttccaggttcatt

SEQ ID NO: 23531 - DNA, 25 bp, Artificial Sequence
  Synthetic
ttaggtcctgtagctttagactcat

SEQ ID NO: 23532 - DNA, 20 bp, Artificial Sequence
  Synthetic
aaggcactattcgttgcacc

SEQ ID NO: 23533 - DNA, 21 bp, Artificial Sequence
  Synthetic
aatcacaatgcgctcccattt

SEQ ID NO: 23534 - DNA, 24 bp, Artificial Sequence
  Synthetic
agaagcaaggatgaggttttctgt

SEQ ID NO: 23535 - DNA, 20 bp, Artificial Sequence
  Synthetic
gcccctaaaacccgacaaag

SEQ ID NO: 23536 - DNA, 22 bp, Artificial Sequence
  Synthetic
aaaagcatctaggagctcccca

SEQ ID NO: 23537 - DNA, 20 bp, Artificial Sequence
  Synthetic
cacaggagcaaccacgaaga

SEQ ID NO: 23538 - DNA, 25 bp, Artificial Sequence
  Synthetic
acctctctgtaagcaaatactgaca

SEQ ID NO: 23539 - DNA, 20 bp, Artificial Sequence
  Synthetic
cgaagcggtgaatgcatgaa

SEQ ID NO: 23540 - DNA, 25 bp, Artificial Sequence
  Synthetic
actggaaaagctacaatggattgta

SEQ ID NO: 23541 - DNA, 21 bp, Artificial Sequence
  Synthetic
tctgccatcaaagcatttcga

SEQ ID NO: 23542 - DNA, 20 bp, Artificial Sequence
  Synthetic
aatttggcggctggtaatcc

SEQ ID NO: 23543 - DNA, 20 bp, Artificial Sequence
  Synthetic
ttccgaccgagcaatctcag

SEQ ID NO: 23544 - DNA, 25 bp, Artificial Sequence
  Synthetic
caacacttttttaaggcatcttcca

SEQ ID NO: 23545 - DNA, 22 bp, Artificial Sequence
  Synthetic
ccaaagcgttcatatctcggac

SEQ ID NO: 23546 - DNA, 20 bp, Artificial Sequence
  Synthetic
aagcaaccttgacgggcatt

SEQ ID NO: 23547 - DNA, 21 bp, Artificial Sequence
  Synthetic
aaaccggcgtatttcttcctg

SEQ ID NO: 23548 - DNA, 21 bp, Artificial Sequence
  Synthetic
agaccctcttacgctggttaa

SEQ ID NO: 23549 - DNA, 23 bp, Artificial Sequence
  Synthetic
tctttgtcatcgatttggtcacg

SEQ ID NO: 23550 - DNA, 22 bp, Artificial Sequence
  Synthetic
cgtccactaccaagacctagat

SEQ ID NO: 23551 - DNA, 23 bp, Artificial Sequence
  Synthetic
tagctctgcagattttgtagcac

SEQ ID NO: 23552 - DNA, 22 bp, Artificial Sequence
  Synthetic
agctaaaccaacccgaagaatc

SEQ ID NO: 23553 - DNA, 25 bp, Artificial Sequence
  Synthetic
tctcaaaatccctttaaagcagagc

SEQ ID NO: 23554 - DNA, 25 bp, Artificial Sequence
  Synthetic
atctggaaattcaagaaagtcgtgg

SEQ ID NO: 23555 - DNA, 21 bp, Artificial Sequence
  Synthetic
ctgaaggaatcgctcaaggac

SEQ ID NO: 23556 - DNA, 20 bp, Artificial Sequence
  Synthetic
tggaggggccattccgtaat

SEQ ID NO: 23557 - DNA, 20 bp, Artificial Sequence
  Synthetic
aacctgggagacaagatgca

SEQ ID NO: 23558 - DNA, 22 bp, Artificial Sequence
  Synthetic
caccctaatatagttccgctgc

SEQ ID NO: 23559 - DNA, 23 bp, Artificial Sequence
  Synthetic
cagatgcttttacgacttgcaac

SEQ ID NO: 23560 - DNA, 20 bp, Artificial Sequence
  Synthetic
aagttcccatgatcgcctca

SEQ ID NO: 23561 - DNA, 20 bp, Artificial Sequence
  Synthetic
gagcttgtcccaattgctcc

SEQ ID NO: 23562 - DNA, 24 bp, Artificial Sequence
  Synthetic
tatcagcgatgcagtttctacagc

SEQ ID NO: 23563 - DNA, 20 bp, Artificial Sequence
  Synthetic
tgttccccgtacaagcaagt

SEQ ID NO: 23564 - DNA, 24 bp, Artificial Sequence
  Synthetic
ctgctcagctgttaaaaagtcaaa

SEQ ID NO: 23565 - DNA, 20 bp, Artificial Sequence
  Synthetic
ccccaggcaaagcaaaaagc

SEQ ID NO: 23566 - DNA, 22 bp, Artificial Sequence
  Synthetic
ggtaactgttgtattcgcacgg

SEQ ID NO: 23567 - DNA, 23 bp, Artificial Sequence
  Synthetic
gatcctaacgtgtctcctattgc

SEQ ID NO: 23568 - DNA, 24 bp, Artificial Sequence
  Synthetic
ttttcctgtgttttttcgatcagc

SEQ ID NO: 23569 - DNA, 22 bp, Artificial Sequence
  Synthetic
gggagttggagaaatcatggga

SEQ ID NO: 23570 - DNA, 22 bp, Artificial Sequence
  Synthetic
ttcgagcccttttgaagagtga

SEQ ID NO: 23571 - DNA, 22 bp, Artificial Sequence
  Synthetic
tcagagcctgtggatagtcttg

SEQ ID NO: 23572 - DNA, 21 bp, Artificial Sequence
  Synthetic
agggaaatcagaaaatcccgc

SEQ ID NO: 23573 - DNA, 25 bp, Artificial Sequence
  Synthetic
agcgtacatccatgatttattgtgt

SEQ ID NO: 23574 - DNA, 20 bp, Artificial Sequence
  Synthetic
cgcgctccgttaagatgatt

SEQ ID NO: 23575 - DNA, 22 bp, Artificial Sequence
  Synthetic
ccttcggcaacaaaaatcgttg

SEQ ID NO: 23576 - DNA, 21 bp, Artificial Sequence
  Synthetic
ttaacttcaacaagcgctgca

SEQ ID NO: 23577 - DNA, 23 bp, Artificial Sequence
  Synthetic
caggacgcaccggagataaaatt

SEQ ID NO: 23578 - DNA, 20 bp, Artificial Sequence
  Synthetic
gtagtgccagctcgggataa

SEQ ID NO: 23579 - DNA, 20 bp, Artificial Sequence
  Synthetic
tcctgcagccagaccatgta

SEQ ID NO: 23580 - DNA, 23 bp, Artificial Sequence
  Synthetic
cttaatctttctgaatggggcgt

SEQ ID NO: 23581 - DNA, 22 bp, Artificial Sequence
  Synthetic
ttacgaaggccatacggtatct

SEQ ID NO: 23582 - DNA, 20 bp, Artificial Sequence
  Synthetic
gtgcggggagaactcttgtt

SEQ ID NO: 23583 - DNA, 23 bp, Artificial Sequence
  Synthetic
caacgaaatacgcttgataccca

SEQ ID NO: 23584 - DNA, 24 bp, Artificial Sequence
  Synthetic
aatgtcgaggctttaaacgttttc

SEQ ID NO: 23585 - DNA, 21 bp, Artificial Sequence
  Synthetic
cgtctgcgtaagatgcatctt

SEQ ID NO: 23586 - DNA, 20 bp, Artificial Sequence
  Synthetic
gcgtaatggtgtgatgcctg

SEQ ID NO: 23587 - DNA, 25 bp, Artificial Sequence
  Synthetic
tccgtaacttctgattcagaattga

SEQ ID NO: 23588 - DNA, 20 bp, Artificial Sequence
  Synthetic
catggcaaaggttcgcctca

SEQ ID NO: 23589 - DNA, 21 bp, Artificial Sequence
  Synthetic
aggcgattctggaccaaaatc

SEQ ID NO: 23590 - DNA, 23 bp, Artificial Sequence
  Synthetic
ttgccttaggagaaaagggaagg

SEQ ID NO: 23591 - DNA, 20 bp, Artificial Sequence
  Synthetic
agcttcggaaggagacaagt

SEQ ID NO: 23592 - DNA, 23 bp, Artificial Sequence
  Synthetic
agcaattacgggatgaacatctg

SEQ ID NO: 23593 - DNA, 25 bp, Artificial Sequence
  Synthetic
gttcacctctttcaacggtatatga

SEQ ID NO: 23594 - DNA, 20 bp, Artificial Sequence
  Synthetic
ctccacaaatcagccgatcc

SEQ ID NO: 23595 - DNA, 20 bp, Artificial Sequence
  Synthetic
tgctcgctgcaaattccgaa

SEQ ID NO: 23596 - DNA, 23 bp, Artificial Sequence
  Synthetic
aacagctcaccaatcgagaatca

SEQ ID NO: 23597 - DNA, 20 bp, Artificial Sequence
  Synthetic
catgtgcggcaagccttttg

SEQ ID NO: 23598 - DNA, 22 bp, Artificial Sequence
  Synthetic
caagagcacaatggtatccgag

SEQ ID NO: 23599 - DNA, 25 bp, Artificial Sequence
  Synthetic
tggaagaggttcttttatgaatcgt

SEQ ID NO: 23600 - DNA, 22 bp, Artificial Sequence
  Synthetic
tatagggagcgaatgttgctgt

SEQ ID NO: 23601 - DNA, 20 bp, Artificial Sequence
  Synthetic
ttggcgagatagcgttgttc

SEQ ID NO: 23602 - DNA, 20 bp, Artificial Sequence
  Synthetic
ggtgctttgtgccaactctt

SEQ ID NO: 23603 - DNA, 25 bp, Artificial Sequence
  Synthetic
ctaagggaacagaaggcttgataat

SEQ ID NO: 23604 - DNA, 20 bp, Artificial Sequence
  Synthetic
tgctaaaaggtcgcgctaga

SEQ ID NO: 23605 - DNA, 20 bp, Artificial Sequence
  Synthetic
gtggaaattcgggggagtct

SEQ ID NO: 23606 - DNA, 25 bp, Artificial Sequence
  Synthetic
aaggacaatatagccttggagaaac

SEQ ID NO: 23607 - DNA, 25 bp, Artificial Sequence
  Synthetic
tcctggttttcctctcttaatagct

SEQ ID NO: 23608 - DNA, 22 bp, Artificial Sequence
  Synthetic
ccggaagacttattagcagcag

SEQ ID NO: 23609 - DNA, 22 bp, Artificial Sequence
  Synthetic
actagctaagcagttaggcctt

SEQ ID NO: 23610 - DNA, 22 bp, Artificial Sequence
  Synthetic
ttcacactacacaatgtgtcgc

SEQ ID NO: 23611 - DNA, 24 bp, Artificial Sequence
  Synthetic
tgacggatgttgttaaaggttctc

SEQ ID NO: 23612 - DNA, 23 bp, Artificial Sequence
  Synthetic
ttctcagaagaggatgtgcatga

SEQ ID NO: 23613 - DNA, 24 bp, Artificial Sequence
  Synthetic
tcgcagaattgatgatcatatgcc

SEQ ID NO: 23614 - DNA, 25 bp, Artificial Sequence
  Synthetic
atatgctgaggatttagaacaagca

SEQ ID NO: 23615 - DNA, 20 bp, Artificial Sequence
  Synthetic
gtcgcatcgagcaaagcatc

SEQ ID NO: 23616 - DNA, 21 bp, Artificial Sequence
  Synthetic
tagcagggatagaggaagcca

SEQ ID NO: 23617 - DNA, 24 bp, Artificial Sequence
  Synthetic
ctccttctttgacaaagtcagaga

SEQ ID NO: 23618 - DNA, 25 bp, Artificial Sequence
  Synthetic
ggagcatatttagaaacagttccct

SEQ ID NO: 23619 - DNA, 23 bp, Artificial Sequence
  Synthetic
gcgattcagttagcacgtattcc

SEQ ID NO: 23620 - DNA, 20 bp, Artificial Sequence
  Synthetic
tccgaagaaagcttgggtgc

SEQ ID NO: 23621 - DNA, 20 bp, Artificial Sequence
  Synthetic
cgttgcgtgatctcaaggct

SEQ ID NO: 23622 - DNA, 25 bp, Artificial Sequence
  Synthetic
ggaaattttctttccggagaacgag

SEQ ID NO: 23623 - DNA, 23 bp, Artificial Sequence
  Synthetic
gatcccagccatcaatgtgatag

SEQ ID NO: 23624 - DNA, 21 bp, Artificial Sequence
  Synthetic
ctagtcagcgagtgggatgac

SEQ ID NO: 23625 - DNA, 23 bp, Artificial Sequence
  Synthetic
tatgccgcatattttaacgcgta

SEQ ID NO: 23626 - DNA, 24 bp, Artificial Sequence
  Synthetic
tccacagttacagaaatcgatgag

SEQ ID NO: 23627 - DNA, 20 bp, Artificial Sequence
  Synthetic
gcgctatgatggttacagcg

SEQ ID NO: 23628 - DNA, 25 bp, Artificial Sequence
  Synthetic
accagtattttgggtcatatcttgt

SEQ ID NO: 23629 - DNA, 22 bp, Artificial Sequence
  Synthetic
gaaagggggagctatttatgcc

SEQ ID NO: 23630 - DNA, 22 bp, Artificial Sequence
  Synthetic
gcaattcaagcaagtgtggatg

SEQ ID NO: 23631 - DNA, 22 bp, Artificial Sequence
  Synthetic
atacacatttgcagaggagagc

SEQ ID NO: 23632 - DNA, 21 bp, Artificial Sequence
  Synthetic
gcatcgacaccatcaccatct

SEQ ID NO: 23633 - DNA, 24 bp, Artificial Sequence
  Synthetic
tttacgcagttgctgtactactca

SEQ ID NO: 23634 - DNA, 22 bp, Artificial Sequence
  Synthetic
ttgctctgaaacacttctgtcg

SEQ ID NO: 23635 - DNA, 25 bp, Artificial Sequence
  Synthetic
ttgatggaattggacgattctacat

SEQ ID NO: 23636 - DNA, 23 bp, Artificial Sequence
  Synthetic
gccaagccaataatggtgatgat

SEQ ID NO: 23637 - DNA, 22 bp, Artificial Sequence
  Synthetic
ggtgagaatggacggaaaacaa

SEQ ID NO: 23638 - DNA, 21 bp, Artificial Sequence
  Synthetic
aaggaccagaagtggaggaaa

SEQ ID NO: 23639 - DNA, 24 bp, Artificial Sequence
  Synthetic
gggatgtgtttgtcataagggaac

SEQ ID NO: 23640 - DNA, 25 bp, Artificial Sequence
  Synthetic
aacagacactatcaagagttggaga

SEQ ID NO: 23641 - DNA, 22 bp, Artificial Sequence
  Synthetic
cacatgtgtgtgcagggataac

SEQ ID NO: 23642 - DNA, 23 bp, Artificial Sequence
  Synthetic
tgagatgatttgggatccgaacg

SEQ ID NO: 23643 - DNA, 22 bp, Artificial Sequence
  Synthetic
tctacggaaggagtacctgagt

SEQ ID NO: 23644 - DNA, 23 bp, Artificial Sequence
  Synthetic
tggcttcggaggaaatttgtatg

SEQ ID NO: 23645 - DNA, 23 bp, Artificial Sequence
  Synthetic
tgaaggagttaactggagtccac

SEQ ID NO: 23646 - DNA, 24 bp, Artificial Sequence
  Synthetic
aaatccagcattgtacacacaaga

SEQ ID NO: 23647 - DNA, 24 bp, Artificial Sequence
  Synthetic
atcaccttacacagggaattctgg

SEQ ID NO: 23648 - DNA, 23 bp, Artificial Sequence
  Synthetic
actggactatgaagctagatgca

SEQ ID NO: 23649 - DNA, 25 bp, Artificial Sequence
  Synthetic
agagcagaatttttggaatcgatga

SEQ ID NO: 23650 - DNA, 25 bp, Artificial Sequence
  Synthetic
aggagaattgggaataataagagcc

SEQ ID NO: 23651 - DNA, 24 bp, Artificial Sequence
  Synthetic
caatcagatcctttttactgggga

SEQ ID NO: 23652 - DNA, 20 bp, Artificial Sequence
  Synthetic
ccagttgcatgggcctcata

SEQ ID NO: 23653 - DNA, 22 bp, Artificial Sequence
  Synthetic
tcatcctagctccagtgctggt

SEQ ID NO: 23654 - DNA, 22 bp, Artificial Sequence
  Synthetic
catcacaatggcaaaacctcct

SEQ ID NO: 23655 - DNA, 21 bp, Artificial Sequence
  Synthetic
cctgcattgtgacgaagactt

SEQ ID NO: 23656 - DNA, 24 bp, Artificial Sequence
  Synthetic
tttgacaaagacacagactcagat

SEQ ID NO: 23657 - DNA, 20 bp, Artificial Sequence
  Synthetic
aagaggcgactgttcgagga

SEQ ID NO: 23658 - DNA, 23 bp, Artificial Sequence
  Synthetic
atacccatggagaatacccagag

SEQ ID NO: 23659 - DNA, 25 bp, Artificial Sequence
  Synthetic
cactgcaagacaagttaatgacaat

SEQ ID NO: 23660 - DNA, 23 bp, Artificial Sequence
  Synthetic
agtgaaactggagaatgggaagt

SEQ ID NO: 23661 - DNA, 20 bp, Artificial Sequence
  Synthetic
gacgaccgaaagcgtcaccg

SEQ ID NO: 23662 - DNA, 20 bp, Artificial Sequence
  Synthetic
cctccagaggccgtagaggg

SEQ ID NO: 23663 - DNA, 23 bp, Artificial Sequence
  Synthetic
gcaggtagcaacgatagaatagg

SEQ ID NO: 23664 - DNA, 23 bp, Artificial Sequence
  Synthetic
tgaggctataggaccaagtgaac

SEQ ID NO: 23665 - DNA, 24 bp, Artificial Sequence
  Synthetic
caaacgagctactataaggaccag

SEQ ID NO: 23666 - DNA, 23 bp, Artificial Sequence
  Synthetic
ttttgcagatgtcctattggctt

SEQ ID NO: 23667 - DNA, 25 bp, Artificial Sequence
  Synthetic
atcagtttagagcttttcgactgaa

SEQ ID NO: 23668 - DNA, 22 bp, Artificial Sequence
  Synthetic
taggtgaacattgggacacagc

SEQ ID NO: 23669 - DNA, 25 bp, Artificial Sequence
  Synthetic
acgacgagaacaatgttatgttagg

SEQ ID NO: 23670 - DNA, 23 bp, Artificial Sequence
  Synthetic
attggttacaaagagcacaaggc

SEQ ID NO: 23671 - DNA, 21 bp, Artificial Sequence
  Synthetic
gttaacagctttcagccaggg

SEQ ID NO: 23672 - DNA, 25 bp, Artificial Sequence
  Synthetic
tgaatgcaagtccatatgatttgga

SEQ ID NO: 23673 - DNA, 24 bp, Artificial Sequence
  Synthetic
ttgttccatgggttatgtacttgc

SEQ ID NO: 23674 - DNA, 24 bp, Artificial Sequence
  Synthetic
gagtgctgctactatacgtagtgt

SEQ ID NO: 23675 - DNA, 25 bp, Artificial Sequence
  Synthetic
tggtaacatgatagatggttttgct

SEQ ID NO: 23676 - DNA, 20 bp, Artificial Sequence
  Synthetic
acgggagttgctaggtgttt

SEQ ID NO: 23677 - DNA, 25 bp, Artificial Sequence
  Synthetic
acgtagaagaatttgtctttcaggc

SEQ ID NO: 23678 - DNA, 24 bp, Artificial Sequence
  Synthetic
tgacaaatattaccctgttgtggt

SEQ ID NO: 23679 - DNA, 23 bp, Artificial Sequence
  Synthetic
ttaactgtcacaagtgctggaca

SEQ ID NO: 23680 - DNA, 25 bp, Artificial Sequence
  Synthetic
acctgctaatattgtacttccacaa

SEQ ID NO: 23681 - DNA, 24 bp, Artificial Sequence
  Synthetic
aaactgtgcttaatgttgttggac

SEQ ID NO: 23682 - DNA, 24 bp, Artificial Sequence
  Synthetic
atcaatgacgttgcatttgtttcg

SEQ ID NO: 23683 - DNA, 24 bp, Artificial Sequence
  Synthetic
aggaaatgtgttttgtgatggagt

SEQ ID NO: 23684 - DNA, 23 bp, Artificial Sequence
  Synthetic
aaaattgttcaatggcaagaggc

SEQ ID NO: 23685 - DNA, 25 bp, Artificial Sequence
  Synthetic
ttgagtcgtgaagatcttgagattg

SEQ ID NO: 23686 - DNA, 25 bp, Artificial Sequence
  Synthetic
ttaaattgataggacacaccgtctg

SEQ ID NO: 23687 - DNA, 20 bp, Artificial Sequence
  Synthetic
ggtgacagctcagagagtgg

SEQ ID NO: 23688 - DNA, 25 bp, Artificial Sequence
  Synthetic
tggctttagctaatatgttaccagc

SEQ ID NO: 23689 - DNA, 23 bp, Artificial Sequence
  Synthetic
ctaaggaattgaaacggcccatt

SEQ ID NO: 23690 - DNA, 25 bp, Artificial Sequence
  Synthetic
aactggtttgaaactgaagcttact

SEQ ID NO: 23691 - DNA, 25 bp, Artificial Sequence
  Synthetic
tgtgttgcactttattacacatgca

SEQ ID NO: 23692 - DNA, 23 bp, Artificial Sequence
  Synthetic
actcgttctatgtcgtattgcag

SEQ ID NO: 23693 - DNA, 22 bp, Artificial Sequence
  Synthetic
aagcttaaacgtgcttttggtg

SEQ ID NO: 23694 - DNA, 20 bp, Artificial Sequence
  Synthetic
gcctactgcttccgtctcaa

SEQ ID NO: 23695 - DNA, 25 bp, Artificial Sequence
  Synthetic
gatcttgtggatctgttggttatgt

SEQ ID NO: 23696 - DNA, 25 bp, Artificial Sequence
  Synthetic
agatgctttagcttctatgactggt

SEQ ID NO: 23697 - DNA, 25 bp, Artificial Sequence
  Synthetic
tgtgtacaagcatacatttagaggc

SEQ ID NO: 23698 - DNA, 23 bp, Artificial Sequence
  Synthetic
gcaaaggttattgctaagtgggt

SEQ ID NO: 23699 - DNA, 25 bp, Artificial Sequence
  Synthetic
tgactgatgtcaaatgtgctaatgt

SEQ ID NO: 23700 - DNA, 25 bp, Artificial Sequence
  Synthetic
tgctaagaaaaatcttgatgaggcg

SEQ ID NO: 23701 - DNA, 25 bp, Artificial Sequence
  Synthetic
gtatggcagattcaaactatccagg

SEQ ID NO: 23702 - DNA, 24 bp, Artificial Sequence
  Synthetic
gaactgctactgaatatgcttcca

SEQ ID NO: 23703 - DNA, 21 bp, Artificial Sequence
  Synthetic
cggcaagtttgtacaagtgcc

SEQ ID NO: 23704 - DNA, 25 bp, Artificial Sequence
  Synthetic
tcagttctttgttgttaagaggaca

SEQ ID NO: 23705 - DNA, 25 bp, Artificial Sequence
  Synthetic
ttttggtgactatgttattgcagcc

SEQ ID NO: 23706 - DNA, 22 bp, Artificial Sequence
  Synthetic
atccagctttgcatgtagcttc

SEQ ID NO: 23707 - DNA, 25 bp, Artificial Sequence
  Synthetic
ttggaaaagccaggctctattatga

SEQ ID NO: 23708 - DNA, 21 bp, Artificial Sequence
  Synthetic
ctgggatgatatgttacgccg

SEQ ID NO: 23709 - DNA, 25 bp, Artificial Sequence
  Synthetic
gttgattcaacctttgtcacagaat

SEQ ID NO: 23710 - DNA, 21 bp, Artificial Sequence
  Synthetic
agatggatggtgacgatgtct

SEQ ID NO: 23711 - DNA, 22 bp, Artificial Sequence
  Synthetic
ttatgcagagtgttggagcttg

SEQ ID NO: 23712 - DNA, 24 bp, Artificial Sequence
  Synthetic
cttgaaattgtttgctgcagaaac

SEQ ID NO: 23713 - DNA, 25 bp, Artificial Sequence
  Synthetic
acacattggtatgaaacgttactgc

SEQ ID NO: 23714 - DNA, 25 bp, Artificial Sequence
  Synthetic
accataaatgcattacctgagatgg

SEQ ID NO: 23715 - DNA, 21 bp, Artificial Sequence
  Synthetic
caaaccgtggattctgctcaa

SEQ ID NO: 23716 - DNA, 20 bp, Artificial Sequence
  Synthetic
atcacccagctcatgctcct

SEQ ID NO: 23717 - DNA, 21 bp, Artificial Sequence
  Synthetic
gaagccactggtttgtttgct

SEQ ID NO: 23718 - DNA, 25 bp, Artificial Sequence
  Synthetic
taaacgtgccacagtttacaattct

SEQ ID NO: 23719 - DNA, 25 bp, Artificial Sequence
  Synthetic
tttgaggcacataaggactctttta

SEQ ID NO: 23720 - DNA, 21 bp, Artificial Sequence
  Synthetic
gcatggatgctaagcaggttg

SEQ ID NO: 23721 - DNA, 24 bp, Artificial Sequence
  Synthetic
acaacataccctactaatgtggcc

SEQ ID NO: 23722 - DNA, 25 bp, Artificial Sequence
  Synthetic
agagtctttcgatgataagaggtcc

SEQ ID NO: 23723 - DNA, 25 bp, Artificial Sequence
  Synthetic
tgcatttgttaataggcttgtaccg

SEQ ID NO: 23724 - DNA, 25 bp, Artificial Sequence
  Synthetic
ttctccaatggaaagagttagtctc

SEQ ID NO: 23725 - DNA, 24 bp, Artificial Sequence
  Synthetic
aatggggtattttgcattttggac

SEQ ID NO: 23726 - DNA, 22 bp, Artificial Sequence
  Synthetic
ctggacatacagcctgaagact

SEQ ID NO: 23727 - DNA, 25 bp, Artificial Sequence
  Synthetic
ccggctagacttgaaatagttaagc

SEQ ID NO: 23728 - DNA, 22 bp, Artificial Sequence
  Synthetic
tcatgcctttaaatgcaaccgt

SEQ ID NO: 23729 - DNA, 24 bp, Artificial Sequence
  Synthetic
gtaaggattttacgcctgtacagg

SEQ ID NO: 23730 - DNA, 24 bp, Artificial Sequence
  Synthetic
acaaggtcttttagaggtctctgt

SEQ ID NO: 23731 - DNA, 25 bp, Artificial Sequence
  Synthetic
attgggttacacctctcacttctag

SEQ ID NO: 23732 - DNA, 25 bp, Artificial Sequence
  Synthetic
tgagcagcctgatgtcttttattca

SEQ ID NO: 23733 - DNA, 24 bp, Artificial Sequence
  Synthetic
cctgcaggtgttcttactaatcat

SEQ ID NO: 23734 - DNA, 25 bp, Artificial Sequence
  Synthetic
aagtgattattgtggaggcaattct

SEQ ID NO: 23735 - DNA, 22 bp, Artificial Sequence
  Synthetic
ccgaaccagcattgctatttcg

SEQ ID NO: 23736 - DNA, 23 bp, Artificial Sequence
  Synthetic
tgtggtgattatgcagcatgtaa

SEQ ID NO: 23737 - DNA, 20 bp, Artificial Sequence
  Synthetic
gcatcaaagtgttgcctcca

SEQ ID NO: 23738 - DNA, 25 bp, Artificial Sequence
  Synthetic
tgcttatgtttctcaacagcttagt

SEQ ID NO: 23739 - DNA, 25 bp, Artificial Sequence
  Synthetic
gtagtggttactactaccctgaacc

SEQ ID NO: 23740 - DNA, 25 bp, Artificial Sequence
  Synthetic
gtaaaatggccttggtatgtatggc

SEQ ID NO: 23741 - DNA, 22 bp, Artificial Sequence
  Synthetic
agagttcctagtcatgcttggt

SEQ ID NO: 23742 - DNA, 24 bp, Artificial Sequence
  Synthetic
ttgaggactatcatactctgacgg

SEQ ID NO: 23743 - DNA, 22 bp, Artificial Sequence
  Synthetic
aatccagtagtagagcgtcctc

SEQ ID NO: 23744 - DNA, 22 bp, Artificial Sequence
  Synthetic
ccaggctgatgtcaataccccg

SEQ ID NO: 23745 - DNA, 24 bp, Artificial Sequence
  Synthetic
ttgctagtcttgttctggcaaaac

SEQ ID NO: 23746 - DNA, 25 bp, Artificial Sequence
  Synthetic
tgacagtacactttcaggttttgag

SEQ ID NO: 23747 - DNA, 23 bp, Artificial Sequence
  Synthetic
gcagaaaagtcgagataaggcac

SEQ ID NO: 23748 - DNA, 22 bp, Artificial Sequence
  Synthetic
ggaaggacctctttgcatcaga

SEQ ID NO: 23749 - DNA, 24 bp, Artificial Sequence
  Synthetic
ctacagagattcgcttggagaagc

SEQ ID NO: 23750 - DNA, 21 bp, Artificial Sequence
  Synthetic
ggcttcgccgagatcagaagt

SEQ ID NO: 23751 - DNA, 20 bp, Artificial Sequence
  Synthetic
gaaagtgacagggccccttt

SEQ ID NO: 23752 - DNA, 23 bp, Artificial Sequence
  Synthetic
aacacagttcgagtctctgaaac

SEQ ID NO: 23753 - DNA, 22 bp, Artificial Sequence
  Synthetic
ccctcccgggagagccatagtg

SEQ ID NO: 23754 - DNA, 21 bp, Artificial Sequence
  Synthetic
tggagtatacgtgttgccgcg

SEQ ID NO: 23755 - DNA, 19 bp, Artificial Sequence
  Synthetic
gctcgtcggcgctcctgta

SEQ ID NO: 23756 - DNA, 22 bp, Artificial Sequence
  Synthetic
acacctacagtggcagtcaggt

SEQ ID NO: 23757 - DNA, 21 bp, Artificial Sequence
  Synthetic
gcatgtcctgcgtttacccca

SEQ ID NO: 23758 - DNA, 20 bp, Artificial Sequence
  Synthetic
tactgctggcactacgcacc

SEQ ID NO: 23759 - DNA, 21 bp, Artificial Sequence
  Synthetic
ctcccagtggtcggtggtttg

SEQ ID NO: 23760 - DNA, 21 bp, Artificial Sequence
  Synthetic
tgaccgcagtgagcaacatcc

SEQ ID NO: 23761 - DNA, 20 bp, Artificial Sequence
  Synthetic
cgctgctgctgggacacatg

SEQ ID NO: 23762 - DNA, 20 bp, Artificial Sequence
  Synthetic
aggtcatcacctggggtgcg

SEQ ID NO: 23763 - DNA, 22 bp, Artificial Sequence
  Synthetic
atggagcaggttcgagaacgct

SEQ ID NO: 23764 - DNA, 22 bp, Artificial Sequence
  Synthetic
tgttgcggggatctttagggct

SEQ ID NO: 23765 - DNA, 21 bp, Artificial Sequence
  Synthetic
gggaaccgcaccgttacaact

SEQ ID NO: 23766 - DNA, 22 bp, Artificial Sequence
  Synthetic
acgtaccgatatgtcgcctccg

SEQ ID NO: 23767 - DNA, 20 bp, Artificial Sequence
  Synthetic
gcaggctcctcccccaagtt

SEQ ID NO: 23768 - DNA, 22 bp, Artificial Sequence
  Synthetic
atggaggagtgctcacaagctg

SEQ ID NO: 23769 - DNA, 19 bp, Artificial Sequence
  Synthetic
tactcggggggtgggttgc

SEQ ID NO: 23770 - DNA, 20 bp, Artificial Sequence
  Synthetic
cgtaggacctggggagggag

SEQ ID NO: 23771 - DNA, 22 bp, Artificial Sequence
  Synthetic
aaagggatacaagggcgtgtgg

SEQ ID NO: 23772 - DNA, 20 bp, Artificial Sequence
  Synthetic
tgccggctgctgagttcttt

SEQ ID NO: 23773 - DNA, 21 bp, Artificial Sequence
  Synthetic
cagacgctgagctagtggacg

SEQ ID NO: 23774 - DNA, 22 bp, Artificial Sequence
  Synthetic
tcagctggacggctctaatgtg

SEQ ID NO: 23775 - DNA, 22 bp, Artificial Sequence
  Synthetic
aagagaaactgcccatcagccc

SEQ ID NO: 23776 - DNA, 22 bp, Artificial Sequence
  Synthetic
ttccaaccaccatcatggcgaa

SEQ ID NO: 23777 - DNA, 21 bp, Artificial Sequence
  Synthetic
ctccctcacggagcggcttta

SEQ ID NO: 23778 - DNA, 21 bp, Artificial Sequence
  Synthetic
tagagcagccctgagagcctt

SEQ ID NO: 23779 - DNA, 25 bp, Artificial Sequence
  Synthetic
tcaagaagtacacatcaggaagaca

SEQ ID NO: 23780 - DNA, 23 bp, Artificial Sequence
  Synthetic
agtcgaaaggctaaagcatggaa

SEQ ID NO: 23781 - DNA, 25 bp, Artificial Sequence
  Synthetic
agagaagaaagaagaactccaggat

SEQ ID NO: 23782 - DNA, 25 bp, Artificial Sequence
  Synthetic
tagcatctttattggagatgtgcca

SEQ ID NO: 23783 - DNA, 23 bp, Artificial Sequence
  Synthetic
tgaagagttcacaatggttggga

SEQ ID NO: 23784 - DNA, 24 bp, Artificial Sequence
  Synthetic
aaagtgctttttcaaaattgggga

SEQ ID NO: 23785 - DNA, 22 bp, Artificial Sequence
  Synthetic
acacagggaacagagaaactga

SEQ ID NO: 23786 - DNA, 24 bp, Artificial Sequence
  Synthetic
gatgtgcttgggacatttgatacc

SEQ ID NO: 23787 - DNA, 22 bp, Artificial Sequence
  Synthetic
agacaggagatatgggccagca

SEQ ID NO: 23788 - DNA, 20 bp, Artificial Sequence
  Synthetic
ctgccgacgccttaccgatt

SEQ ID NO: 23789 - DNA, 20 bp, Artificial Sequence
  Synthetic
gcccccttgtgtcatcggag

SEQ ID NO: 23790 - DNA, 20 bp, Artificial Sequence
  Synthetic
gcccattgctgctgtccacc

SEQ ID NO: 23791 - DNA, 22 bp, Artificial Sequence
  Synthetic
atctgaagggtaggtgggtgcc

SEQ ID NO: 23792 - DNA, 21 bp, Artificial Sequence
  Synthetic
aaagtcccctacttcgtgcgc

SEQ ID NO: 23793 - DNA, 18 bp, Artificial Sequence
  Synthetic
ccgcgtgcggtgacatca

SEQ ID NO: 23794 - DNA, 19 bp, Artificial Sequence
  Synthetic
agaccttgtgggctggccc

SEQ ID NO: 23795 - DNA, 22 bp, Artificial Sequence
  Synthetic
tcacggacaactcctctccacc

SEQ ID NO: 23796 - DNA, 22 bp, Artificial Sequence
  Synthetic
tttgtgacgagtgccactccac

SEQ ID NO: 23797 - DNA, 20 bp, Artificial Sequence
  Synthetic
accgcggtcttgacgtgtct

SEQ ID NO: 23798 - DNA, 20 bp, Artificial Sequence
  Synthetic
gagtgctatgacgcgggctg

SEQ ID NO: 23799 - DNA, 20 bp, Artificial Sequence
  Synthetic
acctggaggtcgtcacgagc

SEQ ID NO: 23800 - DNA, 22 bp, Artificial Sequence
  Synthetic
accaactggcagaaactcgagg

SEQ ID NO: 23801 - DNA, 22 bp, Artificial Sequence
  Synthetic
agatcatgagcggtgaggtccc

SEQ ID NO: 23802 - DNA, 22 bp, Artificial Sequence
  Synthetic
ctcagcagcctcactgtaaccc

SEQ ID NO: 23803 - DNA, 21 bp, Artificial Sequence
  Synthetic
gggacgttccccattaacgcc

SEQ ID NO: 23804 - DNA, 19 bp, Artificial Sequence
  Synthetic
cgagcccgaaccggacgta

SEQ ID NO: 23805 - DNA, 20 bp, Artificial Sequence
  Synthetic
ccggactacaaccccccgct

SEQ ID NO: 23806 - DNA, 19 bp, Artificial Sequence
  Synthetic
tcttccatgccccccctgg

SEQ ID NO: 23807 - DNA, 20 bp, Artificial Sequence
  Synthetic
ctgacgcccccacattcagc

SEQ ID NO: 23808 - DNA, 22 bp, Artificial Sequence
  Synthetic
acgacgtggttagcaagctccc

SEQ ID NO: 23809 - DNA, 22 bp, Artificial Sequence
  Synthetic
tcacttgctacatcaaggcccg

SEQ ID NO: 23810 - DNA, 22 bp, Artificial Sequence
  Synthetic
ccagtcaattcctggctaggca

SEQ ID NO: 23811 - DNA, 20 bp, Artificial Sequence
  Synthetic
gtccgcgctaggcttctgtc

SEQ ID NO: 23812 - DNA, 25 bp, Artificial Sequence
  Synthetic
acccagaaacatattgcttttgtgt

SEQ ID NO: 23813 - DNA, 20 bp, Artificial Sequence
  Synthetic
tgtgtcacaaaccgctggta

SEQ ID NO: 23814 - DNA, 21 bp, Artificial Sequence
  Synthetic
gcacaacaagcgtatagggtg

SEQ ID NO: 23815 - DNA, 22 bp, Artificial Sequence
  Synthetic
gacagtcagcaaaggccaaacg

SEQ ID NO: 23816 - DNA, 22 bp, Artificial Sequence
  Synthetic
gggaatgacagtgcttatgctg

SEQ ID NO: 23817 - DNA, 20 bp, Artificial Sequence
  Synthetic
tggggggggctgttatatcc

SEQ ID NO: 23818 - DNA, 23 bp, Artificial Sequence
  Synthetic
tatgggcacgtttaagccttacc

SEQ ID NO: 23819 - DNA, 23 bp, Artificial Sequence
  Synthetic
atgtgaatttcaaggatgacgct

SEQ ID NO: 23820 - DNA, 19 bp, Artificial Sequence
  Synthetic
ttccacccagaaggccgcg

SEQ ID NO: 23821 - DNA, 20 bp, Artificial Sequence
  Synthetic
gctgacgtgctatctggcat

SEQ ID NO: 23822 - DNA, 22 bp, Artificial Sequence
  Synthetic
tggcagatcgcattttgcagtg

SEQ ID NO: 23823 - DNA, 20 bp, Artificial Sequence
  Synthetic
ccccagctgtgttggacatc

SEQ ID NO: 23824 - DNA, 20 bp, Artificial Sequence
  Synthetic
tacttgctccagctgcctct

SEQ ID NO: 23825 - DNA, 20 bp, Artificial Sequence
  Synthetic
cgactatgtgacacgcacca

SEQ ID NO: 23826 - DNA, 23 bp, Artificial Sequence
  Synthetic
atccagattatttgggaatggcc

SEQ ID NO: 23827 - DNA, 23 bp, Artificial Sequence
  Synthetic
attggaggattggaactttgggt

SEQ ID NO: 23828 - DNA, 24 bp, Artificial Sequence
  Synthetic
gtaaggttgttctaggtcaggaga

SEQ ID NO: 23829 - DNA, 21 bp, Artificial Sequence
  Synthetic
tgtgcgacacaagctgcaata

SEQ ID NO: 23830 - DNA, 21 bp, Artificial Sequence
  Synthetic
gaatcggagcagggaaattcc

SEQ ID NO: 23831 - DNA, 25 bp, Artificial Sequence
  Synthetic
tatcaggattcacatgaacagtggc

SEQ ID NO: 23832 - DNA, 20 bp, Artificial Sequence
  Synthetic
accgcaaatcgcagctggag

SEQ ID NO: 23833 - DNA, 22 bp, Artificial Sequence
  Synthetic
agacttcaagaggaggctcggg

SEQ ID NO: 23834 - DNA, 23 bp, Artificial Sequence
  Synthetic
ctccatctattacacgccctttg

SEQ ID NO: 23835 - DNA, 21 bp, Artificial Sequence
  Synthetic
acatcattaggtggtggggag

SEQ ID NO: 23836 - DNA, 22 bp, Artificial Sequence
  Synthetic
catcagtttgcagtttcagcag

SEQ ID NO: 23837 - DNA, 24 bp, Artificial Sequence
  Synthetic
atcacctacttacccttacacacc

SEQ ID NO: 23838 - DNA, 23 bp, Artificial Sequence
  Synthetic
ttatgctggatctgaaaggcttc

SEQ ID NO: 23839 - DNA, 25 bp, Artificial Sequence
  Synthetic
acagaaaatcctaacacgtatcctg

SEQ ID NO: 23840 - DNA, 22 bp, Artificial Sequence
  Synthetic
gtgatgtaggatttggagctgc

SEQ ID NO: 23841 - DNA, 25 bp, Artificial Sequence
  Synthetic
acaaacctcaaaacaatttaggacc

SEQ ID NO: 23842 - DNA, 23 bp, Artificial Sequence
  Synthetic
gaggcaaacttagaaaccgtttc

SEQ ID NO: 23843 - DNA, 21 bp, Artificial Sequence
  Synthetic
aagaatgaagtgggccatgtg

SEQ ID NO: 23844 - DNA, 25 bp, Artificial Sequence
  Synthetic
tcagaaagatgagacttgacaatgc

SEQ ID NO: 23845 - DNA, 23 bp, Artificial Sequence
  Synthetic
aactcccattgtactggcataca

SEQ ID NO: 23846 - DNA, 25 bp, Artificial Sequence
  Synthetic
agctgtagagattgcaaataagact

SEQ ID NO: 23847 - DNA, 22 bp, Artificial Sequence
  Synthetic
ttcagccaaaaaggaggacatg

SEQ ID NO: 23848 - DNA, 25 bp, Artificial Sequence
  Synthetic
tgaggaatcacctaaagcaagtgag

SEQ ID NO: 23849 - DNA, 22 bp, Artificial Sequence
  Synthetic
ccaagatgtgggaaatgggaac

SEQ ID NO: 23850 - DNA, 24 bp, Artificial Sequence
  Synthetic
aattgttgcctttctgtttttcgc

SEQ ID NO: 23851 - DNA, 25 bp, Artificial Sequence
  Synthetic
tgaggaacttgaaagactaaaaccg

SEQ ID NO: 23852 - DNA, 25 bp, Artificial Sequence
  Synthetic
actttccacacttttcatctctctg

SEQ ID NO: 23853 - DNA, 22 bp, Artificial Sequence
  Synthetic
tcttggacaagaatggcatgtg

SEQ ID NO: 23854 - DNA, 25 bp, Artificial Sequence
  Synthetic
ctagcgaagttaaagcccaatcatc

SEQ ID NO: 23855 - DNA, 23 bp, Artificial Sequence
  Synthetic
attgacttgtttgttaagcgtcg

SEQ ID NO: 23856 - DNA, 24 bp, Artificial Sequence
  Synthetic
tttgtcttttagatcaggcttggc

SEQ ID NO: 23857 - DNA, 24 bp, Artificial Sequence
  Synthetic
ttaatcctgctaatgggcatatgc

SEQ ID NO: 23858 - DNA, 20 bp, Artificial Sequence
  Synthetic
cagtggcaggaagcatggta

SEQ ID NO: 23859 - DNA, 25 bp, Artificial Sequence
  Synthetic
ctcctctgagtaaggatttacctga

SEQ ID NO: 23860 - DNA, 25 bp, Artificial Sequence
  Synthetic
tgttgagtacaaagtaacagtctgg

SEQ ID NO: 23861 - DNA, 25 bp, Artificial Sequence
  Synthetic
acgaaattgtagtgttcgtgttaag

SEQ ID NO: 23862 - DNA, 21 bp, Artificial Sequence
  Synthetic
cagtagctgctggtttggaat

SEQ ID NO: 23863 - DNA, 25 bp, Artificial Sequence
  Synthetic
atacatctttggttccacatacacg

SEQ ID NO: 23864 - DNA, 25 bp, Artificial Sequence
  Synthetic
tggtaatgttaaacctggtgaaact

SEQ ID NO: 23865 - DNA, 25 bp, Artificial Sequence
  Synthetic
attgtgcttggtttgtacaaaatga

SEQ ID NO: 23866 - DNA, 25 bp, Artificial Sequence
  Synthetic
agaggctcggattaatgataagaag

SEQ ID NO: 23867 - DNA, 24 bp, Artificial Sequence
  Synthetic
ctcagtttgtatttattgccgtgc

SEQ ID NO: 23868 - DNA, 25 bp, Artificial Sequence
  Synthetic
tttggtgattttatacaaacagccc

SEQ ID NO: 23869 - DNA, 21 bp, Artificial Sequence
  Synthetic
cagatcctgctatgcacgttg

SEQ ID NO: 23870 - DNA, 25 bp, Artificial Sequence
  Synthetic
tgctatcagtgctaagaatagagct

SEQ ID NO: 23871 - DNA, 25 bp, Artificial Sequence
  Synthetic
acatgaattttgttgttcacatggt

SEQ ID NO: 23872 - DNA, 25 bp, Artificial Sequence
  Synthetic
aagtctagctatagatgcttaccct

SEQ ID NO: 23873 - DNA, 25 bp, Artificial Sequence
  Synthetic
tgaacgtttaaagttatttgctgca

SEQ ID NO: 23874 - DNA, 25 bp, Artificial Sequence
  Synthetic
atgttgctaattatcagcacattgg

SEQ ID NO: 23875 - DNA, 25 bp, Artificial Sequence
  Synthetic
ctttccactgcaaataggtttttca

SEQ ID NO: 23876 - DNA, 22 bp, Artificial Sequence
  Synthetic
tgatgcttttcctgtagccaag

SEQ ID NO: 23877 - DNA, 23 bp, Artificial Sequence
  Synthetic
atcacacggtgtaatctaggtgg

SEQ ID NO: 23878 - DNA, 23 bp, Artificial Sequence
  Synthetic
ctcaaagttgagttttggttcgc

SEQ ID NO: 23879 - DNA, 24 bp, Artificial Sequence
  Synthetic
ttttacatttaggtgcagggtctg

SEQ ID NO: 23880 - DNA, 25 bp, Artificial Sequence
  Synthetic
atcgttcttgtgagagtactactgt

SEQ ID NO: 23881 - DNA, 25 bp, Artificial Sequence
  Synthetic
tcgtaaacgtagaagtatttctgct

SEQ ID NO: 23882 - DNA, 24 bp, Artificial Sequence
  Synthetic
aaatgcttatgtctctcaacagct

SEQ ID NO: 23883 - DNA, 21 bp, Artificial Sequence
  Synthetic
tacagggtgtcaaacttggca

SEQ ID NO: 23884 - DNA, 23 bp, Artificial Sequence
  Synthetic
atctgagcgaaattaccaaacct

SEQ ID NO: 23885 - DNA, 25 bp, Artificial Sequence
  Synthetic
tcaacagtgttttggtaaaagagga

SEQ ID NO: 23886 - DNA, 24 bp, Artificial Sequence
  Synthetic
ctggtactcagcacatttcaaatg

SEQ ID NO: 23887 - DNA, 20 bp, Artificial Sequence
  Synthetic
tgcagcaatatgcacccact

SEQ ID NO: 23888 - DNA, 24 bp, Artificial Sequence
  Synthetic
cgaaagaggcgaagaaacaattga

SEQ ID NO: 23889 - DNA, 24 bp, Artificial Sequence
  Synthetic
cctaatggacctccttgttatcag

SEQ ID NO: 23890 - DNA, 23 bp, Artificial Sequence
  Synthetic
aaaacgagtcaactaaagtgggc

SEQ ID NO: 23891 - DNA, 25 bp, Artificial Sequence
  Synthetic
gaattatttcacagcagaggtgtcc

SEQ ID NO: 23892 - DNA, 25 bp, Artificial Sequence
  Synthetic
aaatgggagaaatactgtgtccttg

SEQ ID NO: 23893 - DNA, 20 bp, Artificial Sequence
  Synthetic
ccccaagggagtggaagaag

SEQ ID NO: 23894 - DNA, 25 bp, Artificial Sequence
  Synthetic
aattgggaggttttacgtacagatg

SEQ ID NO: 23895 - DNA, 21 bp, Artificial Sequence
  Synthetic
ggcgataatggacgaagaaca

SEQ ID NO: 23896 - DNA, 21 bp, Artificial Sequence
  Synthetic
tcctgagaggatccgtagccc

SEQ ID NO: 23897 - DNA, 25 bp, Artificial Sequence
  Synthetic
aagaggacaactatccactagagga

SEQ ID NO: 23898 - DNA, 25 bp, Artificial Sequence
  Synthetic
aagctttcagcatctattactgaca

SEQ ID NO: 23899 - DNA, 22 bp, Artificial Sequence
  Synthetic
aagagacggagagagaccgagg

SEQ ID NO: 23900 - DNA, 24 bp, Artificial Sequence
  Synthetic
aaatgttggaggtggagatgtaaa

SEQ ID NO: 23901 - DNA, 23 bp, Artificial Sequence
  Synthetic
cggaggacttatatagggcttgt

SEQ ID NO: 23902 - DNA, 25 bp, Artificial Sequence
  Synthetic
acacctgttaaaccaaatacagctg

SEQ ID NO: 23903 - DNA, 21 bp, Artificial Sequence
  Synthetic
tgcagcctatacctgaaaggc

SEQ ID NO: 23904 - DNA, 23 bp, Artificial Sequence
  Synthetic
cactttagttagagccagggaac

SEQ ID NO: 23905 - DNA, 20 bp, Artificial Sequence
  Synthetic
ggtggttcgagtgagcagat

SEQ ID NO: 23906 - DNA, 25 bp, Artificial Sequence
  Synthetic
tacaggtgaatattgggatgtagca

SEQ ID NO: 23907 - DNA, 21 bp, Artificial Sequence
  Synthetic
ctttcatggaagacgggagca

SEQ ID NO: 23908 - DNA, 20 bp, Artificial Sequence
  Synthetic
gtacctccccctcagactgc

SEQ ID NO: 23909 - DNA, 21 bp, Artificial Sequence
  Synthetic
tcgcactgtttatgcagagca

SEQ ID NO: 23910 - DNA, 23 bp, Artificial Sequence
  Synthetic
ttttggtaagtgacaaatgcccg

SEQ ID NO: 23911 - DNA, 24 bp, Artificial Sequence
  Synthetic
attcggatttccatttcatcgacg

SEQ ID NO: 23912 - DNA, 24 bp, Artificial Sequence
  Synthetic
tcattgaaattggagtaacacgga

SEQ ID NO: 23913 - DNA, 23 bp, Artificial Sequence
  Synthetic
aagaggcgaagagacaattgaag

SEQ ID NO: 23914 - DNA, 25 bp, Artificial Sequence
  Synthetic
agactttgatgactgcaaagatgtt

SEQ ID NO: 23915 - DNA, 25 bp, Artificial Sequence
  Synthetic
gggctactgaatacataatgaaggg

SEQ ID NO: 23916 - DNA, 25 bp, Artificial Sequence
  Synthetic
tgtgttcttgaaataggagacatgc

SEQ ID NO: 23917 - DNA, 20 bp, Artificial Sequence
  Synthetic
gggagtggaggaaggctcta

SEQ ID NO: 23918 - DNA, 21 bp, Artificial Sequence
  Synthetic
gtgatgccccctttgatgaca

SEQ ID NO: 23919 - DNA, 25 bp, Artificial Sequence
  Synthetic
cagaaaataactggaggccttatgg

SEQ ID NO: 23920 - DNA, 20 bp, Artificial Sequence
  Synthetic
acagagattcgcttggggaa

SEQ ID NO: 23921 - DNA, 23 bp, Artificial Sequence
  Synthetic
agggacaacatgaccaagaaaat

SEQ ID NO: 23922 - DNA, 21 bp, Artificial Sequence
  Synthetic
ccgttggagggaatgagaaga

SEQ ID NO: 23923 - DNA, 23 bp, Artificial Sequence
  Synthetic
tccaatcctctgatgatttcgct

SEQ ID NO: 23924 - DNA, 20 bp, Artificial Sequence
  Synthetic
aacaacgaccttggaccagc

SEQ ID NO: 23925 - DNA, 23 bp, Artificial Sequence
  Synthetic
tcttccctagcagttcatatcgg

SEQ ID NO: 23926 - DNA, 20 bp, Artificial Sequence
  Synthetic
ccagctacccgaccctacaa

SEQ ID NO: 23927 - DNA, 25 bp, Artificial Sequence
  Synthetic
tggaaccatataatgaagtgcaaga

SEQ ID NO: 23928 - DNA, 25 bp, Artificial Sequence
  Synthetic
acatgccttaaaacgaaagtatgga

SEQ ID NO: 23929 - DNA, 24 bp, Artificial Sequence
  Synthetic
tgacagtgtatttgacctgtcaga

SEQ ID NO: 23930 - DNA, 23 bp, Artificial Sequence
  Synthetic
gacgtggtccagattagatttgc

SEQ ID NO: 23931 - DNA, 23 bp, Artificial Sequence
  Synthetic
aaaagcaaagcacatgaagcaat

SEQ ID NO: 23932 - DNA, 22 bp, Artificial Sequence
  Synthetic
agagaattacaacaccccacca

SEQ ID NO: 23933 - DNA, 25 bp, Artificial Sequence
  Synthetic
ggccttcagatccatctattgttac

SEQ ID NO: 23934 - DNA, 23 bp, Artificial Sequence
  Synthetic
cacatggatacgaggaaattcca

SEQ ID NO: 23935 - DNA, 21 bp, Artificial Sequence
  Synthetic
tgccttaacatccagacgtgg

SEQ ID NO: 23936 - DNA, 25 bp, Artificial Sequence
  Synthetic
tcctgaaacacaacgtttagtatgg

SEQ ID NO: 23937 - DNA, 23 bp, Artificial Sequence
  Synthetic
attggttgtgttcctgctattgg

SEQ ID NO: 23938 - DNA, 24 bp, Artificial Sequence
  Synthetic
tttacgacgcgaacagttatttgc

SEQ ID NO: 23939 - DNA, 22 bp, Artificial Sequence
  Synthetic
gaaccctatgtttcatgcgacc

SEQ ID NO: 23940 - DNA, 24 bp, Artificial Sequence
  Synthetic
tctgcagtagtatggtacaacaga

SEQ ID NO: 23941 - DNA, 23 bp, Artificial Sequence
  Synthetic
ggctcaaatagaccagtgattca

SEQ ID NO: 23942 - DNA, 22 bp, Artificial Sequence
  Synthetic
ctcgaggtctggatacgagatg

SEQ ID NO: 23943 - DNA, 23 bp, Artificial Sequence
  Synthetic
aaaagtacacatcaggaaggcaa

SEQ ID NO: 23944 - DNA, 24 bp, Artificial Sequence
  Synthetic
aaaaggtcgaaaggttgaaacatg

SEQ ID NO: 23945 - DNA, 24 bp, Artificial Sequence
  Synthetic
atgctagaaagagaattggtccgt

SEQ ID NO: 23946 - DNA, 22 bp, Artificial Sequence
  Synthetic
tctctcttggaaatgtgccaca

SEQ ID NO: 23947 - DNA, 25 bp, Artificial Sequence
  Synthetic
gaagagcaacagctattctcagaaa

SEQ ID NO: 23948 - DNA, 20 bp, Artificial Sequence
  Synthetic
agatcaatggccctgagtca

SEQ ID NO: 23949 - DNA, 20 bp, Artificial Sequence
  Synthetic
tgccccaccagaacagagta

SEQ ID NO: 23950 - DNA, 24 bp, Artificial Sequence
  Synthetic
aagagatatggcccagcattaagc

SEQ ID NO: 23951 - DNA, 25 bp, Artificial Sequence
  Synthetic
tggaggagtattgcaaacattatgg

SEQ ID NO: 23952 - DNA, 25 bp, Artificial Sequence
  Synthetic
ggttagattaagggtttgtgtacgt

SEQ ID NO: 23953 - DNA, 25 bp, Artificial Sequence
  Synthetic
aaaaggagattgtttttggacagtg

SEQ ID NO: 23954 - DNA, 23 bp, Artificial Sequence
  Synthetic
gggaagtggatctagaacggttc

SEQ ID NO: 23955 - DNA, 22 bp, Artificial Sequence
  Synthetic
gtggatcacgttctggtagacc

SEQ ID NO: 23956 - DNA, 20 bp, Artificial Sequence
  Synthetic
actggcggtgtcactcaatc

SEQ ID NO: 23957 - DNA, 21 bp, Artificial Sequence
  Synthetic
agcagcaccagacaatgcatt

SEQ ID NO: 23958 - DNA, 25 bp, Artificial Sequence
  Synthetic
agaccctataaatgcaacagatgtt

SEQ ID NO: 23959 - DNA, 23 bp, Artificial Sequence
  Synthetic
taggtgatacagagaatccagca

SEQ ID NO: 23960 - DNA, 25 bp, Artificial Sequence
  Synthetic
gtgtgccattagaattagtggacac

SEQ ID NO: 23961 - DNA, 21 bp, Artificial Sequence
  Synthetic
ctagtggacagcagtgacctt

SEQ ID NO: 23962 - DNA, 25 bp, Artificial Sequence
  Synthetic
ctgtgtggaaacctggatattgtgt

SEQ ID NO: 23963 - DNA, 24 bp, Artificial Sequence
  Synthetic
gtgcctggatattttacacagcag

SEQ ID NO: 23964 - DNA, 24 bp, Artificial Sequence
  Synthetic
agaagtgtaccagtagcattgttt

SEQ ID NO: 23965 - DNA, 21 bp, Artificial Sequence
  Synthetic
agatggaaacgaggtgtctgt

SEQ ID NO: 23966 - DNA, 21 bp, Artificial Sequence
  Synthetic
cattggcagcatctgaaagca

SEQ ID NO: 23967 - DNA, 23 bp, Artificial Sequence
  Synthetic
atgtgcattttaccaaggaagca

SEQ ID NO: 23968 - DNA, 20 bp, Artificial Sequence
  Synthetic
ttttacatgggtggcggatg

SEQ ID NO: 23969 - DNA, 20 bp, Artificial Sequence
  Synthetic
caggtgggggtcgggtaaca

SEQ ID NO: 23970 - DNA, 23 bp, Artificial Sequence
  Synthetic
acagaccctgttacacaatctgc

SEQ ID NO: 23971 - DNA, 24 bp, Artificial Sequence
  Synthetic
gtatccaccctgactcatttgaat

SEQ ID NO: 23972 - DNA, 25 bp, Artificial Sequence
  Synthetic
ccacagtccggtaaactttatctac

SEQ ID NO: 23973 - DNA, 20 bp, Artificial Sequence
  Synthetic
cattgggatgctgcaaagcc

SEQ ID NO: 23974 - DNA, 25 bp, Artificial Sequence
  Synthetic
tgccaccagctataaacattatctg

SEQ ID NO: 23975 - DNA, 23 bp, Artificial Sequence
  Synthetic
tctacctcctctagaaagcggtc

SEQ ID NO: 23976 - DNA, 25 bp, Artificial Sequence
  Synthetic
cttgatcctatgattgttgttggca

SEQ ID NO: 23977 - DNA, 25 bp, Artificial Sequence
  Synthetic
gcactatccctatacaatagacacc

SEQ ID NO: 23978 - DNA, 23 bp, Artificial Sequence
  Synthetic
tagcgaatggtatgttgtgacag

SEQ ID NO: 23979 - DNA, 25 bp, Artificial Sequence
  Synthetic
tttcacctcagagacaaagcaaaag

SEQ ID NO: 23980 - DNA, 21 bp, Artificial Sequence
  Synthetic
gtgccgctgcagaagaagtaa

SEQ ID NO: 23981 - DNA, 25 bp, Artificial Sequence
  Synthetic
ccaaattatttctgctcctgttacc

SEQ ID NO: 23982 - DNA, 20 bp, Artificial Sequence
  Synthetic
ctccagagagtcgccccgta

SEQ ID NO: 23983 - DNA, 25 bp, Artificial Sequence
  Synthetic
agaccctataagttcaggttctgaa

SEQ ID NO: 23984 - DNA, 22 bp, Artificial Sequence
  Synthetic
ggggagggatttcaacgtgtta

SEQ ID NO: 23985 - DNA, 25 bp, Artificial Sequence
  Synthetic
gaacaatacgagtcagcagattagg

SEQ ID NO: 23986 - DNA, 25 bp, Artificial Sequence
  Synthetic
tgaaggagaatctatgatcatgccc

SEQ ID NO: 23987 - DNA, 25 bp, Artificial Sequence
  Synthetic
aatgttttacagatggctctttggt

SEQ ID NO: 23988 - DNA, 25 bp, Artificial Sequence
  Synthetic
tgtctttaacccagaaagagagaga

SEQ ID NO: 23989 - DNA, 20 bp, Artificial Sequence
  Synthetic
ccagccactggtgaacactg

SEQ ID NO: 23990 - DNA, 23 bp, Artificial Sequence
  Synthetic
ctcggatttaacaagcattgctg

SEQ ID NO: 23991 - DNA, 20 bp, Artificial Sequence
  Synthetic
gcagtttggcttcgaggtgc

SEQ ID NO: 23992 - DNA, 19 bp, Artificial Sequence
  Synthetic
ccagagacggtgttgcgcc

SEQ ID NO: 23993 - DNA, 22 bp, Artificial Sequence
  Synthetic
gtagacacccagttatgcagtg

SEQ ID NO: 23994 - DNA, 20 bp, Artificial Sequence
  Synthetic
agtaggtgcctccagagccc

SEQ ID NO: 23995 - DNA, 19 bp, Artificial Sequence
  Synthetic
ccggtatcgggccagaggt

SEQ ID NO: 23996 - DNA, 20 bp, Artificial Sequence
  Synthetic
cctggggccaccttcatcac

SEQ ID NO: 23997 - DNA, 20 bp, Artificial Sequence
  Synthetic
gtggctgcctttgggatgca

SEQ ID NO: 23998 - DNA, 21 bp, Artificial Sequence
  Synthetic
agttgatgatctgtaggcgca

SEQ ID NO: 23999 - DNA, 19 bp, Artificial Sequence
  Synthetic
atgcgggatctgccggtcg

SEQ ID NO: 24000 - DNA, 20 bp, Artificial Sequence
  Synthetic
actcgtgaggcaccccatcc

SEQ ID NO: 24001 - DNA, 20 bp, Artificial Sequence
  Synthetic
tccccgggagattcgcgaca

SEQ ID NO: 24002 - DNA, 21 bp, Artificial Sequence
  Synthetic
gtttcagatcccacgcctcca

SEQ ID NO: 24003 - DNA, 21 bp, Artificial Sequence
  Synthetic
agctatgcctcccgtcgactg

SEQ ID NO: 24004 - DNA, 20 bp, Artificial Sequence
  Synthetic
cggccaatcccggggtaact

SEQ ID NO: 24005 - DNA, 21 bp, Artificial Sequence
  Synthetic
cctgcgtagaacgatggggcg

SEQ ID NO: 24006 - DNA, 22 bp, Artificial Sequence
  Synthetic
gactctgtttccagccagaggg

SEQ ID NO: 24007 - DNA, 19 bp, Artificial Sequence
  Synthetic
ccgccatctcgtgggcctt

SEQ ID NO: 24008 - DNA, 19 bp, Artificial Sequence
  Synthetic
ggcctcattcgcctctcgc

SEQ ID NO: 24009 - DNA, 19 bp, Artificial Sequence
  Synthetic
gcaggcaggcctccagctt

SEQ ID NO: 24010 - DNA, 19 bp, Artificial Sequence
  Synthetic
gccgtgcctaggatgcgga

SEQ ID NO: 24011 - DNA, 18 bp, Artificial Sequence
  Synthetic
tgcgagcaaaggcggcga

SEQ ID NO: 24012 - DNA, 20 bp, Artificial Sequence
  Synthetic
tcgccagagggatctgcacc

SEQ ID NO: 24013 - DNA, 20 bp, Artificial Sequence
  Synthetic
cgacctcagctccgagtggg

SEQ ID NO: 24014 - DNA, 19 bp, Artificial Sequence
  Synthetic
cccacttttggcgcgacct

SEQ ID NO: 24015 - DNA, 19 bp, Artificial Sequence
  Synthetic
actcctgctggccctccct

SEQ ID NO: 24016 - DNA, 19 bp, Artificial Sequence
  Synthetic
catgagcaagggcccaggg

SEQ ID NO: 24017 - DNA, 18 bp, Artificial Sequence
  Synthetic
ttccggccgttagcgtgc

SEQ ID NO: 24018 - DNA, 20 bp, Artificial Sequence
  Synthetic
gcctctggctgttcagctcg

SEQ ID NO: 24019 - DNA, 18 bp, Artificial Sequence
  Synthetic
aggggtcagcggctgtca

SEQ ID NO: 24020 - DNA, 19 bp, Artificial Sequence
  Synthetic
cggccaggctctgaccaga

SEQ ID NO: 24021 - DNA, 19 bp, Artificial Sequence
  Synthetic
agatgcggcgcagacagcc

SEQ ID NO: 24022 - DNA, 20 bp, Artificial Sequence
  Synthetic
ctcgtcaggccgcgagagga

SEQ ID NO: 24023 - DNA, 19 bp, Artificial Sequence
  Synthetic
cctttgagcccgaggtgcc

SEQ ID NO: 24024 - DNA, 20 bp, Artificial Sequence
  Synthetic
gtagcgccgctgattctgga

SEQ ID NO: 24025 - DNA, 22 bp, Artificial Sequence
  Synthetic
tctgttccttctgctccagtgc

SEQ ID NO: 24026 - DNA, 19 bp, Artificial Sequence
  Synthetic
gatgcgcctgacgttgtgc

SEQ ID NO: 24027 - DNA, 25 bp, Artificial Sequence
  Synthetic
tcgaagagtttatatggatgtgcat

SEQ ID NO: 24028 - DNA, 22 bp, Artificial Sequence
  Synthetic
ttggcttctgacatctcccagc

SEQ ID NO: 24029 - DNA, 18 bp, Artificial Sequence
  Synthetic
agtagcgggcctcggtgt

SEQ ID NO: 24030 - DNA, 21 bp, Artificial Sequence
  Synthetic
gcagtggctatgcctccatgc

SEQ ID NO: 24031 - DNA, 22 bp, Artificial Sequence
  Synthetic
gagatggtgtccggagacccca

SEQ ID NO: 24032 - DNA, 21 bp, Artificial Sequence
  Synthetic
aagagccagggggggaagtcg

SEQ ID NO: 24033 - DNA, 21 bp, Artificial Sequence
  Synthetic
aagcctgcctcatccttgacc

SEQ ID NO: 24034 - DNA, 19 bp, Artificial Sequence
  Synthetic
ccctgggcttggttcgcct

SEQ ID NO: 24035 - DNA, 20 bp, Artificial Sequence
  Synthetic
tgggcagtaggctcggagtg

SEQ ID NO: 24036 - DNA, 19 bp, Artificial Sequence
  Synthetic
cccgcctggtgctggaagt

SEQ ID NO: 24037 - DNA, 22 bp, Artificial Sequence
  Synthetic
agatggccatcagtaggcaccc

SEQ ID NO: 24038 - DNA, 20 bp, Artificial Sequence
  Synthetic
cagtcctaggtcagcggccg

SEQ ID NO: 24039 - DNA, 22 bp, Artificial Sequence
  Synthetic
tgtgctggaaagagaggctgga

SEQ ID NO: 24040 - DNA, 19 bp, Artificial Sequence
  Synthetic
tgggacctggggccgtaga

SEQ ID NO: 24041 - DNA, 19 bp, Artificial Sequence
  Synthetic
tgctgtatgcctcgcagcg

SEQ ID NO: 24042 - DNA, 20 bp, Artificial Sequence
  Synthetic
ggggggcctggagtcgatca

SEQ ID NO: 24043 - DNA, 18 bp, Artificial Sequence
  Synthetic
tggcacgcgattggggca

SEQ ID NO: 24044 - DNA, 18 bp, Artificial Sequence
  Synthetic
aagggcgcacaccactcc

SEQ ID NO: 24045 - DNA, 19 bp, Artificial Sequence
  Synthetic
acaccctcaacccccgagt

SEQ ID NO: 24046 - DNA, 19 bp, Artificial Sequence
  Synthetic
gccctccagatcgccacct

SEQ ID NO: 24047 - DNA, 22 bp, Artificial Sequence
  Synthetic
tgacggatgtctttaacggcgc

SEQ ID NO: 24048 - DNA, 22 bp, Artificial Sequence
  Synthetic
gcgtaacgtcattgtccaccga

SEQ ID NO: 24049 - DNA, 20 bp, Artificial Sequence
  Synthetic
actgacccccttgagcacgc

SEQ ID NO: 24050 - DNA, 21 bp, Artificial Sequence
  Synthetic
gtgtcctggtttaaggccgca

SEQ ID NO: 24051 - DNA, 19 bp, Artificial Sequence
  Synthetic
tgtacccatcccggccctc

SEQ ID NO: 24052 - DNA, 21 bp, Artificial Sequence
  Synthetic
tcgatgagggagcaaacaccc

SEQ ID NO: 24053 - DNA, 21 bp, Artificial Sequence
  Synthetic
gtggtcagcagcagatagtga

SEQ ID NO: 24054 - DNA, 19 bp, Artificial Sequence
  Synthetic
cgtagcaccacgtggctgc

SEQ ID NO: 24055 - DNA, 19 bp, Artificial Sequence
  Synthetic
cgctctccgggcacgtctt

SEQ ID NO: 24056 - DNA, 21 bp, Artificial Sequence
  Synthetic
cccgtgcctccttactacgga

SEQ ID NO: 24057 - DNA, 19 bp, Artificial Sequence
  Synthetic
aggcctctgcgtccggagt

SEQ ID NO: 24058 - DNA, 21 bp, Artificial Sequence
  Synthetic
ctggatgagggagcgccaatt

SEQ ID NO: 24059 - DNA, 19 bp, Artificial Sequence
  Synthetic
ccagggtccccacagtgga

SEQ ID NO: 24060 - DNA, 19 bp, Artificial Sequence
  Synthetic
gggcagttcctcgttgcgc

SEQ ID NO: 24061 - DNA, 19 bp, Artificial Sequence
  Synthetic
cagacgcccccagccctaa

SEQ ID NO: 24062 - DNA, 20 bp, Artificial Sequence
  Synthetic
ccaccaccgtcagggagtct

SEQ ID NO: 24063 - DNA, 19 bp, Artificial Sequence
  Synthetic
cacgttgctgggtggggga

SEQ ID NO: 24064 - DNA, 20 bp, Artificial Sequence
  Synthetic
ctgtcctcccagggacccga

SEQ ID NO: 24065 - DNA, 22 bp, Artificial Sequence
  Synthetic
ggtggttacaggagacgtgggt

SEQ ID NO: 24066 - DNA, 19 bp, Artificial Sequence
  Synthetic
cgtagctcaccgccagctc

SEQ ID NO: 24067 - DNA, 22 bp, Artificial Sequence
  Synthetic
aacgatggaatggccaccaggt

SEQ ID NO: 24068 - DNA, 19 bp, Artificial Sequence
  Synthetic
gcaccgtcaggcacctgtg

SEQ ID NO: 24069 - DNA, 22 bp, Artificial Sequence
  Synthetic
gagtctgcgatagagggccagg

SEQ ID NO: 24070 - DNA, 21 bp, Artificial Sequence
  Synthetic
cgtacgtgcgtgtctttgccc

SEQ ID NO: 24071 - DNA, 21 bp, Artificial Sequence
  Synthetic
tggactcagccaccttgtcgt

SEQ ID NO: 24072 - DNA, 19 bp, Artificial Sequence
  Synthetic
gccgctgggtgacacagac

SEQ ID NO: 24073 - DNA, 22 bp, Artificial Sequence
  Synthetic
tttcaggctttgcaaacacagt

SEQ ID NO: 24074 - DNA, 22 bp, Artificial Sequence
  Synthetic
atagggtggacggtgagcaacc

SEQ ID NO: 24075 - DNA, 23 bp, Artificial Sequence
  Synthetic
aacaacatgtttggactgggtag

SEQ ID NO: 24076 - DNA, 20 bp, Artificial Sequence
  Synthetic
agaagtacgcctgctgcatt

SEQ ID NO: 24077 - DNA, 25 bp, Artificial Sequence
  Synthetic
gtagacattataaacgagcagagca

SEQ ID NO: 24078 - DNA, 21 bp, Artificial Sequence
  Synthetic
tttgggtggggttgtcatttc

SEQ ID NO: 24079 - DNA, 25 bp, Artificial Sequence
  Synthetic
atgtgttgttatttaaggcaaggga

SEQ ID NO: 24080 - DNA, 24 bp, Artificial Sequence
  Synthetic
gctggaaaaaaaaaggctacactg

SEQ ID NO: 24081 - DNA, 22 bp, Artificial Sequence
  Synthetic
aaacctactgaccacggacccg

SEQ ID NO: 24082 - DNA, 25 bp, Artificial Sequence
  Synthetic
accaggatatatgtcattgtttgca

SEQ ID NO: 24083 - DNA, 25 bp, Artificial Sequence
  Synthetic
tactgctactacgtgtacataacct

SEQ ID NO: 24084 - DNA, 20 bp, Artificial Sequence
  Synthetic
ctcctactcctgtagtgccg

SEQ ID NO: 24085 - DNA, 25 bp, Artificial Sequence
  Synthetic
aaatcgtatagttgtccccaaagtg

SEQ ID NO: 24086 - DNA, 24 bp, Artificial Sequence
  Synthetic
gctgtttgatgttaatcctggtga

SEQ ID NO: 24087 - DNA, 25 bp, Artificial Sequence
  Synthetic
tatcagattatttcgaatggctgca

SEQ ID NO: 24088 - DNA, 20 bp, Artificial Sequence
  Synthetic
actggctacaacgtgcacag

SEQ ID NO: 24089 - DNA, 23 bp, Artificial Sequence
  Synthetic
ggtgatacctaccgctttttaca

SEQ ID NO: 24090 - DNA, 20 bp, Artificial Sequence
  Synthetic
cagtgaccatgccctgcctt

SEQ ID NO: 24091 - DNA, 24 bp, Artificial Sequence
  Synthetic
ccattgtttggggcatatagttgt

SEQ ID NO: 24092 - DNA, 22 bp, Artificial Sequence
  Synthetic
ataccacttctgtcactggctg

SEQ ID NO: 24093 - DNA, 20 bp, Artificial Sequence
  Synthetic
tcctgaagaggaggagcgac

SEQ ID NO: 24094 - DNA, 24 bp, Artificial Sequence
  Synthetic
aaaacgaaagtatctgacaagccc

SEQ ID NO: 24095 - DNA, 21 bp, Artificial Sequence
  Synthetic
tgaagttatgtgccagcctcc

SEQ ID NO: 24096 - DNA, 25 bp, Artificial Sequence
  Synthetic
ggcagcatggataaataaatgttgc

SEQ ID NO: 24097 - DNA, 23 bp, Artificial Sequence
  Synthetic
aaaagctggctattccgttgatg

SEQ ID NO: 24098 - DNA, 22 bp, Artificial Sequence
  Synthetic
agaagaaccaggtcccctcagc

SEQ ID NO: 24099 - DNA, 24 bp, Artificial Sequence
  Synthetic
attcctttggaaactttacctcca

SEQ ID NO: 24100 - DNA, 20 bp, Artificial Sequence
  Synthetic
ctgacccgattcctcccaga

SEQ ID NO: 24101 - DNA, 24 bp, Artificial Sequence
  Synthetic
agcccaatttcgactattgttgaa

SEQ ID NO: 24102 - DNA, 23 bp, Artificial Sequence
  Synthetic
aattgcctttcagatgacactgt

SEQ ID NO: 24103 - DNA, 21 bp, Artificial Sequence
  Synthetic
ggttgtgaaccagcgttaggt

SEQ ID NO: 24104 - DNA, 22 bp, Artificial Sequence
  Synthetic
tttcagctgaattgtcccagtt

SEQ ID NO: 24105 - DNA, 21 bp, Artificial Sequence
  Synthetic
ttgcggaacagcattaacaga

SEQ ID NO: 24106 - DNA, 22 bp, Artificial Sequence
  Synthetic
gcttgcctgcagtgttggaaac

SEQ ID NO: 24107 - DNA, 21 bp, Artificial Sequence
  Synthetic
ctccaggagcttctgttgggc

SEQ ID NO: 24108 - DNA, 21 bp, Artificial Sequence
  Synthetic
acagacagcaggaggcacaag

SEQ ID NO: 24109 - DNA, 20 bp, Artificial Sequence
  Synthetic
gcacagggggggtacaggaa

SEQ ID NO: 24110 - DNA, 23 bp, Artificial Sequence
  Synthetic
cagcaacactgtcaatatgcaca

SEQ ID NO: 24111 - DNA, 25 bp, Artificial Sequence
  Synthetic
agaaacaccagaatggattgtaaga

SEQ ID NO: 24112 - DNA, 24 bp, Artificial Sequence
  Synthetic
ggcacaaatgacaatgtcagaatg

SEQ ID NO: 24113 - DNA, 21 bp, Artificial Sequence
  Synthetic
gctgcagccattatgtgatgc

SEQ ID NO: 24114 - DNA, 23 bp, Artificial Sequence
  Synthetic
tgatgcaaactggaaatgcttct

SEQ ID NO: 24115 - DNA, 20 bp, Artificial Sequence
  Synthetic
acatggaccaaggtgtctgg

SEQ ID NO: 24116 - DNA, 22 bp, Artificial Sequence
  Synthetic
acagaagacaggatccagcggc

SEQ ID NO: 24117 - DNA, 21 bp, Artificial Sequence
  Synthetic
gatggtcaacgtgcagtaaca

SEQ ID NO: 24118 - DNA, 24 bp, Artificial Sequence
  Synthetic
tggcgttactgcttttcttattgt

SEQ ID NO: 24119 - DNA, 23 bp, Artificial Sequence
  Synthetic
atcctgtagtactgtggacacct

SEQ ID NO: 24120 - DNA, 19 bp, Artificial Sequence
  Synthetic
attgggacccgacccccca

SEQ ID NO: 24121 - DNA, 25 bp, Artificial Sequence
  Synthetic
acagaggaaaccatactatttgagc

SEQ ID NO: 24122 - DNA, 23 bp, Artificial Sequence
  Synthetic
gttcccaaggtgtctggatatca

SEQ ID NO: 24123 - DNA, 25 bp, Artificial Sequence
  Synthetic
acccagctatttattatagggtgca

SEQ ID NO: 24124 - DNA, 24 bp, Artificial Sequence
  Synthetic
tctgtttacgtagggaacagatgt

SEQ ID NO: 24125 - DNA, 24 bp, Artificial Sequence
  Synthetic
actacacgtagcaccaatatgact

SEQ ID NO: 24126 - DNA, 24 bp, Artificial Sequence
  Synthetic
gtactgttgtgtatgtatgggtgg

SEQ ID NO: 24127 - DNA, 20 bp, Artificial Sequence
  Synthetic
ccggtttcggtcgtgcacaa

SEQ ID NO: 24128 - DNA, 22 bp, Artificial Sequence
  Synthetic
tgagtgtcgtacagcctccagg

SEQ ID NO: 24129 - DNA, 20 bp, Artificial Sequence
  Synthetic
gcgcgcgacaaggaagactt

SEQ ID NO: 24130 - DNA, 19 bp, Artificial Sequence
  Synthetic
cgccagagctctcgcgcat

SEQ ID NO: 24131 - DNA, 21 bp, Artificial Sequence
  Synthetic
tctcaccgaatgtggccgtgc

SEQ ID NO: 24132 - DNA, 20 bp, Artificial Sequence
  Synthetic
cgtcatgttcggcttggcct

SEQ ID NO: 24133 - DNA, 20 bp, Artificial Sequence
  Synthetic
ggatggggcgccttgcaata

SEQ ID NO: 24134 - DNA, 20 bp, Artificial Sequence
  Synthetic
tgacttcaacgccagcacgg

SEQ ID NO: 24135 - DNA, 22 bp, Artificial Sequence
  Synthetic
ccttgctcttactcggacctgc

SEQ ID NO: 24136 - DNA, 21 bp, Artificial Sequence
  Synthetic
attccctcactggcctgtggt

SEQ ID NO: 24137 - DNA, 22 bp, Artificial Sequence
  Synthetic
ctaaaaggtgctttgacgcgcg

SEQ ID NO: 24138 - DNA, 22 bp, Artificial Sequence
  Synthetic
tggcccagctgatggctatacc

SEQ ID NO: 24139 - DNA, 22 bp, Artificial Sequence
  Synthetic
tcacgcagatgtactccagtgc

SEQ ID NO: 24140 - DNA, 21 bp, Artificial Sequence
  Synthetic
caggtcgggtacttgcatgcc

SEQ ID NO: 24141 - DNA, 22 bp, Artificial Sequence
  Synthetic
ctaccaccatccttggcatcgg

SEQ ID NO: 24142 - DNA, 20 bp, Artificial Sequence
  Synthetic
caccgacgccctcatgacag

SEQ ID NO: 24143 - DNA, 20 bp, Artificial Sequence
  Synthetic
ccgtcaggctcagggcgtat

SEQ ID NO: 24144 - DNA, 22 bp, Artificial Sequence
  Synthetic
atacatcgccacctgcatgcaa

SEQ ID NO: 24145 - DNA, 22 bp, Artificial Sequence
  Synthetic
ttctgggccaaacacatgtgga

SEQ ID NO: 24146 - DNA, 22 bp, Artificial Sequence
  Synthetic
tgtcgtcaacttgctgcctgga

SEQ ID NO: 24147 - DNA, 20 bp, Artificial Sequence
  Synthetic
cgaaacccgcgccaaacttt

SEQ ID NO: 24148 - DNA, 18 bp, Artificial Sequence
  Synthetic
cgtttagcgcgggggtca

SEQ ID NO: 24149 - DNA, 20 bp, Artificial Sequence
  Synthetic
cctgggcacggcctgattac

SEQ ID NO: 24150 - DNA, 22 bp, Artificial Sequence
  Synthetic
acctggagcctgagcaggtaga

SEQ ID NO: 24151 - DNA, 20 bp, Artificial Sequence
  Synthetic
cgcaaggctcctcaccatgg

SEQ ID NO: 24152 - DNA, 22 bp, Artificial Sequence
  Synthetic
tggattccagtattcccccgct

SEQ ID NO: 24153 - DNA, 20 bp, Artificial Sequence
  Synthetic
aatcgcgcccacaatgctgg

SEQ ID NO: 24154 - DNA, 20 bp, Artificial Sequence
  Synthetic
gggctgcctgggaaacagtt

SEQ ID NO: 24155 - DNA, 19 bp, Artificial Sequence
  Synthetic
ccacccctcagagcgtgga

SEQ ID NO: 24156 - DNA, 21 bp, Artificial Sequence
  Synthetic
cgcgattgatgcggatttgcc

SEQ ID NO: 24157 - DNA, 20 bp, Artificial Sequence
  Synthetic
cgaggtgggcgtaacgcttg

SEQ ID NO: 24158 - DNA, 21 bp, Artificial Sequence
  Synthetic
tcatgcccgggaagagtttgc

SEQ ID NO: 24159 - DNA, 19 bp, Artificial Sequence
  Synthetic
gggcggacaatgccgtctg

SEQ ID NO: 24160 - DNA, 20 bp, Artificial Sequence
  Synthetic
cagcgtcagtccgaacgtcc

SEQ ID NO: 24161 - DNA, 22 bp, Artificial Sequence
  Synthetic
gcgaaccgaaaacccaataccg

SEQ ID NO: 24162 - DNA, 22 bp, Artificial Sequence
  Synthetic
gaccaatacatcggcggcatcg

SEQ ID NO: 24163 - DNA, 20 bp, Artificial Sequence
  Synthetic
gcaaaatcaccgtcgccgcc

SEQ ID NO: 24164 - DNA, 20 bp, Artificial Sequence
  Synthetic
gctcccaagccgaaacgtga

SEQ ID NO: 24165 - DNA, 19 bp, Artificial Sequence
  Synthetic
gtgatgcggccgccgactt

SEQ ID NO: 24166 - DNA, 21 bp, Artificial Sequence
  Synthetic
aaccgggaatcaggtcggtgg

SEQ ID NO: 24167 - DNA, 19 bp, Artificial Sequence
  Synthetic
ggggtgtgcgtgccggaaa

SEQ ID NO: 24168 - DNA, 20 bp, Artificial Sequence
  Synthetic
ccgcccgcgacaatgtagtt

SEQ ID NO: 24169 - DNA, 20 bp, Artificial Sequence
  Synthetic
gcgcttttgggcgaacagcg

SEQ ID NO: 24170 - DNA, 19 bp, Artificial Sequence
  Synthetic
ggcagggaataccgcccgt

SEQ ID NO: 24171 - DNA, 19 bp, Artificial Sequence
  Synthetic
ccgccctgcaagccgatgt

SEQ ID NO: 24172 - DNA, 22 bp, Artificial Sequence
  Synthetic
gcttcctgccatttgctgtcgg

SEQ ID NO: 24173 - DNA, 20 bp, Artificial Sequence
  Synthetic
agtttcaccgccaccaacgc

SEQ ID NO: 24174 - DNA, 19 bp, Artificial Sequence
  Synthetic
ttcgtcccaagccggacac

SEQ ID NO: 24175 - DNA, 19 bp, Artificial Sequence
  Synthetic
ccgcgtttcgggcaactcg

SEQ ID NO: 24176 - DNA, 18 bp, Artificial Sequence
  Synthetic
ggtacgcgccgtggatga

SEQ ID NO: 24177 - DNA, 20 bp, Artificial Sequence
  Synthetic
ccgctttgccgtggaacagt

SEQ ID NO: 24178 - DNA, 19 bp, Artificial Sequence
  Synthetic
tgcaggtggaggtagcgcg

SEQ ID NO: 24179 - DNA, 20 bp, Artificial Sequence
  Synthetic
tagagcagttcggcgtgtgc

SEQ ID NO: 24180 - DNA, 22 bp, Artificial Sequence
  Synthetic
gccgccctaccgacttgataat

SEQ ID NO: 24181 - DNA, 20 bp, Artificial Sequence
  Synthetic
cgcgtgtcgcccaaaatgac

SEQ ID NO: 24182 - DNA, 22 bp, Artificial Sequence
  Synthetic
ccaaaaacgcctcgaatcgtgg

SEQ ID NO: 24183 - DNA, 21 bp, Artificial Sequence
  Synthetic
ttatgccgtctgtcgaacggc

SEQ ID NO: 24184 - DNA, 19 bp, Artificial Sequence
  Synthetic
ggcggagagtgcaccgtgt

SEQ ID NO: 24185 - DNA, 22 bp, Artificial Sequence
  Synthetic
ttcgggccgatgaaggtaaagc

SEQ ID NO: 24186 - DNA, 22 bp, Artificial Sequence
  Synthetic
gattcgtcggcgagtttgacgt

SEQ ID NO: 24187 - DNA, 18 bp, Artificial Sequence
  Synthetic
cgccggtggctttggaga

SEQ ID NO: 24188 - DNA, 21 bp, Artificial Sequence
  Synthetic
acgtcttccaatgtcagcggc

SEQ ID NO: 24189 - DNA, 19 bp, Artificial Sequence
  Synthetic
cgggtgtcgatgtcggcga

SEQ ID NO: 24190 - DNA, 18 bp, Artificial Sequence
  Synthetic
cgatgtgcgcgacaggga

SEQ ID NO: 24191 - DNA, 19 bp, Artificial Sequence
  Synthetic
ggcgttgcccagttgcagg

SEQ ID NO: 24192 - DNA, 20 bp, Artificial Sequence
  Synthetic
cctgcgaaatgctggtcgga

SEQ ID NO: 24193 - DNA, 20 bp, Artificial Sequence
  Synthetic
cgctcccttgcctacgatgc

SEQ ID NO: 24194 - DNA, 20 bp, Artificial Sequence
  Synthetic
gaccccagcttcaaagccgc

SEQ ID NO: 24195 - DNA, 20 bp, Artificial Sequence
  Synthetic
gttccgaccagtggggcaac

SEQ ID NO: 24196 - DNA, 21 bp, Artificial Sequence
  Synthetic
atcagccccctgcgtaccaaa

SEQ ID NO: 24197 - DNA, 22 bp, Artificial Sequence
  Synthetic
tcagtggtttgtcggcatggac

SEQ ID NO: 24198 - DNA, 19 bp, Artificial Sequence
  Synthetic
ccgccgccatcgagccttt

SEQ ID NO: 24199 - DNA, 19 bp, Artificial Sequence
  Synthetic
catggcagggcaggccgaa

SEQ ID NO: 24200 - DNA, 22 bp, Artificial Sequence
  Synthetic
tcttcgaggctgacgaaggcga

SEQ ID NO: 24201 - DNA, 20 bp, Artificial Sequence
  Synthetic
tcgatgctgtcgaacgcgcc

SEQ ID NO: 24202 - DNA, 22 bp, Artificial Sequence
  Synthetic
gattcgtccgcctgatacacgg

SEQ ID NO: 24203 - DNA, 18 bp, Artificial Sequence
  Synthetic
tgcggcgaggcgtgcatt

SEQ ID NO: 24204 - DNA, 21 bp, Artificial Sequence
  Synthetic
cgtccaaacgcgccatttcgc

SEQ ID NO: 24205 - DNA, 18 bp, Artificial Sequence
  Synthetic
tcgtgccacggcagcatg

SEQ ID NO: 24206 - DNA, 19 bp, Artificial Sequence
  Synthetic
cgccacggcgtgttgtcga

SEQ ID NO: 24207 - DNA, 21 bp, Artificial Sequence
  Synthetic
tgtttggtccgtcgggttcgg

SEQ ID NO: 24208 - DNA, 21 bp, Artificial Sequence
  Synthetic
aacaaccagaatgaggcggca

SEQ ID NO: 24209 - DNA, 21 bp, Artificial Sequence
  Synthetic
gcggcaacatgcacgatacga

SEQ ID NO: 24210 - DNA, 18 bp, Artificial Sequence
  Synthetic
ccgtcagcggcaacagca

SEQ ID NO: 24211 - DNA, 19 bp, Artificial Sequence
  Synthetic
gccgccgtctgcatcagca

SEQ ID NO: 24212 - DNA, 20 bp, Artificial Sequence
  Synthetic
cggcacgcaaaacctgtacg

SEQ ID NO: 24213 - DNA, 22 bp, Artificial Sequence
  Synthetic
cgttgtgcattgaagggcgaac

SEQ ID NO: 24214 - DNA, 19 bp, Artificial Sequence
  Synthetic
cggcgacgggggaatttgc

SEQ ID NO: 24215 - DNA, 22 bp, Artificial Sequence
  Synthetic
cgccgtaacccatttccgcttc

SEQ ID NO: 24216 - DNA, 22 bp, Artificial Sequence
  Synthetic
caacacgctgttgggtatggga

SEQ ID NO: 24217 - DNA, 19 bp, Artificial Sequence
  Synthetic
tttgccgtatccgggcggt

SEQ ID NO: 24218 - DNA, 20 bp, Artificial Sequence
  Synthetic
ggtggaacggaagctgctgg

SEQ ID NO: 24219 - DNA, 22 bp, Artificial Sequence
  Synthetic
ccgctgtcggcttcaaaatggt

SEQ ID NO: 24220 - DNA, 19 bp, Artificial Sequence
  Synthetic
gtttgcgcgtcagctcgac

SEQ ID NO: 24221 - DNA, 21 bp, Artificial Sequence
  Synthetic
ttttccggcaggagcttgtcg

SEQ ID NO: 24222 - DNA, 21 bp, Artificial Sequence
  Synthetic
gcgtgccgcagattttcatcg

SEQ ID NO: 24223 - DNA, 22 bp, Artificial Sequence
  Synthetic
aagcctgcgccttttgcattcg

SEQ ID NO: 24224 - DNA, 21 bp, Artificial Sequence
  Synthetic
aagtcggcgtagatgtgccca

SEQ ID NO: 24225 - DNA, 22 bp, Artificial Sequence
  Synthetic
aaccctgaaatcgtcgaagcgc

SEQ ID NO: 24226 - DNA, 19 bp, Artificial Sequence
  Synthetic
gaaccggcgggcaggatgt

SEQ ID NO: 24227 - DNA, 19 bp, Artificial Sequence
  Synthetic
ccggcgatggtctgcctga

SEQ ID NO: 24228 - DNA, 20 bp, Artificial Sequence
  Synthetic
aaaggtcgatgacgcgcacg

SEQ ID NO: 24229 - DNA, 20 bp, Artificial Sequence
  Synthetic
aatcggcaactgcggttccc

SEQ ID NO: 24230 - DNA, 20 bp, Artificial Sequence
  Synthetic
gctttcagacgacgtcaggt

SEQ ID NO: 24231 - DNA, 20 bp, Artificial Sequence
  Synthetic
gcaaggtcggcggcgcttta

SEQ ID NO: 24232 - DNA, 21 bp, Artificial Sequence
  Synthetic
catgttgcgcgggatttctgg

SEQ ID NO: 24233 - DNA, 19 bp, Artificial Sequence
  Synthetic
gggcatgaccgccgccata

SEQ ID NO: 24234 - DNA, 22 bp, Artificial Sequence
  Synthetic
aacgtggtcgatgtggttgcag

SEQ ID NO: 24235 - DNA, 19 bp, Artificial Sequence
  Synthetic
atgccgaacgtcccccagc

SEQ ID NO: 24236 - DNA, 21 bp, Artificial Sequence
  Synthetic
aggcagtggagtcgaggatgt

SEQ ID NO: 24237 - DNA, 18 bp, Artificial Sequence
  Synthetic
gggttgccgccgaccaaa

SEQ ID NO: 24238 - DNA, 20 bp, Artificial Sequence
  Synthetic
ttgatgccgacgacctgtcc

SEQ ID NO: 24239 - DNA, 21 bp, Artificial Sequence
  Synthetic
gcttcgccgtcgccttgttta

SEQ ID NO: 24240 - DNA, 22 bp, Artificial Sequence
  Synthetic
ttcgcgcccaaccgttatttgg

SEQ ID NO: 24241 - DNA, 21 bp, Artificial Sequence
  Synthetic
aaaaccctgcaccgcagtgat

SEQ ID NO: 24242 - DNA, 19 bp, Artificial Sequence
  Synthetic
gtagcgcgctgatgcagga

SEQ ID NO: 24243 - DNA, 19 bp, Artificial Sequence
  Synthetic
cgcaaggcaggccgtggtt

SEQ ID NO: 24244 - DNA, 20 bp, Artificial Sequence
  Synthetic
gggttcggacggcatctgtc

SEQ ID NO: 24245 - DNA, 22 bp, Artificial Sequence
  Synthetic
agccataagctgcccgtttcgg

SEQ ID NO: 24246 - DNA, 20 bp, Artificial Sequence
  Synthetic
gggtatggacggcagcaagg

SEQ ID NO: 24247 - DNA, 19 bp, Artificial Sequence
  Synthetic
tgctcctgctcgcccacga

SEQ ID NO: 24248 - DNA, 18 bp, Artificial Sequence
  Synthetic
agacggatgcgagggcgt

SEQ ID NO: 24249 - DNA, 21 bp, Artificial Sequence
  Synthetic
gggtaccttccacgacgcgta

SEQ ID NO: 24250 - DNA, 19 bp, Artificial Sequence
  Synthetic
ctgcgggcagttcgttggt

SEQ ID NO: 24251 - DNA, 21 bp, Artificial Sequence
  Synthetic
tttgggcgtgtcgtgtgttcc

SEQ ID NO: 24252 - DNA, 19 bp, Artificial Sequence
  Synthetic
gcaaggtggcggctgtcga

SEQ ID NO: 24253 - DNA, 21 bp, Artificial Sequence
  Synthetic
gccgctgcaagggcttttttg

SEQ ID NO: 24254 - DNA, 20 bp, Artificial Sequence
  Synthetic
tccgttgcggatgtggtggg

SEQ ID NO: 24255 - DNA, 22 bp, Artificial Sequence
  Synthetic
atgaggaagttgcagtgtcggg

SEQ ID NO: 24256 - DNA, 21 bp, Artificial Sequence
  Synthetic
tgtgcaggctgtgtccgaagc

SEQ ID NO: 24257 - DNA, 20 bp, Artificial Sequence
  Synthetic
ggtgcgttgttctgttcgcc

SEQ ID NO: 24258 - DNA, 20 bp, Artificial Sequence
  Synthetic
ggaggcggtcagtatgccga

SEQ ID NO: 24259 - DNA, 22 bp, Artificial Sequence
  Synthetic
tttccgcaggttcggctgtact

SEQ ID NO: 24260 - DNA, 20 bp, Artificial Sequence
  Synthetic
aggctgtgttcgagttcggg

SEQ ID NO: 24261 - DNA, 20 bp, Artificial Sequence
  Synthetic
gggaagcggccgatgtgttt

SEQ ID NO: 24262 - DNA, 20 bp, Artificial Sequence
  Synthetic
gcttttcgcgtgatgccccg

SEQ ID NO: 24263 - DNA, 19 bp, Artificial Sequence
  Synthetic
ggtgcaggcggggtggaaa

SEQ ID NO: 24264 - DNA, 24 bp, Artificial Sequence
  Synthetic
ttgatggctttaggttttgtcgtt

SEQ ID NO: 24265 - DNA, 19 bp, Artificial Sequence
  Synthetic
caggttgcggctgccttct

SEQ ID NO: 24266 - DNA, 19 bp, Artificial Sequence
  Synthetic
caggtgtcgccgctgacga

SEQ ID NO: 24267 - DNA, 21 bp, Artificial Sequence
  Synthetic
agcgtgtgttttcggggttga

SEQ ID NO: 24268 - DNA, 19 bp, Artificial Sequence
  Synthetic
ccgacggtcagcgggatga

SEQ ID NO: 24269 - DNA, 20 bp, Artificial Sequence
  Synthetic
acgccatgtttttcggcggc

SEQ ID NO: 24270 - DNA, 18 bp, Artificial Sequence
  Synthetic
tggcactgcgttggacgg

SEQ ID NO: 24271 - DNA, 18 bp, Artificial Sequence
  Synthetic
agcgcgtcggcatcggta

SEQ ID NO: 24272 - DNA, 21 bp, Artificial Sequence
  Synthetic
aaccagtcgtcgcttttgcct

SEQ ID NO: 24273 - DNA, 19 bp, Artificial Sequence
  Synthetic
ctcttgcgccgtcctgcct

SEQ ID NO: 24274 - DNA, 18 bp, Artificial Sequence
  Synthetic
agcagggtggcggtcaac

SEQ ID NO: 24275 - DNA, 18 bp, Artificial Sequence
  Synthetic
cgcctttgccgcgtgttt

SEQ ID NO: 24276 - DNA, 20 bp, Artificial Sequence
  Synthetic
gtttgcgacagtcggccatg

SEQ ID NO: 24277 - DNA, 22 bp, Artificial Sequence
  Synthetic
ttcgacaatgccggtaatgcgt

SEQ ID NO: 24278 - DNA, 21 bp, Artificial Sequence
  Synthetic
gacgtgttcctcgggttgcag

SEQ ID NO: 24279 - DNA, 19 bp, Artificial Sequence
  Synthetic
agccttcaacggcactgca

SEQ ID NO: 24280 - DNA, 20 bp, Artificial Sequence
  Synthetic
ccggcaaaatgcaggcaggc

SEQ ID NO: 24281 - DNA, 19 bp, Artificial Sequence
  Synthetic
acgatgatgcccatcccgc

SEQ ID NO: 24282 - DNA, 20 bp, Artificial Sequence
  Synthetic
ggagagggcggcgggtatca

SEQ ID NO: 24283 - DNA, 22 bp, Artificial Sequence
  Synthetic
tcgaaacagccttggatgtcgc

SEQ ID NO: 24284 - DNA, 19 bp, Artificial Sequence
  Synthetic
ttttggacacgctgccgga

SEQ ID NO: 24285 - DNA, 22 bp, Artificial Sequence
  Synthetic
gaacggattcggtttgcttggc

SEQ ID NO: 24286 - DNA, 19 bp, Artificial Sequence
  Synthetic
ggtatgctgggcgcgtcga

SEQ ID NO: 24287 - DNA, 22 bp, Artificial Sequence
  Synthetic
aagccacttcgataaaggcggc

SEQ ID NO: 24288 - DNA, 22 bp, Artificial Sequence
  Synthetic
tcggcaatctggaaatggtcgt

SEQ ID NO: 24289 - DNA, 19 bp, Artificial Sequence
  Synthetic
cacttctcccgcccccgaa

SEQ ID NO: 24290 - DNA, 20 bp, Artificial Sequence
  Synthetic
accgcatccgtgccgtattc

SEQ ID NO: 24291 - DNA, 19 bp, Artificial Sequence
  Synthetic
acaggcgcgcgagaaagac

SEQ ID NO: 24292 - DNA, 18 bp, Artificial Sequence
  Synthetic
aaacaggtgcgccgacgg

SEQ ID NO: 24293 - DNA, 19 bp, Artificial Sequence
  Synthetic
tcctgtggcacggctaccc

SEQ ID NO: 24294 - DNA, 19 bp, Artificial Sequence
  Synthetic
cgccgtgcggttgccgata

SEQ ID NO: 24295 - DNA, 18 bp, Artificial Sequence
  Synthetic
cccgaaggcagcgcgttt

SEQ ID NO: 24296 - DNA, 19 bp, Artificial Sequence
  Synthetic
agccgcccgcctcgttttg

SEQ ID NO: 24297 - DNA, 22 bp, Artificial Sequence
  Synthetic
aggcgcacaaattcttcctcgg

SEQ ID NO: 24298 - DNA, 18 bp, Artificial Sequence
  Synthetic
gcgatgtttgccgccgtc

SEQ ID NO: 24299 - DNA, 21 bp, Artificial Sequence
  Synthetic
ggtggttttcgtcgtggaggc

SEQ ID NO: 24300 - DNA, 19 bp, Artificial Sequence
  Synthetic
ccggtgatgcggacggctt

SEQ ID NO: 24301 - DNA, 20 bp, Artificial Sequence
  Synthetic
tcgctgtcggtttgcgaacc

SEQ ID NO: 24302 - DNA, 20 bp, Artificial Sequence
  Synthetic
cgttttcggcggcggatttc

SEQ ID NO: 24303 - DNA, 21 bp, Artificial Sequence
  Synthetic
gtctgtcgtcgaggcattcca

SEQ ID NO: 24304 - DNA, 22 bp, Artificial Sequence
  Synthetic
acgaaaacggccaagtcttggg

SEQ ID NO: 24305 - DNA, 24 bp, Artificial Sequence
  Synthetic
cctgttaacaagaaacggttttgc

SEQ ID NO: 24306 - DNA, 20 bp, Artificial Sequence
  Synthetic
cgactaccgttgctatgcgt

SEQ ID NO: 24307 - DNA, 18 bp, Artificial Sequence
  Synthetic
aattccgcgcgcgggcat

SEQ ID NO: 24308 - DNA, 19 bp, Artificial Sequence
  Synthetic
gccaaccatccgcttgccg

SEQ ID NO: 24309 - DNA, 19 bp, Artificial Sequence
  Synthetic
gcactgtttgccgagcgcg

SEQ ID NO: 24310 - DNA, 19 bp, Artificial Sequence
  Synthetic
tgaagggcgatgtcccgcg

SEQ ID NO: 24311 - DNA, 22 bp, Artificial Sequence
  Synthetic
ggctttggggcgacaaacagac

SEQ ID NO: 24312 - DNA, 20 bp, Artificial Sequence
  Synthetic
gccagcggctttccacaatg

SEQ ID NO: 24313 - DNA, 19 bp, Artificial Sequence
  Synthetic
aacgacgacgcgcaggtgg

SEQ ID NO: 24314 - DNA, 19 bp, Artificial Sequence
  Synthetic
gtttgcccgaacgtgcggt

SEQ ID NO: 24315 - DNA, 21 bp, Artificial Sequence
  Synthetic
gcagggcagtgtgtatccagt

SEQ ID NO: 24316 - DNA, 21 bp, Artificial Sequence
  Synthetic
aaacagtcatgccgatgccga

SEQ ID NO: 24317 - DNA, 22 bp, Artificial Sequence
  Synthetic
acgcatgatatttggctggcgg

SEQ ID NO: 24318 - DNA, 21 bp, Artificial Sequence
  Synthetic
cgccgtacacgaggtcttccg

SEQ ID NO: 24319 - DNA, 22 bp, Artificial Sequence
  Synthetic
aaccgtttacaccggaagatgt

SEQ ID NO: 24320 - DNA, 20 bp, Artificial Sequence
  Synthetic
atggtgatgatgattgcgcc

SEQ ID NO: 24321 - DNA, 22 bp, Artificial Sequence
  Synthetic
agaagtaacaggccgtctgaaa

SEQ ID NO: 24322 - DNA, 21 bp, Artificial Sequence
  Synthetic
tcatcgtcgaagaaagcggct

SEQ ID NO: 24323 - DNA, 19 bp, Artificial Sequence
  Synthetic
gtagggcggcgaggttggt

SEQ ID NO: 24324 - DNA, 22 bp, Artificial Sequence
  Synthetic
tccgagtccgaagcatcttgtg

SEQ ID NO: 24325 - DNA, 22 bp, Artificial Sequence
  Synthetic
tcgctgctcatcaggctaaggt

SEQ ID NO: 24326 - DNA, 22 bp, Artificial Sequence
  Synthetic
gttctttacgtttttgtggggc

SEQ ID NO: 24327 - DNA, 22 bp, Artificial Sequence
  Synthetic
aggcgtggatttccgttaccgt

SEQ ID NO: 24328 - DNA, 24 bp, Artificial Sequence
  Synthetic
gcatttttcggtatcggtgtaacg

SEQ ID NO: 24329 - DNA, 19 bp, Artificial Sequence
  Synthetic
ggcgtggcgatgattgccg

SEQ ID NO: 24330 - DNA, 21 bp, Artificial Sequence
  Synthetic
taagccaagccgttgcaaccg

SEQ ID NO: 24331 - DNA, 21 bp, Artificial Sequence
  Synthetic
acgtctggctttccattcggg

SEQ ID NO: 24332 - DNA, 21 bp, Artificial Sequence
  Synthetic
cctaccgtttttctgcttgcg

SEQ ID NO: 24333 - DNA, 20 bp, Artificial Sequence
  Synthetic
gcgtattgtctgtgcgcgga

SEQ ID NO: 24334 - DNA, 22 bp, Artificial Sequence
  Synthetic
cgaaaacacagcttccgaaccg

SEQ ID NO: 24335 - DNA, 21 bp, Artificial Sequence
  Synthetic
gcggcgaagatgaatgccaac

SEQ ID NO: 24336 - DNA, 22 bp, Artificial Sequence
  Synthetic
tgcactgaagccgagtattccg

SEQ ID NO: 24337 - DNA, 22 bp, Artificial Sequence
  Synthetic
gaccccgaacacgccaaaatct

SEQ ID NO: 24338 - DNA, 21 bp, Artificial Sequence
  Synthetic
aagcccaatgggagaaatcgt

SEQ ID NO: 24339 - DNA, 21 bp, Artificial Sequence
  Synthetic
acgcttcgaccgtccaatccc

SEQ ID NO: 24340 - DNA, 22 bp, Artificial Sequence
  Synthetic
ggcaacggcgtaaatcagtgcc

SEQ ID NO: 24341 - DNA, 19 bp, Artificial Sequence
  Synthetic
gacggtttcgcggctgtct

SEQ ID NO: 24342 - DNA, 21 bp, Artificial Sequence
  Synthetic
ccagcccgcgatcctgataca

SEQ ID NO: 24343 - DNA, 22 bp, Artificial Sequence
  Synthetic
aggagtggtaaccatgccgaca

SEQ ID NO: 24344 - DNA, 20 bp, Artificial Sequence
  Synthetic
gacttgttcgggcagcccca

SEQ ID NO: 24345 - DNA, 22 bp, Artificial Sequence
  Synthetic
ggcggttttgattttggagccg

SEQ ID NO: 24346 - DNA, 20 bp, Artificial Sequence
  Synthetic
acggtttatctgcccgccga

SEQ ID NO: 24347 - DNA, 19 bp, Artificial Sequence
  Synthetic
gaacgcaggctgccgagca

SEQ ID NO: 24348 - DNA, 20 bp, Artificial Sequence
  Synthetic
ggtgttgttcggcggcaagg

SEQ ID NO: 24349 - DNA, 18 bp, Artificial Sequence
  Synthetic
cggctgccgtgtcggtaa

SEQ ID NO: 24350 - DNA, 20 bp, Artificial Sequence
  Synthetic
agagcggcatatcgggatgc

SEQ ID NO: 24351 - DNA, 20 bp, Artificial Sequence
  Synthetic
tcgtcggcgtgtttaagcgc

SEQ ID NO: 24352 - DNA, 18 bp, Artificial Sequence
  Synthetic
tttgcccgccgtcgaacg

SEQ ID NO: 24353 - DNA, 21 bp, Artificial Sequence
  Synthetic
gttgtcgtttcccccgaagcc

SEQ ID NO: 24354 - DNA, 19 bp, Artificial Sequence
  Synthetic
gcatcggccctgcctacga

SEQ ID NO: 24355 - DNA, 20 bp, Artificial Sequence
  Synthetic
cgcgcgtcatatggtcgagc

SEQ ID NO: 24356 - DNA, 19 bp, Artificial Sequence
  Synthetic
atctggtgatgggccgccc

SEQ ID NO: 24357 - DNA, 20 bp, Artificial Sequence
  Synthetic
gcgcgaactcgaaaaaccgc

SEQ ID NO: 24358 - DNA, 22 bp, Artificial Sequence
  Synthetic
tggtggaaggcttcgaacatcg

SEQ ID NO: 24359 - DNA, 19 bp, Artificial Sequence
  Synthetic
ggccgggtttcgaccgtgt

SEQ ID NO: 24360 - DNA, 21 bp, Artificial Sequence
  Synthetic
gcccaattggaaaagggcagc

SEQ ID NO: 24361 - DNA, 19 bp, Artificial Sequence
  Synthetic
ccggcatccgcgccttgtt

SEQ ID NO: 24362 - DNA, 22 bp, Artificial Sequence
  Synthetic
accgtccgaccatcgtgtttgc

SEQ ID NO: 24363 - DNA, 21 bp, Artificial Sequence
  Synthetic
gacgagttccacgtcgttcgc

SEQ ID NO: 24364 - DNA, 19 bp, Artificial Sequence
  Synthetic
ggatgttgggcgcgggcat

SEQ ID NO: 24365 - DNA, 19 bp, Artificial Sequence
  Synthetic
gcgtgtcgggcaggtaggt

SEQ ID NO: 24366 - DNA, 22 bp, Artificial Sequence
  Synthetic
gtctgtgcccacatcggtctga

SEQ ID NO: 24367 - DNA, 20 bp, Artificial Sequence
  Synthetic
cgggaacggctctggcaacc

SEQ ID NO: 24368 - DNA, 19 bp, Artificial Sequence
  Synthetic
gacaaaggcgtgctggcgg

SEQ ID NO: 24369 - DNA, 22 bp, Artificial Sequence
  Synthetic
atacgcttagggtgtctgatcg

SEQ ID NO: 24370 - DNA, 22 bp, Artificial Sequence
  Synthetic
aagggttcgtccaaaagcagga

SEQ ID NO: 24371 - DNA, 22 bp, Artificial Sequence
  Synthetic
aacgttgtgaaacggtttgcgc

SEQ ID NO: 24372 - DNA, 20 bp, Artificial Sequence
  Synthetic
ggagttgccgcgttggaagt

SEQ ID NO: 24373 - DNA, 21 bp, Artificial Sequence
  Synthetic
ttctgcggatgtttttctccg

SEQ ID NO: 24374 - DNA, 19 bp, Artificial Sequence
  Synthetic
ggacagccggttccggtca

SEQ ID NO: 24375 - DNA, 22 bp, Artificial Sequence
  Synthetic
tcatcttgttgctgatggcgga

SEQ ID NO: 24376 - DNA, 21 bp, Artificial Sequence
  Synthetic
cggcaaccggcttcttcttcc

SEQ ID NO: 24377 - DNA, 19 bp, Artificial Sequence
  Synthetic
ctgacggcgcggcattcct

SEQ ID NO: 24378 - DNA, 19 bp, Artificial Sequence
  Synthetic
tgcgagatgctgggaacgg

SEQ ID NO: 24379 - DNA, 22 bp, Artificial Sequence
  Synthetic
gcgtgaaaccaagacattcggc

SEQ ID NO: 24380 - DNA, 22 bp, Artificial Sequence
  Synthetic
accgttattggcggatttggcg

SEQ ID NO: 24381 - DNA, 22 bp, Artificial Sequence
  Synthetic
ttggacaacgccctgaaggttg

SEQ ID NO: 24382 - DNA, 19 bp, Artificial Sequence
  Synthetic
ggctgaaatcaggcggcgc

SEQ ID NO: 24383 - DNA, 19 bp, Artificial Sequence
  Synthetic
tcgccgtcgccgtcagcta

SEQ ID NO: 24384 - DNA, 20 bp, Artificial Sequence
  Synthetic
agggcaattcgacgatgttg

SEQ ID NO: 24385 - DNA, 19 bp, Artificial Sequence
  Synthetic
gaagcgaggtcaggcggca

SEQ ID NO: 24386 - DNA, 22 bp, Artificial Sequence
  Synthetic
agccgataatcaggcgtgttgc

SEQ ID NO: 24387 - DNA, 19 bp, Artificial Sequence
  Synthetic
ggcgatggcggacggtatg

SEQ ID NO: 24388 - DNA, 20 bp, Artificial Sequence
  Synthetic
gcacatttttcggggcgcat

SEQ ID NO: 24389 - DNA, 20 bp, Artificial Sequence
  Synthetic
gtgattccggctgttcgcgg

SEQ ID NO: 24390 - DNA, 19 bp, Artificial Sequence
  Synthetic
tgccgaagcagaagccgaa

SEQ ID NO: 24391 - DNA, 19 bp, Artificial Sequence
  Synthetic
gcctcctggccgccgatta

SEQ ID NO: 24392 - DNA, 19 bp, Artificial Sequence
  Synthetic
taaggcttcgctgcgccag

SEQ ID NO: 24393 - DNA, 19 bp, Artificial Sequence
  Synthetic
agcaggaagccgcacaagc

SEQ ID NO: 24394 - DNA, 18 bp, Artificial Sequence
  Synthetic
cggcgcgcgggtcaaaat

SEQ ID NO: 24395 - DNA, 22 bp, Artificial Sequence
  Synthetic
gctgcatgaggacgctctatga

SEQ ID NO: 24396 - DNA, 20 bp, Artificial Sequence
  Synthetic
gcaggacggtcaaggcacac

SEQ ID NO: 24397 - DNA, 22 bp, Artificial Sequence
  Synthetic
tgctgacattgtgctacgtcga

SEQ ID NO: 24398 - DNA, 21 bp, Artificial Sequence
  Synthetic
aagcatcaacggcttggaggc

SEQ ID NO: 24399 - DNA, 22 bp, Artificial Sequence
  Synthetic
tggtggacacgcagaaaaaccg

SEQ ID NO: 24400 - DNA, 19 bp, Artificial Sequence
  Synthetic
cgccgccctgccttgtgaa

SEQ ID NO: 24401 - DNA, 22 bp, Artificial Sequence
  Synthetic
acatcgggcatttcttcccagc

SEQ ID NO: 24402 - DNA, 19 bp, Artificial Sequence
  Synthetic
atacggctgcatcgcggtc

SEQ ID NO: 24403 - DNA, 19 bp, Artificial Sequence
  Synthetic
cggaacgcctcaaagccgc

SEQ ID NO: 24404 - DNA, 22 bp, Artificial Sequence
  Synthetic
gtcaaatcgtggtttgacgggc

SEQ ID NO: 24405 - DNA, 20 bp, Artificial Sequence
  Synthetic
aaaagccgggcgcaaatcag

SEQ ID NO: 24406 - DNA, 21 bp, Artificial Sequence
  Synthetic
ccaaatgggcgaattggggcg

SEQ ID NO: 24407 - DNA, 18 bp, Artificial Sequence
  Synthetic
gcggcggcggttctcaaa

SEQ ID NO: 24408 - DNA, 18 bp, Artificial Sequence
  Synthetic
gcgcggcacttcgaccaa

SEQ ID NO: 24409 - DNA, 19 bp, Artificial Sequence
  Synthetic
atgcgcgcggatgtttggc

SEQ ID NO: 24410 - DNA, 20 bp, Artificial Sequence
  Synthetic
attgtccgaccatacgcccg

SEQ ID NO: 24411 - DNA, 23 bp, Artificial Sequence
  Synthetic
gagttcctgttgtcgctatttgc

SEQ ID NO: 24412 - DNA, 21 bp, Artificial Sequence
  Synthetic
gcgaagagcggaaaatcaaac

SEQ ID NO: 24413 - DNA, 22 bp, Artificial Sequence
  Synthetic
tcccgggtagcagccttttttg

SEQ ID NO: 24414 - DNA, 20 bp, Artificial Sequence
  Synthetic
aaatgccccgatggtgcagg

SEQ ID NO: 24415 - DNA, 21 bp, Artificial Sequence
  Synthetic
ctgttcggcagccgtttcacc

SEQ ID NO: 24416 - DNA, 18 bp, Artificial Sequence
  Synthetic
gcgcgatgtccatccgca

SEQ ID NO: 24417 - DNA, 19 bp, Artificial Sequence
  Synthetic
cccgccccgatcccttcta

SEQ ID NO: 24418 - DNA, 19 bp, Artificial Sequence
  Synthetic
atttggccgatgcgctgca

SEQ ID NO: 24419 - DNA, 22 bp, Artificial Sequence
  Synthetic
gttggcgatgacttcgttggtg

SEQ ID NO: 24420 - DNA, 22 bp, Artificial Sequence
  Synthetic
cgcattaatgccgtttatgcca

SEQ ID NO: 24421 - DNA, 21 bp, Artificial Sequence
  Synthetic
tggttttgccgatgtctgccg

SEQ ID NO: 24422 - DNA, 19 bp, Artificial Sequence
  Synthetic
gcagtaccgcccagcagga

SEQ ID NO: 24423 - DNA, 19 bp, Artificial Sequence
  Synthetic
ggtggtgcagcctgccgaa

SEQ ID NO: 24424 - DNA, 20 bp, Artificial Sequence
  Synthetic
tgtggacgacgtaaccgcgc

SEQ ID NO: 24425 - DNA, 22 bp, Artificial Sequence
  Synthetic
tccgccaccaaaaacctgatga

SEQ ID NO: 24426 - DNA, 22 bp, Artificial Sequence
  Synthetic
atttggacttcaaacgcggcag

SEQ ID NO: 24427 - DNA, 19 bp, Artificial Sequence
  Synthetic
tcaaaccataggccgcgcc

SEQ ID NO: 24428 - DNA, 19 bp, Artificial Sequence
  Synthetic
cgaagctgacgttggcggc

SEQ ID NO: 24429 - DNA, 22 bp, Artificial Sequence
  Synthetic
ttgcccatgccgaccataatcg

SEQ ID NO: 24430 - DNA, 22 bp, Artificial Sequence
  Synthetic
tcttcgggattggattcgccgg

SEQ ID NO: 24431 - DNA, 20 bp, Artificial Sequence
  Synthetic
aatcgttgctgccggcatcg

SEQ ID NO: 24432 - DNA, 22 bp, Artificial Sequence
  Synthetic
agccgcagtggattaagaaggg

SEQ ID NO: 24433 - DNA, 18 bp, Artificial Sequence
  Synthetic
tgctccccgaacgcgctt

SEQ ID NO: 24434 - DNA, 21 bp, Artificial Sequence
  Synthetic
acataaagccggcggcaaaca

SEQ ID NO: 24435 - DNA, 20 bp, Artificial Sequence
  Synthetic
gagcaggcggtatggtcggc

SEQ ID NO: 24436 - DNA, 23 bp, Artificial Sequence
  Synthetic
tccagcatcacatactcgaaagt

SEQ ID NO: 24437 - DNA, 21 bp, Artificial Sequence
  Synthetic
acgaagttttggtcgattgcc

SEQ ID NO: 24438 - DNA, 19 bp, Artificial Sequence
  Synthetic
gcaagggcgggttcggtaa

SEQ ID NO: 24439 - DNA, 20 bp, Artificial Sequence
  Synthetic
ggttttggcggcaggcgtat

SEQ ID NO: 24440 - DNA, 22 bp, Artificial Sequence
  Synthetic
tttggcggctttggatatcgga

SEQ ID NO: 24441 - DNA, 20 bp, Artificial Sequence
  Synthetic
aatcctgcatggcgagggtg

SEQ ID NO: 24442 - DNA, 19 bp, Artificial Sequence
  Synthetic
ggcgagtacggcgacctgt

SEQ ID NO: 24443 - DNA, 20 bp, Artificial Sequence
  Synthetic
cgctttcatgcgcctgaccg

SEQ ID NO: 24444 - DNA, 18 bp, Artificial Sequence
  Synthetic
tccgccgcgccgctttta

SEQ ID NO: 24445 - DNA, 19 bp, Artificial Sequence
  Synthetic
ggcccggggcgcatgattt

SEQ ID NO: 24446 - DNA, 17 bp, Artificial Sequence
  Synthetic
ttgttcgaccgccgcgt

SEQ ID NO: 24447 - DNA, 21 bp, Artificial Sequence
  Synthetic
ggttcgatggcttcggatgcc

SEQ ID NO: 24448 - DNA, 19 bp, Artificial Sequence
  Synthetic
ggacgagccgttgacgagc

SEQ ID NO: 24449 - DNA, 19 bp, Artificial Sequence
  Synthetic
caagcgcgcgcaggacgta

SEQ ID NO: 24450 - DNA, 20 bp, Artificial Sequence
  Synthetic
gcttcgccgaagcagacggg

SEQ ID NO: 24451 - DNA, 25 bp, Artificial Sequence
  Synthetic
aatttgcaggttatcactatgtgca

SEQ ID NO: 24452 - DNA, 19 bp, Artificial Sequence
  Synthetic
ggcgaaaaaggcgctggcg

SEQ ID NO: 24453 - DNA, 21 bp, Artificial Sequence
  Synthetic
gacgttgtgcaaggtttccgg

SEQ ID NO: 24454 - DNA, 18 bp, Artificial Sequence
  Synthetic
cagtccgcacgccccaat

SEQ ID NO: 24455 - DNA, 21 bp, Artificial Sequence
  Synthetic
actttggtggcgacgacttcg

SEQ ID NO: 24456 - DNA, 19 bp, Artificial Sequence
  Synthetic
gcgcccgaaatccccgtca

SEQ ID NO: 24457 - DNA, 19 bp, Artificial Sequence
  Synthetic
cgccatcgaagcctgcacg

SEQ ID NO: 24458 - DNA, 22 bp, Artificial Sequence
  Synthetic
acctgaaagacctgttcggcac

SEQ ID NO: 24459 - DNA, 20 bp, Artificial Sequence
  Synthetic
gcattggccgtcataccgct

SEQ ID NO: 24460 - DNA, 21 bp, Artificial Sequence
  Synthetic
aaaaccgtgttggagctcggc

SEQ ID NO: 24461 - DNA, 22 bp, Artificial Sequence
  Synthetic
ccctgcgacggttttagacagg

SEQ ID NO: 24462 - DNA, 22 bp, Artificial Sequence
  Synthetic
cgatacgttcggggtggatgtt

SEQ ID NO: 24463 - DNA, 20 bp, Artificial Sequence
  Synthetic
ttgcgacgtatgcaccagct

SEQ ID NO: 24464 - DNA, 19 bp, Artificial Sequence
  Synthetic
gcgcaggcgatggtggtgt

SEQ ID NO: 24465 - DNA, 22 bp, Artificial Sequence
  Synthetic
ttgctggaatctaaatcggctg

SEQ ID NO: 24466 - DNA, 20 bp, Artificial Sequence
  Synthetic
tgtgaatgtttcgccgcccg

SEQ ID NO: 24467 - DNA, 20 bp, Artificial Sequence
  Synthetic
gggcgataatggcgcggaag

SEQ ID NO: 24468 - DNA, 20 bp, Artificial Sequence
  Synthetic
gcactttgccgccgatgttt

SEQ ID NO: 24469 - DNA, 18 bp, Artificial Sequence
  Synthetic
gcgaatcgccgcagacga

SEQ ID NO: 24470 - DNA, 22 bp, Artificial Sequence
  Synthetic
tattgcaggagttcggcagctt

SEQ ID NO: 24471 - DNA, 19 bp, Artificial Sequence
  Synthetic
tccgcaccgcaaatcaggg

SEQ ID NO: 24472 - DNA, 21 bp, Artificial Sequence
  Synthetic
acgaagcagtgctgatgctca

SEQ ID NO: 24473 - DNA, 19 bp, Artificial Sequence
  Synthetic
acagcctcgccaccaacgc

SEQ ID NO: 24474 - DNA, 20 bp, Artificial Sequence
  Synthetic
cgttggcgcggattttggcg

SEQ ID NO: 24475 - DNA, 20 bp, Artificial Sequence
  Synthetic
gccgtttcgacaaaggcggc

SEQ ID NO: 24476 - DNA, 20 bp, Artificial Sequence
  Synthetic
aaacgccagcgacgaagtgc

SEQ ID NO: 24477 - DNA, 19 bp, Artificial Sequence
  Synthetic
gcagcgaccaggaatggcg

SEQ ID NO: 24478 - DNA, 19 bp, Artificial Sequence
  Synthetic
agcccgttcatttgcgcca

SEQ ID NO: 24479 - DNA, 22 bp, Artificial Sequence
  Synthetic
gcctgaacaatcaaaatggcga

SEQ ID NO: 24480 - DNA, 22 bp, Artificial Sequence
  Synthetic
tatcggcttcactattggcagc

SEQ ID NO: 24481 - DNA, 20 bp, Artificial Sequence
  Synthetic
tgtacggcaaaggagacggc

SEQ ID NO: 24482 - DNA, 18 bp, Artificial Sequence
  Synthetic
cggcggcaagcgtctgaa

SEQ ID NO: 24483 - DNA, 22 bp, Artificial Sequence
  Synthetic
accgtattcattgcaggtgccg

SEQ ID NO: 24484 - DNA, 21 bp, Artificial Sequence
  Synthetic
aaagccagttggacttcgccc

SEQ ID NO: 24485 - DNA, 22 bp, Artificial Sequence
  Synthetic
acttctcggacgttccattcgg

SEQ ID NO: 24486 - DNA, 19 bp, Artificial Sequence
  Synthetic
gtcggtcagcagcgccact

SEQ ID NO: 24487 - DNA, 20 bp, Artificial Sequence
  Synthetic
acacgatggcgggtgcttcg

SEQ ID NO: 24488 - DNA, 22 bp, Artificial Sequence
  Synthetic
acagtaatgcgcttcagacggc

SEQ ID NO: 24489 - DNA, 21 bp, Artificial Sequence
  Synthetic
gcaactgcgcgacgtattgtc

SEQ ID NO: 24490 - DNA, 21 bp, Artificial Sequence
  Synthetic
cctgcttgccaacgtctttgc

SEQ ID NO: 24491 - DNA, 18 bp, Artificial Sequence
  Synthetic
gcaggattggcggggcat

SEQ ID NO: 24492 - DNA, 22 bp, Artificial Sequence
  Synthetic
ttcgccgtgggactttatccgg

SEQ ID NO: 24493 - DNA, 22 bp, Artificial Sequence
  Synthetic
tttctgcgtcggtcattggggt

SEQ ID NO: 24494 - DNA, 22 bp, Artificial Sequence
  Synthetic
ccccaaagccgaaatcgaaggc

SEQ ID NO: 24495 - DNA, 19 bp, Artificial Sequence
  Synthetic
ttcgcgggaatgacggtcg

SEQ ID NO: 24496 - DNA, 18 bp, Artificial Sequence
  Synthetic
ggtgcagcctgccttcgt

SEQ ID NO: 24497 - DNA, 21 bp, Artificial Sequence
  Synthetic
acgagttggtgtacttgccgg

SEQ ID NO: 24498 - DNA, 21 bp, Artificial Sequence
  Synthetic
tgtcgcggacaaaacgatggt

SEQ ID NO: 24499 - DNA, 20 bp, Artificial Sequence
  Synthetic
acgatttgcagttggcggcg

SEQ ID NO: 24500 - DNA, 18 bp, Artificial Sequence
  Synthetic
cggctgcgtttggcgact

SEQ ID NO: 24501 - DNA, 20 bp, Artificial Sequence
  Synthetic
ttttccccgagcgcggcatt

SEQ ID NO: 24502 - DNA, 22 bp, Artificial Sequence
  Synthetic
tcttcggcgatttcaaagccgt

SEQ ID NO: 24503 - DNA, 22 bp, Artificial Sequence
  Synthetic
gggcattgtttgaccggtttcc

SEQ ID NO: 24504 - DNA, 21 bp, Artificial Sequence
  Synthetic
gcttaagcccgcaacaaaaag

SEQ ID NO: 24505 - DNA, 20 bp, Artificial Sequence
  Synthetic
gaagtcggcggcgaattgct

SEQ ID NO: 24506 - DNA, 20 bp, Artificial Sequence
  Synthetic
ccaaatgcggatggtgcgga

SEQ ID NO: 24507 - DNA, 21 bp, Artificial Sequence
  Synthetic
agtgactgggttatcttcggc

SEQ ID NO: 24508 - DNA, 20 bp, Artificial Sequence
  Synthetic
gttgagaagcgttgacggct

SEQ ID NO: 24509 - DNA, 22 bp, Artificial Sequence
  Synthetic
tgaaagaatgtccaggcgattt

SEQ ID NO: 24510 - DNA, 21 bp, Artificial Sequence
  Synthetic
cccgatgttcgtgattacgga

SEQ ID NO: 24511 - DNA, 25 bp, Artificial Sequence
  Synthetic
aatatttcacgggcaataacttccc

SEQ ID NO: 24512 - DNA, 25 bp, Artificial Sequence
  Synthetic
cgattgaggcttcatcgtttttagg

SEQ ID NO: 24513 - DNA, 25 bp, Artificial Sequence
  Synthetic
tggaattctaggcagaatctcttgc

SEQ ID NO: 24514 - DNA, 22 bp, Artificial Sequence
  Synthetic
tggcacaaattccatatccgaa

SEQ ID NO: 24515 - DNA, 19 bp, Artificial Sequence
  Synthetic
ctgcgcgacatccacaccc

SEQ ID NO: 24516 - DNA, 19 bp, Artificial Sequence
  Synthetic
acatcgccaaaggacgcgg

SEQ ID NO: 24517 - DNA, 21 bp, Artificial Sequence
  Synthetic
ccgctttggatttggttgccg

SEQ ID NO: 24518 - DNA, 19 bp, Artificial Sequence
  Synthetic
gcatccgcttctccggcga

SEQ ID NO: 24519 - DNA, 21 bp, Artificial Sequence
  Synthetic
gttctgccgaccgctacttcc

SEQ ID NO: 24520 - DNA, 19 bp, Artificial Sequence
  Synthetic
gttcggtcaccgtcgggca

SEQ ID NO: 24521 - DNA, 18 bp, Artificial Sequence
  Synthetic
gttggatgcgcccgtcga

SEQ ID NO: 24522 - DNA, 21 bp, Artificial Sequence
  Synthetic
cgtggcaaacatccaacccga

SEQ ID NO: 24523 - DNA, 19 bp, Artificial Sequence
  Synthetic
gtctgtccctgcccggcaa

SEQ ID NO: 24524 - DNA, 22 bp, Artificial Sequence
  Synthetic
agcatcctcaaattcaccggcc

SEQ ID NO: 24525 - DNA, 18 bp, Artificial Sequence
  Synthetic
gccgacacgttggcgcaa

SEQ ID NO: 24526 - DNA, 19 bp, Artificial Sequence
  Synthetic
tccaagacccaggcgagca

SEQ ID NO: 24527 - DNA, 22 bp, Artificial Sequence
  Synthetic
atcgccaactcctgcgtcttcc

SEQ ID NO: 24528 - DNA, 19 bp, Artificial Sequence
  Synthetic
cccctgcccaaaacgaccg

SEQ ID NO: 24529 - DNA, 22 bp, Artificial Sequence
  Synthetic
gatcgccgaaatcgattcccca

SEQ ID NO: 24530 - DNA, 20 bp, Artificial Sequence
  Synthetic
cgcgtgccgccatatcttcg

SEQ ID NO: 24531 - DNA, 22 bp, Artificial Sequence
  Synthetic
gcgggatgattttttccgccaa

SEQ ID NO: 24532 - DNA, 21 bp, Artificial Sequence
  Synthetic
tcgttgagcaggcgcaatacg

SEQ ID NO: 24533 - DNA, 22 bp, Artificial Sequence
  Synthetic
aagcccaaaaagtcggactggt

SEQ ID NO: 24534 - DNA, 18 bp, Artificial Sequence
  Synthetic
tacttgccaccgcgccct

SEQ ID NO: 24535 - DNA, 22 bp, Artificial Sequence
  Synthetic
ctcgaggttgcaaaagtcgcct

SEQ ID NO: 24536 - DNA, 22 bp, Artificial Sequence
  Synthetic
ttgatgaccgcctgccagtagc

SEQ ID NO: 24537 - DNA, 21 bp, Artificial Sequence
  Synthetic
gatggatgcccgattcgtgcg

SEQ ID NO: 24538 - DNA, 22 bp, Artificial Sequence
  Synthetic
ttttcgcaatcgcattgaccgc

SEQ ID NO: 24539 - DNA, 19 bp, Artificial Sequence
  Synthetic
gccatcgttgccgccctga

SEQ ID NO: 24540 - DNA, 21 bp, Artificial Sequence
  Synthetic
gcaccggtctcttccgattgg

SEQ ID NO: 24541 - DNA, 22 bp, Artificial Sequence
  Synthetic
tgctttccaacatcctccccct

SEQ ID NO: 24542 - DNA, 20 bp, Artificial Sequence
  Synthetic
cgcacacgctgccatatcct

SEQ ID NO: 24543 - DNA, 20 bp, Artificial Sequence
  Synthetic
tgcccttcattgccgttggg

SEQ ID NO: 24544 - DNA, 22 bp, Artificial Sequence
  Synthetic
gcagaaagtcggcgaataccgg

SEQ ID NO: 24545 - DNA, 22 bp, Artificial Sequence
  Synthetic
tccgcctgtaccgaaatcaacg

SEQ ID NO: 24546 - DNA, 20 bp, Artificial Sequence
  Synthetic
cgaaaccgacgctcgcgtat

SEQ ID NO: 24547 - DNA, 24 bp, Artificial Sequence
  Synthetic
ttttccagacggcattttttgttt

SEQ ID NO: 24548 - DNA, 19 bp, Artificial Sequence
  Synthetic
catccgcacccagttgcgc

SEQ ID NO: 24549 - DNA, 22 bp, Artificial Sequence
  Synthetic
gtcagacatcgggaaatgcttt

SEQ ID NO: 24550 - DNA, 20 bp, Artificial Sequence
  Synthetic
tgcaaaccgcgccgtatcag

SEQ ID NO: 24551 - DNA, 19 bp, Artificial Sequence
  Synthetic
gcgaaccggcgcaagaact

SEQ ID NO: 24552 - DNA, 22 bp, Artificial Sequence
  Synthetic
gttgccaagcctaagccgttgc

SEQ ID NO: 24553 - DNA, 20 bp, Artificial Sequence
  Synthetic
tggcggcttcgactgtttcg

SEQ ID NO: 24554 - DNA, 22 bp, Artificial Sequence
  Synthetic
agcatccccatcatccacaacc

SEQ ID NO: 24555 - DNA, 21 bp, Artificial Sequence
  Synthetic
tcgcttcgatcacttcgggac

SEQ ID NO: 24556 - DNA, 19 bp, Artificial Sequence
  Synthetic
ggattgccggcgccgatgt

SEQ ID NO: 24557 - DNA, 18 bp, Artificial Sequence
  Synthetic
cgcgccgtccaagccttt

SEQ ID NO: 24558 - DNA, 21 bp, Artificial Sequence
  Synthetic
ggcttggatttgccggactgt

SEQ ID NO: 24559 - DNA, 19 bp, Artificial Sequence
  Synthetic
cgagggtgcgctccatctg

SEQ ID NO: 24560 - DNA, 20 bp, Artificial Sequence
  Synthetic
gtagcggtcgaagtcgtgcg

SEQ ID NO: 24561 - DNA, 21 bp, Artificial Sequence
  Synthetic
cgggggaagtcggtcaggtag

SEQ ID NO: 24562 - DNA, 22 bp, Artificial Sequence
  Synthetic
tttgaccagcagcgaagacagg

SEQ ID NO: 24563 - DNA, 20 bp, Artificial Sequence
  Synthetic
cacggtccgcgtgatttggt

SEQ ID NO: 24564 - DNA, 25 bp, Artificial Sequence
  Synthetic
acaggctggttactttgtttttttg

SEQ ID NO: 24565 - DNA, 21 bp, Artificial Sequence
  Synthetic
ggtcggtatgcaatgcgtggt

SEQ ID NO: 24566 - DNA, 21 bp, Artificial Sequence
  Synthetic
ccccgatagccgaaaagcagc

SEQ ID NO: 24567 - DNA, 19 bp, Artificial Sequence
  Synthetic
ggacagcccgaacacaccc

SEQ ID NO: 24568 - DNA, 19 bp, Artificial Sequence
  Synthetic
ttgccggaacatggctgct

SEQ ID NO: 24569 - DNA, 18 bp, Artificial Sequence
  Synthetic
tgggcaacgaaggcgacg

SEQ ID NO: 24570 - DNA, 21 bp, Artificial Sequence
  Synthetic
ctacaccctctccgtcgtccc

SEQ ID NO: 24571 - DNA, 19 bp, Artificial Sequence
  Synthetic
atatgtgccgtgccgcgct

SEQ ID NO: 24572 - DNA, 21 bp, Artificial Sequence
  Synthetic
aaaggggcgaagtttacaggc

SEQ ID NO: 24573 - DNA, 20 bp, Artificial Sequence
  Synthetic
ttggtttcgccgctcatggc

SEQ ID NO: 24574 - DNA, 18 bp, Artificial Sequence
  Synthetic
cgctcggcggcatccaaa

SEQ ID NO: 24575 - DNA, 19 bp, Artificial Sequence
  Synthetic
tcacaggcacacgtctgcg

SEQ ID NO: 24576 - DNA, 19 bp, Artificial Sequence
  Synthetic
cgtgggcttacctgccgct

SEQ ID NO: 24577 - DNA, 22 bp, Artificial Sequence
  Synthetic
ttcagacggcattttcggcaca

SEQ ID NO: 24578 - DNA, 22 bp, Artificial Sequence
  Synthetic
tacctcgccaaaaaactcggca

SEQ ID NO: 24579 - DNA, 22 bp, Artificial Sequence
  Synthetic
ggtcggtatggatgccttcctg

SEQ ID NO: 24580 - DNA, 22 bp, Artificial Sequence
  Synthetic
accaacaacagcaccttcctcg

SEQ ID NO: 24581 - DNA, 22 bp, Artificial Sequence
  Synthetic
atctggcgaaggaaatgcacgt

SEQ ID NO: 24582 - DNA, 22 bp, Artificial Sequence
  Synthetic
gcttgcccgattttgaaagccg

SEQ ID NO: 24583 - DNA, 19 bp, Artificial Sequence
  Synthetic
ccgcccgcccgattgtcaa

SEQ ID NO: 24584 - DNA, 22 bp, Artificial Sequence
  Synthetic
tcgagtacgccggtgattttgt

SEQ ID NO: 24585 - DNA, 21 bp, Artificial Sequence
  Synthetic
aattcgactgctttttcggcg

SEQ ID NO: 24586 - DNA, 22 bp, Artificial Sequence
  Synthetic
tccaacagttttgccacaccgt

SEQ ID NO: 24587 - DNA, 22 bp, Artificial Sequence
  Synthetic
agcccagtatgacaatttgctg

SEQ ID NO: 24588 - DNA, 20 bp, Artificial Sequence
  Synthetic
tgcccaagcacccaaatcat

SEQ ID NO: 24589 - DNA, 20 bp, Artificial Sequence
  Synthetic
cacgccaatgacgcgcaatc

SEQ ID NO: 24590 - DNA, 21 bp, Artificial Sequence
  Synthetic
gcaaaattccgcgcattaagc

SEQ ID NO: 24591 - DNA, 22 bp, Artificial Sequence
  Synthetic
gcctataccgaaaaatggcgcg

SEQ ID NO: 24592 - DNA, 20 bp, Artificial Sequence
  Synthetic
gtttgatgccgttttgtgcg

SEQ ID NO: 24593 - DNA, 20 bp, Artificial Sequence
  Synthetic
gcaaacaacaacactcgggc

SEQ ID NO: 24594 - DNA, 25 bp, Artificial Sequence
  Synthetic
cgaaatttttcatggtaaacgagcg

SEQ ID NO: 24595 - DNA, 21 bp, Artificial Sequence
  Synthetic
gtccgaagacggcggcttcac

SEQ ID NO: 24596 - DNA, 21 bp, Artificial Sequence
  Synthetic
ggtacgcaaccgaacagctct

SEQ ID NO: 24597 - DNA, 25 bp, Artificial Sequence
  Synthetic
accgttcaaataaatcgctctacat

SEQ ID NO: 24598 - DNA, 21 bp, Artificial Sequence
  Synthetic
ctgggcaaactggaaaaacgg

SEQ ID NO: 24599 - DNA, 18 bp, Artificial Sequence
  Synthetic
cggcaaaggcgtgcacgt

SEQ ID NO: 24600 - DNA, 19 bp, Artificial Sequence
  Synthetic
cgcctgcgcgttgtgaatc

SEQ ID NO: 24601 - DNA, 23 bp, Artificial Sequence
  Synthetic
aaacggtttttctttggcttcgg

SEQ ID NO: 24602 - DNA, 22 bp, Artificial Sequence
  Synthetic
gcggctgccgtacaatcaaaat

SEQ ID NO: 24603 - DNA, 19 bp, Artificial Sequence
  Synthetic
gcatcagccttgccacgct

SEQ ID NO: 24604 - DNA, 22 bp, Artificial Sequence
  Synthetic
caggcagtgtcggtcatcctca

SEQ ID NO: 24605 - DNA, 19 bp, Artificial Sequence
  Synthetic
tccaggcgtccccagttgt

SEQ ID NO: 24606 - DNA, 18 bp, Artificial Sequence
  Synthetic
acgttcgacggcggcttg

SEQ ID NO: 24607 - DNA, 21 bp, Artificial Sequence
  Synthetic
ttcagcttcggatggaaaagg

SEQ ID NO: 24608 - DNA, 20 bp, Artificial Sequence
  Synthetic
catacggcgcatcgttggcg

SEQ ID NO: 24609 - DNA, 20 bp, Artificial Sequence
  Synthetic
cccgcctttccgacaacgag

SEQ ID NO: 24610 - DNA, 21 bp, Artificial Sequence
  Synthetic
tgtggcgaaaagctccatcgg

SEQ ID NO: 24611 - DNA, 19 bp, Artificial Sequence
  Synthetic
gggctgctggatgcgggta

SEQ ID NO: 24612 - DNA, 19 bp, Artificial Sequence
  Synthetic
cgcccgccggtctgaaaca

SEQ ID NO: 24613 - DNA, 21 bp, Artificial Sequence
  Synthetic
acggtggaacgtgggaacagg

SEQ ID NO: 24614 - DNA, 19 bp, Artificial Sequence
  Synthetic
aagcaacagcatccgccgc

SEQ ID NO: 24615 - DNA, 20 bp, Artificial Sequence
  Synthetic
tccccgataccgatgccgtc

SEQ ID NO: 24616 - DNA, 20 bp, Artificial Sequence
  Synthetic
aaacggttgcccaaaccccg

SEQ ID NO: 24617 - DNA, 22 bp, Artificial Sequence
  Synthetic
tctgctcgccaaagtcaaagcc

SEQ ID NO: 24618 - DNA, 22 bp, Artificial Sequence
  Synthetic
aacatctggcgcaaaaaaccgg

SEQ ID NO: 24619 - DNA, 20 bp, Artificial Sequence
  Synthetic
cgaagtgttggacgcaccgc

SEQ ID NO: 24620 - DNA, 20 bp, Artificial Sequence
  Synthetic
ttttccacgcgtttgcccgg

SEQ ID NO: 24621 - DNA, 20 bp, Artificial Sequence
  Synthetic
cgacatccacggcaaagcgc

SEQ ID NO: 24622 - DNA, 20 bp, Artificial Sequence
  Synthetic
attcacacgcaaacccgcct

SEQ ID NO: 24623 - DNA, 22 bp, Artificial Sequence
  Synthetic
agtgtccgccaacatattgcgc

SEQ ID NO: 24624 - DNA, 19 bp, Artificial Sequence
  Synthetic
ccccgcccgtttcgccaaa

SEQ ID NO: 24625 - DNA, 19 bp, Artificial Sequence
  Synthetic
accattgccgtctgcgaca

SEQ ID NO: 24626 - DNA, 21 bp, Artificial Sequence
  Synthetic
cgaaaccttaaaccccggccc

SEQ ID NO: 24627 - DNA, 22 bp, Artificial Sequence
  Synthetic
tgtcaaaacgctccttcaggcg

SEQ ID NO: 24628 - DNA, 18 bp, Artificial Sequence
  Synthetic
gcatccgcgccgaagagt

SEQ ID NO: 24629 - DNA, 19 bp, Artificial Sequence
  Synthetic
catctgcgccttgtccggc

SEQ ID NO: 24630 - DNA, 21 bp, Artificial Sequence
  Synthetic
cctgcggattcaataccggca

SEQ ID NO: 24631 - DNA, 19 bp, Artificial Sequence
  Synthetic
cggccgattccgccaaacc

SEQ ID NO: 24632 - DNA, 20 bp, Artificial Sequence
  Synthetic
cccattccccgtttgccagc

SEQ ID NO: 24633 - DNA, 21 bp, Artificial Sequence
  Synthetic
gctgggcacgtcttccaaagc

SEQ ID NO: 24634 - DNA, 18 bp, Artificial Sequence
  Synthetic
gccagttcgcgcgtggtt

SEQ ID NO: 24635 - DNA, 18 bp, Artificial Sequence
  Synthetic
gcctttggcggctttgcg

SEQ ID NO: 24636 - DNA, 18 bp, Artificial Sequence
  Synthetic
gtgtgcggcgcggatgta

SEQ ID NO: 24637 - DNA, 19 bp, Artificial Sequence
  Synthetic
gcgtttttccagcgcgtcg

SEQ ID NO: 24638 - DNA, 21 bp, Artificial Sequence
  Synthetic
gatcctacacgccgcgaacct

SEQ ID NO: 24639 - DNA, 22 bp, Artificial Sequence
  Synthetic
gactcggaagacgtcatccggc

SEQ ID NO: 24640 - DNA, 22 bp, Artificial Sequence
  Synthetic
aacttgaagcggcaatgagggc

SEQ ID NO: 24641 - DNA, 19 bp, Artificial Sequence
  Synthetic
cggctgtgcgtgaggtgct

SEQ ID NO: 24642 - DNA, 20 bp, Artificial Sequence
  Synthetic
tcaacgcctttcaccagctc

SEQ ID NO: 24643 - DNA, 19 bp, Artificial Sequence
  Synthetic
gtccaccaccaagagcgcg

SEQ ID NO: 24644 - DNA, 20 bp, Artificial Sequence
  Synthetic
ggcgagcgtttgcggatgaa

SEQ ID NO: 24645 - DNA, 21 bp, Artificial Sequence
  Synthetic
atgtgtgccgaaaacaaccgc

SEQ ID NO: 24646 - DNA, 19 bp, Artificial Sequence
  Synthetic
cttccgtcctcgccgatcc

SEQ ID NO: 24647 - DNA, 19 bp, Artificial Sequence
  Synthetic
cgaagccctgcgcctcgaa

SEQ ID NO: 24648 - DNA, 19 bp, Artificial Sequence
  Synthetic
tttgcagacgaccgcgtgc

SEQ ID NO: 24649 - DNA, 20 bp, Artificial Sequence
  Synthetic
aaatcctgtttgccgccgcc

SEQ ID NO: 24650 - DNA, 18 bp, Artificial Sequence
  Synthetic
tttggccttggctgccga

SEQ ID NO: 24651 - DNA, 19 bp, Artificial Sequence
  Synthetic
cgctacggcagccgcgaaa

SEQ ID NO: 24652 - DNA, 21 bp, Artificial Sequence
  Synthetic
tgccggtatggtttcaagacg

SEQ ID NO: 24653 - DNA, 22 bp, Artificial Sequence
  Synthetic
cctctcgtactaggagcagccc

SEQ ID NO: 24654 - DNA, 19 bp, Artificial Sequence
  Synthetic
gcggggccctcgaaaacct

SEQ ID NO: 24655 - DNA, 22 bp, Artificial Sequence
  Synthetic
agcacaaaaatcttgccgtcgc

SEQ ID NO: 24656 - DNA, 19 bp, Artificial Sequence
  Synthetic
gacgggcaaaggttcgcgt

SEQ ID NO: 24657 - DNA, 21 bp, Artificial Sequence
  Synthetic
atctccatccacgacgtgggc

SEQ ID NO: 24658 - DNA, 21 bp, Artificial Sequence
  Synthetic
cggcaaataccaaacccccgt

SEQ ID NO: 24659 - DNA, 19 bp, Artificial Sequence
  Synthetic
aatggccgccgccttcacc

SEQ ID NO: 24660 - DNA, 19 bp, Artificial Sequence
  Synthetic
ccctgccttgcgcgaccaa

SEQ ID NO: 24661 - DNA, 21 bp, Artificial Sequence
  Synthetic
tctcgctcgcgtccaaatctg

SEQ ID NO: 24662 - DNA, 20 bp, Artificial Sequence
  Synthetic
ccgtgggtatgtcgctcggc

SEQ ID NO: 24663 - DNA, 20 bp, Artificial Sequence
  Synthetic
caccgtcggtgcagtcttca

SEQ ID NO: 24664 - DNA, 19 bp, Artificial Sequence
  Synthetic
ctacgaagcccccgtcgga

SEQ ID NO: 24665 - DNA, 19 bp, Artificial Sequence
  Synthetic
cgttcaggctgcccgaaca

SEQ ID NO: 24666 - DNA, 22 bp, Artificial Sequence
  Synthetic
agaacaaatcaaacgcgcccgc

SEQ ID NO: 24667 - DNA, 19 bp, Artificial Sequence
  Synthetic
cgcaccccgtgggcacaat

SEQ ID NO: 24668 - DNA, 24 bp, Artificial Sequence
  Synthetic
catgcagatatgcagattctgaca

SEQ ID NO: 24669 - DNA, 21 bp, Artificial Sequence
  Synthetic
tatcgagttgcgccaccaacc

SEQ ID NO: 24670 - DNA, 22 bp, Artificial Sequence
  Synthetic
tcaaccaatccgtttacgccca

SEQ ID NO: 24671 - DNA, 22 bp, Artificial Sequence
  Synthetic
ttttggacgaaccctccatcgg

SEQ ID NO: 24672 - DNA, 22 bp, Artificial Sequence
  Synthetic
gcgacggcgtgattaaagtcga

SEQ ID NO: 24673 - DNA, 19 bp, Artificial Sequence
  Synthetic
acgccgtacgccgaaacag

SEQ ID NO: 24674 - DNA, 18 bp, Artificial Sequence
  Synthetic
aacgcatcgtgccgccca

SEQ ID NO: 24675 - DNA, 22 bp, Artificial Sequence
  Synthetic
agctgcaactgctcggtaatga

SEQ ID NO: 24676 - DNA, 19 bp, Artificial Sequence
  Synthetic
ccgccagattgccgcgtgt

SEQ ID NO: 24677 - DNA, 21 bp, Artificial Sequence
  Synthetic
tggggtctttttcggtcaggc

SEQ ID NO: 24678 - DNA, 22 bp, Artificial Sequence
  Synthetic
tgtccgtcgggattttggtgtc

SEQ ID NO: 24679 - DNA, 20 bp, Artificial Sequence
  Synthetic
atgaccccgcttttgctggt

SEQ ID NO: 24680 - DNA, 20 bp, Artificial Sequence
  Synthetic
cttggtcgagctgcttgccc

SEQ ID NO: 24681 - DNA, 20 bp, Artificial Sequence
  Synthetic
caggttcaggcttggtcgct

SEQ ID NO: 24682 - DNA, 22 bp, Artificial Sequence
  Synthetic
cgcgaaagagttgtccgacgaa

SEQ ID NO: 24683 - DNA, 21 bp, Artificial Sequence
  Synthetic
ctgcggaaaatgcggcaaagc

SEQ ID NO: 24684 - DNA, 19 bp, Artificial Sequence
  Synthetic
ggcacgacacccgccgatt

SEQ ID NO: 24685 - DNA, 22 bp, Artificial Sequence
  Synthetic
ctcgatgcgatggaaagccccg

SEQ ID NO: 24686 - DNA, 20 bp, Artificial Sequence
  Synthetic
ccgtcctcgaagccgtcagg

SEQ ID NO: 24687 - DNA, 22 bp, Artificial Sequence
  Synthetic
cactcggcgacaaaaaaggcat

SEQ ID NO: 24688 - DNA, 20 bp, Artificial Sequence
  Synthetic
gcgtatacaaccgctcgccc

SEQ ID NO: 24689 - DNA, 20 bp, Artificial Sequence
  Synthetic
tcggttttctctgtgcggac

SEQ ID NO: 24690 - DNA, 18 bp, Artificial Sequence
  Synthetic
caaccggcgtggcgatgt

SEQ ID NO: 24691 - DNA, 18 bp, Artificial Sequence
  Synthetic
cgcggccaaactcgttgc

SEQ ID NO: 24692 - DNA, 21 bp, Artificial Sequence
  Synthetic
atgagcgtggtcaaaggtcgc

SEQ ID NO: 24693 - DNA, 21 bp, Artificial Sequence
  Synthetic
tggcaatggcaggctttgaga

SEQ ID NO: 24694 - DNA, 22 bp, Artificial Sequence
  Synthetic
cttgcccatgaaaaccacgtcg

SEQ ID NO: 24695 - DNA, 19 bp, Artificial Sequence
  Synthetic
gacaagcccccgcctacca

SEQ ID NO: 24696 - DNA, 21 bp, Artificial Sequence
  Synthetic
aaccgtctgcaccgtaaatgt

SEQ ID NO: 24697 - DNA, 20 bp, Artificial Sequence
  Synthetic
tttccagtgcggcgagatac

SEQ ID NO: 24698 - DNA, 19 bp, Artificial Sequence
  Synthetic
acatccgccgtggtgttgc

SEQ ID NO: 24699 - DNA, 20 bp, Artificial Sequence
  Synthetic
ttcatgcagtggcgttagct

SEQ ID NO: 24700 - DNA, 20 bp, Artificial Sequence
  Synthetic
gtgcctctccaaacgccacg

SEQ ID NO: 24701 - DNA, 20 bp, Artificial Sequence
  Synthetic
gtttgtcgtcaaaccgcgcg

SEQ ID NO: 24702 - DNA, 20 bp, Artificial Sequence
  Synthetic
gaggcggaggtagagccgga

SEQ ID NO: 24703 - DNA, 18 bp, Artificial Sequence
  Synthetic
ttgccgccagttgcagcg

SEQ ID NO: 24704 - DNA, 22 bp, Artificial Sequence
  Synthetic
cgcatcgacgttgtcctttggt

SEQ ID NO: 24705 - DNA, 16 bp, Artificial Sequence
  Synthetic
tgccgcacgcgcagaa

SEQ ID NO: 24706 - DNA, 22 bp, Artificial Sequence
  Synthetic
caagccgaaacacgagcgaaac

SEQ ID NO: 24707 - DNA, 18 bp, Artificial Sequence
  Synthetic
cgtgtccgcgcgtttgca

SEQ ID NO: 24708 - DNA, 21 bp, Artificial Sequence
  Synthetic
acggtgcgtttctgacttcgc

SEQ ID NO: 24709 - DNA, 20 bp, Artificial Sequence
  Synthetic
ccgtcctgccactcggtctc

SEQ ID NO: 24710 - DNA, 19 bp, Artificial Sequence
  Synthetic
ctggtccgcatacagccgc

SEQ ID NO: 24711 - DNA, 20 bp, Artificial Sequence
  Synthetic
cgcgggcttggcgttatacg

SEQ ID NO: 24712 - DNA, 22 bp, Artificial Sequence
  Synthetic
accgcaaaagacgacaaggtgt

SEQ ID NO: 24713 - DNA, 16 bp, Artificial Sequence
  Synthetic
aaggcagccgcgcgat

SEQ ID NO: 24714 - DNA, 20 bp, Artificial Sequence
  Synthetic
cgggcctataccgttgccgc

SEQ ID NO: 24715 - DNA, 21 bp, Artificial Sequence
  Synthetic
gcccactgcagatagggacca

SEQ ID NO: 24716 - DNA, 21 bp, Artificial Sequence
  Synthetic
aaaccataaaacgggttgcct

SEQ ID NO: 24717 - DNA, 21 bp, Artificial Sequence
  Synthetic
cagatcgaccgcttcctcgtg

SEQ ID NO: 24718 - DNA, 22 bp, Artificial Sequence
  Synthetic
acaggcgaacaccaccaactac

SEQ ID NO: 24719 - DNA, 21 bp, Artificial Sequence
  Synthetic
cggtagattgcccggaatgcg

SEQ ID NO: 24720 - DNA, 19 bp, Artificial Sequence
  Synthetic
ccgccgacggccgaaaagt

SEQ ID NO: 24721 - DNA, 20 bp, Artificial Sequence
  Synthetic
cgtatcgaccaaagcggcgt

SEQ ID NO: 24722 - DNA, 22 bp, Artificial Sequence
  Synthetic
gcattcaaccgtttggacagca

SEQ ID NO: 24723 - DNA, 22 bp, Artificial Sequence
  Synthetic
cgactttgtcggcaacaccttg

SEQ ID NO: 24724 - DNA, 19 bp, Artificial Sequence
  Synthetic
gccgaagcgatggcgatgg

SEQ ID NO: 24725 - DNA, 20 bp, Artificial Sequence
  Synthetic
caagtgccgggcaaacctcc

SEQ ID NO: 24726 - DNA, 22 bp, Artificial Sequence
  Synthetic
cgaaagcaaagccgaactcgac

SEQ ID NO: 24727 - DNA, 20 bp, Artificial Sequence
  Synthetic
agaagccgtcttcccgctgc

SEQ ID NO: 24728 - DNA, 19 bp, Artificial Sequence
  Synthetic
tctgccttcgcttctgccg

SEQ ID NO: 24729 - DNA, 18 bp, Artificial Sequence
  Synthetic
gagcgcggggttgccttt

SEQ ID NO: 24730 - DNA, 20 bp, Artificial Sequence
  Synthetic
ctttgtcgcgggcgagtttg

SEQ ID NO: 24731 - DNA, 20 bp, Artificial Sequence
  Synthetic
tcgtcttcgcctttgaccgg

SEQ ID NO: 24732 - DNA, 22 bp, Artificial Sequence
  Synthetic
cttggcagatatgtgtcgggct

SEQ ID NO: 24733 - DNA, 22 bp, Artificial Sequence
  Synthetic
tcttcagccgccttcaaatcca

SEQ ID NO: 24734 - DNA, 19 bp, Artificial Sequence
  Synthetic
ggaggtgtggatgcggcct

SEQ ID NO: 24735 - DNA, 19 bp, Artificial Sequence
  Synthetic
ggaagctgtccgagcccgt

SEQ ID NO: 24736 - DNA, 19 bp, Artificial Sequence
  Synthetic
ggcaagtgcgccgaaatgg

SEQ ID NO: 24737 - DNA, 21 bp, Artificial Sequence
  Synthetic
gtcgccttcacatcgtgcacg

SEQ ID NO: 24738 - DNA, 19 bp, Artificial Sequence
  Synthetic
ggcaacgcggctgtcttcc

SEQ ID NO: 24739 - DNA, 20 bp, Artificial Sequence
  Synthetic
tttcaggcaggtcgggctgt

SEQ ID NO: 24740 - DNA, 21 bp, Artificial Sequence
  Synthetic
cgattgcgatatacccggcgg

SEQ ID NO: 24741 - DNA, 19 bp, Artificial Sequence
  Synthetic
cgtcgcataccaaacgcgc

SEQ ID NO: 24742 - DNA, 20 bp, Artificial Sequence
  Synthetic
gaagcctgccgcgagattct

SEQ ID NO: 24743 - DNA, 22 bp, Artificial Sequence
  Synthetic
acgcaccacaacgacagtatgg

SEQ ID NO: 24744 - DNA, 20 bp, Artificial Sequence
  Synthetic
ttgggacgggcagaacgacc

SEQ ID NO: 24745 - DNA, 21 bp, Artificial Sequence
  Synthetic
ccgaaatgcctgcccataccg

SEQ ID NO: 24746 - DNA, 20 bp, Artificial Sequence
  Synthetic
gtttgcctgtttgagcgcgt

SEQ ID NO: 24747 - DNA, 20 bp, Artificial Sequence
  Synthetic
gacattgccgccgctcaagc

SEQ ID NO: 24748 - DNA, 21 bp, Artificial Sequence
  Synthetic
gtaaccgccgcccaattcgtc

SEQ ID NO: 24749 - DNA, 21 bp, Artificial Sequence
  Synthetic
gcaaacgaaatgccttgcgcc

SEQ ID NO: 24750 - DNA, 20 bp, Artificial Sequence
  Synthetic
ggcaggaacgaagtcggcag

SEQ ID NO: 24751 - DNA, 20 bp, Artificial Sequence
  Synthetic
cgatttgctccgcgtgttgc

SEQ ID NO: 24752 - DNA, 21 bp, Artificial Sequence
  Synthetic
caaccaggtcgaatacggcgg

SEQ ID NO: 24753 - DNA, 19 bp, Artificial Sequence
  Synthetic
cggatgtggcggatgacgg

SEQ ID NO: 24754 - DNA, 19 bp, Artificial Sequence
  Synthetic
ctgccgccatatccgggca

SEQ ID NO: 24755 - DNA, 20 bp, Artificial Sequence
  Synthetic
aaacagctgatccgtgccgc

SEQ ID NO: 24756 - DNA, 22 bp, Artificial Sequence
  Synthetic
caatgcatcccgctcggattga

SEQ ID NO: 24757 - DNA, 21 bp, Artificial Sequence
  Synthetic
tacctgcccaagcaatacccg

SEQ ID NO: 24758 - DNA, 20 bp, Artificial Sequence
  Synthetic
cgcccacacgtgccaaatca

SEQ ID NO: 24759 - DNA, 20 bp, Artificial Sequence
  Synthetic
tcgccccttatgacctcgac

SEQ ID NO: 24760 - DNA, 20 bp, Artificial Sequence
  Synthetic
gacaccgtgcgcgaagaagg

SEQ ID NO: 24761 - DNA, 19 bp, Artificial Sequence
  Synthetic
cgctcgcccgccacaaact

SEQ ID NO: 24762 - DNA, 20 bp, Artificial Sequence
  Synthetic
ggtacgacttcgatgccgcg

SEQ ID NO: 24763 - DNA, 22 bp, Artificial Sequence
  Synthetic
aaccttggtcgcccataacgga

SEQ ID NO: 24764 - DNA, 20 bp, Artificial Sequence
  Synthetic
ggccgaccgacagtttccag

SEQ ID NO: 24765 - DNA, 21 bp, Artificial Sequence
  Synthetic
ggcaagggcgaggatgatgag

SEQ ID NO: 24766 - DNA, 19 bp, Artificial Sequence
  Synthetic
ctctgcctgccctgctgct

SEQ ID NO: 24767 - DNA, 22 bp, Artificial Sequence
  Synthetic
cgttaacaccgagcttgtcgca

SEQ ID NO: 24768 - DNA, 20 bp, Artificial Sequence
  Synthetic
cgaggttcgcaccgacttcg

SEQ ID NO: 24769 - DNA, 20 bp, Artificial Sequence
  Synthetic
aagccgcacaagcctttccc

SEQ ID NO: 24770 - DNA, 21 bp, Artificial Sequence
  Synthetic
tgccgcgttgtcgtgaaaagc

SEQ ID NO: 24771 - DNA, 22 bp, Artificial Sequence
  Synthetic
tcgtctttcaactgcgcttcca

SEQ ID NO: 24772 - DNA, 21 bp, Artificial Sequence
  Synthetic
gcgtcgtggtttcagacgtgc

SEQ ID NO: 24773 - DNA, 19 bp, Artificial Sequence
  Synthetic
ggacaggcgcggcgaaact

SEQ ID NO: 24774 - DNA, 19 bp, Artificial Sequence
  Synthetic
gcaccatcagcatcggggc

SEQ ID NO: 24775 - DNA, 19 bp, Artificial Sequence
  Synthetic
cggcacgtcggcaaaacgg

SEQ ID NO: 24776 - DNA, 19 bp, Artificial Sequence
  Synthetic
gctgtccgcccgagagttc

SEQ ID NO: 24777 - DNA, 20 bp, Artificial Sequence
  Synthetic
cgcgacacgcctttttcctg

SEQ ID NO: 24778 - DNA, 19 bp, Artificial Sequence
  Synthetic
ggcggggttgaggctgaac

SEQ ID NO: 24779 - DNA, 20 bp, Artificial Sequence
  Synthetic
cctcctgctgctgcaacagg

SEQ ID NO: 24780 - DNA, 19 bp, Artificial Sequence
  Synthetic
actgtgccagttcgcgctc

SEQ ID NO: 24781 - DNA, 19 bp, Artificial Sequence
  Synthetic
ggcaaaggtgcgggcggta

SEQ ID NO: 24782 - DNA, 22 bp, Artificial Sequence
  Synthetic
tgcgacaggatttgcgacaacg

SEQ ID NO: 24783 - DNA, 20 bp, Artificial Sequence
  Synthetic
tcctgctgggtttggaaggc

SEQ ID NO: 24784 - DNA, 19 bp, Artificial Sequence
  Synthetic
ctttcggcgcgggggtttc

SEQ ID NO: 24785 - DNA, 21 bp, Artificial Sequence
  Synthetic
ataccggcctgtccgtgaccc

SEQ ID NO: 24786 - DNA, 22 bp, Artificial Sequence
  Synthetic
ggcttcgtacagcttatcgcct

SEQ ID NO: 24787 - DNA, 20 bp, Artificial Sequence
  Synthetic
ccgacaatggcaagggcgtt

SEQ ID NO: 24788 - DNA, 21 bp, Artificial Sequence
  Synthetic
ccgccgtacaacgaatggctc

SEQ ID NO: 24789 - DNA, 19 bp, Artificial Sequence
  Synthetic
ccctcgccgctgattgacg

SEQ ID NO: 24790 - DNA, 22 bp, Artificial Sequence
  Synthetic
acggcgaaatcgaatgggtcaa

SEQ ID NO: 24791 - DNA, 18 bp, Artificial Sequence
  Synthetic
gcggcggatgctgttgct

SEQ ID NO: 24792 - DNA, 19 bp, Artificial Sequence
  Synthetic
cgccgtcgcggaatgggaa

SEQ ID NO: 24793 - DNA, 20 bp, Artificial Sequence
  Synthetic
agcggcacttccaatacgcg

SEQ ID NO: 24794 - DNA, 20 bp, Artificial Sequence
  Synthetic
aggcgagtttgtaggcggtc

SEQ ID NO: 24795 - DNA, 18 bp, Artificial Sequence
  Synthetic
aacgcaccatggtcgggc

SEQ ID NO: 24796 - DNA, 18 bp, Artificial Sequence
  Synthetic
agaaacaccgccgctccg

SEQ ID NO: 24797 - DNA, 20 bp, Artificial Sequence
  Synthetic
cgtccacacgcccaacatcg

SEQ ID NO: 24798 - DNA, 19 bp, Artificial Sequence
  Synthetic
gcgcggtaagccacgccta

SEQ ID NO: 24799 - DNA, 21 bp, Artificial Sequence
  Synthetic
tgttgtcggtttagcagcaag

SEQ ID NO: 24800 - DNA, 21 bp, Artificial Sequence
  Synthetic
gtttgaacacgattgaccgct

SEQ ID NO: 24801 - DNA, 22 bp, Artificial Sequence
  Synthetic
ccacctacttacattttgcggt

SEQ ID NO: 24802 - DNA, 20 bp, Artificial Sequence
  Synthetic
ggtcgcgccattcagaaaac

SEQ ID NO: 24803 - DNA, 20 bp, Artificial Sequence
  Synthetic
aaacagcccgaatcacaacc

SEQ ID NO: 24804 - DNA, 20 bp, Artificial Sequence
  Synthetic
acacaaagcgagatgcccga

SEQ ID NO: 24805 - DNA, 24 bp, Artificial Sequence
  Synthetic
acgtgatgatgctaaatttttgca

SEQ ID NO: 24806 - DNA, 24 bp, Artificial Sequence
  Synthetic
ggtcgtcatgaagttttaatgcgg

SEQ ID NO: 24807 - DNA, 20 bp, Artificial Sequence
  Synthetic
cggaagcgatgcacaatctg

SEQ ID NO: 24808 - DNA, 24 bp, Artificial Sequence
  Synthetic
tctgaaagatgatgatgagccaag

SEQ ID NO: 24809 - DNA, 22 bp, Artificial Sequence
  Synthetic
tgcaactgacctgcaaattttc

SEQ ID NO: 24810 - DNA, 24 bp, Artificial Sequence
  Synthetic
gtgcctgtcataatcgcttaatgc

SEQ ID NO: 24811 - DNA, 20 bp, Artificial Sequence
  Synthetic
cgttggaaacgttgtgcgac

SEQ ID NO: 24812 - DNA, 21 bp, Artificial Sequence
  Synthetic
catagccagcagcgtccaagc

SEQ ID NO: 24813 - DNA, 19 bp, Artificial Sequence
  Synthetic
cggttggtcaggcgcacgt

SEQ ID NO: 24814 - DNA, 20 bp, Artificial Sequence
  Synthetic
tcgcccaggtaagtctttgg

SEQ ID NO: 24815 - DNA, 19 bp, Artificial Sequence
  Synthetic
acattgacacacggcggcg

SEQ ID NO: 24816 - DNA, 18 bp, Artificial Sequence
  Synthetic
ccgcagtttaccgccgca

SEQ ID NO: 24817 - DNA, 19 bp, Artificial Sequence
  Synthetic
tttcaccagcccctccgcg

SEQ ID NO: 24818 - DNA, 20 bp, Artificial Sequence
  Synthetic
gctgggcagcgaatccttcc

SEQ ID NO: 24819 - DNA, 18 bp, Artificial Sequence
  Synthetic
gccgccggcaaattccca

SEQ ID NO: 24820 - DNA, 19 bp, Artificial Sequence
  Synthetic
gcccgatgccgatgttgcg

SEQ ID NO: 24821 - DNA, 18 bp, Artificial Sequence
  Synthetic
ggctgtgtgcgtcggcat

SEQ ID NO: 24822 - DNA, 19 bp, Artificial Sequence
  Synthetic
ggcgcggtgcagggttttg

SEQ ID NO: 24823 - DNA, 22 bp, Artificial Sequence
  Synthetic
ctgttgggtaaacgtgccctgc

SEQ ID NO: 24824 - DNA, 20 bp, Artificial Sequence
  Synthetic
acccgaaaaacagcacggcg

SEQ ID NO: 24825 - DNA, 20 bp, Artificial Sequence
  Synthetic
gcaatcagcctttgcgtcgg

SEQ ID NO: 24826 - DNA, 18 bp, Artificial Sequence
  Synthetic
aagcgacagcatccgccg

SEQ ID NO: 24827 - DNA, 21 bp, Artificial Sequence
  Synthetic
acaccgatgccgtctgaacct

SEQ ID NO: 24828 - DNA, 22 bp, Artificial Sequence
  Synthetic
ccacttccgtgggaatgacggt

SEQ ID NO: 24829 - DNA, 22 bp, Artificial Sequence
  Synthetic
cggcggataaatcgaattgccc

SEQ ID NO: 24830 - DNA, 22 bp, Artificial Sequence
  Synthetic
tccaaacgctcgcggatttcat

SEQ ID NO: 24831 - DNA, 19 bp, Artificial Sequence
  Synthetic
gttcctgcgcggcgaggat

SEQ ID NO: 24832 - DNA, 18 bp, Artificial Sequence
  Synthetic
tttacgcgttccgccgcc

SEQ ID NO: 24833 - DNA, 18 bp, Artificial Sequence
  Synthetic
cgcgacgaaggcgggttt

SEQ ID NO: 24834 - DNA, 21 bp, Artificial Sequence
  Synthetic
tgtacgttcccctgccagtgc

SEQ ID NO: 24835 - DNA, 22 bp, Artificial Sequence
  Synthetic
aggctcttcgtaaggcttcgcc

SEQ ID NO: 24836 - DNA, 19 bp, Artificial Sequence
  Synthetic
ccccgaccacgcgctcttt

SEQ ID NO: 24837 - DNA, 20 bp, Artificial Sequence
  Synthetic
ccacgccacggaaatcacgc

SEQ ID NO: 24838 - DNA, 17 bp, Artificial Sequence
  Synthetic
aaaacggcggcgcacca

SEQ ID NO: 24839 - DNA, 21 bp, Artificial Sequence
  Synthetic
cgtatttttggaagcggcggc

SEQ ID NO: 24840 - DNA, 22 bp, Artificial Sequence
  Synthetic
agagtgggtaagctggtagccg

SEQ ID NO: 24841 - DNA, 20 bp, Artificial Sequence
  Synthetic
gacgccgatcaggaacacgc

SEQ ID NO: 24842 - DNA, 22 bp, Artificial Sequence
  Synthetic
gcttgaacgcctcgatatccgg

SEQ ID NO: 24843 - DNA, 18 bp, Artificial Sequence
  Synthetic
gcactgcctgcccgcatt

SEQ ID NO: 24844 - DNA, 18 bp, Artificial Sequence
  Synthetic
aaccggcagccaaagcca

SEQ ID NO: 24845 - DNA, 18 bp, Artificial Sequence
  Synthetic
gctgccgcgcccatcaat

SEQ ID NO: 24846 - DNA, 22 bp, Artificial Sequence
  Synthetic
aacggtagagcagggtttggac

SEQ ID NO: 24847 - DNA, 19 bp, Artificial Sequence
  Synthetic
cggccgggtctgttgggat

SEQ ID NO: 24848 - DNA, 20 bp, Artificial Sequence
  Synthetic
caggttgcccatcgggtaat

SEQ ID NO: 24849 - DNA, 21 bp, Artificial Sequence
  Synthetic
cgccgaacatgacatgtccca

SEQ ID NO: 24850 - DNA, 20 bp, Artificial Sequence
  Synthetic
acctcgtcggctttgtcggc

SEQ ID NO: 24851 - DNA, 20 bp, Artificial Sequence
  Synthetic
cgtttgcttacgggcggata

SEQ ID NO: 24852 - DNA, 18 bp, Artificial Sequence
  Synthetic
acgcactgctttcgcccg

SEQ ID NO: 24853 - DNA, 22 bp, Artificial Sequence
  Synthetic
caaactctccgccatccatccg

SEQ ID NO: 24854 - DNA, 20 bp, Artificial Sequence
  Synthetic
agccgtcgatttctgccgct

SEQ ID NO: 24855 - DNA, 21 bp, Artificial Sequence
  Synthetic
agcctgattgccggttatgcc

SEQ ID NO: 24856 - DNA, 19 bp, Artificial Sequence
  Synthetic
aaagcccttgccaaacgcg

SEQ ID NO: 24857 - DNA, 21 bp, Artificial Sequence
  Synthetic
ccgacttggacggtttgctgc

SEQ ID NO: 24858 - DNA, 21 bp, Artificial Sequence
  Synthetic
cgcttggaaaacacccgcttc

SEQ ID NO: 24859 - DNA, 19 bp, Artificial Sequence
  Synthetic
aaggcgcacgcaattccgc

SEQ ID NO: 24860 - DNA, 18 bp, Artificial Sequence
  Synthetic
tgggcggcagtgcgcaat

SEQ ID NO: 24861 - DNA, 19 bp, Artificial Sequence
  Synthetic
cgcgccaagtccataccgg

SEQ ID NO: 24862 - DNA, 20 bp, Artificial Sequence
  Synthetic
gtccgcaccatcctgtcgca

SEQ ID NO: 24863 - DNA, 21 bp, Artificial Sequence
  Synthetic
tttcccgtccatccatcggca

SEQ ID NO: 24864 - DNA, 19 bp, Artificial Sequence
  Synthetic
ctgcgcctgcggcaatttg

SEQ ID NO: 24865 - DNA, 21 bp, Artificial Sequence
  Synthetic
gtgttgctgctggacgaaccg

SEQ ID NO: 24866 - DNA, 21 bp, Artificial Sequence
  Synthetic
gcatggcgacaatctcgtccc

SEQ ID NO: 24867 - DNA, 22 bp, Artificial Sequence
  Synthetic
attcggcgaacacatcatccgg

SEQ ID NO: 24868 - DNA, 24 bp, Artificial Sequence
  Synthetic
atcttgatgtgtttgtgttcgacg

SEQ ID NO: 24869 - DNA, 20 bp, Artificial Sequence
  Synthetic
ctgcaccgcagcaggatgtt

SEQ ID NO: 24870 - DNA, 22 bp, Artificial Sequence
  Synthetic
aacatcagcgtactcccccccg

SEQ ID NO: 24871 - DNA, 22 bp, Artificial Sequence
  Synthetic
gcgtaaccacttccacatcggt

SEQ ID NO: 24872 - DNA, 21 bp, Artificial Sequence
  Synthetic
gatgacggtccgttgcagtcg

SEQ ID NO: 24873 - DNA, 21 bp, Artificial Sequence
  Synthetic
ctggtgtggttggaagacggc

SEQ ID NO: 24874 - DNA, 18 bp, Artificial Sequence
  Synthetic
gcgggcgcgttcgtgtat

SEQ ID NO: 24875 - DNA, 22 bp, Artificial Sequence
  Synthetic
cgccattttgcgcccgatatgt

SEQ ID NO: 24876 - DNA, 19 bp, Artificial Sequence
  Synthetic
accgacgcaggcatcgatg

SEQ ID NO: 24877 - DNA, 21 bp, Artificial Sequence
  Synthetic
agcttcttcatctcgcgcgtg

SEQ ID NO: 24878 - DNA, 20 bp, Artificial Sequence
  Synthetic
atgggcatctaccggcgtga

SEQ ID NO: 24879 - DNA, 22 bp, Artificial Sequence
  Synthetic
cgacatcggcgatttcgtcctg

SEQ ID NO: 24880 - DNA, 21 bp, Artificial Sequence
  Synthetic
ttccgacaccgcaatatgccc

SEQ ID NO: 24881 - DNA, 21 bp, Artificial Sequence
  Synthetic
atcggcgtattcgatcggggc

SEQ ID NO: 24882 - DNA, 19 bp, Artificial Sequence
  Synthetic
tcttcggcggctttggcgg

SEQ ID NO: 24883 - DNA, 19 bp, Artificial Sequence
  Synthetic
cgcacgggattcagcggct

SEQ ID NO: 24884 - DNA, 20 bp, Artificial Sequence
  Synthetic
atgcgggcggaggattatgc

SEQ ID NO: 24885 - DNA, 19 bp, Artificial Sequence
  Synthetic
agtgctgaacgacacgcgc

SEQ ID NO: 24886 - DNA, 21 bp, Artificial Sequence
  Synthetic
cgcgattgagcaagacgcaaa

SEQ ID NO: 24887 - DNA, 20 bp, Artificial Sequence
  Synthetic
ggaggcggcggcgtataagg

SEQ ID NO: 24888 - DNA, 18 bp, Artificial Sequence
  Synthetic
atccgccgtggtgttgcc

SEQ ID NO: 24889 - DNA, 19 bp, Artificial Sequence
  Synthetic
acactgcctgggcaaagcg

SEQ ID NO: 24890 - DNA, 19 bp, Artificial Sequence
  Synthetic
gcccgaaactgccgcacct

SEQ ID NO: 24891 - DNA, 23 bp, Artificial Sequence
  Synthetic
aactgacgggcattttgaatttg

SEQ ID NO: 24892 - DNA, 20 bp, Artificial Sequence
  Synthetic
ccagtccgacccactgcatc

SEQ ID NO: 24893 - DNA, 21 bp, Artificial Sequence
  Synthetic
gggcggactgaatatccggtc

SEQ ID NO: 24894 - DNA, 20 bp, Artificial Sequence
  Synthetic
gcacaggcagtccgcgatcc

SEQ ID NO: 24895 - DNA, 22 bp, Artificial Sequence
  Synthetic
ttcaaccgcgatgtgtccgtag

SEQ ID NO: 24896 - DNA, 20 bp, Artificial Sequence
  Synthetic
cggtacatcacgctgcgctg

SEQ ID NO: 24897 - DNA, 20 bp, Artificial Sequence
  Synthetic
cggtacgcggccttggtaga

SEQ ID NO: 24898 - DNA, 20 bp, Artificial Sequence
  Synthetic
ctgcaggggctcgagtacgc

SEQ ID NO: 24899 - DNA, 22 bp, Artificial Sequence
  Synthetic
cagtcgtacatcgcaaacacgc

SEQ ID NO: 24900 - DNA, 19 bp, Artificial Sequence
  Synthetic
cccctcgctgccgttgact

SEQ ID NO: 24901 - DNA, 18 bp, Artificial Sequence
  Synthetic
cagcggcaaatcggcagc

SEQ ID NO: 24902 - DNA, 20 bp, Artificial Sequence
  Synthetic
cgtaaaaaccggcggcaaac

SEQ ID NO: 24903 - DNA, 22 bp, Artificial Sequence
  Synthetic
tttccagcgcggatattctggc

SEQ ID NO: 24904 - DNA, 22 bp, Artificial Sequence
  Synthetic
aggatggggtgcatacggtagc

SEQ ID NO: 24905 - DNA, 22 bp, Artificial Sequence
  Synthetic
ccgatacggtttggagccgttt

SEQ ID NO: 24906 - DNA, 21 bp, Artificial Sequence
  Synthetic
tggttcgcaccgctttacgaa

SEQ ID NO: 24907 - DNA, 20 bp, Artificial Sequence
  Synthetic
gcgaccataccaaacaccca

SEQ ID NO: 24908 - DNA, 20 bp, Artificial Sequence
  Synthetic
ggcaaagcaaaaacccccgg

SEQ ID NO: 24909 - DNA, 20 bp, Artificial Sequence
  Synthetic
tttgcctgacccactgcctg

SEQ ID NO: 24910 - DNA, 22 bp, Artificial Sequence
  Synthetic
cgaaatgattaaggcgggcgcg

SEQ ID NO: 24911 - DNA, 21 bp, Artificial Sequence
  Synthetic
acgttttaaacctcccccgcc

SEQ ID NO: 24912 - DNA, 19 bp, Artificial Sequence
  Synthetic
gccaccctgcaatcgctcg

SEQ ID NO: 24913 - DNA, 20 bp, Artificial Sequence
  Synthetic
tgcccaagctgatttcgccc

SEQ ID NO: 24914 - DNA, 22 bp, Artificial Sequence
  Synthetic
tcatcgaaatcaccgtccccga

SEQ ID NO: 24915 - DNA, 22 bp, Artificial Sequence
  Synthetic
tcgaaataccccaatcggaacc

SEQ ID NO: 24916 - DNA, 19 bp, Artificial Sequence
  Synthetic
gcggcagggttgggttcga

SEQ ID NO: 24917 - DNA, 19 bp, Artificial Sequence
  Synthetic
gtttcgcgcgcctcttgca

SEQ ID NO: 24918 - DNA, 20 bp, Artificial Sequence
  Synthetic
aaccgacttcccggcaaacg

SEQ ID NO: 24919 - DNA, 22 bp, Artificial Sequence
  Synthetic
gcgtggacggcttcttcaaagg

SEQ ID NO: 24920 - DNA, 18 bp, Artificial Sequence
  Synthetic
acggcggcgtttttgctg

SEQ ID NO: 24921 - DNA, 20 bp, Artificial Sequence
  Synthetic
atgttgtcggcaagctcgcg

SEQ ID NO: 24922 - DNA, 18 bp, Artificial Sequence
  Synthetic
ctttggcgggcgcggttt

SEQ ID NO: 24923 - DNA, 21 bp, Artificial Sequence
  Synthetic
ttccatacggacgttgtgcgc

SEQ ID NO: 24924 - DNA, 22 bp, Artificial Sequence
  Synthetic
atcggaagcttgtgcggattcg

SEQ ID NO: 24925 - DNA, 21 bp, Artificial Sequence
  Synthetic
acactgggcgagtttgacgac

SEQ ID NO: 24926 - DNA, 19 bp, Artificial Sequence
  Synthetic
aaacctgcccgccgtcatt

SEQ ID NO: 24927 - DNA, 20 bp, Artificial Sequence
  Synthetic
cttgccgatatgcttgccgc

SEQ ID NO: 24928 - DNA, 18 bp, Artificial Sequence
  Synthetic
gctgctgcaacgcgggtt

SEQ ID NO: 24929 - DNA, 19 bp, Artificial Sequence
  Synthetic
ggctgcctgccgacatcct

SEQ ID NO: 24930 - DNA, 21 bp, Artificial Sequence
  Synthetic
aaaaccctgcccatccccagc

SEQ ID NO: 24931 - DNA, 22 bp, Artificial Sequence
  Synthetic
atgtcaaacgcctctcctccgc

SEQ ID NO: 24932 - DNA, 21 bp, Artificial Sequence
  Synthetic
cggcgatgatggtgttttcgg

SEQ ID NO: 24933 - DNA, 19 bp, Artificial Sequence
  Synthetic
ggctggcgactctgctgca

SEQ ID NO: 24934 - DNA, 20 bp, Artificial Sequence
  Synthetic
cacgactgaaccgatgccgt

SEQ ID NO: 24935 - DNA, 19 bp, Artificial Sequence
  Synthetic
cgtcgatttcgcctgcggc

SEQ ID NO: 24936 - DNA, 22 bp, Artificial Sequence
  Synthetic
ggtggtgtccgaaatgtttgcg

SEQ ID NO: 24937 - DNA, 21 bp, Artificial Sequence
  Synthetic
taatagaggcccgccgcaaag

SEQ ID NO: 24938 - DNA, 22 bp, Artificial Sequence
  Synthetic
acggcatttgtcatcactggcc

SEQ ID NO: 24939 - DNA, 22 bp, Artificial Sequence
  Synthetic
ttacccatcgcaccgacaaaca

SEQ ID NO: 24940 - DNA, 22 bp, Artificial Sequence
  Synthetic
ttgaggccgtctgaaacttcgc

SEQ ID NO: 24941 - DNA, 20 bp, Artificial Sequence
  Synthetic
cacgcagaaggtcagcacca

SEQ ID NO: 24942 - DNA, 19 bp, Artificial Sequence
  Synthetic
gcccatgtgctgcggttgt

SEQ ID NO: 24943 - DNA, 21 bp, Artificial Sequence
  Synthetic
ggcggcggtatttatgtccgt

SEQ ID NO: 24944 - DNA, 20 bp, Artificial Sequence
  Synthetic
aaaaccgctcaaaccgccct

SEQ ID NO: 24945 - DNA, 19 bp, Artificial Sequence
  Synthetic
ggtcaacgcaggcggttcg

SEQ ID NO: 24946 - DNA, 21 bp, Artificial Sequence
  Synthetic
ccaacacacccaagccacaca

SEQ ID NO: 24947 - DNA, 22 bp, Artificial Sequence
  Synthetic
attcggtgactacggctggatg

SEQ ID NO: 24948 - DNA, 20 bp, Artificial Sequence
  Synthetic
caccaacctcaccggctcaa

SEQ ID NO: 24949 - DNA, 21 bp, Artificial Sequence
  Synthetic
gttccgccacaaacaactggg

SEQ ID NO: 24950 - DNA, 21 bp, Artificial Sequence
  Synthetic
ggcttcccaagtacaggcctc

SEQ ID NO: 24951 - DNA, 18 bp, Artificial Sequence
  Synthetic
ggacgtgccgccgatgtt

SEQ ID NO: 24952 - DNA, 21 bp, Artificial Sequence
  Synthetic
ccagaagcgtttgcctgtggc

SEQ ID NO: 24953 - DNA, 22 bp, Artificial Sequence
  Synthetic
gagggtgaggatttcgtcgtgg

SEQ ID NO: 24954 - DNA, 20 bp, Artificial Sequence
  Synthetic
ggtcagacgctcgacggtgt

SEQ ID NO: 24955 - DNA, 19 bp, Artificial Sequence
  Synthetic
gcgtgggcgtatccgtcgt

SEQ ID NO: 24956 - DNA, 18 bp, Artificial Sequence
  Synthetic
gcgcggcaggcatcattc

SEQ ID NO: 24957 - DNA, 19 bp, Artificial Sequence
  Synthetic
agcgtgttcaatggcggcg

SEQ ID NO: 24958 - DNA, 19 bp, Artificial Sequence
  Synthetic
gcacgctcgcgctcttgga

SEQ ID NO: 24959 - DNA, 21 bp, Artificial Sequence
  Synthetic
gtgccgactgttttgccgacg

SEQ ID NO: 24960 - DNA, 22 bp, Artificial Sequence
  Synthetic
ttccgacaaaatccggctcaca

SEQ ID NO: 24961 - DNA, 20 bp, Artificial Sequence
  Synthetic
cgaagccgacgaacgcaagg

SEQ ID NO: 24962 - DNA, 21 bp, Artificial Sequence
  Synthetic
aaacagccgttgaccgcaacc

SEQ ID NO: 24963 - DNA, 20 bp, Artificial Sequence
  Synthetic
gacaaactccgcacgtccgc

SEQ ID NO: 24964 - DNA, 19 bp, Artificial Sequence
  Synthetic
cggcacgcctttcagacgg

SEQ ID NO: 24965 - DNA, 19 bp, Artificial Sequence
  Synthetic
cgaaagcagccacgtcgcc

SEQ ID NO: 24966 - DNA, 21 bp, Artificial Sequence
  Synthetic
ctgaacgaaaaacgcgccgag

SEQ ID NO: 24967 - DNA, 18 bp, Artificial Sequence
  Synthetic
acgtggccaaaccgcacc

SEQ ID NO: 24968 - DNA, 20 bp, Artificial Sequence
  Synthetic
catcgccacacccgttcaga

SEQ ID NO: 24969 - DNA, 18 bp, Artificial Sequence
  Synthetic
accgcacaaaccggcgga

SEQ ID NO: 24970 - DNA, 19 bp, Artificial Sequence
  Synthetic
cgtgatcgacggaggtgcg

SEQ ID NO: 24971 - DNA, 22 bp, Artificial Sequence
  Synthetic
ttggaaaactacgaaggcggcc

SEQ ID NO: 24972 - DNA, 20 bp, Artificial Sequence
  Synthetic
cccgaacctcgattacgccg

SEQ ID NO: 24973 - DNA, 19 bp, Artificial Sequence
  Synthetic
atccgccctctttgctgcg

SEQ ID NO: 24974 - DNA, 21 bp, Artificial Sequence
  Synthetic
gtcgtcgttttgcccacaccg

SEQ ID NO: 24975 - DNA, 18 bp, Artificial Sequence
  Synthetic
gccattgccgccgccaaa

SEQ ID NO: 24976 - DNA, 19 bp, Artificial Sequence
  Synthetic
aaaagccgcagccacctcg

SEQ ID NO: 24977 - DNA, 19 bp, Artificial Sequence
  Synthetic
tgctcgaccgccacttcac

SEQ ID NO: 24978 - DNA, 22 bp, Artificial Sequence
  Synthetic
caggaaatttccgccctcgtca

SEQ ID NO: 24979 - DNA, 22 bp, Artificial Sequence
  Synthetic
caaacttgggactgaacccggc

SEQ ID NO: 24980 - DNA, 19 bp, Artificial Sequence
  Synthetic
aggcgctcggcaaacacaa

SEQ ID NO: 24981 - DNA, 22 bp, Artificial Sequence
  Synthetic
gcgacacctacaacgacacaca

SEQ ID NO: 24982 - DNA, 22 bp, Artificial Sequence
  Synthetic
atcgccgacaaaaccaccatcg

SEQ ID NO: 24983 - DNA, 19 bp, Artificial Sequence
  Synthetic
ccgggcgcggtattctgga

SEQ ID NO: 24984 - DNA, 19 bp, Artificial Sequence
  Synthetic
ggacgacgtacgcgccgaa

SEQ ID NO: 24985 - DNA, 18 bp, Artificial Sequence
  Synthetic
cgacggcggcgagattgt

SEQ ID NO: 24986 - DNA, 24 bp, Artificial Sequence
  Synthetic
accaataccgtaaatagcctgaag

SEQ ID NO: 24987 - DNA, 22 bp, Artificial Sequence
  Synthetic
aaatgtcttccactgtcaagcc

SEQ ID NO: 24988 - DNA, 22 bp, Artificial Sequence
  Synthetic
cgacagcagctttgatttcagg

SEQ ID NO: 24989 - DNA, 20 bp, Artificial Sequence
  Synthetic
cgccgcatattttcagacgg

SEQ ID NO: 24990 - DNA, 19 bp, Artificial Sequence
  Synthetic
ccccttcagacggcatcgc

SEQ ID NO: 24991 - DNA, 21 bp, Artificial Sequence
  Synthetic
gagttcgcggttttcaacgcg

SEQ ID NO: 24992 - DNA, 21 bp, Artificial Sequence
  Synthetic
gtaaccagactgtacgggccg

SEQ ID NO: 24993 - DNA, 21 bp, Artificial Sequence
  Synthetic
gggaatcagaagcggtagcgc

SEQ ID NO: 24994 - DNA, 19 bp, Artificial Sequence
  Synthetic
gccaggccggcggtaatca

SEQ ID NO: 24995 - DNA, 20 bp, Artificial Sequence
  Synthetic
atatgccccgttccgtcggc

SEQ ID NO: 24996 - DNA, 19 bp, Artificial Sequence
  Synthetic
gcgcgtatcagcacggtga

SEQ ID NO: 24997 - DNA, 21 bp, Artificial Sequence
  Synthetic
tggtcgaaaccgccatttccg

SEQ ID NO: 24998 - DNA, 20 bp, Artificial Sequence
  Synthetic
cgctgaacgccaataccgcc

SEQ ID NO: 24999 - DNA, 22 bp, Artificial Sequence
  Synthetic
cggcgcgtatccgtttgaaacc

SEQ ID NO: 25000 - DNA, 20 bp, Artificial Sequence
  Synthetic
acggcgttgaacgaagtcga

SEQ ID NO: 25001 - DNA, 19 bp, Artificial Sequence
  Synthetic
gcgtgggcgtgaactaccg

SEQ ID NO: 25002 - DNA, 22 bp, Artificial Sequence
  Synthetic
aattgttggaatccggcttgtt

SEQ ID NO: 25003 - DNA, 19 bp, Artificial Sequence
  Synthetic
cgcgcgggtcttggacgaa

SEQ ID NO: 25004 - DNA, 21 bp, Artificial Sequence
  Synthetic
tttgaccaactcggcaagcgg

SEQ ID NO: 25005 - DNA, 19 bp, Artificial Sequence
  Synthetic
gcaccagttcgcccgcgat

SEQ ID NO: 25006 - DNA, 20 bp, Artificial Sequence
  Synthetic
cgcccgtggcttctttacgg

SEQ ID NO: 25007 - DNA, 22 bp, Artificial Sequence
  Synthetic
aacgccgccatttccatatcgg

SEQ ID NO: 25008 - DNA, 20 bp, Artificial Sequence
  Synthetic
gcacttctaactccccgccc

SEQ ID NO: 25009 - DNA, 22 bp, Artificial Sequence
  Synthetic
tttgcaaaggtctcagaatgcc

SEQ ID NO: 25010 - DNA, 21 bp, Artificial Sequence
  Synthetic
agcgtaccgaccgacaatccg

SEQ ID NO: 25011 - DNA, 20 bp, Artificial Sequence
  Synthetic
cgtattccccgccggagaga

SEQ ID NO: 25012 - DNA, 20 bp, Artificial Sequence
  Synthetic
aatacgcgatgcagctcgcc

SEQ ID NO: 25013 - DNA, 19 bp, Artificial Sequence
  Synthetic
aagctcgccatgcccttcg

SEQ ID NO: 25014 - DNA, 22 bp, Artificial Sequence
  Synthetic
ttccaaatcatcctgccccacc

SEQ ID NO: 25015 - DNA, 21 bp, Artificial Sequence
  Synthetic
tgagccgccttctcgacaacc

SEQ ID NO: 25016 - DNA, 18 bp, Artificial Sequence
  Synthetic
attccgccatgccgtccg

SEQ ID NO: 25017 - DNA, 20 bp, Artificial Sequence
  Synthetic
cggcgtaatcgtcggctcgc

SEQ ID NO: 25018 - DNA, 20 bp, Artificial Sequence
  Synthetic
cgcataccgcagcgaaatgc

SEQ ID NO: 25019 - DNA, 20 bp, Artificial Sequence
  Synthetic
gcagcagcggaacacaaagc

SEQ ID NO: 25020 - DNA, 19 bp, Artificial Sequence
  Synthetic
cggttccctaaggcgccca

SEQ ID NO: 25021 - DNA, 19 bp, Artificial Sequence
  Synthetic
tgcagaccggcaagctgtt

SEQ ID NO: 25022 - DNA, 19 bp, Artificial Sequence
  Synthetic
gcgggcgaactcgacgctt

SEQ ID NO: 25023 - DNA, 22 bp, Artificial Sequence
  Synthetic
atgattttggacatcggcccga

SEQ ID NO: 25024 - DNA, 21 bp, Artificial Sequence
  Synthetic
ggttggcgcagaagctgtttg

SEQ ID NO: 25025 - DNA, 22 bp, Artificial Sequence
  Synthetic
agacgacctgattattgcccgc

SEQ ID NO: 25026 - DNA, 21 bp, Artificial Sequence
  Synthetic
aagggtttccaacaggctgct

SEQ ID NO: 25027 - DNA, 21 bp, Artificial Sequence
  Synthetic
cgccgacctgttcgcaaatcg

SEQ ID NO: 25028 - DNA, 22 bp, Artificial Sequence
  Synthetic
aaatgccgtctgaacacattgc

SEQ ID NO: 25029 - DNA, 20 bp, Artificial Sequence
  Synthetic
cgggctgccgtttaccatag

SEQ ID NO: 25030 - DNA, 23 bp, Artificial Sequence
  Synthetic
gttcaagtttcggctattgcaaa

SEQ ID NO: 25031 - DNA, 21 bp, Artificial Sequence
  Synthetic
ccgcaacacaagggtatgatt

SEQ ID NO: 25032 - DNA, 20 bp, Artificial Sequence
  Synthetic
ccgcagttttgccctgtcct

SEQ ID NO: 25033 - DNA, 20 bp, Artificial Sequence
  Synthetic
tatcgacatcgggcacgctg

SEQ ID NO: 25034 - DNA, 19 bp, Artificial Sequence
  Synthetic
gtaatcctgccgccgagcg

SEQ ID NO: 25035 - DNA, 19 bp, Artificial Sequence
  Synthetic
ccgggcaatacggcatcgc

SEQ ID NO: 25036 - DNA, 18 bp, Artificial Sequence
  Synthetic
gcatcgggcggcttgtgt

SEQ ID NO: 25037 - DNA, 20 bp, Artificial Sequence
  Synthetic
cgagatagccttgcgcggtc

SEQ ID NO: 25038 - DNA, 20 bp, Artificial Sequence
  Synthetic
ggtacagcccgaagcgcaaa

SEQ ID NO: 25039 - DNA, 20 bp, Artificial Sequence
  Synthetic
ggcagaggtgcggattagcg

SEQ ID NO: 25040 - DNA, 22 bp, Artificial Sequence
  Synthetic
ttttccggccttctgcgagaaa

SEQ ID NO: 25041 - DNA, 19 bp, Artificial Sequence
  Synthetic
agatgaggaggcagcgggc

SEQ ID NO: 25042 - DNA, 24 bp, Artificial Sequence
  Synthetic
ggcatattaacaacatcaaccctg

SEQ ID NO: 25043 - DNA, 21 bp, Artificial Sequence
  Synthetic
cgatggggaggtttggaagct

SEQ ID NO: 25044 - DNA, 19 bp, Artificial Sequence
  Synthetic
cgtaacctacgccgcccag

SEQ ID NO: 25045 - DNA, 19 bp, Artificial Sequence
  Synthetic
cggcatcttgtccgacggc

SEQ ID NO: 25046 - DNA, 19 bp, Artificial Sequence
  Synthetic
ggtaggaacgggcggtggt

SEQ ID NO: 25047 - DNA, 19 bp, Artificial Sequence
  Synthetic
gcggatgggggacgttgag

SEQ ID NO: 25048 - DNA, 19 bp, Artificial Sequence
  Synthetic
gcaaaggcggcttgggcaa

SEQ ID NO: 25049 - DNA, 20 bp, Artificial Sequence
  Synthetic
tgattaccgccgtctccgcc

SEQ ID NO: 25050 - DNA, 21 bp, Artificial Sequence
  Synthetic
ctatcacgcaccggtctgctg

SEQ ID NO: 25051 - DNA, 22 bp, Artificial Sequence
  Synthetic
ggcaggcgtatgcgaaagatgt

SEQ ID NO: 25052 - DNA, 21 bp, Artificial Sequence
  Synthetic
ccatgcccagtttgcggatgc

SEQ ID NO: 25053 - DNA, 18 bp, Artificial Sequence
  Synthetic
gccggaagcggcttggta

SEQ ID NO: 25054 - DNA, 22 bp, Artificial Sequence
  Synthetic
catcggcaagattttcggtcgc

SEQ ID NO: 25055 - DNA, 20 bp, Artificial Sequence
  Synthetic
gcagcagatgccggcgcata

SEQ ID NO: 25056 - DNA, 18 bp, Artificial Sequence
  Synthetic
gcctgttgcggcacttgc

SEQ ID NO: 25057 - DNA, 19 bp, Artificial Sequence
  Synthetic
cgaagcggcgggattcgga

SEQ ID NO: 25058 - DNA, 22 bp, Artificial Sequence
  Synthetic
ttgtcgaacactttgccgaagc

SEQ ID NO: 25059 - DNA, 22 bp, Artificial Sequence
  Synthetic
aacaaccgtccgatttggtgcg

SEQ ID NO: 25060 - DNA, 22 bp, Artificial Sequence
  Synthetic
gcaatacgccgtcaaaacccca

SEQ ID NO: 25061 - DNA, 19 bp, Artificial Sequence
  Synthetic
gacagggcgcggtcgagtt

SEQ ID NO: 25062 - DNA, 19 bp, Artificial Sequence
  Synthetic
gcggttttcgcgccgtagc

SEQ ID NO: 25063 - DNA, 22 bp, Artificial Sequence
  Synthetic
tcatcgtgagcgtgttcagacg

SEQ ID NO: 25064 - DNA, 19 bp, Artificial Sequence
  Synthetic
ggcatgacggcggacagtt

SEQ ID NO: 25065 - DNA, 22 bp, Artificial Sequence
  Synthetic
atttcggcaatcgataccgccg

SEQ ID NO: 25066 - DNA, 18 bp, Artificial Sequence
  Synthetic
gcaaacacgccgccgaca

SEQ ID NO: 25067 - DNA, 21 bp, Artificial Sequence
  Synthetic
cgaactttccggcggtcagaa

SEQ ID NO: 25068 - DNA, 22 bp, Artificial Sequence
  Synthetic
gtcgaattcgtcctgaccgagg

SEQ ID NO: 25069 - DNA, 20 bp, Artificial Sequence
  Synthetic
gttggcgatgctggtggtgg

SEQ ID NO: 25070 - DNA, 19 bp, Artificial Sequence
  Synthetic
ccgcgtccgattccacgct

SEQ ID NO: 25071 - DNA, 19 bp, Artificial Sequence
  Synthetic
ggttcgcccgcttccagca

SEQ ID NO: 25072 - DNA, 19 bp, Artificial Sequence
  Synthetic
tggcagccctctcgcctga

SEQ ID NO: 25073 - DNA, 20 bp, Artificial Sequence
  Synthetic
accttggttgccgcgacttt

SEQ ID NO: 25074 - DNA, 18 bp, Artificial Sequence
  Synthetic
aacggcgtggcgcaaggt

SEQ ID NO: 25075 - DNA, 21 bp, Artificial Sequence
  Synthetic
tttggcagaggcgctcaaaga

SEQ ID NO: 25076 - DNA, 21 bp, Artificial Sequence
  Synthetic
ccggcatcggcgatctcatct

SEQ ID NO: 25077 - DNA, 22 bp, Artificial Sequence
  Synthetic
gtgccgtagtggttttcgagca

SEQ ID NO: 25078 - DNA, 20 bp, Artificial Sequence
  Synthetic
ggaagggcggcttcttctgc

SEQ ID NO: 25079 - DNA, 20 bp, Artificial Sequence
  Synthetic
atgcgctgaaaacacccccg

SEQ ID NO: 25080 - DNA, 22 bp, Artificial Sequence
  Synthetic
ggcatcgggaacttaatcaggg

SEQ ID NO: 25081 - DNA, 21 bp, Artificial Sequence
  Synthetic
gcccgaagatttggtgtgccg

SEQ ID NO: 25082 - DNA, 22 bp, Artificial Sequence
  Synthetic
atgagtatcgtgctgcacggcg

SEQ ID NO: 25083 - DNA, 19 bp, Artificial Sequence
  Synthetic
ggccagccgtccgcattca

SEQ ID NO: 25084 - DNA, 20 bp, Artificial Sequence
  Synthetic
cgacaacgccctgagcaagg

SEQ ID NO: 25085 - DNA, 18 bp, Artificial Sequence
  Synthetic
tcgtctttggcggcgtcg

SEQ ID NO: 25086 - DNA, 19 bp, Artificial Sequence
  Synthetic
gcgaggtaggcggtcagca

SEQ ID NO: 25087 - DNA, 21 bp, Artificial Sequence
  Synthetic
cgtcggtgttgacggcaatgc

SEQ ID NO: 25088 - DNA, 18 bp, Artificial Sequence
  Synthetic
gccgccggcattgtcgat

SEQ ID NO: 25089 - DNA, 22 bp, Artificial Sequence
  Synthetic
cggaaggattgcaggcttttgg

SEQ ID NO: 25090 - DNA, 20 bp, Artificial Sequence
  Synthetic
tcaaacagagcccgacgtgg

SEQ ID NO: 25091 - DNA, 20 bp, Artificial Sequence
  Synthetic
gcgtgaaggtcgccaaaggc

SEQ ID NO: 25092 - DNA, 22 bp, Artificial Sequence
  Synthetic
cgttttcctgatgttccgtctt

SEQ ID NO: 25093 - DNA, 20 bp, Artificial Sequence
  Synthetic
cgggctgtccgtccgtatcg

SEQ ID NO: 25094 - DNA, 22 bp, Artificial Sequence
  Synthetic
attcatcgcggcaggttgacgg

SEQ ID NO: 25095 - DNA, 20 bp, Artificial Sequence
  Synthetic
caggcctcaacccatcctgc

SEQ ID NO: 25096 - DNA, 22 bp, Artificial Sequence
  Synthetic
aagctccctgccgtggattttg

SEQ ID NO: 25097 - DNA, 20 bp, Artificial Sequence
  Synthetic
cggggacgcggatttcagac

SEQ ID NO: 25098 - DNA, 19 bp, Artificial Sequence
  Synthetic
gttccgcgccgatgatgcg

SEQ ID NO: 25099 - DNA, 20 bp, Artificial Sequence
  Synthetic
tgatgttgacggcgcagtgg

SEQ ID NO: 25100 - DNA, 19 bp, Artificial Sequence
  Synthetic
gatgacgggcgcgacgtgt

SEQ ID NO: 25101 - DNA, 21 bp, Artificial Sequence
  Synthetic
aaagacggcttcatgcgtgcg

SEQ ID NO: 25102 - DNA, 20 bp, Artificial Sequence
  Synthetic
gaagcccagtccgacgacgt

SEQ ID NO: 25103 - DNA, 19 bp, Artificial Sequence
  Synthetic
cgtatggcgaggcggtcga

SEQ ID NO: 25104 - DNA, 22 bp, Artificial Sequence
  Synthetic
gcgaaattttgccgcctactgc

SEQ ID NO: 25105 - DNA, 20 bp, Artificial Sequence
  Synthetic
gcctgcctgaaaggttcgga

SEQ ID NO: 25106 - DNA, 19 bp, Artificial Sequence
  Synthetic
gacgatgccgcgctgctgt

SEQ ID NO: 25107 - DNA, 19 bp, Artificial Sequence
  Synthetic
gtagccgcgtttgagggcg

SEQ ID NO: 25108 - DNA, 20 bp, Artificial Sequence
  Synthetic
tcgccttcggcatagggaca

SEQ ID NO: 25109 - DNA, 21 bp, Artificial Sequence
  Synthetic
cccgcgccggtaatcagaatc

SEQ ID NO: 25110 - DNA, 22 bp, Artificial Sequence
  Synthetic
actttgccgagcatatagccgc

SEQ ID NO: 25111 - DNA, 19 bp, Artificial Sequence
  Synthetic
cgcgaagggcagtacgtcc

SEQ ID NO: 25112 - DNA, 21 bp, Artificial Sequence
  Synthetic
atgccgtatcacgttccccct

SEQ ID NO: 25113 - DNA, 19 bp, Artificial Sequence
  Synthetic
gacgccgcctacgcactca

SEQ ID NO: 25114 - DNA, 20 bp, Artificial Sequence
  Synthetic
acaccttggctcgttccaaa

SEQ ID NO: 25115 - DNA, 22 bp, Artificial Sequence
  Synthetic
atcaggtaggcaaacaccgcca

SEQ ID NO: 25116 - DNA, 19 bp, Artificial Sequence
  Synthetic
ccaaggcgaggacggtgca

SEQ ID NO: 25117 - DNA, 19 bp, Artificial Sequence
  Synthetic
cgtcatacaggcgcgggct

SEQ ID NO: 25118 - DNA, 18 bp, Artificial Sequence
  Synthetic
ttccgcgctgcaacacgc

SEQ ID NO: 25119 - DNA, 19 bp, Artificial Sequence
  Synthetic
ccgttaccggggttctgcg

SEQ ID NO: 25120 - DNA, 21 bp, Artificial Sequence
  Synthetic
acctgaacgccttgtcctcca

SEQ ID NO: 25121 - DNA, 19 bp, Artificial Sequence
  Synthetic
gttggcgggttggatgggc

SEQ ID NO: 25122 - DNA, 19 bp, Artificial Sequence
  Synthetic
gccgcatttcaaagcggcg

SEQ ID NO: 25123 - DNA, 22 bp, Artificial Sequence
  Synthetic
cgaacctgccgatgccgtattg

SEQ ID NO: 25124 - DNA, 19 bp, Artificial Sequence
  Synthetic
gtttgttggcggtaggcgc

SEQ ID NO: 25125 - DNA, 18 bp, Artificial Sequence
  Synthetic
cgcgcgttccgaacccaa

SEQ ID NO: 25126 - DNA, 19 bp, Artificial Sequence
  Synthetic
gatgccggaaccgacaccg

SEQ ID NO: 25127 - DNA, 20 bp, Artificial Sequence
  Synthetic
cgccttcaaaccccaagccg

SEQ ID NO: 25128 - DNA, 18 bp, Artificial Sequence
  Synthetic
gcgcggcgttcgtcttgt

SEQ ID NO: 25129 - DNA, 19 bp, Artificial Sequence
  Synthetic
gcggggaggccgtctgaat

SEQ ID NO: 25130 - DNA, 21 bp, Artificial Sequence
  Synthetic
cgctcttcaatcagcgtgccc

SEQ ID NO: 25131 - DNA, 18 bp, Artificial Sequence
  Synthetic
ggcatgcgccgcattgtg

SEQ ID NO: 25132 - DNA, 18 bp, Artificial Sequence
  Synthetic
tggcccggcgtgttttcc

SEQ ID NO: 25133 - DNA, 21 bp, Artificial Sequence
  Synthetic
cctgggctttgctgatgacgc

SEQ ID NO: 25134 - DNA, 19 bp, Artificial Sequence
  Synthetic
ggcggccagcagcttgtct

SEQ ID NO: 25135 - DNA, 18 bp, Artificial Sequence
  Synthetic
gttgcgcgcgtctgtggt

SEQ ID NO: 25136 - DNA, 22 bp, Artificial Sequence
  Synthetic
agtcatcgtcttcatcgtcgcc

SEQ ID NO: 25137 - DNA, 19 bp, Artificial Sequence
  Synthetic
ccagccgccgcctttcctt

SEQ ID NO: 25138 - DNA, 19 bp, Artificial Sequence
  Synthetic
gccgtctgaacgcgaccgt

SEQ ID NO: 25139 - DNA, 22 bp, Artificial Sequence
  Synthetic
tcggtttgattcctaccggcga

SEQ ID NO: 25140 - DNA, 22 bp, Artificial Sequence
  Synthetic
cctgctgaaaaaagccgatgcc

SEQ ID NO: 25141 - DNA, 21 bp, Artificial Sequence
  Synthetic
gtcgccgtcagccattattgc

SEQ ID NO: 25142 - DNA, 22 bp, Artificial Sequence
  Synthetic
ttgccgcttctgatcgattgcc

SEQ ID NO: 25143 - DNA, 20 bp, Artificial Sequence
  Synthetic
taccgcgaacgcatgagggc

SEQ ID NO: 25144 - DNA, 19 bp, Artificial Sequence
  Synthetic
agggcgcgggtcatatcgg

SEQ ID NO: 25145 - DNA, 18 bp, Artificial Sequence
  Synthetic
ggcaatggcgacgcgttg

SEQ ID NO: 25146 - DNA, 20 bp, Artificial Sequence
  Synthetic
ggcgaggaacatcgtctgca

SEQ ID NO: 25147 - DNA, 19 bp, Artificial Sequence
  Synthetic
ggcgatgaaggcggcaaga

SEQ ID NO: 25148 - DNA, 19 bp, Artificial Sequence
  Synthetic
gcagccatggtgcgtccga

SEQ ID NO: 25149 - DNA, 22 bp, Artificial Sequence
  Synthetic
catgagttgtgccagttccgcc

SEQ ID NO: 25150 - DNA, 20 bp, Artificial Sequence
  Synthetic
tggagacaacatgtagcgca

SEQ ID NO: 25151 - DNA, 25 bp, Artificial Sequence
  Synthetic
gacagttggtgtcctaattgtaaca

SEQ ID NO: 25152 - DNA, 24 bp, Artificial Sequence
  Synthetic
aaaggaggttattgtttgaggaca

SEQ ID NO: 25153 - DNA, 23 bp, Artificial Sequence
  Synthetic
acagctgacgttaattagccacc

SEQ ID NO: 25154 - DNA, 25 bp, Artificial Sequence
  Synthetic
atcccttgcgaaatctaaatatgca

SEQ ID NO: 25155 - DNA, 25 bp, Artificial Sequence
  Synthetic
tttggagtgtgcattacaaaaatga

SEQ ID NO: 25156 - DNA, 21 bp, Artificial Sequence
  Synthetic
aacctaaacttgggtcccctg

SEQ ID NO: 25157 - DNA, 24 bp, Artificial Sequence
  Synthetic
tattgcagtgattgatacaccagg

SEQ ID NO: 25158 - DNA, 25 bp, Artificial Sequence
  Synthetic
acaagacaggttttaaatgtcaccg

SEQ ID NO: 25159 - DNA, 25 bp, Artificial Sequence
  Synthetic
accaccagcatttaatgtaaaagtg

SEQ ID NO: 25160 - DNA, 25 bp, Artificial Sequence
  Synthetic
agtaggggttcaaattgatagaggt

SEQ ID NO: 25161 - DNA, 25 bp, Artificial Sequence
  Synthetic
aaggagatagtttacctacagaccc

SEQ ID NO: 25162 - DNA, 25 bp, Artificial Sequence
  Synthetic
acttgatgagtgggaattagcattt

SEQ ID NO: 25163 - DNA, 25 bp, Artificial Sequence
  Synthetic
gacctatgtgtaagtgaccaatagc

SEQ ID NO: 25164 - DNA, 25 bp, Artificial Sequence
  Synthetic
aaatcgaaacaaacaaatttgcagc

SEQ ID NO: 25165 - DNA, 23 bp, Artificial Sequence
  Synthetic
cgagattggagtgacaaggagag

SEQ ID NO: 25166 - DNA, 21 bp, Artificial Sequence
  Synthetic
cggtccaaattcctgctgatg

SEQ ID NO: 25167 - DNA, 21 bp, Artificial Sequence
  Synthetic
aaagtgggcacttggtgagaa

SEQ ID NO: 25168 - DNA, 23 bp, Artificial Sequence
  Synthetic
aggaattacttcacagcagaggt

SEQ ID NO: 25169 - DNA, 23 bp, Artificial Sequence
  Synthetic
gcatggagttttctctcactgac

SEQ ID NO: 25170 - DNA, 25 bp, Artificial Sequence
  Synthetic
tgagaataaatcagaaacatggccc

SEQ ID NO: 25171 - DNA, 22 bp, Artificial Sequence
  Synthetic
agcgataggaggggatgctagg

SEQ ID NO: 25172 - DNA, 21 bp, Artificial Sequence
  Synthetic
tgggatgctcctcccgattcc

SEQ ID NO: 25173 - DNA, 20 bp, Artificial Sequence
  Synthetic
tccttcggatgcccaggtcg

SEQ ID NO: 25174 - DNA, 19 bp, Artificial Sequence
  Synthetic
cgctcccctcgttccacct

SEQ ID NO: 25175 - DNA, 21 bp, Artificial Sequence
  Synthetic
aaggcctcttcctaggtccgg

SEQ ID NO: 25176 - DNA, 20 bp, Artificial Sequence
  Synthetic
agagaacgacccagaacgct

SEQ ID NO: 25177 - DNA, 23 bp, Artificial Sequence
  Synthetic
attggggccagaagaaaaacaaa

SEQ ID NO: 25178 - DNA, 25 bp, Artificial Sequence
  Synthetic
ttggactatgaacaatttgacagct

SEQ ID NO: 25179 - DNA, 21 bp, Artificial Sequence
  Synthetic
ggggtgtacagggtggttttc

SEQ ID NO: 25180 - DNA, 21 bp, Artificial Sequence
  Synthetic
actaggtagtcagaacagccc

SEQ ID NO: 25181 - DNA, 20 bp, Artificial Sequence
  Synthetic
ggaggacgcggacaaagaaa

SEQ ID NO: 25182 - DNA, 20 bp, Artificial Sequence
  Synthetic
acagaagcttggacaatgcg

SEQ ID NO: 25183 - DNA, 21 bp, Artificial Sequence
  Synthetic
tggactttaaacaagaggcgg

SEQ ID NO: 25184 - DNA, 20 bp, Artificial Sequence
  Synthetic
ccactgtcaccacagctgcc

SEQ ID NO: 25185 - DNA, 23 bp, Artificial Sequence
  Synthetic
acctacatttagtggtggcaatg

SEQ ID NO: 25186 - DNA, 23 bp, Artificial Sequence
  Synthetic
cgcaaaggtactgtacgctatag

SEQ ID NO: 25187 - DNA, 23 bp, Artificial Sequence
  Synthetic
taccagttccaagatatgcctcc

SEQ ID NO: 25188 - DNA, 20 bp, Artificial Sequence
  Synthetic
tttcagatggctttgtggcg

SEQ ID NO: 25189 - DNA, 20 bp, Artificial Sequence
  Synthetic
tggattgcctgatccacagt

SEQ ID NO: 25190 - DNA, 20 bp, Artificial Sequence
  Synthetic
gggattgcccccccttagaa

SEQ ID NO: 25191 - DNA, 20 bp, Artificial Sequence
  Synthetic
gggatgctatacccaccact

SEQ ID NO: 25192 - DNA, 25 bp, Artificial Sequence
  Synthetic
acaactgtatgtaatgtaaaggcgt

SEQ ID NO: 25193 - DNA, 22 bp, Artificial Sequence
  Synthetic
ccaccttagtatgtaggcggcg

SEQ ID NO: 25194 - DNA, 20 bp, Artificial Sequence
  Synthetic
ttgcgaggggatctgggagt

SEQ ID NO: 25195 - DNA, 22 bp, Artificial Sequence
  Synthetic
tggagtcaactgggctactggt

SEQ ID NO: 25196 - DNA, 22 bp, Artificial Sequence
  Synthetic
acacccttccaattggactggc

SEQ ID NO: 25197 - DNA, 25 bp, Artificial Sequence
  Synthetic
cgaggggatgtatggttaaattcaa

SEQ ID NO: 25198 - DNA, 20 bp, Artificial Sequence
  Synthetic
gtaccccacctgtggtacgt

SEQ ID NO: 25199 - DNA, 22 bp, Artificial Sequence
  Synthetic
tggagggctgacaataccacct

SEQ ID NO: 25200 - DNA, 23 bp, Artificial Sequence
  Synthetic
gttagggcccatagaatgttggt

SEQ ID NO: 25201 - DNA, 19 bp, Artificial Sequence
  Synthetic
cgccagatgggtgggccat

SEQ ID NO: 25202 - DNA, 22 bp, Artificial Sequence
  Synthetic
gtcccttactcggtgctcttgc

SEQ ID NO: 25203 - DNA, 25 bp, Artificial Sequence
  Synthetic
tcttacatgcaggagaagtatgagg

SEQ ID NO: 25204 - DNA, 25 bp, Artificial Sequence
  Synthetic
acatgccaacataactgagattcaa

SEQ ID NO: 25205 - DNA, 20 bp, Artificial Sequence
  Synthetic
caacctgggttacctgcgat

SEQ ID NO: 25206 - DNA, 22 bp, Artificial Sequence
  Synthetic
cctcatgcagctacaatccttg

SEQ ID NO: 25207 - DNA, 22 bp, Artificial Sequence
  Synthetic
gtctactccgcgttcaatccgg

SEQ ID NO: 25208 - DNA, 25 bp, Artificial Sequence
  Synthetic
ggactagtcttgtcgtcaattatgg

SEQ ID NO: 25209 - DNA, 20 bp, Artificial Sequence
  Synthetic
ccatgccgatgcccctgttg

SEQ ID NO: 25210 - DNA, 21 bp, Artificial Sequence
  Synthetic
caactcgggccatcactagtg

SEQ ID NO: 25211 - DNA, 21 bp, Artificial Sequence
  Synthetic
ttgcagaagtgtgtcgaggca

SEQ ID NO: 25212 - DNA, 22 bp, Artificial Sequence
  Synthetic
aactcagtgaccaacaccgagc

SEQ ID NO: 25213 - DNA, 22 bp, Artificial Sequence
  Synthetic
tgcagacaaacaagcaatgcgt

SEQ ID NO: 25214 - DNA, 21 bp, Artificial Sequence
  Synthetic
gcatcattgctggtgtgcacg

SEQ ID NO: 25215 - DNA, 22 bp, Artificial Sequence
  Synthetic
attgtgatgtttactccccgga

SEQ ID NO: 25216 - DNA, 22 bp, Artificial Sequence
  Synthetic
tggtctgaaggggatgacgtcc

SEQ ID NO: 25217 - DNA, 21 bp, Artificial Sequence
  Synthetic
gaattcaactcccccccaaac

SEQ ID NO: 25218 - DNA, 20 bp, Artificial Sequence
  Synthetic
tggggacatctgggtgacaa

SEQ ID NO: 25219 - DNA, 22 bp, Artificial Sequence
  Synthetic
aacgggggatgataaaaatgca

SEQ ID NO: 25220 - DNA, 21 bp, Artificial Sequence
  Synthetic
atcctggtgtcagatgtgtct

SEQ ID NO: 25221 - DNA, 21 bp, Artificial Sequence
  Synthetic
aatgacgtgtggatgggaaga

SEQ ID NO: 25222 - DNA, 20 bp, Artificial Sequence
  Synthetic
agaagtcagtggcgaggttt

SEQ ID NO: 25223 - DNA, 21 bp, Artificial Sequence
  Synthetic
ggacagctttcctttgtgtgc

SEQ ID NO: 25224 - DNA, 21 bp, Artificial Sequence
  Synthetic
ggaattccctggcgttttaca

SEQ ID NO: 25225 - DNA, 25 bp, Artificial Sequence
  Synthetic
agctgatactcagataagtgtaccc

SEQ ID NO: 25226 - DNA, 25 bp, Artificial Sequence
  Synthetic
ttgcttgttggcaatatatggatgt

SEQ ID NO: 25227 - DNA, 20 bp, Artificial Sequence
  Synthetic
gaagcgtcgacgagctgcag

SEQ ID NO: 25228 - DNA, 22 bp, Artificial Sequence
  Synthetic
ctcttggaagagttcagcgact

SEQ ID NO: 25229 - DNA, 20 bp, Artificial Sequence
  Synthetic
ccggaaggtgcaccaacaaa

SEQ ID NO: 25230 - DNA, 25 bp, Artificial Sequence
  Synthetic
ttcaactacagaaacctcagtttgc

SEQ ID NO: 25231 - DNA, 22 bp, Artificial Sequence
  Synthetic
atcctccagaacaaacagacga

SEQ ID NO: 25232 - DNA, 25 bp, Artificial Sequence
  Synthetic
tggcctgatcttataaaaatggagc

SEQ ID NO: 25233 - DNA, 22 bp, Artificial Sequence
  Synthetic
acaacatgtgcagacaaactga

SEQ ID NO: 25234 - DNA, 21 bp, Artificial Sequence
  Synthetic
aaatggaacgtgttaccctgg

SEQ ID NO: 25235 - DNA, 20 bp, Artificial Sequence
  Synthetic
tgtggggcatacatcaccca

SEQ ID NO: 25236 - DNA, 20 bp, Artificial Sequence
  Synthetic
ggagggagccatggaagaat

SEQ ID NO: 25237 - DNA, 25 bp, Artificial Sequence
  Synthetic
tggtttccagcattcaaatgatcaa

SEQ ID NO: 25238 - DNA, 25 bp, Artificial Sequence
  Synthetic
ctatataacaaggtgaagagggcac

SEQ ID NO: 25239 - DNA, 19 bp, Artificial Sequence
  Synthetic
aaacccgctcaatgcccgg

SEQ ID NO: 25240 - DNA, 20 bp, Artificial Sequence
  Synthetic
gcaggggccctaaattgggt

SEQ ID NO: 25241 - DNA, 20 bp, Artificial Sequence
  Synthetic
cgagcttcggagcagtcacg

SEQ ID NO: 25242 - DNA, 21 bp, Artificial Sequence
  Synthetic
gggcggtactgttggtcaagg

SEQ ID NO: 25243 - DNA, 22 bp, Artificial Sequence
  Synthetic
gatgacaagccgtattgctggc

SEQ ID NO: 25244 - DNA, 20 bp, Artificial Sequence
  Synthetic
ggccaacaggcaacaacagc

SEQ ID NO: 25245 - DNA, 20 bp, Artificial Sequence
  Synthetic
cttcacacctacgcccgctc

SEQ ID NO: 25246 - DNA, 22 bp, Artificial Sequence
  Synthetic
gcttggcttggcatgtcaaggg

SEQ ID NO: 25247 - DNA, 22 bp, Artificial Sequence
  Synthetic
cgtgacgctgtcatcatgctca

SEQ ID NO: 25248 - DNA, 22 bp, Artificial Sequence
  Synthetic
ggagacgaaggtcatcacgtgg

SEQ ID NO: 25249 - DNA, 22 bp, Artificial Sequence
  Synthetic
cggttctaagacccttgctggc

SEQ ID NO: 25250 - DNA, 18 bp, Artificial Sequence
  Synthetic
gtgtgcacgcggggtgtt

SEQ ID NO: 25251 - DNA, 21 bp, Artificial Sequence
  Synthetic
taggactgtcaccaccggagc

SEQ ID NO: 25252 - DNA, 20 bp, Artificial Sequence
  Synthetic
agaggtctagacgtcgccgt

SEQ ID NO: 25253 - DNA, 22 bp, Artificial Sequence
  Synthetic
accggtatgtttcgtctgggga

SEQ ID NO: 25254 - DNA, 20 bp, Artificial Sequence
  Synthetic
gctgggggccgttcagaatg

SEQ ID NO: 25255 - DNA, 19 bp, Artificial Sequence
  Synthetic
tctaggagggtgggtggcc

SEQ ID NO: 25256 - DNA, 21 bp, Artificial Sequence
  Synthetic
caggcgagggggctgtacagt

SEQ ID NO: 25257 - DNA, 22 bp, Artificial Sequence
  Synthetic
catgccagaaggggtacaaggg

SEQ ID NO: 25258 - DNA, 20 bp, Artificial Sequence
  Synthetic
gaggattcaccgcttcgcgc

SEQ ID NO: 25259 - DNA, 20 bp, Artificial Sequence
  Synthetic
acaaggccaccacccagatg

SEQ ID NO: 25260 - DNA, 22 bp, Artificial Sequence
  Synthetic
ttccgcggaggaaaaggaagcc

SEQ ID NO: 25261 - DNA, 21 bp, Artificial Sequence
  Synthetic
gctcatcaccccttgctctgc

SEQ ID NO: 25262 - DNA, 22 bp, Artificial Sequence
  Synthetic
tcgctctctcgacaagaaagcc

SEQ ID NO: 25263 - DNA, 20 bp, Artificial Sequence
  Synthetic
gagagccaggggacacacga

SEQ ID NO: 25264 - DNA, 22 bp, Artificial Sequence
  Synthetic
ctacagagccaggaacagctgg

SEQ ID NO: 25265 - DNA, 22 bp, Artificial Sequence
  Synthetic
actgggcggtgaagacaaaacg

SEQ ID NO: 25266 - DNA, 22 bp, Artificial Sequence
  Synthetic
cgagtaactcgtccctcttctg

SEQ ID NO: 25267 - DNA, 20 bp, Artificial Sequence
  Synthetic
gcgtactgccccagcttgaa

SEQ ID NO: 25268 - DNA, 25 bp, Artificial Sequence
  Synthetic
gtgttgaaaagaaaaagactgaggg

SEQ ID NO: 25269 - DNA, 23 bp, Artificial Sequence
  Synthetic
ccatactggcattactggtgaca

SEQ ID NO: 25270 - DNA, 21 bp, Artificial Sequence
  Synthetic
ccactgtgtggttttccctca

SEQ ID NO: 25271 - DNA, 23 bp, Artificial Sequence
  Synthetic
tgtacaacagacttctcagtggt

SEQ ID NO: 25272 - DNA, 22 bp, Artificial Sequence
  Synthetic
gaagtcttcatcgctcaaagca

SEQ ID NO: 25273 - DNA, 25 bp, Artificial Sequence
  Synthetic
tactggctacaaacaatgtctttcg

SEQ ID NO: 25274 - DNA, 25 bp, Artificial Sequence
  Synthetic
tgatgaaacctgtgaacatgagtac

SEQ ID NO: 25275 - DNA, 21 bp, Artificial Sequence
  Synthetic
gaaacatggtggtggtgtagc

SEQ ID NO: 25276 - DNA, 20 bp, Artificial Sequence
  Synthetic
gtgcagacggttcgtacaca

SEQ ID NO: 25277 - DNA, 25 bp, Artificial Sequence
  Synthetic
ctagtggtgatatcacttgtgttgt

SEQ ID NO: 25278 - DNA, 22 bp, Artificial Sequence
  Synthetic
cataatggcaaccatccaacgt

SEQ ID NO: 25279 - DNA, 23 bp, Artificial Sequence
  Synthetic
aagacatctgaggagcactttgt

SEQ ID NO: 25280 - DNA, 25 bp, Artificial Sequence
  Synthetic
cttgatgagagttttcttggtaggt

SEQ ID NO: 25281 - DNA, 22 bp, Artificial Sequence
  Synthetic
ttaacgggtgtagaagctgtga

SEQ ID NO: 25282 - DNA, 25 bp, Artificial Sequence
  Synthetic
aaggaaacatcttacactacaacca

SEQ ID NO: 25283 - DNA, 25 bp, Artificial Sequence
  Synthetic
agacactattcagcgagtttcaaga

SEQ ID NO: 25284 - DNA, 24 bp, Artificial Sequence
  Synthetic
aacacaagagttaggtcatgagga

SEQ ID NO: 25285 - DNA, 25 bp, Artificial Sequence
  Synthetic
tgcagcatttgtttaagtggattag

SEQ ID NO: 25286 - DNA, 25 bp, Artificial Sequence
  Synthetic
tggaagagctatgttcatatcatgg

SEQ ID NO: 25287 - DNA, 22 bp, Artificial Sequence
  Synthetic
agtgttgctgtgaaaaatggcg

SEQ ID NO: 25288 - DNA, 21 bp, Artificial Sequence
  Synthetic
tacagctcacagcgagttagc

SEQ ID NO: 25289 - DNA, 22 bp, Artificial Sequence
  Synthetic
aattcgtagtgctgccaagaag

SEQ ID NO: 25290 - DNA, 20 bp, Artificial Sequence
  Synthetic
tttagccagcgtggtggttc

SEQ ID NO: 25291 - DNA, 24 bp, Artificial Sequence
  Synthetic
cactcgttatgtgcttatggatgg

SEQ ID NO: 25292 - DNA, 24 bp, Artificial Sequence
  Synthetic
tattgccatattggtgacttgtgc

SEQ ID NO: 25293 - DNA, 22 bp, Artificial Sequence
  Synthetic
agacactgttgccacttacaca

SEQ ID NO: 25294 - DNA, 21 bp, Artificial Sequence
  Synthetic
aggaaaatggcattcccgtca

SEQ ID NO: 25295 - DNA, 24 bp, Artificial Sequence
  Synthetic
atccaacctggtcaaacattttca

SEQ ID NO: 25296 - DNA, 24 bp, Artificial Sequence
  Synthetic
tgacatattgggacctctttctgc

SEQ ID NO: 25297 - DNA, 23 bp, Artificial Sequence
  Synthetic
gtttacgagaatgctttcttgcc

SEQ ID NO: 25298 - DNA, 24 bp, Artificial Sequence
  Synthetic
gctagagctatagtgtttgtgtgt

SEQ ID NO: 25299 - DNA, 25 bp, Artificial Sequence
  Synthetic
aaaccatgtatcaaggttgctactg

SEQ ID NO: 25300 - DNA, 21 bp, Artificial Sequence
  Synthetic
gcgaggaaatgctcgataacc

SEQ ID NO: 25301 - DNA, 24 bp, Artificial Sequence
  Synthetic
acaatgctcttcactatgcttagg

SEQ ID NO: 25302 - DNA, 20 bp, Artificial Sequence
  Synthetic
cggctggtaccacacaaaca

SEQ ID NO: 25303 - DNA, 23 bp, Artificial Sequence
  Synthetic
ttcaactgtgctttccttctgtg

SEQ ID NO: 25304 - DNA, 22 bp, Artificial Sequence
  Synthetic
agaaacacagtctgtaccgtct

SEQ ID NO: 25305 - DNA, 24 bp, Artificial Sequence
  Synthetic
cgtcagcgtctaactaaatacaca

SEQ ID NO: 25306 - DNA, 25 bp, Artificial Sequence
  Synthetic
aatcaggatcttaatgggaactggt

SEQ ID NO: 25307 - DNA, 24 bp, Artificial Sequence
  Synthetic
tctactgtgtttccacctacaagt

SEQ ID NO: 25308 - DNA, 25 bp, Artificial Sequence
  Synthetic
agacttttatgactttgctgtgtct

SEQ ID NO: 25309 - DNA, 21 bp, Artificial Sequence
  Synthetic
ttgaagtcaatagccgccact

SEQ ID NO: 25310 - DNA, 23 bp, Artificial Sequence
  Synthetic
agtgtgcgcaagtattaagtgag

SEQ ID NO: 25311 - DNA, 25 bp, Artificial Sequence
  Synthetic
tgtgtgctataacagtaactatgcg

SEQ ID NO: 25312 - DNA, 22 bp, Artificial Sequence
  Synthetic
acatgatgagcttactggccac

SEQ ID NO: 25313 - DNA, 20 bp, Artificial Sequence
  Synthetic
aatgccccaggttgtgatgt

SEQ ID NO: 25314 - DNA, 20 bp, Artificial Sequence
  Synthetic
tggtattgccactgtacgcg

SEQ ID NO: 25315 - DNA, 25 bp, Artificial Sequence
  Synthetic
atgttgcaaattatcaaaaggtcgg

SEQ ID NO: 25316 - DNA, 22 bp, Artificial Sequence
  Synthetic
agacttcgtgcaaaacactacg

SEQ ID NO: 25317 - DNA, 25 bp, Artificial Sequence
  Synthetic
acagacctcaaataggcgttgtaag

SEQ ID NO: 25318 - DNA, 23 bp, Artificial Sequence
  Synthetic
atgtggctacattacaagcagaa

SEQ ID NO: 25319 - DNA, 20 bp, Artificial Sequence
  Synthetic
tagagggctgtcatgcaact

SEQ ID NO: 25320 - DNA, 25 bp, Artificial Sequence
  Synthetic
tgaagtactttgtcaagattggacc

SEQ ID NO: 25321 - DNA, 25 bp, Artificial Sequence
  Synthetic
ttgctgataagtttccagttcttca

SEQ ID NO: 25322 - DNA, 24 bp, Artificial Sequence
  Synthetic
atgtgaataagcatgcattccaca

SEQ ID NO: 25323 - DNA, 22 bp, Artificial Sequence
  Synthetic
aaaggacactttgatggacacg

SEQ ID NO: 25324 - DNA, 23 bp, Artificial Sequence
  Synthetic
ttgatggtagagtggaaggacag

SEQ ID NO: 25325 - DNA, 22 bp, Artificial Sequence
  Synthetic
gctatgccttcgaacacatcgt

SEQ ID NO: 25326 - DNA, 25 bp, Artificial Sequence
  Synthetic
gtaaggatggacatgttgaaacctt

SEQ ID NO: 25327 - DNA, 21 bp, Artificial Sequence
  Synthetic
ctgtgcaacagtacatacggc

SEQ ID NO: 25328 - DNA, 23 bp, Artificial Sequence
  Synthetic
tggctataccatgcatgctaact

SEQ ID NO: 25329 - DNA, 25 bp, Artificial Sequence
  Synthetic
tgcactttcgagtacatatctgatg

SEQ ID NO: 25330 - DNA, 24 bp, Artificial Sequence
  Synthetic
aaatggtacaatcacagatgctgt

SEQ ID NO: 25331 - DNA, 25 bp, Artificial Sequence
  Synthetic
atgcagattcttttgtagtcaaggg

SEQ ID NO: 25332 - DNA, 25 bp, Artificial Sequence
  Synthetic
tatggtttttacaccactactggca

SEQ ID NO: 25333 - DNA, 24 bp, Artificial Sequence
  Synthetic
tcaagatgttaactgcactgatgt

SEQ ID NO: 25334 - DNA, 25 bp, Artificial Sequence
  Synthetic
acagaagtaatgcctgtttctatgg

SEQ ID NO: 25335 - DNA, 25 bp, Artificial Sequence
  Synthetic
taatgctagagatctcatttgtgcg

SEQ ID NO: 25336 - DNA, 20 bp, Artificial Sequence
  Synthetic
gcaagctgcaagacgttgtt

SEQ ID NO: 25337 - DNA, 22 bp, Artificial Sequence
  Synthetic
acatgtcacgtatgtgccatcc

SEQ ID NO: 25338 - DNA, 23 bp, Artificial Sequence
  Synthetic
catcaccagatgttgatcttggc

SEQ ID NO: 25339 - DNA, 21 bp, Artificial Sequence
  Synthetic
gtggttcttgctgcaagtttg

SEQ ID NO: 25340 - DNA, 23 bp, Artificial Sequence
  Synthetic
attcacatcttttgcttgtcgct

SEQ ID NO: 25341 - DNA, 23 bp, Artificial Sequence
  Synthetic
cgaagtttactaccagcttgagt

SEQ ID NO: 25342 - DNA, 23 bp, Artificial Sequence
  Synthetic
agtcacactagccatccttactg

SEQ ID NO: 25343 - DNA, 23 bp, Artificial Sequence
  Synthetic
taaagcttgttttcctctggctc

SEQ ID NO: 25344 - DNA, 22 bp, Artificial Sequence
  Synthetic
actgtggctacatcacgaacgc

SEQ ID NO: 25345 - DNA, 22 bp, Artificial Sequence
  Synthetic
agtgtgttagaggtacgactgt

SEQ ID NO: 25346 - DNA, 24 bp, Artificial Sequence
  Synthetic
gcttgaagatccttgtaaggtaca

SEQ ID NO: 25347 - DNA, 20 bp, Artificial Sequence
  Synthetic
agcgccgaccccaaggttta

SEQ ID NO: 25348 - DNA, 20 bp, Artificial Sequence
  Synthetic
acaatgctgccaccgtgcta

SEQ ID NO: 25349 - DNA, 21 bp, Artificial Sequence
  Synthetic
gctgaggcatctaaaaagcct

SEQ ID NO: 25350 - DNA, 23 bp, Artificial Sequence
  Synthetic
aagcacattgacgcatacaaaac

SEQ ID NO: 25351 - DNA, 25 bp, Artificial Sequence
  Synthetic
tcaatgtgtaacattagggaggact

SEQ ID NO: 25352 - DNA, 24 bp, Artificial Sequence
  Synthetic
accaataggtgacaatcatccaga

SEQ ID NO: 25353 - DNA, 22 bp, Artificial Sequence
  Synthetic
ttgacaaggtgtgaagagccgc

SEQ ID NO: 25354 - DNA, 22 bp, Artificial Sequence
  Synthetic
gttgggacacactccacacaaa

SEQ ID NO: 25355 - DNA, 25 bp, Artificial Sequence
  Synthetic
cagacagactaatacagataacccg

SEQ ID NO: 25356 - DNA, 25 bp, Artificial Sequence
  Synthetic
ttaccattttctagggagatctgga

SEQ ID NO: 25357 - DNA, 25 bp, Artificial Sequence
  Synthetic
ggtaacttacctatttatccccacc

SEQ ID NO: 25358 - DNA, 25 bp, Artificial Sequence
  Synthetic
taccagttatgttaacacctggatc

SEQ ID NO: 25359 - DNA, 25 bp, Artificial Sequence
  Synthetic
ttagccactactctcataggagaac

SEQ ID NO: 25360 - DNA, 20 bp, Artificial Sequence
  Synthetic
agtccaccgcctcactagtt

SEQ ID NO: 25361 - DNA, 24 bp, Artificial Sequence
  Synthetic
ttaaatgaagttcttgtggtgcca

SEQ ID NO: 25362 - DNA, 21 bp, Artificial Sequence
  Synthetic
aaatgcatctgtgttctggca

SEQ ID NO: 25363 - DNA, 23 bp, Artificial Sequence
  Synthetic
ttgcctatcaacacacacactca

SEQ ID NO: 25364 - DNA, 25 bp, Artificial Sequence
  Synthetic
tccctaattgtgattgcactgaatg

SEQ ID NO: 25365 - DNA, 22 bp, Artificial Sequence
  Synthetic
ctgaggagcaagggttatctga

SEQ ID NO: 25366 - DNA, 23 bp, Artificial Sequence
  Synthetic
ggctccagcttagctatgtacat

SEQ ID NO: 25367 - DNA, 25 bp, Artificial Sequence
  Synthetic
ttgatgggtatgatcaacagagtgt

SEQ ID NO: 25368 - DNA, 22 bp, Artificial Sequence
  Synthetic
ttaccagcaatggcaagaaggt

SEQ ID NO: 25369 - DNA, 23 bp, Artificial Sequence
  Synthetic
gggaacctaaacccaaaagcaga

SEQ ID NO: 25370 - DNA, 23 bp, Artificial Sequence
  Synthetic
ccatgagggtgttaagctagaga

SEQ ID NO: 25371 - DNA, 23 bp, Artificial Sequence
  Synthetic
ttcttggtatacatgttggtggc

SEQ ID NO: 25372 - DNA, 20 bp, Artificial Sequence
  Synthetic
tggttcagcagtagggtgtg

SEQ ID NO: 25373 - DNA, 22 bp, Artificial Sequence
  Synthetic
cgccactctttccttatacacc

SEQ ID NO: 25374 - DNA, 20 bp, Artificial Sequence
  Synthetic
tctgccattcgcattttgca

SEQ ID NO: 25375 - DNA, 25 bp, Artificial Sequence
  Synthetic
agactctctaaattcaaatgtggcg

SEQ ID NO: 25376 - DNA, 25 bp, Artificial Sequence
  Synthetic
gtatgcaacaaatcatattgccacc

SEQ ID NO: 25377 - DNA, 24 bp, Artificial Sequence
  Synthetic
actgggatgcagttagaaaagaaa

SEQ ID NO: 25378 - DNA, 23 bp, Artificial Sequence
  Synthetic
ctagctcctcacggacttttttc

SEQ ID NO: 25379 - DNA, 25 bp, Artificial Sequence
  Synthetic
aaacagaaacatcaaaggtgctagt

SEQ ID NO: 25380 - DNA, 24 bp, Artificial Sequence
  Synthetic
gttccattagttgaaggtacccct

SEQ ID NO: 25381 - DNA, 24 bp, Artificial Sequence
  Synthetic
cctgaatttttggtacagccttcc

SEQ ID NO: 25382 - DNA, 25 bp, Artificial Sequence
  Synthetic
tgtaggtgatggactttttgtagca

SEQ ID NO: 25383 - DNA, 23 bp, Artificial Sequence
  Synthetic
tggtctggagattaatagggctg

SEQ ID NO: 25384 - DNA, 25 bp, Artificial Sequence
  Synthetic
ttactcatgcaggaactataggtga

SEQ ID NO: 25385 - DNA, 22 bp, Artificial Sequence
  Synthetic
agttggcttttattcctcctgc

SEQ ID NO: 25386 - DNA, 25 bp, Artificial Sequence
  Synthetic
cccatggggttggtataaatacaga

SEQ ID NO: 25387 - DNA, 23 bp, Artificial Sequence
  Synthetic
aatttgctggcttcagaagagtc

SEQ ID NO: 25388 - DNA, 23 bp, Artificial Sequence
  Synthetic
attgtggaagaagcagattgtgt

SEQ ID NO: 25389 - DNA, 21 bp, Artificial Sequence
  Synthetic
ggcagcagtacacatttctcc

SEQ ID NO: 25390 - DNA, 25 bp, Artificial Sequence
  Synthetic
tcctagcactttatgaaaaaggagc

SEQ ID NO: 25391 - DNA, 21 bp, Artificial Sequence
  Synthetic
agaagtccttctccgctgaaa

SEQ ID NO: 25392 - DNA, 20 bp, Artificial Sequence
  Synthetic
gcccactgcaccaactcctg

SEQ ID NO: 25393 - DNA, 20 bp, Artificial Sequence
  Synthetic
tccctcagttgtgcctttgc

SEQ ID NO: 25394 - DNA, 23 bp, Artificial Sequence
  Synthetic
cccagacttcattagacagcctt

SEQ ID NO: 25395 - DNA, 20 bp, Artificial Sequence
  Synthetic
tggtacaatttgcgcgggaa

SEQ ID NO: 25396 - DNA, 25 bp, Artificial Sequence
  Synthetic
gctgaaaaattacactgttggttcg

SEQ ID NO: 25397 - DNA, 25 bp, Artificial Sequence
  Synthetic
tgaagcatttgaaatagcagaaggc

SEQ ID NO: 25398 - DNA, 22 bp, Artificial Sequence
  Synthetic
tgaatggaatgggaaagggaga

SEQ ID NO: 25399 - DNA, 20 bp, Artificial Sequence
  Synthetic
gtggagaacgccagaatgct

SEQ ID NO: 25400 - DNA, 22 bp, Artificial Sequence
  Synthetic
gatcaggagaatttggcgtcaa

SEQ ID NO: 25401 - DNA, 21 bp, Artificial Sequence
  Synthetic
tcctgagaggatcagtggccc

SEQ ID NO: 25402 - DNA, 24 bp, Artificial Sequence
  Synthetic
cccaaggggacaactatctactag

SEQ ID NO: 25403 - DNA, 25 bp, Artificial Sequence
  Synthetic
ctgctggttttgaagtttataacgc

SEQ ID NO: 25404 - DNA, 20 bp, Artificial Sequence
  Synthetic
cctgggcttggaaaaaccca

SEQ ID NO: 25405 - DNA, 25 bp, Artificial Sequence
  Synthetic
aatgacagttattcccatcgaagaa

SEQ ID NO: 25406 - DNA, 23 bp, Artificial Sequence
  Synthetic
ggaaattatcccgatacagaccg

SEQ ID NO: 25407 - DNA, 25 bp, Artificial Sequence
  Synthetic
cagtgtactaactgtcagcatgtga

SEQ ID NO: 25408 - DNA, 24 bp, Artificial Sequence
  Synthetic
tgatcccaatgttggtatggtaga

SEQ ID NO: 25409 - DNA, 24 bp, Artificial Sequence
  Synthetic
ttaaacctgttttggaagatggga

SEQ ID NO: 25410 - DNA, 25 bp, Artificial Sequence
  Synthetic
tcaggcgttgataaattaaccagag

SEQ ID NO: 25411 - DNA, 25 bp, Artificial Sequence
  Synthetic
tcaagaaccttgacgttacctttac

SEQ ID NO: 25412 - DNA, 20 bp, Artificial Sequence
  Synthetic
ccatgtgatgggccaattca

SEQ ID NO: 25413 - DNA, 25 bp, Artificial Sequence
  Synthetic
atggttccttattcaaagatggggt

SEQ ID NO: 25414 - DNA, 24 bp, Artificial Sequence
  Synthetic
atcaattaggagatgccacaacaa

SEQ ID NO: 25415 - DNA, 23 bp, Artificial Sequence
  Synthetic
tgagagaggctagaacaacttcc

SEQ ID NO: 25416 - DNA, 25 bp, Artificial Sequence
  Synthetic
aaggcagagttgatctcttaggaga

SEQ ID NO: 25417 - DNA, 21 bp, Artificial Sequence
  Synthetic
tcatgtgatgcgataaccacc

SEQ ID NO: 25418 - DNA, 25 bp, Artificial Sequence
  Synthetic
tttagctgataccggtcttaaaagt

SEQ ID NO: 25419 - DNA, 25 bp, Artificial Sequence
  Synthetic
gataccatgcttaaagatgggttga

SEQ ID NO: 25420 - DNA, 23 bp, Artificial Sequence
  Synthetic
tcaaagatgaggggacagtaact

SEQ ID NO: 25421 - DNA, 20 bp, Artificial Sequence
  Synthetic
tttgggtcacccgattggag

SEQ ID NO: 25422 - DNA, 24 bp, Artificial Sequence
  Synthetic
tgacaaaggcacaaaagacttaac

SEQ ID NO: 25423 - DNA, 21 bp, Artificial Sequence
  Synthetic
ctaactgtgtagcctgcttgc

SEQ ID NO: 25424 - DNA, 24 bp, Artificial Sequence
  Synthetic
gacttgtccctttgatagaggtgc

SEQ ID NO: 25425 - DNA, 25 bp, Artificial Sequence
  Synthetic
accggcttttttagaataaccaaca

SEQ ID NO: 25426 - DNA, 23 bp, Artificial Sequence
  Synthetic
tttgtcaacaaatttgggttcgg

SEQ ID NO: 25427 - DNA, 20 bp, Artificial Sequence
  Synthetic
aacggcaatcgcatgcttag

SEQ ID NO: 25428 - DNA, 22 bp, Artificial Sequence
  Synthetic
tggctcagaagctacaaaaacc

SEQ ID NO: 25429 - DNA, 25 bp, Artificial Sequence
  Synthetic
aatcagatgctctttacgttgttga

SEQ ID NO: 25430 - DNA, 25 bp, Artificial Sequence
  Synthetic
attgacttactcagatggttcagac

SEQ ID NO: 25431 - DNA, 25 bp, Artificial Sequence
  Synthetic
caagctattcagtttgcttttgacc

SEQ ID NO: 25432 - DNA, 23 bp, Artificial Sequence
  Synthetic
attaccctgttgaccaagcaaac

SEQ ID NO: 25433 - DNA, 25 bp, Artificial Sequence
  Synthetic
acgtaaccctaaatcaaatgaacct

SEQ ID NO: 25434 - DNA, 24 bp, Artificial Sequence
  Synthetic
acgatcggttacagaaatcaagtc

SEQ ID NO: 25435 - DNA, 21 bp, Artificial Sequence
  Synthetic
tctgccacctctcaaccgact

SEQ ID NO: 25436 - DNA, 21 bp, Artificial Sequence
  Synthetic
ggcttcaaccacaaacagcag

SEQ ID NO: 25437 - DNA, 25 bp, Artificial Sequence
  Synthetic
tcatgttcatgtctcctttaatgct

SEQ ID NO: 25438 - DNA, 23 bp, Artificial Sequence
  Synthetic
aaggggtagatcagaaatcagct

SEQ ID NO: 25439 - DNA, 24 bp, Artificial Sequence
  Synthetic
tcgtttgattcacaagagaggaaa

SEQ ID NO: 25440 - DNA, 25 bp, Artificial Sequence
  Synthetic
tattgcttacctagaatcacacgac

SEQ ID NO: 25441 - DNA, 25 bp, Artificial Sequence
  Synthetic
tcatcctaaagtgttttaccaggac

SEQ ID NO: 25442 - DNA, 25 bp, Artificial Sequence
  Synthetic
acaagaaaattgaggagtgtacagg

SEQ ID NO: 25443 - DNA, 21 bp, Artificial Sequence
  Synthetic
ttgggggacaacagaagactt

SEQ ID NO: 25444 - DNA, 23 bp, Artificial Sequence
  Synthetic
gtgaaagccagttgacctatgtt

SEQ ID NO: 25445 - DNA, 21 bp, Artificial Sequence
  Synthetic
gaacagcggaatgcacgtatt

SEQ ID NO: 25446 - DNA, 22 bp, Artificial Sequence
  Synthetic
ttttcggcggttcagaagttaa

SEQ ID NO: 25447 - DNA, 25 bp, Artificial Sequence
  Synthetic
agtcactttcattttagtgggatca

SEQ ID NO: 25448 - DNA, 23 bp, Artificial Sequence
  Synthetic
gcccaaggcagtaatcatttcaa

SEQ ID NO: 25449 - DNA, 23 bp, Artificial Sequence
  Synthetic
ttgtcctagttgtacgaggagag

SEQ ID NO: 25450 - DNA, 25 bp, Artificial Sequence
  Synthetic
tgaagtggttacagcattagaatca

SEQ ID NO: 25451 - DNA, 25 bp, Artificial Sequence
  Synthetic
acagaagtgaactcttgtcttgaac

SEQ ID NO: 25452 - DNA, 23 bp, Artificial Sequence
  Synthetic
ttttggatcgtgaagtaacgcaa

SEQ ID NO: 25453 - DNA, 25 bp, Artificial Sequence
  Synthetic
caggctattgctgatgaattagacg

SEQ ID NO: 25454 - DNA, 23 bp, Artificial Sequence
  Synthetic
tctttgactgctatgggagaagc

SEQ ID NO: 25455 - DNA, 24 bp, Artificial Sequence
  Synthetic
cgtaaacgtaaatcagaagcagct

SEQ ID NO: 25456 - DNA, 23 bp, Artificial Sequence
  Synthetic
ataacggctcctaaaaagctacc

SEQ ID NO: 25457 - DNA, 25 bp, Artificial Sequence
  Synthetic
agcgttaatattgtcgatgtcattg

SEQ ID NO: 25458 - DNA, 21 bp, Artificial Sequence
  Synthetic
gcagtacttgctagccaacac

SEQ ID NO: 25459 - DNA, 25 bp, Artificial Sequence
  Synthetic
ctttcgaaatcgtatcatgtttccc

SEQ ID NO: 25460 - DNA, 20 bp, Artificial Sequence
  Synthetic
tgatggtgacgatgctggac

SEQ ID NO: 25461 - DNA, 25 bp, Artificial Sequence
  Synthetic
atgcattaaggattcaagataggca

SEQ ID NO: 25462 - DNA, 23 bp, Artificial Sequence
  Synthetic
tcaagcggctctagaagtactag

SEQ ID NO: 25463 - DNA, 25 bp, Artificial Sequence
  Synthetic
atttgctgttacatgtgattgatgc

SEQ ID NO: 25464 - DNA, 25 bp, Artificial Sequence
  Synthetic
tacacgtttgaccaagaaatagagg

SEQ ID NO: 25465 - DNA, 23 bp, Artificial Sequence
  Synthetic
actgaccaaccatcttttgagga

SEQ ID NO: 25466 - DNA, 24 bp, Artificial Sequence
  Synthetic
gctcttagccaaacattttctggt

SEQ ID NO: 25467 - DNA, 25 bp, Artificial Sequence
  Synthetic
ttaccaggatttttatcaagtcggt

SEQ ID NO: 25468 - DNA, 21 bp, Artificial Sequence
  Synthetic
cagaagccttaaaagcagcgg

SEQ ID NO: 25469 - DNA, 25 bp, Artificial Sequence
  Synthetic
tcttgctcaatcatgtatcagctcg

SEQ ID NO: 25470 - DNA, 24 bp, Artificial Sequence
  Synthetic
attaccaatccagtagccattgag

SEQ ID NO: 25471 - DNA, 25 bp, Artificial Sequence
  Synthetic
cccttcgcttagaattagcggataa

SEQ ID NO: 25472 - DNA, 23 bp, Artificial Sequence
  Synthetic
acttgtctcaactgcatgatcct

SEQ ID NO: 25473 - DNA, 22 bp, Artificial Sequence
  Synthetic
acgggttgctaaaatgtatgcg

SEQ ID NO: 25474 - DNA, 20 bp, Artificial Sequence
  Synthetic
catgaccatgcgaggcatca

SEQ ID NO: 25475 - DNA, 20 bp, Artificial Sequence
  Synthetic
tcatcgacgttggtggagaa

SEQ ID NO: 25476 - DNA, 22 bp, Artificial Sequence
  Synthetic
tctaggcaatagagcacaagca

SEQ ID NO: 25477 - DNA, 25 bp, Artificial Sequence
  Synthetic
ccagttgatgtgaggacttatggat

SEQ ID NO: 25478 - DNA, 23 bp, Artificial Sequence
  Synthetic
agctttttaacgaatttccgcct

SEQ ID NO: 25479 - DNA, 23 bp, Artificial Sequence
  Synthetic
ggtcgtgtgaggcatgaaaaatg

SEQ ID NO: 25480 - DNA, 22 bp, Artificial Sequence
  Synthetic
aatcactacgagctatcacgca

SEQ ID NO: 25481 - DNA, 21 bp, Artificial Sequence
  Synthetic
tatccgctaaggtgcttaccc

SEQ ID NO: 25482 - DNA, 20 bp, Artificial Sequence
  Synthetic
atcggattggtggtgtggaa

SEQ ID NO: 25483 - DNA, 20 bp, Artificial Sequence
  Synthetic
aagagccccacaaccacaga

SEQ ID NO: 25484 - DNA, 20 bp, Artificial Sequence
  Synthetic
aagactagggcaagggacca

SEQ ID NO: 25485 - DNA, 20 bp, Artificial Sequence
  Synthetic
cgcccgcagactgtctgttg

SEQ ID NO: 25486 - DNA, 25 bp, Artificial Sequence
  Synthetic
aaatggtaaccaaaaaggatcctgt

SEQ ID NO: 25487 - DNA, 25 bp, Artificial Sequence
  Synthetic
ttttccatcatgagatttgaccact

SEQ ID NO: 25488 - DNA, 21 bp, Artificial Sequence
  Synthetic
aaatggcacctggtgtttgtg

SEQ ID NO: 25489 - DNA, 25 bp, Artificial Sequence
  Synthetic
catcactatttccaatttggacagc

SEQ ID NO: 25490 - DNA, 22 bp, Artificial Sequence
  Synthetic
gattggggcaaagtaatgacgt

SEQ ID NO: 25491 - DNA, 25 bp, Artificial Sequence
  Synthetic
ctttgatcaagttggatttaggtgc

SEQ ID NO: 25492 - DNA, 24 bp, Artificial Sequence
  Synthetic
ggatacccgtgatgccaatattga

SEQ ID NO: 25493 - DNA, 22 bp, Artificial Sequence
  Synthetic
accagcatcatttctccagagt

SEQ ID NO: 25494 - DNA, 25 bp, Artificial Sequence
  Synthetic
ttccagcaattttatagaggctgtc

SEQ ID NO: 25495 - DNA, 21 bp, Artificial Sequence
  Synthetic
aaagggcttgtcctccataca

SEQ ID NO: 25496 - DNA, 21 bp, Artificial Sequence
  Synthetic
ggaaacgagcatagttgagca

SEQ ID NO: 25497 - DNA, 25 bp, Artificial Sequence
  Synthetic
tggaatgttaatcaaagtgtcacgc

SEQ ID NO: 25498 - DNA, 25 bp, Artificial Sequence
  Synthetic
acagactctgttaaaaaagcatcgt

SEQ ID NO: 25499 - DNA, 25 bp, Artificial Sequence
  Synthetic
acacttgactttcaattgttcgaaa

SEQ ID NO: 25500 - DNA, 25 bp, Artificial Sequence
  Synthetic
ttgctgtcatcataccaatacgatg

SEQ ID NO: 25501 - DNA, 24 bp, Artificial Sequence
  Synthetic
accactcgaatactagttacttgc

SEQ ID NO: 25502 - DNA, 22 bp, Artificial Sequence
  Synthetic
caacctgtgttgttccttttgc

SEQ ID NO: 25503 - DNA, 22 bp, Artificial Sequence
  Synthetic
gctttttgagcttgagtacgca

SEQ ID NO: 25504 - DNA, 23 bp, Artificial Sequence
  Synthetic
atcaaccgtaacaaagttcacca

SEQ ID NO: 25505 - DNA, 22 bp, Artificial Sequence
  Synthetic
agacattttttcgcccttacca

SEQ ID NO: 25506 - DNA, 20 bp, Artificial Sequence
  Synthetic
tgaccctggatgagtgaagc

SEQ ID NO: 25507 - DNA, 20 bp, Artificial Sequence
  Synthetic
ggtacagcacgccagatgat

SEQ ID NO: 25508 - DNA, 24 bp, Artificial Sequence
  Synthetic
atggtcaccaaggataaccaattc

SEQ ID NO: 25509 - DNA, 25 bp, Artificial Sequence
  Synthetic
tgtcatggtattcaatttcagcctc

SEQ ID NO: 25510 - DNA, 22 bp, Artificial Sequence
  Synthetic
gattccttgcttagccaagact

SEQ ID NO: 25511 - DNA, 25 bp, Artificial Sequence
  Synthetic
aactccttttaaacaaacttgcgac

SEQ ID NO: 25512 - DNA, 23 bp, Artificial Sequence
  Synthetic
ggctcagtcgtagaatcagattg

SEQ ID NO: 25513 - DNA, 25 bp, Artificial Sequence
  Synthetic
actaagaagcaattgaatagcctgc

SEQ ID NO: 25514 - DNA, 20 bp, Artificial Sequence
  Synthetic
cccttgaccaacggaccata

SEQ ID NO: 25515 - DNA, 20 bp, Artificial Sequence
  Synthetic
ctgtgttcggcatgggtaca

SEQ ID NO: 25516 - DNA, 22 bp, Artificial Sequence
  Synthetic
tctcaaatttcctacgcccgcg

SEQ ID NO: 25517 - DNA, 22 bp, Artificial Sequence
  Synthetic
cctgctcgagttgtagctctcg

SEQ ID NO: 25518 - DNA, 21 bp, Artificial Sequence
  Synthetic
aagtcagcaccccttctcccg

SEQ ID NO: 25519 - DNA, 24 bp, Artificial Sequence
  Synthetic
ttccaatcgtccggtttagttagc

SEQ ID NO: 25520 - DNA, 23 bp, Artificial Sequence
  Synthetic
actcgactagtgagctattacgc

SEQ ID NO: 25521 - DNA, 22 bp, Artificial Sequence
  Synthetic
cacctttccctcacggtactgg

SEQ ID NO: 25522 - DNA, 21 bp, Artificial Sequence
  Synthetic
gaaaggaggtgatccagccgc

SEQ ID NO: 25523 - DNA, 20 bp, Artificial Sequence
  Synthetic
catcggcttcggcattagct

SEQ ID NO: 25524 - DNA, 24 bp, Artificial Sequence
  Synthetic
tgctgttgagaagacttgtgattt

SEQ ID NO: 25525 - DNA, 21 bp, Artificial Sequence
  Synthetic
tctgaaagggcttgacgaact

SEQ ID NO: 25526 - DNA, 23 bp, Artificial Sequence
  Synthetic
gatacgtcaaatgtaccaccacc

SEQ ID NO: 25527 - DNA, 21 bp, Artificial Sequence
  Synthetic
ttgccttctgggttagcaatg

SEQ ID NO: 25528 - DNA, 20 bp, Artificial Sequence
  Synthetic
cttagcagacgctcgtgcaa

SEQ ID NO: 25529 - DNA, 21 bp, Artificial Sequence
  Synthetic
tagcgttgaagttgttgacgt

SEQ ID NO: 25530 - DNA, 25 bp, Artificial Sequence
  Synthetic
atcaataggaccaatcaaactcagg

SEQ ID NO: 25531 - DNA, 24 bp, Artificial Sequence
  Synthetic
actgtcactggcttagattcatct

SEQ ID NO: 25532 - DNA, 24 bp, Artificial Sequence
  Synthetic
attacgaatagtggcgctactaga

SEQ ID NO: 25533 - DNA, 25 bp, Artificial Sequence
  Synthetic
acttctcatcaatggcttacctatg

SEQ ID NO: 25534 - DNA, 25 bp, Artificial Sequence
  Synthetic
aaaagcactaattctccttcgtcct

SEQ ID NO: 25535 - DNA, 23 bp, Artificial Sequence
  Synthetic
tggtcaccaccattcaaaaactc

SEQ ID NO: 25536 - DNA, 25 bp, Artificial Sequence
  Synthetic
atgtctccatcaatacaccgttaaa

SEQ ID NO: 25537 - DNA, 25 bp, Artificial Sequence
  Synthetic
ctatcactgaaaatgacaatgcgtc

SEQ ID NO: 25538 - DNA, 24 bp, Artificial Sequence
  Synthetic
aaacctcagcacattattcaagct

SEQ ID NO: 25539 - DNA, 25 bp, Artificial Sequence
  Synthetic
ttgcatctgtacaggtctatagtga

SEQ ID NO: 25540 - DNA, 21 bp, Artificial Sequence
  Synthetic
gctatggctgactcactagct

SEQ ID NO: 25541 - DNA, 25 bp, Artificial Sequence
  Synthetic
cttaaaagggcactaggaaaggaaa

SEQ ID NO: 25542 - DNA, 23 bp, Artificial Sequence
  Synthetic
attggcgaacttttccaaatggt

SEQ ID NO: 25543 - DNA, 21 bp, Artificial Sequence
  Synthetic
ccttgcccataaagccaagat

SEQ ID NO: 25544 - DNA, 25 bp, Artificial Sequence
  Synthetic
atccgtcgctttatgttgtaattgt

SEQ ID NO: 25545 - DNA, 25 bp, Artificial Sequence
  Synthetic
ggacaaccgtttttttaaaaggttg

SEQ ID NO: 25546 - DNA, 20 bp, Artificial Sequence
  Synthetic
cctttgccaaacacgagcaa

SEQ ID NO: 25547 - DNA, 23 bp, Artificial Sequence
  Synthetic
gtatgagatggctgaggtcaagg

SEQ ID NO: 25548 - DNA, 22 bp, Artificial Sequence
  Synthetic
aaaagtcccgctaatgaatccc

SEQ ID NO: 25549 - DNA, 25 bp, Artificial Sequence
  Synthetic
atcaactcctgattgattacctgtt

SEQ ID NO: 25550 - DNA, 22 bp, Artificial Sequence
  Synthetic
cctgctaagtcgggattgaagt

SEQ ID NO: 25551 - DNA, 20 bp, Artificial Sequence
  Synthetic
ccacctaaagctacccccaa

SEQ ID NO: 25552 - DNA, 22 bp, Artificial Sequence
  Synthetic
attcacacgaccaatcagacct

SEQ ID NO: 25553 - DNA, 21 bp, Artificial Sequence
  Synthetic
gtggtacgcccctacctgtcg

SEQ ID NO: 25554 - DNA, 19 bp, Artificial Sequence
  Synthetic
cagggcgccctgctactga

SEQ ID NO: 25555 - DNA, 20 bp, Artificial Sequence
  Synthetic
gggtttataccacccgcgct

SEQ ID NO: 25556 - DNA, 22 bp, Artificial Sequence
  Synthetic
tacaccccttacccgaaggcca

SEQ ID NO: 25557 - DNA, 21 bp, Artificial Sequence
  Synthetic
cggtggttgtggcctcctatt

SEQ ID NO: 25558 - DNA, 22 bp, Artificial Sequence
  Synthetic
tgcttcgatcgtgaatacgcct

SEQ ID NO: 25559 - DNA, 21 bp, Artificial Sequence
  Synthetic
tctcacggacgccttccatca

SEQ ID NO: 25560 - DNA, 21 bp, Artificial Sequence
  Synthetic
ggggccgatttccccgaggta

SEQ ID NO: 25561 - DNA, 20 bp, Artificial Sequence
  Synthetic
cggccaacgcccaacacaac

SEQ ID NO: 25562 - DNA, 21 bp, Artificial Sequence
  Synthetic
tataggcaggagacggctgct

SEQ ID NO: 25563 - DNA, 22 bp, Artificial Sequence
  Synthetic
ggtttccctgttatgaccccgc

SEQ ID NO: 25564 - DNA, 20 bp, Artificial Sequence
  Synthetic
cgatgcccccgagatgtgtg

SEQ ID NO: 25565 - DNA, 19 bp, Artificial Sequence
  Synthetic
tcgaggtgcgagctgtggt

SEQ ID NO: 25566 - DNA, 22 bp, Artificial Sequence
  Synthetic
agcttgccgaattggttgaggc

SEQ ID NO: 25567 - DNA, 20 bp, Artificial Sequence
  Synthetic
ggtgttgcaggctccccaag

SEQ ID NO: 25568 - DNA, 21 bp, Artificial Sequence
  Synthetic
gcttgctagtcgcctgtggtc

SEQ ID NO: 25569 - DNA, 21 bp, Artificial Sequence
  Synthetic
tgcggtcgcaggtttgaaagc

SEQ ID NO: 25570 - DNA, 22 bp, Artificial Sequence
  Synthetic
ctctccaccatgcccccacttg

SEQ ID NO: 25571 - DNA, 22 bp, Artificial Sequence
  Synthetic
ttccatcacttccaccgacgtg

SEQ ID NO: 25572 - DNA, 22 bp, Artificial Sequence
  Synthetic
tgacccctggtaacacgaacac

SEQ ID NO: 25573 - DNA, 22 bp, Artificial Sequence
  Synthetic
gcccagtcgcagagtgctatgg

SEQ ID NO: 25574 - DNA, 20 bp, Artificial Sequence
  Synthetic
tctgtgggtctggtgggatg

SEQ ID NO: 25575 - DNA, 22 bp, Artificial Sequence
  Synthetic
tttctgtgtctaagcactggtg

SEQ ID NO: 25576 - DNA, 25 bp, Artificial Sequence
  Synthetic
tgattatgtcattgcattgactggt

SEQ ID NO: 25577 - DNA, 22 bp, Artificial Sequence
  Synthetic
ttctgagagttggagtgttggt

SEQ ID NO: 25578 - DNA, 24 bp, Artificial Sequence
  Synthetic
actggtgttattgacattagtgct

SEQ ID NO: 25579 - DNA, 25 bp, Artificial Sequence
  Synthetic
acaagcttttttctatagtggtggt

SEQ ID NO: 25580 - DNA, 25 bp, Artificial Sequence
  Synthetic
ttctgcattgataattgtggtgagc

SEQ ID NO: 25581 - DNA, 24 bp, Artificial Sequence
  Synthetic
tgaaactgtctgtagtgtcgcata

SEQ ID NO: 25582 - DNA, 24 bp, Artificial Sequence
  Synthetic
tgatgaagagggtggttatgatgt

SEQ ID NO: 25583 - DNA, 25 bp, Artificial Sequence
  Synthetic
agcttgttagtatgaaaggtactgg

SEQ ID NO: 25584 - DNA, 24 bp, Artificial Sequence
  Synthetic
tttgactttgttgtcaatgctgct

SEQ ID NO: 25585 - DNA, 24 bp, Artificial Sequence
  Synthetic
aacttgtgttattgccaatgttcc

SEQ ID NO: 25586 - DNA, 24 bp, Artificial Sequence
  Synthetic
gaagttgactgggttgctttttac

SEQ ID NO: 25587 - DNA, 23 bp, Artificial Sequence
  Synthetic
gtgatgttggtttttgtccacac

SEQ ID NO: 25588 - DNA, 25 bp, Artificial Sequence
  Synthetic
tgtcctatagttgttggtgtttcag

SEQ ID NO: 25589 - DNA, 23 bp, Artificial Sequence
  Synthetic
tgatgacggttacatttgtggtg

SEQ ID NO: 25590 - DNA, 25 bp, Artificial Sequence
  Synthetic
agctacaattccaccttacaatctg

SEQ ID NO: 25591 - DNA, 24 bp, Artificial Sequence
  Synthetic
cataatggtgtcttcttgggagtt

SEQ ID NO: 25592 - DNA, 20 bp, Artificial Sequence
  Synthetic
tgcaagttgagagtgccaac

SEQ ID NO: 25593 - DNA, 20 bp, Artificial Sequence
  Synthetic
tgcaccacatggaccttttg

SEQ ID NO: 25594 - DNA, 25 bp, Artificial Sequence
  Synthetic
cgcaaagtctgaatttgatcatgag

SEQ ID NO: 25595 - DNA, 25 bp, Artificial Sequence
  Synthetic
tgaaactttgacatggcctcttatc

SEQ ID NO: 25596 - DNA, 25 bp, Artificial Sequence
  Synthetic
ttaactgcttgtgctttttctgttg

SEQ ID NO: 25597 - DNA, 20 bp, Artificial Sequence
  Synthetic
gggtgtgcttgtgaccgtac

SEQ ID NO: 25598 - DNA, 23 bp, Artificial Sequence
  Synthetic
tacttggaaagatggcagagtca

SEQ ID NO: 25599 - DNA, 20 bp, Artificial Sequence
  Synthetic
tgctctatgcgatgcgatgg

SEQ ID NO: 25600 - DNA, 24 bp, Artificial Sequence
  Synthetic
actgaacttttgcaatttgtcacc

SEQ ID NO: 25601 - DNA, 22 bp, Artificial Sequence
  Synthetic
agaactgttggtggtgtttctc

SEQ ID NO: 25602 - DNA, 25 bp, Artificial Sequence
  Synthetic
tggcacaagttttaacagaagttgt

SEQ ID NO: 25603 - DNA, 23 bp, Artificial Sequence
  Synthetic
atttgccttacccagatcctagt

SEQ ID NO: 25604 - DNA, 24 bp, Artificial Sequence
  Synthetic
ttgtggttcacaaactgtacttcg

SEQ ID NO: 25605 - DNA, 25 bp, Artificial Sequence
  Synthetic
gtcagtgatgcatatgctaatttgg

SEQ ID NO: 25606 - DNA, 25 bp, Artificial Sequence
  Synthetic
tgttcctttacaggttggtttttca

SEQ ID NO: 25607 - DNA, 20 bp, Artificial Sequence
  Synthetic
ttgagccaaaaccaccacac

SEQ ID NO: 25608 - DNA, 23 bp, Artificial Sequence
  Synthetic
tggtcaacttgatggtctttgtt

SEQ ID NO: 25609 - DNA, 25 bp, Artificial Sequence
  Synthetic
aattgtttgcaaaacgaaaaatggg

SEQ ID NO: 25610 - DNA, 25 bp, Artificial Sequence
  Synthetic
taaccacttgtccactttttatcca

SEQ ID NO: 25611 - DNA, 25 bp, Artificial Sequence
  Synthetic
cacctggtacaactgttttaaaacg

SEQ ID NO: 25612 - DNA, 23 bp, Artificial Sequence
  Synthetic
gttacgggtttattgccaactca

SEQ ID NO: 25613 - DNA, 25 bp, Artificial Sequence
  Synthetic
ttcctgtgtttttagtgttgtcaac

SEQ ID NO: 25614 - DNA, 24 bp, Artificial Sequence
  Synthetic
atcaaccactccgtttaacttgtt

SEQ ID NO: 25615 - DNA, 25 bp, Artificial Sequence
  Synthetic
gcacttttgtgggtattttaccacc

SEQ ID NO: 25616 - DNA, 25 bp, Artificial Sequence
  Synthetic
atgttgcactccccatttattatca

SEQ ID NO: 25617 - DNA, 23 bp, Artificial Sequence
  Synthetic
atcaacaaagcattattggtgcc

SEQ ID NO: 25618 - DNA, 25 bp, Artificial Sequence
  Synthetic
aagttgttacatctggtttgggtac

SEQ ID NO: 25619 - DNA, 23 bp, Artificial Sequence
  Synthetic
atgaccggcttgattcaattcaa

SEQ ID NO: 25620 - DNA, 24 bp, Artificial Sequence
  Synthetic
aatggtgtctttcgtgtaacttcc

SEQ ID NO: 25621 - DNA, 23 bp, Artificial Sequence
  Synthetic
ctacaggttgttgtggttgttgc

SEQ ID NO: 25622 - DNA, 25 bp, Artificial Sequence
  Synthetic
atgtccatttacgtaactggaactt

SEQ ID NO: 25623 - DNA, 25 bp, Artificial Sequence
  Synthetic
cacttcttagtggtgtacttcttgt

SEQ ID NO: 25624 - DNA, 24 bp, Artificial Sequence
  Synthetic
tcctccttcattttacatgcctct

SEQ ID NO: 25625 - DNA, 25 bp, Artificial Sequence
  Synthetic
tttggaaccaaagttctctattgct

SEQ ID NO: 25626 - DNA, 23 bp, Artificial Sequence
  Synthetic
agttcttctggtacttccactcc

SEQ ID NO: 25627 - DNA, 25 bp, Artificial Sequence
  Synthetic
agtgggtgataatgttcagattacc

SEQ ID NO: 25628 - DNA, 25 bp, Artificial Sequence
  Synthetic
ttggacagacctttattgcaaattg

SEQ ID NO: 25629 - DNA, 23 bp, Artificial Sequence
  Synthetic
atctgatttattagacgaggcgc

SEQ ID NO: 25630 - DNA, 21 bp, Artificial Sequence
  Synthetic
tgtggagattgggttttggca

SEQ ID NO: 25631 - DNA, 22 bp, Artificial Sequence
  Synthetic
acaactttggagtggattgcac

SEQ ID NO: 25632 - DNA, 25 bp, Artificial Sequence
  Synthetic
aatggggtaatgagaattggattgc

SEQ ID NO: 25633 - DNA, 24 bp, Artificial Sequence
  Synthetic
taaccctgataatcagacaaggca

SEQ ID NO: 25634 - DNA, 22 bp, Artificial Sequence
  Synthetic
tcgacgtccatcgactacaccg

SEQ ID NO: 25635 - DNA, 20 bp, Artificial Sequence
  Synthetic
agagagttgctttgcccaga

SEQ ID NO: 25636 - DNA, 24 bp, Artificial Sequence
  Synthetic
aatattgcaatatggcagtctggg

SEQ ID NO: 25637 - DNA, 24 bp, Artificial Sequence
  Synthetic
tgcaggttattgcagaaattcacc

SEQ ID NO: 25638 - DNA, 25 bp, Artificial Sequence
  Synthetic
ttaaacttaggccttgaaacagaca

SEQ ID NO: 25639 - DNA, 22 bp, Artificial Sequence
  Synthetic
ctgagcaagcccacattttcgc

SEQ ID NO: 25640 - DNA, 25 bp, Artificial Sequence
  Synthetic
taggtgacacagcatttatacaagg

SEQ ID NO: 25641 - DNA, 21 bp, Artificial Sequence
  Synthetic
atctgaacgtctactgctggt

SEQ ID NO: 25642 - DNA, 24 bp, Artificial Sequence
  Synthetic
tactgcttttgatgcaaaacagac

SEQ ID NO: 25643 - DNA, 25 bp, Artificial Sequence
  Synthetic
atcagaatgaaccatgaagcctatg

SEQ ID NO: 25644 - DNA, 23 bp, Artificial Sequence
  Synthetic
ccagaataatggcatttgctgga

SEQ ID NO: 25645 - DNA, 25 bp, Artificial Sequence
  Synthetic
aatccctacccctaaaatctgtttg

SEQ ID NO: 25646 - DNA, 20 bp, Artificial Sequence
  Synthetic
cgcggttaggacttgtttca

SEQ ID NO: 25647 - DNA, 21 bp, Artificial Sequence
  Synthetic
tttgtgtgaaacctgtgctgc

SEQ ID NO: 25648 - DNA, 24 bp, Artificial Sequence
  Synthetic
ggaattgttccaccaacaggaaag

SEQ ID NO: 25649 - DNA, 23 bp, Artificial Sequence
  Synthetic
ctgatgttacggagagtcaaacc

SEQ ID NO: 25650 - DNA, 24 bp, Artificial Sequence
  Synthetic
acaaacacaagtagggcaaacaga

SEQ ID NO: 25651 - DNA, 20 bp, Artificial Sequence
  Synthetic
acgatgcaacgtcacaatgt

SEQ ID NO: 25652 - DNA, 24 bp, Artificial Sequence
  Synthetic
tttcactatgctcgacaaaatggt

SEQ ID NO: 25653 - DNA, 22 bp, Artificial Sequence
  Synthetic
atctggtggaaggcttggatat

SEQ ID NO: 25654 - DNA, 20 bp, Artificial Sequence
  Synthetic
gggtgacccaaaatgaaggc

SEQ ID NO: 25655 - DNA, 23 bp, Artificial Sequence
  Synthetic
tgtagcagagaccgattttacca

SEQ ID NO: 25656 - DNA, 21 bp, Artificial Sequence
  Synthetic
acaacagacaaaatgtgggct

SEQ ID NO: 25657 - DNA, 24 bp, Artificial Sequence
  Synthetic
atccagactacattaaaatggcgc

SEQ ID NO: 25658 - DNA, 22 bp, Artificial Sequence
  Synthetic
gtggttctctcgtatccacaga

SEQ ID NO: 25659 - DNA, 24 bp, Artificial Sequence
  Synthetic
aacatctcagacaagttgtagcat

SEQ ID NO: 25660 - DNA, 24 bp, Artificial Sequence
  Synthetic
actttgaagcaggaattctggagt

SEQ ID NO: 25661 - DNA, 25 bp, Artificial Sequence
  Synthetic
actgtgtgaaaaatccctcaactag

SEQ ID NO: 25662 - DNA, 25 bp, Artificial Sequence
  Synthetic
aatggagacaagtccttatcaactc

SEQ ID NO: 25663 - DNA, 24 bp, Artificial Sequence
  Synthetic
tatcccaatttggtcaagagcacc

SEQ ID NO: 25664 - DNA, 24 bp, Artificial Sequence
  Synthetic
tttcccttttccctttcctattcc

SEQ ID NO: 25665 - DNA, 25 bp, Artificial Sequence
  Synthetic
tctctttgatcttccacaaggggta

SEQ ID NO: 25666 - DNA, 25 bp, Artificial Sequence
  Synthetic
agtgactggtgcttcttattttact

SEQ ID NO: 25667 - DNA, 25 bp, Artificial Sequence
  Synthetic
tcaagttcagataaaccctacacct

SEQ ID NO: 25668 - DNA, 24 bp, Artificial Sequence
  Synthetic
aatattgggacaggaacttcagct

SEQ ID NO: 25669 - DNA, 25 bp, Artificial Sequence
  Synthetic
cttggacatctattccaactttggc

SEQ ID NO: 25670 - DNA, 25 bp, Artificial Sequence
  Synthetic
tttctggaatcacattaaagcaagc

SEQ ID NO: 25671 - DNA, 21 bp, Artificial Sequence
  Synthetic
ttgcttcccatgtcagagtga

SEQ ID NO: 25672 - DNA, 25 bp, Artificial Sequence
  Synthetic
ttgaggatccagttttagcaaagaa

SEQ ID NO: 25673 - DNA, 24 bp, Artificial Sequence
  Synthetic
tagagggcctttagatctgacaat

SEQ ID NO: 25674 - DNA, 24 bp, Artificial Sequence
  Synthetic
agaagttgggaaacaaagactcaa

SEQ ID NO: 25675 - DNA, 20 bp, Artificial Sequence
  Synthetic
caggcagaagtgtgtggact

SEQ ID NO: 25676 - DNA, 25 bp, Artificial Sequence
  Synthetic
tggtcagatttttgtcagttagtgt

SEQ ID NO: 25677 - DNA, 20 bp, Artificial Sequence
  Synthetic
gcagttggcattcttggagt

SEQ ID NO: 25678 - DNA, 25 bp, Artificial Sequence
  Synthetic
gagagaagaatggatgtgtgagatg

SEQ ID NO: 25679 - DNA, 22 bp, Artificial Sequence
  Synthetic
tccatgttgctggaggaaattc

SEQ ID NO: 25680 - DNA, 25 bp, Artificial Sequence
  Synthetic
agaaccagaggattataaagaggct

SEQ ID NO: 25681 - DNA, 22 bp, Artificial Sequence
  Synthetic
ggagttcatccaagattggctc

SEQ ID NO: 25682 - DNA, 25 bp, Artificial Sequence
  Synthetic
tgctattggcatagatcctgataga

SEQ ID NO: 25683 - DNA, 20 bp, Artificial Sequence
  Synthetic
ggcaccatgcagtaccaaac

SEQ ID NO: 25684 - DNA, 24 bp, Artificial Sequence
  Synthetic
cctacagcaactgttacccttatg

SEQ ID NO: 25685 - DNA, 20 bp, Artificial Sequence
  Synthetic
cgggtacggacaatgaccaa

SEQ ID NO: 25686 - DNA, 23 bp, Artificial Sequence
  Synthetic
atgagatcagatgcacccattgg

SEQ ID NO: 25687 - DNA, 21 bp, Artificial Sequence
  Synthetic
ttgggagggaatggtagacgg

SEQ ID NO: 25688 - DNA, 20 bp, Artificial Sequence
  Synthetic
ttcttgtggccctggagaac

SEQ ID NO: 25689 - DNA, 25 bp, Artificial Sequence
  Synthetic
atggatttcctttgccatatcatgt

SEQ ID NO: 25690 - DNA, 23 bp, Artificial Sequence
  Synthetic
aaagacagtgcagcaacttagaa

SEQ ID NO: 25691 - DNA, 21 bp, Artificial Sequence
  Synthetic
aatctcgcagtggcagtttac

SEQ ID NO: 25692 - DNA, 23 bp, Artificial Sequence
  Synthetic
cattgtgacgaagagttgacaga

SEQ ID NO: 25693 - DNA, 25 bp, Artificial Sequence
  Synthetic
aattggttttctcttgaagcagact

SEQ ID NO: 25694 - DNA, 22 bp, Artificial Sequence
  Synthetic
cctcgtttggaagcaatacctt

SEQ ID NO: 25695 - DNA, 22 bp, Artificial Sequence
  Synthetic
actgggtcgtaactgcatatgg

SEQ ID NO: 25696 - DNA, 25 bp, Artificial Sequence
  Synthetic
caaggtaatacacgcataggtagag

SEQ ID NO: 25697 - DNA, 25 bp, Artificial Sequence
  Synthetic
ccaaattttaaagtatggcagcacc

SEQ ID NO: 25698 - DNA, 21 bp, Artificial Sequence
  Synthetic
tgtccctcttacagacacagg

SEQ ID NO: 25699 - DNA, 24 bp, Artificial Sequence
  Synthetic
taagcactattgacacagaaccct

SEQ ID NO: 25700 - DNA, 21 bp, Artificial Sequence
  Synthetic
tgtcaacaacgggtaaggtct

SEQ ID NO: 25701 - DNA, 25 bp, Artificial Sequence
  Synthetic
gatcctaacagatttgctctagctg

SEQ ID NO: 25702 - DNA, 25 bp, Artificial Sequence
  Synthetic
ccttaccttgtgtagaaaatcctcc

SEQ ID NO: 25703 - DNA, 24 bp, Artificial Sequence
  Synthetic
tgggtcagtaggagacagtattcc

SEQ ID NO: 25704 - DNA, 22 bp, Artificial Sequence
  Synthetic
ttaagcaacatgagtgcgactc

SEQ ID NO: 25705 - DNA, 20 bp, Artificial Sequence
  Synthetic
gtggggacatttgggtgacg

SEQ ID NO: 25706 - DNA, 24 bp, Artificial Sequence
  Synthetic
ctggggatgataaaaatgcaactg

SEQ ID NO: 25707 - DNA, 23 bp, Artificial Sequence
  Synthetic
tcctgacgtcagatgtatctgca

SEQ ID NO: 25708 - DNA, 23 bp, Artificial Sequence
  Synthetic
agaacgatcagcaaggatttacg

SEQ ID NO: 25709 - DNA, 20 bp, Artificial Sequence
  Synthetic
ttccacgcgacagatccgtc

SEQ ID NO: 25710 - DNA, 20 bp, Artificial Sequence
  Synthetic
acagagctggtcctgacgga

SEQ ID NO: 25711 - DNA, 22 bp, Artificial Sequence
  Synthetic
gctgatcctaacggaaggaggc

SEQ ID NO: 25712 - DNA, 19 bp, Artificial Sequence
  Synthetic
cctcccacgcgcgcctata

SEQ ID NO: 25713 - DNA, 20 bp, Artificial Sequence
  Synthetic
acaagacgagggctgcaacg

SEQ ID NO: 25714 - DNA, 20 bp, Artificial Sequence
  Synthetic
cggaggagagagaacggccg

SEQ ID NO: 25715 - DNA, 19 bp, Artificial Sequence
  Synthetic
ggccaaggcaacggcacga

SEQ ID NO: 25716 - DNA, 21 bp, Artificial Sequence
  Synthetic
cgatacagcgcgtcgtcgaac

SEQ ID NO: 25717 - DNA, 20 bp, Artificial Sequence
  Synthetic
gttctcggacgggtccctta

SEQ ID NO: 25718 - DNA, 23 bp, Artificial Sequence
  Synthetic
gcacgttgtctatccaatcgtaa

SEQ ID NO: 25719 - DNA, 21 bp, Artificial Sequence
  Synthetic
cgctttcctccgcatgtacaa

SEQ ID NO: 25720 - DNA, 24 bp, Artificial Sequence
  Synthetic
ttttacacagtgtcgaaatcacca

SEQ ID NO: 25721 - DNA, 22 bp, Artificial Sequence
  Synthetic
aacctgacctcgataaagcact

SEQ ID NO: 25722 - DNA, 23 bp, Artificial Sequence
  Synthetic
aatgacaaaacgtgctctctctg

SEQ ID NO: 25723 - DNA, 23 bp, Artificial Sequence
  Synthetic
gttgcctgagttttcggtattcg

SEQ ID NO: 25724 - DNA, 25 bp, Artificial Sequence
  Synthetic
ggttttgaagaagaagatgggatgt

SEQ ID NO: 25725 - DNA, 25 bp, Artificial Sequence
  Synthetic
aacgattggattttcaaagtttcca

SEQ ID NO: 25726 - DNA, 23 bp, Artificial Sequence
  Synthetic
cgaaaatagttccgcctgtttct

SEQ ID NO: 25727 - DNA, 25 bp, Artificial Sequence
  Synthetic
ggtcaagcgaagataacattctttc

SEQ ID NO: 25728 - DNA, 23 bp, Artificial Sequence
  Synthetic
cattcgactcacatcattgaagc

SEQ ID NO: 25729 - DNA, 24 bp, Artificial Sequence
  Synthetic
aggttagattcggaaaccatagct

SEQ ID NO: 25730 - DNA, 20 bp, Artificial Sequence
  Synthetic
ggctccgcccatgatttcat

SEQ ID NO: 25731 - DNA, 20 bp, Artificial Sequence
  Synthetic
gagtcgcttctagactcgcc

SEQ ID NO: 25732 - DNA, 20 bp, Artificial Sequence
  Synthetic
tatgggcgcaaagtgctgta

SEQ ID NO: 25733 - DNA, 21 bp, Artificial Sequence
  Synthetic
ttggaagcatacgtttgtggc

SEQ ID NO: 25734 - DNA, 21 bp, Artificial Sequence
  Synthetic
tttgcttttactgcagagcgt

SEQ ID NO: 25735 - DNA, 20 bp, Artificial Sequence
  Synthetic
tcggagagcgttgtggattg

SEQ ID NO: 25736 - DNA, 19 bp, Artificial Sequence
  Synthetic
acgacgtgctgcaaggccg

SEQ ID NO: 25737 - DNA, 21 bp, Artificial Sequence
  Synthetic
cagaccgctgctggacgaact

SEQ ID NO: 25738 - DNA, 22 bp, Artificial Sequence
  Synthetic
acatctgttcgacgtgatcgcc

SEQ ID NO: 25739 - DNA, 22 bp, Artificial Sequence
  Synthetic
ttgggtggtcttgactttggcg

SEQ ID NO: 25740 - DNA, 22 bp, Artificial Sequence
  Synthetic
ccctcttccctttaaccccacg

SEQ ID NO: 25741 - DNA, 24 bp, Artificial Sequence
  Synthetic
acaaagggattggctgatgattac

SEQ ID NO: 25742 - DNA, 25 bp, Artificial Sequence
  Synthetic
aactgaggaatatatctgttccagc

SEQ ID NO: 25743 - DNA, 24 bp, Artificial Sequence
  Synthetic
taatgcctttctcctcatgtctga

SEQ ID NO: 25744 - DNA, 25 bp, Artificial Sequence
  Synthetic
agaagtagcaatagatgacgaaacg

SEQ ID NO: 25745 - DNA, 24 bp, Artificial Sequence
  Synthetic
tttgtgagtggaagagaaaaacct

SEQ ID NO: 25746 - DNA, 24 bp, Artificial Sequence
  Synthetic
ggaaggcaaactagtaaaagggtc

SEQ ID NO: 25747 - DNA, 23 bp, Artificial Sequence
  Synthetic
agaagacaagcataacgggaaac

SEQ ID NO: 25748 - DNA, 25 bp, Artificial Sequence
  Synthetic
tcatcgattatgaggagctaagaga

SEQ ID NO: 25749 - DNA, 23 bp, Artificial Sequence
  Synthetic
tgcagatgcatatgtttttgtgg

SEQ ID NO: 25750 - DNA, 25 bp, Artificial Sequence
  Synthetic
attgcaatacaacttgtcaaacacc

SEQ ID NO: 25751 - DNA, 22 bp, Artificial Sequence
  Synthetic
caccatcaaaatgagcaggggt

SEQ ID NO: 25752 - DNA, 20 bp, Artificial Sequence
  Synthetic
cctacaagcgccaggagggt

SEQ ID NO: 25753 - DNA, 19 bp, Artificial Sequence
  Synthetic
ctcggagtcccagcgcgtt

SEQ ID NO: 25754 - DNA, 19 bp, Artificial Sequence
  Synthetic
cacctccctgtggcgcatc

SEQ ID NO: 25755 - DNA, 20 bp, Artificial Sequence
  Synthetic
tatccgtcctccctgggcac

SEQ ID NO: 25756 - DNA, 19 bp, Artificial Sequence
  Synthetic
ccgtccaccgtccctctca

SEQ ID NO: 25757 - DNA, 22 bp, Artificial Sequence
  Synthetic
gaagacctagagctgccggacc

SEQ ID NO: 25758 - DNA, 22 bp, Artificial Sequence
  Synthetic
gtgattctgggaaacgtgccca

SEQ ID NO: 25759 - DNA, 19 bp, Artificial Sequence
  Synthetic
gccctcctgggtacggcaa

SEQ ID NO: 25760 - DNA, 20 bp, Artificial Sequence
  Synthetic
gccgtgcttccagagaccga

SEQ ID NO: 25761 - DNA, 20 bp, Artificial Sequence
  Synthetic
caactcggcctgcgtgatcc

SEQ ID NO: 25762 - DNA, 20 bp, Artificial Sequence
  Synthetic
aagccatgacggtacacagg

SEQ ID NO: 25763 - DNA, 24 bp, Artificial Sequence
  Synthetic
ttaaccgtttcttctgccagttag

SEQ ID NO: 25764 - DNA, 23 bp, Artificial Sequence
  Synthetic
tctccgaacatgatcagaactcg

SEQ ID NO: 25765 - DNA, 24 bp, Artificial Sequence
  Synthetic
acgaaaacttttaacttcgacgga

SEQ ID NO: 25766 - DNA, 20 bp, Artificial Sequence
  Synthetic
actgcaaatcgttccgtcgt

SEQ ID NO: 25767 - DNA, 23 bp, Artificial Sequence
  Synthetic
agcaaagcaataacgaaccttgt

SEQ ID NO: 25768 - DNA, 21 bp, Artificial Sequence
  Synthetic
tatcgtcgagctgtacagacg

SEQ ID NO: 25769 - DNA, 25 bp, Artificial Sequence
  Synthetic
taccttcaaaaatacgtaaacccct

SEQ ID NO: 25770 - DNA, 20 bp, Artificial Sequence
  Synthetic
acaaacttgcaagcctgagc

SEQ ID NO: 25771 - DNA, 20 bp, Artificial Sequence
  Synthetic
ggtaggtcgcgacttgttga

SEQ ID NO: 25772 - DNA, 25 bp, Artificial Sequence
  Synthetic
caaccctgatgtaataaattccgtg

SEQ ID NO: 25773 - DNA, 23 bp, Artificial Sequence
  Synthetic
tcgggagaaaatagatcaagggc

SEQ ID NO: 25774 - DNA, 24 bp, Artificial Sequence
  Synthetic
taattcgcttaagattggcagtgg

SEQ ID NO: 25775 - DNA, 21 bp, Artificial Sequence
  Synthetic
cgtctgttgttaggaccggtt

SEQ ID NO: 25776 - DNA, 24 bp, Artificial Sequence
  Synthetic
tcttcgcatacgtaagaaactacg

SEQ ID NO: 25777 - DNA, 23 bp, Artificial Sequence
  Synthetic
gcaaagcataaattcttctggcg

SEQ ID NO: 25778 - DNA, 21 bp, Artificial Sequence
  Synthetic
tcatggttccgtcttccaagt

SEQ ID NO: 25779 - DNA, 20 bp, Artificial Sequence
  Synthetic
ccagatccgggttatagcga

SEQ ID NO: 25780 - DNA, 20 bp, Artificial Sequence
  Synthetic
ctctctcctgtgtcgatcgc

SEQ ID NO: 25781 - DNA, 20 bp, Artificial Sequence
  Synthetic
atgtgtgacgtccgcatcat

SEQ ID NO: 25782 - DNA, 20 bp, Artificial Sequence
  Synthetic
tgctcctacaagcgccagga

SEQ ID NO: 25783 - DNA, 19 bp, Artificial Sequence
  Synthetic
ggtggccgtgtacgcacct

SEQ ID NO: 25784 - DNA, 22 bp, Artificial Sequence
  Synthetic
atcgaccgactcctgctatccg

SEQ ID NO: 25785 - DNA, 19 bp, Artificial Sequence
  Synthetic
gcggttctgccagggcgtt

SEQ ID NO: 25786 - DNA, 19 bp, Artificial Sequence
  Synthetic
gggaccccgtggcgtatga

SEQ ID NO: 25787 - DNA, 20 bp, Artificial Sequence
  Synthetic
acattccatggggccaaaga

SEQ ID NO: 25788 - DNA, 24 bp, Artificial Sequence
  Synthetic
ttaaatacggactgaaaggagggc

SEQ ID NO: 25789 - DNA, 22 bp, Artificial Sequence
  Synthetic
ctccgccgagatcaaaagtcct

SEQ ID NO: 25790 - DNA, 25 bp, Artificial Sequence
  Synthetic
aggcgatcatggaaaagaacatagt

SEQ ID NO: 25791 - DNA, 22 bp, Artificial Sequence
  Synthetic
gggagaccttcactacctccag

SEQ ID NO: 25792 - DNA, 20 bp, Artificial Sequence
  Synthetic
ggccactatgtctgcacgtt

SEQ ID NO: 25793 - DNA, 24 bp, Artificial Sequence
  Synthetic
agaagtgagaataagatgctgcaa

SEQ ID NO: 25794 - DNA, 20 bp, Artificial Sequence
  Synthetic
cacgcaacaggacttgcaag

SEQ ID NO: 25795 - DNA, 20 bp, Artificial Sequence
  Synthetic
atgtggggtctgggtgttca

SEQ ID NO: 25796 - DNA, 24 bp, Artificial Sequence
  Synthetic
caggtggtagagctgtttaaatgc

SEQ ID NO: 25797 - DNA, 25 bp, Artificial Sequence
  Synthetic
gcttgccaaaatgttaaatgtacca

SEQ ID NO: 25798 - DNA, 25 bp, Artificial Sequence
  Synthetic
tgcacaaatagcagatatagatgca

SEQ ID NO: 25799 - DNA, 22 bp, Artificial Sequence
  Synthetic
gcaaacagctacagcaccatat

SEQ ID NO: 25800 - DNA, 25 bp, Artificial Sequence
  Synthetic
tacaggacacaagtcaagaactatg

SEQ ID NO: 25801 - DNA, 21 bp, Artificial Sequence
  Synthetic
gcacgctcgcctgatattgaa

SEQ ID NO: 25802 - DNA, 25 bp, Artificial Sequence
  Synthetic
aaccccatatttactgatccttcgg

SEQ ID NO: 25803 - DNA, 25 bp, Artificial Sequence
  Synthetic
tcaccttctatacctgccatatctg

SEQ ID NO: 25804 - DNA, 20 bp, Artificial Sequence
  Synthetic
tacgcttgcccgaccctaat

SEQ ID NO: 25805 - DNA, 21 bp, Artificial Sequence
  Synthetic
acaccgtgcaatgcttctaaa

SEQ ID NO: 25806 - DNA, 21 bp, Artificial Sequence
  Synthetic
tgtgtgtgatactcccttgca

SEQ ID NO: 25807 - DNA, 25 bp, Artificial Sequence
  Synthetic
atacgcttccaaacttgcttttagg

SEQ ID NO: 25808 - DNA, 22 bp, Artificial Sequence
  Synthetic
cattgcaccagctatgtgaagt

SEQ ID NO: 25809 - DNA, 25 bp, Artificial Sequence
  Synthetic
taaggtgctacagatgtcaacatcc

SEQ ID NO: 25810 - DNA, 24 bp, Artificial Sequence
  Synthetic
ctcagaggatgaggatgaggatga

SEQ ID NO: 25811 - DNA, 22 bp, Artificial Sequence
  Synthetic
gtaatcagcaaacagtgtgccg

SEQ ID NO: 25812 - DNA, 22 bp, Artificial Sequence
  Synthetic
tgccactgcaacaaatacaaga

SEQ ID NO: 25813 - DNA, 25 bp, Artificial Sequence
  Synthetic
gcatttgacaatgaagtaaccgatg

SEQ ID NO: 25814 - DNA, 22 bp, Artificial Sequence
  Synthetic
cctaaggtatcaaggggtcgag

SEQ ID NO: 25815 - DNA, 24 bp, Artificial Sequence
  Synthetic
atttggataacgacgaagacaagg

SEQ ID NO: 25816 - DNA, 22 bp, Artificial Sequence
  Synthetic
acaaactttaaagacgaggcca

SEQ ID NO: 25817 - DNA, 22 bp, Artificial Sequence
  Synthetic
actgactccaccacacagtcca

SEQ ID NO: 25818 - DNA, 24 bp, Artificial Sequence
  Synthetic
agatgaaacccaacgccaaaaatt

SEQ ID NO: 25819 - DNA, 20 bp, Artificial Sequence
  Synthetic
tttgctgctttgtgtgcctg

SEQ ID NO: 25820 - DNA, 24 bp, Artificial Sequence
  Synthetic
ccaacatctggggttcatagttat

SEQ ID NO: 25821 - DNA, 24 bp, Artificial Sequence
  Synthetic
agacattgtggctttacacagacc

SEQ ID NO: 25822 - DNA, 23 bp, Artificial Sequence
  Synthetic
acgtaggcgtcgtaaacgtattc

SEQ ID NO: 25823 - DNA, 23 bp, Artificial Sequence
  Synthetic
acagatatgtgaaaagtgcagct

SEQ ID NO: 25824 - DNA, 23 bp, Artificial Sequence
  Synthetic
ctgcataccttagtgcttttggg

SEQ ID NO: 25825 - DNA, 20 bp, Artificial Sequence
  Synthetic
ggcaactctccaggttgtct

SEQ ID NO: 25826 - DNA, 20 bp, Artificial Sequence
  Synthetic
ctgcctgcgcacctctcatg

SEQ ID NO: 25827 - DNA, 25 bp, Artificial Sequence
  Synthetic
tgtggctattcagacaggattatgc

SEQ ID NO: 25828 - DNA, 22 bp, Artificial Sequence
  Synthetic
aactccaggatctgggcaattc

SEQ ID NO: 25829 - DNA, 24 bp, Artificial Sequence
  Synthetic
acaactttaattggggagattgca

SEQ ID NO: 25830 - DNA, 22 bp, Artificial Sequence
  Synthetic
tctcttgttgtaccatgggtga

SEQ ID NO: 25831 - DNA, 25 bp, Artificial Sequence
  Synthetic
tggaaaatcacactacaggaaatgg

SEQ ID NO: 25832 - DNA, 25 bp, Artificial Sequence
  Synthetic
ggacagccatttcctagattttctt

SEQ ID NO: 25833 - DNA, 25 bp, Artificial Sequence
  Synthetic
aggaacaaggcataactgattacat

SEQ ID NO: 25834 - DNA, 25 bp, Artificial Sequence
  Synthetic
aaaagttttgcaaatggacccaatt

SEQ ID NO: 25835 - DNA, 21 bp, Artificial Sequence
  Synthetic
ggtggtggatgtcatgtctgc

SEQ ID NO: 25836 - DNA, 25 bp, Artificial Sequence
  Synthetic
aacgatttatgagtcaaaaggttgg

SEQ ID NO: 25837 - DNA, 25 bp, Artificial Sequence
  Synthetic
tatgcgaaaaacttgattgttgtgt

SEQ ID NO: 25838 - DNA, 25 bp, Artificial Sequence
  Synthetic
agatgatgaagttgatgcagaagag

SEQ ID NO: 25839 - DNA, 25 bp, Artificial Sequence
  Synthetic
acaggtaacaactagtggattttca

SEQ ID NO: 25840 - DNA, 24 bp, Artificial Sequence
  Synthetic
aaatgcgtaatatgtcaatggcag

SEQ ID NO: 25841 - DNA, 25 bp, Artificial Sequence
  Synthetic
agatgtaaaagcagaacaatcgttg

SEQ ID NO: 25842 - DNA, 24 bp, Artificial Sequence
  Synthetic
atttggaggcttaaagacacaagt

SEQ ID NO: 25843 - DNA, 22 bp, Artificial Sequence
  Synthetic
aaccttcgacgacgacaaggag

SEQ ID NO: 25844 - DNA, 25 bp, Artificial Sequence
  Synthetic
gaggagctatataaacaatgtgcca

SEQ ID NO: 25845 - DNA, 25 bp, Artificial Sequence
  Synthetic
cagatgagtctgcagtactagatgt

SEQ ID NO: 25846 - DNA, 25 bp, Artificial Sequence
  Synthetic
accttcctattttacaaccgatacc

SEQ ID NO: 25847 - DNA, 25 bp, Artificial Sequence
  Synthetic
ttcagatgacttttacttgcatcct

SEQ ID NO: 25848 - DNA, 22 bp, Artificial Sequence
  Synthetic
gaggacgatactggtgatcaca

SEQ ID NO: 25849 - DNA, 20 bp, Artificial Sequence
  Synthetic
caacaccgagtggctcactg

SEQ ID NO: 25850 - DNA, 25 bp, Artificial Sequence
  Synthetic
ttctgggacgttgatttaacagaga

SEQ ID NO: 25851 - DNA, 21 bp, Artificial Sequence
  Synthetic
ggctgcctgcccctctttgag

SEQ ID NO: 25852 - DNA, 21 bp, Artificial Sequence
  Synthetic
tactgtttgacaccatgggcg

SEQ ID NO: 25853 - DNA, 25 bp, Artificial Sequence
  Synthetic
aggcttaaacaaattactatcggga

SEQ ID NO: 25854 - DNA, 21 bp, Artificial Sequence
  Synthetic
accatcatgcattgggtaggt

SEQ ID NO: 25855 - DNA, 25 bp, Artificial Sequence
  Synthetic
aacatcactatattcccacaccagc

SEQ ID NO: 25856 - DNA, 25 bp, Artificial Sequence
  Synthetic
tggatctcaacaatttctcacaact

SEQ ID NO: 25857 - DNA, 25 bp, Artificial Sequence
  Synthetic
actttgcaaattggtcaggtagtat

SEQ ID NO: 25858 - DNA, 20 bp, Artificial Sequence
  Synthetic
ccaacccagtggtccacaac

SEQ ID NO: 25859 - DNA, 25 bp, Artificial Sequence
  Synthetic
tttgacatggaagttactgttgtca

SEQ ID NO: 25860 - DNA, 25 bp, Artificial Sequence
  Synthetic
tgctgtgtatggtatcacatctaca

SEQ ID NO: 25861 - DNA, 20 bp, Artificial Sequence
  Synthetic
aaactgcaggcccaagtgat

SEQ ID NO: 25862 - DNA, 25 bp, Artificial Sequence
  Synthetic
tggtatcagatagaggaaacctgtt

SEQ ID NO: 25863 - DNA, 25 bp, Artificial Sequence
  Synthetic
ggtttcactgacacacttaaagacc

SEQ ID NO: 25864 - DNA, 20 bp, Artificial Sequence
  Synthetic
ccaagccgacaaggtgatgg

SEQ ID NO: 25865 - DNA, 21 bp, Artificial Sequence
  Synthetic
atggatgatctgggccaaaac

SEQ ID NO: 25866 - DNA, 24 bp, Artificial Sequence
  Synthetic
tcaagtaggcttgctagatactgc

SEQ ID NO: 25867 - DNA, 25 bp, Artificial Sequence
  Synthetic
agaccctaaagtcattcaatactgc

SEQ ID NO: 25868 - DNA, 21 bp, Artificial Sequence
  Synthetic
ccttgcaaggtcctgaacatg

SEQ ID NO: 25869 - DNA, 24 bp, Artificial Sequence
  Synthetic
atacatgtgggtggaaatggtagg

SEQ ID NO: 25870 - DNA, 24 bp, Artificial Sequence
  Synthetic
tgaatgagtacatagaaacagccg

SEQ ID NO: 25871 - DNA, 24 bp, Artificial Sequence
  Synthetic
actttcctaaaggatgaactccgc

SEQ ID NO: 25872 - DNA, 24 bp, Artificial Sequence
  Synthetic
agatggagaactcattgcttttga

SEQ ID NO: 25873 - DNA, 25 bp, Artificial Sequence
  Synthetic
atgagtcaatcagatggactaagga

SEQ ID NO: 25874 - DNA, 23 bp, Artificial Sequence
  Synthetic
aaccctgctctcagaatgaaatg

SEQ ID NO: 25875 - DNA, 25 bp, Artificial Sequence
  Synthetic
caagtacagtccattatccaaaggt

SEQ ID NO: 25876 - DNA, 25 bp, Artificial Sequence
  Synthetic
gtaaaattgctcctttaatggtggc

SEQ ID NO: 25877 - DNA, 20 bp, Artificial Sequence
  Synthetic
ggcggagagcaacagctatc

SEQ ID NO: 25878 - DNA, 25 bp, Artificial Sequence
  Synthetic
cacttccaaaaagatgcaaaagtgc

SEQ ID NO: 25879 - DNA, 23 bp, Artificial Sequence
  Synthetic
cagggaacagagaagttgacaat

SEQ ID NO: 25880 - DNA, 21 bp, Artificial Sequence
  Synthetic
ggaaacggccgattttcccac

SEQ ID NO: 25881 - DNA, 25 bp, Artificial Sequence
  Synthetic
ggtgtttatgttacacatcagctga

SEQ ID NO: 25882 - DNA, 23 bp, Artificial Sequence
  Synthetic
atgattcttcaggctgacatagc

SEQ ID NO: 25883 - DNA, 20 bp, Artificial Sequence
  Synthetic
ggagacccaaatgcttcctg

SEQ ID NO: 25884 - DNA, 20 bp, Artificial Sequence
  Synthetic
ccaggaactaggcgcagctg

SEQ ID NO: 25885 - DNA, 24 bp, Artificial Sequence
  Synthetic
actggtttggaactcctctatctc

SEQ ID NO: 25886 - DNA, 21 bp, Artificial Sequence
  Synthetic
gcttttacagccagcagcgtc

SEQ ID NO: 25887 - DNA, 22 bp, Artificial Sequence
  Synthetic
aacatgcctgctacatctcggg

SEQ ID NO: 25888 - DNA, 22 bp, Artificial Sequence
  Synthetic
ctgctcttccctagaaacgggc

SEQ ID NO: 25889 - DNA, 22 bp, Artificial Sequence
  Synthetic
acgatgagaccaagtccagggt

SEQ ID NO: 25890 - DNA, 21 bp, Artificial Sequence
  Synthetic
gaccatgacctacgcgaccgt

SEQ ID NO: 25891 - DNA, 20 bp, Artificial Sequence
  Synthetic
ggggtggaggtagcaccact

SEQ ID NO: 25892 - DNA, 22 bp, Artificial Sequence
  Synthetic
ggaccaccaggacaatgtagcc

SEQ ID NO: 25893 - DNA, 19 bp, Artificial Sequence
  Synthetic
gggccgtagatgaccccga

SEQ ID NO: 25894 - DNA, 22 bp, Artificial Sequence
  Synthetic
ttgggacgactgcgactgtagg

SEQ ID NO: 25895 - DNA, 20 bp, Artificial Sequence
  Synthetic
tttgggcgcgagaaagaccg

SEQ ID NO: 25896 - DNA, 22 bp, Artificial Sequence
  Synthetic
cgtccacgccaagacaaaggag

SEQ ID NO: 25897 - DNA, 22 bp, Artificial Sequence
  Synthetic
ccctgccgcaatgctttttagg

SEQ ID NO: 25898 - DNA, 20 bp, Artificial Sequence
  Synthetic
ccagcctcggttatgcaggg

SEQ ID NO: 25899 - DNA, 20 bp, Artificial Sequence
  Synthetic
acaactcatgcgagggtgcc

SEQ ID NO: 25900 - DNA, 20 bp, Artificial Sequence
  Synthetic
gaggtgtgcgtcagggcaaa

SEQ ID NO: 25901 - DNA, 22 bp, Artificial Sequence
  Synthetic
aagctcctcgtaggtgaggtcc

SEQ ID NO: 25902 - DNA, 22 bp, Artificial Sequence
  Synthetic
accagcatgaaggggacaagct

SEQ ID NO: 25903 - DNA, 20 bp, Artificial Sequence
  Synthetic
gccctggctggtggttttca

SEQ ID NO: 25904 - DNA, 19 bp, Artificial Sequence
  Synthetic
gcgtcattgacggcggcct

SEQ ID NO: 25905 - DNA, 21 bp, Artificial Sequence
  Synthetic
cgcaggcgctgaaaaaggtag

SEQ ID NO: 25906 - DNA, 20 bp, Artificial Sequence
  Synthetic
cgggagacggtcgacgaagc

SEQ ID NO: 25907 - DNA, 22 bp, Artificial Sequence
  Synthetic
aggaaagcgtctagccaatcgc

SEQ ID NO: 25908 - DNA, 19 bp, Artificial Sequence
  Synthetic
cgacgcgctcggcaaggat

SEQ ID NO: 25909 - DNA, 22 bp, Artificial Sequence
  Synthetic
gtagccgtagaggtagcgggac

SEQ ID NO: 25910 - DNA, 21 bp, Artificial Sequence
  Synthetic
ggctaaagccgcgactaacgt

SEQ ID NO: 25911 - DNA, 21 bp, Artificial Sequence
  Synthetic
gcatcccgtcctgcgccaaat

SEQ ID NO: 25912 - DNA, 19 bp, Artificial Sequence
  Synthetic
tgattgcgcgcgaggaggt

SEQ ID NO: 25913 - DNA, 19 bp, Artificial Sequence
  Synthetic
cgcatggcgctcaaggtgc

SEQ ID NO: 25914 - DNA, 18 bp, Artificial Sequence
  Synthetic
taagggcggcgctgcaaa

SEQ ID NO: 25915 - DNA, 21 bp, Artificial Sequence
  Synthetic
acgaacgtgcagtccaacctg

SEQ ID NO: 25916 - DNA, 21 bp, Artificial Sequence
  Synthetic
cggtcaacggtgagcagcttg

SEQ ID NO: 25917 - DNA, 21 bp, Artificial Sequence
  Synthetic
cactgtcggccgaggaagaaa

SEQ ID NO: 25918 - DNA, 20 bp, Artificial Sequence
  Synthetic
ccgccagggttctacacggg

SEQ ID NO: 25919 - DNA, 19 bp, Artificial Sequence
  Synthetic
gcctggtgtgggacgacga

SEQ ID NO: 25920 - DNA, 22 bp, Artificial Sequence
  Synthetic
accctggaggttccgtttgtgc

SEQ ID NO: 25921 - DNA, 22 bp, Artificial Sequence
  Synthetic
gatgccgggggtctacacctac

SEQ ID NO: 25922 - DNA, 22 bp, Artificial Sequence
  Synthetic
gcaagaggagatagcagtgtcc

SEQ ID NO: 25923 - DNA, 22 bp, Artificial Sequence
  Synthetic
tcagcaactaccccgtggttgg

SEQ ID NO: 25924 - DNA, 19 bp, Artificial Sequence
  Synthetic
cgcgtgctctccagtcgca

SEQ ID NO: 25925 - DNA, 19 bp, Artificial Sequence
  Synthetic
aactacacccccgccccct

SEQ ID NO: 25926 - DNA, 18 bp, Artificial Sequence
  Synthetic
cgtgtactgggtgcgcga

SEQ ID NO: 25927 - DNA, 20 bp, Artificial Sequence
  Synthetic
cggcacggcggtggtgttta

SEQ ID NO: 25928 - DNA, 21 bp, Artificial Sequence
  Synthetic
aaatggatgtggagcccgagg

SEQ ID NO: 25929 - DNA, 20 bp, Artificial Sequence
  Synthetic
ccaggaggcgaagatggggc

SEQ ID NO: 25930 - DNA, 19 bp, Artificial Sequence
  Synthetic
caggagaggcatggcaggc

SEQ ID NO: 25931 - DNA, 20 bp, Artificial Sequence
  Synthetic
gaacgggggcgccttcaatt

SEQ ID NO: 25932 - DNA, 19 bp, Artificial Sequence
  Synthetic
cctgacgcggaggagacga

SEQ ID NO: 25933 - DNA, 21 bp, Artificial Sequence
  Synthetic
gagcacgctgcacagtatcgt

SEQ ID NO: 25934 - DNA, 21 bp, Artificial Sequence
  Synthetic
cacccacgatgtgaccacgga

SEQ ID NO: 25935 - DNA, 22 bp, Artificial Sequence
  Synthetic
aagggtctgcaaattggtgttg

SEQ ID NO: 25936 - DNA, 20 bp, Artificial Sequence
  Synthetic
gaactctgcggtggacagtt

SEQ ID NO: 25937 - DNA, 22 bp, Artificial Sequence
  Synthetic
cctacgagtacatgaacgggcg

SEQ ID NO: 25938 - DNA, 19 bp, Artificial Sequence
  Synthetic
gcgcctccgtccgctttga

SEQ ID NO: 25939 - DNA, 21 bp, Artificial Sequence
  Synthetic
aacgtggcccaatgcaacatg

SEQ ID NO: 25940 - DNA, 19 bp, Artificial Sequence
  Synthetic
cagccctaccccgccaact

SEQ ID NO: 25941 - DNA, 20 bp, Artificial Sequence
  Synthetic
ggcaacgccaccacctaagc

SEQ ID NO: 25942 - DNA, 22 bp, Artificial Sequence
  Synthetic
ttcgagtacgaggccatgttgc

SEQ ID NO: 25943 - DNA, 19 bp, Artificial Sequence
  Synthetic
tccggcgcaaccaggagga

SEQ ID NO: 25944 - DNA, 20 bp, Artificial Sequence
  Synthetic
gtctcgctccacatgcgccg

SEQ ID NO: 25945 - DNA, 22 bp, Artificial Sequence
  Synthetic
ctgcttaaaagcttgctgggcc

SEQ ID NO: 25946 - DNA, 18 bp, Artificial Sequence
  Synthetic
tggccttccacctcggca

SEQ ID NO: 25947 - DNA, 22 bp, Artificial Sequence
  Synthetic
tggtatccatgcccttctccca

SEQ ID NO: 25948 - DNA, 20 bp, Artificial Sequence
  Synthetic
ccggagcccacccgctgata

SEQ ID NO: 25949 - DNA, 22 bp, Artificial Sequence
  Synthetic
acagaaggaaaccaacgctggg

SEQ ID NO: 25950 - DNA, 22 bp, Artificial Sequence
  Synthetic
ctcacccattttgcctaccccg

SEQ ID NO: 25951 - DNA, 22 bp, Artificial Sequence
  Synthetic
cgtggagctaaccaacctggtc

SEQ ID NO: 25952 - DNA, 20 bp, Artificial Sequence
  Synthetic
gccttggacctggccgaaat

SEQ ID NO: 25953 - DNA, 19 bp, Artificial Sequence
  Synthetic
gccactgccgctgcaacct

SEQ ID NO: 25954 - DNA, 20 bp, Artificial Sequence
  Synthetic
ctcgcccaattgcacgccat

SEQ ID NO: 25955 - DNA, 22 bp, Artificial Sequence
  Synthetic
gggatcgagtaaagggtgacgg

SEQ ID NO: 25956 - DNA, 20 bp, Artificial Sequence
  Synthetic
aaatcggtctctgcgctcgc

SEQ ID NO: 25957 - DNA, 20 bp, Artificial Sequence
  Synthetic
gtccgcccagacccgactta

SEQ ID NO: 25958 - DNA, 22 bp, Artificial Sequence
  Synthetic
taccccgacgagttcataccga

SEQ ID NO: 25959 - DNA, 22 bp, Artificial Sequence
  Synthetic
atccagtgtcgtcataatcgca

SEQ ID NO: 25960 - DNA, 20 bp, Artificial Sequence
  Synthetic
ggggtgtactgtcatgccac

SEQ ID NO: 25961 - DNA, 21 bp, Artificial Sequence
  Synthetic
ctgctggtaggggctctaatg

SEQ ID NO: 25962 - DNA, 25 bp, Artificial Sequence
  Synthetic
taatgctgacaagtctcatgaaagg

SEQ ID NO: 25963 - DNA, 25 bp, Artificial Sequence
  Synthetic
atcaacaaataaccttcagccaaca

SEQ ID NO: 25964 - DNA, 25 bp, Artificial Sequence
  Synthetic
acaagttgcagaaactgatcaaaac

SEQ ID NO: 25965 - DNA, 24 bp, Artificial Sequence
  Synthetic
ttgctgcaaagccagaaaaaaatc

SEQ ID NO: 25966 - DNA, 22 bp, Artificial Sequence
  Synthetic
tcctgcagcttatcgactggtg

SEQ ID NO: 25967 - DNA, 20 bp, Artificial Sequence
  Synthetic
ctggaactctgttggggcat

SEQ ID NO: 25968 - DNA, 21 bp, Artificial Sequence
  Synthetic
cgaaaccagcggctgtatcca

SEQ ID NO: 25969 - DNA, 24 bp, Artificial Sequence
  Synthetic
tggaaatgtctcactcaaggttgg

SEQ ID NO: 25970 - DNA, 23 bp, Artificial Sequence
  Synthetic
agaagataaacgcaccctatgga

SEQ ID NO: 25971 - DNA, 20 bp, Artificial Sequence
  Synthetic
ggaaagccacatcaaccagc

SEQ ID NO: 25972 - DNA, 20 bp, Artificial Sequence
  Synthetic
gtgcgggaactggacttggg

SEQ ID NO: 25973 - DNA, 22 bp, Artificial Sequence
  Synthetic
atgttgggaatgatggaaccca

SEQ ID NO: 25974 - DNA, 20 bp, Artificial Sequence
  Synthetic
tggaaactcttgcagcaggg

SEQ ID NO: 25975 - DNA, 21 bp, Artificial Sequence
  Synthetic
gcggaggcaggattggaagaa

SEQ ID NO: 25976 - DNA, 20 bp, Artificial Sequence
  Synthetic
tccgcacatgtggaaaagct

SEQ ID NO: 25977 - DNA, 25 bp, Artificial Sequence
  Synthetic
atcctgtaaatacgtcactaggacc

SEQ ID NO: 25978 - DNA, 20 bp, Artificial Sequence
  Synthetic
actgggttagtatgcccgtg

SEQ ID NO: 25979 - DNA, 23 bp, Artificial Sequence
  Synthetic
aatgacggaaggtgtaaaaaccc

SEQ ID NO: 25980 - DNA, 23 bp, Artificial Sequence
  Synthetic
agtctggcggaggagcaattata

SEQ ID NO: 25981 - DNA, 24 bp, Artificial Sequence
  Synthetic
agttcaagtttggatagtgttggt

SEQ ID NO: 25982 - DNA, 20 bp, Artificial Sequence
  Synthetic
caatgggcgttgctgtggta

SEQ ID NO: 25983 - DNA, 25 bp, Artificial Sequence
  Synthetic
aatgacagcaatgaaagatggatga

SEQ ID NO: 25984 - DNA, 20 bp, Artificial Sequence
  Synthetic
tgatgatgctacagcggctg

SEQ ID NO: 25985 - DNA, 21 bp, Artificial Sequence
  Synthetic
acagaagctggctccatggta

SEQ ID NO: 25986 - DNA, 22 bp, Artificial Sequence
  Synthetic
aaggtatacacagggcctctag

SEQ ID NO: 25987 - DNA, 20 bp, Artificial Sequence
  Synthetic
tccagagcttgaagatgccg

SEQ ID NO: 25988 - DNA, 23 bp, Artificial Sequence
  Synthetic
cactccaaagaacaaccacaacc

SEQ ID NO: 25989 - DNA, 22 bp, Artificial Sequence
  Synthetic
aaagacaaggtttgacccctct

SEQ ID NO: 25990 - DNA, 22 bp, Artificial Sequence
  Synthetic
cctctcaaaacaggtcctgaca

SEQ ID NO: 25991 - DNA, 21 bp, Artificial Sequence
  Synthetic
tctactaccatggtccagccg

SEQ ID NO: 25992 - DNA, 25 bp, Artificial Sequence
  Synthetic
tatcagtgaatctgctggttacact

SEQ ID NO: 25993 - DNA, 25 bp, Artificial Sequence
  Synthetic
ccacatatgaatctagtcatctggg

SEQ ID NO: 25994 - DNA, 25 bp, Artificial Sequence
  Synthetic
aagcagagagaaaaacaacaacaca

SEQ ID NO: 25995 - DNA, 24 bp, Artificial Sequence
  Synthetic
tgtcattggtaccatagcactagg

SEQ ID NO: 25996 - DNA, 25 bp, Artificial Sequence
  Synthetic
aagggaactgtgatagatgttgatt

SEQ ID NO: 25997 - DNA, 23 bp, Artificial Sequence
  Synthetic
ttgacctataccaattgcggttt

SEQ ID NO: 25998 - DNA, 22 bp, Artificial Sequence
  Synthetic
aacctataaggcaacagcatcc

SEQ ID NO: 25999 - DNA, 25 bp, Artificial Sequence
  Synthetic
tctcattattacctggaccaagtct

SEQ ID NO: 26000 - DNA, 24 bp, Artificial Sequence
  Synthetic
acaaggggttatcagttatgctcc

SEQ ID NO: 26001 - DNA, 20 bp, Artificial Sequence
  Synthetic
gtggcttaacaactccgctc

SEQ ID NO: 26002 - DNA, 25 bp, Artificial Sequence
  Synthetic
ccaacctgcaaataggatcattaga

SEQ ID NO: 26003 - DNA, 25 bp, Artificial Sequence
  Synthetic
tcaacatgctaagactcaagaatgt

SEQ ID NO: 26004 - DNA, 25 bp, Artificial Sequence
  Synthetic
agagttactcagactggatatccca

SEQ ID NO: 26005 - DNA, 25 bp, Artificial Sequence
  Synthetic
gaattatgggagcttatcgactctt

SEQ ID NO: 26006 - DNA, 25 bp, Artificial Sequence
  Synthetic
tggtaaagggagaaattgacctact

SEQ ID NO: 26007 - DNA, 22 bp, Artificial Sequence
  Synthetic
gtgacatccagagttcctgtca

SEQ ID NO: 26008 - DNA, 25 bp, Artificial Sequence
  Synthetic
ttgtcagaaatataggtgatccagc

SEQ ID NO: 26009 - DNA, 22 bp, Artificial Sequence
  Synthetic
agaaactccagacccgttagaa

SEQ ID NO: 26010 - DNA, 24 bp, Artificial Sequence
  Synthetic
ttgaagttactcacccctgtatcg

SEQ ID NO: 26011 - DNA, 22 bp, Artificial Sequence
  Synthetic
aaagacacatcacatgcagtcc

SEQ ID NO: 26012 - DNA, 25 bp, Artificial Sequence
  Synthetic
ctgctgaggttcaacacaatatacc

SEQ ID NO: 26013 - DNA, 20 bp, Artificial Sequence
  Synthetic
atctcggagaaggtgcaggt

SEQ ID NO: 26014 - DNA, 20 bp, Artificial Sequence
  Synthetic
ccatacagccatgggacagg

SEQ ID NO: 26015 - DNA, 21 bp, Artificial Sequence
  Synthetic
gtcgtcagacctatgactgga

SEQ ID NO: 26016 - DNA, 25 bp, Artificial Sequence
  Synthetic
aaatggtcacacaacgaacaatagg

SEQ ID NO: 26017 - DNA, 25 bp, Artificial Sequence
  Synthetic
atgactaattcacaagacacagagc

SEQ ID NO: 26018 - DNA, 20 bp, Artificial Sequence
  Synthetic
gcatgaagctccgaacacaa

SEQ ID NO: 26019 - DNA, 21 bp, Artificial Sequence
  Synthetic
ccaatcctctgatgacttcgc

SEQ ID NO: 26020 - DNA, 22 bp, Artificial Sequence
  Synthetic
atgagcattggggtaacagtga

SEQ ID NO: 26021 - DNA, 24 bp, Artificial Sequence
  Synthetic
gtaatcccctgaatccatttgtca

SEQ ID NO: 26022 - DNA, 20 bp, Artificial Sequence
  Synthetic
tcgtacaggagaccagttgg

SEQ ID NO: 26023 - DNA, 21 bp, Artificial Sequence
  Synthetic
aggactacgaggtggactttg

SEQ ID NO: 26024 - DNA, 21 bp, Artificial Sequence
  Synthetic
atacggtgccatgcatgcagc

SEQ ID NO: 26025 - DNA, 22 bp, Artificial Sequence
  Synthetic
ttgttgaacaagcacagcaggc

SEQ ID NO: 26026 - DNA, 25 bp, Artificial Sequence
  Synthetic
agtgataagtcaatatgtggggact

SEQ ID NO: 26027 - DNA, 22 bp, Artificial Sequence
  Synthetic
ccaccaaagattagaagcgcac

SEQ ID NO: 26028 - DNA, 21 bp, Artificial Sequence
  Synthetic
ccttcttggccagtaactgcc

SEQ ID NO: 26029 - DNA, 25 bp, Artificial Sequence
  Synthetic
tgagcctactaaattttctgggagg

SEQ ID NO: 26030 - DNA, 21 bp, Artificial Sequence
  Synthetic
gcaacaagcttgaggaccaaa

SEQ ID NO: 26031 - DNA, 20 bp, Artificial Sequence
  Synthetic
tgtggaatacgcagccacaa

SEQ ID NO: 26032 - DNA, 24 bp, Artificial Sequence
  Synthetic
acatgcaagtgttgtggtatatgg

SEQ ID NO: 26033 - DNA, 22 bp, Artificial Sequence
  Synthetic
gtggatattggccctgtgtccc

SEQ ID NO: 26034 - DNA, 20 bp, Artificial Sequence
  Synthetic
accttgccggccatgtcatt

SEQ ID NO: 26035 - DNA, 22 bp, Artificial Sequence
  Synthetic
atgctgaccctgaggtgttgga

SEQ ID NO: 26036 - DNA, 23 bp, Artificial Sequence
  Synthetic
cgtcgtaaacgtgtaccctattc

SEQ ID NO: 26037 - DNA, 20 bp, Artificial Sequence
  Synthetic
tatccccaaggtgtctggct

SEQ ID NO: 26038 - DNA, 23 bp, Artificial Sequence
  Synthetic
gtttacgcagggaacaaatgttt

SEQ ID NO: 26039 - DNA, 25 bp, Artificial Sequence
  Synthetic
aattgtttgtaaccgttgtggatac

SEQ ID NO: 26040 - DNA, 20 bp, Artificial Sequence
  Synthetic
gcccaaggaggatcgctatg

SEQ ID NO: 26041 - DNA, 25 bp, Artificial Sequence
  Synthetic
gttgttttgtattgtgctgtactgg

SEQ ID NO: 26042 - DNA, 22 bp, Artificial Sequence
  Synthetic
gttccttgtgttcgggtagcca

SEQ ID NO: 26043 - DNA, 24 bp, Artificial Sequence
  Synthetic
tttgtgctgactactttcccttaa

SEQ ID NO: 26044 - DNA, 23 bp, Artificial Sequence
  Synthetic
aacatgtttacaaggtgggacgt

SEQ ID NO: 26045 - DNA, 21 bp, Artificial Sequence
  Synthetic
acctccaacaaagcctgaaga

SEQ ID NO: 26046 - DNA, 21 bp, Artificial Sequence
  Synthetic
aacctgactcacgctcagggc

SEQ ID NO: 26047 - DNA, 20 bp, Artificial Sequence
  Synthetic
cgaccgcgccattccattgg

SEQ ID NO: 26048 - DNA, 22 bp, Artificial Sequence
  Synthetic
atcacccgaaaactagaggaca

SEQ ID NO: 26049 - DNA, 23 bp, Artificial Sequence
  Synthetic
agttggcctaactcaccaaaaac

SEQ ID NO: 26050 - DNA, 19 bp, Artificial Sequence
  Synthetic
tgcgtggtctccggtgcct

SEQ ID NO: 26051 - DNA, 22 bp, Artificial Sequence
  Synthetic
tgggtgggtgtacgtaggttcc

SEQ ID NO: 26052 - DNA, 21 bp, Artificial Sequence
  Synthetic
gagatgctgctgtgtgaggca

SEQ ID NO: 26053 - DNA, 22 bp, Artificial Sequence
  Synthetic
tggaagcctgctcagggatttc

SEQ ID NO: 26054 - DNA, 19 bp, Artificial Sequence
  Synthetic
acgtgggctgggcggatct

SEQ ID NO: 26055 - DNA, 22 bp, Artificial Sequence
  Synthetic
tctcccggattcactgccatct

SEQ ID NO: 26056 - DNA, 22 bp, Artificial Sequence
  Synthetic
ctcttcgcctacgcacaagtgg

SEQ ID NO: 26057 - DNA, 19 bp, Artificial Sequence
  Synthetic
accagtgtcgccagtgcct

SEQ ID NO: 26058 - DNA, 21 bp, Artificial Sequence
  Synthetic
ccgagctcgggactctggtac

SEQ ID NO: 26059 - DNA, 20 bp, Artificial Sequence
  Synthetic
actggatgtgggcaaaggat

SEQ ID NO: 26060 - DNA, 20 bp, Artificial Sequence
  Synthetic
tggcgatctgggagttggcg

SEQ ID NO: 26061 - DNA, 20 bp, Artificial Sequence
  Synthetic
tagaggctgccgatgcctga

SEQ ID NO: 26062 - DNA, 21 bp, Artificial Sequence
  Synthetic
atgggagaggcaccactctgt

SEQ ID NO: 26063 - DNA, 19 bp, Artificial Sequence
  Synthetic
gcaatgccagcgcggggta

SEQ ID NO: 26064 - DNA, 19 bp, Artificial Sequence
  Synthetic
tcgggcgaagagcttccgg

SEQ ID NO: 26065 - DNA, 19 bp, Artificial Sequence
  Synthetic
cggacagtgtcgcgctgca

SEQ ID NO: 26066 - DNA, 19 bp, Artificial Sequence
  Synthetic
gcgctgggcggttgaggtt

SEQ ID NO: 26067 - DNA, 21 bp, Artificial Sequence
  Synthetic
ccctggctgaactcaccgaca

SEQ ID NO: 26068 - DNA, 20 bp, Artificial Sequence
  Synthetic
ggccaccatcccgtgacagg

SEQ ID NO: 26069 - DNA, 20 bp, Artificial Sequence
  Synthetic
ggtatccacacggagcaggc

SEQ ID NO: 26070 - DNA, 19 bp, Artificial Sequence
  Synthetic
ctccagcggcccaaaggga

SEQ ID NO: 26071 - DNA, 19 bp, Artificial Sequence
  Synthetic
accagccaccagacgagca

SEQ ID NO: 26072 - DNA, 20 bp, Artificial Sequence
  Synthetic
cggttgaaggagcccacgtt

SEQ ID NO: 26073 - DNA, 21 bp, Artificial Sequence
  Synthetic
cgtcgcctataccgcatctgc

SEQ ID NO: 26074 - DNA, 19 bp, Artificial Sequence
  Synthetic
agagacacaagcccccccg

SEQ ID NO: 26075 - DNA, 19 bp, Artificial Sequence
  Synthetic
cgcaccgtagcccgcgaaa

SEQ ID NO: 26076 - DNA, 19 bp, Artificial Sequence
  Synthetic
gcagcactacgtggcggga

SEQ ID NO: 26077 - DNA, 20 bp, Artificial Sequence
  Synthetic
aaaagctcagggcatccgcg

SEQ ID NO: 26078 - DNA, 22 bp, Artificial Sequence
  Synthetic
atcctgctgctcctgctcatcc

SEQ ID NO: 26079 - DNA, 22 bp, Artificial Sequence
  Synthetic
cggtggaggtaaaggtgttgcg

SEQ ID NO: 26080 - DNA, 22 bp, Artificial Sequence
  Synthetic
gtgtacctggggcacctcaacc

SEQ ID NO: 26081 - DNA, 22 bp, Artificial Sequence
  Synthetic
atctggatcccttgacctcggc

SEQ ID NO: 26082 - DNA, 20 bp, Artificial Sequence
  Synthetic
ttccttgcaggcgaagaggc

SEQ ID NO: 26083 - DNA, 19 bp, Artificial Sequence
  Synthetic
gacgagtgcagcaccaggt

SEQ ID NO: 26084 - DNA, 18 bp, Artificial Sequence
  Synthetic
accgcgttgtcggagctg

SEQ ID NO: 26085 - DNA, 22 bp, Artificial Sequence
  Synthetic
agctagaggatttgcgattgct

SEQ ID NO: 26086 - DNA, 22 bp, Artificial Sequence
  Synthetic
agacgctgactctagtgtgccc

SEQ ID NO: 26087 - DNA, 20 bp, Artificial Sequence
  Synthetic
ccggtggaggatcaggagga

SEQ ID NO: 26088 - DNA, 25 bp, Artificial Sequence
  Synthetic
atggattgttagacagacgttggta

SEQ ID NO: 26089 - DNA, 22 bp, Artificial Sequence
  Synthetic
agtgttctatggacctgcagac

SEQ ID NO: 26090 - DNA, 25 bp, Artificial Sequence
  Synthetic
gaggaggacagatggaaatatttgc

SEQ ID NO: 26091 - DNA, 22 bp, Artificial Sequence
  Synthetic
aggccatagaggtacagctggc

SEQ ID NO: 26092 - DNA, 21 bp, Artificial Sequence
  Synthetic
gtatccccagtcccagcccca

SEQ ID NO: 26093 - DNA, 24 bp, Artificial Sequence
  Synthetic
gatagcattgccagggtatatgtc

SEQ ID NO: 26094 - DNA, 20 bp, Artificial Sequence
  Synthetic
cacacctaacacccccactt

SEQ ID NO: 26095 - DNA, 22 bp, Artificial Sequence
  Synthetic
gccgtcttggatatcaccccct

SEQ ID NO: 26096 - DNA, 20 bp, Artificial Sequence
  Synthetic
ttgatgagttacccgccgcc

SEQ ID NO: 26097 - DNA, 22 bp, Artificial Sequence
  Synthetic
atgtctatgtcacgcggactaa

SEQ ID NO: 26098 - DNA, 25 bp, Artificial Sequence
  Synthetic
atcctgattatctgaagatggctgc

SEQ ID NO: 26099 - DNA, 22 bp, Artificial Sequence
  Synthetic
atggatccccagttgttagagg

SEQ ID NO: 26100 - DNA, 20 bp, Artificial Sequence
  Synthetic
cttgtgtgtagcccccagtt

SEQ ID NO: 26101 - DNA, 25 bp, Artificial Sequence
  Synthetic
ccttcaattggcagatctaaaacga

SEQ ID NO: 26102 - DNA, 20 bp, Artificial Sequence
  Synthetic
gccagggtgtgtaaggagtt

SEQ ID NO: 26103 - DNA, 20 bp, Artificial Sequence
  Synthetic
tgcatgttggcagttcatgg

SEQ ID NO: 26104 - DNA, 25 bp, Artificial Sequence
  Synthetic
agcaaaacaagctataatgatggcc

SEQ ID NO: 26105 - DNA, 21 bp, Artificial Sequence
  Synthetic
gacgagggggaagtcgaagga

SEQ ID NO: 26106 - DNA, 20 bp, Artificial Sequence
  Synthetic
tggcatagggacaggcaaag

SEQ ID NO: 26107 - DNA, 25 bp, Artificial Sequence
  Synthetic
gtagtggtagtaatactcctgcagt

SEQ ID NO: 26108 - DNA, 25 bp, Artificial Sequence
  Synthetic
aactagaaagaccaaggttctctga

SEQ ID NO: 26109 - DNA, 25 bp, Artificial Sequence
  Synthetic
attaccagcaataataacaccaggc

SEQ ID NO: 26110 - DNA, 24 bp, Artificial Sequence
  Synthetic
gtagtgatcgccttctaacagttg

SEQ ID NO: 26111 - DNA, 24 bp, Artificial Sequence
  Synthetic
tttcagggtagtactgatagcaga

SEQ ID NO: 26112 - DNA, 23 bp, Artificial Sequence
  Synthetic
gtttacagcacgataggtcctca

SEQ ID NO: 26113 - DNA, 25 bp, Artificial Sequence
  Synthetic
gtttactttcctactcctagtggct

SEQ ID NO: 26114 - DNA, 25 bp, Artificial Sequence
  Synthetic
attgtctcagacatctcttggaagg

SEQ ID NO: 26115 - DNA, 22 bp, Artificial Sequence
  Synthetic
gtgtgttactgactcacagggt

SEQ ID NO: 26116 - DNA, 25 bp, Artificial Sequence
  Synthetic
ggatactttagagcgccttgtacag

SEQ ID NO: 26117 - DNA, 25 bp, Artificial Sequence
  Synthetic
tagacgatgatgtggatgaagttga

SEQ ID NO: 26118 - DNA, 20 bp, Artificial Sequence
  Synthetic
gagccgagctctgaaaccaa

SEQ ID NO: 26119 - DNA, 25 bp, Artificial Sequence
  Synthetic
agcagactcatttgatctatcacaa

SEQ ID NO: 26120 - DNA, 22 bp, Artificial Sequence
  Synthetic
actgctgcagaagttggaagca

SEQ ID NO: 26121 - DNA, 24 bp, Artificial Sequence
  Synthetic
aaaagggtgtacgtattgctttgg

SEQ ID NO: 26122 - DNA, 20 bp, Artificial Sequence
  Synthetic
tgggcttggcattggaacag

SEQ ID NO: 26123 - DNA, 21 bp, Artificial Sequence
  Synthetic
tatcagaggtcacaggggttg

SEQ ID NO: 26124 - DNA, 25 bp, Artificial Sequence
  Synthetic
actcatgtgggttatacagaagaca

SEQ ID NO: 26125 - DNA, 22 bp, Artificial Sequence
  Synthetic
atgatttggcagagattgggga

SEQ ID NO: 26126 - DNA, 24 bp, Artificial Sequence
  Synthetic
cctgatggagttctggtagatgac

SEQ ID NO: 26127 - DNA, 24 bp, Artificial Sequence
  Synthetic
ttaagcacagaccaaaataccgtt

SEQ ID NO: 26128 - DNA, 25 bp, Artificial Sequence
  Synthetic
atggattaatcagtgaccaaaagga

SEQ ID NO: 26129 - DNA, 23 bp, Artificial Sequence
  Synthetic
ttgactagcagcgaatcaaacat

SEQ ID NO: 26130 - DNA, 22 bp, Artificial Sequence
  Synthetic
tctgcatttttgttaccccacc

SEQ ID NO: 26131 - DNA, 25 bp, Artificial Sequence
  Synthetic
atcactatatgtgtcagcctcattg

SEQ ID NO: 26132 - DNA, 25 bp, Artificial Sequence
  Synthetic
actcagctcccttgataataagaga

SEQ ID NO: 26133 - DNA, 25 bp, Artificial Sequence
  Synthetic
aatggacatatatcggagttgatgg

SEQ ID NO: 26134 - DNA, 20 bp, Artificial Sequence
  Synthetic
cactgaagagtgcacatgcg

SEQ ID NO: 26135 - DNA, 22 bp, Artificial Sequence
  Synthetic
ggcatcaaaggaggattcgtcc

SEQ ID NO: 26136 - DNA, 23 bp, Artificial Sequence
  Synthetic
acagccatttactgtttgatggg

SEQ ID NO: 26137 - DNA, 25 bp, Artificial Sequence
  Synthetic
aacagatatacatgtaaccgcttgc

SEQ ID NO: 26138 - DNA, 21 bp, Artificial Sequence
  Synthetic
attgacctgcaatgctacgag

SEQ ID NO: 26139 - DNA, 23 bp, Artificial Sequence
  Synthetic
gtgtcgtgaagaaattcggaatg

SEQ ID NO: 26140 - DNA, 25 bp, Artificial Sequence
  Synthetic
cggagcaagtacaaaagttaaaacg

SEQ ID NO: 26141 - DNA, 22 bp, Artificial Sequence
  Synthetic
acaatgggcctatgatagcgat

SEQ ID NO: 26142 - DNA, 22 bp, Artificial Sequence
  Synthetic
aattagagctcagtgacccaga

SEQ ID NO: 26143 - DNA, 22 bp, Artificial Sequence
  Synthetic
tggcagtatctgaaaccaaagc

SEQ ID NO: 26144 - DNA, 22 bp, Artificial Sequence
  Synthetic
gttaccttcgctgatgatgctg

SEQ ID NO: 26145 - DNA, 20 bp, Artificial Sequence
  Synthetic
caccagcaccacagcaacca

SEQ ID NO: 26146 - DNA, 22 bp, Artificial Sequence
  Synthetic
caacctccagagattccagccc

SEQ ID NO: 26147 - DNA, 24 bp, Artificial Sequence
  Synthetic
gatcctccagtaatacttttgcga

SEQ ID NO: 26148 - DNA, 22 bp, Artificial Sequence
  Synthetic
tagaggaacctacaccaccaag

SEQ ID NO: 26149 - DNA, 22 bp, Artificial Sequence
  Synthetic
gctgtagaagaacctccagaca

SEQ ID NO: 26150 - DNA, 22 bp, Artificial Sequence
  Synthetic
gatgctactattgtccaaggcc

SEQ ID NO: 26151 - DNA, 25 bp, Artificial Sequence
  Synthetic
atcctgaacgaaggaattatccaga

SEQ ID NO: 26152 - DNA, 24 bp, Artificial Sequence
  Synthetic
acattcagaggacagacatctact

SEQ ID NO: 26153 - DNA, 25 bp, Artificial Sequence
  Synthetic
acaacaggacatccattgtttaaca

SEQ ID NO: 26154 - DNA, 22 bp, Artificial Sequence
  Synthetic
attacctgcagcaagtcaacag

SEQ ID NO: 26155 - DNA, 25 bp, Artificial Sequence
  Synthetic
cagaaaaactgtctttggatttgga

SEQ ID NO: 26156 - DNA, 24 bp, Artificial Sequence
  Synthetic
tttcagtgtgattttcaatcggct

SEQ ID NO: 26157 - DNA, 25 bp, Artificial Sequence
  Synthetic
tttcctgggaaaataaaagtggtgc

SEQ ID NO: 26158 - DNA, 25 bp, Artificial Sequence
  Synthetic
gctggtacaacaattctatttctgc

SEQ ID NO: 26159 - DNA, 25 bp, Artificial Sequence
  Synthetic
attgtcaccttatagagttgacagc

SEQ ID NO: 26160 - DNA, 21 bp, Artificial Sequence
  Synthetic
tgctcttagtcctcgtttgga

SEQ ID NO: 26161 - DNA, 21 bp, Artificial Sequence
  Synthetic
atctgaacagtggacgtttgc

SEQ ID NO: 26162 - DNA, 25 bp, Artificial Sequence
  Synthetic
tgacaatgaacaaattttgcccttt

SEQ ID NO: 26163 - DNA, 21 bp, Artificial Sequence
  Synthetic
cacaccactgagcctagtttg

SEQ ID NO: 26164 - DNA, 22 bp, Artificial Sequence
  Synthetic
atcccgcctttgatgctgatgt

SEQ ID NO: 26165 - DNA, 24 bp, Artificial Sequence
  Synthetic
tctcagttcattaccaatgcttca

SEQ ID NO: 26166 - DNA, 24 bp, Artificial Sequence
  Synthetic
atacattcgcctatacaagatggc

SEQ ID NO: 26167 - DNA, 23 bp, Artificial Sequence
  Synthetic
aggatgtgaatggtgatcacaga

SEQ ID NO: 26168 - DNA, 20 bp, Artificial Sequence
  Synthetic
tcaacagaagccacctgcag

SEQ ID NO: 26169 - DNA, 23 bp, Artificial Sequence
  Synthetic
tttcagcaactattggtttccga

SEQ ID NO: 26170 - DNA, 23 bp, Artificial Sequence
  Synthetic
atgcccaagttacagaggattca

SEQ ID NO: 26171 - DNA, 24 bp, Artificial Sequence
  Synthetic
tctaacaatgcggtggttgaaaat

SEQ ID NO: 26172 - DNA, 25 bp, Artificial Sequence
  Synthetic
gaactttcaaagatggtacaatggg

SEQ ID NO: 26173 - DNA, 21 bp, Artificial Sequence
  Synthetic
cttccgcgacatggtttatcg

SEQ ID NO: 26174 - DNA, 22 bp, Artificial Sequence
  Synthetic
tggtggaggaacagtttctagg

SEQ ID NO: 26175 - DNA, 25 bp, Artificial Sequence
  Synthetic
tgagcatcctgcagtaataaatgtt

SEQ ID NO: 26176 - DNA, 22 bp, Artificial Sequence
  Synthetic
ttttacagtgagaccgaaagcg

SEQ ID NO: 26177 - DNA, 25 bp, Artificial Sequence
  Synthetic
ttaccagaacaaaatgaaaacaggg

SEQ ID NO: 26178 - DNA, 23 bp, Artificial Sequence
  Synthetic
agatgctgtttgtaaatggcctg

SEQ ID NO: 26179 - DNA, 24 bp, Artificial Sequence
  Synthetic
tcgcatataaatgtgatgaaccca

SEQ ID NO: 26180 - DNA, 22 bp, Artificial Sequence
  Synthetic
ggtcaaattccttttccccacc

SEQ ID NO: 26181 - DNA, 20 bp, Artificial Sequence
  Synthetic
cgcttttgttgctggctgtc

SEQ ID NO: 26182 - DNA, 20 bp, Artificial Sequence
  Synthetic
tagagggcattggagagggt

SEQ ID NO: 26183 - DNA, 25 bp, Artificial Sequence
  Synthetic
gctcgaagaattatcattcgtttgc

SEQ ID NO: 26184 - DNA, 23 bp, Artificial Sequence
  Synthetic
gtagtgagctgggtaaagatggc

SEQ ID NO: 26185 - DNA, 25 bp, Artificial Sequence
  Synthetic
tggtacagtgggcatatgataatga

SEQ ID NO: 26186 - DNA, 22 bp, Artificial Sequence
  Synthetic
ggcccagcagaaagttccatcc

SEQ ID NO: 26187 - DNA, 21 bp, Artificial Sequence
  Synthetic
aaaaggtcctgcaaatcccct

SEQ ID NO: 26188 - DNA, 21 bp, Artificial Sequence
  Synthetic
acgcgtattacctgaagggac

SEQ ID NO: 26189 - DNA, 23 bp, Artificial Sequence
  Synthetic
atatatctcctgcacaaccagcc

SEQ ID NO: 26190 - DNA, 20 bp, Artificial Sequence
  Synthetic
cagtgccacggctaacacaa

SEQ ID NO: 26191 - DNA, 23 bp, Artificial Sequence
  Synthetic
accttcattaggggaacattggg

SEQ ID NO: 26192 - DNA, 25 bp, Artificial Sequence
  Synthetic
tacggtgaccaggtatttttctttg

SEQ ID NO: 26193 - DNA, 22 bp, Artificial Sequence
  Synthetic
tcaaactggtttactggagcgt

SEQ ID NO: 26194 - DNA, 20 bp, Artificial Sequence
  Synthetic
atccggacctcatgccagat

SEQ ID NO: 26195 - DNA, 22 bp, Artificial Sequence
  Synthetic
tgactgactcaaacgttcttgg

SEQ ID NO: 26196 - DNA, 20 bp, Artificial Sequence
  Synthetic
gatcgccagaatgcaactga

SEQ ID NO: 26197 - DNA, 22 bp, Artificial Sequence
  Synthetic
tcagttgctcacaaatcttgcc

SEQ ID NO: 26198 - DNA, 20 bp, Artificial Sequence
  Synthetic
aaaagtatctccgcggggga

SEQ ID NO: 26199 - DNA, 22 bp, Artificial Sequence
  Synthetic
aatacggagggaaggacttcag

SEQ ID NO: 26200 - DNA, 23 bp, Artificial Sequence
  Synthetic
aatttgaaaatacaggcgagcgc

SEQ ID NO: 26201 - DNA, 23 bp, Artificial Sequence
  Synthetic
gagcaattgaacagctcagagga

SEQ ID NO: 26202 - DNA, 25 bp, Artificial Sequence
  Synthetic
aaaacgaaagtatttaggcagtccg

SEQ ID NO: 26203 - DNA, 20 bp, Artificial Sequence
  Synthetic
acgccaccacagcaaataca

SEQ ID NO: 26204 - DNA, 22 bp, Artificial Sequence
  Synthetic
aacagatgacagtgacattgca

SEQ ID NO: 26205 - DNA, 22 bp, Artificial Sequence
  Synthetic
ttttacgaggcacaccaaaaca

SEQ ID NO: 26206 - DNA, 22 bp, Artificial Sequence
  Synthetic
attgtcccgactctgtgtctag

SEQ ID NO: 26207 - DNA, 20 bp, Artificial Sequence
  Synthetic
tttgtgtgcctgtgtgtctg

SEQ ID NO: 26208 - DNA, 20 bp, Artificial Sequence
  Synthetic
gtgtactatggtcgcccacc

SEQ ID NO: 26209 - DNA, 21 bp, Artificial Sequence
  Synthetic
tccacaaactggggaggtatc

SEQ ID NO: 26210 - DNA, 22 bp, Artificial Sequence
  Synthetic
ttgtggctttacacagacctgc

SEQ ID NO: 26211 - DNA, 25 bp, Artificial Sequence
  Synthetic
aacatgttccctattttcttgcaga

SEQ ID NO: 26212 - DNA, 22 bp, Artificial Sequence
  Synthetic
ttcccaaggtgtctgcatttca

SEQ ID NO: 26213 - DNA, 25 bp, Artificial Sequence
  Synthetic
catgactatatctgcaaccacacaa

SEQ ID NO: 26214 - DNA, 24 bp, Artificial Sequence
  Synthetic
aaaagccttgctataacctgtcaa

SEQ ID NO: 26215 - DNA, 20 bp, Artificial Sequence
  Synthetic
cggcggtgattgtttgtgtc

SEQ ID NO: 26216 - DNA, 20 bp, Artificial Sequence
  Synthetic
tggttgttgcacaccactgt

SEQ ID NO: 26217 - DNA, 23 bp, Artificial Sequence
  Synthetic
tgcaaacatctgcaacacaatga

SEQ ID NO: 26218 - DNA, 20 bp, Artificial Sequence
  Synthetic
aacggccatacaagctacca

SEQ ID NO: 26219 - DNA, 25 bp, Artificial Sequence
  Synthetic
ctcagaggatgaggatgaaacagac

SEQ ID NO: 26220 - DNA, 20 bp, Artificial Sequence
  Synthetic
ggaggtgttcgggatggttt

SEQ ID NO: 26221 - DNA, 25 bp, Artificial Sequence
  Synthetic
aatggtacagtgggcatttgataat

SEQ ID NO: 26222 - DNA, 25 bp, Artificial Sequence
  Synthetic
aatgcattagatggcaatcctatgt

SEQ ID NO: 26223 - DNA, 24 bp, Artificial Sequence
  Synthetic
acaaagacgtggtcaaaactagat

SEQ ID NO: 26224 - DNA, 24 bp, Artificial Sequence
  Synthetic
tccaaagggcataatgcaattgaa

SEQ ID NO: 26225 - DNA, 25 bp, Artificial Sequence
  Synthetic
atggtagcattggggtattttttgg

SEQ ID NO: 26226 - DNA, 23 bp, Artificial Sequence
  Synthetic
aacaacatctgtggacagtacac

SEQ ID NO: 26227 - DNA, 23 bp, Artificial Sequence
  Synthetic
gctagaaaaactggcatacgtgt

SEQ ID NO: 26228 - DNA, 24 bp, Artificial Sequence
  Synthetic
gacctactgaggcaaaggtatacc

SEQ ID NO: 26229 - DNA, 20 bp, Artificial Sequence
  Synthetic
gcacaccatgtggtacccaa

SEQ ID NO: 26230 - DNA, 23 bp, Artificial Sequence
  Synthetic
aggtactgtaggcgatgctattc

SEQ ID NO: 26231 - DNA, 23 bp, Artificial Sequence
  Synthetic
aacatgttttggtctgtttgtgc

SEQ ID NO: 26232 - DNA, 24 bp, Artificial Sequence
  Synthetic
aagaacgttactgttacacatgcc

SEQ ID NO: 26233 - DNA, 21 bp, Artificial Sequence
  Synthetic
gttacccaggggatttcaacg

SEQ ID NO: 26234 - DNA, 20 bp, Artificial Sequence
  Synthetic
gatgcggcagagcagacaaa

SEQ ID NO: 26235 - DNA, 25 bp, Artificial Sequence
  Synthetic
agtgaattggaatatggtaactgca

SEQ ID NO: 26236 - DNA, 22 bp, Artificial Sequence
  Synthetic
ggtaccaccatagcaatgagca

SEQ ID NO: 26237 - DNA, 25 bp, Artificial Sequence
  Synthetic
ttcatgactcaaatgtcaagaacct

SEQ ID NO: 26238 - DNA, 25 bp, Artificial Sequence
  Synthetic
actgtcaatttattcaacagtggcg

SEQ ID NO: 26239 - DNA, 20 bp, Artificial Sequence
  Synthetic
gagaacgccagaatgccact

SEQ ID NO: 26240 - DNA, 24 bp, Artificial Sequence
  Synthetic
taaacggaaagtggatgagagaac

SEQ ID NO: 26241 - DNA, 21 bp, Artificial Sequence
  Synthetic
ggtcaggatgatcaaacgtgg

SEQ ID NO: 26242 - DNA, 24 bp, Artificial Sequence
  Synthetic
ggaagctttccactagaggagttc

SEQ ID NO: 26243 - DNA, 20 bp, Artificial Sequence
  Synthetic
cagcaggacgagcaagcttt

SEQ ID NO: 26244 - DNA, 20 bp, Artificial Sequence
  Synthetic
agttgcgtgtatcgtcccaa

SEQ ID NO: 26245 - DNA, 25 bp, Artificial Sequence
  Synthetic
ttcagttttatgctgcaaaatgtcg

SEQ ID NO: 26246 - DNA, 25 bp, Artificial Sequence
  Synthetic
agggctaatagatgatgcaacattt

SEQ ID NO: 26247 - DNA, 20 bp, Artificial Sequence
  Synthetic
accgtttcgatgctgtgcaa

SEQ ID NO: 26248 - DNA, 25 bp, Artificial Sequence
  Synthetic
acgttatggaccgctatttattacc

SEQ ID NO: 26249 - DNA, 20 bp, Artificial Sequence
  Synthetic
aagacgaggctagggatccg

SEQ ID NO: 26250 - DNA, 20 bp, Artificial Sequence
  Synthetic
gctggtgctgaggtgtttgt

SEQ ID NO: 26251 - DNA, 23 bp, Artificial Sequence
  Synthetic
gcatctgctaacattaatggcag

SEQ ID NO: 26252 - DNA, 22 bp, Artificial Sequence
  Synthetic
atttgcatccaagtcacagacg

SEQ ID NO: 26253 - DNA, 22 bp, Artificial Sequence
  Synthetic
caccccttgtaaaggtgaacac

SEQ ID NO: 26254 - DNA, 23 bp, Artificial Sequence
  Synthetic
gtccttagcatctagtgactccc

SEQ ID NO: 26255 - DNA, 25 bp, Artificial Sequence
  Synthetic
ttttgggtggttgatttatcagaca

SEQ ID NO: 26256 - DNA, 25 bp, Artificial Sequence
  Synthetic
gtattactcatgtgttttgcaacgt

SEQ ID NO: 26257 - DNA, 20 bp, Artificial Sequence
  Synthetic
cttgaagcagtagtccttct

SEQ ID NO: 26258 - DNA, 25 bp, Artificial Sequence
  Synthetic
catatctataagcaataattggctc

SEQ ID NO: 26259 - DNA, 18 bp, Artificial Sequence
  Synthetic
tccaaacatacaggggtg

SEQ ID NO: 26260 - DNA, 23 bp, Artificial Sequence
  Synthetic
aaatgtatagcttctttggactt

SEQ ID NO: 26261 - DNA, 18 bp, Artificial Sequence
  Synthetic
ccggtggtgctactagcg

SEQ ID NO: 26262 - DNA, 20 bp, Artificial Sequence
  Synthetic
gcttcagcttcaagtcttgc

SEQ ID NO: 26263 - DNA, 23 bp, Artificial Sequence
  Synthetic
ttataatgagtccaaatgtccat

SEQ ID NO: 26264 - DNA, 19 bp, Artificial Sequence
  Synthetic
ataaaattggcgggctctg

SEQ ID NO: 26265 - DNA, 22 bp, Artificial Sequence
  Synthetic
tcctagcctacttaatcgaatt

SEQ ID NO: 26266 - DNA, 25 bp, Artificial Sequence
  Synthetic
gtcaaaagactcattatatggatct

SEQ ID NO: 26267 - DNA, 21 bp, Artificial Sequence
  Synthetic
tgtaatcctcatcctgttgag

SEQ ID NO: 26268 - DNA, 23 bp, Artificial Sequence
  Synthetic
gcagccaatatggtctattaaat

SEQ ID NO: 26269 - DNA, 19 bp, Artificial Sequence
  Synthetic
ccgtaacataccggtttga

SEQ ID NO: 26270 - DNA, 18 bp, Artificial Sequence
  Synthetic
tttggcgcctttttagca

SEQ ID NO: 26271 - DNA, 22 bp, Artificial Sequence
  Synthetic
aggcagtactaattcttcaaga

SEQ ID NO: 26272 - DNA, 24 bp, Artificial Sequence
  Synthetic
ctacttgtaccttctaaactatca

SEQ ID NO: 26273 - DNA, 20 bp, Artificial Sequence
  Synthetic
agagcttattttcacagcct

SEQ ID NO: 26274 - DNA, 18 bp, Artificial Sequence
  Synthetic
cagttcctgcagtgcatc

SEQ ID NO: 26275 - DNA, 20 bp, Artificial Sequence
  Synthetic
tgtctcaggtgatgttgtgg

SEQ ID NO: 26276 - DNA, 21 bp, Artificial Sequence
  Synthetic
cgatatctccagcatttaagc

SEQ ID NO: 26277 - DNA, 18 bp, Artificial Sequence
  Synthetic
gaatgactgcagagccag

SEQ ID NO: 26278 - DNA, 18 bp, Artificial Sequence
  Synthetic
tgctaaacgtttcggtgg

SEQ ID NO: 26279 - DNA, 18 bp, Artificial Sequence
  Synthetic
atctctgaagcgggtgac

SEQ ID NO: 26280 - DNA, 19 bp, Artificial Sequence
  Synthetic
cgagtttgcattgttccac

SEQ ID NO: 26281 - DNA, 21 bp, Artificial Sequence
  Synthetic
cagatacagtttaccagttgg

SEQ ID NO: 26282 - DNA, 18 bp, Artificial Sequence
  Synthetic
gcgattcggatctggtag

SEQ ID NO: 26283 - DNA, 20 bp, Artificial Sequence
  Synthetic
acaaggctttgctatatccc

SEQ ID NO: 26284 - DNA, 18 bp, Artificial Sequence
  Synthetic
ttgttagtcccctgagca

SEQ ID NO: 26285 - DNA, 20 bp, Artificial Sequence
  Synthetic
cgggcatagagtgggttgat

SEQ ID NO: 26286 - DNA, 18 bp, Artificial Sequence
  Synthetic
tttggggatacgttggcg

SEQ ID NO: 26287 - DNA, 20 bp, Artificial Sequence
  Synthetic
tccctgttgcatagttgacc

SEQ ID NO: 26288 - DNA, 18 bp, Artificial Sequence
  Synthetic
aggtcaatatgcgtccgc

SEQ ID NO: 26289 - DNA, 17 bp, Artificial Sequence
  Synthetic
aacacaccccagtggcc

SEQ ID NO: 26290 - DNA, 18 bp, Artificial Sequence
  Synthetic
aatagggtcgctggtccg

SEQ ID NO: 26291 - DNA, 20 bp, Artificial Sequence
  Synthetic
cggatgtttcctgaagcagt

SEQ ID NO: 26292 - DNA, 20 bp, Artificial Sequence
  Synthetic
gtagataaggccggaagcgg

SEQ ID NO: 26293 - DNA, 19 bp, Artificial Sequence
  Synthetic
ctgcctcgtagatgccaag

SEQ ID NO: 26294 - DNA, 18 bp, Artificial Sequence
  Synthetic
tagcacagcagcacacac

SEQ ID NO: 26295 - DNA, 17 bp, Artificial Sequence
  Synthetic
tgtcgccacaagcagtg

SEQ ID NO: 26296 - DNA, 16 bp, Artificial Sequence
  Synthetic
gtgcccgctccgtgat

SEQ ID NO: 26297 - DNA, 18 bp, Artificial Sequence
  Synthetic
ctgctttggctacaccgc

SEQ ID NO: 26298 - DNA, 18 bp, Artificial Sequence
  Synthetic
acctgaacaacccccgtc

SEQ ID NO: 26299 - DNA, 20 bp, Artificial Sequence
  Synthetic
cccctatagtaagcaacggc

SEQ ID NO: 26300 - DNA, 18 bp, Artificial Sequence
  Synthetic
cgccactggacacgtatc

SEQ ID NO: 26301 - DNA, 18 bp, Artificial Sequence
  Synthetic
tgaacattccgccgatgg

SEQ ID NO: 26302 - DNA, 18 bp, Artificial Sequence
  Synthetic
ccgagaccacgaaagtcg

SEQ ID NO: 26303 - DNA, 18 bp, Artificial Sequence
  Synthetic
atttccacgggaggcgaa

SEQ ID NO: 26304 - DNA, 20 bp, Artificial Sequence
  Synthetic
cgcatcgatccgttcttgac

SEQ ID NO: 26305 - DNA, 18 bp, Artificial Sequence
  Synthetic
tgggttcaggggcgaatc

SEQ ID NO: 26306 - DNA, 16 bp, Artificial Sequence
  Synthetic
gtgccgtggaaaccgc

SEQ ID NO: 26307 - DNA, 20 bp, Artificial Sequence
  Synthetic
ggcaggatttacgcagaaga

SEQ ID NO: 26308 - DNA, 20 bp, Artificial Sequence
  Synthetic
ccacgtacaacctctcggta

SEQ ID NO: 26309 - DNA, 19 bp, Artificial Sequence
  Synthetic
gagtacctggtcattgccg

SEQ ID NO: 26310 - DNA, 17 bp, Artificial Sequence
  Synthetic
tgatccacgtccgcctc

SEQ ID NO: 26311 - DNA, 20 bp, Artificial Sequence
  Synthetic
taagcacctcataacgatgt

SEQ ID NO: 26312 - DNA, 21 bp, Artificial Sequence
  Synthetic
acttcttcaaccatttccatt

SEQ ID NO: 26313 - DNA, 21 bp, Artificial Sequence
  Synthetic
cacatcctgtaacatcagaaa

SEQ ID NO: 26314 - DNA, 19 bp, Artificial Sequence
  Synthetic
tattgttgtgttcagtgcc

SEQ ID NO: 26315 - DNA, 18 bp, Artificial Sequence
  Synthetic
tactgatccctcctggtg

SEQ ID NO: 26316 - DNA, 18 bp, Artificial Sequence
  Synthetic
atctcccctgtggcattt

SEQ ID NO: 26317 - DNA, 22 bp, Artificial Sequence
  Synthetic
caaatgtcctacaaagggattt

SEQ ID NO: 26318 - DNA, 18 bp, Artificial Sequence
  Synthetic
gtgggccatagcttcaag

SEQ ID NO: 26319 - DNA, 18 bp, Artificial Sequence
  Synthetic
cacagtgacattccgctc

SEQ ID NO: 26320 - DNA, 18 bp, Artificial Sequence
  Synthetic
atgtttcacgctgctgag

SEQ ID NO: 26321 - DNA, 20 bp, Artificial Sequence
  Synthetic
tctggtacaatgctctttgt

SEQ ID NO: 26322 - DNA, 22 bp, Artificial Sequence
  Synthetic
tgtatttattgctcccaaagga

SEQ ID NO: 26323 - DNA, 18 bp, Artificial Sequence
  Synthetic
ctgctgcataccctgatc

SEQ ID NO: 26324 - DNA, 21 bp, Artificial Sequence
  Synthetic
tgtgtgttatgatgtctctgg

SEQ ID NO: 26325 - DNA, 18 bp, Artificial Sequence
  Synthetic
actatctcctgtgctccg

SEQ ID NO: 26326 - DNA, 22 bp, Artificial Sequence
  Synthetic
tgtgctataccaaaatgaacaa

SEQ ID NO: 26327 - DNA, 20 bp, Artificial Sequence
  Synthetic
ttgagttgttcagcatatgc

SEQ ID NO: 26328 - DNA, 20 bp, Artificial Sequence
  Synthetic
ttcactttcctcattcctga

SEQ ID NO: 26329 - DNA, 18 bp, Artificial Sequence
  Synthetic
tttttccgggtggctagt

SEQ ID NO: 26330 - DNA, 18 bp, Artificial Sequence
  Synthetic
aaggacacattggcacat

SEQ ID NO: 26331 - DNA, 25 bp, Artificial Sequence
  Synthetic
ctactataaattgactttgtggctt

SEQ ID NO: 26332 - DNA, 24 bp, Artificial Sequence
  Synthetic
tgtctatgttgacagatattgtga

SEQ ID NO: 26333 - DNA, 21 bp, Artificial Sequence
  Synthetic
atgaatatgatggctgcaatt

SEQ ID NO: 26334 - DNA, 21 bp, Artificial Sequence
  Synthetic
tccaggttttttgtttggtat

SEQ ID NO: 26335 - DNA, 20 bp, Artificial Sequence
  Synthetic
tgtgataggtactcggatgt

SEQ ID NO: 26336 - DNA, 18 bp, Artificial Sequence
  Synthetic
gcactgcatgttgtttga

SEQ ID NO: 26337 - DNA, 22 bp, Artificial Sequence
  Synthetic
tcacaataggtaacaactgttt

SEQ ID NO: 26338 - DNA, 20 bp, Artificial Sequence
  Synthetic
actgttcattgtgtcacaaa

SEQ ID NO: 26339 - DNA, 22 bp, Artificial Sequence
  Synthetic
aaatccaatgatagatgggttg

SEQ ID NO: 26340 - DNA, 20 bp, Artificial Sequence
  Synthetic
tcttcattgtccctcagttt

SEQ ID NO: 26341 - DNA, 22 bp, Artificial Sequence
  Synthetic
cagctatcattttctctgctaa

SEQ ID NO: 26342 - DNA, 23 bp, Artificial Sequence
  Synthetic
ttctctgctttataaaagggtaa

SEQ ID NO: 26343 - DNA, 24 bp, Artificial Sequence
  Synthetic
ggctagtatcaaagtgataatttg

SEQ ID NO: 26344 - DNA, 18 bp, Artificial Sequence
  Synthetic
gtcgtcctggcaattccg

SEQ ID NO: 26345 - DNA, 20 bp, Artificial Sequence
  Synthetic
tggggataggctgacgtcta

SEQ ID NO: 26346 - DNA, 20 bp, Artificial Sequence
  Synthetic
agaaagagcaaccaggaagg

SEQ ID NO: 26347 - DNA, 18 bp, Artificial Sequence
  Synthetic
tgcgttgtggggagtttg

SEQ ID NO: 26348 - DNA, 20 bp, Artificial Sequence
  Synthetic
ccaccatggagaaatacgct

SEQ ID NO: 26349 - DNA, 19 bp, Artificial Sequence
  Synthetic
gtcttggagggtagtgcca

SEQ ID NO: 26350 - DNA, 19 bp, Artificial Sequence
  Synthetic
gaagcaatcagtggggcag

SEQ ID NO: 26351 - DNA, 20 bp, Artificial Sequence
  Synthetic
gcagggtcgtgaaagaacac

SEQ ID NO: 26352 - DNA, 18 bp, Artificial Sequence
  Synthetic
gaggccacatcccgtaga

SEQ ID NO: 26353 - DNA, 18 bp, Artificial Sequence
  Synthetic
cggctatcttccgcgcta

SEQ ID NO: 26354 - DNA, 20 bp, Artificial Sequence
  Synthetic
aagccgttgatgatgtcacc

SEQ ID NO: 26355 - DNA, 20 bp, Artificial Sequence
  Synthetic
cacaaggtcttggtccacat

SEQ ID NO: 26356 - DNA, 19 bp, Artificial Sequence
  Synthetic
ggtggagaggagttgtccg

SEQ ID NO: 26357 - DNA, 18 bp, Artificial Sequence
  Synthetic
atgtggcatccgtggagt

SEQ ID NO: 26358 - DNA, 19 bp, Artificial Sequence
  Synthetic
gacagacacgtcaagaccg

SEQ ID NO: 26359 - DNA, 19 bp, Artificial Sequence
  Synthetic
taactgtagtctcggcggg

SEQ ID NO: 26360 - DNA, 17 bp, Artificial Sequence
  Synthetic
ggtgctcgtgacgacct

SEQ ID NO: 26361 - DNA, 20 bp, Artificial Sequence
  Synthetic
agacctcgagtttctgccag

SEQ ID NO: 26362 - DNA, 18 bp, Artificial Sequence
  Synthetic
cacgaggaccttccccag

SEQ ID NO: 26363 - DNA, 17 bp, Artificial Sequence
  Synthetic
tgcagtcgcctcaggag

SEQ ID NO: 26364 - DNA, 19 bp, Artificial Sequence
  Synthetic
caggaaggggagtacaggg

SEQ ID NO: 26365 - DNA, 20 bp, Artificial Sequence
  Synthetic
agggatcagtgagcatggac

SEQ ID NO: 26366 - DNA, 19 bp, Artificial Sequence
  Synthetic
gcgaatctccgagacttcc

SEQ ID NO: 26367 - DNA, 20 bp, Artificial Sequence
  Synthetic
ggggcatggaagaataggac

SEQ ID NO: 26368 - DNA, 18 bp, Artificial Sequence
  Synthetic
ttttgacgccgctgcttt

SEQ ID NO: 26369 - DNA, 18 bp, Artificial Sequence
  Synthetic
aggagcttcccatcacgg

SEQ ID NO: 26370 - DNA, 20 bp, Artificial Sequence
  Synthetic
cagctagttgtcagtacgcc

SEQ ID NO: 26371 - DNA, 20 bp, Artificial Sequence
  Synthetic
tgtgggggcaaacatgatta

SEQ ID NO: 26372 - DNA, 18 bp, Artificial Sequence
  Synthetic
tggacagaagcctagcgc

SEQ ID NO: 26373 - DNA, 22 bp, Artificial Sequence
  Synthetic
catgaaacagacttctaagtgc

SEQ ID NO: 26374 - DNA, 21 bp, Artificial Sequence
  Synthetic
tagtatgtgtgaacttccctc

SEQ ID NO: 26375 - DNA, 20 bp, Artificial Sequence
  Synthetic
ctactttctctggtgccata

SEQ ID NO: 26376 - DNA, 23 bp, Artificial Sequence
  Synthetic
cccttcattatgtattcagtagc

SEQ ID NO: 26377 - DNA, 19 bp, Artificial Sequence
  Synthetic
gtccgtaagagcatgtctc

SEQ ID NO: 26378 - DNA, 18 bp, Artificial Sequence
  Synthetic
aaggttctgcacaccttc

SEQ ID NO: 26379 - DNA, 20 bp, Artificial Sequence
  Synthetic
tcacactgaaattcgctttc

SEQ ID NO: 26380 - DNA, 18 bp, Artificial Sequence
  Synthetic
gttctcgccattttccgt

SEQ ID NO: 26381 - DNA, 18 bp, Artificial Sequence
  Synthetic
gcacaaggaagttgcaaa

SEQ ID NO: 26382 - DNA, 20 bp, Artificial Sequence
  Synthetic
cttgtttgtcaggttgtgtt

SEQ ID NO: 26383 - DNA, 18 bp, Artificial Sequence
  Synthetic
cactgtcctccacatcct

SEQ ID NO: 26384 - DNA, 20 bp, Artificial Sequence
  Synthetic
ttgggccttatcaaacagcc

SEQ ID NO: 26385 - DNA, 21 bp, Artificial Sequence
  Synthetic
gcatttatgttggaggtcact

SEQ ID NO: 26386 - DNA, 23 bp, Artificial Sequence
  Synthetic
ccaatgttctatttggtcctcta

SEQ ID NO: 26387 - DNA, 20 bp, Artificial Sequence
  Synthetic
ctactgtttgtccacgtctt

SEQ ID NO: 26388 - DNA, 19 bp, Artificial Sequence
  Synthetic
gaaaaaatgatgctgctgc

SEQ ID NO: 26389 - DNA, 18 bp, Artificial Sequence
  Synthetic
tgtccataaaggcgggat

SEQ ID NO: 26390 - DNA, 25 bp, Artificial Sequence
  Synthetic
ataagtataactaggatgcaggtaa

SEQ ID NO: 26391 - DNA, 18 bp, Artificial Sequence
  Synthetic
acatttgttcccgcctta

SEQ ID NO: 26392 - DNA, 20 bp, Artificial Sequence
  Synthetic
gggtggtatctacaactgtt

SEQ ID NO: 26393 - DNA, 18 bp, Artificial Sequence
  Synthetic
ttgacatgcaatggcctg

SEQ ID NO: 26394 - DNA, 16 bp, Artificial Sequence
  Synthetic
gagcgccggacaaagg

SEQ ID NO: 26395 - DNA, 16 bp, Artificial Sequence
  Synthetic
agggctagcgctacgg

SEQ ID NO: 26396 - DNA, 20 bp, Artificial Sequence
  Synthetic
aacatagggaggggggattt

SEQ ID NO: 26397 - DNA, 19 bp, Artificial Sequence
  Synthetic
tgctggtgatggagggaag

SEQ ID NO: 26398 - DNA, 18 bp, Artificial Sequence
  Synthetic
gaggcgttctacgaaggc

SEQ ID NO: 26399 - DNA, 18 bp, Artificial Sequence
  Synthetic
tgacatagggggcatggc

SEQ ID NO: 26400 - DNA, 19 bp, Artificial Sequence
  Synthetic
ggaactggctgatttcggg

SEQ ID NO: 26401 - DNA, 18 bp, Artificial Sequence
  Synthetic
aggctggacaagtcaggg

SEQ ID NO: 26402 - DNA, 20 bp, Artificial Sequence
  Synthetic
tgccaggagaatgtcatcca

SEQ ID NO: 26403 - DNA, 20 bp, Artificial Sequence
  Synthetic
cgcagctgcactaatgattg

SEQ ID NO: 26404 - DNA, 20 bp, Artificial Sequence
  Synthetic
tggtttggcagagtagtcca

SEQ ID NO: 26405 - DNA, 19 bp, Artificial Sequence
  Synthetic
tgcaggacaggggtgatta

SEQ ID NO: 26406 - DNA, 22 bp, Artificial Sequence
  Synthetic
atagggttttaagaatgccatt

SEQ ID NO: 26407 - DNA, 16 bp, Artificial Sequence
  Synthetic
tccgacgggtcttggg

SEQ ID NO: 26408 - DNA, 18 bp, Artificial Sequence
  Synthetic
attagggcagggtggctg

SEQ ID NO: 26409 - DNA, 24 bp, Artificial Sequence
  Synthetic
aatattgaggtgtgaaacttcttg

SEQ ID NO: 26410 - DNA, 16 bp, Artificial Sequence
  Synthetic
tcctgccagccactcc

SEQ ID NO: 26411 - DNA, 18 bp, Artificial Sequence
  Synthetic
ttggaaggcgaggtggag

SEQ ID NO: 26412 - DNA, 16 bp, Artificial Sequence
  Synthetic
tccaggggggaaagcg

SEQ ID NO: 26413 - DNA, 20 bp, Artificial Sequence
  Synthetic
tccaaacacgtagactgggt

SEQ ID NO: 26414 - DNA, 20 bp, Artificial Sequence
  Synthetic
gaggaaggagggtggaatgt

SEQ ID NO: 26415 - DNA, 24 bp, Artificial Sequence
  Synthetic
gagatgcaaattatgaaaggaaga

SEQ ID NO: 26416 - DNA, 19 bp, Artificial Sequence
  Synthetic
acggcttgacaaacatggg

SEQ ID NO: 26417 - DNA, 19 bp, Artificial Sequence
  Synthetic
cggacgtagttcaggaggc

SEQ ID NO: 26418 - DNA, 20 bp, Artificial Sequence
  Synthetic
ttcattgccatcatccattt

SEQ ID NO: 26419 - DNA, 20 bp, Artificial Sequence
  Synthetic
ggcgtattttgacttggttt

SEQ ID NO: 26420 - DNA, 18 bp, Artificial Sequence
  Synthetic
ttgttccaccagcaactg

SEQ ID NO: 26421 - DNA, 19 bp, Artificial Sequence
  Synthetic
ctgcctaagaatgtccacc

SEQ ID NO: 26422 - DNA, 20 bp, Artificial Sequence
  Synthetic
attgactgttcgtctcttcc

SEQ ID NO: 26423 - DNA, 20 bp, Artificial Sequence
  Synthetic
cttggagtcatgtctggtaa

SEQ ID NO: 26424 - DNA, 19 bp, Artificial Sequence
  Synthetic
tcagggccattaatctccc

SEQ ID NO: 26425 - DNA, 19 bp, Artificial Sequence
  Synthetic
tctactttgctttggtggg

SEQ ID NO: 26426 - DNA, 19 bp, Artificial Sequence
  Synthetic
tgatgcttaatgctggtcc

SEQ ID NO: 26427 - DNA, 19 bp, Artificial Sequence
  Synthetic
tcacactgaagttcgcttt

SEQ ID NO: 26428 - DNA, 21 bp, Artificial Sequence
  Synthetic
tcccattctcattactgcttc

SEQ ID NO: 26429 - DNA, 20 bp, Artificial Sequence
  Synthetic
ccactttcccttttctgagt

SEQ ID NO: 26430 - DNA, 18 bp, Artificial Sequence
  Synthetic
tatggtgttggccaatgc

SEQ ID NO: 26431 - DNA, 21 bp, Artificial Sequence
  Synthetic
cgatagcccttctttttaact

SEQ ID NO: 26432 - DNA, 18 bp, Artificial Sequence
  Synthetic
catcgccaggaacattcg

SEQ ID NO: 26433 - DNA, 21 bp, Artificial Sequence
  Synthetic
gaagaggccttattttctcaa

SEQ ID NO: 26434 - DNA, 20 bp, Artificial Sequence
  Synthetic
aggtcctgtagaatctgtcc

SEQ ID NO: 26435 - DNA, 20 bp, Artificial Sequence
  Synthetic
ctcccctatggcacctatat

SEQ ID NO: 26436 - DNA, 18 bp, Artificial Sequence
  Synthetic
gaatcgtgtgcgcgaaag

SEQ ID NO: 26437 - DNA, 16 bp, Artificial Sequence
  Synthetic
tgggctggggtggttt

SEQ ID NO: 26438 - DNA, 16 bp, Artificial Sequence
  Synthetic
gttcaccgcgtcgtgc

SEQ ID NO: 26439 - DNA, 20 bp, Artificial Sequence
  Synthetic
gacggattcctgaggctaca

SEQ ID NO: 26440 - DNA, 19 bp, Artificial Sequence
  Synthetic
ggtcggaccatccacccat

SEQ ID NO: 26441 - DNA, 20 bp, Artificial Sequence
  Synthetic
gacgcgttaatcgaactttc

SEQ ID NO: 26442 - DNA, 19 bp, Artificial Sequence
  Synthetic
cggccgctgaaaaaagagt

SEQ ID NO: 26443 - DNA, 18 bp, Artificial Sequence
  Synthetic
ggtcggtccaggtcaacg

SEQ ID NO: 26444 - DNA, 20 bp, Artificial Sequence
  Synthetic
cgttatagcgccgtctttcg

SEQ ID NO: 26445 - DNA, 18 bp, Artificial Sequence
  Synthetic
ccaggctgtgggtctcgt

SEQ ID NO: 26446 - DNA, 17 bp, Artificial Sequence
  Synthetic
tacgcggtgccgttcac

SEQ ID NO: 26447 - DNA, 18 bp, Artificial Sequence
  Synthetic
cggatccgtcagccagta

SEQ ID NO: 26448 - DNA, 18 bp, Artificial Sequence
  Synthetic
tcttcctcagagacggcc

SEQ ID NO: 26449 - DNA, 17 bp, Artificial Sequence
  Synthetic
catgacgcgttcgggac

SEQ ID NO: 26450 - DNA, 20 bp, Artificial Sequence
  Synthetic
tggagcctcggtttggatac

SEQ ID NO: 26451 - DNA, 18 bp, Artificial Sequence
  Synthetic
tctcggacgagggctatg

SEQ ID NO: 26452 - DNA, 16 bp, Artificial Sequence
  Synthetic
gcagcggctcatcagg

SEQ ID NO: 26453 - DNA, 19 bp, Artificial Sequence
  Synthetic
atacgtggtgtgcacgttg

SEQ ID NO: 26454 - DNA, 15 bp, Artificial Sequence
  Synthetic
tacgcggcgacagct

SEQ ID NO: 26455 - DNA, 17 bp, Artificial Sequence
  Synthetic
tcgatgggtccgcttca

SEQ ID NO: 26456 - DNA, 19 bp, Artificial Sequence
  Synthetic
agtacgactcgtaggccgt

SEQ ID NO: 26457 - DNA, 16 bp, Artificial Sequence
  Synthetic
aatgcgggcaggcgtg

SEQ ID NO: 26458 - DNA, 17 bp, Artificial Sequence
  Synthetic
gacagttgagcgcgtcg

SEQ ID NO: 26459 - DNA, 19 bp, Artificial Sequence
  Synthetic
ggcggtgtttccagcattt

SEQ ID NO: 26460 - DNA, 20 bp, Artificial Sequence
  Synthetic
tgtgctagaccgtaccgaat

SEQ ID NO: 26461 - DNA, 17 bp, Artificial Sequence
  Synthetic
gccgatttttcgccgca

SEQ ID NO: 26462 - DNA, 19 bp, Artificial Sequence
  Synthetic
cggataatctcctgggcca

SEQ ID NO: 26463 - DNA, 18 bp, Artificial Sequence
  Synthetic
cacgctgatgtcctcggg

SEQ ID NO: 26464 - DNA, 19 bp, Artificial Sequence
  Synthetic
cgacgccatcaccgagaac

SEQ ID NO: 26465 - DNA, 19 bp, Artificial Sequence
  Synthetic
cgcccaccatgaaggattt

SEQ ID NO: 26466 - DNA, 18 bp, Artificial Sequence
  Synthetic
tccaccagctggactacg

SEQ ID NO: 26467 - DNA, 18 bp, Artificial Sequence
  Synthetic
ttcatgacgcccaagtgg

SEQ ID NO: 26468 - DNA, 18 bp, Artificial Sequence
  Synthetic
aatcgcccctcacgtcag

SEQ ID NO: 26469 - DNA, 18 bp, Artificial Sequence
  Synthetic
gcgtacgccgtgtaccac

SEQ ID NO: 26470 - DNA, 18 bp, Artificial Sequence
  Synthetic
cgaccgggatcacgacga

SEQ ID NO: 26471 - DNA, 18 bp, Artificial Sequence
  Synthetic
gtacctggtgtcgcggtc

SEQ ID NO: 26472 - DNA, 20 bp, Artificial Sequence
  Synthetic
ccgtgagtgttacttcccca

SEQ ID NO: 26473 - DNA, 16 bp, Artificial Sequence
  Synthetic
tctccatcgccagcgc

SEQ ID NO: 26474 - DNA, 20 bp, Artificial Sequence
  Synthetic
ctttgatttgagcgtgctgc

SEQ ID NO: 26475 - DNA, 17 bp, Artificial Sequence
  Synthetic
tacccaagctggccgag

SEQ ID NO: 26476 - DNA, 18 bp, Artificial Sequence
  Synthetic
cactggcagaccttggtc

SEQ ID NO: 26477 - DNA, 19 bp, Artificial Sequence
  Synthetic
ttacggtctggatctcgcg

SEQ ID NO: 26478 - DNA, 19 bp, Artificial Sequence
  Synthetic
tgtcgctgctgatctgacg

SEQ ID NO: 26479 - DNA, 16 bp, Artificial Sequence
  Synthetic
gcctggcttacgggga

SEQ ID NO: 26480 - DNA, 17 bp, Artificial Sequence
  Synthetic
cgcgccaacgagttgac

SEQ ID NO: 26481 - DNA, 17 bp, Artificial Sequence
  Synthetic
cgccacatccagcatgt

SEQ ID NO: 26482 - DNA, 20 bp, Artificial Sequence
  Synthetic
gcaactctagcattttggcg

SEQ ID NO: 26483 - DNA, 20 bp, Artificial Sequence
  Synthetic
gcgtttcctcttcctcttcg

SEQ ID NO: 26484 - DNA, 18 bp, Artificial Sequence
  Synthetic
cgttgatccgcccgtcta

SEQ ID NO: 26485 - DNA, 18 bp, Artificial Sequence
  Synthetic
acagctcgcgaagtgtct

SEQ ID NO: 26486 - DNA, 16 bp, Artificial Sequence
  Synthetic
tgcgctagcgtcacgg

SEQ ID NO: 26487 - DNA, 16 bp, Artificial Sequence
  Synthetic
acttcgcacgggcacg

SEQ ID NO: 26488 - DNA, 17 bp, Artificial Sequence
  Synthetic
ctttgcgactctgggcc

SEQ ID NO: 26489 - DNA, 18 bp, Artificial Sequence
  Synthetic
cggagtgctgacgaagtg

SEQ ID NO: 26490 - DNA, 20 bp, Artificial Sequence
  Synthetic
gaatgtcctgggctaagcag

SEQ ID NO: 26491 - DNA, 17 bp, Artificial Sequence
  Synthetic
ttgagaaacagcggcgg

SEQ ID NO: 26492 - DNA, 18 bp, Artificial Sequence
  Synthetic
gtcggacgcgattgatgg

SEQ ID NO: 26493 - DNA, 19 bp, Artificial Sequence
  Synthetic
gctccggcagtaacagtag

SEQ ID NO: 26494 - DNA, 20 bp, Artificial Sequence
  Synthetic
tacagcaaaggtacgacggt

SEQ ID NO: 26495 - DNA, 16 bp, Artificial Sequence
  Synthetic
agggggaggggcgaat

SEQ ID NO: 26496 - DNA, 17 bp, Artificial Sequence
  Synthetic
agcagcaacagtcgcag

SEQ ID NO: 26497 - DNA, 19 bp, Artificial Sequence
  Synthetic
ggattgcgaccccgaagtg

SEQ ID NO: 26498 - DNA, 18 bp, Artificial Sequence
  Synthetic
ctcatcgaccccgtgacg

SEQ ID NO: 26499 - DNA, 19 bp, Artificial Sequence
  Synthetic
catacgcaaggcatcgtgg

SEQ ID NO: 26500 - DNA, 19 bp, Artificial Sequence
  Synthetic
aacgcaggagattctggcc

SEQ ID NO: 26501 - DNA, 18 bp, Artificial Sequence
  Synthetic
aagccgtcccgaacatca

SEQ ID NO: 26502 - DNA, 20 bp, Artificial Sequence
  Synthetic
agggaaaaaaaggtggggcc

SEQ ID NO: 26503 - DNA, 16 bp, Artificial Sequence
  Synthetic
tctcacggcggcagtc

SEQ ID NO: 26504 - DNA, 17 bp, Artificial Sequence
  Synthetic
acgtctggcaccctacc

SEQ ID NO: 26505 - DNA, 19 bp, Artificial Sequence
  Synthetic
tctggatgaccgtatgggc

SEQ ID NO: 26506 - DNA, 16 bp, Artificial Sequence
  Synthetic
accgctgcccgtctac

SEQ ID NO: 26507 - DNA, 18 bp, Artificial Sequence
  Synthetic
acgtctacctggcctacc

SEQ ID NO: 26508 - DNA, 16 bp, Artificial Sequence
  Synthetic
cgggtgacggcgacat

SEQ ID NO: 26509 - DNA, 16 bp, Artificial Sequence
  Synthetic
acaggcggttgagcgc

SEQ ID NO: 26510 - DNA, 16 bp, Artificial Sequence
  Synthetic
gccttcccaagcggca

SEQ ID NO: 26511 - DNA, 16 bp, Artificial Sequence
  Synthetic
atcgtcccgtagcccg

SEQ ID NO: 26512 - DNA, 16 bp, Artificial Sequence
  Synthetic
agcctgcgactgctgc

SEQ ID NO: 26513 - DNA, 20 bp, Artificial Sequence
  Synthetic
gtcgtcgtggttgatgttga

SEQ ID NO: 26514 - DNA, 18 bp, Artificial Sequence
  Synthetic
ctgccacggtagcacctg

SEQ ID NO: 26515 - DNA, 17 bp, Artificial Sequence
  Synthetic
ataccgcccggagagtc

SEQ ID NO: 26516 - DNA, 20 bp, Artificial Sequence
  Synthetic
gcctgggaaactcaagtctt

SEQ ID NO: 26517 - DNA, 19 bp, Artificial Sequence
  Synthetic
atgtttgccggcttcgagg

SEQ ID NO: 26518 - DNA, 18 bp, Artificial Sequence
  Synthetic
tcccgggcgtctccatag

SEQ ID NO: 26519 - DNA, 19 bp, Artificial Sequence
  Synthetic
taaacatcaagggccgctg

SEQ ID NO: 26520 - DNA, 17 bp, Artificial Sequence
  Synthetic
actgccaggtgcttcgg

SEQ ID NO: 26521 - DNA, 16 bp, Artificial Sequence
  Synthetic
ggccgagcgcaaacac

SEQ ID NO: 26522 - DNA, 19 bp, Artificial Sequence
  Synthetic
acaatcagctgcaggtgca

SEQ ID NO: 26523 - DNA, 20 bp, Artificial Sequence
  Synthetic
acgcaccaagtcaaatccac

SEQ ID NO: 26524 - DNA, 17 bp, Artificial Sequence
  Synthetic
ggtgcgacgacccttct

SEQ ID NO: 26525 - DNA, 19 bp, Artificial Sequence
  Synthetic
tgataccgcggaatcaacg

SEQ ID NO: 26526 - DNA, 20 bp, Artificial Sequence
  Synthetic
tgatcgacatgaagaccgcc

SEQ ID NO: 26527 - DNA, 18 bp, Artificial Sequence
  Synthetic
gccctggatcgtacccat

SEQ ID NO: 26528 - DNA, 19 bp, Artificial Sequence
  Synthetic
acctcaagacgctgctagt

SEQ ID NO: 26529 - DNA, 18 bp, Artificial Sequence
  Synthetic
ggtaacgcgcatctcagc

SEQ ID NO: 26530 - DNA, 16 bp, Artificial Sequence
  Synthetic
tgtgccacccggtgct

SEQ ID NO: 26531 - DNA, 17 bp, Artificial Sequence
  Synthetic
tgctttccccgagctcc

SEQ ID NO: 26532 - DNA, 20 bp, Artificial Sequence
  Synthetic
gtaccagatgttcaccgtgg

SEQ ID NO: 26533 - DNA, 19 bp, Artificial Sequence
  Synthetic
agaggctcggcaattctcg

SEQ ID NO: 26534 - DNA, 17 bp, Artificial Sequence
  Synthetic
acgtcgaacgcgatcgg

SEQ ID NO: 26535 - DNA, 19 bp, Artificial Sequence
  Synthetic
gtgttcctgataggcccgg

SEQ ID NO: 26536 - DNA, 16 bp, Artificial Sequence
  Synthetic
acaccaaccaggcggc

SEQ ID NO: 26537 - DNA, 20 bp, Artificial Sequence
  Synthetic
tcaacgtggtctcttacgtg

SEQ ID NO: 26538 - DNA, 17 bp, Artificial Sequence
  Synthetic
agttttgggggcggagg

SEQ ID NO: 26539 - DNA, 17 bp, Artificial Sequence
  Synthetic
cttggatcacgtcggcg

SEQ ID NO: 26540 - DNA, 18 bp, Artificial Sequence
  Synthetic
ccacctcctgcatctcca

SEQ ID NO: 26541 - DNA, 19 bp, Artificial Sequence
  Synthetic
ttcaggtggatcctccgtc

SEQ ID NO: 26542 - DNA, 16 bp, Artificial Sequence
  Synthetic
acgtcgaaaccccggc

SEQ ID NO: 26543 - DNA, 18 bp, Artificial Sequence
  Synthetic
gcaagccgtggtaaccgt

SEQ ID NO: 26544 - DNA, 16 bp, Artificial Sequence
  Synthetic
agcgccgacaactccg

SEQ ID NO: 26545 - DNA, 18 bp, Artificial Sequence
  Synthetic
cgtagctcatttgcgccg

SEQ ID NO: 26546 - DNA, 16 bp, Artificial Sequence
  Synthetic
ttttccccgccggtgg

SEQ ID NO: 26547 - DNA, 17 bp, Artificial Sequence
  Synthetic
agccactaccgcagagc

SEQ ID NO: 26548 - DNA, 17 bp, Artificial Sequence
  Synthetic
tcagagacgcgttccgc

SEQ ID NO: 26549 - DNA, 17 bp, Artificial Sequence
  Synthetic
cagacgcagacaggtgc

SEQ ID NO: 26550 - DNA, 20 bp, Artificial Sequence
  Synthetic
ccgttgccgtagaagaagtt

SEQ ID NO: 26551 - DNA, 18 bp, Artificial Sequence
  Synthetic
tttctgggctactccgcc

SEQ ID NO: 26552 - DNA, 20 bp, Artificial Sequence
  Synthetic
gctggaggtccatacggatt

SEQ ID NO: 26553 - DNA, 18 bp, Artificial Sequence
  Synthetic
aagctgctgttcaccacg

SEQ ID NO: 26554 - DNA, 20 bp, Artificial Sequence
  Synthetic
acgctctttgacaccatcac

SEQ ID NO: 26555 - DNA, 16 bp, Artificial Sequence
  Synthetic
agaggtcctcgcaggc

SEQ ID NO: 26556 - DNA, 16 bp, Artificial Sequence
  Synthetic
ggtctgcgtgggcgaa

SEQ ID NO: 26557 - DNA, 20 bp, Artificial Sequence
  Synthetic
gtgtgatccatgagttcggc

SEQ ID NO: 26558 - DNA, 20 bp, Artificial Sequence
  Synthetic
ggcgattgtaggtaacgagc

SEQ ID NO: 26559 - DNA, 16 bp, Artificial Sequence
  Synthetic
tgcaccacctcggggt

SEQ ID NO: 26560 - DNA, 20 bp, Artificial Sequence
  Synthetic
gactcttggcgatggtcatg

SEQ ID NO: 26561 - DNA, 16 bp, Artificial Sequence
  Synthetic
ttgcctggacgcctgg

SEQ ID NO: 26562 - DNA, 20 bp, Artificial Sequence
  Synthetic
cctgctgtacaacaatccgg

SEQ ID NO: 26563 - DNA, 18 bp, Artificial Sequence
  Synthetic
ctctcatcgtgccgcaga

SEQ ID NO: 26564 - DNA, 19 bp, Artificial Sequence
  Synthetic
tgcttactgtgtgaagcgg

SEQ ID NO: 26565 - DNA, 16 bp, Artificial Sequence
  Synthetic
acgccacaggccgtag

SEQ ID NO: 26566 - DNA, 18 bp, Artificial Sequence
  Synthetic
aggtgacgcgacctcctg

SEQ ID NO: 26567 - DNA, 19 bp, Artificial Sequence
  Synthetic
gctacggctgctgatacga

SEQ ID NO: 26568 - DNA, 16 bp, Artificial Sequence
  Synthetic
cgctcggcagctcctt

SEQ ID NO: 26569 - DNA, 18 bp, Artificial Sequence
  Synthetic
ctacggaccgtctgtcga

SEQ ID NO: 26570 - DNA, 24 bp, Artificial Sequence
  Synthetic
ttgtctctctttatctttcttgtg

SEQ ID NO: 26571 - DNA, 21 bp, Artificial Sequence
  Synthetic
caagtcatgattcgtaactgc

SEQ ID NO: 26572 - DNA, 20 bp, Artificial Sequence
  Synthetic
cgcttcgtaattctgacgca

SEQ ID NO: 26573 - DNA, 19 bp, Artificial Sequence
  Synthetic
aagatgtgggccgagaact

SEQ ID NO: 26574 - DNA, 16 bp, Artificial Sequence
  Synthetic
aagccgccgttcaagc

SEQ ID NO: 26575 - DNA, 18 bp, Artificial Sequence
  Synthetic
tggtggacgagacgagac

SEQ ID NO: 26576 - DNA, 17 bp, Artificial Sequence
  Synthetic
aaacccaagccggtcgg

SEQ ID NO: 26577 - DNA, 16 bp, Artificial Sequence
  Synthetic
tacgctagcggggctg

SEQ ID NO: 26578 - DNA, 20 bp, Artificial Sequence
  Synthetic
taacgtgggtttcaggggaa

SEQ ID NO: 26579 - DNA, 17 bp, Artificial Sequence
  Synthetic
actgcagaccgtacggg

SEQ ID NO: 26580 - DNA, 16 bp, Artificial Sequence
  Synthetic
ttctgcaccgccgacg

SEQ ID NO: 26581 - DNA, 18 bp, Artificial Sequence
  Synthetic
acccagcactccatcgac

SEQ ID NO: 26582 - DNA, 18 bp, Artificial Sequence
  Synthetic
catacgccacagcatgcg

SEQ ID NO: 26583 - DNA, 15 bp, Artificial Sequence
  Synthetic
tgtgcactgccgcga

SEQ ID NO: 26584 - DNA, 18 bp, Artificial Sequence
  Synthetic
aggccgtggaaaaccacc

SEQ ID NO: 26585 - DNA, 18 bp, Artificial Sequence
  Synthetic
caggcatgggtctgtcga

SEQ ID NO: 26586 - DNA, 18 bp, Artificial Sequence
  Synthetic
gagactggcagggacacg

SEQ ID NO: 26587 - DNA, 18 bp, Artificial Sequence
  Synthetic
ctggccgtcctgttcctg

SEQ ID NO: 26588 - DNA, 16 bp, Artificial Sequence
  Synthetic
accgttgacgtgggcg

SEQ ID NO: 26589 - DNA, 18 bp, Artificial Sequence
  Synthetic
gcgacagacatccccctg

SEQ ID NO: 26590 - DNA, 20 bp, Artificial Sequence
  Synthetic
gttcagtgttggatcagact

SEQ ID NO: 26591 - DNA, 16 bp, Artificial Sequence
  Synthetic
ctcgcgggtttgggga

SEQ ID NO: 26592 - DNA, 16 bp, Artificial Sequence
  Synthetic
gaaggcaccgcgacag

SEQ ID NO: 26593 - DNA, 16 bp, Artificial Sequence
  Synthetic
accccagcaacggcct

SEQ ID NO: 26594 - DNA, 20 bp, Artificial Sequence
  Synthetic
gattgctgacgctggaaacc

SEQ ID NO: 26595 - DNA, 17 bp, Artificial Sequence
  Synthetic
cagagaacgcagcgcac

SEQ ID NO: 26596 - DNA, 18 bp, Artificial Sequence
  Synthetic
tcctcctggtgcctgtgg

SEQ ID NO: 26597 - DNA, 17 bp, Artificial Sequence
  Synthetic
gggccgcccaaacatct

SEQ ID NO: 26598 - DNA, 20 bp, Artificial Sequence
  Synthetic
cccttgagtttgatggtgcc

SEQ ID NO: 26599 - DNA, 17 bp, Artificial Sequence
  Synthetic
cgggactttgacagccg

SEQ ID NO: 26600 - DNA, 18 bp, Artificial Sequence
  Synthetic
tctcctttacggggctgg

SEQ ID NO: 26601 - DNA, 17 bp, Artificial Sequence
  Synthetic
gggcctgaagcgatgga

SEQ ID NO: 26602 - DNA, 17 bp, Artificial Sequence
  Synthetic
tacgatcctccggcgct

SEQ ID NO: 26603 - DNA, 17 bp, Artificial Sequence
  Synthetic
caggctggaacgcaacg

SEQ ID NO: 26604 - DNA, 19 bp, Artificial Sequence
  Synthetic
ccacagacgccgtttgcta

SEQ ID NO: 26605 - DNA, 19 bp, Artificial Sequence
  Synthetic
ttgagtgccagtacagcgc

SEQ ID NO: 26606 - DNA, 16 bp, Artificial Sequence
  Synthetic
gtgacgccggttgtcc

SEQ ID NO: 26607 - DNA, 19 bp, Artificial Sequence
  Synthetic
tttcctgtgcaccgtcatc

SEQ ID NO: 26608 - DNA, 19 bp, Artificial Sequence
  Synthetic
tggatgattttgcgcgaca

SEQ ID NO: 26609 - DNA, 19 bp, Artificial Sequence
  Synthetic
gaagatcgtcctctcgccg

SEQ ID NO: 26610 - DNA, 20 bp, Artificial Sequence
  Synthetic
ccgacaggtaagatgtggct

SEQ ID NO: 26611 - DNA, 16 bp, Artificial Sequence
  Synthetic
tcctccgggttcctgc

SEQ ID NO: 26612 - DNA, 19 bp, Artificial Sequence
  Synthetic
gcagcacacgcaactagtc

SEQ ID NO: 26613 - DNA, 25 bp, Artificial Sequence
  Synthetic
caatgaaatggaagtctgaatacat

SEQ ID NO: 26614 - DNA, 23 bp, Artificial Sequence
  Synthetic
tcggattttatcttgttagcttt

SEQ ID NO: 26615 - DNA, 19 bp, Artificial Sequence
  Synthetic
aaggctggagaagttaggt

SEQ ID NO: 26616 - DNA, 19 bp, Artificial Sequence
  Synthetic
tgctatcgatctgagctct

SEQ ID NO: 26617 - DNA, 18 bp, Artificial Sequence
  Synthetic
catccatggctgcacaag

SEQ ID NO: 26618 - DNA, 21 bp, Artificial Sequence
  Synthetic
cctacttcaagaacacagtac

SEQ ID NO: 26619 - DNA, 18 bp, Artificial Sequence
  Synthetic
aaggttctgcacaccttc

SEQ ID NO: 26620 - DNA, 20 bp, Artificial Sequence
  Synthetic
gaatcagcctcccttcattg

SEQ ID NO: 26621 - DNA, 20 bp, Artificial Sequence
  Synthetic
atgccatatcatcagatggg

SEQ ID NO: 26622 - DNA, 18 bp, Artificial Sequence
  Synthetic
gtgctgctgtttggaatt

SEQ ID NO: 26623 - DNA, 25 bp, Artificial Sequence
  Synthetic
ttcttatagcccaatatctacttct

SEQ ID NO: 26624 - DNA, 18 bp, Artificial Sequence
  Synthetic
gaggctcagagttcactc

SEQ ID NO: 26625 - DNA, 21 bp, Artificial Sequence
  Synthetic
tcgtaaagagacggaacataa

SEQ ID NO: 26626 - DNA, 18 bp, Artificial Sequence
  Synthetic
gttccctatcagcggcag

SEQ ID NO: 26627 - DNA, 19 bp, Artificial Sequence
  Synthetic
caggtgctcaaagtccatt

SEQ ID NO: 26628 - DNA, 20 bp, Artificial Sequence
  Synthetic
tcaccctatttaccaccttg

SEQ ID NO: 26629 - DNA, 20 bp, Artificial Sequence
  Synthetic
tttacttctccaccaccgca

SEQ ID NO: 26630 - DNA, 21 bp, Artificial Sequence
  Synthetic
tgcattcgacatctaaaagca

SEQ ID NO: 26631 - DNA, 20 bp, Artificial Sequence
  Synthetic
caaaacgtcgcatagtttga

SEQ ID NO: 26632 - DNA, 18 bp, Artificial Sequence
  Synthetic
tagcacaatgggacgaag

SEQ ID NO: 26633 - DNA, 20 bp, Artificial Sequence
  Synthetic
agcattcgaagccaagtgat

SEQ ID NO: 26634 - DNA, 19 bp, Artificial Sequence
  Synthetic
cactaacccggaacatgaa

SEQ ID NO: 26635 - DNA, 19 bp, Artificial Sequence
  Synthetic
tttccatgcctttccttct

SEQ ID NO: 26636 - DNA, 19 bp, Artificial Sequence
  Synthetic
cgcgtccgacaaatgatga

SEQ ID NO: 26637 - DNA, 20 bp, Artificial Sequence
  Synthetic
ggacaaaaccctcgtccatt

SEQ ID NO: 26638 - DNA, 19 bp, Artificial Sequence
  Synthetic
agttattgtggcgcagatg

SEQ ID NO: 26639 - DNA, 18 bp, Artificial Sequence
  Synthetic
aacgatcggtacccttcc

SEQ ID NO: 26640 - DNA, 22 bp, Artificial Sequence
  Synthetic
tgatcaaatggaagaaagccta

SEQ ID NO: 26641 - DNA, 20 bp, Artificial Sequence
  Synthetic
cggtgaagtagttaccagcg

SEQ ID NO: 26642 - DNA, 19 bp, Artificial Sequence
  Synthetic
gcgccttcacatgagctat

SEQ ID NO: 26643 - DNA, 19 bp, Artificial Sequence
  Synthetic
ttaagaaaggctgcacaag

SEQ ID NO: 26644 - DNA, 24 bp, Artificial Sequence
  Synthetic
gagttgtatatagtaggacacaat

SEQ ID NO: 26645 - DNA, 20 bp, Artificial Sequence
  Synthetic
tcttgtcaaacatgccttac

SEQ ID NO: 26646 - DNA, 18 bp, Artificial Sequence
  Synthetic
ctgctttctggtgcgagg

SEQ ID NO: 26647 - DNA, 20 bp, Artificial Sequence
  Synthetic
gcggacatgcttttctctct

SEQ ID NO: 26648 - DNA, 16 bp, Artificial Sequence
  Synthetic
tcccctgccagagcgt

SEQ ID NO: 26649 - DNA, 21 bp, Artificial Sequence
  Synthetic
ggaacgaaattggactaaacg

SEQ ID NO: 26650 - DNA, 19 bp, Artificial Sequence
  Synthetic
gcaacgcctcatttcccat

SEQ ID NO: 26651 - DNA, 18 bp, Artificial Sequence
  Synthetic
gcctgcgaattcaacaag

SEQ ID NO: 26652 - DNA, 19 bp, Artificial Sequence
  Synthetic
acacagaaactgtacagcc

SEQ ID NO: 26653 - DNA, 20 bp, Artificial Sequence
  Synthetic
cgtggcaactattgaacgct

SEQ ID NO: 26654 - DNA, 20 bp, Artificial Sequence
  Synthetic
aagactcctctccgtgtctg

SEQ ID NO: 26655 - DNA, 15 bp, Artificial Sequence
  Synthetic
aaatccgcggcgcag

SEQ ID NO: 26656 - DNA, 23 bp, Artificial Sequence
  Synthetic
cattgtctctactatgttgaact

SEQ ID NO: 26657 - DNA, 16 bp, Artificial Sequence
  Synthetic
gccggtcgctgcatct

SEQ ID NO: 26658 - DNA, 18 bp, Artificial Sequence
  Synthetic
ctgttatagcgtgccacg

SEQ ID NO: 26659 - DNA, 24 bp, Artificial Sequence
  Synthetic
cttgcaaatttttaaaagcctgag

SEQ ID NO: 26660 - DNA, 20 bp, Artificial Sequence
  Synthetic
gactgtccgtaacatcatcc

SEQ ID NO: 26661 - DNA, 20 bp, Artificial Sequence
  Synthetic
agcaaatgggtttcctgacc

SEQ ID NO: 26662 - DNA, 18 bp, Artificial Sequence
  Synthetic
atggtttggccttcgttg

SEQ ID NO: 26663 - DNA, 18 bp, Artificial Sequence
  Synthetic
aaaatcaaccccgcaacc

SEQ ID NO: 26664 - DNA, 18 bp, Artificial Sequence
  Synthetic
gtccatgaccgaactcct

SEQ ID NO: 26665 - DNA, 18 bp, Artificial Sequence
  Synthetic
cgtctacagtggtgcgac

SEQ ID NO: 26666 - DNA, 19 bp, Artificial Sequence
  Synthetic
tcgcgcacccagtatacat

SEQ ID NO: 26667 - DNA, 20 bp, Artificial Sequence
  Synthetic
ccgggagaaaaaaccactgt

SEQ ID NO: 26668 - DNA, 24 bp, Artificial Sequence
  Synthetic
cttttttatcggacgtacttttac

SEQ ID NO: 26669 - DNA, 20 bp, Artificial Sequence
  Synthetic
ttgtacaacgcgacgtactg

SEQ ID NO: 26670 - DNA, 20 bp, Artificial Sequence
  Synthetic
ggttctgttgtgtgcgttac

SEQ ID NO: 26671 - DNA, 18 bp, Artificial Sequence
  Synthetic
actccgaggcatcctgac

SEQ ID NO: 26672 - DNA, 20 bp, Artificial Sequence
  Synthetic
ttgtgaagcattaggagcgc

SEQ ID NO: 26673 - DNA, 20 bp, Artificial Sequence
  Synthetic
gcttaaacacaagatgcgtg

SEQ ID NO: 26674 - DNA, 19 bp, Artificial Sequence
  Synthetic
cctactgcgctaagaggaa

SEQ ID NO: 26675 - DNA, 22 bp, Artificial Sequence
  Synthetic
cgatattgacataggtatccac

SEQ ID NO: 26676 - DNA, 19 bp, Artificial Sequence
  Synthetic
tgtgccatgggaaaaaagt

SEQ ID NO: 26677 - DNA, 20 bp, Artificial Sequence
  Synthetic
ttcatttggggttagcaaac

SEQ ID NO: 26678 - DNA, 19 bp, Artificial Sequence
  Synthetic
cacagctgtttggcctata

SEQ ID NO: 26679 - DNA, 18 bp, Artificial Sequence
  Synthetic
gtgtacgcccccagtttc

SEQ ID NO: 26680 - DNA, 20 bp, Artificial Sequence
  Synthetic
cctgaggactttgtagcata

SEQ ID NO: 26681 - DNA, 20 bp, Artificial Sequence
  Synthetic
ggccctaattgcgacttcaa

SEQ ID NO: 26682 - DNA, 22 bp, Artificial Sequence
  Synthetic
ggaataattctttctccggaaa

SEQ ID NO: 26683 - DNA, 18 bp, Artificial Sequence
  Synthetic
tcaggagctcatgggacg

SEQ ID NO: 26684 - DNA, 18 bp, Artificial Sequence
  Synthetic
aaatggaaaccaggcagg

SEQ ID NO: 26685 - DNA, 20 bp, Artificial Sequence
  Synthetic
tgctttgtcgctgtagatgt

SEQ ID NO: 26686 - DNA, 25 bp, Artificial Sequence
  Synthetic
gacctaaaccttcaaaaattttagg

SEQ ID NO: 26687 - DNA, 20 bp, Artificial Sequence
  Synthetic
cgctgttgtagttcgttgga

SEQ ID NO: 26688 - DNA, 18 bp, Artificial Sequence
  Synthetic
tgtccgttcgtcaaaacc

SEQ ID NO: 26689 - DNA, 18 bp, Artificial Sequence
  Synthetic
ggttcaaatttgcgcagg

SEQ ID NO: 26690 - DNA, 19 bp, Artificial Sequence
  Synthetic
ctgcctgactctcccaaga

SEQ ID NO: 26691 - DNA, 20 bp, Artificial Sequence
  Synthetic
gaatcgccactccatcatgg

SEQ ID NO: 26692 - DNA, 23 bp, Artificial Sequence
  Synthetic
agtatttattgaacagagcttct

SEQ ID NO: 26693 - DNA, 20 bp, Artificial Sequence
  Synthetic
cgaggcaaaagtacagtggt

SEQ ID NO: 26694 - DNA, 18 bp, Artificial Sequence
  Synthetic
cttcttcaggcggtacag

SEQ ID NO: 26695 - DNA, 18 bp, Artificial Sequence
  Synthetic
gaaggagaaactgcctcg

SEQ ID NO: 26696 - DNA, 19 bp, Artificial Sequence
  Synthetic
agggttacattatggccag

SEQ ID NO: 26697 - DNA, 23 bp, Artificial Sequence
  Synthetic
agcttttagtaatacctgaaaca

SEQ ID NO: 26698 - DNA, 18 bp, Artificial Sequence
  Synthetic
atcaaggtcactgactgc

SEQ ID NO: 26699 - DNA, 18 bp, Artificial Sequence
  Synthetic
aacaacagaaggaggacg

SEQ ID NO: 26700 - DNA, 18 bp, Artificial Sequence
  Synthetic
aataggtaccgagcccac

SEQ ID NO: 26701 - DNA, 18 bp, Artificial Sequence
  Synthetic
catactgggttctgctgc

SEQ ID NO: 26702 - DNA, 20 bp, Artificial Sequence
  Synthetic
tcttgtgttaagtgtgaggg

SEQ ID NO: 26703 - DNA, 20 bp, Artificial Sequence
  Synthetic
gacaaggctaaggaaccgtt

SEQ ID NO: 26704 - DNA, 21 bp, Artificial Sequence
  Synthetic
agttgttaagttccagtttgt

SEQ ID NO: 26705 - DNA, 23 bp, Artificial Sequence
  Synthetic
taacagtattggtagacactgat

SEQ ID NO: 26706 - DNA, 18 bp, Artificial Sequence
  Synthetic
tacaaagggggaaaggga

SEQ ID NO: 26707 - DNA, 23 bp, Artificial Sequence
  Synthetic
taattatgcatcatcgagcaatt

SEQ ID NO: 26708 - DNA, 18 bp, Artificial Sequence
  Synthetic
tacatggtcatgagcggt

SEQ ID NO: 26709 - DNA, 18 bp, Artificial Sequence
  Synthetic
cagacggtatcgctacag

SEQ ID NO: 26710 - DNA, 23 bp, Artificial Sequence
  Synthetic
ttgaacatttggaaaatcgctta

SEQ ID NO: 26711 - DNA, 21 bp, Artificial Sequence
  Synthetic
ttgtgcaagttgtatgttctg

SEQ ID NO: 26712 - DNA, 18 bp, Artificial Sequence
  Synthetic
cgtgttttgcgatgttcg

SEQ ID NO: 26713 - DNA, 19 bp, Artificial Sequence
  Synthetic
tctggtaaggcattatggc

SEQ ID NO: 26714 - DNA, 20 bp, Artificial Sequence
  Synthetic
acatctagcctcatctgcca

SEQ ID NO: 26715 - DNA, 19 bp, Artificial Sequence
  Synthetic
cacagcgtcttgggttgtt

SEQ ID NO: 26716 - DNA, 20 bp, Artificial Sequence
  Synthetic
atgggtgtgctcatagctca

SEQ ID NO: 26717 - DNA, 18 bp, Artificial Sequence
  Synthetic
tggtggggtgaaatcctg

SEQ ID NO: 26718 - DNA, 18 bp, Artificial Sequence
  Synthetic
ccattatagcccctgtgg

SEQ ID NO: 26719 - DNA, 23 bp, Artificial Sequence
  Synthetic
tcaaatctaacataggtgaacaa

SEQ ID NO: 26720 - DNA, 22 bp, Artificial Sequence
  Synthetic
tgttaaggaaatgttttggctc

SEQ ID NO: 26721 - DNA, 21 bp, Artificial Sequence
  Synthetic
tgagctgtagtttctcaagtc

SEQ ID NO: 26722 - DNA, 18 bp, Artificial Sequence
  Synthetic
taatgtgtccgacttgcg

SEQ ID NO: 26723 - DNA, 20 bp, Artificial Sequence
  Synthetic
ctctgcccttatcttcaaga

SEQ ID NO: 26724 - DNA, 20 bp, Artificial Sequence
  Synthetic
catccctctttctcacagaa

SEQ ID NO: 26725 - DNA, 22 bp, Artificial Sequence
  Synthetic
ggtagtctggtatgaatcttct

SEQ ID NO: 26726 - DNA, 19 bp, Artificial Sequence
  Synthetic
cttggacaaaacagctgtt

SEQ ID NO: 26727 - DNA, 20 bp, Artificial Sequence
  Synthetic
atcacaccctatagctgaac

SEQ ID NO: 26728 - DNA, 21 bp, Artificial Sequence
  Synthetic
gcattatcccagttgactttc

SEQ ID NO: 26729 - DNA, 21 bp, Artificial Sequence
  Synthetic
agatcgacagtatgagaacaa

SEQ ID NO: 26730 - DNA, 23 bp, Artificial Sequence
  Synthetic
gcagcatacaatgtaattcttac

SEQ ID NO: 26731 - DNA, 23 bp, Artificial Sequence
  Synthetic
gttagaaatgtttgaatcgtcat

SEQ ID NO: 26732 - DNA, 22 bp, Artificial Sequence
  Synthetic
gaattttcagcttcatcttcga

SEQ ID NO: 26733 - DNA, 20 bp, Artificial Sequence
  Synthetic
gttgctgcttgatgacttac

SEQ ID NO: 26734 - DNA, 25 bp, Artificial Sequence
  Synthetic
gcattttcttttctgatattttccc

SEQ ID NO: 26735 - DNA, 18 bp, Artificial Sequence
  Synthetic
gtcgaaggaggaggagta

SEQ ID NO: 26736 - DNA, 19 bp, Artificial Sequence
  Synthetic
ttcggtctctcctcctcct

SEQ ID NO: 26737 - DNA, 22 bp, Artificial Sequence
  Synthetic
gtcagtgctatcaaatgcaata

SEQ ID NO: 26738 - DNA, 20 bp, Artificial Sequence
  Synthetic
ggattatacccagttgaccc

SEQ ID NO: 26739 - DNA, 24 bp, Artificial Sequence
  Synthetic
ctcttgtatctccactatctactg

SEQ ID NO: 26740 - DNA, 24 bp, Artificial Sequence
  Synthetic
acaaatacattcagatcagatgac

SEQ ID NO: 26741 - DNA, 18 bp, Artificial Sequence
  Synthetic
gcatcaaaggcgggattt

SEQ ID NO: 26742 - DNA, 24 bp, Artificial Sequence
  Synthetic
gataattcaatagcatcagcagta

SEQ ID NO: 26743 - DNA, 20 bp, Artificial Sequence
  Synthetic
gtagtacctataccaagcgg

SEQ ID NO: 26744 - DNA, 18 bp, Artificial Sequence
  Synthetic
tggtagagcatctcccat

SEQ ID NO: 26745 - DNA, 21 bp, Artificial Sequence
  Synthetic
tcaacaacccaaaaagacaaa

SEQ ID NO: 26746 - DNA, 23 bp, Artificial Sequence
  Synthetic
ggaaatttgaagaggatatgtcc

SEQ ID NO: 26747 - DNA, 16 bp, Artificial Sequence
  Synthetic
actgctgccgtgcgac

SEQ ID NO: 26748 - DNA, 21 bp, Artificial Sequence
  Synthetic
cttactgaacgacatcgaaat

SEQ ID NO: 26749 - DNA, 20 bp, Artificial Sequence
  Synthetic
actacattaacggtctccat

SEQ ID NO: 26750 - DNA, 16 bp, Artificial Sequence
  Synthetic
cgtcgcgcgaattcgg

SEQ ID NO: 26751 - DNA, 24 bp, Artificial Sequence
  Synthetic
gttcttgagtagtcatatgttctt

SEQ ID NO: 26752 - DNA, 19 bp, Artificial Sequence
  Synthetic
gtcttccttccgtaagtct

SEQ ID NO: 26753 - DNA, 20 bp, Artificial Sequence
  Synthetic
tgttggcattcattccattt

SEQ ID NO: 26754 - DNA, 21 bp, Artificial Sequence
  Synthetic
tcgctctaaattcttggagac

SEQ ID NO: 26755 - DNA, 19 bp, Artificial Sequence
  Synthetic
tttcttctatggcctctcc

SEQ ID NO: 26756 - DNA, 22 bp, Artificial Sequence
  Synthetic
gcaaaacacacaattaatttgc

SEQ ID NO: 26757 - DNA, 19 bp, Artificial Sequence
  Synthetic
tttctacttcacacagcgg

SEQ ID NO: 26758 - DNA, 22 bp, Artificial Sequence
  Synthetic
ggtcactatttggaaatgttgt

SEQ ID NO: 26759 - DNA, 19 bp, Artificial Sequence
  Synthetic
ccatgtcatacccactgtc

SEQ ID NO: 26760 - DNA, 18 bp, Artificial Sequence
  Synthetic
tggtttgaaacagccgtc

SEQ ID NO: 26761 - DNA, 18 bp, Artificial Sequence
  Synthetic
taccaagtaatgctgccc

SEQ ID NO: 26762 - DNA, 25 bp, Artificial Sequence
  Synthetic
gcatattgctatttaaaaatgctcg

SEQ ID NO: 26763 - DNA, 25 bp, Artificial Sequence
  Synthetic
cagtactgttttcttcataaagttc

SEQ ID NO: 26764 - DNA, 18 bp, Artificial Sequence
  Synthetic
ttctacagttttgccccg

SEQ ID NO: 26765 - DNA, 23 bp, Artificial Sequence
  Synthetic
actttaaacaattggattcacct

SEQ ID NO: 26766 - DNA, 23 bp, Artificial Sequence
  Synthetic
atgtacagttgtattacaccaat

SEQ ID NO: 26767 - DNA, 20 bp, Artificial Sequence
  Synthetic
catcattgctgtgtggtaac

SEQ ID NO: 26768 - DNA, 21 bp, Artificial Sequence
  Synthetic
tccccttcatatacagggtta

SEQ ID NO: 26769 - DNA, 19 bp, Artificial Sequence
  Synthetic
aaacagggcctgtaggtaa

SEQ ID NO: 26770 - DNA, 19 bp, Artificial Sequence
  Synthetic
cagttttgttagcccgttt

SEQ ID NO: 26771 - DNA, 20 bp, Artificial Sequence
  Synthetic
acatttgttccttccgtaga

SEQ ID NO: 26772 - DNA, 18 bp, Artificial Sequence
  Synthetic
atgttggtactgcgtgtg

SEQ ID NO: 26773 - DNA, 23 bp, Artificial Sequence
  Synthetic
aacagtaagagcaaaaaaatgtg

SEQ ID NO: 26774 - DNA, 16 bp, Artificial Sequence
  Synthetic
aggcctttcgcgaccc

SEQ ID NO: 26775 - DNA, 19 bp, Artificial Sequence
  Synthetic
tcttccacgaggttgcgac

SEQ ID NO: 26776 - DNA, 20 bp, Artificial Sequence
  Synthetic
cgaaagaagtgccaagagga

SEQ ID NO: 26777 - DNA, 20 bp, Artificial Sequence
  Synthetic
ccccaccatcaaatccacat

SEQ ID NO: 26778 - DNA, 20 bp, Artificial Sequence
  Synthetic
caacccctgcaaagaggaat

SEQ ID NO: 26779 - DNA, 16 bp, Artificial Sequence
  Synthetic
atcccgcatggccgag

SEQ ID NO: 26780 - DNA, 18 bp, Artificial Sequence
  Synthetic
cctgaagcaatcggtggg

SEQ ID NO: 26781 - DNA, 18 bp, Artificial Sequence
  Synthetic
atcaagccggtggagagg

SEQ ID NO: 26782 - DNA, 16 bp, Artificial Sequence
  Synthetic
gacaacgatggcgccg

SEQ ID NO: 26783 - DNA, 20 bp, Artificial Sequence
  Synthetic
gccctaagatggccagaaga

SEQ ID NO: 26784 - DNA, 20 bp, Artificial Sequence
  Synthetic
gtctccacccctttgatgtt

SEQ ID NO: 26785 - DNA, 19 bp, Artificial Sequence
  Synthetic
gattgacaggtcccttcgg

SEQ ID NO: 26786 - DNA, 16 bp, Artificial Sequence
  Synthetic
ggtgcgtgtaggtgcg

SEQ ID NO: 26787 - DNA, 18 bp, Artificial Sequence
  Synthetic
atgtcgtatgcccctccg

SEQ ID NO: 26788 - DNA, 20 bp, Artificial Sequence
  Synthetic
ctctgtagtaggctacggca

SEQ ID NO: 26789 - DNA, 20 bp, Artificial Sequence
  Synthetic
gcagtgtcaaacatgcctga

SEQ ID NO: 26790 - DNA, 18 bp, Artificial Sequence
  Synthetic
tctgtagaggaggggcgt

SEQ ID NO: 26791 - DNA, 20 bp, Artificial Sequence
  Synthetic
cctaaggccttctgcttgaa

SEQ ID NO: 26792 - DNA, 18 bp, Artificial Sequence
  Synthetic
ttttgccaaggcccacac

SEQ ID NO: 26793 - DNA, 17 bp, Artificial Sequence
  Synthetic
acacgtgattgcctcgc

SEQ ID NO: 26794 - DNA, 18 bp, Artificial Sequence
  Synthetic
acctgccagatctgctcc

SEQ ID NO: 26795 - DNA, 20 bp, Artificial Sequence
  Synthetic
ttgtgatcccactacgaacg

SEQ ID NO: 26796 - DNA, 20 bp, Artificial Sequence
  Synthetic
agacccccacaagaggttag

SEQ ID NO: 26797 - DNA, 20 bp, Artificial Sequence
  Synthetic
gccaaagcggtagaaacaac

SEQ ID NO: 26798 - DNA, 20 bp, Artificial Sequence
  Synthetic
tgaattgctcagggggctaa

SEQ ID NO: 26799 - DNA, 20 bp, Artificial Sequence
  Synthetic
tggccatgattgttgttgga

SEQ ID NO: 26800 - DNA, 18 bp, Artificial Sequence
  Synthetic
atgactttgcgggcttcg

SEQ ID NO: 26801 - DNA, 16 bp, Artificial Sequence
  Synthetic
agcgtcacctggggga

SEQ ID NO: 26802 - DNA, 18 bp, Artificial Sequence
  Synthetic
ggtcgggcatgagacatg

SEQ ID NO: 26803 - DNA, 21 bp, Artificial Sequence
  Synthetic
ttgattttcgtgagatccact

SEQ ID NO: 26804 - DNA, 19 bp, Artificial Sequence
  Synthetic
cataacacacaacagcgtt

SEQ ID NO: 26805 - DNA, 22 bp, Artificial Sequence
  Synthetic
tactgtgtaacctgatcttcct

SEQ ID NO: 26806 - DNA, 20 bp, Artificial Sequence
  Synthetic
gtgatccagaccaatgtgta

SEQ ID NO: 26807 - DNA, 25 bp, Artificial Sequence
  Synthetic
gaagtataagagaagtttgatacca

SEQ ID NO: 26808 - DNA, 20 bp, Artificial Sequence
  Synthetic
gggactttttgtgtgtgttt

SEQ ID NO: 26809 - DNA, 22 bp, Artificial Sequence
  Synthetic
taaggcacactaaaccttgatg

SEQ ID NO: 26810 - DNA, 23 bp, Artificial Sequence
  Synthetic
cctttcctcttcttaattactgg

SEQ ID NO: 26811 - DNA, 20 bp, Artificial Sequence
  Synthetic
acttgggtaataagggcttc

SEQ ID NO: 26812 - DNA, 18 bp, Artificial Sequence
  Synthetic
agtgaacccgacaccaaa

SEQ ID NO: 26813 - DNA, 20 bp, Artificial Sequence
  Synthetic
actttctgaaccatccatca

SEQ ID NO: 26814 - DNA, 20 bp, Artificial Sequence
  Synthetic
catcaaagtgcttgggatct

SEQ ID NO: 26815 - DNA, 23 bp, Artificial Sequence
  Synthetic
tgcaaacatatatctaggtcaaa

SEQ ID NO: 26816 - DNA, 21 bp, Artificial Sequence
  Synthetic
accaaagatcttaccagtagc

SEQ ID NO: 26817 - DNA, 25 bp, Artificial Sequence
  Synthetic
cccttgtacttagagaataatgatt

SEQ ID NO: 26818 - DNA, 19 bp, Artificial Sequence
  Synthetic
cacatcaggatcacaaccc

SEQ ID NO: 26819 - DNA, 23 bp, Artificial Sequence
  Synthetic
atgtatatctttcatgggcataa

SEQ ID NO: 26820 - DNA, 20 bp, Artificial Sequence
  Synthetic
tcgaccgaaatccacgaaag

SEQ ID NO: 26821 - DNA, 19 bp, Artificial Sequence
  Synthetic
gcataaaagcgctcgtggt

SEQ ID NO: 26822 - DNA, 19 bp, Artificial Sequence
  Synthetic
atcgtcaagcactgcgtac

SEQ ID NO: 26823 - DNA, 18 bp, Artificial Sequence
  Synthetic
cactgccaagctggacac

SEQ ID NO: 26824 - DNA, 18 bp, Artificial Sequence
  Synthetic
gaacgcctgcagatcgac

SEQ ID NO: 26825 - DNA, 21 bp, Artificial Sequence
  Synthetic
gcttcaaattttgcactaagc

SEQ ID NO: 26826 - DNA, 18 bp, Artificial Sequence
  Synthetic
gtcacgaaaaagcagtcg

SEQ ID NO: 26827 - DNA, 18 bp, Artificial Sequence
  Synthetic
ttaaggagctctgcgtcc

SEQ ID NO: 26828 - DNA, 25 bp, Artificial Sequence
  Synthetic
gagtcttctgttaattgattgtcat

SEQ ID NO: 26829 - DNA, 19 bp, Artificial Sequence
  Synthetic
tccatctaatgcatttcgc

SEQ ID NO: 26830 - DNA, 18 bp, Artificial Sequence
  Synthetic
agtgcttgcctcctcctg

SEQ ID NO: 26831 - DNA, 18 bp, Artificial Sequence
  Synthetic
taatggattagcaggccc

SEQ ID NO: 26832 - DNA, 18 bp, Artificial Sequence
  Synthetic
atcaccaccttggacaca

SEQ ID NO: 26833 - DNA, 19 bp, Artificial Sequence
  Synthetic
gcaacaggaaggacgtctg

SEQ ID NO: 26834 - DNA, 20 bp, Artificial Sequence
  Synthetic
tctgatataaatctcgcgcc

SEQ ID NO: 26835 - DNA, 18 bp, Artificial Sequence
  Synthetic
taagcggcttacacgaat

SEQ ID NO: 26836 - DNA, 21 bp, Artificial Sequence
  Synthetic
cacatggtttagctaaatccc

SEQ ID NO: 26837 - DNA, 24 bp, Artificial Sequence
  Synthetic
tactccatctttacaaaacatgtg

SEQ ID NO: 26838 - DNA, 18 bp, Artificial Sequence
  Synthetic
aagttcgtttccccatgc

SEQ ID NO: 26839 - DNA, 22 bp, Artificial Sequence
  Synthetic
ggagtactggatgtataggtat

SEQ ID NO: 26840 - DNA, 21 bp, Artificial Sequence
  Synthetic
acaaagtaaagtgtgccaaat

SEQ ID NO: 26841 - DNA, 19 bp, Artificial Sequence
  Synthetic
gctggatgggatggttcca

SEQ ID NO: 26842 - DNA, 18 bp, Artificial Sequence
  Synthetic
gcagtaagtgcggtcagc

SEQ ID NO: 26843 - DNA, 16 bp, Artificial Sequence
  Synthetic
accacaacgcgcctgc

SEQ ID NO: 26844 - DNA, 20 bp, Artificial Sequence
  Synthetic
tggaaatagggagggggtac

SEQ ID NO: 26845 - DNA, 18 bp, Artificial Sequence
  Synthetic
cttctgagcatgctcccg

SEQ ID NO: 26846 - DNA, 20 bp, Artificial Sequence
  Synthetic
ggttgtaggaaacaggtgca

SEQ ID NO: 26847 - DNA, 18 bp, Artificial Sequence
  Synthetic
tttactgtggcggtcagc

SEQ ID NO: 26848 - DNA, 16 bp, Artificial Sequence
  Synthetic
cgggggcaaaaaccgc

SEQ ID NO: 26849 - DNA, 20 bp, Artificial Sequence
  Synthetic
tggtcaacattagacgcgtt

SEQ ID NO: 26850 - DNA, 18 bp, Artificial Sequence
  Synthetic
gcacctggtatatgccgg

SEQ ID NO: 26851 - DNA, 16 bp, Artificial Sequence
  Synthetic
actgcacaacgccggg

SEQ ID NO: 26852 - DNA, 16 bp, Artificial Sequence
  Synthetic
aaggtggacggtggcg

SEQ ID NO: 26853 - DNA, 17 bp, Artificial Sequence
  Synthetic
gttggcggccttagctg

SEQ ID NO: 26854 - DNA, 18 bp, Artificial Sequence
  Synthetic
attggcgtcaggattgcc

SEQ ID NO: 26855 - DNA, 18 bp, Artificial Sequence
  Synthetic
gtctcccccgtggtgaat

SEQ ID NO: 26856 - DNA, 20 bp, Artificial Sequence
  Synthetic
catccacacacatctgagct

SEQ ID NO: 26857 - DNA, 16 bp, Artificial Sequence
  Synthetic
agcgaccgcggttagc

SEQ ID NO: 26858 - DNA, 17 bp, Artificial Sequence
  Synthetic
tggtgagctcggcagtc

SEQ ID NO: 26859 - DNA, 19 bp, Artificial Sequence
  Synthetic
tgtgaccttggtccagtcg

SEQ ID NO: 26860 - DNA, 19 bp, Artificial Sequence
  Synthetic
tcctcaagcaatgctagcg

SEQ ID NO: 26861 - DNA, 21 bp, Artificial Sequence
  Synthetic
ttaaaaaatccgttggtcgtc

SEQ ID NO: 26862 - DNA, 23 bp, Artificial Sequence
  Synthetic
caaacatctttgaattgtttcca

SEQ ID NO: 26863 - DNA, 20 bp, Artificial Sequence
  Synthetic
attgaagtttggtttacgcg

SEQ ID NO: 26864 - DNA, 19 bp, Artificial Sequence
  Synthetic
catacgaaactgtgcaagc

SEQ ID NO: 26865 - DNA, 22 bp, Artificial Sequence
  Synthetic
ggaatacgttcaattaaagctc

SEQ ID NO: 26866 - DNA, 19 bp, Artificial Sequence
  Synthetic
cgatgtacggcaaatcaat

SEQ ID NO: 26867 - DNA, 18 bp, Artificial Sequence
  Synthetic
taggccaacgttttccac

SEQ ID NO: 26868 - DNA, 18 bp, Artificial Sequence
  Synthetic
agtaaatttgggacgccg

SEQ ID NO: 26869 - DNA, 20 bp, Artificial Sequence
  Synthetic
aagccagtttttcattggtg

SEQ ID NO: 26870 - DNA, 21 bp, Artificial Sequence
  Synthetic
aaggctgttatcatctgatcg

SEQ ID NO: 26871 - DNA, 20 bp, Artificial Sequence
  Synthetic
agccctgaattaaaaaaggc

SEQ ID NO: 26872 - DNA, 20 bp, Artificial Sequence
  Synthetic
atgttacaaaatacgcacgc

SEQ ID NO: 26873 - DNA, 17 bp, Artificial Sequence
  Synthetic
tcggtggcgctgtatgc

SEQ ID NO: 26874 - DNA, 17 bp, Artificial Sequence
  Synthetic
acaccgtgtgtacccgc

SEQ ID NO: 26875 - DNA, 19 bp, Artificial Sequence
  Synthetic
gataattcccccggtgtcg

SEQ ID NO: 26876 - DNA, 16 bp, Artificial Sequence
  Synthetic
tcggacagcgttcccg

SEQ ID NO: 26877 - DNA, 22 bp, Artificial Sequence
  Synthetic
cagtatttgtctacagccttct

SEQ ID NO: 26878 - DNA, 18 bp, Artificial Sequence
  Synthetic
gcctgatgtaccatttgc

SEQ ID NO: 26879 - DNA, 21 bp, Artificial Sequence
  Synthetic
catcctatttgttcctgaagg

SEQ ID NO: 26880 - DNA, 19 bp, Artificial Sequence
  Synthetic
agccaaaactcttgcctta

SEQ ID NO: 26881 - DNA, 25 bp, Artificial Sequence
  Synthetic
tgtattgatagataactatgtctgg

SEQ ID NO: 26882 - DNA, 23 bp, Artificial Sequence
  Synthetic
aggagtttacataattgccttac

SEQ ID NO: 26883 - DNA, 18 bp, Artificial Sequence
  Synthetic
actcaggaatccaggtgg

SEQ ID NO: 26884 - DNA, 20 bp, Artificial Sequence
  Synthetic
ctgacatttatcacagctgg

SEQ ID NO: 26885 - DNA, 18 bp, Artificial Sequence
  Synthetic
attcctgcttgattcccg

SEQ ID NO: 26886 - DNA, 20 bp, Artificial Sequence
  Synthetic
aaatgccagtctctttctcc

SEQ ID NO: 26887 - DNA, 18 bp, Artificial Sequence
  Synthetic
ttctggggcttgttccat

SEQ ID NO: 26888 - DNA, 19 bp, Artificial Sequence
  Synthetic
tctgtcgagtaacgcctat

SEQ ID NO: 26889 - DNA, 18 bp, Artificial Sequence
  Synthetic
tacttcttgtgggttggg

SEQ ID NO: 26890 - DNA, 21 bp, Artificial Sequence
  Synthetic
tgtccgtgaaattgacagatc

SEQ ID NO: 26891 - DNA, 20 bp, Artificial Sequence
  Synthetic
cacttctccaattgtccctc

SEQ ID NO: 26892 - DNA, 20 bp, Artificial Sequence
  Synthetic
ggtatctttccacagccagg

SEQ ID NO: 26893 - DNA, 19 bp, Artificial Sequence
  Synthetic
ggaaaacccacctcctcct

SEQ ID NO: 26894 - DNA, 18 bp, Artificial Sequence
  Synthetic
tgcaggatctgagggctc

SEQ ID NO: 26895 - DNA, 20 bp, Artificial Sequence
  Synthetic
gcctcgaacatctccgtgtc

SEQ ID NO: 26896 - DNA, 17 bp, Artificial Sequence
  Synthetic
ccatggccatcaacgcc

SEQ ID NO: 26897 - DNA, 16 bp, Artificial Sequence
  Synthetic
agggcctttctggggc

SEQ ID NO: 26898 - DNA, 17 bp, Artificial Sequence
  Synthetic
ttaagcacctgggcccg

SEQ ID NO: 26899 - DNA, 16 bp, Artificial Sequence
  Synthetic
aacagccaggtcgcgg

SEQ ID NO: 26900 - DNA, 20 bp, Artificial Sequence
  Synthetic
aagttacatcaccaacccgg

SEQ ID NO: 26901 - DNA, 18 bp, Artificial Sequence
  Synthetic
cggcgtatctcatcaccg

SEQ ID NO: 26902 - DNA, 20 bp, Artificial Sequence
  Synthetic
ccgctagagtacgagatcga

SEQ ID NO: 26903 - DNA, 16 bp, Artificial Sequence
  Synthetic
aagggagacgcgtggc

SEQ ID NO: 26904 - DNA, 18 bp, Artificial Sequence
  Synthetic
gcaaaacagggccgagag

SEQ ID NO: 26905 - DNA, 18 bp, Artificial Sequence
  Synthetic
cctggcccatgatgcagg

SEQ ID NO: 26906 - DNA, 19 bp, Artificial Sequence
  Synthetic
cgaacctttagccccgagg

SEQ ID NO: 26907 - DNA, 20 bp, Artificial Sequence
  Synthetic
ggcggctttacgaccactac

SEQ ID NO: 26908 - DNA, 19 bp, Artificial Sequence
  Synthetic
catgaactacgggccggac

SEQ ID NO: 26909 - DNA, 17 bp, Artificial Sequence
  Synthetic
cgttgccaggttctgcc

SEQ ID NO: 26910 - DNA, 16 bp, Artificial Sequence
  Synthetic
cgaaacagccgcctgg

SEQ ID NO: 26911 - DNA, 18 bp, Artificial Sequence
  Synthetic
caccggagctctcggtaa

SEQ ID NO: 26912 - DNA, 20 bp, Artificial Sequence
  Synthetic
aaaagagtggtttgccgtgg

SEQ ID NO: 26913 - DNA, 18 bp, Artificial Sequence
  Synthetic
ccagaccctgcagctaca

SEQ ID NO: 26914 - DNA, 17 bp, Artificial Sequence
  Synthetic
ccgtagtctccgcgaga

SEQ ID NO: 26915 - DNA, 17 bp, Artificial Sequence
  Synthetic
accggggaaacaggcac

SEQ ID NO: 26916 - DNA, 16 bp, Artificial Sequence
  Synthetic
tcagcctcgcagaccc

SEQ ID NO: 26917 - DNA, 18 bp, Artificial Sequence
  Synthetic
gcttcatggagggcagcc

SEQ ID NO: 26918 - DNA, 19 bp, Artificial Sequence
  Synthetic
cggatctggtggccatagg

SEQ ID NO: 26919 - DNA, 16 bp, Artificial Sequence
  Synthetic
gttggtcgggttgccc

SEQ ID NO: 26920 - DNA, 16 bp, Artificial Sequence
  Synthetic
agccccggatcctcgt

SEQ ID NO: 26921 - DNA, 18 bp, Artificial Sequence
  Synthetic
gagggcgggttcatcctg

SEQ ID NO: 26922 - DNA, 16 bp, Artificial Sequence
  Synthetic
tcctggagtcggcgac

SEQ ID NO: 26923 - DNA, 16 bp, Artificial Sequence
  Synthetic
atcgcgatcgggggag

SEQ ID NO: 26924 - DNA, 16 bp, Artificial Sequence
  Synthetic
tccaatccggacgccc

SEQ ID NO: 26925 - DNA, 20 bp, Artificial Sequence
  Synthetic
gggctacgtgtacttcgagg

SEQ ID NO: 26926 - DNA, 16 bp, Artificial Sequence
  Synthetic
acagcttcgcccagcc

SEQ ID NO: 26927 - DNA, 18 bp, Artificial Sequence
  Synthetic
ctttcccaacggcaagcc

SEQ ID NO: 26928 - DNA, 18 bp, Artificial Sequence
  Synthetic
gtacgtatggcgctgagc

SEQ ID NO: 26929 - DNA, 17 bp, Artificial Sequence
  Synthetic
ggcaggtcacacatggc

SEQ ID NO: 26930 - DNA, 19 bp, Artificial Sequence
  Synthetic
gcaccatcgagctgtacaa

SEQ ID NO: 26931 - DNA, 16 bp, Artificial Sequence
  Synthetic
tgctccgccgtgatcg

SEQ ID NO: 26932 - DNA, 16 bp, Artificial Sequence
  Synthetic
tgcgaacggcgtcctc

SEQ ID NO: 26933 - DNA, 20 bp, Artificial Sequence
  Synthetic
ccaacaatctgtcgacagga

SEQ ID NO: 26934 - DNA, 16 bp, Artificial Sequence
  Synthetic
atacaggcgggcggac

SEQ ID NO: 26935 - DNA, 18 bp, Artificial Sequence
  Synthetic
ttccaggtacacgcacgc

SEQ ID NO: 26936 - DNA, 19 bp, Artificial Sequence
  Synthetic
gttcaggtcccggaactcg

SEQ ID NO: 26937 - DNA, 17 bp, Artificial Sequence
  Synthetic
tggggcacaccggaatc

SEQ ID NO: 26938 - DNA, 20 bp, Artificial Sequence
  Synthetic
cgacaggaaggcaaacagaa

SEQ ID NO: 26939 - DNA, 17 bp, Artificial Sequence
  Synthetic
tcgtgcaggtccccaac

SEQ ID NO: 26940 - DNA, 20 bp, Artificial Sequence
  Synthetic
tggaaaagaagacaaccggc

SEQ ID NO: 26941 - DNA, 16 bp, Artificial Sequence
  Synthetic
agacgctgcagcaggg

SEQ ID NO: 26942 - DNA, 19 bp, Artificial Sequence
  Synthetic
ctgccggggtaaaatccac

SEQ ID NO: 26943 - DNA, 17 bp, Artificial Sequence
  Synthetic
atacaacggctcggccc

SEQ ID NO: 26944 - DNA, 16 bp, Artificial Sequence
  Synthetic
cggtccaacagcaccg

SEQ ID NO: 26945 - DNA, 16 bp, Artificial Sequence
  Synthetic
tccgtcagggtctcgc

SEQ ID NO: 26946 - DNA, 18 bp, Artificial Sequence
  Synthetic
gcaggcggttgttatcgc

SEQ ID NO: 26947 - DNA, 19 bp, Artificial Sequence
  Synthetic
caaaagataggtcgccggg

SEQ ID NO: 26948 - DNA, 17 bp, Artificial Sequence
  Synthetic
gcccacgatgacgccaa

SEQ ID NO: 26949 - DNA, 16 bp, Artificial Sequence
  Synthetic
ataactccgcgcggcc

SEQ ID NO: 26950 - DNA, 16 bp, Artificial Sequence
  Synthetic
tagtggtcggcgtggg

SEQ ID NO: 26951 - DNA, 16 bp, Artificial Sequence
  Synthetic
cccaccacaacacggc

SEQ ID NO: 26952 - DNA, 16 bp, Artificial Sequence
  Synthetic
acggacgagatcgccc

SEQ ID NO: 26953 - DNA, 18 bp, Artificial Sequence
  Synthetic
gaacgcagctgtcttcgc

SEQ ID NO: 26954 - DNA, 17 bp, Artificial Sequence
  Synthetic
tgggtcgtgccatccga

SEQ ID NO: 26955 - DNA, 17 bp, Artificial Sequence
  Synthetic
aacacgcttcaccccgg

SEQ ID NO: 26956 - DNA, 19 bp, Artificial Sequence
  Synthetic
tgtacgtgtgctttcgggc

SEQ ID NO: 26957 - DNA, 18 bp, Artificial Sequence
  Synthetic
tcgcaggagccgtagtcc

SEQ ID NO: 26958 - DNA, 20 bp, Artificial Sequence
  Synthetic
cgagtcgaaatcccacacag

SEQ ID NO: 26959 - DNA, 18 bp, Artificial Sequence
  Synthetic
aaggtcgctgaggctctg

SEQ ID NO: 26960 - DNA, 21 bp, Artificial Sequence
  Synthetic
caatttcttgcaggtcaacac

SEQ ID NO: 26961 - DNA, 19 bp, Artificial Sequence
  Synthetic
gccattctgctcgacacag

SEQ ID NO: 26962 - DNA, 23 bp, Artificial Sequence
  Synthetic
gaacagtataatgccatcattgt

SEQ ID NO: 26963 - DNA, 18 bp, Artificial Sequence
  Synthetic
cagatcgttgtccagtgc

SEQ ID NO: 26964 - DNA, 21 bp, Artificial Sequence
  Synthetic
tgatacctcagaaaatgcaca

SEQ ID NO: 26965 - DNA, 18 bp, Artificial Sequence
  Synthetic
atgttttggtccgcgtac

SEQ ID NO: 26966 - DNA, 19 bp, Artificial Sequence
  Synthetic
acagactcgtggtcaatgt

SEQ ID NO: 26967 - DNA, 16 bp, Artificial Sequence
  Synthetic
ttaggggctggggcga

SEQ ID NO: 26968 - DNA, 18 bp, Artificial Sequence
  Synthetic
aacatcgggtggacaatc

SEQ ID NO: 26969 - DNA, 16 bp, Artificial Sequence
  Synthetic
acacggggtgccatgg

SEQ ID NO: 26970 - DNA, 20 bp, Artificial Sequence
  Synthetic
atcgctcctgtataggcaca

SEQ ID NO: 26971 - DNA, 20 bp, Artificial Sequence
  Synthetic
agcctacctgaacaccagag

SEQ ID NO: 26972 - DNA, 25 bp, Artificial Sequence
  Synthetic
gcagttaataaatctatttcctgca

SEQ ID NO: 26973 - DNA, 18 bp, Artificial Sequence
  Synthetic
gaccacctctttgccatc

SEQ ID NO: 26974 - DNA, 18 bp, Artificial Sequence
  Synthetic
agcagctgtgtttgctta

SEQ ID NO: 26975 - DNA, 21 bp, Artificial Sequence
  Synthetic
cacaatatctaatggggcatc

SEQ ID NO: 26976 - DNA, 20 bp, Artificial Sequence
  Synthetic
aaattctcaggggtaaggtc

SEQ ID NO: 26977 - DNA, 21 bp, Artificial Sequence
  Synthetic
gaaacaaaaacttcctgccaa

SEQ ID NO: 26978 - DNA, 19 bp, Artificial Sequence
  Synthetic
cgcctaaatccttgcgctt

SEQ ID NO: 26979 - DNA, 18 bp, Artificial Sequence
  Synthetic
aaaggccccaatacctcc

SEQ ID NO: 26980 - DNA, 22 bp, Artificial Sequence
  Synthetic
gatttgtagcttcatcttcctc

SEQ ID NO: 26981 - DNA, 25 bp, Artificial Sequence
  Synthetic
cttttctagcatagtataaagtcac

SEQ ID NO: 26982 - DNA, 20 bp, Artificial Sequence
  Synthetic
gcagcaggtgtaataggttt

SEQ ID NO: 26983 - DNA, 19 bp, Artificial Sequence
  Synthetic
aaaatctggatctggtgca

SEQ ID NO: 26984 - DNA, 23 bp, Artificial Sequence
  Synthetic
actttctgcaagattatccacta

SEQ ID NO: 26985 - DNA, 23 bp, Artificial Sequence
  Synthetic
ctaactttaggaacttctacagc

SEQ ID NO: 26986 - DNA, 19 bp, Artificial Sequence
  Synthetic
atcatgtgctacgtccatg

SEQ ID NO: 26987 - DNA, 18 bp, Artificial Sequence
  Synthetic
ctcaaactcaaaccgtgc

SEQ ID NO: 26988 - DNA, 20 bp, Artificial Sequence
  Synthetic
tgatatcacgcaaagtaggt

SEQ ID NO: 26989 - DNA, 18 bp, Artificial Sequence
  Synthetic
gatctgccatggcgatag

SEQ ID NO: 26990 - DNA, 19 bp, Artificial Sequence
  Synthetic
gtcttctgtaacctgctgg

SEQ ID NO: 26991 - DNA, 20 bp, Artificial Sequence
  Synthetic
actacaccgtaacagttcaa

SEQ ID NO: 26992 - DNA, 21 bp, Artificial Sequence
  Synthetic
catctgcagctaaagcataat

SEQ ID NO: 26993 - DNA, 18 bp, Artificial Sequence
  Synthetic
tcgaaacgctctgtcaga

SEQ ID NO: 26994 - DNA, 20 bp, Artificial Sequence
  Synthetic
gaggtttccgaagacgagga

SEQ ID NO: 26995 - DNA, 20 bp, Artificial Sequence
  Synthetic
agtttgcaggaccttgaaca

SEQ ID NO: 26996 - DNA, 18 bp, Artificial Sequence
  Synthetic
atcaggagggcatgtacc

SEQ ID NO: 26997 - DNA, 20 bp, Artificial Sequence
  Synthetic
tgtctagagggacaccaaat

SEQ ID NO: 26998 - DNA, 23 bp, Artificial Sequence
  Synthetic
aaggtgtaatttctaataaggct

SEQ ID NO: 26999 - DNA, 21 bp, Artificial Sequence
  Synthetic
ccataaagttctctgggtctt

SEQ ID NO: 27000 - DNA, 18 bp, Artificial Sequence
  Synthetic
cgtatatttccgctgggc

SEQ ID NO: 27001 - DNA, 20 bp, Artificial Sequence
  Synthetic
cttcacgaaacacatcatcc

SEQ ID NO: 27002 - DNA, 24 bp, Artificial Sequence
  Synthetic
cattctgcctattatcattaccag

SEQ ID NO: 27003 - DNA, 21 bp, Artificial Sequence
  Synthetic
ggccatttgcaagtttgatta

SEQ ID NO: 27004 - DNA, 20 bp, Artificial Sequence
  Synthetic
agctgacaacatgtatgagg

SEQ ID NO: 27005 - DNA, 18 bp, Artificial Sequence
  Synthetic
actcccggtacatgagtg

SEQ ID NO: 27006 - DNA, 18 bp, Artificial Sequence
  Synthetic
aatttgctgctcattgcc

SEQ ID NO: 27007 - DNA, 20 bp, Artificial Sequence
  Synthetic
tcctttctgctgaataaagc

SEQ ID NO: 27008 - DNA, 21 bp, Artificial Sequence
  Synthetic
ttgttatggccgttttctcat

SEQ ID NO: 27009 - DNA, 24 bp, Artificial Sequence
  Synthetic
ccacatcaattaaatcttgtcttg

SEQ ID NO: 27010 - DNA, 23 bp, Artificial Sequence
  Synthetic
ttttcaggtaaatcaagcaatga

SEQ ID NO: 27011 - DNA, 21 bp, Artificial Sequence
  Synthetic
cgcaactggtatctatttgga

SEQ ID NO: 27012 - DNA, 20 bp, Artificial Sequence
  Synthetic
ctgtcatcgaataagcgtct

SEQ ID NO: 27013 - DNA, 22 bp, Artificial Sequence
  Synthetic
tttagtatcttgcaatggttgt

SEQ ID NO: 27014 - DNA, 23 bp, Artificial Sequence
  Synthetic
ccaagtctattatagccactctt

SEQ ID NO: 27015 - DNA, 18 bp, Artificial Sequence
  Synthetic
atcccacctgcgaaggag

SEQ ID NO: 27016 - DNA, 18 bp, Artificial Sequence
  Synthetic
aatacctgttgtgccctc

SEQ ID NO: 27017 - DNA, 25 bp, Artificial Sequence
  Synthetic
caatttcacctgtaatattagcatc

SEQ ID NO: 27018 - DNA, 18 bp, Artificial Sequence
  Synthetic
aatctggatcaggagccg

SEQ ID NO: 27019 - DNA, 23 bp, Artificial Sequence
  Synthetic
ctactgtatgcccagataaaatt

SEQ ID NO: 27020 - DNA, 22 bp, Artificial Sequence
  Synthetic
tttcatagtagggatggtctac

SEQ ID NO: 27021 - DNA, 23 bp, Artificial Sequence
  Synthetic
gctttgttaaataaaggatgacc

SEQ ID NO: 27022 - DNA, 21 bp, Artificial Sequence
  Synthetic
agttcttaaaatttgctgccc

SEQ ID NO: 27023 - DNA, 20 bp, Artificial Sequence
  Synthetic
agcatttgtaggtggcaata

SEQ ID NO: 27024 - DNA, 22 bp, Artificial Sequence
  Synthetic
tcttgcaaatcaactaaccaaa

SEQ ID NO: 27025 - DNA, 19 bp, Artificial Sequence
  Synthetic
cgccaaaataccagagacg

SEQ ID NO: 27026 - DNA, 23 bp, Artificial Sequence
  Synthetic
caaattaacaggcaataccaaat

SEQ ID NO: 27027 - DNA, 19 bp, Artificial Sequence
  Synthetic
agacagatcacaggcaatt

SEQ ID NO: 27028 - DNA, 19 bp, Artificial Sequence
  Synthetic
aagtccccaatagctctgt

SEQ ID NO: 27029 - DNA, 23 bp, Artificial Sequence
  Synthetic
ccaaataaatctttgaatttgcc

SEQ ID NO: 27030 - DNA, 23 bp, Artificial Sequence
  Synthetic
acattaaatctattcctccaaca

SEQ ID NO: 27031 - DNA, 18 bp, Artificial Sequence
  Synthetic
aagggtatgacatcagcg

SEQ ID NO: 27032 - DNA, 21 bp, Artificial Sequence
  Synthetic
gtctggatttctggtttgaac

SEQ ID NO: 27033 - DNA, 23 bp, Artificial Sequence
  Synthetic
ctggattataaactttgggatct

SEQ ID NO: 27034 - DNA, 21 bp, Artificial Sequence
  Synthetic
tcccaatgttctcctattgtg

SEQ ID NO: 27035 - DNA, 23 bp, Artificial Sequence
  Synthetic
gcagattttttagaaactgaagt

SEQ ID NO: 27036 - DNA, 18 bp, Artificial Sequence
  Synthetic
aggttgtaaagcgtccag

SEQ ID NO: 27037 - DNA, 20 bp, Artificial Sequence
  Synthetic
atcttcccatgttctaggtg

SEQ ID NO: 27038 - DNA, 18 bp, Artificial Sequence
  Synthetic
tgtcaaagttgctccacg

SEQ ID NO: 27039 - DNA, 18 bp, Artificial Sequence
  Synthetic
aatagggatcgagctggg

SEQ ID NO: 27040 - DNA, 20 bp, Artificial Sequence
  Synthetic
catgcgagtcttcacaccat

SEQ ID NO: 27041 - DNA, 18 bp, Artificial Sequence
  Synthetic
tatggtggaattgcccag

SEQ ID NO: 27042 - DNA, 23 bp, Artificial Sequence
  Synthetic
ctatgaaatttggtagcattgca

SEQ ID NO: 27043 - DNA, 25 bp, Artificial Sequence
  Synthetic
gtcctcaaatttataaattggtgag

SEQ ID NO: 27044 - DNA, 21 bp, Artificial Sequence
  Synthetic
gtctgtcatctgtagtgagaa

SEQ ID NO: 27045 - DNA, 20 bp, Artificial Sequence
  Synthetic
tcctgtgtacatgagtgaaa

SEQ ID NO: 27046 - DNA, 23 bp, Artificial Sequence
  Synthetic
cccagcactagtataagtatcag

SEQ ID NO: 27047 - DNA, 25 bp, Artificial Sequence
  Synthetic
gacttgaaaggttaattttccaatc

SEQ ID NO: 27048 - DNA, 20 bp, Artificial Sequence
  Synthetic
aaaagggacactaaacctgg

SEQ ID NO: 27049 - DNA, 18 bp, Artificial Sequence
  Synthetic
tctggggtagttagtgcg

SEQ ID NO: 27050 - DNA, 18 bp, Artificial Sequence
  Synthetic
agtacgagctaccctcaa

SEQ ID NO: 27051 - DNA, 20 bp, Artificial Sequence
  Synthetic
tgctctccctaaactggtaa

SEQ ID NO: 27052 - DNA, 22 bp, Artificial Sequence
  Synthetic
ttgtgacatttgttctaaccac

SEQ ID NO: 27053 - DNA, 22 bp, Artificial Sequence
  Synthetic
aatgttttggatcaggaggtaa

SEQ ID NO: 27054 - DNA, 18 bp, Artificial Sequence
  Synthetic
tgtgctgtgcatgcaaat

SEQ ID NO: 27055 - DNA, 25 bp, Artificial Sequence
  Synthetic
ggatctactagtttgtatttgtctt

SEQ ID NO: 27056 - DNA, 19 bp, Artificial Sequence
  Synthetic
tttttcctgttgtgcacaa

SEQ ID NO: 27057 - DNA, 21 bp, Artificial Sequence
  Synthetic
gtctagggtcattgtcattga

SEQ ID NO: 27058 - DNA, 24 bp, Artificial Sequence
  Synthetic
gaaatctgaatacatgaagcatac

SEQ ID NO: 27059 - DNA, 19 bp, Artificial Sequence
  Synthetic
tgggtcctcaatgcttaat

SEQ ID NO: 27060 - DNA, 18 bp, Artificial Sequence
  Synthetic
tgatgtacacccccttca

SEQ ID NO: 27061 - DNA, 25 bp, Artificial Sequence
  Synthetic
cttagaagcatatctcctatctcaa

SEQ ID NO: 27062 - DNA, 18 bp, Artificial Sequence
  Synthetic
ttcctccactcctttggg

SEQ ID NO: 27063 - DNA, 20 bp, Artificial Sequence
  Synthetic
ccattatccttttgtctgcc

SEQ ID NO: 27064 - DNA, 18 bp, Artificial Sequence
  Synthetic
ctaagatctgcatggccc

SEQ ID NO: 27065 - DNA, 19 bp, Artificial Sequence
  Synthetic
cgatatacacgctgcttgt

SEQ ID NO: 27066 - DNA, 21 bp, Artificial Sequence
  Synthetic
gttcttctgttgggttttgtc

SEQ ID NO: 27067 - DNA, 19 bp, Artificial Sequence
  Synthetic
cccactcactatcagttgg

SEQ ID NO: 27068 - DNA, 20 bp, Artificial Sequence
  Synthetic
tgtcaggcaatattccgatc

SEQ ID NO: 27069 - DNA, 24 bp, Artificial Sequence
  Synthetic
attgatatgtgttaactagcactg

SEQ ID NO: 27070 - DNA, 19 bp, Artificial Sequence
  Synthetic
acaggagaattgcctctca

SEQ ID NO: 27071 - DNA, 23 bp, Artificial Sequence
  Synthetic
aattgttactctatcacctttca

SEQ ID NO: 27072 - DNA, 18 bp, Artificial Sequence
  Synthetic
actcctctgcacactgta

SEQ ID NO: 27073 - DNA, 19 bp, Artificial Sequence
  Synthetic
actattacatgcggcactt

SEQ ID NO: 27074 - DNA, 18 bp, Artificial Sequence
  Synthetic
cgctctgcgtctgtgctt

SEQ ID NO: 27075 - DNA, 24 bp, Artificial Sequence
  Synthetic
ccaacactttaatgtattctgagg

SEQ ID NO: 27076 - DNA, 18 bp, Artificial Sequence
  Synthetic
aattgcaggccttactgg

SEQ ID NO: 27077 - DNA, 23 bp, Artificial Sequence
  Synthetic
ttgtacttgaacatctatctgag

SEQ ID NO: 27078 - DNA, 19 bp, Artificial Sequence
  Synthetic
gaagataaagccgtccagt

SEQ ID NO: 27079 - DNA, 24 bp, Artificial Sequence
  Synthetic
gcaaatttattaggatcaggtaac

SEQ ID NO: 27080 - DNA, 23 bp, Artificial Sequence
  Synthetic
ataaaaagctgattttgtttggg

SEQ ID NO: 27081 - DNA, 18 bp, Artificial Sequence
  Synthetic
gtcgtcctggcaattccg

SEQ ID NO: 27082 - DNA, 16 bp, Artificial Sequence
  Synthetic
agatgggcgcgccttg

SEQ ID NO: 27083 - DNA, 19 bp, Artificial Sequence
  Synthetic
ccacatgtttgcggaaccc

SEQ ID NO: 27084 - DNA, 20 bp, Artificial Sequence
  Synthetic
accttcaaccaattgcctga

SEQ ID NO: 27085 - DNA, 19 bp, Artificial Sequence
  Synthetic
gcatagtgccagcagtagg

SEQ ID NO: 27086 - DNA, 18 bp, Artificial Sequence
  Synthetic
gggcacaggagctggtta

SEQ ID NO: 27087 - DNA, 20 bp, Artificial Sequence
  Synthetic
atgaggacgacatactccca

SEQ ID NO: 27088 - DNA, 15 bp, Artificial Sequence
  Synthetic
aggtgcatgcgggca

SEQ ID NO: 27089 - DNA, 19 bp, Artificial Sequence
  Synthetic
gtcccagcagcaccaagtc

SEQ ID NO: 27090 - DNA, 18 bp, Artificial Sequence
  Synthetic
aagtgacctagcccccag

SEQ ID NO: 27091 - DNA, 19 bp, Artificial Sequence
  Synthetic
ggcgaggagttgtcggtaa

SEQ ID NO: 27092 - DNA, 17 bp, Artificial Sequence
  Synthetic
cgtagcgagcaccgtga

SEQ ID NO: 27093 - DNA, 18 bp, Artificial Sequence
  Synthetic
tctaccacctgcgtcacg

SEQ ID NO: 27094 - DNA, 20 bp, Artificial Sequence
  Synthetic
ggagtgtttaggtaggcacg

SEQ ID NO: 27095 - DNA, 20 bp, Artificial Sequence
  Synthetic
acttccaggtctgcagacat

SEQ ID NO: 27096 - DNA, 20 bp, Artificial Sequence
  Synthetic
ccacatgtgtttcctccaga

SEQ ID NO: 27097 - DNA, 19 bp, Artificial Sequence
  Synthetic
ccggcaaggatgtcaacaa

SEQ ID NO: 27098 - DNA, 18 bp, Artificial Sequence
  Synthetic
tctcgcagccatgaggac

SEQ ID NO: 27099 - DNA, 19 bp, Artificial Sequence
  Synthetic
gcacactagggctggtagt

SEQ ID NO: 27100 - DNA, 20 bp, Artificial Sequence
  Synthetic
cagtgagcattgacgtgact

SEQ ID NO: 27101 - DNA, 18 bp, Artificial Sequence
  Synthetic
tcgtatccgggcatttgc

SEQ ID NO: 27102 - DNA, 20 bp, Artificial Sequence
  Synthetic
ggggcattgagctaaaggat

SEQ ID NO: 27103 - DNA, 18 bp, Artificial Sequence
  Synthetic
tgcagatcccatcacggt

SEQ ID NO: 27104 - DNA, 19 bp, Artificial Sequence
  Synthetic
gatgttggctgccctacac

SEQ ID NO: 27105 - DNA, 20 bp, Artificial Sequence
  Synthetic
tgatgatgttgcccaaccac

SEQ ID NO: 27106 - DNA, 20 bp, Artificial Sequence
  Synthetic
accttgggcaatgagtttgg

SEQ ID NO: 27107 - DNA, 23 bp, Artificial Sequence
  Synthetic
ctttttcaattgctatgccattt

SEQ ID NO: 27108 - DNA, 23 bp, Artificial Sequence
  Synthetic
tttgctctgtttagttcatttcc

SEQ ID NO: 27109 - DNA, 20 bp, Artificial Sequence
  Synthetic
ctcctcttttgccttctctc

SEQ ID NO: 27110 - DNA, 18 bp, Artificial Sequence
  Synthetic
agagtaagtctggcagcc

SEQ ID NO: 27111 - DNA, 20 bp, Artificial Sequence
  Synthetic
gagaaagcactgttgaaact

SEQ ID NO: 27112 - DNA, 19 bp, Artificial Sequence
  Synthetic
tcatcttcttggcttgtcc

SEQ ID NO: 27113 - DNA, 24 bp, Artificial Sequence
  Synthetic
gctgttgaaattcaaataaagcag

SEQ ID NO: 27114 - DNA, 19 bp, Artificial Sequence
  Synthetic
aagatcgtctcctggaaca

SEQ ID NO: 27115 - DNA, 18 bp, Artificial Sequence
  Synthetic
cagttgctcgccaattag

SEQ ID NO: 27116 - DNA, 19 bp, Artificial Sequence
  Synthetic
aatcaaattggtctgcagc

SEQ ID NO: 27117 - DNA, 19 bp, Artificial Sequence
  Synthetic
aacatatacacaggctccc

SEQ ID NO: 27118 - DNA, 23 bp, Artificial Sequence
  Synthetic
atgtttcttttccaaatggtgat

SEQ ID NO: 27119 - DNA, 21 bp, Artificial Sequence
  Synthetic
gtggttctagagtaagagctg

SEQ ID NO: 27120 - DNA, 19 bp, Artificial Sequence
  Synthetic
ccccaacccatttaaacac

SEQ ID NO: 27121 - DNA, 20 bp, Artificial Sequence
  Synthetic
attatagctgatgcctctgg

SEQ ID NO: 27122 - DNA, 19 bp, Artificial Sequence
  Synthetic
ttcaaattgaacagcccga

SEQ ID NO: 27123 - DNA, 24 bp, Artificial Sequence
  Synthetic
ttcctaattcaggtggtaaactag

SEQ ID NO: 27124 - DNA, 25 bp, Artificial Sequence
  Synthetic
gatctattaaagcaaacttgttagg

SEQ ID NO: 27125 - DNA, 20 bp, Artificial Sequence
  Synthetic
gagcatgtggttcaggtatg

SEQ ID NO: 27126 - DNA, 18 bp, Artificial Sequence
  Synthetic
gtcctcaataccggatgg

SEQ ID NO: 27127 - DNA, 18 bp, Artificial Sequence
  Synthetic
tgtttgttttgacagccg

SEQ ID NO: 27128 - DNA, 18 bp, Artificial Sequence
  Synthetic
tatgaggcccatgcaact

SEQ ID NO: 27129 - DNA, 21 bp, Artificial Sequence
  Synthetic
atagactcaggtactccttcc

SEQ ID NO: 27130 - DNA, 21 bp, Artificial Sequence
  Synthetic
ctgtttctgcctgtgttaaat

SEQ ID NO: 27131 - DNA, 18 bp, Artificial Sequence
  Synthetic
ccccacttccaccactat

SEQ ID NO: 27132 - DNA, 25 bp, Artificial Sequence
  Synthetic
ttgtaataaatagcacattctaggc

SEQ ID NO: 27133 - DNA, 22 bp, Artificial Sequence
  Synthetic
gttactgatgcttcttcacaaa

SEQ ID NO: 27134 - DNA, 18 bp, Artificial Sequence
  Synthetic
aatgccctccagtttctg

SEQ ID NO: 27135 - DNA, 20 bp, Artificial Sequence
  Synthetic
gcaagtagtctggatgttcc

SEQ ID NO: 27136 - DNA, 25 bp, Artificial Sequence
  Synthetic
ccaatttatttaataaaggatggcc

SEQ ID NO: 27137 - DNA, 21 bp, Artificial Sequence
  Synthetic
aacttcacttttgttagcctg

SEQ ID NO: 27138 - DNA, 19 bp, Artificial Sequence
  Synthetic
tgtgctcgttgtaaccaat

SEQ ID NO: 27139 - DNA, 22 bp, Artificial Sequence
  Synthetic
tgtagcttttcgttttcctaat

SEQ ID NO: 27140 - DNA, 22 bp, Artificial Sequence
  Synthetic
taaaaaacaatggaatggttgg

SEQ ID NO: 27141 - DNA, 19 bp, Artificial Sequence
  Synthetic
tcccgaaaagcaaagtcat

SEQ ID NO: 27142 - DNA, 20 bp, Artificial Sequence
  Synthetic
cgtgttcttgatgatctgca

SEQ ID NO: 27143 - DNA, 18 bp, Artificial Sequence
  Synthetic
ttgtacgcacaaccgaag

SEQ ID NO: 27144 - DNA, 18 bp, Artificial Sequence
  Synthetic
agttgattcgcctcgttc

SEQ ID NO: 27145 - DNA, 25 bp, Artificial Sequence
  Synthetic
ctttctctaggtaatatatgtggac

SEQ ID NO: 27146 - DNA, 19 bp, Artificial Sequence
  Synthetic
tcctcaaagtccaccttct

SEQ ID NO: 27147 - DNA, 24 bp, Artificial Sequence
  Synthetic
ctgtatttatgtacactcccttca

SEQ ID NO: 27148 - DNA, 18 bp, Artificial Sequence
  Synthetic
cttggcctactgcagttc

SEQ ID NO: 27149 - DNA, 18 bp, Artificial Sequence
  Synthetic
aaggttctgcacaccttc

SEQ ID NO: 27150 - DNA, 21 bp, Artificial Sequence
  Synthetic
gcatcctttgtcattgtgttc

SEQ ID NO: 27151 - DNA, 20 bp, Artificial Sequence
  Synthetic
aattgtgaaggagagctctg

SEQ ID NO: 27152 - DNA, 23 bp, Artificial Sequence
  Synthetic
ctctcttgttgatttgttgaagt

SEQ ID NO: 27153 - DNA, 19 bp, Artificial Sequence
  Synthetic
acctatctactcctgcctg

SEQ ID NO: 27154 - DNA, 18 bp, Artificial Sequence
  Synthetic
cccctgtgacatcggtat

SEQ ID NO: 27155 - DNA, 22 bp, Artificial Sequence
  Synthetic
atttccttatgactgacaaacg

SEQ ID NO: 27156 - DNA, 22 bp, Artificial Sequence
  Synthetic
tcaataaatgggatacggagag

SEQ ID NO: 27157 - DNA, 23 bp, Artificial Sequence
  Synthetic
agaaacaacagctaacttttctg

SEQ ID NO: 27158 - DNA, 18 bp, Artificial Sequence
  Synthetic
gccttaacagctgatcgc

SEQ ID NO: 27159 - DNA, 23 bp, Artificial Sequence
  Synthetic
atctgatatgtcactttcagatc

SEQ ID NO: 27160 - DNA, 19 bp, Artificial Sequence
  Synthetic
ttgcctttttttccctctg

SEQ ID NO: 27161 - DNA, 20 bp, Artificial Sequence
  Synthetic
aactacagcatgtcttgttg

SEQ ID NO: 27162 - DNA, 19 bp, Artificial Sequence
  Synthetic
cttgtagccagtctaagcg

SEQ ID NO: 27163 - DNA, 22 bp, Artificial Sequence
  Synthetic
tggtgctaaaaagatttctctg

SEQ ID NO: 27164 - DNA, 20 bp, Artificial Sequence
  Synthetic
tctgagggtggtatctctgg

SEQ ID NO: 27165 - DNA, 19 bp, Artificial Sequence
  Synthetic
tttgtatatcaggggggca

SEQ ID NO: 27166 - DNA, 24 bp, Artificial Sequence
  Synthetic
aatattatcagatgctgaagcttc

SEQ ID NO: 27167 - DNA, 19 bp, Artificial Sequence
  Synthetic
gtaactaaggaagcaggcc

SEQ ID NO: 27168 - DNA, 19 bp, Artificial Sequence
  Synthetic
cgatgcagcaagagaactt

SEQ ID NO: 27169 - DNA, 18 bp, Artificial Sequence
  Synthetic
ttggtgatcggttgggta

SEQ ID NO: 27170 - DNA, 22 bp, Artificial Sequence
  Synthetic
ccaaactagtctctcagtttct

SEQ ID NO: 27171 - DNA, 25 bp, Artificial Sequence
  Synthetic
cctcaataactgtgttaactaattc

SEQ ID NO: 27172 - DNA, 21 bp, Artificial Sequence
  Synthetic
attcacatgtatattcaggcc

SEQ ID NO: 27173 - DNA, 18 bp, Artificial Sequence
  Synthetic
aacttcaaaattcgcgcg

SEQ ID NO: 27174 - DNA, 24 bp, Artificial Sequence
  Synthetic
cataatcactgagtttgagttcag

SEQ ID NO: 27175 - DNA, 22 bp, Artificial Sequence
  Synthetic
tgtttgaaattttcctttgagg

SEQ ID NO: 27176 - DNA, 20 bp, Artificial Sequence
  Synthetic
gaccacttggctgttttgga

SEQ ID NO: 27177 - DNA, 19 bp, Artificial Sequence
  Synthetic
cccagtatctgcttctcag

SEQ ID NO: 27178 - DNA, 19 bp, Artificial Sequence
  Synthetic
cccatttgaatgcctgtca

SEQ ID NO: 27179 - DNA, 25 bp, Artificial Sequence
  Synthetic
ccatcagtcattatagtaaaacatg

SEQ ID NO: 27180 - DNA, 25 bp, Artificial Sequence
  Synthetic
gtatcctatttgataatccaggttt

SEQ ID NO: 27181 - DNA, 20 bp, Artificial Sequence
  Synthetic
caatcagtcattgccacaac

SEQ ID NO: 27182 - DNA, 18 bp, Artificial Sequence
  Synthetic
gtcataggtttggcgacc

SEQ ID NO: 27183 - DNA, 25 bp, Artificial Sequence
  Synthetic
agtaattgtaaaagagagctctgta

SEQ ID NO: 27184 - DNA, 19 bp, Artificial Sequence
  Synthetic
tcaagtcaatgcttgcaag

SEQ ID NO: 27185 - DNA, 20 bp, Artificial Sequence
  Synthetic
cctgcttctattccctcatg

SEQ ID NO: 27186 - DNA, 20 bp, Artificial Sequence
  Synthetic
gtggcatcggtatgggtatc

SEQ ID NO: 27187 - DNA, 20 bp, Artificial Sequence
  Synthetic
tcttgcagtgaagtgttcag

SEQ ID NO: 27188 - DNA, 18 bp, Artificial Sequence
  Synthetic
ttcaacggtttctggcac

SEQ ID NO: 27189 - DNA, 24 bp, Artificial Sequence
  Synthetic
catctatttcatcgttttcttcct

SEQ ID NO: 27190 - DNA, 18 bp, Artificial Sequence
  Synthetic
tctgtatccacctccagc

SEQ ID NO: 27191 - DNA, 25 bp, Artificial Sequence
  Synthetic
ctatattgctattgtcacttgtacc

SEQ ID NO: 27192 - DNA, 25 bp, Artificial Sequence
  Synthetic
ggctcctaaaaatgttataaactct

SEQ ID NO: 27193 - DNA, 23 bp, Artificial Sequence
  Synthetic
gttcaatagctttatgtgcttta

SEQ ID NO: 27194 - DNA, 19 bp, Artificial Sequence
  Synthetic
cgtgttgtacccttccttt

SEQ ID NO: 27195 - DNA, 19 bp, Artificial Sequence
  Synthetic
gagtccacagtgtccaggt

SEQ ID NO: 27196 - DNA, 23 bp, Artificial Sequence
  Synthetic
tctttgtgtttcactatggtatg

SEQ ID NO: 27197 - DNA, 21 bp, Artificial Sequence
  Synthetic
gcaatagtaacatgggcaata

SEQ ID NO: 27198 - DNA, 23 bp, Artificial Sequence
  Synthetic
ctaatctactaaagcgaacagtc

SEQ ID NO: 27199 - DNA, 21 bp, Artificial Sequence
  Synthetic
cagaagatatagtgggcgaat

SEQ ID NO: 27200 - DNA, 19 bp, Artificial Sequence
  Synthetic
taagttctaaaggggggca

SEQ ID NO: 27201 - DNA, 18 bp, Artificial Sequence
  Synthetic
caggtgaagcaggcatac

SEQ ID NO: 27202 - DNA, 22 bp, Artificial Sequence
  Synthetic
atcatattcctcaacatgtctg

SEQ ID NO: 27203 - DNA, 20 bp, Artificial Sequence
  Synthetic
aaaccacagacataagccaa

SEQ ID NO: 27204 - DNA, 19 bp, Artificial Sequence
  Synthetic
actgatgtgtcctgttgac

SEQ ID NO: 27205 - DNA, 18 bp, Artificial Sequence
  Synthetic
agtcataggtctgtcggc

SEQ ID NO: 27206 - DNA, 19 bp, Artificial Sequence
  Synthetic
aagaaagttcggtgtcctg

SEQ ID NO: 27207 - DNA, 19 bp, Artificial Sequence
  Synthetic
cggcttgaatcccttcatg

SEQ ID NO: 27208 - DNA, 19 bp, Artificial Sequence
  Synthetic
tgctggaccaagatcattg

SEQ ID NO: 27209 - DNA, 18 bp, Artificial Sequence
  Synthetic
gcatcaattcgggctctg

SEQ ID NO: 27210 - DNA, 17 bp, Artificial Sequence
  Synthetic
tccagggaagcggtcac

SEQ ID NO: 27211 - DNA, 16 bp, Artificial Sequence
  Synthetic
tgccgcctgtagcacg

SEQ ID NO: 27212 - DNA, 19 bp, Artificial Sequence
  Synthetic
cgagggagaatggttcacc

SEQ ID NO: 27213 - DNA, 19 bp, Artificial Sequence
  Synthetic
tgatgtccagcctaggagg

SEQ ID NO: 27214 - DNA, 18 bp, Artificial Sequence
  Synthetic
ctcctgggcagctcatca

SEQ ID NO: 27215 - DNA, 19 bp, Artificial Sequence
  Synthetic
cactgggattccgggaatc

SEQ ID NO: 27216 - DNA, 19 bp, Artificial Sequence
  Synthetic
accaacatggcaagaacca

SEQ ID NO: 27217 - DNA, 16 bp, Artificial Sequence
  Synthetic
tggcgccagaaagggc

SEQ ID NO: 27218 - DNA, 20 bp, Artificial Sequence
  Synthetic
ctgccaacactagcatgact

SEQ ID NO: 27219 - DNA, 20 bp, Artificial Sequence
  Synthetic
acacacttcagcagcaatgt

SEQ ID NO: 27220 - DNA, 20 bp, Artificial Sequence
  Synthetic
gcacaccattcactctctga

SEQ ID NO: 27221 - DNA, 18 bp, Artificial Sequence
  Synthetic
ttctcacgacccaaacgc

SEQ ID NO: 27222 - DNA, 20 bp, Artificial Sequence
  Synthetic
acgatagccggttttacccg

SEQ ID NO: 27223 - DNA, 18 bp, Artificial Sequence
  Synthetic
gggtcgcagtggcaaaca

SEQ ID NO: 27224 - DNA, 19 bp, Artificial Sequence
  Synthetic
cacatcaccggctggaatt

SEQ ID NO: 27225 - DNA, 19 bp, Artificial Sequence
  Synthetic
taccacgtgacaccagcct

SEQ ID NO: 27226 - DNA, 16 bp, Artificial Sequence
  Synthetic
ccgccaagcaaggggt

SEQ ID NO: 27227 - DNA, 19 bp, Artificial Sequence
  Synthetic
cgtagctagcagccatggg

SEQ ID NO: 27228 - DNA, 16 bp, Artificial Sequence
  Synthetic
aggagcagagcagccg

SEQ ID NO: 27229 - DNA, 18 bp, Artificial Sequence
  Synthetic
agacggttgacccagtcg

SEQ ID NO: 27230 - DNA, 18 bp, Artificial Sequence
  Synthetic
atccacaagtacagcgcg

SEQ ID NO: 27231 - DNA, 18 bp, Artificial Sequence
  Synthetic
ggcaaatcaccggcgaag

SEQ ID NO: 27232 - DNA, 19 bp, Artificial Sequence
  Synthetic
tctcggcaagaacagtcgt

SEQ ID NO: 27233 - DNA, 19 bp, Artificial Sequence
  Synthetic
ccctcccacaacctaaggg

SEQ ID NO: 27234 - DNA, 18 bp, Artificial Sequence
  Synthetic
caaagcatgcacccggac

SEQ ID NO: 27235 - DNA, 19 bp, Artificial Sequence
  Synthetic
ggcttccgcatatccgtac

SEQ ID NO: 27236 - DNA, 18 bp, Artificial Sequence
  Synthetic
gcgaggcaagagcttcag

SEQ ID NO: 27237 - DNA, 18 bp, Artificial Sequence
  Synthetic
agcacgcaaacacacaat

SEQ ID NO: 27238 - DNA, 22 bp, Artificial Sequence
  Synthetic
agctccagaataatatcttgca

SEQ ID NO: 27239 - DNA, 20 bp, Artificial Sequence
  Synthetic
agtttttgcaattgctcctc

SEQ ID NO: 27240 - DNA, 20 bp, Artificial Sequence
  Synthetic
aacctactccaaacgactct

SEQ ID NO: 27241 - DNA, 18 bp, Artificial Sequence
  Synthetic
tatgaactgtcccgcgat

SEQ ID NO: 27242 - DNA, 19 bp, Artificial Sequence
  Synthetic
caaatttggcctggttgtt

SEQ ID NO: 27243 - DNA, 24 bp, Artificial Sequence
  Synthetic
tgttacatcatccaatagagctat

SEQ ID NO: 27244 - DNA, 18 bp, Artificial Sequence
  Synthetic
attgaaacgctcgctgag

SEQ ID NO: 27245 - DNA, 20 bp, Artificial Sequence
  Synthetic
tcggtttgttgtggctgttt

SEQ ID NO: 27246 - DNA, 18 bp, Artificial Sequence
  Synthetic
gtgtggtgcaggaggagg

SEQ ID NO: 27247 - DNA, 18 bp, Artificial Sequence
  Synthetic
tttagctctgttgcggac

SEQ ID NO: 27248 - DNA, 22 bp, Artificial Sequence
  Synthetic
cgccatagcaaatacaaaatgt

SEQ ID NO: 27249 - DNA, 19 bp, Artificial Sequence
  Synthetic
tgacccgtgttggaggaat

SEQ ID NO: 27250 - DNA, 18 bp, Artificial Sequence
  Synthetic
catatcccgctggtgttg

SEQ ID NO: 27251 - DNA, 18 bp, Artificial Sequence
  Synthetic
ttttacgtttgcgcctgt

SEQ ID NO: 27252 - DNA, 20 bp, Artificial Sequence
  Synthetic
tcattttctgcacatggaac

SEQ ID NO: 27253 - DNA, 21 bp, Artificial Sequence
  Synthetic
ccattattatgaccttgggct

SEQ ID NO: 27254 - DNA, 23 bp, Artificial Sequence
  Synthetic
ttccttgaatactgtgtaaaagt

SEQ ID NO: 27255 - DNA, 23 bp, Artificial Sequence
  Synthetic
actatctctgttatgttcctttc

SEQ ID NO: 27256 - DNA, 20 bp, Artificial Sequence
  Synthetic
ttgttgttcaaagtggttcc

SEQ ID NO: 27257 - DNA, 20 bp, Artificial Sequence
  Synthetic
tgagttctgaggatgttctt

SEQ ID NO: 27258 - DNA, 24 bp, Artificial Sequence
  Synthetic
acatttatatatagcacgggtcta

SEQ ID NO: 27259 - DNA, 23 bp, Artificial Sequence
  Synthetic
tgacttgcctatttatttgtgac

SEQ ID NO: 27260 - DNA, 18 bp, Artificial Sequence
  Synthetic
gttcgtttgttgcttggc

SEQ ID NO: 27261 - DNA, 23 bp, Artificial Sequence
  Synthetic
ttcagttttcttgtcatcagttg

SEQ ID NO: 27262 - DNA, 20 bp, Artificial Sequence
  Synthetic
tcataatcctctgctgtgtc

SEQ ID NO: 27263 - DNA, 20 bp, Artificial Sequence
  Synthetic
tatagtaaccggtgctggtt

SEQ ID NO: 27264 - DNA, 24 bp, Artificial Sequence
  Synthetic
tggtagaactaagctttctaattc

SEQ ID NO: 27265 - DNA, 25 bp, Artificial Sequence
  Synthetic
gttaagtcagtacctttattactgt

SEQ ID NO: 27266 - DNA, 18 bp, Artificial Sequence
  Synthetic
gctgaggagaggtggtaa

SEQ ID NO: 27267 - DNA, 18 bp, Artificial Sequence
  Synthetic
atgcttcagaaacgcagc

SEQ ID NO: 27268 - DNA, 21 bp, Artificial Sequence
  Synthetic
ttcaattgagtaggtgctcta

SEQ ID NO: 27269 - DNA, 25 bp, Artificial Sequence
  Synthetic
ctcataaagattcattaggttttcc

SEQ ID NO: 27270 - DNA, 18 bp, Artificial Sequence
  Synthetic
cgtcgtcgtcgtcgtaac

SEQ ID NO: 27271 - DNA, 21 bp, Artificial Sequence
  Synthetic
taatagtgtcatgtgcaaaca

SEQ ID NO: 27272 - DNA, 22 bp, Artificial Sequence
  Synthetic
aacttgctgtacaaaacgtcta

SEQ ID NO: 27273 - DNA, 18 bp, Artificial Sequence
  Synthetic
cacctttgcaacaggctt

SEQ ID NO: 27274 - DNA, 22 bp, Artificial Sequence
  Synthetic
tactagtctccatactaatcgc

SEQ ID NO: 27275 - DNA, 18 bp, Artificial Sequence
  Synthetic
tactgtcctgttggtggt

SEQ ID NO: 27276 - DNA, 21 bp, Artificial Sequence
  Synthetic
tcttgcataaagctgttcctt

SEQ ID NO: 27277 - DNA, 23 bp, Artificial Sequence
  Synthetic
ctgaagttaatatttcgcgtatt

SEQ ID NO: 27278 - DNA, 19 bp, Artificial Sequence
  Synthetic
tttgtgctacgtttgcagt

SEQ ID NO: 27279 - DNA, 19 bp, Artificial Sequence
  Synthetic
tgtgttctgttgactgtgt

SEQ ID NO: 27280 - DNA, 18 bp, Artificial Sequence
  Synthetic
ggccttgggttagtttgt

SEQ ID NO: 27281 - DNA, 23 bp, Artificial Sequence
  Synthetic
gctcttattagatagcctctctt

SEQ ID NO: 27282 - DNA, 21 bp, Artificial Sequence
  Synthetic
tgaaagaaagctcagtgtctt

SEQ ID NO: 27283 - DNA, 23 bp, Artificial Sequence
  Synthetic
cattgaaatacttcaggtcaatg

SEQ ID NO: 27284 - DNA, 21 bp, Artificial Sequence
  Synthetic
gaatctatccactcctgcttg

SEQ ID NO: 27285 - DNA, 21 bp, Artificial Sequence
  Synthetic
tcctctatggcacctatatgt

SEQ ID NO: 27286 - DNA, 20 bp, Artificial Sequence
  Synthetic
cagggggttacaaagtcttc

SEQ ID NO: 27287 - DNA, 18 bp, Artificial Sequence
  Synthetic
attctggcatcaatccgg

SEQ ID NO: 27288 - DNA, 22 bp, Artificial Sequence
  Synthetic
acaagcactgtagctctaattc

SEQ ID NO: 27289 - DNA, 19 bp, Artificial Sequence
  Synthetic
gacacaacacagtctaacg

SEQ ID NO: 27290 - DNA, 22 bp, Artificial Sequence
  Synthetic
ttttcagcttcatcttcaatcc

SEQ ID NO: 27291 - DNA, 18 bp, Artificial Sequence
  Synthetic
tgtcgtacgatgtggaag

SEQ ID NO: 27292 - DNA, 21 bp, Artificial Sequence
  Synthetic
aatgtcccatagagtacgtag

SEQ ID NO: 27293 - DNA, 18 bp, Artificial Sequence
  Synthetic
tgagttggccttccagac

SEQ ID NO: 27294 - DNA, 24 bp, Artificial Sequence
  Synthetic
ctacttcaaattcttcgttagagg

SEQ ID NO: 27295 - DNA, 23 bp, Artificial Sequence
  Synthetic
acaaacctattacctaattgggt

SEQ ID NO: 27296 - DNA, 24 bp, Artificial Sequence
  Synthetic
cttactcttattgtaccttctgag

SEQ ID NO: 27297 - DNA, 21 bp, Artificial Sequence
  Synthetic
actttgatatctccaccatct

SEQ ID NO: 27298 - DNA, 25 bp, Artificial Sequence
  Synthetic
gtttgtttaggatctatagacaagt

SEQ ID NO: 27299 - DNA, 19 bp, Artificial Sequence
  Synthetic
tcaggccataagctgattg

SEQ ID NO: 27300 - DNA, 22 bp, Artificial Sequence
  Synthetic
caactgaaacaatacacaacaa

SEQ ID NO: 27301 - DNA, 20 bp, Artificial Sequence
  Synthetic
cccattgctatcagactcag

SEQ ID NO: 27302 - DNA, 19 bp, Artificial Sequence
  Synthetic
gttgttctctccgttgggc

SEQ ID NO: 27303 - DNA, 18 bp, Artificial Sequence
  Synthetic
ccttcagcaacccatgaa

SEQ ID NO: 27304 - DNA, 21 bp, Artificial Sequence
  Synthetic
gcactactatttcaggaccaa

SEQ ID NO: 27305 - DNA, 19 bp, Artificial Sequence
  Synthetic
ctgtagtggccacaaatgt

SEQ ID NO: 27306 - DNA, 19 bp, Artificial Sequence
  Synthetic
aattgaactgaatcgcctg

SEQ ID NO: 27307 - DNA, 19 bp, Artificial Sequence
  Synthetic
acctttaatgctgctccac

SEQ ID NO: 27308 - DNA, 21 bp, Artificial Sequence
  Synthetic
aatcatctgtactcagcactc

SEQ ID NO: 27309 - DNA, 22 bp, Artificial Sequence
  Synthetic
gcaagtagaacaaagttcacat

SEQ ID NO: 27310 - DNA, 21 bp, Artificial Sequence
  Synthetic
gttgcaagaggattatgtctc

SEQ ID NO: 27311 - DNA, 22 bp, Artificial Sequence
  Synthetic
cataacaaaatggtcctttcca

SEQ ID NO: 27312 - DNA, 19 bp, Artificial Sequence
  Synthetic
ctgagaaagaagcagttgc

SEQ ID NO: 27313 - DNA, 25 bp, Artificial Sequence
  Synthetic
cattgttattttcagttccagtttc

SEQ ID NO: 27314 - DNA, 19 bp, Artificial Sequence
  Synthetic
atgactcactagctgtagc

SEQ ID NO: 27315 - DNA, 21 bp, Artificial Sequence
  Synthetic
ggattaccatctaaacccgtt

SEQ ID NO: 27316 - DNA, 23 bp, Artificial Sequence
  Synthetic
acataataacatgctcttgtctt

SEQ ID NO: 27317 - DNA, 19 bp, Artificial Sequence
  Synthetic
atagtttcggagttccagg

SEQ ID NO: 27318 - DNA, 23 bp, Artificial Sequence
  Synthetic
ttaacccttttactggtattcat

SEQ ID NO: 27319 - DNA, 19 bp, Artificial Sequence
  Synthetic
ggaccagaaacagtgacat

SEQ ID NO: 27320 - DNA, 18 bp, Artificial Sequence
  Synthetic
tctgctcctcctcaaagg

SEQ ID NO: 27321 - DNA, 23 bp, Artificial Sequence
  Synthetic
attgcaggttcaatattagaagt

SEQ ID NO: 27322 - DNA, 20 bp, Artificial Sequence
  Synthetic
gtagttccaataccaagcgg

SEQ ID NO: 27323 - DNA, 18 bp, Artificial Sequence
  Synthetic
tctcccattgttcctgct

SEQ ID NO: 27324 - DNA, 18 bp, Artificial Sequence
  Synthetic
cagcttgttcaggacagg

SEQ ID NO: 27325 - DNA, 23 bp, Artificial Sequence
  Synthetic
gatggacagtctaaaatctgttt

SEQ ID NO: 27326 - DNA, 18 bp, Artificial Sequence
  Synthetic
taccactcccggtcattg

SEQ ID NO: 27327 - DNA, 16 bp, Artificial Sequence
  Synthetic
cccgtctggtccacca

SEQ ID NO: 27328 - DNA, 20 bp, Artificial Sequence
  Synthetic
gaggaaatgctggcaggttc

SEQ ID NO: 27329 - DNA, 16 bp, Artificial Sequence
  Synthetic
tgtggcctcccgttcc

SEQ ID NO: 27330 - DNA, 19 bp, Artificial Sequence
  Synthetic
gccataaacgccgactacg

SEQ ID NO: 27331 - DNA, 17 bp, Artificial Sequence
  Synthetic
ctttgcggacgagctgc

SEQ ID NO: 27332 - DNA, 16 bp, Artificial Sequence
  Synthetic
gcccggcctgacgatt

SEQ ID NO: 27333 - DNA, 16 bp, Artificial Sequence
  Synthetic
aacctccccggctgga

SEQ ID NO: 27334 - DNA, 17 bp, Artificial Sequence
  Synthetic
accacaccccccagtac

SEQ ID NO: 27335 - DNA, 16 bp, Artificial Sequence
  Synthetic
cgagccacgccagaac

SEQ ID NO: 27336 - DNA, 17 bp, Artificial Sequence
  Synthetic
acagggccgagagaacg

SEQ ID NO: 27337 - DNA, 15 bp, Artificial Sequence
  Synthetic
agccgtcaagcgcgt

SEQ ID NO: 27338 - DNA, 16 bp, Artificial Sequence
  Synthetic
tgcagcaccatggccg

SEQ ID NO: 27339 - DNA, 20 bp, Artificial Sequence
  Synthetic
ggggcgataacatctgcatt

SEQ ID NO: 27340 - DNA, 17 bp, Artificial Sequence
  Synthetic
accttccccaacgcgag

SEQ ID NO: 27341 - DNA, 18 bp, Artificial Sequence
  Synthetic
gatacgtcccgctcagga

SEQ ID NO: 27342 - DNA, 18 bp, Artificial Sequence
  Synthetic
cgcatcgatccggagatc

SEQ ID NO: 27343 - DNA, 17 bp, Artificial Sequence
  Synthetic
agccacttccccgactg

SEQ ID NO: 27344 - DNA, 16 bp, Artificial Sequence
  Synthetic
accttccgtcccctgc

SEQ ID NO: 27345 - DNA, 16 bp, Artificial Sequence
  Synthetic
cccaagattcggcgcg

SEQ ID NO: 27346 - DNA, 18 bp, Artificial Sequence
  Synthetic
tccccctcgcacatcctc

SEQ ID NO: 27347 - DNA, 16 bp, Artificial Sequence
  Synthetic
tggaggagcaagcggc

SEQ ID NO: 27348 - DNA, 20 bp, Artificial Sequence
  Synthetic
gccgagatttacaaggacca

SEQ ID NO: 27349 - DNA, 16 bp, Artificial Sequence
  Synthetic
tttaaccgcgagcgcc

SEQ ID NO: 27350 - DNA, 20 bp, Artificial Sequence
  Synthetic
gagcggctcaagatctttcg

SEQ ID NO: 27351 - DNA, 15 bp, Artificial Sequence
  Synthetic
tacgcgcgccaaacc

SEQ ID NO: 27352 - DNA, 16 bp, Artificial Sequence
  Synthetic
gaggccgctgttggtg

SEQ ID NO: 27353 - DNA, 17 bp, Artificial Sequence
  Synthetic
gcgaatgtgtgcggagg

SEQ ID NO: 27354 - DNA, 16 bp, Artificial Sequence
  Synthetic
agtgtcacgcgggagg

SEQ ID NO: 27355 - DNA, 17 bp, Artificial Sequence
  Synthetic
gtgcgcctggattcgct

SEQ ID NO: 27356 - DNA, 19 bp, Artificial Sequence
  Synthetic
gtgctcagcccctgcttta

SEQ ID NO: 27357 - DNA, 20 bp, Artificial Sequence
  Synthetic
catcatcagctcaagacggg

SEQ ID NO: 27358 - DNA, 20 bp, Artificial Sequence
  Synthetic
cggtgttttacctgctgcag

SEQ ID NO: 27359 - DNA, 17 bp, Artificial Sequence
  Synthetic
gttgcgcgccatccaac

SEQ ID NO: 27360 - DNA, 20 bp, Artificial Sequence
  Synthetic
atgcaaacagcctgtacgac

SEQ ID NO: 27361 - DNA, 20 bp, Artificial Sequence
  Synthetic
tgttttgggggatgtccgtg

SEQ ID NO: 27362 - DNA, 19 bp, Artificial Sequence
  Synthetic
ggtttcggtccgttgtgac

SEQ ID NO: 27363 - DNA, 20 bp, Artificial Sequence
  Synthetic
cgagagcgtgtttatcctgg

SEQ ID NO: 27364 - DNA, 18 bp, Artificial Sequence
  Synthetic
gtttttctcgggggacgc

SEQ ID NO: 27365 - DNA, 17 bp, Artificial Sequence
  Synthetic
tcatcccgccgaccttg

SEQ ID NO: 27366 - DNA, 18 bp, Artificial Sequence
  Synthetic
tgtggcctcgaataccga

SEQ ID NO: 27367 - DNA, 18 bp, Artificial Sequence
  Synthetic
tgagtcttcggacctcgc

SEQ ID NO: 27368 - DNA, 16 bp, Artificial Sequence
  Synthetic
acgaccacctgctccg

SEQ ID NO: 27369 - DNA, 17 bp, Artificial Sequence
  Synthetic
ggaatagtggcgctggc

SEQ ID NO: 27370 - DNA, 19 bp, Artificial Sequence
  Synthetic
ctcaagaaccccaccaacc

SEQ ID NO: 27371 - DNA, 18 bp, Artificial Sequence
  Synthetic
caccttcggtgggggcta

SEQ ID NO: 27372 - DNA, 16 bp, Artificial Sequence
  Synthetic
tgccatcgcgtggtgc

SEQ ID NO: 27373 - DNA, 16 bp, Artificial Sequence
  Synthetic
tgggggactgcatcgg

SEQ ID NO: 27374 - DNA, 16 bp, Artificial Sequence
  Synthetic
tggcctgggactgggt

SEQ ID NO: 27375 - DNA, 17 bp, Artificial Sequence
  Synthetic
aagcgcgtggacatcct

SEQ ID NO: 27376 - DNA, 17 bp, Artificial Sequence
  Synthetic
gccctgagtcagtgcca

SEQ ID NO: 27377 - DNA, 19 bp, Artificial Sequence
  Synthetic
tcatgcaggagacgtaccg

SEQ ID NO: 27378 - DNA, 19 bp, Artificial Sequence
  Synthetic
accgagggcttcaaggagg

SEQ ID NO: 27379 - DNA, 18 bp, Artificial Sequence
  Synthetic
ggattacctccgttcgcg

SEQ ID NO: 27380 - DNA, 17 bp, Artificial Sequence
  Synthetic
atggccgggcagaagtt

SEQ ID NO: 27381 - DNA, 17 bp, Artificial Sequence
  Synthetic
cttgatggcggcctgct

SEQ ID NO: 27382 - DNA, 20 bp, Artificial Sequence
  Synthetic
ggtgaacgtcttttcgcact

SEQ ID NO: 27383 - DNA, 20 bp, Artificial Sequence
  Synthetic
agctttttttcgtccacacg

SEQ ID NO: 27384 - DNA, 16 bp, Artificial Sequence
  Synthetic
gcagcagctggaaggc

SEQ ID NO: 27385 - DNA, 16 bp, Artificial Sequence
  Synthetic
tcggggcccatgaacc

SEQ ID NO: 27386 - DNA, 16 bp, Artificial Sequence
  Synthetic
atccagcggggccaga

SEQ ID NO: 27387 - DNA, 16 bp, Artificial Sequence
  Synthetic
ggcgaggtgggcttct

SEQ ID NO: 27388 - DNA, 19 bp, Artificial Sequence
  Synthetic
gcagggcacatatgatcgc

SEQ ID NO: 27389 - DNA, 19 bp, Artificial Sequence
  Synthetic
cctacgttctggccctggt

SEQ ID NO: 27390 - DNA, 18 bp, Artificial Sequence
  Synthetic
gaaccttaccaccccggc

SEQ ID NO: 27391 - DNA, 16 bp, Artificial Sequence
  Synthetic
agcaagacccggggga

SEQ ID NO: 27392 - DNA, 20 bp, Artificial Sequence
  Synthetic
gaccggcaagtttccaaagc

SEQ ID NO: 27393 - DNA, 16 bp, Artificial Sequence
  Synthetic
ccttgagggcgggcat

SEQ ID NO: 27394 - DNA, 17 bp, Artificial Sequence
  Synthetic
cgcttcccaggttgcag

SEQ ID NO: 27395 - DNA, 18 bp, Artificial Sequence
  Synthetic
aggacatccgcgacgaaa

SEQ ID NO: 27396 - DNA, 19 bp, Artificial Sequence
  Synthetic
ttgtgtttggagccaaggc

SEQ ID NO: 27397 - DNA, 19 bp, Artificial Sequence
  Synthetic
cgcttctggtccacgagag

SEQ ID NO: 27398 - DNA, 19 bp, Artificial Sequence
  Synthetic
ggtgacgcaggtactcgtg

SEQ ID NO: 27399 - DNA, 16 bp, Artificial Sequence
  Synthetic
tgtgcgttcgatgcgg

SEQ ID NO: 27400 - DNA, 17 bp, Artificial Sequence
  Synthetic
tcgtgcgtctgcgtgtc

SEQ ID NO: 27401 - DNA, 18 bp, Artificial Sequence
  Synthetic
tttgccgacaccgtggtg

SEQ ID NO: 27402 - DNA, 16 bp, Artificial Sequence
  Synthetic
acgacgcccccgaaga

SEQ ID NO: 27403 - DNA, 19 bp, Artificial Sequence
  Synthetic
gggaagtcacgaggtacgg

SEQ ID NO: 27404 - DNA, 17 bp, Artificial Sequence
  Synthetic
tcaccaccatccgcgtg

SEQ ID NO: 27405 - DNA, 18 bp, Artificial Sequence
  Synthetic
cacagagggccactcacg

SEQ ID NO: 27406 - DNA, 16 bp, Artificial Sequence
  Synthetic
cccgacgcctcgtgaa

SEQ ID NO: 27407 - DNA, 20 bp, Artificial Sequence
  Synthetic
ctccacaaaatctcggtcca

SEQ ID NO: 27408 - DNA, 17 bp, Artificial Sequence
  Synthetic
tgcaggcggttgctgtc

SEQ ID NO: 27409 - DNA, 16 bp, Artificial Sequence
  Synthetic
tgttggtgccggtggg

SEQ ID NO: 27410 - DNA, 19 bp, Artificial Sequence
  Synthetic
gcctgcgtagttcaagagg

SEQ ID NO: 27411 - DNA, 18 bp, Artificial Sequence
  Synthetic
tcctctccgtgggggtct

SEQ ID NO: 27412 - DNA, 16 bp, Artificial Sequence
  Synthetic
ggcgcggaccaggtaa

SEQ ID NO: 27413 - DNA, 18 bp, Artificial Sequence
  Synthetic
acgtacgccgaggctatg

SEQ ID NO: 27414 - DNA, 16 bp, Artificial Sequence
  Synthetic
ttgctgatcccccgcc

SEQ ID NO: 27415 - DNA, 17 bp, Artificial Sequence
  Synthetic
caaaatccgccggggtg

SEQ ID NO: 27416 - DNA, 19 bp, Artificial Sequence
  Synthetic
ttggggagaagcaggtgtc

SEQ ID NO: 27417 - DNA, 16 bp, Artificial Sequence
  Synthetic
tgtcgtcggggtcgtc

SEQ ID NO: 27418 - DNA, 17 bp, Artificial Sequence
  Synthetic
gcgtgtatgggcatgcc

SEQ ID NO: 27419 - DNA, 18 bp, Artificial Sequence
  Synthetic
atcgtgcgcactaggtcc

SEQ ID NO: 27420 - DNA, 17 bp, Artificial Sequence
  Synthetic
agaacaacgccctgccc

SEQ ID NO: 27421 - DNA, 20 bp, Artificial Sequence
  Synthetic
acaaaacttacgacaggcca

SEQ ID NO: 27422 - DNA, 16 bp, Artificial Sequence
  Synthetic
tgacacaggcgctcgg

SEQ ID NO: 27423 - DNA, 16 bp, Artificial Sequence
  Synthetic
tggtcgaggggggctt

SEQ ID NO: 27424 - DNA, 16 bp, Artificial Sequence
  Synthetic
aggatcgccgggtggt

SEQ ID NO: 27425 - DNA, 19 bp, Artificial Sequence
  Synthetic
cctggcggtgaatgtagtc

SEQ ID NO: 27426 - DNA, 20 bp, Artificial Sequence
  Synthetic
tctggatgcggggaaaactc

SEQ ID NO: 27427 - DNA, 19 bp, Artificial Sequence
  Synthetic
cctcctcctccagtccaat

SEQ ID NO: 27428 - DNA, 18 bp, Artificial Sequence
  Synthetic
tccggatagccaggcctg

SEQ ID NO: 27429 - DNA, 18 bp, Artificial Sequence
  Synthetic
ctggggtgaggggacact

SEQ ID NO: 27430 - DNA, 16 bp, Artificial Sequence
  Synthetic
tcacacggccgggcta

SEQ ID NO: 27431 - DNA, 18 bp, Artificial Sequence
  Synthetic
ggtcccccacaaagcgaa

SEQ ID NO: 27432 - DNA, 18 bp, Artificial Sequence
  Synthetic
gagccgttgtacgccaga

SEQ ID NO: 27433 - DNA, 16 bp, Artificial Sequence
  Synthetic
ccaccaggaccaccga

SEQ ID NO: 27434 - DNA, 16 bp, Artificial Sequence
  Synthetic
accgactgttggcggc

SEQ ID NO: 27435 - DNA, 20 bp, Artificial Sequence
  Synthetic
gtgatgggggggaagagaga

SEQ ID NO: 27436 - DNA, 20 bp, Artificial Sequence
  Synthetic
tgatttacccaggtgttgtt

SEQ ID NO: 27437 - DNA, 22 bp, Artificial Sequence
  Synthetic
ttgagttctcagtatgttgttc

SEQ ID NO: 27438 - DNA, 24 bp, Artificial Sequence
  Synthetic
ccaaattttgattgaaagataccc

SEQ ID NO: 27439 - DNA, 18 bp, Artificial Sequence
  Synthetic
caccgagaagctactgtc

SEQ ID NO: 27440 - DNA, 20 bp, Artificial Sequence
  Synthetic
accactgaacaaatggcact

SEQ ID NO: 27441 - DNA, 20 bp, Artificial Sequence
  Synthetic
aggcctgttaataggaagtt

SEQ ID NO: 27442 - DNA, 18 bp, Artificial Sequence
  Synthetic
atgcctcaaggtcggtcg

SEQ ID NO: 27443 - DNA, 20 bp, Artificial Sequence
  Synthetic
cacaagagttgcctgaactt

SEQ ID NO: 27444 - DNA, 20 bp, Artificial Sequence
  Synthetic
aggtgtccttgttgggattg

SEQ ID NO: 27445 - DNA, 19 bp, Artificial Sequence
  Synthetic
tcctaagtgacgggttctt

SEQ ID NO: 27446 - DNA, 23 bp, Artificial Sequence
  Synthetic
atgttttaacctttcgactttgt

SEQ ID NO: 27447 - DNA, 21 bp, Artificial Sequence
  Synthetic
ctgtctaagaatgtccaccat

SEQ ID NO: 27448 - DNA, 21 bp, Artificial Sequence
  Synthetic
atcttctggttgcttttctga

SEQ ID NO: 27449 - DNA, 18 bp, Artificial Sequence
  Synthetic
ccatcacactgtcgatgt

SEQ ID NO: 27450 - DNA, 23 bp, Artificial Sequence
  Synthetic
atgatccattgataggtattgac

SEQ ID NO: 27451 - DNA, 18 bp, Artificial Sequence
  Synthetic
tgctttgctttggtggag

SEQ ID NO: 27452 - DNA, 22 bp, Artificial Sequence
  Synthetic
cttttgcaaggttactcagttc

SEQ ID NO: 27453 - DNA, 19 bp, Artificial Sequence
  Synthetic
gtgcaacacatctcacaca

SEQ ID NO: 27454 - DNA, 19 bp, Artificial Sequence
  Synthetic
gcatcttagaagcattcgc

SEQ ID NO: 27455 - DNA, 19 bp, Artificial Sequence
  Synthetic
ttggggcaaagaaacgaaa

SEQ ID NO: 27456 - DNA, 18 bp, Artificial Sequence
  Synthetic
tttgtcacaatcctcccg

SEQ ID NO: 27457 - DNA, 23 bp, Artificial Sequence
  Synthetic
tgctttctgattagttctttcca

SEQ ID NO: 27458 - DNA, 24 bp, Artificial Sequence
  Synthetic
cttttttaatgactgcaacaacag

SEQ ID NO: 27459 - DNA, 19 bp, Artificial Sequence
  Synthetic
actggtactagagccgacc

SEQ ID NO: 27460 - DNA, 19 bp, Artificial Sequence
  Synthetic
ctgtgactctaggtgttgt

SEQ ID NO: 27461 - DNA, 24 bp, Artificial Sequence
  Synthetic
gctatattttcatcttgtcctgta

SEQ ID NO: 27462 - DNA, 21 bp, Artificial Sequence
  Synthetic
taactctaacgcgaccactat

SEQ ID NO: 27463 - DNA, 25 bp, Artificial Sequence
  Synthetic
cctcatcatcaaattgtatttcact

SEQ ID NO: 27464 - DNA, 19 bp, Artificial Sequence
  Synthetic
cctcaacagtttcctgagg

SEQ ID NO: 27465 - DNA, 18 bp, Artificial Sequence
  Synthetic
agctgtgtttgttttggg

SEQ ID NO: 27466 - DNA, 24 bp, Artificial Sequence
  Synthetic
gaaaatctggatatttacaggtgc

SEQ ID NO: 27467 - DNA, 21 bp, Artificial Sequence
  Synthetic
gctcttttctaacacgtttgt

SEQ ID NO: 27468 - DNA, 20 bp, Artificial Sequence
  Synthetic
tgaaaaatatttgccagccc

SEQ ID NO: 27469 - DNA, 20 bp, Artificial Sequence
  Synthetic
aaacacttgagtcagccata

SEQ ID NO: 27470 - DNA, 19 bp, Artificial Sequence
  Synthetic
attgtgacacttggagtct

SEQ ID NO: 27471 - DNA, 19 bp, Artificial Sequence
  Synthetic
gtctttttgcaccaacagt

SEQ ID NO: 27472 - DNA, 20 bp, Artificial Sequence
  Synthetic
agtcgtgagtaaccgtgtct

SEQ ID NO: 27473 - DNA, 21 bp, Artificial Sequence
  Synthetic
gtctagtcactggtaagtctg

SEQ ID NO: 27474 - DNA, 21 bp, Artificial Sequence
  Synthetic
tagctgtctcactttcttctg

SEQ ID NO: 27475 - DNA, 18 bp, Artificial Sequence
  Synthetic
tgagctggtgttcgtaaa

SEQ ID NO: 27476 - DNA, 20 bp, Artificial Sequence
  Synthetic
tccttctgatgtagcagaca

SEQ ID NO: 27477 - DNA, 22 bp, Artificial Sequence
  Synthetic
gctcgtttaccatttaacaaac

SEQ ID NO: 27478 - DNA, 19 bp, Artificial Sequence
  Synthetic
tctcacaaatggacgtctg

SEQ ID NO: 27479 - DNA, 20 bp, Artificial Sequence
  Synthetic
actgatactagcttccacag

SEQ ID NO: 27480 - DNA, 20 bp, Artificial Sequence
  Synthetic
tgctagtgctggagagaacc

SEQ ID NO: 27481 - DNA, 18 bp, Artificial Sequence
  Synthetic
cgtggtttgttcctgccg

SEQ ID NO: 27482 - DNA, 18 bp, Artificial Sequence
  Synthetic
gactccaacaggctctct

SEQ ID NO: 27483 - DNA, 20 bp, Artificial Sequence
  Synthetic
cccgaacttcttttcctcca

SEQ ID NO: 27484 - DNA, 22 bp, Artificial Sequence
  Synthetic
ttttggtccctgttttatgtct

SEQ ID NO: 27485 - DNA, 20 bp, Artificial Sequence
  Synthetic
tttgccatgatgtgtcctgg

SEQ ID NO: 27486 - DNA, 18 bp, Artificial Sequence
  Synthetic
gccttggtccatctttcc

SEQ ID NO: 27487 - DNA, 20 bp, Artificial Sequence
  Synthetic
ctggtagggtaaatgcagta

SEQ ID NO: 27488 - DNA, 18 bp, Artificial Sequence
  Synthetic
ttggccatagttcacagc

SEQ ID NO: 27489 - DNA, 21 bp, Artificial Sequence
  Synthetic
ggattttctcttcctggtgta

SEQ ID NO: 27490 - DNA, 21 bp, Artificial Sequence
  Synthetic
catatcctgcttttccctctt

SEQ ID NO: 27491 - DNA, 25 bp, Artificial Sequence
  Synthetic
gggttagttcttttataatgctatg

SEQ ID NO: 27492 - DNA, 18 bp, Artificial Sequence
  Synthetic
acctacccaccatgccac

SEQ ID NO: 27493 - DNA, 19 bp, Artificial Sequence
  Synthetic
ttccacagtagttcaccag

SEQ ID NO: 27494 - DNA, 18 bp, Artificial Sequence
  Synthetic
cttcacctgccgtaaagc

SEQ ID NO: 27495 - DNA, 25 bp, Artificial Sequence
  Synthetic
gcacaaatatctatactttgtgtag

SEQ ID NO: 27496 - DNA, 18 bp, Artificial Sequence
  Synthetic
tacatcccgctctgaagt

SEQ ID NO: 27497 - DNA, 23 bp, Artificial Sequence
  Synthetic
acaatatactaagcaagcacttg

SEQ ID NO: 27498 - DNA, 18 bp, Artificial Sequence
  Synthetic
gaggttgtggaactcgag

SEQ ID NO: 27499 - DNA, 22 bp, Artificial Sequence
  Synthetic
ttacatcttaatagggcaaagc

SEQ ID NO: 27500 - DNA, 18 bp, Artificial Sequence
  Synthetic
ggtttgcttcacctcctg

SEQ ID NO: 27501 - DNA, 24 bp, Artificial Sequence
  Synthetic
gtccgatttttatctatgtcaatg

SEQ ID NO: 27502 - DNA, 21 bp, Artificial Sequence
  Synthetic
tgatatttgcctctaggtagc

SEQ ID NO: 27503 - DNA, 19 bp, Artificial Sequence
  Synthetic
cctcgcgaatgcttggaaa

SEQ ID NO: 27504 - DNA, 25 bp, Artificial Sequence
  Synthetic
catatctattgccaatttataggtc

SEQ ID NO: 27505 - DNA, 24 bp, Artificial Sequence
  Synthetic
cctgttattcactatatggtatcc

SEQ ID NO: 27506 - DNA, 20 bp, Artificial Sequence
  Synthetic
tgcttctaactggcagcttt

SEQ ID NO: 27507 - DNA, 19 bp, Artificial Sequence
  Synthetic
atcacaccagtcacattga

SEQ ID NO: 27508 - DNA, 24 bp, Artificial Sequence
  Synthetic
ctctgagaagattaggtagttgtc

SEQ ID NO: 27509 - DNA, 21 bp, Artificial Sequence
  Synthetic
ttttgtcatcagagtggaacc

SEQ ID NO: 27510 - DNA, 21 bp, Artificial Sequence
  Synthetic
cttttattaccttgctcctgc

SEQ ID NO: 27511 - DNA, 19 bp, Artificial Sequence
  Synthetic
acctgcaatcattccttcc

SEQ ID NO: 27512 - DNA, 24 bp, Artificial Sequence
  Synthetic
ctcatcttcactgtttattatccc

SEQ ID NO: 27513 - DNA, 19 bp, Artificial Sequence
  Synthetic
ctagaagcagcagttgagt

SEQ ID NO: 27514 - DNA, 24 bp, Artificial Sequence
  Synthetic
ttgtatatgagacccatacaactg

SEQ ID NO: 27515 - DNA, 20 bp, Artificial Sequence
  Synthetic
cccaattgtcctcattgcct

SEQ ID NO: 27516 - DNA, 19 bp, Artificial Sequence
  Synthetic
gaaggccctcttttcaaac

SEQ ID NO: 27517 - DNA, 20 bp, Artificial Sequence
  Synthetic
tcctccataacaaaccagtt

SEQ ID NO: 27518 - DNA, 21 bp, Artificial Sequence
  Synthetic
aacagaatgtttcggactaca

SEQ ID NO: 27519 - DNA, 18 bp, Artificial Sequence
  Synthetic
gagtctcctgtagtgcag

SEQ ID NO: 27520 - DNA, 19 bp, Artificial Sequence
  Synthetic
ccatatctggcagcatctg

SEQ ID NO: 27521 - DNA, 24 bp, Artificial Sequence
  Synthetic
acccaagtatattacacttccaaa

SEQ ID NO: 27522 - DNA, 25 bp, Artificial Sequence
  Synthetic
ctatgtcaataatagatggatcagg

SEQ ID NO: 27523 - DNA, 23 bp, Artificial Sequence
  Synthetic
tttcaccttgataatttggtgaa

SEQ ID NO: 27524 - DNA, 20 bp, Artificial Sequence
  Synthetic
aatattcaaactgcacagcg

SEQ ID NO: 27525 - DNA, 25 bp, Artificial Sequence
  Synthetic
gactcaatagcagataaatcttgat

SEQ ID NO: 27526 - DNA, 18 bp, Artificial Sequence
  Synthetic
aagtactctggctgtggg

SEQ ID NO: 27527 - DNA, 20 bp, Artificial Sequence
  Synthetic
ccaacacctagaggatttcc

SEQ ID NO: 27528 - DNA, 18 bp, Artificial Sequence
  Synthetic
cctggcttcaagggtcta

SEQ ID NO: 27529 - DNA, 18 bp, Artificial Sequence
  Synthetic
atccccaacatttcctgc

SEQ ID NO: 27530 - DNA, 25 bp, Artificial Sequence
  Synthetic
caagaagacaaatatctgtatgtgt

SEQ ID NO: 27531 - DNA, 24 bp, Artificial Sequence
  Synthetic
gcatacagtaaacatttcacagta

SEQ ID NO: 27532 - DNA, 20 bp, Artificial Sequence
  Synthetic
aatagcccatgcaaatcttg

SEQ ID NO: 27533 - DNA, 20 bp, Artificial Sequence
  Synthetic
gtagctaacacacacagtct

SEQ ID NO: 27534 - DNA, 22 bp, Artificial Sequence
  Synthetic
caaaatatcctgtaaggcagtg

SEQ ID NO: 27535 - DNA, 18 bp, Artificial Sequence
  Synthetic
gtatgcaatggctggttc

SEQ ID NO: 27536 - DNA, 24 bp, Artificial Sequence
  Synthetic
agcataatactccaatacactttc

SEQ ID NO: 27537 - DNA, 18 bp, Artificial Sequence
  Synthetic
cttgtcctcgtcgtcgtc

SEQ ID NO: 27538 - DNA, 23 bp, Artificial Sequence
  Synthetic
tttcccaaatatataacactgct

SEQ ID NO: 27539 - DNA, 20 bp, Artificial Sequence
  Synthetic
tgtttctgctcctaaaccag

SEQ ID NO: 27540 - DNA, 22 bp, Artificial Sequence
  Synthetic
cgggattttcaaattcaaatgt

SEQ ID NO: 27541 - DNA, 21 bp, Artificial Sequence
  Synthetic
ctggcacatttttttcactag

SEQ ID NO: 27542 - DNA, 18 bp, Artificial Sequence
  Synthetic
taccgactccaagaggac

SEQ ID NO: 27543 - DNA, 18 bp, Artificial Sequence
  Synthetic
gctcatctggaggattcc

SEQ ID NO: 27544 - DNA, 22 bp, Artificial Sequence
  Synthetic
ctttaggacacatagctgctaa

SEQ ID NO: 27545 - DNA, 18 bp, Artificial Sequence
  Synthetic
aagacacaggcaccgata

SEQ ID NO: 27546 - DNA, 18 bp, Artificial Sequence
  Synthetic
tttgtcagctgtgatcgg

SEQ ID NO: 27547 - DNA, 22 bp, Artificial Sequence
  Synthetic
tccgtgttttaatctttcaacc

SEQ ID NO: 27548 - DNA, 18 bp, Artificial Sequence
  Synthetic
aggaatctggtcttgcga

SEQ ID NO: 27549 - DNA, 19 bp, Artificial Sequence
  Synthetic
ccaatttgtgtgctatggc

SEQ ID NO: 27550 - DNA, 18 bp, Artificial Sequence
  Synthetic
cccttccgctgactatca

SEQ ID NO: 27551 - DNA, 20 bp, Artificial Sequence
  Synthetic
acattgtcgatgggttcaat

SEQ ID NO: 27552 - DNA, 18 bp, Artificial Sequence
  Synthetic
tctggcccgttaatctcc

SEQ ID NO: 27553 - DNA, 18 bp, Artificial Sequence
  Synthetic
cctactctgttccggtgg

SEQ ID NO: 27554 - DNA, 18 bp, Artificial Sequence
  Synthetic
tgcttaatgctggtccat

SEQ ID NO: 27555 - DNA, 20 bp, Artificial Sequence
  Synthetic
gatgtttgttcgttccactg

SEQ ID NO: 27556 - DNA, 23 bp, Artificial Sequence
  Synthetic
ccattagttcttattccactgta

SEQ ID NO: 27557 - DNA, 22 bp, Artificial Sequence
  Synthetic
caattcttccagatagaccatt

SEQ ID NO: 27558 - DNA, 22 bp, Artificial Sequence
  Synthetic
ctcctttgcttaacatatctcg

SEQ ID NO: 27559 - DNA, 23 bp, Artificial Sequence
  Synthetic
tgttatttgatcaattgccgatt

SEQ ID NO: 27560 - DNA, 23 bp, Artificial Sequence
  Synthetic
tgaaatatttcaaagcaaccagt

SEQ ID NO: 27561 - DNA, 21 bp, Artificial Sequence
  Synthetic
gcagatttgtaaattccgcag

SEQ ID NO: 27562 - DNA, 25 bp, Artificial Sequence
  Synthetic
gtccacctatttaaaatgaatctga

SEQ ID NO: 27563 - DNA, 18 bp, Artificial Sequence
  Synthetic
tgcagctgttgtatgtcc

SEQ ID NO: 27564 - DNA, 21 bp, Artificial Sequence
  Synthetic
accaaatgacaatccaaacag

SEQ ID NO: 27565 - DNA, 23 bp, Artificial Sequence
  Synthetic
gctctattaacagttgattagca

SEQ ID NO: 27566 - DNA, 23 bp, Artificial Sequence
  Synthetic
tgtctacacataattccacaatc

SEQ ID NO: 27567 - DNA, 20 bp, Artificial Sequence
  Synthetic
ccatttcacgagccttaaat

SEQ ID NO: 27568 - DNA, 23 bp, Artificial Sequence
  Synthetic
cgtatataaatgtccatgctgta

SEQ ID NO: 27569 - DNA, 18 bp, Artificial Sequence
  Synthetic
ttgtgacgccgtagtgct

SEQ ID NO: 27570 - DNA, 18 bp, Artificial Sequence
  Synthetic
agctagcaagacaggagg

SEQ ID NO: 27571 - DNA, 23 bp, Artificial Sequence
  Synthetic
tacaaacaatacaaaaacccaac

SEQ ID NO: 27572 - DNA, 23 bp, Artificial Sequence
  Synthetic
cgtaaagtaaaaggatcactgta

SEQ ID NO: 27573 - DNA, 20 bp, Artificial Sequence
  Synthetic
tcattaattgcggatgaagc

SEQ ID NO: 27574 - DNA, 20 bp, Artificial Sequence
  Synthetic
actgctggcatgataaaagt

SEQ ID NO: 27575 - DNA, 21 bp, Artificial Sequence
  Synthetic
cacctcagcttttgaagtttg

SEQ ID NO: 27576 - DNA, 18 bp, Artificial Sequence
  Synthetic
tatggcctgagactgcac

SEQ ID NO: 27577 - DNA, 21 bp, Artificial Sequence
  Synthetic
ctttctaaaacatgcttgtgc

SEQ ID NO: 27578 - DNA, 23 bp, Artificial Sequence
  Synthetic
aaagcataatagtaagcaattgc

SEQ ID NO: 27579 - DNA, 25 bp, Artificial Sequence
  Synthetic
ccctgatacttaagtaaattagcaa

SEQ ID NO: 27580 - DNA, 19 bp, Artificial Sequence
  Synthetic
tcgtcgtcgttgtcctctt

SEQ ID NO: 27581 - DNA, 25 bp, Artificial Sequence
  Synthetic
ctccaacatttcaatttattagcac

SEQ ID NO: 27582 - DNA, 19 bp, Artificial Sequence
  Synthetic
agctgcacatcgatttgag

SEQ ID NO: 27583 - DNA, 19 bp, Artificial Sequence
  Synthetic
atcaccaacaactccatct

SEQ ID NO: 27584 - DNA, 20 bp, Artificial Sequence
  Synthetic
ttccctgagctttatgtacc

SEQ ID NO: 27585 - DNA, 18 bp, Artificial Sequence
  Synthetic
cctgaggaggtgaaggaa

SEQ ID NO: 27586 - DNA, 19 bp, Artificial Sequence
  Synthetic
gtttagtagtgcgacgctt

SEQ ID NO: 27587 - DNA, 18 bp, Artificial Sequence
  Synthetic
acgtttgtgtgcgatgtt

SEQ ID NO: 27588 - DNA, 21 bp, Artificial Sequence
  Synthetic
cagaagatgactcaaatgcct

SEQ ID NO: 27589 - DNA, 20 bp, Artificial Sequence
  Synthetic
ccatttgcctagcctgactt

SEQ ID NO: 27590 - DNA, 18 bp, Artificial Sequence
  Synthetic
agactcaggcactccttc

SEQ ID NO: 27591 - DNA, 24 bp, Artificial Sequence
  Synthetic
gttttagatctttctcgatcatgt

SEQ ID NO: 27592 - DNA, 21 bp, Artificial Sequence
  Synthetic
cttgtctgaaagcttccaatc

SEQ ID NO: 27593 - DNA, 23 bp, Artificial Sequence
  Synthetic
ccaagttcatcttctagtgttga

SEQ ID NO: 27594 - DNA, 18 bp, Artificial Sequence
  Synthetic
taggtcttcttgggggtc

SEQ ID NO: 27595 - DNA, 21 bp, Artificial Sequence
  Synthetic
gatcaatatcctccgtgttct

SEQ ID NO: 27596 - DNA, 19 bp, Artificial Sequence
  Synthetic
agttgtgtttgtctgttcg

SEQ ID NO: 27597 - DNA, 23 bp, Artificial Sequence
  Synthetic
gttgcatttgattcattgtatga

SEQ ID NO: 27598 - DNA, 22 bp, Artificial Sequence
  Synthetic
tctaaataccgagatccatgtt

SEQ ID NO: 27599 - DNA, 23 bp, Artificial Sequence
  Synthetic
cgtacaattcacgaagattactc

SEQ ID NO: 27600 - DNA, 25 bp, Artificial Sequence
  Synthetic
gtcctaagtttttgattatccctta

SEQ ID NO: 27601 - DNA, 19 bp, Artificial Sequence
  Synthetic
cccctccaaagaatcgttt

SEQ ID NO: 27602 - DNA, 18 bp, Artificial Sequence
  Synthetic
acatctgctccacctaga

SEQ ID NO: 27603 - DNA, 21 bp, Artificial Sequence
  Synthetic
tgtgtagaatgcaagagttcc

SEQ ID NO: 27604 - DNA, 21 bp, Artificial Sequence
  Synthetic
gagcttgttgttatgagtagc

SEQ ID NO: 27605 - DNA, 18 bp, Artificial Sequence
  Synthetic
cacagccatcaacagtcg

SEQ ID NO: 27606 - DNA, 21 bp, Artificial Sequence
  Synthetic
gactataagatgcctgattgc

SEQ ID NO: 27607 - DNA, 18 bp, Artificial Sequence
  Synthetic
ccagctgagagtgttctg

SEQ ID NO: 27608 - DNA, 23 bp, Artificial Sequence
  Synthetic
aattgtcaaatcctcatctaact

SEQ ID NO: 27609 - DNA, 23 bp, Artificial Sequence
  Synthetic
tgaataaccattctcaattgctt

SEQ ID NO: 27610 - DNA, 19 bp, Artificial Sequence
  Synthetic
atgcagcaactgatggatc

SEQ ID NO: 27611 - DNA, 22 bp, Artificial Sequence
  Synthetic
ttctgatcctgttattaccacc

SEQ ID NO: 27612 - DNA, 24 bp, Artificial Sequence
  Synthetic
ttgcagtatcttttaatctgtgtg

SEQ ID NO: 27613 - DNA, 18 bp, Artificial Sequence
  Synthetic
aatctcgtgacggaacac

SEQ ID NO: 27614 - DNA, 20 bp, Artificial Sequence
  Synthetic
tgcagacccataacatatgt

SEQ ID NO: 27615 - DNA, 23 bp, Artificial Sequence
  Synthetic
accatgcacatattcaatctctt

SEQ ID NO: 27616 - DNA, 19 bp, Artificial Sequence
  Synthetic
actgatcacgttgcaacaa

SEQ ID NO: 27617 - DNA, 18 bp, Artificial Sequence
  Synthetic
tttcagcacccaacatgg

SEQ ID NO: 27618 - DNA, 19 bp, Artificial Sequence
  Synthetic
aagcgcattatcaagcaaa

SEQ ID NO: 27619 - DNA, 19 bp, Artificial Sequence
  Synthetic
acatcgccaattacaacag

SEQ ID NO: 27620 - DNA, 20 bp, Artificial Sequence
  Synthetic
ttagactctgcagctttcac

SEQ ID NO: 27621 - DNA, 23 bp, Artificial Sequence
  Synthetic
acaatgtaaggtttatcaaaagc

SEQ ID NO: 27622 - DNA, 23 bp, Artificial Sequence
  Synthetic
ttcttataaaagacgtgctcatc

SEQ ID NO: 27623 - DNA, 21 bp, Artificial Sequence
  Synthetic
cgccttcttcatcataaatgt

SEQ ID NO: 27624 - DNA, 20 bp, Artificial Sequence
  Synthetic
cgtatacattgctcagcagt

SEQ ID NO: 27625 - DNA, 21 bp, Artificial Sequence
  Synthetic
aactgcctaattgtacacatg

SEQ ID NO: 27626 - DNA, 22 bp, Artificial Sequence
  Synthetic
gtcaacaccattaacaacagta

SEQ ID NO: 27627 - DNA, 21 bp, Artificial Sequence
  Synthetic
acacacaacaagtcttctgta

SEQ ID NO: 27628 - DNA, 25 bp, Artificial Sequence
  Synthetic
cctacaaaagaaacattacaagtca

SEQ ID NO: 27629 - DNA, 21 bp, Artificial Sequence
  Synthetic
ccattaacaacagcactttca

SEQ ID NO: 27630 - DNA, 19 bp, Artificial Sequence
  Synthetic
agcaacaccactcaaaagt

SEQ ID NO: 27631 - DNA, 22 bp, Artificial Sequence
  Synthetic
gcaaaactactgagtacaatgt

SEQ ID NO: 27632 - DNA, 21 bp, Artificial Sequence
  Synthetic
tgacaatgaaaggttgcatat

SEQ ID NO: 27633 - DNA, 22 bp, Artificial Sequence
  Synthetic
acaaaacttactaccaccattt

SEQ ID NO: 27634 - DNA, 18 bp, Artificial Sequence
  Synthetic
tacaacacgccaagtcat

SEQ ID NO: 27635 - DNA, 20 bp, Artificial Sequence
  Synthetic
atcaaacacacaagaccaca

SEQ ID NO: 27636 - DNA, 19 bp, Artificial Sequence
  Synthetic
caggtgttgtgactccaaa

SEQ ID NO: 27637 - DNA, 18 bp, Artificial Sequence
  Synthetic
aacgtaaccattggcaac

SEQ ID NO: 27638 - DNA, 21 bp, Artificial Sequence
  Synthetic
tcagcaaactaggtaacaaac

SEQ ID NO: 27639 - DNA, 18 bp, Artificial Sequence
  Synthetic
atagcagacacggacaac

SEQ ID NO: 27640 - DNA, 19 bp, Artificial Sequence
  Synthetic
tgttcacaccaaaaacacc

SEQ ID NO: 27641 - DNA, 22 bp, Artificial Sequence
  Synthetic
tcattataatgctccacaaaca

SEQ ID NO: 27642 - DNA, 23 bp, Artificial Sequence
  Synthetic
aaatgtaagacagagtgacaaag

SEQ ID NO: 27643 - DNA, 20 bp, Artificial Sequence
  Synthetic
accagcaaactaacgtagtc

SEQ ID NO: 27644 - DNA, 22 bp, Artificial Sequence
  Synthetic
agtttaaaagacagaaagagcg

SEQ ID NO: 27645 - DNA, 19 bp, Artificial Sequence
  Synthetic
aagaaaaaggccaacaacg

SEQ ID NO: 27646 - DNA, 19 bp, Artificial Sequence
  Synthetic
tgcatggcactaacaactt

SEQ ID NO: 27647 - DNA, 18 bp, Artificial Sequence
  Synthetic
acgacacgttcacaagtc

SEQ ID NO: 27648 - DNA, 22 bp, Artificial Sequence
  Synthetic
agatacttaatttggggtccag

SEQ ID NO: 27649 - DNA, 19 bp, Artificial Sequence
  Synthetic
tcctgcgtagtgttggaat

SEQ ID NO: 27650 - DNA, 20 bp, Artificial Sequence
  Synthetic
aatgcacggacacagtaatc

SEQ ID NO: 27651 - DNA, 20 bp, Artificial Sequence
  Synthetic
tctatggggtcaaaccaatt

SEQ ID NO: 27652 - DNA, 24 bp, Artificial Sequence
  Synthetic
aagatgtcacttttcataaagcac

SEQ ID NO: 27653 - DNA, 22 bp, Artificial Sequence
  Synthetic
tgttaacatctttgttccacac

SEQ ID NO: 27654 - DNA, 18 bp, Artificial Sequence
  Synthetic
attgcagcatcacccttt

SEQ ID NO: 27655 - DNA, 20 bp, Artificial Sequence
  Synthetic
gccataaaacttggtagtgc

SEQ ID NO: 27656 - DNA, 20 bp, Artificial Sequence
  Synthetic
agatcttcctcagtccaaca

SEQ ID NO: 27657 - DNA, 21 bp, Artificial Sequence
  Synthetic
agatgtttgacccagtctaac

SEQ ID NO: 27658 - DNA, 19 bp, Artificial Sequence
  Synthetic
gcgaatgtcagaccaatca

SEQ ID NO: 27659 - DNA, 22 bp, Artificial Sequence
  Synthetic
agcaacattatgagaagtcaaa

SEQ ID NO: 27660 - DNA, 18 bp, Artificial Sequence
  Synthetic
aacactcaactctggcac

SEQ ID NO: 27661 - DNA, 23 bp, Artificial Sequence
  Synthetic
caacattatagtcaattggttcc

SEQ ID NO: 27662 - DNA, 25 bp, Artificial Sequence
  Synthetic
gcgaatataacatagtcatattcac

SEQ ID NO: 27663 - DNA, 22 bp, Artificial Sequence
  Synthetic
cacatgttcataggtacaaaca

SEQ ID NO: 27664 - DNA, 20 bp, Artificial Sequence
  Synthetic
gttagaacacaaccttcagg

SEQ ID NO: 27665 - DNA, 22 bp, Artificial Sequence
  Synthetic
caatgcatgtttaaagcaacaa

SEQ ID NO: 27666 - DNA, 21 bp, Artificial Sequence
  Synthetic
gattgctttagggttgtacaa

SEQ ID NO: 27667 - DNA, 18 bp, Artificial Sequence
  Synthetic
aacggtgctggtttcaat

SEQ ID NO: 27668 - DNA, 22 bp, Artificial Sequence
  Synthetic
ctaatggctactggtaattcac

SEQ ID NO: 27669 - DNA, 21 bp, Artificial Sequence
  Synthetic
cagagtaaaacgttcgtatga

SEQ ID NO: 27670 - DNA, 20 bp, Artificial Sequence
  Synthetic
cacgcctatatccatgttca

SEQ ID NO: 27671 - DNA, 23 bp, Artificial Sequence
  Synthetic
gcattatctttacaccatagcat

SEQ ID NO: 27672 - DNA, 18 bp, Artificial Sequence
  Synthetic
aacaacaattgcgtcgtg

SEQ ID NO: 27673 - DNA, 25 bp, Artificial Sequence
  Synthetic
gtgtttgcaattaaatttactcagg

SEQ ID NO: 27674 - DNA, 23 bp, Artificial Sequence
  Synthetic
aggaaccaattattgaatgcaaa

SEQ ID NO: 27675 - DNA, 18 bp, Artificial Sequence
  Synthetic
aatgtcctgtgcgtgaaa

SEQ ID NO: 27676 - DNA, 20 bp, Artificial Sequence
  Synthetic
taacagttaaagcacttgcc

SEQ ID NO: 27677 - DNA, 21 bp, Artificial Sequence
  Synthetic
cagcttgctgataaacaacaa

SEQ ID NO: 27678 - DNA, 18 bp, Artificial Sequence
  Synthetic
ctcaacctggaccgaagt

SEQ ID NO: 27679 - DNA, 18 bp, Artificial Sequence
  Synthetic
cttctatggcactgcgac

SEQ ID NO: 27680 - DNA, 22 bp, Artificial Sequence
  Synthetic
tgttaaaagatgcagcaagaat

SEQ ID NO: 27681 - DNA, 18 bp, Artificial Sequence
  Synthetic
ttgttgtgcaagctgtct

SEQ ID NO: 27682 - DNA, 23 bp, Artificial Sequence
  Synthetic
gtgacattgcaattttcaatttg

SEQ ID NO: 27683 - DNA, 20 bp, Artificial Sequence
  Synthetic
agccactttaagtcgactaa

SEQ ID NO: 27684 - DNA, 21 bp, Artificial Sequence
  Synthetic
gcattgctaagcgattgatta

SEQ ID NO: 27685 - DNA, 21 bp, Artificial Sequence
  Synthetic
gtgtggttacattgaagacaa

SEQ ID NO: 27686 - DNA, 23 bp, Artificial Sequence
  Synthetic
atatgattggtaaatgtggtaca

SEQ ID NO: 27687 - DNA, 19 bp, Artificial Sequence
  Synthetic
taacgagtgttgatacggc

SEQ ID NO: 27688 - DNA, 21 bp, Artificial Sequence
  Synthetic
ctttcgttttctgtcatgttg

SEQ ID NO: 27689 - DNA, 19 bp, Artificial Sequence
  Synthetic
ggtcctgtgccaagataat

SEQ ID NO: 27690 - DNA, 20 bp, Artificial Sequence
  Synthetic
tacgagaaggcttaggagta

SEQ ID NO: 27691 - DNA, 21 bp, Artificial Sequence
  Synthetic
tttagctttaacaccattggc

SEQ ID NO: 27692 - DNA, 23 bp, Artificial Sequence
  Synthetic
gcatgtttagtttacttcatcaa

SEQ ID NO: 27693 - DNA, 21 bp, Artificial Sequence
  Synthetic
tgcgatctttgattactccag

SEQ ID NO: 27694 - DNA, 21 bp, Artificial Sequence
  Synthetic
aagtagccaaatacctaggac

SEQ ID NO: 27695 - DNA, 18 bp, Artificial Sequence
  Synthetic
cacacttagcagctgact

SEQ ID NO: 27696 - DNA, 19 bp, Artificial Sequence
  Synthetic
tgcaaaatgtccaggcact

SEQ ID NO: 27697 - DNA, 21 bp, Artificial Sequence
  Synthetic
attgcaccataggagctaatt

SEQ ID NO: 27698 - DNA, 24 bp, Artificial Sequence
  Synthetic
attaattagctttttccagtctcc

SEQ ID NO: 27699 - DNA, 21 bp, Artificial Sequence
  Synthetic
aggtcttctgaatcttggtaa

SEQ ID NO: 27700 - DNA, 22 bp, Artificial Sequence
  Synthetic
gtgtgttagatggtccttttac

SEQ ID NO: 27701 - DNA, 18 bp, Artificial Sequence
  Synthetic
acatacccagaggaaccc

SEQ ID NO: 27702 - DNA, 20 bp, Artificial Sequence
  Synthetic
gcagagggtctacaggtaca

SEQ ID NO: 27703 - DNA, 25 bp, Artificial Sequence
  Synthetic
tatccaaaggtatagattcaccaat

SEQ ID NO: 27704 - DNA, 18 bp, Artificial Sequence
  Synthetic
gcagcagcagcaagtgta

SEQ ID NO: 27705 - DNA, 21 bp, Artificial Sequence
  Synthetic
gtttaccaccagtagaggtta

SEQ ID NO: 27706 - DNA, 20 bp, Artificial Sequence
  Synthetic
cacgtaatcatctgtaggca

SEQ ID NO: 27707 - DNA, 19 bp, Artificial Sequence
  Synthetic
gtagacccaacacctaacg

SEQ ID NO: 27708 - DNA, 23 bp, Artificial Sequence
  Synthetic
gactccccaggaataatatatgt

SEQ ID NO: 27709 - DNA, 18 bp, Artificial Sequence
  Synthetic
tttccttagggggctctg

SEQ ID NO: 27710 - DNA, 20 bp, Artificial Sequence
  Synthetic
attgatggcctggaactgac

SEQ ID NO: 27711 - DNA, 17 bp, Artificial Sequence
  Synthetic
tgaccctgtccgtgtgc

SEQ ID NO: 27712 - DNA, 20 bp, Artificial Sequence
  Synthetic
gatccaggtgtagatgcagg

SEQ ID NO: 27713 - DNA, 19 bp, Artificial Sequence
  Synthetic
cgctcctccacctcaaaca

SEQ ID NO: 27714 - DNA, 20 bp, Artificial Sequence
  Synthetic
ggcaaaggatgaccaggttc

SEQ ID NO: 27715 - DNA, 20 bp, Artificial Sequence
  Synthetic
gcaaaacatatggcatcccg

SEQ ID NO: 27716 - DNA, 22 bp, Artificial Sequence
  Synthetic
atgatagaattccaggaggttt

SEQ ID NO: 27717 - DNA, 16 bp, Artificial Sequence
  Synthetic
aagtttgggggcgccc

SEQ ID NO: 27718 - DNA, 19 bp, Artificial Sequence
  Synthetic
ggtggagtgttgggcttag

SEQ ID NO: 27719 - DNA, 19 bp, Artificial Sequence
  Synthetic
tacccctgaaggtgaaccg

SEQ ID NO: 27720 - DNA, 16 bp, Artificial Sequence
  Synthetic
agagaagggccggtgg

SEQ ID NO: 27721 - DNA, 20 bp, Artificial Sequence
  Synthetic
taccacctcctcttcttgct

SEQ ID NO: 27722 - DNA, 20 bp, Artificial Sequence
  Synthetic
ccactttataccaggggcag

SEQ ID NO: 27723 - DNA, 19 bp, Artificial Sequence
  Synthetic
ggacccttctacggactcg

SEQ ID NO: 27724 - DNA, 20 bp, Artificial Sequence
  Synthetic
ggaaatgcataggagtgcga

SEQ ID NO: 27725 - DNA, 16 bp, Artificial Sequence
  Synthetic
ccttcttccacggcgc

SEQ ID NO: 27726 - DNA, 16 bp, Artificial Sequence
  Synthetic
tccacacccaccaccg

SEQ ID NO: 27727 - DNA, 16 bp, Artificial Sequence
  Synthetic
atcgagctcgctggcg

SEQ ID NO: 27728 - DNA, 18 bp, Artificial Sequence
  Synthetic
catcactctcccaggccc

SEQ ID NO: 27729 - DNA, 20 bp, Artificial Sequence
  Synthetic
tccttctacgagcacgaaga

SEQ ID NO: 27730 - DNA, 19 bp, Artificial Sequence
  Synthetic
aacgctgcaggatctggtc

SEQ ID NO: 27731 - DNA, 17 bp, Artificial Sequence
  Synthetic
aagtcgagggcatggcc

SEQ ID NO: 27732 - DNA, 20 bp, Artificial Sequence
  Synthetic
gccgctatgctattgggaat

SEQ ID NO: 27733 - DNA, 18 bp, Artificial Sequence
  Synthetic
agagtatggggcccctcc

SEQ ID NO: 27734 - DNA, 19 bp, Artificial Sequence
  Synthetic
aggaggagaacccgaggat

SEQ ID NO: 27735 - DNA, 17 bp, Artificial Sequence
  Synthetic
aaaaccatcccccggcc

SEQ ID NO: 27736 - DNA, 16 bp, Artificial Sequence
  Synthetic
tttgctcgcacggccc

SEQ ID NO: 27737 - DNA, 18 bp, Artificial Sequence
  Synthetic
cagatccctctggcgacg

SEQ ID NO: 27738 - DNA, 20 bp, Artificial Sequence
  Synthetic
acctccctcttttcactcct

SEQ ID NO: 27739 - DNA, 18 bp, Artificial Sequence
  Synthetic
tactgccggtccctgagg

SEQ ID NO: 27740 - DNA, 18 bp, Artificial Sequence
  Synthetic
agagcctctccaggtccc

SEQ ID NO: 27741 - DNA, 15 bp, Artificial Sequence
  Synthetic
gcaggtcgcgccaaa

SEQ ID NO: 27742 - DNA, 17 bp, Artificial Sequence
  Synthetic
tcatccccctgcgtgtc

SEQ ID NO: 27743 - DNA, 17 bp, Artificial Sequence
  Synthetic
ctaacggccggaatgcg

SEQ ID NO: 27744 - DNA, 17 bp, Artificial Sequence
  Synthetic
cctcgcgagctgaacag

SEQ ID NO: 27745 - DNA, 20 bp, Artificial Sequence
  Synthetic
tgatagagggacatctgggc

SEQ ID NO: 27746 - DNA, 17 bp, Artificial Sequence
  Synthetic
gcgcacctacttcaccc

SEQ ID NO: 27747 - DNA, 16 bp, Artificial Sequence
  Synthetic
tgccatcctctcgcgg

SEQ ID NO: 27748 - DNA, 18 bp, Artificial Sequence
  Synthetic
cctccagaatcagcggcg

SEQ ID NO: 27749 - DNA, 20 bp, Artificial Sequence
  Synthetic
aacaagaccaccatcctgct

SEQ ID NO: 27750 - DNA, 20 bp, Artificial Sequence
  Synthetic
ctggtcaaagaaggcgagaa

SEQ ID NO: 27751 - DNA, 20 bp, Artificial Sequence
  Synthetic
ggtttaacgagcagagaaga

SEQ ID NO: 27752 - DNA, 20 bp, Artificial Sequence
  Synthetic
ccgtcgctaaaaacacctgg

SEQ ID NO: 27753 - DNA, 19 bp, Artificial Sequence
  Synthetic
tttgacctgtgcctcagca

SEQ ID NO: 27754 - DNA, 17 bp, Artificial Sequence
  Synthetic
tgaacaggccactcggg

SEQ ID NO: 27755 - DNA, 18 bp, Artificial Sequence
  Synthetic
tacgttgttgcatgccgc

SEQ ID NO: 27756 - DNA, 16 bp, Artificial Sequence
  Synthetic
tcgcaggggcattggc

SEQ ID NO: 27757 - DNA, 20 bp, Artificial Sequence
  Synthetic
gagtccggacagtttcatgc

SEQ ID NO: 27758 - DNA, 20 bp, Artificial Sequence
  Synthetic
tttcctccagaaagagtgac

SEQ ID NO: 27759 - DNA, 17 bp, Artificial Sequence
  Synthetic
gcaaggatcccatgccc

SEQ ID NO: 27760 - DNA, 20 bp, Artificial Sequence
  Synthetic
ggtagatggcgagactcttg

SEQ ID NO: 27761 - DNA, 20 bp, Artificial Sequence
  Synthetic
atctacgcttttagccacgg

SEQ ID NO: 27762 - DNA, 16 bp, Artificial Sequence
  Synthetic
gcgaaccaagcccagg

SEQ ID NO: 27763 - DNA, 19 bp, Artificial Sequence
  Synthetic
agacactccgagcctactg

SEQ ID NO: 27764 - DNA, 18 bp, Artificial Sequence
  Synthetic
ttctggtagaggcgctgc

SEQ ID NO: 27765 - DNA, 18 bp, Artificial Sequence
  Synthetic
aacttccagcaccaggcg

SEQ ID NO: 27766 - DNA, 18 bp, Artificial Sequence
  Synthetic
tcgacctggtcctcggag

SEQ ID NO: 27767 - DNA, 16 bp, Artificial Sequence
  Synthetic
tcttgagccggctggg

SEQ ID NO: 27768 - DNA, 20 bp, Artificial Sequence
  Synthetic
tcttccagcctctctttcca

SEQ ID NO: 27769 - DNA, 18 bp, Artificial Sequence
  Synthetic
acaagcgttttgacccac

SEQ ID NO: 27770 - DNA, 18 bp, Artificial Sequence
  Synthetic
gacctgcttctggacgcc

SEQ ID NO: 27771 - DNA, 19 bp, Artificial Sequence
  Synthetic
tggtatcatgcacctcgct

SEQ ID NO: 27772 - DNA, 18 bp, Artificial Sequence
  Synthetic
cttctacggccccaggtc

SEQ ID NO: 27773 - DNA, 16 bp, Artificial Sequence
  Synthetic
cggctactcgggggtt

SEQ ID NO: 27774 - DNA, 19 bp, Artificial Sequence
  Synthetic
ctcaagggggtcagtacct

SEQ ID NO: 27775 - DNA, 16 bp, Artificial Sequence
  Synthetic
ttcgctcttggccggg

SEQ ID NO: 27776 - DNA, 19 bp, Artificial Sequence
  Synthetic
acattttccccaggcagtc

SEQ ID NO: 27777 - DNA, 19 bp, Artificial Sequence
  Synthetic
tgtcgcccgatgtcgtaaa

SEQ ID NO: 27778 - DNA, 19 bp, Artificial Sequence
  Synthetic
ttcactatctgctgctgac

SEQ ID NO: 27779 - DNA, 20 bp, Artificial Sequence
  Synthetic
cgatttgacctcacacgaga

SEQ ID NO: 27780 - DNA, 18 bp, Artificial Sequence
  Synthetic
gtggtgctacgcgagttg

SEQ ID NO: 27781 - DNA, 20 bp, Artificial Sequence
  Synthetic
gggtcacctgactactgaga

SEQ ID NO: 27782 - DNA, 19 bp, Artificial Sequence
  Synthetic
tctcttcgaacacctggcc

SEQ ID NO: 27783 - DNA, 20 bp, Artificial Sequence
  Synthetic
gcagcctatttttgagcacc

SEQ ID NO: 27784 - DNA, 17 bp, Artificial Sequence
  Synthetic
catgtgtgtgggcgcag

SEQ ID NO: 27785 - DNA, 17 bp, Artificial Sequence
  Synthetic
cgtgagtggcaagggct

SEQ ID NO: 27786 - DNA, 19 bp, Artificial Sequence
  Synthetic
gcggcctgtttctaaacgt

SEQ ID NO: 27787 - DNA, 20 bp, Artificial Sequence
  Synthetic
ccagatcttcctcagtggct

SEQ ID NO: 27788 - DNA, 17 bp, Artificial Sequence
  Synthetic
acgagcgggatagcagg

SEQ ID NO: 27789 - DNA, 17 bp, Artificial Sequence
  Synthetic
tccgtgaaggcagggtc

SEQ ID NO: 27790 - DNA, 16 bp, Artificial Sequence
  Synthetic
ttgccgatgccctggc

SEQ ID NO: 27791 - DNA, 17 bp, Artificial Sequence
  Synthetic
aagaagctgctggcggc

SEQ ID NO: 27792 - DNA, 17 bp, Artificial Sequence
  Synthetic
tcttgcgggccaacacc

SEQ ID NO: 27793 - DNA, 16 bp, Artificial Sequence
  Synthetic
acggccaccaacgagg

SEQ ID NO: 27794 - DNA, 17 bp, Artificial Sequence
  Synthetic
gccaagctgcagtcctg

SEQ ID NO: 27795 - DNA, 17 bp, Artificial Sequence
  Synthetic
cgctttcggggcgtaag

SEQ ID NO: 27796 - DNA, 19 bp, Artificial Sequence
  Synthetic
actggcagctgaaccagaa

SEQ ID NO: 27797 - DNA, 16 bp, Artificial Sequence
  Synthetic
ccggccagcctcaact

SEQ ID NO: 27798 - DNA, 19 bp, Artificial Sequence
  Synthetic
tgcacagactagcgaggat

SEQ ID NO: 27799 - DNA, 18 bp, Artificial Sequence
  Synthetic
cggtgttcacccgggatg

SEQ ID NO: 27800 - DNA, 18 bp, Artificial Sequence
  Synthetic
atatccgccgtctgctgc

SEQ ID NO: 27801 - DNA, 19 bp, Artificial Sequence
  Synthetic
ctgctaactcttgcaaaca

SEQ ID NO: 27802 - DNA, 20 bp, Artificial Sequence
  Synthetic
ctctataagggctatgctcc

SEQ ID NO: 27803 - DNA, 22 bp, Artificial Sequence
  Synthetic
aaacaatcgtcttttgctttgt

SEQ ID NO: 27804 - DNA, 21 bp, Artificial Sequence
  Synthetic
gctgactcatgactaagcata

SEQ ID NO: 27805 - DNA, 19 bp, Artificial Sequence
  Synthetic
agtgcatcgaaacgaactg

SEQ ID NO: 27806 - DNA, 18 bp, Artificial Sequence
  Synthetic
ggaggaactgactgatcc

SEQ ID NO: 27807 - DNA, 23 bp, Artificial Sequence
  Synthetic
ggggtaatttctgatagaggtac

SEQ ID NO: 27808 - DNA, 18 bp, Artificial Sequence
  Synthetic
ctgaatgtgacgcccata

SEQ ID NO: 27809 - DNA, 23 bp, Artificial Sequence
  Synthetic
tttcatcgtctacagtatccatt

SEQ ID NO: 27810 - DNA, 18 bp, Artificial Sequence
  Synthetic
ggccaaagagctgtttca

SEQ ID NO: 27811 - DNA, 25 bp, Artificial Sequence
  Synthetic
gtcatatctatttcccaaaatgtgt

SEQ ID NO: 27812 - DNA, 19 bp, Artificial Sequence
  Synthetic
aaacggttggtgaatgtcc

SEQ ID NO: 27813 - DNA, 20 bp, Artificial Sequence
  Synthetic
aggttaacagagtgtgtcac

SEQ ID NO: 27814 - DNA, 23 bp, Artificial Sequence
  Synthetic
ttctttgggaaatatttcgaatc

SEQ ID NO: 27815 - DNA, 25 bp, Artificial Sequence
  Synthetic
attctgatagatattctgttgatcc

SEQ ID NO: 27816 - DNA, 21 bp, Artificial Sequence
  Synthetic
tgttacactcatgcattgatg

SEQ ID NO: 27817 - DNA, 21 bp, Artificial Sequence
  Synthetic
ccctgttcattctgatgatga

SEQ ID NO: 27818 - DNA, 18 bp, Artificial Sequence
  Synthetic
gaaactgattgcccccag

SEQ ID NO: 27819 - DNA, 21 bp, Artificial Sequence
  Synthetic
gcggtcatatgaaaatgtgta

SEQ ID NO: 27820 - DNA, 21 bp, Artificial Sequence
  Synthetic
tcttttccaactacagcaaat

SEQ ID NO: 27821 - DNA, 21 bp, Artificial Sequence
  Synthetic
ccacctctggtatagtagctt

SEQ ID NO: 27822 - DNA, 25 bp, Artificial Sequence
  Synthetic
ctacagcattctttaggatctaatt

SEQ ID NO: 27823 - DNA, 19 bp, Artificial Sequence
  Synthetic
gcaattgtgtttgttgctc

SEQ ID NO: 27824 - DNA, 20 bp, Artificial Sequence
  Synthetic
acagctttcacattgctatg

SEQ ID NO: 27825 - DNA, 20 bp, Artificial Sequence
  Synthetic
acttcagatacttgcagcaa

SEQ ID NO: 27826 - DNA, 20 bp, Artificial Sequence
  Synthetic
gtaaaaaagccctggcatta

SEQ ID NO: 27827 - DNA, 19 bp, Artificial Sequence
  Synthetic
gctgagagtttccatcctc

SEQ ID NO: 27828 - DNA, 22 bp, Artificial Sequence
  Synthetic
gcaatagtaaaaccatgccaat

SEQ ID NO: 27829 - DNA, 20 bp, Artificial Sequence
  Synthetic
gggatgatgtcctggatcct

SEQ ID NO: 27830 - DNA, 16 bp, Artificial Sequence
  Synthetic
ggagtgggagcgggaa

SEQ ID NO: 27831 - DNA, 18 bp, Artificial Sequence
  Synthetic
aatcattcgcgctcttcc

SEQ ID NO: 27832 - DNA, 18 bp, Artificial Sequence
  Synthetic
gtggacatgtaccagcag

SEQ ID NO: 27833 - DNA, 20 bp, Artificial Sequence
  Synthetic
gggtcaattggtctgactgt

SEQ ID NO: 27834 - DNA, 18 bp, Artificial Sequence
  Synthetic
attgagttcgtgcaacac

SEQ ID NO: 27835 - DNA, 18 bp, Artificial Sequence
  Synthetic
tacgtgtgcggattgttg

SEQ ID NO: 27836 - DNA, 25 bp, Artificial Sequence
  Synthetic
gaattaaaatccacatcttcaacag

SEQ ID NO: 27837 - DNA, 21 bp, Artificial Sequence
  Synthetic
agacactttagggacttcaat

SEQ ID NO: 27838 - DNA, 20 bp, Artificial Sequence
  Synthetic
gatgtgttttgcctgtcatc

SEQ ID NO: 27839 - DNA, 24 bp, Artificial Sequence
  Synthetic
gttactaatgacccacttactgta

SEQ ID NO: 27840 - DNA, 19 bp, Artificial Sequence
  Synthetic
cttggattttcgtgtcctc

SEQ ID NO: 27841 - DNA, 21 bp, Artificial Sequence
  Synthetic
gtcccaggatatattcgtctc

SEQ ID NO: 27842 - DNA, 18 bp, Artificial Sequence
  Synthetic
tgtcctatgagcgctgat

SEQ ID NO: 27843 - DNA, 21 bp, Artificial Sequence
  Synthetic
agatttcttcttacccttggg

SEQ ID NO: 27844 - DNA, 20 bp, Artificial Sequence
  Synthetic
gaatgctcaaatcaaaggcg

SEQ ID NO: 27845 - DNA, 23 bp, Artificial Sequence
  Synthetic
tactctgaaatggattcttgatg

SEQ ID NO: 27846 - DNA, 22 bp, Artificial Sequence
  Synthetic
tagacatgaagtatgcagagac

SEQ ID NO: 27847 - DNA, 20 bp, Artificial Sequence
  Synthetic
aagcgatacgactatctagc

SEQ ID NO: 27848 - DNA, 22 bp, Artificial Sequence
  Synthetic
ccatattcaaagcctaaaacgg

SEQ ID NO: 27849 - DNA, 23 bp, Artificial Sequence
  Synthetic
cttttttctggatcaaaacgttc

SEQ ID NO: 27850 - DNA, 22 bp, Artificial Sequence
  Synthetic
actctctccatgatctttcaag

SEQ ID NO: 27851 - DNA, 22 bp, Artificial Sequence
  Synthetic
cgattcttttctcgttcaatga

SEQ ID NO: 27852 - DNA, 24 bp, Artificial Sequence
  Synthetic
tgattatctaattcaaacagctcc

SEQ ID NO: 27853 - DNA, 20 bp, Artificial Sequence
  Synthetic
caggcgttatggttatgcta

SEQ ID NO: 27854 - DNA, 21 bp, Artificial Sequence
  Synthetic
acaaaacaatcacaacagctc

SEQ ID NO: 27855 - DNA, 20 bp, Artificial Sequence
  Synthetic
aagagagctcagatctgtgt

SEQ ID NO: 27856 - DNA, 18 bp, Artificial Sequence
  Synthetic
acaggagacaatggcaac

SEQ ID NO: 27857 - DNA, 19 bp, Artificial Sequence
  Synthetic
ccattattccacccccatc

SEQ ID NO: 27858 - DNA, 21 bp, Artificial Sequence
  Synthetic
gttggtaaaggatgtctgatg

SEQ ID NO: 27859 - DNA, 23 bp, Artificial Sequence
  Synthetic
gtatgagactgatagatgtttgt

SEQ ID NO: 27860 - DNA, 25 bp, Artificial Sequence
  Synthetic
ctctagatccttaaatagagcattt

SEQ ID NO: 27861 - DNA, 21 bp, Artificial Sequence
  Synthetic
ctctgctatcgaaaaggtttc

SEQ ID NO: 27862 - DNA, 19 bp, Artificial Sequence
  Synthetic
gagttcgaggtgtttctct

SEQ ID NO: 27863 - DNA, 20 bp, Artificial Sequence
  Synthetic
tggtttatgaagtggtggat

SEQ ID NO: 27864 - DNA, 21 bp, Artificial Sequence
  Synthetic
ttgttgcttataagaaggctg

SEQ ID NO: 27865 - DNA, 21 bp, Artificial Sequence
  Synthetic
tacttctcccagactgttctt

SEQ ID NO: 27866 - DNA, 21 bp, Artificial Sequence
  Synthetic
tcgatattacggagacaaaga

SEQ ID NO: 27867 - DNA, 21 bp, Artificial Sequence
  Synthetic
acgaactcatagactagggat

SEQ ID NO: 27868 - DNA, 20 bp, Artificial Sequence
  Synthetic
cttgtggttcagtaggagaa

SEQ ID NO: 27869 - DNA, 18 bp, Artificial Sequence
  Synthetic
gaacccctacatccatgc

SEQ ID NO: 27870 - DNA, 20 bp, Artificial Sequence
  Synthetic
ataccataaacagcctcagt

SEQ ID NO: 27871 - DNA, 23 bp, Artificial Sequence
  Synthetic
ccacaaaccaaaaccttctatag

SEQ ID NO: 27872 - DNA, 18 bp, Artificial Sequence
  Synthetic
taaccgcgaatcccatag

SEQ ID NO: 27873 - DNA, 19 bp, Artificial Sequence
  Synthetic
ttgggttcttctgagctag

SEQ ID NO: 27874 - DNA, 24 bp, Artificial Sequence
  Synthetic
catactaagttgtccattgttgat

SEQ ID NO: 27875 - DNA, 21 bp, Artificial Sequence
  Synthetic
aaacttcaataaacgaaagcg

SEQ ID NO: 27876 - DNA, 20 bp, Artificial Sequence
  Synthetic
acggtaaaagaaggtcgttt

SEQ ID NO: 27877 - DNA, 20 bp, Artificial Sequence
  Synthetic
ctgagagagattgtggtact

SEQ ID NO: 27878 - DNA, 23 bp, Artificial Sequence
  Synthetic
ttaaaaaacacttgttggagaga

SEQ ID NO: 27879 - DNA, 20 bp, Artificial Sequence
  Synthetic
tggttcggtttctttacctc

SEQ ID NO: 27880 - DNA, 18 bp, Artificial Sequence
  Synthetic
aagaagaaggtggacgac

SEQ ID NO: 27881 - DNA, 21 bp, Artificial Sequence
  Synthetic
gttactggggttgaaatgttc

SEQ ID NO: 27882 - DNA, 21 bp, Artificial Sequence
  Synthetic
atagagttgtacaagcgattg

SEQ ID NO: 27883 - DNA, 21 bp, Artificial Sequence
  Synthetic
tcctccaactaaaagaccatt

SEQ ID NO: 27884 - DNA, 25 bp, Artificial Sequence
  Synthetic
cgttttatttttatagcggacttct

SEQ ID NO: 27885 - DNA, 18 bp, Artificial Sequence
  Synthetic
taaggatggccgattcgt

SEQ ID NO: 27886 - DNA, 22 bp, Artificial Sequence
  Synthetic
ctgatacaccagaaatagtcga

SEQ ID NO: 27887 - DNA, 19 bp, Artificial Sequence
  Synthetic
aggacttggagaagctttc

SEQ ID NO: 27888 - DNA, 18 bp, Artificial Sequence
  Synthetic
agttcacgagcagtttgc

SEQ ID NO: 27889 - DNA, 18 bp, Artificial Sequence
  Synthetic
gcgctcatttcttggttg

SEQ ID NO: 27890 - DNA, 21 bp, Artificial Sequence
  Synthetic
cttgaagcttttggtacagta

SEQ ID NO: 27891 - DNA, 18 bp, Artificial Sequence
  Synthetic
gtcggagatactgggagg

SEQ ID NO: 27892 - DNA, 18 bp, Artificial Sequence
  Synthetic
agcaattgtggctatcgc

SEQ ID NO: 27893 - DNA, 22 bp, Artificial Sequence
  Synthetic
atctgtatcaaaaaaaggcagc

SEQ ID NO: 27894 - DNA, 23 bp, Artificial Sequence
  Synthetic
cttttttatggttttgtctgtgc

SEQ ID NO: 27895 - DNA, 20 bp, Artificial Sequence
  Synthetic
gtaacgacatcattgcatga

SEQ ID NO: 27896 - DNA, 18 bp, Artificial Sequence
  Synthetic
gggatttggcgaagaaga

SEQ ID NO: 27897 - DNA, 18 bp, Artificial Sequence
  Synthetic
gatcgtgtgtgtcgtgat

SEQ ID NO: 27898 - DNA, 22 bp, Artificial Sequence
  Synthetic
caaaattttcgcaaaagcatac

SEQ ID NO: 27899 - DNA, 25 bp, Artificial Sequence
  Synthetic
ctttagagaaagtcataaatacgga

SEQ ID NO: 27900 - DNA, 20 bp, Artificial Sequence
  Synthetic
gctttagttgtggcttcaac

SEQ ID NO: 27901 - DNA, 20 bp, Artificial Sequence
  Synthetic
ggaaagactcctttggtgtt

SEQ ID NO: 27902 - DNA, 21 bp, Artificial Sequence
  Synthetic
gatcttttttggagcatatgc

SEQ ID NO: 27903 - DNA, 22 bp, Artificial Sequence
  Synthetic
acagtttctccatagatagcac

SEQ ID NO: 27904 - DNA, 19 bp, Artificial Sequence
  Synthetic
tcttggagcatcttgtgga

SEQ ID NO: 27905 - DNA, 24 bp, Artificial Sequence
  Synthetic
tcttcttcattaaaatcagcaacg

SEQ ID NO: 27906 - DNA, 19 bp, Artificial Sequence
  Synthetic
ggtcgaggacaatatgctc

SEQ ID NO: 27907 - DNA, 19 bp, Artificial Sequence
  Synthetic
caaagagactcccgtagac

SEQ ID NO: 27908 - DNA, 21 bp, Artificial Sequence
  Synthetic
aaagagttcagttccttggat

SEQ ID NO: 27909 - DNA, 20 bp, Artificial Sequence
  Synthetic
agtgcatgagaatcgtcttg

SEQ ID NO: 27910 - DNA, 18 bp, Artificial Sequence
  Synthetic
gttggagcacacatcacg

SEQ ID NO: 27911 - DNA, 22 bp, Artificial Sequence
  Synthetic
agaacgtccctaatattgaaga

SEQ ID NO: 27912 - DNA, 20 bp, Artificial Sequence
  Synthetic
aaggactggatatgaagtgg

SEQ ID NO: 27913 - DNA, 19 bp, Artificial Sequence
  Synthetic
gtaaaagagtgccttggtg

SEQ ID NO: 27914 - DNA, 24 bp, Artificial Sequence
  Synthetic
ggttacttccggatattaatgatc

SEQ ID NO: 27915 - DNA, 21 bp, Artificial Sequence
  Synthetic
ggatgagatgttgaagagagc

SEQ ID NO: 27916 - DNA, 23 bp, Artificial Sequence
  Synthetic
gaagagtaagaagttcattgctt

SEQ ID NO: 27917 - DNA, 19 bp, Artificial Sequence
  Synthetic
atgggaatgacgagtgatt

SEQ ID NO: 27918 - DNA, 18 bp, Artificial Sequence
  Synthetic
tgacttcggcgaatttgg

SEQ ID NO: 27919 - DNA, 22 bp, Artificial Sequence
  Synthetic
tttgggagtaaaagttcaggtt

SEQ ID NO: 27920 - DNA, 20 bp, Artificial Sequence
  Synthetic
gtagtgttgttgaagctcaa

SEQ ID NO: 27921 - DNA, 23 bp, Artificial Sequence
  Synthetic
taagaaaaggtccttttgttgat

SEQ ID NO: 27922 - DNA, 20 bp, Artificial Sequence
  Synthetic
gccattccactaaaaagcct

SEQ ID NO: 27923 - DNA, 19 bp, Artificial Sequence
  Synthetic
aaaacaattcccctgtgga

SEQ ID NO: 27924 - DNA, 25 bp, Artificial Sequence
  Synthetic
cctttggagataataatagaggatt

SEQ ID NO: 27925 - DNA, 18 bp, Artificial Sequence
  Synthetic
gaggggaaagcatcatca

SEQ ID NO: 27926 - DNA, 20 bp, Artificial Sequence
  Synthetic
acgccaatcaaaatctcctt

SEQ ID NO: 27927 - DNA, 19 bp, Artificial Sequence
  Synthetic
cctccgggatagtcttagg

SEQ ID NO: 27928 - DNA, 23 bp, Artificial Sequence
  Synthetic
tgttcttacacatatcgatcgta

SEQ ID NO: 27929 - DNA, 22 bp, Artificial Sequence
  Synthetic
atacgcggaaatttctacttct

SEQ ID NO: 27930 - DNA, 20 bp, Artificial Sequence
  Synthetic
ggtaagggatcaggaattcc

SEQ ID NO: 27931 - DNA, 21 bp, Artificial Sequence
  Synthetic
gtgttccaatttggtttggtt

SEQ ID NO: 27932 - DNA, 19 bp, Artificial Sequence
  Synthetic
tgttgttcgagatccttgg

SEQ ID NO: 27933 - DNA, 19 bp, Artificial Sequence
  Synthetic
ccattggagataaaagcgc

SEQ ID NO: 27934 - DNA, 22 bp, Artificial Sequence
  Synthetic
ctcttgatacagtttgaaagct

SEQ ID NO: 27935 - DNA, 19 bp, Artificial Sequence
  Synthetic
caagatattggtgtgcggt

SEQ ID NO: 27936 - DNA, 20 bp, Artificial Sequence
  Synthetic
acaggaaactctaacccttt

SEQ ID NO: 27937 - DNA, 20 bp, Artificial Sequence
  Synthetic
gtcaaaaagaaacggatcgt

SEQ ID NO: 27938 - DNA, 22 bp, Artificial Sequence
  Synthetic
agaagatacccacaataaaagc

SEQ ID NO: 27939 - DNA, 18 bp, Artificial Sequence
  Synthetic
ttctgccccatatctgca

SEQ ID NO: 27940 - DNA, 19 bp, Artificial Sequence
  Synthetic
tggtaagtgttcttcccac

SEQ ID NO: 27941 - DNA, 18 bp, Artificial Sequence
  Synthetic
aagctcactgttgctgtt

SEQ ID NO: 27942 - DNA, 23 bp, Artificial Sequence
  Synthetic
gcgatatatcaatgaggtaggac

SEQ ID NO: 27943 - DNA, 23 bp, Artificial Sequence
  Synthetic
tgtagtaggtatctgaatctgtg

SEQ ID NO: 27944 - DNA, 19 bp, Artificial Sequence
  Synthetic
ggagcaactcttactgacg

SEQ ID NO: 27945 - DNA, 21 bp, Artificial Sequence
  Synthetic
ccctcaaactcaacaagaact

SEQ ID NO: 27946 - DNA, 20 bp, Artificial Sequence
  Synthetic
tcgcaatctaatgacgagaa

SEQ ID NO: 27947 - DNA, 20 bp, Artificial Sequence
  Synthetic
cagcgtattccattccattt

SEQ ID NO: 27948 - DNA, 22 bp, Artificial Sequence
  Synthetic
aaaaccttcctcttaagtctcc

SEQ ID NO: 27949 - DNA, 18 bp, Artificial Sequence
  Synthetic
tatcgcggctatcgtctt

SEQ ID NO: 27950 - DNA, 19 bp, Artificial Sequence
  Synthetic
caaggccctattgacaaag

SEQ ID NO: 27951 - DNA, 21 bp, Artificial Sequence
  Synthetic
caaaaattctccaacggaaag

SEQ ID NO: 27952 - DNA, 19 bp, Artificial Sequence
  Synthetic
acaaaagagggcgtgattg

SEQ ID NO: 27953 - DNA, 21 bp, Artificial Sequence
  Synthetic
aaagatgctgttattgatgcg

SEQ ID NO: 27954 - DNA, 18 bp, Artificial Sequence
  Synthetic
acccgtcactaaacactg

SEQ ID NO: 27955 - DNA, 20 bp, Artificial Sequence
  Synthetic
atgtctccggaaaagacaac

SEQ ID NO: 27956 - DNA, 19 bp, Artificial Sequence
  Synthetic
tccagtaggagcatacagc

SEQ ID NO: 27957 - DNA, 18 bp, Artificial Sequence
  Synthetic
aaattggctattcgtgcg

SEQ ID NO: 27958 - DNA, 24 bp, Artificial Sequence
  Synthetic
ggttctcgtatttaaaatcgattc

SEQ ID NO: 27959 - DNA, 23 bp, Artificial Sequence
  Synthetic
ttggaagttgcaaaaaagattgt

SEQ ID NO: 27960 - DNA, 18 bp, Artificial Sequence
  Synthetic
atatcgcaaacgccttgt

SEQ ID NO: 27961 - DNA, 19 bp, Artificial Sequence
  Synthetic
aacgtcttccctaatccca

SEQ ID NO: 27962 - DNA, 20 bp, Artificial Sequence
  Synthetic
ctgcttgctctctaaactct

SEQ ID NO: 27963 - DNA, 19 bp, Artificial Sequence
  Synthetic
ccttcccatgaatgcctat

SEQ ID NO: 27964 - DNA, 18 bp, Artificial Sequence
  Synthetic
cacactttcttcgcgaag

SEQ ID NO: 27965 - DNA, 20 bp, Artificial Sequence
  Synthetic
gaacgcttactacaggagat

SEQ ID NO: 27966 - DNA, 18 bp, Artificial Sequence
  Synthetic
acaatcacacatcccacc

SEQ ID NO: 27967 - DNA, 19 bp, Artificial Sequence
  Synthetic
tcgatccgagatggcttta

SEQ ID NO: 27968 - DNA, 19 bp, Artificial Sequence
  Synthetic
gcaagctttgaatacggtg

SEQ ID NO: 27969 - DNA, 20 bp, Artificial Sequence
  Synthetic
gtatggctaaggagattcgc

SEQ ID NO: 27970 - DNA, 23 bp, Artificial Sequence
  Synthetic
ctatcgatcagatttatgcagat

SEQ ID NO: 27971 - DNA, 21 bp, Artificial Sequence
  Synthetic
agttttgcgttagtagaagct

SEQ ID NO: 27972 - DNA, 21 bp, Artificial Sequence
  Synthetic
gatgtcggttttatgcttagt

SEQ ID NO: 27973 - DNA, 20 bp, Artificial Sequence
  Synthetic
gtgtttgcctctctacaaga

SEQ ID NO: 27974 - DNA, 20 bp, Artificial Sequence
  Synthetic
ctagcattgcatcaggacta

SEQ ID NO: 27975 - DNA, 18 bp, Artificial Sequence
  Synthetic
tagcactgcattcacagc

SEQ ID NO: 27976 - DNA, 23 bp, Artificial Sequence
  Synthetic
ttgctaagaaactatctctctgg

SEQ ID NO: 27977 - DNA, 18 bp, Artificial Sequence
  Synthetic
acaggctgtgatggaaat

SEQ ID NO: 27978 - DNA, 21 bp, Artificial Sequence
  Synthetic
tgctttaccaataagctcgaa

SEQ ID NO: 27979 - DNA, 18 bp, Artificial Sequence
  Synthetic
ctccaagcaagcgtctac

SEQ ID NO: 27980 - DNA, 19 bp, Artificial Sequence
  Synthetic
agcatgatctttgttgcag

SEQ ID NO: 27981 - DNA, 22 bp, Artificial Sequence
  Synthetic
tttctaaggacaaaaaccactg

SEQ ID NO: 27982 - DNA, 20 bp, Artificial Sequence
  Synthetic
cgactctcctagtactccat

SEQ ID NO: 27983 - DNA, 22 bp, Artificial Sequence
  Synthetic
caccacattctgaaatccaaat

SEQ ID NO: 27984 - DNA, 25 bp, Artificial Sequence
  Synthetic
ctgtctgattactagaaaattgcat

SEQ ID NO: 27985 - DNA, 22 bp, Artificial Sequence
  Synthetic
ttgactaaacatccgattgttc

SEQ ID NO: 27986 - DNA, 18 bp, Artificial Sequence
  Synthetic
ccaccctttcctggagta

SEQ ID NO: 27987 - DNA, 20 bp, Artificial Sequence
  Synthetic
cacaatgacatcttcttggc

SEQ ID NO: 27988 - DNA, 25 bp, Artificial Sequence
  Synthetic
gaaatcggatcatctaaattctgaa

SEQ ID NO: 27989 - DNA, 18 bp, Artificial Sequence
  Synthetic
tgcgttatcgagcgtatg

SEQ ID NO: 27990 - DNA, 18 bp, Artificial Sequence
  Synthetic
gtatccccttctgcgatg

SEQ ID NO: 27991 - DNA, 20 bp, Artificial Sequence
  Synthetic
tgatgttttgtcgagcaatt

SEQ ID NO: 27992 - DNA, 23 bp, Artificial Sequence
  Synthetic
aggattcttcaagaaatctacga

SEQ ID NO: 27993 - DNA, 23 bp, Artificial Sequence
  Synthetic
tctgtcatatttctgaattgtct

SEQ ID NO: 27994 - DNA, 25 bp, Artificial Sequence
  Synthetic
tcatatccttaatcttatgacacag

SEQ ID NO: 27995 - DNA, 19 bp, Artificial Sequence
  Synthetic
ccagctcctaaacgcaaat

SEQ ID NO: 27996 - DNA, 19 bp, Artificial Sequence
  Synthetic
tgcaggtatcagcatttgg

SEQ ID NO: 27997 - DNA, 20 bp, Artificial Sequence
  Synthetic
ctctcgtaacagcagatacc

SEQ ID NO: 27998 - DNA, 19 bp, Artificial Sequence
  Synthetic
tgcgtcgggttaattttcc

SEQ ID NO: 27999 - DNA, 21 bp, Artificial Sequence
  Synthetic
ctttactgtatcggtgtcaaa

SEQ ID NO: 28000 - DNA, 19 bp, Artificial Sequence
  Synthetic
attatatcaccccccctcc

SEQ ID NO: 28001 - DNA, 24 bp, Artificial Sequence
  Synthetic
caacagaatccctataaagaatgt

SEQ ID NO: 28002 - DNA, 18 bp, Artificial Sequence
  Synthetic
tagaccgatgaaacgcat

SEQ ID NO: 28003 - DNA, 18 bp, Artificial Sequence
  Synthetic
agcatcgtcgctacaatc

SEQ ID NO: 28004 - DNA, 19 bp, Artificial Sequence
  Synthetic
ctcaaagaggggaagagtc

SEQ ID NO: 28005 - DNA, 19 bp, Artificial Sequence
  Synthetic
aagaattgtacagggccac

SEQ ID NO: 28006 - DNA, 20 bp, Artificial Sequence
  Synthetic
cgaaactccagaaacccata

SEQ ID NO: 28007 - DNA, 19 bp, Artificial Sequence
  Synthetic
ccaatctctccaaccagac

SEQ ID NO: 28008 - DNA, 20 bp, Artificial Sequence
  Synthetic
ccggactgattaatcgtgac

SEQ ID NO: 28009 - DNA, 18 bp, Artificial Sequence
  Synthetic
aaaagaggcgaggtctct

SEQ ID NO: 28010 - DNA, 21 bp, Artificial Sequence
  Synthetic
tttcatttttttctcacgtcg

SEQ ID NO: 28011 - DNA, 19 bp, Artificial Sequence
  Synthetic
gcccctcataatcactgag

SEQ ID NO: 28012 - DNA, 25 bp, Artificial Sequence
  Synthetic
ggtatgttgtatcattcaaattgga

SEQ ID NO: 28013 - DNA, 22 bp, Artificial Sequence
  Synthetic
ttttcctttgagaatgttgcac

SEQ ID NO: 28014 - DNA, 19 bp, Artificial Sequence
  Synthetic
gtacactgatttgacctgc

SEQ ID NO: 28015 - DNA, 22 bp, Artificial Sequence
  Synthetic
ttgagtcaagaagaaggttctg

SEQ ID NO: 28016 - DNA, 20 bp, Artificial Sequence
  Synthetic
acacatgcacattcagactc

SEQ ID NO: 28017 - DNA, 19 bp, Artificial Sequence
  Synthetic
ttctggttgaaagacaccc

SEQ ID NO: 28018 - DNA, 24 bp, Artificial Sequence
  Synthetic
cgatatcttgctttattgagaagt

SEQ ID NO: 28019 - DNA, 18 bp, Artificial Sequence
  Synthetic
tatcgtcagcatccacag

SEQ ID NO: 28020 - DNA, 18 bp, Artificial Sequence
  Synthetic
tcaagacagaggctccag

SEQ ID NO: 28021 - DNA, 23 bp, Artificial Sequence
  Synthetic
ttcagtttgatatcagtccaatt

SEQ ID NO: 28022 - DNA, 21 bp, Artificial Sequence
  Synthetic
gcaagattttctttcccacat

SEQ ID NO: 28023 - DNA, 18 bp, Artificial Sequence
  Synthetic
gtttcagctggagcatgt

SEQ ID NO: 28024 - DNA, 19 bp, Artificial Sequence
  Synthetic
cgtaaaagggctggtttca

SEQ ID NO: 28025 - DNA, 19 bp, Artificial Sequence
  Synthetic
ctgcttcaacgattgcaac

SEQ ID NO: 28026 - DNA, 24 bp, Artificial Sequence
  Synthetic
gttcccataaagattcttgtaatc

SEQ ID NO: 28027 - DNA, 19 bp, Artificial Sequence
  Synthetic
gccaatgaaatagcagcag

SEQ ID NO: 28028 - DNA, 18 bp, Artificial Sequence
  Synthetic
ccaaaagcagcttctgtg

SEQ ID NO: 28029 - DNA, 20 bp, Artificial Sequence
  Synthetic
cttctggtaggcctgcaaat

SEQ ID NO: 28030 - DNA, 24 bp, Artificial Sequence
  Synthetic
tccaatggaatatctaactgtctt

SEQ ID NO: 28031 - DNA, 20 bp, Artificial Sequence
  Synthetic
gtctattctttgaggtgcag

SEQ ID NO: 28032 - DNA, 18 bp, Artificial Sequence
  Synthetic
tttcccaattctgcgtcc

SEQ ID NO: 28033 - DNA, 21 bp, Artificial Sequence
  Synthetic
gaatcttcagcttcatgagtt

SEQ ID NO: 28034 - DNA, 23 bp, Artificial Sequence
  Synthetic
tcatattcctgatgagaaagcaa

SEQ ID NO: 28035 - DNA, 23 bp, Artificial Sequence
  Synthetic
gttccaatgttcaatttgatctt

SEQ ID NO: 28036 - DNA, 18 bp, Artificial Sequence
  Synthetic
gttggtggagctggtaac

SEQ ID NO: 28037 - DNA, 20 bp, Artificial Sequence
  Synthetic
tgtgatcccgatctcgatcc

SEQ ID NO: 28038 - DNA, 19 bp, Artificial Sequence
  Synthetic
gccacttgtgccaacagat

SEQ ID NO: 28039 - DNA, 23 bp, Artificial Sequence
  Synthetic
tctttgagatttactggtaaagc

SEQ ID NO: 28040 - DNA, 18 bp, Artificial Sequence
  Synthetic
agaagcactggggtcaat

SEQ ID NO: 28041 - DNA, 22 bp, Artificial Sequence
  Synthetic
ccctaaaaaaatgtacctgacc

SEQ ID NO: 28042 - DNA, 18 bp, Artificial Sequence
  Synthetic
tttgtacccttgcaaccg

SEQ ID NO: 28043 - DNA, 20 bp, Artificial Sequence
  Synthetic
cagacatgtcagctaaagca

SEQ ID NO: 28044 - DNA, 18 bp, Artificial Sequence
  Synthetic
ctctaatggtgggcatcc

SEQ ID NO: 28045 - DNA, 18 bp, Artificial Sequence
  Synthetic
gggatggtatcacccaca

SEQ ID NO: 28046 - DNA, 22 bp, Artificial Sequence
  Synthetic
gtcagaaacagttcattactcc

SEQ ID NO: 28047 - DNA, 18 bp, Artificial Sequence
  Synthetic
cattgtgacctatgggcg

SEQ ID NO: 28048 - DNA, 18 bp, Artificial Sequence
  Synthetic
aaaactgcttcacgggac

SEQ ID NO: 28049 - DNA, 23 bp, Artificial Sequence
  Synthetic
tccatgatctttattgtaagcac

SEQ ID NO: 28050 - DNA, 20 bp, Artificial Sequence
  Synthetic
aaccatcacacaagtcttca

SEQ ID NO: 28051 - DNA, 19 bp, Artificial Sequence
  Synthetic
tgccatcaaatcacctact

SEQ ID NO: 28052 - DNA, 23 bp, Artificial Sequence
  Synthetic
acagaggtttataaacacctcta

SEQ ID NO: 28053 - DNA, 20 bp, Artificial Sequence
  Synthetic
gatgaatgtaacaagccacg

SEQ ID NO: 28054 - DNA, 19 bp, Artificial Sequence
  Synthetic
ggaactctccatgcttgat

SEQ ID NO: 28055 - DNA, 20 bp, Artificial Sequence
  Synthetic
agacttcagaagactcctcc

SEQ ID NO: 28056 - DNA, 21 bp, Artificial Sequence
  Synthetic
actgccaatcacataaggtta

SEQ ID NO: 28057 - DNA, 24 bp, Artificial Sequence
  Synthetic
cgctctaacaatacataactttgt

SEQ ID NO: 28058 - DNA, 23 bp, Artificial Sequence
  Synthetic
gtgctatatcatgtcttaaggat

SEQ ID NO: 28059 - DNA, 22 bp, Artificial Sequence
  Synthetic
actggaaaaagactttaccttt

SEQ ID NO: 28060 - DNA, 19 bp, Artificial Sequence
  Synthetic
ctacaaatctagcagggcg

SEQ ID NO: 28061 - DNA, 23 bp, Artificial Sequence
  Synthetic
atgaattagctttttaccgcaag

SEQ ID NO: 28062 - DNA, 23 bp, Artificial Sequence
  Synthetic
ctttagagctatcaaaacccaac

SEQ ID NO: 28063 - DNA, 23 bp, Artificial Sequence
  Synthetic
tggttttttaacaccacttaact

SEQ ID NO: 28064 - DNA, 23 bp, Artificial Sequence
  Synthetic
agagcttaataaaagaggcaata

SEQ ID NO: 28065 - DNA, 22 bp, Artificial Sequence
  Synthetic
cttaacatcagtaaccgtatga

SEQ ID NO: 28066 - DNA, 23 bp, Artificial Sequence
  Synthetic
ggtgtagttaaaacagagacatt

SEQ ID NO: 28067 - DNA, 22 bp, Artificial Sequence
  Synthetic
tacgatatttgactatgtggcg

SEQ ID NO: 28068 - DNA, 22 bp, Artificial Sequence
  Synthetic
taaagcatataccctcatcagc

SEQ ID NO: 28069 - DNA, 20 bp, Artificial Sequence
  Synthetic
acaccacacaatcacgttaa

SEQ ID NO: 28070 - DNA, 23 bp, Artificial Sequence
  Synthetic
agtaggatttaccattttcacaa

SEQ ID NO: 28071 - DNA, 22 bp, Artificial Sequence
  Synthetic
ctaagctccaattgatgcatat

SEQ ID NO: 28072 - DNA, 23 bp, Artificial Sequence
  Synthetic
accattcttaagacgcttaatag

SEQ ID NO: 28073 - DNA, 20 bp, Artificial Sequence
  Synthetic
gtgtactcaactgatggaac

SEQ ID NO: 28074 - DNA, 23 bp, Artificial Sequence
  Synthetic
tagcacaaaagcactatcttaat

SEQ ID NO: 28075 - DNA, 23 bp, Artificial Sequence
  Synthetic
acttagaattagaagcaacatgc

SEQ ID NO: 28076 - DNA, 22 bp, Artificial Sequence
  Synthetic
gctttctctagctgttttaact

SEQ ID NO: 28077 - DNA, 25 bp, Artificial Sequence
  Synthetic
atcagatatctcattcaactgctta

SEQ ID NO: 28078 - DNA, 22 bp, Artificial Sequence
  Synthetic
cttaggatctacagaaaacgca

SEQ ID NO: 28079 - DNA, 23 bp, Artificial Sequence
  Synthetic
catgtgtcaaaacataagacaca

SEQ ID NO: 28080 - DNA, 22 bp, Artificial Sequence
  Synthetic
cttttacacgctcatagcattt

SEQ ID NO: 28081 - DNA, 23 bp, Artificial Sequence
  Synthetic
cagcataggcatgatataagaat

SEQ ID NO: 28082 - DNA, 19 bp, Artificial Sequence
  Synthetic
acactaaaacagcaagtgc

SEQ ID NO: 28083 - DNA, 25 bp, Artificial Sequence
  Synthetic
tagtataagcgtaaatttcatcctg

SEQ ID NO: 28084 - DNA, 19 bp, Artificial Sequence
  Synthetic
cccaacccataagtacagg

SEQ ID NO: 28085 - DNA, 22 bp, Artificial Sequence
  Synthetic
ccatcatcactcaaaatcatca

SEQ ID NO: 28086 - DNA, 21 bp, Artificial Sequence
  Synthetic
acaaaacatccagctcctaat

SEQ ID NO: 28087 - DNA, 18 bp, Artificial Sequence
  Synthetic
ttctgatgcaactgccac

SEQ ID NO: 28088 - DNA, 22 bp, Artificial Sequence
  Synthetic
ctgatgcataactctgcttaaa

SEQ ID NO: 28089 - DNA, 19 bp, Artificial Sequence
  Synthetic
gcaagatgtgacttccctg

SEQ ID NO: 28090 - DNA, 23 bp, Artificial Sequence
  Synthetic
tggtaagcatactaacttcatct

SEQ ID NO: 28091 - DNA, 20 bp, Artificial Sequence
  Synthetic
tgtttctgcagtctgtgaat

SEQ ID NO: 28092 - DNA, 18 bp, Artificial Sequence
  Synthetic
aaatcgccagttgcctta

SEQ ID NO: 28093 - DNA, 18 bp, Artificial Sequence
  Synthetic
tcaccaggaggagctttc

SEQ ID NO: 28094 - DNA, 23 bp, Artificial Sequence
  Synthetic
tacaagtaatcacatgtaacact

SEQ ID NO: 28095 - DNA, 23 bp, Artificial Sequence
  Synthetic
cttatccacattacagttccaaa

SEQ ID NO: 28096 - DNA, 21 bp, Artificial Sequence
  Synthetic
acctaaattgcatcttgtgat

SEQ ID NO: 28097 - DNA, 18 bp, Artificial Sequence
  Synthetic
ttaagctctgggtggtgt

SEQ ID NO: 28098 - DNA, 19 bp, Artificial Sequence
  Synthetic
caaccttgtccaccactac

SEQ ID NO: 28099 - DNA, 21 bp, Artificial Sequence
  Synthetic
aaacaaactcctgaacaacca

SEQ ID NO: 28100 - DNA, 20 bp, Artificial Sequence
  Synthetic
ttcatcatacagcctgtagg

SEQ ID NO: 28101 - DNA, 23 bp, Artificial Sequence
  Synthetic
gccaattaaaaatccttcactag

SEQ ID NO: 28102 - DNA, 19 bp, Artificial Sequence
  Synthetic
ccatcaccccaatgcatat

SEQ ID NO: 28103 - DNA, 22 bp, Artificial Sequence
  Synthetic
ccagtgactaactatggtttca

SEQ ID NO: 28104 - DNA, 21 bp, Artificial Sequence
  Synthetic
aacaagcctttattctgcatc

SEQ ID NO: 28105 - DNA, 18 bp, Artificial Sequence
  Synthetic
gttatcagactgcctggc

SEQ ID NO: 28106 - DNA, 21 bp, Artificial Sequence
  Synthetic
ggttaggatgacaaatcgttt

SEQ ID NO: 28107 - DNA, 22 bp, Artificial Sequence
  Synthetic
actcatacaatcaacagcatta

SEQ ID NO: 28108 - DNA, 23 bp, Artificial Sequence
  Synthetic
ccatatatcttagcagcatcaat

SEQ ID NO: 28109 - DNA, 23 bp, Artificial Sequence
  Synthetic
acagaaatttttaggagctttga

SEQ ID NO: 28110 - DNA, 18 bp, Artificial Sequence
  Synthetic
tctgcagaccaacccaaa

SEQ ID NO: 28111 - DNA, 18 bp, Artificial Sequence
  Synthetic
cagctgtcgtgtaagact

SEQ ID NO: 28112 - DNA, 25 bp, Artificial Sequence
  Synthetic
gcattaatgttatcacagaaactac

SEQ ID NO: 28113 - DNA, 18 bp, Artificial Sequence
  Synthetic
ggcagccaaagtgtatcc

SEQ ID NO: 28114 - DNA, 19 bp, Artificial Sequence
  Synthetic
ccttctccatagcttgtgc

SEQ ID NO: 28115 - DNA, 18 bp, Artificial Sequence
  Synthetic
acagcgcaggtactcata

SEQ ID NO: 28116 - DNA, 25 bp, Artificial Sequence
  Synthetic
aatagtaaaacaagcatagctacac

SEQ ID NO: 28117 - DNA, 24 bp, Artificial Sequence
  Synthetic
ggatttaccataaagagtgaatgt

SEQ ID NO: 28118 - DNA, 25 bp, Artificial Sequence
  Synthetic
gtacctagttttataccttgaatgt

SEQ ID NO: 28119 - DNA, 18 bp, Artificial Sequence
  Synthetic
aaactggtcggactgatc

SEQ ID NO: 28120 - DNA, 20 bp, Artificial Sequence
  Synthetic
cggaatagcctcatcgctac

SEQ ID NO: 28121 - DNA, 21 bp, Artificial Sequence
  Synthetic
atgcttagttacttgctgagg

SEQ ID NO: 28122 - DNA, 22 bp, Artificial Sequence
  Synthetic
tgataggcattcaaattctcat

SEQ ID NO: 28123 - DNA, 24 bp, Artificial Sequence
  Synthetic
ctatagtctgctataaccttctct

SEQ ID NO: 28124 - DNA, 20 bp, Artificial Sequence
  Synthetic
ttcgctttcaacatgatgtt

SEQ ID NO: 28125 - DNA, 22 bp, Artificial Sequence
  Synthetic
ttctgttttggagtaagtggag

SEQ ID NO: 28126 - DNA, 20 bp, Artificial Sequence
  Synthetic
gtggcagttctgatgtccag

SEQ ID NO: 28127 - DNA, 22 bp, Artificial Sequence
  Synthetic
ttcaatatgatggttttaccca

SEQ ID NO: 28128 - DNA, 19 bp, Artificial Sequence
  Synthetic
tcccattctcatcactgct

SEQ ID NO: 28129 - DNA, 18 bp, Artificial Sequence
  Synthetic
gtcaccccagcgattccg

SEQ ID NO: 28130 - DNA, 19 bp, Artificial Sequence
  Synthetic
cagaagttttacgcgtcgc

SEQ ID NO: 28131 - DNA, 16 bp, Artificial Sequence
  Synthetic
tcaagggccctcacgc

SEQ ID NO: 28132 - DNA, 20 bp, Artificial Sequence
  Synthetic
cgcgcctactaataggtcca

SEQ ID NO: 28133 - DNA, 18 bp, Artificial Sequence
  Synthetic
gccaagatgccccaatgg

SEQ ID NO: 28134 - DNA, 18 bp, Artificial Sequence
  Synthetic
ggccgcagacacttgatg

SEQ ID NO: 28135 - DNA, 19 bp, Artificial Sequence
  Synthetic
cgcacgtcttgagaaaccc

SEQ ID NO: 28136 - DNA, 20 bp, Artificial Sequence
  Synthetic
agcaaggcagtatagcaagc

SEQ ID NO: 28137 - DNA, 18 bp, Artificial Sequence
  Synthetic
ttaccccgcacgtaccac

SEQ ID NO: 28138 - DNA, 19 bp, Artificial Sequence
  Synthetic
ctaatcgtgcagagacggg

SEQ ID NO: 28139 - DNA, 19 bp, Artificial Sequence
  Synthetic
cccaacgaggtcctgatct

SEQ ID NO: 28140 - DNA, 20 bp, Artificial Sequence
  Synthetic
tgctaagggtttccactggt

SEQ ID NO: 28141 - DNA, 20 bp, Artificial Sequence
  Synthetic
ccgcgagaaacttaccgtag

SEQ ID NO: 28142 - DNA, 18 bp, Artificial Sequence
  Synthetic
acagaggacgaccgagtc

SEQ ID NO: 28143 - DNA, 20 bp, Artificial Sequence
  Synthetic
ggtccatgtagtgttggctt

SEQ ID NO: 28144 - DNA, 20 bp, Artificial Sequence
  Synthetic
ccttgaactggtgggctatt

SEQ ID NO: 28145 - DNA, 19 bp, Artificial Sequence
  Synthetic
caagccgcttaccacgaac

SEQ ID NO: 28146 - DNA, 16 bp, Artificial Sequence
  Synthetic
tggttgccccgggatg

SEQ ID NO: 28147 - DNA, 18 bp, Artificial Sequence
  Synthetic
cagttattgctgccccgc

SEQ ID NO: 28148 - DNA, 18 bp, Artificial Sequence
  Synthetic
aggggcttacatggaggg

SEQ ID NO: 28149 - DNA, 20 bp, Artificial Sequence
  Synthetic
tgtaatgttgctgcccatct

SEQ ID NO: 28150 - DNA, 19 bp, Artificial Sequence
  Synthetic
tcctgtggtttcgaggacg

SEQ ID NO: 28151 - DNA, 20 bp, Artificial Sequence
  Synthetic
cgcttctagacgacgttgaa

SEQ ID NO: 28152 - DNA, 16 bp, Artificial Sequence
  Synthetic
tgcggccccctttagc

SEQ ID NO: 28153 - DNA, 18 bp, Artificial Sequence
  Synthetic
cgataaccacactgggcc

SEQ ID NO: 28154 - DNA, 18 bp, Artificial Sequence
  Synthetic
tggcctgtggagcatctc

SEQ ID NO: 28155 - DNA, 20 bp, Artificial Sequence
  Synthetic
ttcattgccatcatccattt

SEQ ID NO: 28156 - DNA, 21 bp, Artificial Sequence
  Synthetic
acgtattttgacttggtttct

SEQ ID NO: 28157 - DNA, 20 bp, Artificial Sequence
  Synthetic
ctctccaacatgtatgcaac

SEQ ID NO: 28158 - DNA, 20 bp, Artificial Sequence
  Synthetic
ctgcttaaggatgtctacca

SEQ ID NO: 28159 - DNA, 19 bp, Artificial Sequence
  Synthetic
tcaatctcctggttgcttt

SEQ ID NO: 28160 - DNA, 20 bp, Artificial Sequence
  Synthetic
gcaatatcccaatcattccc

SEQ ID NO: 28161 - DNA, 20 bp, Artificial Sequence
  Synthetic
ttgaccaacactgattcagg

SEQ ID NO: 28162 - DNA, 18 bp, Artificial Sequence
  Synthetic
actttgctttggtggagc

SEQ ID NO: 28163 - DNA, 20 bp, Artificial Sequence
  Synthetic
gccttctctcctttcgcaag

SEQ ID NO: 28164 - DNA, 20 bp, Artificial Sequence
  Synthetic
gcttccgttggcataactga

SEQ ID NO: 28165 - DNA, 20 bp, Artificial Sequence
  Synthetic
gaaacaatcagtggggcaga

SEQ ID NO: 28166 - DNA, 19 bp, Artificial Sequence
  Synthetic
ggcagggtcgtgaaagaac

SEQ ID NO: 28167 - DNA, 18 bp, Artificial Sequence
  Synthetic
ggaggagaggccacatcc

SEQ ID NO: 28168 - DNA, 18 bp, Artificial Sequence
  Synthetic
cggctatcttccgcgcta

SEQ ID NO: 28169 - DNA, 19 bp, Artificial Sequence
  Synthetic
gtatctcctggcccctacg

SEQ ID NO: 28170 - DNA, 18 bp, Artificial Sequence
  Synthetic
taaaggtccgaggagccg

SEQ ID NO: 28171 - DNA, 16 bp, Artificial Sequence
  Synthetic
gagcatgcaggtgggc

SEQ ID NO: 28172 - DNA, 18 bp, Artificial Sequence
  Synthetic
ggtcaaggacagtgccga

SEQ ID NO: 28173 - DNA, 18 bp, Artificial Sequence
  Synthetic
gagcatcggtcgacacga

SEQ ID NO: 28174 - DNA, 20 bp, Artificial Sequence
  Synthetic
agcctaactgtagtctcggc

SEQ ID NO: 28175 - DNA, 18 bp, Artificial Sequence
  Synthetic
ttgacaggcaatacgcgg

SEQ ID NO: 28176 - DNA, 20 bp, Artificial Sequence
  Synthetic
cccgccaagtattgtatccc

SEQ ID NO: 28177 - DNA, 16 bp, Artificial Sequence
  Synthetic
agaggatggcgggcag

SEQ ID NO: 28178 - DNA, 20 bp, Artificial Sequence
  Synthetic
acactccgagcttatccact

SEQ ID NO: 28179 - DNA, 18 bp, Artificial Sequence
  Synthetic
tagttcggcgcaggaagg

SEQ ID NO: 28180 - DNA, 20 bp, Artificial Sequence
  Synthetic
cgcctctgctgttatatggg

SEQ ID NO: 28181 - DNA, 19 bp, Artificial Sequence
  Synthetic
ccacaggtggttcgtagtc

SEQ ID NO: 28182 - DNA, 17 bp, Artificial Sequence
  Synthetic
ccatgacccgtcgctga

SEQ ID NO: 28183 - DNA, 19 bp, Artificial Sequence
  Synthetic
catggcaacggacgtcttt

SEQ ID NO: 28184 - DNA, 17 bp, Artificial Sequence
  Synthetic
ccgctgtcctggtgagt

SEQ ID NO: 28185 - DNA, 18 bp, Artificial Sequence
  Synthetic
gcatggtgcagtcctgga

SEQ ID NO: 28186 - DNA, 20 bp, Artificial Sequence
  Synthetic
tatcatcctcgcccacagtg

SEQ ID NO: 28187 - DNA, 20 bp, Artificial Sequence
  Synthetic
tgcccagttgaagaggtact

SEQ ID NO: 28188 - DNA, 23 bp, Artificial Sequence
  Synthetic
tgttttgtgcaaaatatacagca

SEQ ID NO: 28189 - DNA, 20 bp, Artificial Sequence
  Synthetic
tgatattttgtgcagtcgtc

SEQ ID NO: 28190 - DNA, 18 bp, Artificial Sequence
  Synthetic
tgcactctaccaccagtc

SEQ ID NO: 28191 - DNA, 19 bp, Artificial Sequence
  Synthetic
acctgtgtttggccatagc

SEQ ID NO: 28192 - DNA, 19 bp, Artificial Sequence
  Synthetic
tttagccactgtttccctg

SEQ ID NO: 28193 - DNA, 19 bp, Artificial Sequence
  Synthetic
cagataatggctgcaacca

SEQ ID NO: 28194 - DNA, 18 bp, Artificial Sequence
  Synthetic
taaacggttcgctagggt

SEQ ID NO: 28195 - DNA, 18 bp, Artificial Sequence
  Synthetic
cccacatgtacctcccat

SEQ ID NO: 28196 - DNA, 19 bp, Artificial Sequence
  Synthetic
aaccgggtcctgtcactgt

SEQ ID NO: 28197 - DNA, 24 bp, Artificial Sequence
  Synthetic
tgtaaatataatgctataaggccc

SEQ ID NO: 28198 - DNA, 18 bp, Artificial Sequence
  Synthetic
gttccaatgcctaggccc

SEQ ID NO: 28199 - DNA, 23 bp, Artificial Sequence
  Synthetic
gcaggatttgtaaagtttgtact

SEQ ID NO: 28200 - DNA, 20 bp, Artificial Sequence
  Synthetic
tcaccatcatcaacatcagc

SEQ ID NO: 28201 - DNA, 18 bp, Artificial Sequence
  Synthetic
tggcctacagtaagcaac

SEQ ID NO: 28202 - DNA, 20 bp, Artificial Sequence
  Synthetic
ctgcgcaagtaaaagaacat

SEQ ID NO: 28203 - DNA, 23 bp, Artificial Sequence
  Synthetic
aaatctatatgtgtcctccaagc

SEQ ID NO: 28204 - DNA, 18 bp, Artificial Sequence
  Synthetic
aattggtggtgtgcacac

SEQ ID NO: 28205 - DNA, 23 bp, Artificial Sequence
  Synthetic
acagcaaagataattcttgttgt

SEQ ID NO: 28206 - DNA, 25 bp, Artificial Sequence
  Synthetic
gcaatagtattattacagtcctctg

SEQ ID NO: 28207 - DNA, 24 bp, Artificial Sequence
  Synthetic
aaagtacattccatcataatccac

SEQ ID NO: 28208 - DNA, 19 bp, Artificial Sequence
  Synthetic
tgagacagtgcctctctcc

SEQ ID NO: 28209 - DNA, 19 bp, Artificial Sequence
  Synthetic
taagctgtttcccggacct

SEQ ID NO: 28210 - DNA, 23 bp, Artificial Sequence
  Synthetic
agtgggatattaaaaggtcttgt

SEQ ID NO: 28211 - DNA, 25 bp, Artificial Sequence
  Synthetic
tcatatgcaggatttaaaactgtag

SEQ ID NO: 28212 - DNA, 22 bp, Artificial Sequence
  Synthetic
tgaaagtctatatctggtgcag

SEQ ID NO: 28213 - DNA, 22 bp, Artificial Sequence
  Synthetic
gggtgcaagaaaaaatcataat

SEQ ID NO: 28214 - DNA, 22 bp, Artificial Sequence
  Synthetic
tttccaggatcaattacatcaa

SEQ ID NO: 28215 - DNA, 21 bp, Artificial Sequence
  Synthetic
agacacgtccattctattgtc

SEQ ID NO: 28216 - DNA, 24 bp, Artificial Sequence
  Synthetic
taggtactcctgatttatcttcct

SEQ ID NO: 28217 - DNA, 22 bp, Artificial Sequence
  Synthetic
ttgagtataaagagccactagg

SEQ ID NO: 28218 - DNA, 20 bp, Artificial Sequence
  Synthetic
tgtttgaacttgcacttacc

SEQ ID NO: 28219 - DNA, 18 bp, Artificial Sequence
  Synthetic
ttgccatatcacccttgg

SEQ ID NO: 28220 - DNA, 19 bp, Artificial Sequence
  Synthetic
ttactctctcaacagggcc

SEQ ID NO: 28221 - DNA, 18 bp, Artificial Sequence
  Synthetic
tactggcaggaaccttct

SEQ ID NO: 28222 - DNA, 18 bp, Artificial Sequence
  Synthetic
acatcacctccatccagg

SEQ ID NO: 28223 - DNA, 22 bp, Artificial Sequence
  Synthetic
gtgtcttgagaaaataccatgc

SEQ ID NO: 28224 - DNA, 23 bp, Artificial Sequence
  Synthetic
aatgtatagtcagatgcattcat

SEQ ID NO: 28225 - DNA, 23 bp, Artificial Sequence
  Synthetic
actaaatttttaagcacccattg

SEQ ID NO: 28226 - DNA, 24 bp, Artificial Sequence
  Synthetic
caaaaattgataaggctctccatt

SEQ ID NO: 28227 - DNA, 18 bp, Artificial Sequence
  Synthetic
acgggctttccttggtaa

SEQ ID NO: 28228 - DNA, 18 bp, Artificial Sequence
  Synthetic
cattgcgacctatgggag

SEQ ID NO: 28229 - DNA, 23 bp, Artificial Sequence
  Synthetic
aacatgtagatcttcatgaacaa

SEQ ID NO: 28230 - DNA, 23 bp, Artificial Sequence
  Synthetic
atcatggttaacagtatcagtac

SEQ ID NO: 28231 - DNA, 20 bp, Artificial Sequence
  Synthetic
aaaaccatctccacaaactg

SEQ ID NO: 28232 - DNA, 22 bp, Artificial Sequence
  Synthetic
caacaggtttctcgttaaaatt

SEQ ID NO: 28233 - DNA, 18 bp, Artificial Sequence
  Synthetic
tttacctgcagctacagc

SEQ ID NO: 28234 - DNA, 22 bp, Artificial Sequence
  Synthetic
gctaaaacaagagcaactaacc

SEQ ID NO: 28235 - DNA, 19 bp, Artificial Sequence
  Synthetic
gcctacacctacacccata

SEQ ID NO: 28236 - DNA, 23 bp, Artificial Sequence
  Synthetic
acatataaatcatcagatgccaa

SEQ ID NO: 28237 - DNA, 25 bp, Artificial Sequence
  Synthetic
ccaccattagcagtaatatcataat

SEQ ID NO: 28238 - DNA, 25 bp, Artificial Sequence
  Synthetic
cactctttaaatatgtaggtaccaa

SEQ ID NO: 28239 - DNA, 24 bp, Artificial Sequence
  Synthetic
ccttcactaataacatcaggaaat

SEQ ID NO: 28240 - DNA, 18 bp, Artificial Sequence
  Synthetic
gaaatgccccttgtggtc

SEQ ID NO: 28241 - DNA, 18 bp, Artificial Sequence
  Synthetic
tttgccatagcccaaaca

SEQ ID NO: 28242 - DNA, 19 bp, Artificial Sequence
  Synthetic
acgaaccatgctaaaaagc

SEQ ID NO: 28243 - DNA, 24 bp, Artificial Sequence
  Synthetic
ccacgtaatttacatataccatct

SEQ ID NO: 28244 - DNA, 25 bp, Artificial Sequence
  Synthetic
gtcaacataggcatcatataagaat

SEQ ID NO: 28245 - DNA, 23 bp, Artificial Sequence
  Synthetic
cactaaaacaacaagttcgtaaa

SEQ ID NO: 28246 - DNA, 22 bp, Artificial Sequence
  Synthetic
ggcctgtcatagtactaagaat

SEQ ID NO: 28247 - DNA, 21 bp, Artificial Sequence
  Synthetic
tcaaaacttgagcacattcat

SEQ ID NO: 28248 - DNA, 21 bp, Artificial Sequence
  Synthetic
acacgaaagactttttggtat

SEQ ID NO: 28249 - DNA, 19 bp, Artificial Sequence
  Synthetic
tggtagcagaagcatagct

SEQ ID NO: 28250 - DNA, 18 bp, Artificial Sequence
  Synthetic
agactttcccgtaccagg

SEQ ID NO: 28251 - DNA, 24 bp, Artificial Sequence
  Synthetic
aagtataacaatctctctcagcaa

SEQ ID NO: 28252 - DNA, 23 bp, Artificial Sequence
  Synthetic
atctttatgcacatcatagacat

SEQ ID NO: 28253 - DNA, 25 bp, Artificial Sequence
  Synthetic
ggtagttacaatattcttcagcatg

SEQ ID NO: 28254 - DNA, 18 bp, Artificial Sequence
  Synthetic
ctgtctgttcggctgaag

SEQ ID NO: 28255 - DNA, 19 bp, Artificial Sequence
  Synthetic
ccagatggtaaccactgtc

SEQ ID NO: 28256 - DNA, 21 bp, Artificial Sequence
  Synthetic
caggtaaacaagaacacctac

SEQ ID NO: 28257 - DNA, 22 bp, Artificial Sequence
  Synthetic
aaactgacattaaagggttcaa

SEQ ID NO: 28258 - DNA, 21 bp, Artificial Sequence
  Synthetic
ccttctccatagctaaagcag

SEQ ID NO: 28259 - DNA, 23 bp, Artificial Sequence
  Synthetic
tacagtaacatatacgggcaaat

SEQ ID NO: 28260 - DNA, 21 bp, Artificial Sequence
  Synthetic
agacacagtgaatttaggttg

SEQ ID NO: 28261 - DNA, 22 bp, Artificial Sequence
  Synthetic
ccaagctttaacatttcagcat

SEQ ID NO: 28262 - DNA, 22 bp, Artificial Sequence
  Synthetic
ggatcatcaagagtagcaagta

SEQ ID NO: 28263 - DNA, 19 bp, Artificial Sequence
  Synthetic
tcgccttgttcattgatga

SEQ ID NO: 28264 - DNA, 18 bp, Artificial Sequence
  Synthetic
tttcggtgggagactttg

SEQ ID NO: 28265 - DNA, 21 bp, Artificial Sequence
  Synthetic
ttcaatgctcaatttcaaagc

SEQ ID NO: 28266 - DNA, 22 bp, Artificial Sequence
  Synthetic
tgtcaaagtctactttctctgg

SEQ ID NO: 28267 - DNA, 24 bp, Artificial Sequence
  Synthetic
cagtattaatgtatacccccttca

SEQ ID NO: 28268 - DNA, 20 bp, Artificial Sequence
  Synthetic
ccttgaaatttggcctatgg

SEQ ID NO: 28269 - DNA, 22 bp, Artificial Sequence
  Synthetic
tgacttagccaatagagtccta

SEQ ID NO: 28270 - DNA, 20 bp, Artificial Sequence
  Synthetic
atcaaccttccttcttggtc

SEQ ID NO: 28271 - DNA, 19 bp, Artificial Sequence
  Synthetic
ttccctttgaggatgttgc

SEQ ID NO: 28272 - DNA, 18 bp, Artificial Sequence
  Synthetic
tatccactggccacagcg

SEQ ID NO: 28273 - DNA, 19 bp, Artificial Sequence
  Synthetic
gaatccattgcttccacgt

SEQ ID NO: 28274 - DNA, 22 bp, Artificial Sequence
  Synthetic
ctgtatatttctcctagcacac

SEQ ID NO: 28275 - DNA, 20 bp, Artificial Sequence
  Synthetic
ttcaatgttggacgaggagg

SEQ ID NO: 28276 - DNA, 21 bp, Artificial Sequence
  Synthetic
aaaactgtagtgcatgctaaa

SEQ ID NO: 28277 - DNA, 20 bp, Artificial Sequence
  Synthetic
tgcaagtgtagtttgttcaa

SEQ ID NO: 28278 - DNA, 18 bp, Artificial Sequence
  Synthetic
ttgcagatgactcaggag

SEQ ID NO: 28279 - DNA, 18 bp, Artificial Sequence
  Synthetic
ctgggctgttgcatcaat

SEQ ID NO: 28280 - DNA, 22 bp, Artificial Sequence
  Synthetic
tggatcacttataggtacctgt

SEQ ID NO: 28281 - DNA, 20 bp, Artificial Sequence
  Synthetic
gtgcactgtttgacctatag

SEQ ID NO: 28282 - DNA, 25 bp, Artificial Sequence
  Synthetic
gtttactaattgtattgcaggacaa

SEQ ID NO: 28283 - DNA, 18 bp, Artificial Sequence
  Synthetic
atcacccatagtccctgc

SEQ ID NO: 28284 - DNA, 18 bp, Artificial Sequence
  Synthetic
ggtaaatgacagcgggtt

SEQ ID NO: 28285 - DNA, 23 bp, Artificial Sequence
  Synthetic
tgcagtattgtaaacaacattct

SEQ ID NO: 28286 - DNA, 20 bp, Artificial Sequence
  Synthetic
gctttaaagtgcacggtaac

SEQ ID NO: 28287 - DNA, 18 bp, Artificial Sequence
  Synthetic
atagtgcattcgggtcac

SEQ ID NO: 28288 - DNA, 22 bp, Artificial Sequence
  Synthetic
tattttgttggctttctctagg

SEQ ID NO: 28289 - DNA, 18 bp, Artificial Sequence
  Synthetic
gttcggtgggagactttg

SEQ ID NO: 28290 - DNA, 18 bp, Artificial Sequence
  Synthetic
tagagatctgggctctgg

SEQ ID NO: 28291 - DNA, 18 bp, Artificial Sequence
  Synthetic
aaagtcatccatggctgc

SEQ ID NO: 28292 - DNA, 18 bp, Artificial Sequence
  Synthetic
ataggaacatgggcctcg

SEQ ID NO: 28293 - DNA, 21 bp, Artificial Sequence
  Synthetic
agacgcatatagactgttgaa

SEQ ID NO: 28294 - DNA, 18 bp, Artificial Sequence
  Synthetic
caagtgtgctgcctcttc

SEQ ID NO: 28295 - DNA, 23 bp, Artificial Sequence
  Synthetic
actgagaaatttgctttaaggat

SEQ ID NO: 28296 - DNA, 20 bp, Artificial Sequence
  Synthetic
ctgttttggagggagtgaag

SEQ ID NO: 28297 - DNA, 20 bp, Artificial Sequence
  Synthetic
agctcttttttgtcagcttt

SEQ ID NO: 28298 - DNA, 24 bp, Artificial Sequence
  Synthetic
gttagtcatcatctttctcacaac

SEQ ID NO: 28299 - DNA, 20 bp, Artificial Sequence
  Synthetic
cctgcttgtattccctcatg

SEQ ID NO: 28300 - DNA, 23 bp, Artificial Sequence
  Synthetic
tgtagtctttaatgaacagctga

SEQ ID NO: 28301 - DNA, 18 bp, Artificial Sequence
  Synthetic
atcaattcgggccctaga

SEQ ID NO: 28302 - DNA, 18 bp, Artificial Sequence
  Synthetic
cttgcagtgatgtgtcca

SEQ ID NO: 28303 - DNA, 22 bp, Artificial Sequence
  Synthetic
cctctgagttgtttaattcctc

SEQ ID NO: 28304 - DNA, 19 bp, Artificial Sequence
  Synthetic
cttgctgtatcacgacatg

SEQ ID NO: 28305 - DNA, 24 bp, Artificial Sequence
  Synthetic
tcatatgctatgtcactttcatct

SEQ ID NO: 28306 - DNA, 18 bp, Artificial Sequence
  Synthetic
aacgttgggatagggcat

SEQ ID NO: 28307 - DNA, 22 bp, Artificial Sequence
  Synthetic
actctgatttagcaagactctc

SEQ ID NO: 28308 - DNA, 18 bp, Artificial Sequence
  Synthetic
gaacccccactcttttgg

SEQ ID NO: 28309 - DNA, 18 bp, Artificial Sequence
  Synthetic
aacaggagctccagatgt

SEQ ID NO: 28310 - DNA, 18 bp, Artificial Sequence
  Synthetic
aataggttcggtgcctct

SEQ ID NO: 28311 - DNA, 25 bp, Artificial Sequence
  Synthetic
gacatagttagttttttacccaatc

SEQ ID NO: 28312 - DNA, 18 bp, Artificial Sequence
  Synthetic
taacacctaaaggctgcc

SEQ ID NO: 28313 - DNA, 18 bp, Artificial Sequence
  Synthetic
cagtcacctgtttgcaca

SEQ ID NO: 28314 - DNA, 19 bp, Artificial Sequence
  Synthetic
ctgcatctcctatagtgcc

SEQ ID NO: 28315 - DNA, 18 bp, Artificial Sequence
  Synthetic
tgttgttccttggctgag

SEQ ID NO: 28316 - DNA, 18 bp, Artificial Sequence
  Synthetic
agtatgtttcgggcccat

SEQ ID NO: 28317 - DNA, 25 bp, Artificial Sequence
  Synthetic
gcatatatattgactagtgtgtgtc

SEQ ID NO: 28318 - DNA, 22 bp, Artificial Sequence
  Synthetic
ggctttgatctatcatctgtca

SEQ ID NO: 28319 - DNA, 19 bp, Artificial Sequence
  Synthetic
attgccatcatccacttca

SEQ ID NO: 28320 - DNA, 25 bp, Artificial Sequence
  Synthetic
cctccttattttaacttgatttctg

SEQ ID NO: 28321 - DNA, 18 bp, Artificial Sequence
  Synthetic
taaacactgcctgttccg

SEQ ID NO: 28322 - DNA, 19 bp, Artificial Sequence
  Synthetic
gtctaaggatgtccaccat

SEQ ID NO: 28323 - DNA, 20 bp, Artificial Sequence
  Synthetic
ctctcccgcttactatcaac

SEQ ID NO: 28324 - DNA, 21 bp, Artificial Sequence
  Synthetic
caatttcccagttcctgatta

SEQ ID NO: 28325 - DNA, 19 bp, Artificial Sequence
  Synthetic
tcaaccctgatcctctcac

SEQ ID NO: 28326 - DNA, 20 bp, Artificial Sequence
  Synthetic
acattagccttctctccttt

SEQ ID NO: 28327 - DNA, 18 bp, Artificial Sequence
  Synthetic
atggcaaaacacgcatct

SEQ ID NO: 28328 - DNA, 21 bp, Artificial Sequence
  Synthetic
aagagaagcacttgaagactg

SEQ ID NO: 28329 - DNA, 24 bp, Artificial Sequence
  Synthetic
ctacctgtgtaacagtattttcag

SEQ ID NO: 28330 - DNA, 19 bp, Artificial Sequence
  Synthetic
attaatggcggatcccaag

SEQ ID NO: 28331 - DNA, 23 bp, Artificial Sequence
  Synthetic
catctactgttacagatggtctt

SEQ ID NO: 28332 - DNA, 23 bp, Artificial Sequence
  Synthetic
ctagaactgcaaaactagtctca

SEQ ID NO: 28333 - DNA, 24 bp, Artificial Sequence
  Synthetic
tttctgttagtataggtctgtgta

SEQ ID NO: 28334 - DNA, 21 bp, Artificial Sequence
  Synthetic
gctttctgcatattcatcctc

SEQ ID NO: 28335 - DNA, 20 bp, Artificial Sequence
  Synthetic
acaattcattcgttggtctg

SEQ ID NO: 28336 - DNA, 20 bp, Artificial Sequence
  Synthetic
tatcactggtcatgcgtaag

SEQ ID NO: 28337 - DNA, 18 bp, Artificial Sequence
  Synthetic
caggcgccaaaaacttac

SEQ ID NO: 28338 - DNA, 24 bp, Artificial Sequence
  Synthetic
aagatgtacctttagtgtctttgt

SEQ ID NO: 28339 - DNA, 21 bp, Artificial Sequence
  Synthetic
ttccttatatcccactccaaa

SEQ ID NO: 28340 - DNA, 22 bp, Artificial Sequence
  Synthetic
attgttccatgtacaaaacttg

SEQ ID NO: 28341 - DNA, 22 bp, Artificial Sequence
  Synthetic
gaggtaatttaatttgcactgg

SEQ ID NO: 28342 - DNA, 22 bp, Artificial Sequence
  Synthetic
ccatattgggatttctttaggc

SEQ ID NO: 28343 - DNA, 18 bp, Artificial Sequence
  Synthetic
ttccagtcctcacttgcc

SEQ ID NO: 28344 - DNA, 25 bp, Artificial Sequence
  Synthetic
cctttgtgatgtattagtaaatcct

SEQ ID NO: 28345 - DNA, 20 bp, Artificial Sequence
  Synthetic
caggaggcccaataggatct

SEQ ID NO: 28346 - DNA, 20 bp, Artificial Sequence
  Synthetic
cagatccttctgttacagca

SEQ ID NO: 28347 - DNA, 21 bp, Artificial Sequence
  Synthetic
tcaataatacctgtgtcaccg

SEQ ID NO: 28348 - DNA, 21 bp, Artificial Sequence
  Synthetic
cgtattcatcagtaggcagta

SEQ ID NO: 28349 - DNA, 18 bp, Artificial Sequence
  Synthetic
taaaggaggacatgcacc

SEQ ID NO: 28350 - DNA, 20 bp, Artificial Sequence
  Synthetic
tgagaggaaccttgcataat

SEQ ID NO: 28351 - DNA, 18 bp, Artificial Sequence
  Synthetic
ttaaaccccccgtctacg

SEQ ID NO: 28352 - DNA, 18 bp, Artificial Sequence
  Synthetic
tacacctctcccggttag

SEQ ID NO: 28353 - DNA, 25 bp, Artificial Sequence
  Synthetic
gcaataatagtaaatctaacacctg

SEQ ID NO: 28354 - DNA, 22 bp, Artificial Sequence
  Synthetic
tagctcttccattgtatccaaa

SEQ ID NO: 28355 - DNA, 23 bp, Artificial Sequence
  Synthetic
tagcttcatcttctcctaatcca

SEQ ID NO: 28356 - DNA, 22 bp, Artificial Sequence
  Synthetic
aaaatcacaatgttgctgcata

SEQ ID NO: 28357 - DNA, 19 bp, Artificial Sequence
  Synthetic
gctttggaagtgtagtcgt

SEQ ID NO: 28358 - DNA, 19 bp, Artificial Sequence
  Synthetic
actctgtcggtcgacttcg

SEQ ID NO: 28359 - DNA, 22 bp, Artificial Sequence
  Synthetic
tctgcagcacttatatctgaaa

SEQ ID NO: 28360 - DNA, 22 bp, Artificial Sequence
  Synthetic
tcaatattttgtgttggctgtt

SEQ ID NO: 28361 - DNA, 23 bp, Artificial Sequence
  Synthetic
ctttctgaccaatagttagtcca

SEQ ID NO: 28362 - DNA, 20 bp, Artificial Sequence
  Synthetic
cttgcagctatttctggaat

SEQ ID NO: 28363 - DNA, 18 bp, Artificial Sequence
  Synthetic
gagtacacgagcaacagg

SEQ ID NO: 28364 - DNA, 20 bp, Artificial Sequence
  Synthetic
ccacctctaccaatttcaag

SEQ ID NO: 28365 - DNA, 18 bp, Artificial Sequence
  Synthetic
ggatccttttgctggagc

SEQ ID NO: 28366 - DNA, 18 bp, Artificial Sequence
  Synthetic
ttgcctgtttcccctttg

SEQ ID NO: 28367 - DNA, 20 bp, Artificial Sequence
  Synthetic
attgatggcctggaactgac

SEQ ID NO: 28368 - DNA, 20 bp, Artificial Sequence
  Synthetic
ggcaaaggaggaccaggttc

SEQ ID NO: 28369 - DNA, 21 bp, Artificial Sequence
  Synthetic
tgatagaattccaggaggttt

SEQ ID NO: 28370 - DNA, 16 bp, Artificial Sequence
  Synthetic
aagtttgggggcgccc

SEQ ID NO: 28371 - DNA, 19 bp, Artificial Sequence
  Synthetic
ggtggagtgttgggcttag

SEQ ID NO: 28372 - DNA, 19 bp, Artificial Sequence
  Synthetic
cacttcggtctcccctagg

SEQ ID NO: 28373 - DNA, 16 bp, Artificial Sequence
  Synthetic
gcaggcaaggcgagca

SEQ ID NO: 28374 - DNA, 18 bp, Artificial Sequence
  Synthetic
catctacgaggccatcaa

SEQ ID NO: 28375 - DNA, 16 bp, Artificial Sequence
  Synthetic
aaacccgatggccccg

SEQ ID NO: 28376 - DNA, 16 bp, Artificial Sequence
  Synthetic
tggctcccgcgcatac

SEQ ID NO: 28377 - DNA, 20 bp, Artificial Sequence
  Synthetic
catgatcagccacgaacgaa

SEQ ID NO: 28378 - DNA, 18 bp, Artificial Sequence
  Synthetic
aaaacacggccaagggag

SEQ ID NO: 28379 - DNA, 20 bp, Artificial Sequence
  Synthetic
agaagcccagttatccaccc

SEQ ID NO: 28380 - DNA, 20 bp, Artificial Sequence
  Synthetic
agggactggctgtctcctac

SEQ ID NO: 28381 - DNA, 18 bp, Artificial Sequence
  Synthetic
ctggtcggcacacatccg

SEQ ID NO: 28382 - DNA, 17 bp, Artificial Sequence
  Synthetic
acaatttctggcggcgg

SEQ ID NO: 28383 - DNA, 18 bp, Artificial Sequence
  Synthetic
cgctggaagagcaggtcc

SEQ ID NO: 28384 - DNA, 20 bp, Artificial Sequence
  Synthetic
gctccgagaacaggaagaca

SEQ ID NO: 28385 - DNA, 20 bp, Artificial Sequence
  Synthetic
aaacaagggaagagcgggag

SEQ ID NO: 28386 - DNA, 18 bp, Artificial Sequence
  Synthetic
ggatgtgaatgcccccgg

SEQ ID NO: 28387 - DNA, 20 bp, Artificial Sequence
  Synthetic
tccggaacagatcacagtca

SEQ ID NO: 28388 - DNA, 16 bp, Artificial Sequence
  Synthetic
tggaggctgtgctccc

SEQ ID NO: 28389 - DNA, 18 bp, Artificial Sequence
  Synthetic
aagaggtagcgccccagg

SEQ ID NO: 28390 - DNA, 16 bp, Artificial Sequence
  Synthetic
cctcggcgcacaggtt

SEQ ID NO: 28391 - DNA, 16 bp, Artificial Sequence
  Synthetic
tcaccgactgccccct

SEQ ID NO: 28392 - DNA, 17 bp, Artificial Sequence
  Synthetic
acttccaatcccccggg

SEQ ID NO: 28393 - DNA, 20 bp, Artificial Sequence
  Synthetic
caccacagctatgatgccag

SEQ ID NO: 28394 - DNA, 18 bp, Artificial Sequence
  Synthetic
cttctgcttctgcctggc

SEQ ID NO: 28395 - DNA, 18 bp, Artificial Sequence
  Synthetic
accggtcttcctctgcca

SEQ ID NO: 28396 - DNA, 17 bp, Artificial Sequence
  Synthetic
ttgagaccctggcgcac

SEQ ID NO: 28397 - DNA, 18 bp, Artificial Sequence
  Synthetic
acagggggatgccagagg

SEQ ID NO: 28398 - DNA, 20 bp, Artificial Sequence
  Synthetic
tggcctcaaacactgacatt

SEQ ID NO: 28399 - DNA, 16 bp, Artificial Sequence
  Synthetic
agagtgctccggctgc

SEQ ID NO: 28400 - DNA, 20 bp, Artificial Sequence
  Synthetic
catcatcgatcccggctaca

SEQ ID NO: 28401 - DNA, 20 bp, Artificial Sequence
  Synthetic
tcattacctctcgctgtcga

SEQ ID NO: 28402 - DNA, 18 bp, Artificial Sequence
  Synthetic
ggccccactgtatccacc

SEQ ID NO: 28403 - DNA, 19 bp, Artificial Sequence
  Synthetic
atggtttttgtctgatggc

SEQ ID NO: 28404 - DNA, 19 bp, Artificial Sequence
  Synthetic
tgtgcgtagtgttgctgtg

SEQ ID NO: 28405 - DNA, 19 bp, Artificial Sequence
  Synthetic
ggatggacgaggagctcat

SEQ ID NO: 28406 - DNA, 19 bp, Artificial Sequence
  Synthetic
caagagctggtgggagagg

SEQ ID NO: 28407 - DNA, 16 bp, Artificial Sequence
  Synthetic
caccgtgggccccttt

SEQ ID NO: 28408 - DNA, 20 bp, Artificial Sequence
  Synthetic
tcttttcaccacgtccacga

SEQ ID NO: 28409 - DNA, 18 bp, Artificial Sequence
  Synthetic
aaagcagcagcctcagga

SEQ ID NO: 28410 - DNA, 20 bp, Artificial Sequence
  Synthetic
ccaaatactggccggtactc

SEQ ID NO: 28411 - DNA, 17 bp, Artificial Sequence
  Synthetic
tcacgggagccacaacc

SEQ ID NO: 28412 - DNA, 17 bp, Artificial Sequence
  Synthetic
tcagggacgttggtggc

SEQ ID NO: 28413 - DNA, 17 bp, Artificial Sequence
  Synthetic
tggcccgcagacacatt

SEQ ID NO: 28414 - DNA, 18 bp, Artificial Sequence
  Synthetic
actcgggggcctctacac

SEQ ID NO: 28415 - DNA, 16 bp, Artificial Sequence
  Synthetic
tcttgtccgccgccag

SEQ ID NO: 28416 - DNA, 18 bp, Artificial Sequence
  Synthetic
cctggtgcctgaagaccc

SEQ ID NO: 28417 - DNA, 18 bp, Artificial Sequence
  Synthetic
ctatcctgctgcagggcg

SEQ ID NO: 28418 - DNA, 20 bp, Artificial Sequence
  Synthetic
ccacccgctgtatgaggaag

SEQ ID NO: 28419 - DNA, 18 bp, Artificial Sequence
  Synthetic
cccctcctcgtgcaccta

SEQ ID NO: 28420 - DNA, 19 bp, Artificial Sequence
  Synthetic
tgtgatggatccagcgagt

SEQ ID NO: 28421 - DNA, 18 bp, Artificial Sequence
  Synthetic
gccggatcaacgtacacg

SEQ ID NO: 28422 - DNA, 16 bp, Artificial Sequence
  Synthetic
tgggggtgcagggtga

SEQ ID NO: 28423 - DNA, 20 bp, Artificial Sequence
  Synthetic
aggatgtgttggcctttagg

SEQ ID NO: 28424 - DNA, 20 bp, Artificial Sequence
  Synthetic
cattcatgacctgccccact

SEQ ID NO: 28425 - DNA, 20 bp, Artificial Sequence
  Synthetic
gaagccgtctctctgagatg

SEQ ID NO: 28426 - DNA, 18 bp, Artificial Sequence
  Synthetic
gtgctgctccaatgtccg

SEQ ID NO: 28427 - DNA, 17 bp, Artificial Sequence
  Synthetic
atgggcaggctctcacg

SEQ ID NO: 28428 - DNA, 18 bp, Artificial Sequence
  Synthetic
gcacagtcacggggatct

SEQ ID NO: 28429 - DNA, 22 bp, Artificial Sequence
  Synthetic
atcttgagctccaactactttg

SEQ ID NO: 28430 - DNA, 17 bp, Artificial Sequence
  Synthetic
tccagcccctgcatacc

SEQ ID NO: 28431 - DNA, 17 bp, Artificial Sequence
  Synthetic
agttcggggcctgtgtc

SEQ ID NO: 28432 - DNA, 16 bp, Artificial Sequence
  Synthetic
tggatcgcgagggagc

SEQ ID NO: 28433 - DNA, 18 bp, Artificial Sequence
  Synthetic
cacagacttggccttggg

SEQ ID NO: 28434 - DNA, 19 bp, Artificial Sequence
  Synthetic
acaagggtgggctaactct

SEQ ID NO: 28435 - DNA, 18 bp, Artificial Sequence
  Synthetic
tggctctgaccagcaaga

SEQ ID NO: 28436 - DNA, 19 bp, Artificial Sequence
  Synthetic
acccagatgcctcacctgg

SEQ ID NO: 28437 - DNA, 20 bp, Artificial Sequence
  Synthetic
caggcacatctacagcatca

SEQ ID NO: 28438 - DNA, 17 bp, Artificial Sequence
  Synthetic
aggggtggtggatgtgc

SEQ ID NO: 28439 - DNA, 17 bp, Artificial Sequence
  Synthetic
accttcatcacggggcc

SEQ ID NO: 28440 - DNA, 16 bp, Artificial Sequence
  Synthetic
cccgcatgcgcaacca

SEQ ID NO: 28441 - DNA, 18 bp, Artificial Sequence
  Synthetic
tggttctgcccaaccacg

SEQ ID NO: 28442 - DNA, 19 bp, Artificial Sequence
  Synthetic
cggactcgggagccttaat

SEQ ID NO: 28443 - DNA, 20 bp, Artificial Sequence
  Synthetic
ggcaataaccgaggccttca

SEQ ID NO: 28444 - DNA, 19 bp, Artificial Sequence
  Synthetic
ctcttagggaggtggccac

SEQ ID NO: 28445 - DNA, 16 bp, Artificial Sequence
  Synthetic
cacaagagcgccgcct

SEQ ID NO: 28446 - DNA, 18 bp, Artificial Sequence
  Synthetic
aggaagctgtacgcggag

SEQ ID NO: 28447 - DNA, 16 bp, Artificial Sequence
  Synthetic
tgaggaccccggtcga

SEQ ID NO: 28448 - DNA, 16 bp, Artificial Sequence
  Synthetic
aacaccccccgatgcc

SEQ ID NO: 28449 - DNA, 22 bp, Artificial Sequence
  Synthetic
gtattagttgctctgtaactgg

SEQ ID NO: 28450 - DNA, 20 bp, Artificial Sequence
  Synthetic
accacagtatgaaaccaccc

SEQ ID NO: 28451 - DNA, 18 bp, Artificial Sequence
  Synthetic
ttttacaccctccgcaac

SEQ ID NO: 28452 - DNA, 20 bp, Artificial Sequence
  Synthetic
atatgtcacttgcgtttccc

SEQ ID NO: 28453 - DNA, 25 bp, Artificial Sequence
  Synthetic
cacttctaaatgatatccattgtga

SEQ ID NO: 28454 - DNA, 19 bp, Artificial Sequence
  Synthetic
attttgcatcagctaacgg

SEQ ID NO: 28455 - DNA, 18 bp, Artificial Sequence
  Synthetic
aataccaagcacaggcac

SEQ ID NO: 28456 - DNA, 22 bp, Artificial Sequence
  Synthetic
acacattgtcttttcctctttg

SEQ ID NO: 28457 - DNA, 18 bp, Artificial Sequence
  Synthetic
ggtttcgttggtgcccag

SEQ ID NO: 28458 - DNA, 18 bp, Artificial Sequence
  Synthetic
gtacccttaacgttccgc

SEQ ID NO: 28459 - DNA, 24 bp, Artificial Sequence
  Synthetic
cacaacaggatacatatatgcaat

SEQ ID NO: 28460 - DNA, 24 bp, Artificial Sequence
  Synthetic
aaataatacctcagttccatacac

SEQ ID NO: 28461 - DNA, 22 bp, Artificial Sequence
  Synthetic
caaatttatttgggtcgggtag

SEQ ID NO: 28462 - DNA, 24 bp, Artificial Sequence
  Synthetic
gcaaccaataatacatagttgtgt

SEQ ID NO: 28463 - DNA, 19 bp, Artificial Sequence
  Synthetic
ttaaaacattgctctcggc

SEQ ID NO: 28464 - DNA, 21 bp, Artificial Sequence
  Synthetic
gttacaaaaagcagattgccc

SEQ ID NO: 28465 - DNA, 18 bp, Artificial Sequence
  Synthetic
ttttctgcaggaggagga

SEQ ID NO: 28466 - DNA, 18 bp, Artificial Sequence
  Synthetic
aacggcggccattttagg

SEQ ID NO: 28467 - DNA, 18 bp, Artificial Sequence
  Synthetic
tacactgctgttgccaaa

SEQ ID NO: 28468 - DNA, 20 bp, Artificial Sequence
  Synthetic
tgttaaggaaatgcaagcac

SEQ ID NO: 28469 - DNA, 18 bp, Artificial Sequence
  Synthetic
tgcattacaggtaccgca

SEQ ID NO: 28470 - DNA, 18 bp, Artificial Sequence
  Synthetic
tacagcttccagtctcgg

SEQ ID NO: 28471 - DNA, 24 bp, Artificial Sequence
  Synthetic
cgaccgtttataaaaatacaaagc

SEQ ID NO: 28472 - DNA, 20 bp, Artificial Sequence
  Synthetic
tgtgcaataggtttccaatc

SEQ ID NO: 28473 - DNA, 21 bp, Artificial Sequence
  Synthetic
tgtgtatggaaaggctttagc

SEQ ID NO: 28474 - DNA, 19 bp, Artificial Sequence
  Synthetic
atgtcctgttcccacctcc

SEQ ID NO: 28475 - DNA, 18 bp, Artificial Sequence
  Synthetic
aggcctaacgactggaat

SEQ ID NO: 28476 - DNA, 22 bp, Artificial Sequence
  Synthetic
tttcaataactacagcatttgc

SEQ ID NO: 28477 - DNA, 21 bp, Artificial Sequence
  Synthetic
agcatatctgaagtgtcatgt

SEQ ID NO: 28478 - DNA, 18 bp, Artificial Sequence
  Synthetic
ctactggctttgcaggag

SEQ ID NO: 28479 - DNA, 20 bp, Artificial Sequence
  Synthetic
ttaacctcatcactgcaagg

SEQ ID NO: 28480 - DNA, 18 bp, Artificial Sequence
  Synthetic
tttagcagccctgtttga

SEQ ID NO: 28481 - DNA, 19 bp, Artificial Sequence
  Synthetic
acaacttgtagctccttgt

SEQ ID NO: 28482 - DNA, 18 bp, Artificial Sequence
  Synthetic
cgcatcaggctgatccag

SEQ ID NO: 28483 - DNA, 18 bp, Artificial Sequence
  Synthetic
cttcaccgtcggccatag

SEQ ID NO: 28484 - DNA, 20 bp, Artificial Sequence
  Synthetic
ggccaacggactagctagat

SEQ ID NO: 28485 - DNA, 18 bp, Artificial Sequence
  Synthetic
gtgctgtaactgcacccg

SEQ ID NO: 28486 - DNA, 21 bp, Artificial Sequence
  Synthetic
atctcactagcattaggacca

SEQ ID NO: 28487 - DNA, 20 bp, Artificial Sequence
  Synthetic
actgaaactggcattcttct

SEQ ID NO: 28488 - DNA, 18 bp, Artificial Sequence
  Synthetic
accgtactatgggtctcc

SEQ ID NO: 28489 - DNA, 22 bp, Artificial Sequence
  Synthetic
ggtatctatatagctccagcac

SEQ ID NO: 28490 - DNA, 18 bp, Artificial Sequence
  Synthetic
attgtcctcctggtcgtc

SEQ ID NO: 28491 - DNA, 18 bp, Artificial Sequence
  Synthetic
gttacacgtgtcccttcg

SEQ ID NO: 28492 - DNA, 20 bp, Artificial Sequence
  Synthetic
gctgtcagggttacactggt

SEQ ID NO: 28493 - DNA, 18 bp, Artificial Sequence
  Synthetic
atcatgccacagggttac

SEQ ID NO: 28494 - DNA, 22 bp, Artificial Sequence
  Synthetic
gtatgtatatgatcaggaggcc

SEQ ID NO: 28495 - DNA, 20 bp, Artificial Sequence
  Synthetic
aagacacacgaaaagcaaca

SEQ ID NO: 28496 - DNA, 16 bp, Artificial Sequence
  Synthetic
taacgacaggggggcg

SEQ ID NO: 28497 - DNA, 20 bp, Artificial Sequence
  Synthetic
atccaaaaagtcaggatccg

SEQ ID NO: 28498 - DNA, 20 bp, Artificial Sequence
  Synthetic
acttattgggatcaggcaaa

SEQ ID NO: 28499 - DNA, 20 bp, Artificial Sequence
  Synthetic
agacatattgcatggggtac

SEQ ID NO: 28500 - DNA, 18 bp, Artificial Sequence
  Synthetic
gaattgcgtcgcccatag

SEQ ID NO: 28501 - DNA, 24 bp, Artificial Sequence
  Synthetic
gcatgtactctttaaaattggaag

SEQ ID NO: 28502 - DNA, 22 bp, Artificial Sequence
  Synthetic
cacacaaacatgcataaggaaa

SEQ ID NO: 28503 - DNA, 19 bp, Artificial Sequence
  Synthetic
gcgcgaaacagctaacagt

SEQ ID NO: 28504 - DNA, 18 bp, Artificial Sequence
  Synthetic
tactcaccggttccgcag

SEQ ID NO: 28505 - DNA, 18 bp, Artificial Sequence
  Synthetic
tttagggatgggctggcg

SEQ ID NO: 28506 - DNA, 20 bp, Artificial Sequence
  Synthetic
cgggtaagttccctgttgca

SEQ ID NO: 28507 - DNA, 16 bp, Artificial Sequence
  Synthetic
gtcgatgtgcgtccgc

SEQ ID NO: 28508 - DNA, 20 bp, Artificial Sequence
  Synthetic
ggccaacagaaggatgacaa

SEQ ID NO: 28509 - DNA, 20 bp, Artificial Sequence
  Synthetic
tgccagcaatagggtctcat

SEQ ID NO: 28510 - DNA, 20 bp, Artificial Sequence
  Synthetic
ccgcatttgaggtaagtggt

SEQ ID NO: 28511 - DNA, 20 bp, Artificial Sequence
  Synthetic
acgatgttttggtggaggtg

SEQ ID NO: 28512 - DNA, 20 bp, Artificial Sequence
  Synthetic
gcacagatgcgtcataagca

SEQ ID NO: 28513 - DNA, 19 bp, Artificial Sequence
  Synthetic
gcacatcctcagtagagcg

SEQ ID NO: 28514 - DNA, 18 bp, Artificial Sequence
  Synthetic
gtgtctgctgggcgtaag

SEQ ID NO: 28515 - DNA, 17 bp, Artificial Sequence
  Synthetic
cgtgcacggctccaaag

SEQ ID NO: 28516 - DNA, 20 bp, Artificial Sequence
  Synthetic
cagcatatgcgacaggaact

SEQ ID NO: 28517 - DNA, 20 bp, Artificial Sequence
  Synthetic
gcacagttagtctgacccca

SEQ ID NO: 28518 - DNA, 19 bp, Artificial Sequence
  Synthetic
tacgttgcagtcgatcacg

SEQ ID NO: 28519 - DNA, 20 bp, Artificial Sequence
  Synthetic
ctgcctcccaaaactcaaga

SEQ ID NO: 28520 - DNA, 18 bp, Artificial Sequence
  Synthetic
cctgccaagacccatgtg

SEQ ID NO: 28521 - DNA, 20 bp, Artificial Sequence
  Synthetic
tgttgatagtcctgcgaggt

SEQ ID NO: 28522 - DNA, 18 bp, Artificial Sequence
  Synthetic
cagaatggccgcgcagat

SEQ ID NO: 28523 - DNA, 18 bp, Artificial Sequence
  Synthetic
acctccgcgtactctgag

SEQ ID NO: 28524 - DNA, 17 bp, Artificial Sequence
  Synthetic
tgccgatagctggctcg

SEQ ID NO: 28525 - DNA, 20 bp, Artificial Sequence
  Synthetic
cggttggtaatctggccttt

SEQ ID NO: 28526 - DNA, 18 bp, Artificial Sequence
  Synthetic
agaccaggaccccgagtc

SEQ ID NO: 28527 - DNA, 20 bp, Artificial Sequence
  Synthetic
agatcttgcagaatggggtg

SEQ ID NO: 28528 - DNA, 18 bp, Artificial Sequence
  Synthetic
ggtccttcttttccgccc

SEQ ID NO: 28529 - DNA, 20 bp, Artificial Sequence
  Synthetic
ggtcccctggctttctgaga

SEQ ID NO: 28530 - DNA, 20 bp, Artificial Sequence
  Synthetic
tggatgatgtttcccagcca

SEQ ID NO: 28531 - DNA, 17 bp, Artificial Sequence
  Synthetic
acgggagatgagggacg

SEQ ID NO: 28532 - DNA, 18 bp, Artificial Sequence
  Synthetic
gttccagcaccgttttgc

SEQ ID NO: 28533 - DNA, 20 bp, Artificial Sequence
  Synthetic
caaagtccacgccaaaatgg

SEQ ID NO: 28534 - DNA, 18 bp, Artificial Sequence
  Synthetic
cggcttcgtcttcctgtc

SEQ ID NO: 28535 - DNA, 18 bp, Artificial Sequence
  Synthetic
cgtcatgccgcctgaaac

SEQ ID NO: 28536 - DNA, 16 bp, Artificial Sequence
  Synthetic
tcagtgccaccccgtc

SEQ ID NO: 28537 - DNA, 17 bp, Artificial Sequence
  Synthetic
agccccagtagcgttgg

SEQ ID NO: 28538 - DNA, 19 bp, Artificial Sequence
  Synthetic
agtttggtgaagaagcgcg

SEQ ID NO: 28539 - DNA, 16 bp, Artificial Sequence
  Synthetic
tcgttggcgagtgcgg

SEQ ID NO: 28540 - DNA, 18 bp, Artificial Sequence
  Synthetic
tatcgcaagccgctttcg

SEQ ID NO: 28541 - DNA, 16 bp, Artificial Sequence
  Synthetic
ctatcgcgccgccaac

SEQ ID NO: 28542 - DNA, 16 bp, Artificial Sequence
  Synthetic
cggtgtggcaggcgta

SEQ ID NO: 28543 - DNA, 16 bp, Artificial Sequence
  Synthetic
ttaccgccgaccgcac

SEQ ID NO: 28544 - DNA, 18 bp, Artificial Sequence
  Synthetic
ggcacgaacgcttggaag

SEQ ID NO: 28545 - DNA, 17 bp, Artificial Sequence
  Synthetic
taaggaagcgcgcgtgg

SEQ ID NO: 28546 - DNA, 17 bp, Artificial Sequence
  Synthetic
tacgtccgccagttcgc

SEQ ID NO: 28547 - DNA, 19 bp, Artificial Sequence
  Synthetic
cgtgcgtgatttgtccgaa

SEQ ID NO: 28548 - DNA, 20 bp, Artificial Sequence
  Synthetic
gctggagaatgtacaaggcc

SEQ ID NO: 28549 - DNA, 16 bp, Artificial Sequence
  Synthetic
gcaaggactggcaccg

SEQ ID NO: 28550 - DNA, 20 bp, Artificial Sequence
  Synthetic
caaaaaccatgtgtcgtggc

SEQ ID NO: 28551 - DNA, 19 bp, Artificial Sequence
  Synthetic
gaatggtttgccgaacgcg

SEQ ID NO: 28552 - DNA, 18 bp, Artificial Sequence
  Synthetic
cgacatcgggctgttgtc

SEQ ID NO: 28553 - DNA, 17 bp, Artificial Sequence
  Synthetic
tcgtcagcctgtgtccg

SEQ ID NO: 28554 - DNA, 19 bp, Artificial Sequence
  Synthetic
caaaccgaagatgccgtct

SEQ ID NO: 28555 - DNA, 16 bp, Artificial Sequence
  Synthetic
tttctcgcgctcgccc

SEQ ID NO: 28556 - DNA, 20 bp, Artificial Sequence
  Synthetic
gcgaagtgttttatgcgtgg

SEQ ID NO: 28557 - DNA, 17 bp, Artificial Sequence
  Synthetic
ttgcctccgccgaactc

SEQ ID NO: 28558 - DNA, 18 bp, Artificial Sequence
  Synthetic
atatgcggcgaaacgtgc

SEQ ID NO: 28559 - DNA, 18 bp, Artificial Sequence
  Synthetic
ggcagtcatcgtcgcttc

SEQ ID NO: 28560 - DNA, 18 bp, Artificial Sequence
  Synthetic
tcaacgtcaacgatgccg

SEQ ID NO: 28561 - DNA, 18 bp, Artificial Sequence
  Synthetic
tgccgaaaacgccgattt

SEQ ID NO: 28562 - DNA, 18 bp, Artificial Sequence
  Synthetic
caccgttgccgtgcattc

SEQ ID NO: 28563 - DNA, 19 bp, Artificial Sequence
  Synthetic
cgtgttggaagtgaacccg

SEQ ID NO: 28564 - DNA, 18 bp, Artificial Sequence
  Synthetic
gtgtccaccgacttcgac

SEQ ID NO: 28565 - DNA, 20 bp, Artificial Sequence
  Synthetic
aagcctgcacgactatttgg

SEQ ID NO: 28566 - DNA, 18 bp, Artificial Sequence
  Synthetic
acagcgttcagacggcat

SEQ ID NO: 28567 - DNA, 16 bp, Artificial Sequence
  Synthetic
tgtccggactcgccac

SEQ ID NO: 28568 - DNA, 17 bp, Artificial Sequence
  Synthetic
ttccgctgttgccggta

SEQ ID NO: 28569 - DNA, 20 bp, Artificial Sequence
  Synthetic
agagtttgtgcagcatacgg

SEQ ID NO: 28570 - DNA, 16 bp, Artificial Sequence
  Synthetic
cctacccagccggcaa

SEQ ID NO: 28571 - DNA, 18 bp, Artificial Sequence
  Synthetic
tttttggttcaggcggcg

SEQ ID NO: 28572 - DNA, 16 bp, Artificial Sequence
  Synthetic
acccaggcggcatcga

SEQ ID NO: 28573 - DNA, 18 bp, Artificial Sequence
  Synthetic
ttgatggctttgtcgcgc

SEQ ID NO: 28574 - DNA, 18 bp, Artificial Sequence
  Synthetic
cttccgcctgcaaggacg

SEQ ID NO: 28575 - DNA, 19 bp, Artificial Sequence
  Synthetic
ggaaaaatacggcggtccc

SEQ ID NO: 28576 - DNA, 17 bp, Artificial Sequence
  Synthetic
attcgttaccgccgtgc

SEQ ID NO: 28577 - DNA, 18 bp, Artificial Sequence
  Synthetic
aacacatgaaccgccgca

SEQ ID NO: 28578 - DNA, 17 bp, Artificial Sequence
  Synthetic
ggcggcgtgttgattgc

SEQ ID NO: 28579 - DNA, 17 bp, Artificial Sequence
  Synthetic
ccgttgcgcatcgtagc

SEQ ID NO: 28580 - DNA, 16 bp, Artificial Sequence
  Synthetic
ttcgcgcccgaccaac

SEQ ID NO: 28581 - DNA, 17 bp, Artificial Sequence
  Synthetic
cgcaaaaccggccatcc

SEQ ID NO: 28582 - DNA, 19 bp, Artificial Sequence
  Synthetic
ctatcaaggcggctgctcc

SEQ ID NO: 28583 - DNA, 19 bp, Artificial Sequence
  Synthetic
gaacacgcccccttcagac

SEQ ID NO: 28584 - DNA, 16 bp, Artificial Sequence
  Synthetic
ttgccgtaccgtccgg

SEQ ID NO: 28585 - DNA, 17 bp, Artificial Sequence
  Synthetic
cctcctgctgccggaaa

SEQ ID NO: 28586 - DNA, 19 bp, Artificial Sequence
  Synthetic
cttttcgtccgcgcaactc

SEQ ID NO: 28587 - DNA, 19 bp, Artificial Sequence
  Synthetic
tgctgtcgtggtatttccc

SEQ ID NO: 28588 - DNA, 19 bp, Artificial Sequence
  Synthetic
cggcagcagcttttggatt

SEQ ID NO: 28589 - DNA, 18 bp, Artificial Sequence
  Synthetic
cgaactcaaaatgcccgc

SEQ ID NO: 28590 - DNA, 16 bp, Artificial Sequence
  Synthetic
aaggcaaaggcgtgcg

SEQ ID NO: 28591 - DNA, 17 bp, Artificial Sequence
  Synthetic
gcgcatggctcaacctc

SEQ ID NO: 28592 - DNA, 18 bp, Artificial Sequence
  Synthetic
ccggtaaagcctgctacg

SEQ ID NO: 28593 - DNA, 16 bp, Artificial Sequence
  Synthetic
aacgcttcgggcctgc

SEQ ID NO: 28594 - DNA, 16 bp, Artificial Sequence
  Synthetic
atcacgccgcacatcg

SEQ ID NO: 28595 - DNA, 19 bp, Artificial Sequence
  Synthetic
gatgctcgaccacagcctg

SEQ ID NO: 28596 - DNA, 17 bp, Artificial Sequence
  Synthetic
accgtacccgcgttacc

SEQ ID NO: 28597 - DNA, 18 bp, Artificial Sequence
  Synthetic
cccaacgcatcgaagacg

SEQ ID NO: 28598 - DNA, 19 bp, Artificial Sequence
  Synthetic
aaggcggtagaggtcggta

SEQ ID NO: 28599 - DNA, 20 bp, Artificial Sequence
  Synthetic
cgtgccgtctgaaagttgat

SEQ ID NO: 28600 - DNA, 16 bp, Artificial Sequence
  Synthetic
aagcccatgcgctcgg

SEQ ID NO: 28601 - DNA, 20 bp, Artificial Sequence
  Synthetic
acccaaataaccttccctgc

SEQ ID NO: 28602 - DNA, 17 bp, Artificial Sequence
  Synthetic
aaaccgtcctgcgcgac

SEQ ID NO: 28603 - DNA, 20 bp, Artificial Sequence
  Synthetic
ggcgacaacttcaaagccta

SEQ ID NO: 28604 - DNA, 19 bp, Artificial Sequence
  Synthetic
ggcatcgccatgaaagacg

SEQ ID NO: 28605 - DNA, 18 bp, Artificial Sequence
  Synthetic
ccagatgtcgaagtcgcc

SEQ ID NO: 28606 - DNA, 19 bp, Artificial Sequence
  Synthetic
tcccttttccaacgtatcc

SEQ ID NO: 28607 - DNA, 16 bp, Artificial Sequence
  Synthetic
ttaccaatgcgccgcc

SEQ ID NO: 28608 - DNA, 18 bp, Artificial Sequence
  Synthetic
tccattgctgctgccaaa

SEQ ID NO: 28609 - DNA, 16 bp, Artificial Sequence
  Synthetic
tcgaagccgccgacct

SEQ ID NO: 28610 - DNA, 18 bp, Artificial Sequence
  Synthetic
cccatctccgacacgacc

SEQ ID NO: 28611 - DNA, 17 bp, Artificial Sequence
  Synthetic
tcttcctgctcgccagc

SEQ ID NO: 28612 - DNA, 18 bp, Artificial Sequence
  Synthetic
gccccgttaccgacaagt

SEQ ID NO: 28613 - DNA, 20 bp, Artificial Sequence
  Synthetic
actgctgtctttaggcatcg

SEQ ID NO: 28614 - DNA, 19 bp, Artificial Sequence
  Synthetic
atcaatccgggcaattccg

SEQ ID NO: 28615 - DNA, 19 bp, Artificial Sequence
  Synthetic
aatcgccgttctgctttcg

SEQ ID NO: 28616 - DNA, 16 bp, Artificial Sequence
  Synthetic
tcgcgacggcaagcag

SEQ ID NO: 28617 - DNA, 16 bp, Artificial Sequence
  Synthetic
ccggcaatctgcacgg

SEQ ID NO: 28618 - DNA, 16 bp, Artificial Sequence
  Synthetic
gccttgaccaccgcct

SEQ ID NO: 28619 - DNA, 19 bp, Artificial Sequence
  Synthetic
cggtaaaacgccgtgttcg

SEQ ID NO: 28620 - DNA, 19 bp, Artificial Sequence
  Synthetic
tgttttcgacattcgccgg

SEQ ID NO: 28621 - DNA, 16 bp, Artificial Sequence
  Synthetic
ctttgccgaccaccgc

SEQ ID NO: 28622 - DNA, 19 bp, Artificial Sequence
  Synthetic
tgcggatttccttcagcct

SEQ ID NO: 28623 - DNA, 17 bp, Artificial Sequence
  Synthetic
tagagcgtttgggcggc

SEQ ID NO: 28624 - DNA, 17 bp, Artificial Sequence
  Synthetic
acgacctgctccttgcc

SEQ ID NO: 28625 - DNA, 18 bp, Artificial Sequence
  Synthetic
aatccccgaattcgcacc

SEQ ID NO: 28626 - DNA, 16 bp, Artificial Sequence
  Synthetic
ttcgtccgcagcctcg

SEQ ID NO: 28627 - DNA, 18 bp, Artificial Sequence
  Synthetic
acggcggacaatacagca

SEQ ID NO: 28628 - DNA, 19 bp, Artificial Sequence
  Synthetic
caacggacaaaccactgcc

SEQ ID NO: 28629 - DNA, 15 bp, Artificial Sequence
  Synthetic
attgcaccgccgcag

SEQ ID NO: 28630 - DNA, 20 bp, Artificial Sequence
  Synthetic
gcacgcaccaaaaaacctca

SEQ ID NO: 28631 - DNA, 19 bp, Artificial Sequence
  Synthetic
cctcacgacagaaaccgac

SEQ ID NO: 28632 - DNA, 16 bp, Artificial Sequence
  Synthetic
gcatcccggcatcagc

SEQ ID NO: 28633 - DNA, 20 bp, Artificial Sequence
  Synthetic
actcttggcacgcatcaatg

SEQ ID NO: 28634 - DNA, 18 bp, Artificial Sequence
  Synthetic
agaggcttcagacggcat

SEQ ID NO: 28635 - DNA, 20 bp, Artificial Sequence
  Synthetic
atacttccgccgaaaccctt

SEQ ID NO: 28636 - DNA, 18 bp, Artificial Sequence
  Synthetic
gttcaaagccgtcctgcc

SEQ ID NO: 28637 - DNA, 19 bp, Artificial Sequence
  Synthetic
tgaacaccttcttccggca

SEQ ID NO: 28638 - DNA, 20 bp, Artificial Sequence
  Synthetic
atggtcatgaaacgcaaagc

SEQ ID NO: 28639 - DNA, 19 bp, Artificial Sequence
  Synthetic
ttgcgcctttttttgggca

SEQ ID NO: 28640 - DNA, 18 bp, Artificial Sequence
  Synthetic
aaaacgccattcgaaacg

SEQ ID NO: 28641 - DNA, 19 bp, Artificial Sequence
  Synthetic
tctacatcctgcaagcccg

SEQ ID NO: 28642 - DNA, 20 bp, Artificial Sequence
  Synthetic
actcgttcccaaactcggat

SEQ ID NO: 28643 - DNA, 17 bp, Artificial Sequence
  Synthetic
cggttcgcaagccatcg

SEQ ID NO: 28644 - DNA, 20 bp, Artificial Sequence
  Synthetic
caccatcctgcacatcatcg

SEQ ID NO: 28645 - DNA, 16 bp, Artificial Sequence
  Synthetic
tcccgtcatcgcctcc

SEQ ID NO: 28646 - DNA, 19 bp, Artificial Sequence
  Synthetic
ggtcttccccgacctgaac

SEQ ID NO: 28647 - DNA, 16 bp, Artificial Sequence
  Synthetic
tcccttgacgcggcag

SEQ ID NO: 28648 - DNA, 18 bp, Artificial Sequence
  Synthetic
ttccaagccgttgacgca

SEQ ID NO: 28649 - DNA, 20 bp, Artificial Sequence
  Synthetic
accgtttaccgcaatatcgc

SEQ ID NO: 28650 - DNA, 18 bp, Artificial Sequence
  Synthetic
ggcattaccgccgcattc

SEQ ID NO: 28651 - DNA, 19 bp, Artificial Sequence
  Synthetic
cagccaacctcctagagcc

SEQ ID NO: 28652 - DNA, 19 bp, Artificial Sequence
  Synthetic
atgctcgcctacgtcgaaa

SEQ ID NO: 28653 - DNA, 20 bp, Artificial Sequence
  Synthetic
tcatacggcatcgtcgaaac

SEQ ID NO: 28654 - DNA, 16 bp, Artificial Sequence
  Synthetic
acgtcttccgggccga

SEQ ID NO: 28655 - DNA, 19 bp, Artificial Sequence
  Synthetic
cgacaatttctcctgccgc

SEQ ID NO: 28656 - DNA, 20 bp, Artificial Sequence
  Synthetic
aactctggttcggctacacc

SEQ ID NO: 28657 - DNA, 17 bp, Artificial Sequence
  Synthetic
gccccctccgtcaactt

SEQ ID NO: 28658 - DNA, 16 bp, Artificial Sequence
  Synthetic
acgtcctctcccgcct

SEQ ID NO: 28659 - DNA, 20 bp, Artificial Sequence
  Synthetic
ttcccacttcacaacacccg

SEQ ID NO: 28660 - DNA, 19 bp, Artificial Sequence
  Synthetic
accaagcccaagccctaat

SEQ ID NO: 28661 - DNA, 17 bp, Artificial Sequence
  Synthetic
tcgggcatcagcaggac

SEQ ID NO: 28662 - DNA, 18 bp, Artificial Sequence
  Synthetic
tcaccgacctcctcaacc

SEQ ID NO: 28663 - DNA, 19 bp, Artificial Sequence
  Synthetic
cattcgcacaaagcatggg

SEQ ID NO: 28664 - DNA, 16 bp, Artificial Sequence
  Synthetic
tttccaaccgctgccg

SEQ ID NO: 28665 - DNA, 17 bp, Artificial Sequence
  Synthetic
atcatgcggcgacatgg

SEQ ID NO: 28666 - DNA, 18 bp, Artificial Sequence
  Synthetic
tttccctgatcgtgctgc

SEQ ID NO: 28667 - DNA, 15 bp, Artificial Sequence
  Synthetic
aaacgccgcgcacac

SEQ ID NO: 28668 - DNA, 16 bp, Artificial Sequence
  Synthetic
cagcaacgccctgcct

SEQ ID NO: 28669 - DNA, 16 bp, Artificial Sequence
  Synthetic
tatccacaccggcggc

SEQ ID NO: 28670 - DNA, 16 bp, Artificial Sequence
  Synthetic
ctcctgcatacgcgcg

SEQ ID NO: 28671 - DNA, 16 bp, Artificial Sequence
  Synthetic
ttcgggcgtggcttgg

SEQ ID NO: 28672 - DNA, 16 bp, Artificial Sequence
  Synthetic
gtgttgcggggtcacg

SEQ ID NO: 28673 - DNA, 20 bp, Artificial Sequence
  Synthetic
gcgttttctttggcggattt

SEQ ID NO: 28674 - DNA, 17 bp, Artificial Sequence
  Synthetic
gcgcaccaccttttccg

SEQ ID NO: 28675 - DNA, 20 bp, Artificial Sequence
  Synthetic
gttgtttcaacacgacgcgg

SEQ ID NO: 28676 - DNA, 16 bp, Artificial Sequence
  Synthetic
agccgtgggtgcttgc

SEQ ID NO: 28677 - DNA, 20 bp, Artificial Sequence
  Synthetic
ttgccttccgtgatccttac

SEQ ID NO: 28678 - DNA, 18 bp, Artificial Sequence
  Synthetic
gcaacggaaagccaaacg

SEQ ID NO: 28679 - DNA, 18 bp, Artificial Sequence
  Synthetic
cggcgcataccagctttc

SEQ ID NO: 28680 - DNA, 18 bp, Artificial Sequence
  Synthetic
cgatgccggggtaatcca

SEQ ID NO: 28681 - DNA, 20 bp, Artificial Sequence
  Synthetic
cataacggggcattaaacct

SEQ ID NO: 28682 - DNA, 19 bp, Artificial Sequence
  Synthetic
tccaacgtaccgatgattg

SEQ ID NO: 28683 - DNA, 17 bp, Artificial Sequence
  Synthetic
gcaaccaccatcagccc

SEQ ID NO: 28684 - DNA, 16 bp, Artificial Sequence
  Synthetic
gtgtcgccgcacggat

SEQ ID NO: 28685 - DNA, 20 bp, Artificial Sequence
  Synthetic
gcttgtcgatttcctgacgt

SEQ ID NO: 28686 - DNA, 20 bp, Artificial Sequence
  Synthetic
ttcttcgccttcttcctcca

SEQ ID NO: 28687 - DNA, 18 bp, Artificial Sequence
  Synthetic
ggcggacgacggaaatcc

SEQ ID NO: 28688 - DNA, 17 bp, Artificial Sequence
  Synthetic
ctgcaaaacgccttggc

SEQ ID NO: 28689 - DNA, 17 bp, Artificial Sequence
  Synthetic
gccggataaagggcgac

SEQ ID NO: 28690 - DNA, 19 bp, Artificial Sequence
  Synthetic
ccgcctttctcggtgtctg

SEQ ID NO: 28691 - DNA, 18 bp, Artificial Sequence
  Synthetic
cgcctacctgttcggtct

SEQ ID NO: 28692 - DNA, 20 bp, Artificial Sequence
  Synthetic
acaatacagcctgatgacgc

SEQ ID NO: 28693 - DNA, 19 bp, Artificial Sequence
  Synthetic
ggcaaccactttaaacgcc

SEQ ID NO: 28694 - DNA, 17 bp, Artificial Sequence
  Synthetic
gcccgaacacaaaccgc

SEQ ID NO: 28695 - DNA, 21 bp, Artificial Sequence
  Synthetic
cttgggcaatcaattctttca

SEQ ID NO: 28696 - DNA, 19 bp, Artificial Sequence
  Synthetic
caatcggagtaagcggaaa

SEQ ID NO: 28697 - DNA, 22 bp, Artificial Sequence
  Synthetic
acatcgttactccaaaaacgta

SEQ ID NO: 28698 - DNA, 17 bp, Artificial Sequence
  Synthetic
caatgcgttgcgtccga

SEQ ID NO: 28699 - DNA, 18 bp, Artificial Sequence
  Synthetic
tcatctactgcaccggcg

SEQ ID NO: 28700 - DNA, 19 bp, Artificial Sequence
  Synthetic
tgtctgcctccccgataat

SEQ ID NO: 28701 - DNA, 20 bp, Artificial Sequence
  Synthetic
cgtcttgccataggtacggc

SEQ ID NO: 28702 - DNA, 18 bp, Artificial Sequence
  Synthetic
ttaccaggcatccaaacg

SEQ ID NO: 28703 - DNA, 17 bp, Artificial Sequence
  Synthetic
ttgccgcattgcccgac

SEQ ID NO: 28704 - DNA, 22 bp, Artificial Sequence
  Synthetic
gcgttttcggtatatatgcaaa

SEQ ID NO: 28705 - DNA, 20 bp, Artificial Sequence
  Synthetic
cgaatccccaaaccgcatta

SEQ ID NO: 28706 - DNA, 20 bp, Artificial Sequence
  Synthetic
gcatagtgcttgcattgagc

SEQ ID NO: 28707 - DNA, 18 bp, Artificial Sequence
  Synthetic
tcaattcccgaagctcgc

SEQ ID NO: 28708 - DNA, 18 bp, Artificial Sequence
  Synthetic
tggcacaaacagttgtcg

SEQ ID NO: 28709 - DNA, 20 bp, Artificial Sequence
  Synthetic
ttctcctgcaaggcattcat

SEQ ID NO: 28710 - DNA, 19 bp, Artificial Sequence
  Synthetic
agggacggtgcttctatgg

SEQ ID NO: 28711 - DNA, 20 bp, Artificial Sequence
  Synthetic
tcgaaggcgtaacgaagttg

SEQ ID NO: 28712 - DNA, 19 bp, Artificial Sequence
  Synthetic
actgtgcggtttcgtcaaa

SEQ ID NO: 28713 - DNA, 16 bp, Artificial Sequence
  Synthetic
gccgtgatactgccgc

SEQ ID NO: 28714 - DNA, 19 bp, Artificial Sequence
  Synthetic
ggatttgggctttcatcaa

SEQ ID NO: 28715 - DNA, 16 bp, Artificial Sequence
  Synthetic
accggtcggattgcgc

SEQ ID NO: 28716 - DNA, 16 bp, Artificial Sequence
  Synthetic
gcgatggacgaagccg

SEQ ID NO: 28717 - DNA, 16 bp, Artificial Sequence
  Synthetic
cgccgacaaccccctt

SEQ ID NO: 28718 - DNA, 18 bp, Artificial Sequence
  Synthetic
cgacagcatatgcgtcgc

SEQ ID NO: 28719 - DNA, 17 bp, Artificial Sequence
  Synthetic
atccaacgcggcctgac

SEQ ID NO: 28720 - DNA, 18 bp, Artificial Sequence
  Synthetic
cgccctgcttgtaccgat

SEQ ID NO: 28721 - DNA, 20 bp, Artificial Sequence
  Synthetic
gcgctgttgattttccttgc

SEQ ID NO: 28722 - DNA, 19 bp, Artificial Sequence
  Synthetic
ccatcaatgcgacaaagcg

SEQ ID NO: 28723 - DNA, 18 bp, Artificial Sequence
  Synthetic
gctcgaaggcgacctcat

SEQ ID NO: 28724 - DNA, 15 bp, Artificial Sequence
  Synthetic
acgaaaccgccgcac

SEQ ID NO: 28725 - DNA, 20 bp, Artificial Sequence
  Synthetic
atcacaggcctaggttacct

SEQ ID NO: 28726 - DNA, 16 bp, Artificial Sequence
  Synthetic
aaccccgtcgtcagcg

SEQ ID NO: 28727 - DNA, 19 bp, Artificial Sequence
  Synthetic
tacaacactttcggcctgc

SEQ ID NO: 28728 - DNA, 18 bp, Artificial Sequence
  Synthetic
ccgcttctgcatcttccg

SEQ ID NO: 28729 - DNA, 19 bp, Artificial Sequence
  Synthetic
ggccttcgacgtttttcac

SEQ ID NO: 28730 - DNA, 15 bp, Artificial Sequence
  Synthetic
agcaaatcggcggcg

SEQ ID NO: 28731 - DNA, 20 bp, Artificial Sequence
  Synthetic
gcatcgagaaacagctccct

SEQ ID NO: 28732 - DNA, 17 bp, Artificial Sequence
  Synthetic
acttcgcgcaatacggc

SEQ ID NO: 28733 - DNA, 20 bp, Artificial Sequence
  Synthetic
ggcgcaatacttggtcaaac

SEQ ID NO: 28734 - DNA, 17 bp, Artificial Sequence
  Synthetic
caccgttgccgaaaccg

SEQ ID NO: 28735 - DNA, 18 bp, Artificial Sequence
  Synthetic
gcgttgccgaaaacaccc

SEQ ID NO: 28736 - DNA, 18 bp, Artificial Sequence
  Synthetic
ggattgacggcgaaccag

SEQ ID NO: 28737 - DNA, 18 bp, Artificial Sequence
  Synthetic
caaacggctgagccttgc

SEQ ID NO: 28738 - DNA, 16 bp, Artificial Sequence
  Synthetic
tggagcgtcccgaacc

SEQ ID NO: 28739 - DNA, 20 bp, Artificial Sequence
  Synthetic
cacgcttttttgtgtttgcc

SEQ ID NO: 28740 - DNA, 17 bp, Artificial Sequence
  Synthetic
tacggacgcggcgaaac

SEQ ID NO: 28741 - DNA, 18 bp, Artificial Sequence
  Synthetic
tcacccaaatcggcttgg

SEQ ID NO: 28742 - DNA, 16 bp, Artificial Sequence
  Synthetic
ccgcgcccctgaactt

SEQ ID NO: 28743 - DNA, 18 bp, Artificial Sequence
  Synthetic
ggcgacttcgggggattt

SEQ ID NO: 28744 - DNA, 16 bp, Artificial Sequence
  Synthetic
tctgccgcaaagccgc

SEQ ID NO: 28745 - DNA, 18 bp, Artificial Sequence
  Synthetic
aaaccatacgcccaagac

SEQ ID NO: 28746 - DNA, 15 bp, Artificial Sequence
  Synthetic
aacgccagcgcatcg

SEQ ID NO: 28747 - DNA, 20 bp, Artificial Sequence
  Synthetic
gaaggaattgtcgggcgaat

SEQ ID NO: 28748 - DNA, 18 bp, Artificial Sequence
  Synthetic
tggctggtgaaacccctg

SEQ ID NO: 28749 - DNA, 23 bp, Artificial Sequence
  Synthetic
taattaatccgcttatccttgat

SEQ ID NO: 28750 - DNA, 17 bp, Artificial Sequence
  Synthetic
caggaacgcgccgtcaa

SEQ ID NO: 28751 - DNA, 18 bp, Artificial Sequence
  Synthetic
accaagaaagcagcgacg

SEQ ID NO: 28752 - DNA, 18 bp, Artificial Sequence
  Synthetic
ttgagcgccgagatttgg

SEQ ID NO: 28753 - DNA, 17 bp, Artificial Sequence
  Synthetic
tggcggagaacatcggc

SEQ ID NO: 28754 - DNA, 19 bp, Artificial Sequence
  Synthetic
aaaccggtttccttgtccc

SEQ ID NO: 28755 - DNA, 19 bp, Artificial Sequence
  Synthetic
agccttttgtccaaaccgc

SEQ ID NO: 28756 - DNA, 16 bp, Artificial Sequence
  Synthetic
ccttatacgccgccgc

SEQ ID NO: 28757 - DNA, 20 bp, Artificial Sequence
  Synthetic
cctgtcgttgtgataggcaa

SEQ ID NO: 28758 - DNA, 19 bp, Artificial Sequence
  Synthetic
gccaagcccaaatccgtct

SEQ ID NO: 28759 - DNA, 19 bp, Artificial Sequence
  Synthetic
gcagggaaacgtctctgcc

SEQ ID NO: 28760 - DNA, 19 bp, Artificial Sequence
  Synthetic
atacaggcttgcagaactt

SEQ ID NO: 28761 - DNA, 19 bp, Artificial Sequence
  Synthetic
tccgggattcgaccgtgtt

SEQ ID NO: 28762 - DNA, 19 bp, Artificial Sequence
  Synthetic
caggcattacgcgcaacaa

SEQ ID NO: 28763 - DNA, 16 bp, Artificial Sequence
  Synthetic
cttgccggcaaccagc

SEQ ID NO: 28764 - DNA, 19 bp, Artificial Sequence
  Synthetic
acgcctgtcttgactttcg

SEQ ID NO: 28765 - DNA, 16 bp, Artificial Sequence
  Synthetic
tcagaaccggccgcac

SEQ ID NO: 28766 - DNA, 16 bp, Artificial Sequence
  Synthetic
aagcgataccggggcg

SEQ ID NO: 28767 - DNA, 18 bp, Artificial Sequence
  Synthetic
acacgatgcggtctttgc

SEQ ID NO: 28768 - DNA, 18 bp, Artificial Sequence
  Synthetic
atatcgcggcggtttcag

SEQ ID NO: 28769 - DNA, 18 bp, Artificial Sequence
  Synthetic
caatcaccgcgccgaaac

SEQ ID NO: 28770 - DNA, 16 bp, Artificial Sequence
  Synthetic
ttcaccgcaccgacgg

SEQ ID NO: 28771 - DNA, 18 bp, Artificial Sequence
  Synthetic
cgcccgtttaccgtgaat

SEQ ID NO: 28772 - DNA, 16 bp, Artificial Sequence
  Synthetic
gggtagggcaggcgaa

SEQ ID NO: 28773 - DNA, 16 bp, Artificial Sequence
  Synthetic
cgcccttcagttcggc

SEQ ID NO: 28774 - DNA, 18 bp, Artificial Sequence
  Synthetic
ccgccactttgccgtttg

SEQ ID NO: 28775 - DNA, 16 bp, Artificial Sequence
  Synthetic
ccgccttgccgttgac

SEQ ID NO: 28776 - DNA, 18 bp, Artificial Sequence
  Synthetic
gcttacaaccgcgcaacc

SEQ ID NO: 28777 - DNA, 18 bp, Artificial Sequence
  Synthetic
tgtccgaccttttggcgg

SEQ ID NO: 28778 - DNA, 20 bp, Artificial Sequence
  Synthetic
tgccgacaacgaagaaaacg

SEQ ID NO: 28779 - DNA, 16 bp, Artificial Sequence
  Synthetic
cggcggacgatttgcg

SEQ ID NO: 28780 - DNA, 16 bp, Artificial Sequence
  Synthetic
acaacgacggccagcc

SEQ ID NO: 28781 - DNA, 16 bp, Artificial Sequence
  Synthetic
tcgggtctttggccgc

SEQ ID NO: 28782 - DNA, 18 bp, Artificial Sequence
  Synthetic
cgcgtttgccctcgttct

SEQ ID NO: 28783 - DNA, 16 bp, Artificial Sequence
  Synthetic
atgtcccagccgcctg

SEQ ID NO: 28784 - DNA, 16 bp, Artificial Sequence
  Synthetic
tccccctgcccggttt

SEQ ID NO: 28785 - DNA, 16 bp, Artificial Sequence
  Synthetic
gcctggcgggttttgc

SEQ ID NO: 28786 - DNA, 16 bp, Artificial Sequence
  Synthetic
tgctcagcacggggac

SEQ ID NO: 28787 - DNA, 21 bp, Artificial Sequence
  Synthetic
attttcaaatggtagggaagg

SEQ ID NO: 28788 - DNA, 23 bp, Artificial Sequence
  Synthetic
accttgatttctttggaaatctc

SEQ ID NO: 28789 - DNA, 18 bp, Artificial Sequence
  Synthetic
cgcccaaatgctcaacca

SEQ ID NO: 28790 - DNA, 20 bp, Artificial Sequence
  Synthetic
tttacctccgaatgcgtctc

SEQ ID NO: 28791 - DNA, 19 bp, Artificial Sequence
  Synthetic
cgggcggcttgattttcct

SEQ ID NO: 28792 - DNA, 19 bp, Artificial Sequence
  Synthetic
gccgaatttctgcccttcg

SEQ ID NO: 28793 - DNA, 16 bp, Artificial Sequence
  Synthetic
tgctcgggcggtatcc

SEQ ID NO: 28794 - DNA, 16 bp, Artificial Sequence
  Synthetic
aactgttccccgccgc

SEQ ID NO: 28795 - DNA, 18 bp, Artificial Sequence
  Synthetic
tccgacgtgtatcagggc

SEQ ID NO: 28796 - DNA, 18 bp, Artificial Sequence
  Synthetic
gagaccgacaaaaatgcc

SEQ ID NO: 28797 - DNA, 20 bp, Artificial Sequence
  Synthetic
gatcggtgaagtctgccttg

SEQ ID NO: 28798 - DNA, 16 bp, Artificial Sequence
  Synthetic
cgacttggcttgggcg

SEQ ID NO: 28799 - DNA, 20 bp, Artificial Sequence
  Synthetic
cgcagcagttctttaccgta

SEQ ID NO: 28800 - DNA, 16 bp, Artificial Sequence
  Synthetic
atgcagcacgacagcg

SEQ ID NO: 28801 - DNA, 18 bp, Artificial Sequence
  Synthetic
cgtaaatggcggacacgg

SEQ ID NO: 28802 - DNA, 16 bp, Artificial Sequence
  Synthetic
ttcggcggggtacacg

SEQ ID NO: 28803 - DNA, 19 bp, Artificial Sequence
  Synthetic
ttgtcggcgtacaggatgg

SEQ ID NO: 28804 - DNA, 16 bp, Artificial Sequence
  Synthetic
accgtggcgatggtcg

SEQ ID NO: 28805 - DNA, 16 bp, Artificial Sequence
  Synthetic
gattgcctgcccgtgc

SEQ ID NO: 28806 - DNA, 18 bp, Artificial Sequence
  Synthetic
tatcgaaagcggcagcgg

SEQ ID NO: 28807 - DNA, 18 bp, Artificial Sequence
  Synthetic
ttcagaggaccgttcggc

SEQ ID NO: 28808 - DNA, 16 bp, Artificial Sequence
  Synthetic
tgtcgagctgggtcgg

SEQ ID NO: 28809 - DNA, 18 bp, Artificial Sequence
  Synthetic
tggacggtatggacgggc

SEQ ID NO: 28810 - DNA, 17 bp, Artificial Sequence
  Synthetic
actccgtcggcgaatgg

SEQ ID NO: 28811 - DNA, 19 bp, Artificial Sequence
  Synthetic
gatttccccaacagccacg

SEQ ID NO: 28812 - DNA, 18 bp, Artificial Sequence
  Synthetic
catgccaacgctatctgg

SEQ ID NO: 28813 - DNA, 18 bp, Artificial Sequence
  Synthetic
caagaaatgaacccgggt

SEQ ID NO: 28814 - DNA, 19 bp, Artificial Sequence
  Synthetic
gcaagaaaccgtccgtacg

SEQ ID NO: 28815 - DNA, 18 bp, Artificial Sequence
  Synthetic
aactacctcaacgccgca

SEQ ID NO: 28816 - DNA, 18 bp, Artificial Sequence
  Synthetic
acaccgttcggatgttcg

SEQ ID NO: 28817 - DNA, 16 bp, Artificial Sequence
  Synthetic
acgcctcgacgccatc

SEQ ID NO: 28818 - DNA, 16 bp, Artificial Sequence
  Synthetic
accgaagtcgccctgc

SEQ ID NO: 28819 - DNA, 20 bp, Artificial Sequence
  Synthetic
gctttatgtgcctgtttcgc

SEQ ID NO: 28820 - DNA, 19 bp, Artificial Sequence
  Synthetic
caggatttggtgtcggagc

SEQ ID NO: 28821 - DNA, 16 bp, Artificial Sequence
  Synthetic
tcaacctgcgccaacg

SEQ ID NO: 28822 - DNA, 16 bp, Artificial Sequence
  Synthetic
cagcaaccgcctgacc

SEQ ID NO: 28823 - DNA, 16 bp, Artificial Sequence
  Synthetic
gccgatgcgcgtttgc

SEQ ID NO: 28824 - DNA, 17 bp, Artificial Sequence
  Synthetic
cgaacacgagccgcttg

SEQ ID NO: 28825 - DNA, 18 bp, Artificial Sequence
  Synthetic
ccgtatccagcggatccg

SEQ ID NO: 28826 - DNA, 16 bp, Artificial Sequence
  Synthetic
ggcataccggcgtgct

SEQ ID NO: 28827 - DNA, 20 bp, Artificial Sequence
  Synthetic
gccagaatgaacaatctgat

SEQ ID NO: 28828 - DNA, 16 bp, Artificial Sequence
  Synthetic
tttcgggtggcgcagg

SEQ ID NO: 28829 - DNA, 16 bp, Artificial Sequence
  Synthetic
gatggcgtgtgcggtc

SEQ ID NO: 28830 - DNA, 16 bp, Artificial Sequence
  Synthetic
tttgcacggaggctgc

SEQ ID NO: 28831 - DNA, 16 bp, Artificial Sequence
  Synthetic
tcccgtttcggcgtgc

SEQ ID NO: 28832 - DNA, 16 bp, Artificial Sequence
  Synthetic
gaaactcgctgcccgc

SEQ ID NO: 28833 - DNA, 20 bp, Artificial Sequence
  Synthetic
cgtgaaatcggtttcgtgtc

SEQ ID NO: 28834 - DNA, 17 bp, Artificial Sequence
  Synthetic
accaggccagcaggatg

SEQ ID NO: 28835 - DNA, 20 bp, Artificial Sequence
  Synthetic
aggtcgagtgctttgacaaa

SEQ ID NO: 28836 - DNA, 18 bp, Artificial Sequence
  Synthetic
ttccaaatcggcatcggg

SEQ ID NO: 28837 - DNA, 20 bp, Artificial Sequence
  Synthetic
ggggccgaatacttcttctc

SEQ ID NO: 28838 - DNA, 18 bp, Artificial Sequence
  Synthetic
ttgccaacctcaaaccgc

SEQ ID NO: 28839 - DNA, 18 bp, Artificial Sequence
  Synthetic
cacgctgacggacaaagc

SEQ ID NO: 28840 - DNA, 18 bp, Artificial Sequence
  Synthetic
caacgccgaaatcgtcgc

SEQ ID NO: 28841 - DNA, 22 bp, Artificial Sequence
  Synthetic
cagacccttgttttttattccc

SEQ ID NO: 28842 - DNA, 18 bp, Artificial Sequence
  Synthetic
atcggctctccatcgacc

SEQ ID NO: 28843 - DNA, 18 bp, Artificial Sequence
  Synthetic
tcttcacgcgaacatgcc

SEQ ID NO: 28844 - DNA, 20 bp, Artificial Sequence
  Synthetic
tcgaaccgcaagttacttgg

SEQ ID NO: 28845 - DNA, 18 bp, Artificial Sequence
  Synthetic
tatggggcccgaacaagg

SEQ ID NO: 28846 - DNA, 17 bp, Artificial Sequence
  Synthetic
atgccgacagtttgccg

SEQ ID NO: 28847 - DNA, 17 bp, Artificial Sequence
  Synthetic
tgtgcggatgcggttga

SEQ ID NO: 28848 - DNA, 19 bp, Artificial Sequence
  Synthetic
ctgttcgatcagccagacg

SEQ ID NO: 28849 - DNA, 17 bp, Artificial Sequence
  Synthetic
acagcagcatcgcgatg

SEQ ID NO: 28850 - DNA, 18 bp, Artificial Sequence
  Synthetic
aacacggcggaaacaggc

SEQ ID NO: 28851 - DNA, 18 bp, Artificial Sequence
  Synthetic
cacggatttgtgcagggc

SEQ ID NO: 28852 - DNA, 20 bp, Artificial Sequence
  Synthetic
ttccttcatcagcttggtcg

SEQ ID NO: 28853 - DNA, 20 bp, Artificial Sequence
  Synthetic
acgaacccttcagcgtgatg

SEQ ID NO: 28854 - DNA, 16 bp, Artificial Sequence
  Synthetic
cggcgtactcgtccgt

SEQ ID NO: 28855 - DNA, 18 bp, Artificial Sequence
  Synthetic
ttgctgaccatcgtgaat

SEQ ID NO: 28856 - DNA, 19 bp, Artificial Sequence
  Synthetic
tgttcgttgctttgggatt

SEQ ID NO: 28857 - DNA, 20 bp, Artificial Sequence
  Synthetic
tgtaatcgccgaaacggtct

SEQ ID NO: 28858 - DNA, 20 bp, Artificial Sequence
  Synthetic
tgttggactactatccgcgt

SEQ ID NO: 28859 - DNA, 19 bp, Artificial Sequence
  Synthetic
atacagttgggcggtcaac

SEQ ID NO: 28860 - DNA, 17 bp, Artificial Sequence
  Synthetic
cgcaacagcggcattcc

SEQ ID NO: 28861 - DNA, 18 bp, Artificial Sequence
  Synthetic
gcttcgactccgttaccg

SEQ ID NO: 28862 - DNA, 17 bp, Artificial Sequence
  Synthetic
actgaccccgcctttgg

SEQ ID NO: 28863 - DNA, 20 bp, Artificial Sequence
  Synthetic
gtggttaaagtgtcagccgt

SEQ ID NO: 28864 - DNA, 16 bp, Artificial Sequence
  Synthetic
tttctgccccgccctc

SEQ ID NO: 28865 - DNA, 20 bp, Artificial Sequence
  Synthetic
ttggaggcgatgatgaacag

SEQ ID NO: 28866 - DNA, 18 bp, Artificial Sequence
  Synthetic
cttcgtcgggggttttgc

SEQ ID NO: 28867 - DNA, 18 bp, Artificial Sequence
  Synthetic
gcaatccgaccgaaaccg

SEQ ID NO: 28868 - DNA, 18 bp, Artificial Sequence
  Synthetic
ctgtgcatcaaagccgcc

SEQ ID NO: 28869 - DNA, 16 bp, Artificial Sequence
  Synthetic
tccgagcacacccacc

SEQ ID NO: 28870 - DNA, 16 bp, Artificial Sequence
  Synthetic
ctcatcaggcgcgcct

SEQ ID NO: 28871 - DNA, 16 bp, Artificial Sequence
  Synthetic
aagatctgccccccgg

SEQ ID NO: 28872 - DNA, 19 bp, Artificial Sequence
  Synthetic
agtcggtcaggaacacgtc

SEQ ID NO: 28873 - DNA, 18 bp, Artificial Sequence
  Synthetic
aacgtccacccgaccaaa

SEQ ID NO: 28874 - DNA, 18 bp, Artificial Sequence
  Synthetic
ccgactttcgccaaaggc

SEQ ID NO: 28875 - DNA, 20 bp, Artificial Sequence
  Synthetic
agatacggcatatcgcaagg

SEQ ID NO: 28876 - DNA, 20 bp, Artificial Sequence
  Synthetic
acaactgttgcagctcgata

SEQ ID NO: 28877 - DNA, 17 bp, Artificial Sequence
  Synthetic
cgaagccgccaatcagg

SEQ ID NO: 28878 - DNA, 17 bp, Artificial Sequence
  Synthetic
tcccgtccgcatccttc

SEQ ID NO: 28879 - DNA, 18 bp, Artificial Sequence
  Synthetic
tttcgacccgagcattcg

SEQ ID NO: 28880 - DNA, 19 bp, Artificial Sequence
  Synthetic
acttggtcagtttgccttt

SEQ ID NO: 28881 - DNA, 19 bp, Artificial Sequence
  Synthetic
ggatcatgcctttacccgg

SEQ ID NO: 28882 - DNA, 18 bp, Artificial Sequence
  Synthetic
gacggaagagcaggttgc

SEQ ID NO: 28883 - DNA, 24 bp, Artificial Sequence
  Synthetic
ttgtagtatcagaggataaagtgt

SEQ ID NO: 28884 - DNA, 19 bp, Artificial Sequence
  Synthetic
atgcggatatgacctcagt

SEQ ID NO: 28885 - DNA, 20 bp, Artificial Sequence
  Synthetic
cgaatttcctgatgcaaagt

SEQ ID NO: 28886 - DNA, 23 bp, Artificial Sequence
  Synthetic
ggtatttttgtgcgatagacatc

SEQ ID NO: 28887 - DNA, 21 bp, Artificial Sequence
  Synthetic
aagcagatgaagtagtgattg

SEQ ID NO: 28888 - DNA, 18 bp, Artificial Sequence
  Synthetic
gcaatctcggtgctgaat

SEQ ID NO: 28889 - DNA, 18 bp, Artificial Sequence
  Synthetic
cttgacccagagcagttg

SEQ ID NO: 28890 - DNA, 22 bp, Artificial Sequence
  Synthetic
catcaaaaagaggtatcggaaa

SEQ ID NO: 28891 - DNA, 16 bp, Artificial Sequence
  Synthetic
caggttggccgccaag

SEQ ID NO: 28892 - DNA, 15 bp, Artificial Sequence
  Synthetic
attggcgcgcgtctg

SEQ ID NO: 28893 - DNA, 18 bp, Artificial Sequence
  Synthetic
tcgaacccggaccgatac

SEQ ID NO: 28894 - DNA, 16 bp, Artificial Sequence
  Synthetic
accgccgagcatgacg

SEQ ID NO: 28895 - DNA, 18 bp, Artificial Sequence
  Synthetic
ttcgatgccttcggggac

SEQ ID NO: 28896 - DNA, 17 bp, Artificial Sequence
  Synthetic
acacttcggcggtcagc

SEQ ID NO: 28897 - DNA, 15 bp, Artificial Sequence
  Synthetic
tcaggcgcgcgcaat

SEQ ID NO: 28898 - DNA, 18 bp, Artificial Sequence
  Synthetic
ccgccgattcgatcatgg

SEQ ID NO: 28899 - DNA, 19 bp, Artificial Sequence
  Synthetic
acaattctttgcggcctgc

SEQ ID NO: 28900 - DNA, 16 bp, Artificial Sequence
  Synthetic
taccttcgacggcggc

SEQ ID NO: 28901 - DNA, 16 bp, Artificial Sequence
  Synthetic
ttcgcccaccacccga

SEQ ID NO: 28902 - DNA, 16 bp, Artificial Sequence
  Synthetic
tactcggcgtggcagg

SEQ ID NO: 28903 - DNA, 20 bp, Artificial Sequence
  Synthetic
cgggtgtacagttcggtcag

SEQ ID NO: 28904 - DNA, 17 bp, Artificial Sequence
  Synthetic
gtcggcaccgtcttacg

SEQ ID NO: 28905 - DNA, 20 bp, Artificial Sequence
  Synthetic
ggacagatgacggaagagga

SEQ ID NO: 28906 - DNA, 20 bp, Artificial Sequence
  Synthetic
accatcacccaaatgctcaa

SEQ ID NO: 28907 - DNA, 18 bp, Artificial Sequence
  Synthetic
acgttacccccttgtcgc

SEQ ID NO: 28908 - DNA, 17 bp, Artificial Sequence
  Synthetic
acgccaggccaccaaag

SEQ ID NO: 28909 - DNA, 20 bp, Artificial Sequence
  Synthetic
ggtcgatttcgttcaacagc

SEQ ID NO: 28910 - DNA, 16 bp, Artificial Sequence
  Synthetic
acgtgttcgggcgtgc

SEQ ID NO: 28911 - DNA, 19 bp, Artificial Sequence
  Synthetic
ggaaatcggggtgcgaaca

SEQ ID NO: 28912 - DNA, 18 bp, Artificial Sequence
  Synthetic
acttgcgtccgaactgcc

SEQ ID NO: 28913 - DNA, 18 bp, Artificial Sequence
  Synthetic
tatcccgtgcagcccaat

SEQ ID NO: 28914 - DNA, 17 bp, Artificial Sequence
  Synthetic
tcgaagcgggttttgcc

SEQ ID NO: 28915 - DNA, 16 bp, Artificial Sequence
  Synthetic
tacggcttcggggtcg

SEQ ID NO: 28916 - DNA, 16 bp, Artificial Sequence
  Synthetic
ccgtcctgccgggtat

SEQ ID NO: 28917 - DNA, 18 bp, Artificial Sequence
  Synthetic
gaggttgagcagccaacg

SEQ ID NO: 28918 - DNA, 20 bp, Artificial Sequence
  Synthetic
gacattggaacttcctgcgg

SEQ ID NO: 28919 - DNA, 18 bp, Artificial Sequence
  Synthetic
gagggcggtttcgtcagt

SEQ ID NO: 28920 - DNA, 17 bp, Artificial Sequence
  Synthetic
gttcggcaggcaggttt

SEQ ID NO: 28921 - DNA, 18 bp, Artificial Sequence
  Synthetic
ccatacccaatacgccgg

SEQ ID NO: 28922 - DNA, 20 bp, Artificial Sequence
  Synthetic
cgtcttcgggattagccaat

SEQ ID NO: 28923 - DNA, 20 bp, Artificial Sequence
  Synthetic
tggtcattttgctggaagag

SEQ ID NO: 28924 - DNA, 19 bp, Artificial Sequence
  Synthetic
ggtttgtttgctgccgagg

SEQ ID NO: 28925 - DNA, 22 bp, Artificial Sequence
  Synthetic
tttcaaaagcagattggacaaa

SEQ ID NO: 28926 - DNA, 18 bp, Artificial Sequence
  Synthetic
aattgcgcgcttgcttca

SEQ ID NO: 28927 - DNA, 18 bp, Artificial Sequence
  Synthetic
atacttcggggttgcggg

SEQ ID NO: 28928 - DNA, 17 bp, Artificial Sequence
  Synthetic
gcaatcggcggattcgg

SEQ ID NO: 28929 - DNA, 20 bp, Artificial Sequence
  Synthetic
cctttatgcacgccaccttt

SEQ ID NO: 28930 - DNA, 19 bp, Artificial Sequence
  Synthetic
ggggaagtagaacacggct

SEQ ID NO: 28931 - DNA, 20 bp, Artificial Sequence
  Synthetic
gcggaattgctgaaacagga

SEQ ID NO: 28932 - DNA, 20 bp, Artificial Sequence
  Synthetic
ccgatatgaagcggcggata

SEQ ID NO: 28933 - DNA, 16 bp, Artificial Sequence
  Synthetic
tggcgagggtcatcgc

SEQ ID NO: 28934 - DNA, 16 bp, Artificial Sequence
  Synthetic
gcacgacctccggcaa

SEQ ID NO: 28935 - DNA, 17 bp, Artificial Sequence
  Synthetic
ccgaaatgggcgtcgtc

SEQ ID NO: 28936 - DNA, 18 bp, Artificial Sequence
  Synthetic
gacctggacatcctcgcc

SEQ ID NO: 28937 - DNA, 20 bp, Artificial Sequence
  Synthetic
cctgttcaaccccttcgtcc

SEQ ID NO: 28938 - DNA, 16 bp, Artificial Sequence
  Synthetic
tcggcttcggcgcaag

SEQ ID NO: 28939 - DNA, 19 bp, Artificial Sequence
  Synthetic
aatcggcaggggaaatgtg

SEQ ID NO: 28940 - DNA, 19 bp, Artificial Sequence
  Synthetic
ccatcgtgaccaaactgac

SEQ ID NO: 28941 - DNA, 16 bp, Artificial Sequence
  Synthetic
cgcgtgggctgtatgc

SEQ ID NO: 28942 - DNA, 16 bp, Artificial Sequence
  Synthetic
taccgaagccctgcgc

SEQ ID NO: 28943 - DNA, 19 bp, Artificial Sequence
  Synthetic
gttttcgggaatcagggcg

SEQ ID NO: 28944 - DNA, 17 bp, Artificial Sequence
  Synthetic
agatgcctgcgccgtag

SEQ ID NO: 28945 - DNA, 20 bp, Artificial Sequence
  Synthetic
gacaccagcatgtcgcaatg

SEQ ID NO: 28946 - DNA, 20 bp, Artificial Sequence
  Synthetic
ggctttgaaatggcggtaca

SEQ ID NO: 28947 - DNA, 17 bp, Artificial Sequence
  Synthetic
gccggtcgttgagttcg

SEQ ID NO: 28948 - DNA, 19 bp, Artificial Sequence
  Synthetic
ttcgcgttgttgtaggttt

SEQ ID NO: 28949 - DNA, 16 bp, Artificial Sequence
  Synthetic
aaagcccgcgccgaag

SEQ ID NO: 28950 - DNA, 18 bp, Artificial Sequence
  Synthetic
gaaagttacgaggccgcc

SEQ ID NO: 28951 - DNA, 16 bp, Artificial Sequence
  Synthetic
aaagcctcgaccgccc

SEQ ID NO: 28952 - DNA, 20 bp, Artificial Sequence
  Synthetic
cgatgtaaacctcgggcagc

SEQ ID NO: 28953 - DNA, 18 bp, Artificial Sequence
  Synthetic
atttctggtggcggcttg

SEQ ID NO: 28954 - DNA, 19 bp, Artificial Sequence
  Synthetic
ggcttggaggaattcgtgc

SEQ ID NO: 28955 - DNA, 19 bp, Artificial Sequence
  Synthetic
agcccgtcaaagagtttgg

SEQ ID NO: 28956 - DNA, 20 bp, Artificial Sequence
  Synthetic
cgttctaggttcgggtatgc

SEQ ID NO: 28957 - DNA, 19 bp, Artificial Sequence
  Synthetic
gcgaaatactgtcgccgat

SEQ ID NO: 28958 - DNA, 19 bp, Artificial Sequence
  Synthetic
ggtgagttttgccagttgc

SEQ ID NO: 28959 - DNA, 17 bp, Artificial Sequence
  Synthetic
aaggcagggcgatcagc

SEQ ID NO: 28960 - DNA, 20 bp, Artificial Sequence
  Synthetic
gtccacggcttgaatatcga

SEQ ID NO: 28961 - DNA, 24 bp, Artificial Sequence
  Synthetic
ggataaaaatatgacgacacaaga

SEQ ID NO: 28962 - DNA, 20 bp, Artificial Sequence
  Synthetic
gtggaaaaacggtggacaga

SEQ ID NO: 28963 - DNA, 20 bp, Artificial Sequence
  Synthetic
tgctgattatctgccgtaaa

SEQ ID NO: 28964 - DNA, 20 bp, Artificial Sequence
  Synthetic
atttgttttgccgtgatgtg

SEQ ID NO: 28965 - DNA, 20 bp, Artificial Sequence
  Synthetic
tttcggattctttcgccagt

SEQ ID NO: 28966 - DNA, 18 bp, Artificial Sequence
  Synthetic
atgattttcaggctgcct

SEQ ID NO: 28967 - DNA, 19 bp, Artificial Sequence
  Synthetic
aaaccattctgtgcgctcg

SEQ ID NO: 28968 - DNA, 18 bp, Artificial Sequence
  Synthetic
tgattatttacgcggcgg

SEQ ID NO: 28969 - DNA, 18 bp, Artificial Sequence
  Synthetic
ctgcccattgtgcatagg

SEQ ID NO: 28970 - DNA, 18 bp, Artificial Sequence
  Synthetic
gataccgcaatggctttg

SEQ ID NO: 28971 - DNA, 18 bp, Artificial Sequence
  Synthetic
aacagccgaagccgtaag

SEQ ID NO: 28972 - DNA, 18 bp, Artificial Sequence
  Synthetic
gttggctatgactgcccg

SEQ ID NO: 28973 - DNA, 22 bp, Artificial Sequence
  Synthetic
gattagacccaacatgagtttg

SEQ ID NO: 28974 - DNA, 22 bp, Artificial Sequence
  Synthetic
atatattatgctgacgcccaaa

SEQ ID NO: 28975 - DNA, 15 bp, Artificial Sequence
  Synthetic
aatgcctgcgtcgcg

SEQ ID NO: 28976 - DNA, 17 bp, Artificial Sequence
  Synthetic
gccctgcaacactacgc

SEQ ID NO: 28977 - DNA, 18 bp, Artificial Sequence
  Synthetic
ggataaaaccgcctacgc

SEQ ID NO: 28978 - DNA, 18 bp, Artificial Sequence
  Synthetic
gatatgtcgggcggcatc

SEQ ID NO: 28979 - DNA, 15 bp, Artificial Sequence
  Synthetic
tgcgcgtcggcttga

SEQ ID NO: 28980 - DNA, 18 bp, Artificial Sequence
  Synthetic
ctcttccagcctgccctc

SEQ ID NO: 28981 - DNA, 18 bp, Artificial Sequence
  Synthetic
catcacgcccaacctgac

SEQ ID NO: 28982 - DNA, 19 bp, Artificial Sequence
  Synthetic
tgcatcaaaagtcctgcgg

SEQ ID NO: 28983 - DNA, 18 bp, Artificial Sequence
  Synthetic
acgttttttgctggcatc

SEQ ID NO: 28984 - DNA, 19 bp, Artificial Sequence
  Synthetic
gcgccggtttacaatcctt

SEQ ID NO: 28985 - DNA, 20 bp, Artificial Sequence
  Synthetic
aacagtatgcccaactgcaa

SEQ ID NO: 28986 - DNA, 18 bp, Artificial Sequence
  Synthetic
aatcgcccaagtgagctg

SEQ ID NO: 28987 - DNA, 19 bp, Artificial Sequence
  Synthetic
aaagtcgccgaacggaaag

SEQ ID NO: 28988 - DNA, 18 bp, Artificial Sequence
  Synthetic
tccagctcgaccatcagg

SEQ ID NO: 28989 - DNA, 20 bp, Artificial Sequence
  Synthetic
gatagtttgggtactgccgc

SEQ ID NO: 28990 - DNA, 18 bp, Artificial Sequence
  Synthetic
gcgtgatgtcgaaaccga

SEQ ID NO: 28991 - DNA, 19 bp, Artificial Sequence
  Synthetic
tgtaaacggcaggtgcatc

SEQ ID NO: 28992 - DNA, 19 bp, Artificial Sequence
  Synthetic
caaccgaaccgtcattccc

SEQ ID NO: 28993 - DNA, 16 bp, Artificial Sequence
  Synthetic
acgcggatgtcgaggc

SEQ ID NO: 28994 - DNA, 18 bp, Artificial Sequence
  Synthetic
cggcatccaaagtgtcgg

SEQ ID NO: 28995 - DNA, 20 bp, Artificial Sequence
  Synthetic
taaagagttgccgtcgatgg

SEQ ID NO: 28996 - DNA, 18 bp, Artificial Sequence
  Synthetic
gctgcggcaaagttgttg

SEQ ID NO: 28997 - DNA, 18 bp, Artificial Sequence
  Synthetic
tgtggaaacgctcgtcgg

SEQ ID NO: 28998 - DNA, 17 bp, Artificial Sequence
  Synthetic
gacaacacggcggaagg

SEQ ID NO: 28999 - DNA, 19 bp, Artificial Sequence
  Synthetic
ggcagtgacgacgatgacc

SEQ ID NO: 29000 - DNA, 20 bp, Artificial Sequence
  Synthetic
ggagaagtttaaccgccagg

SEQ ID NO: 29001 - DNA, 20 bp, Artificial Sequence
  Synthetic
cggctttttgtggatgatgg

SEQ ID NO: 29002 - DNA, 16 bp, Artificial Sequence
  Synthetic
gcgaggcggagaagct

SEQ ID NO: 29003 - DNA, 15 bp, Artificial Sequence
  Synthetic
aacggttggcgcgtg

SEQ ID NO: 29004 - DNA, 16 bp, Artificial Sequence
  Synthetic
cggcggcgttttggac

SEQ ID NO: 29005 - DNA, 16 bp, Artificial Sequence
  Synthetic
aggcggactggcggaa

SEQ ID NO: 29006 - DNA, 18 bp, Artificial Sequence
  Synthetic
ggaaacgtgcgcctgttg

SEQ ID NO: 29007 - DNA, 17 bp, Artificial Sequence
  Synthetic
ggattatgcgccgggag

SEQ ID NO: 29008 - DNA, 19 bp, Artificial Sequence
  Synthetic
ggaatcggccggtgagttt

SEQ ID NO: 29009 - DNA, 20 bp, Artificial Sequence
  Synthetic
cggcaaggcttatttgtcca

SEQ ID NO: 29010 - DNA, 16 bp, Artificial Sequence
  Synthetic
ttcggggcgcaacacc

SEQ ID NO: 29011 - DNA, 20 bp, Artificial Sequence
  Synthetic
ttgggatttcatcggacagg

SEQ ID NO: 29012 - DNA, 16 bp, Artificial Sequence
  Synthetic
cggaaaaacgcgcggc

SEQ ID NO: 29013 - DNA, 18 bp, Artificial Sequence
  Synthetic
acgaaatggcggcatacg

SEQ ID NO: 29014 - DNA, 19 bp, Artificial Sequence
  Synthetic
ccgaaagctccttgtccgc

SEQ ID NO: 29015 - DNA, 20 bp, Artificial Sequence
  Synthetic
ggtccagttgaagcagctga

SEQ ID NO: 29016 - DNA, 20 bp, Artificial Sequence
  Synthetic
cctgacgcagatagacgatg

SEQ ID NO: 29017 - DNA, 18 bp, Artificial Sequence
  Synthetic
caagtaatcccgcgtccc

SEQ ID NO: 29018 - DNA, 18 bp, Artificial Sequence
  Synthetic
tcctccgcgatatagggt

SEQ ID NO: 29019 - DNA, 18 bp, Artificial Sequence
  Synthetic
gccgacttggaagccttg

SEQ ID NO: 29020 - DNA, 18 bp, Artificial Sequence
  Synthetic
tgccgaacggacaaaacc

SEQ ID NO: 29021 - DNA, 19 bp, Artificial Sequence
  Synthetic
ttgaggaagacggttgcga

SEQ ID NO: 29022 - DNA, 16 bp, Artificial Sequence
  Synthetic
tgtggatgacggcggg

SEQ ID NO: 29023 - DNA, 16 bp, Artificial Sequence
  Synthetic
accgcccaagccttgc

SEQ ID NO: 29024 - DNA, 16 bp, Artificial Sequence
  Synthetic
tccgacaagcagcccg

SEQ ID NO: 29025 - DNA, 16 bp, Artificial Sequence
  Synthetic
ttggggcgcaattcgg

SEQ ID NO: 29026 - DNA, 17 bp, Artificial Sequence
  Synthetic
tccgccgaaacagcttg

SEQ ID NO: 29027 - DNA, 19 bp, Artificial Sequence
  Synthetic
gcggttgttggtggtttgc

SEQ ID NO: 29028 - DNA, 18 bp, Artificial Sequence
  Synthetic
aaagagcagacggagaag

SEQ ID NO: 29029 - DNA, 19 bp, Artificial Sequence
  Synthetic
cgtgagacagtttggtccc

SEQ ID NO: 29030 - DNA, 17 bp, Artificial Sequence
  Synthetic
ccgcacggttaccaacc

SEQ ID NO: 29031 - DNA, 20 bp, Artificial Sequence
  Synthetic
gcgattgacgtgattgtcga

SEQ ID NO: 29032 - DNA, 20 bp, Artificial Sequence
  Synthetic
gttgaggttggacacggtaa

SEQ ID NO: 29033 - DNA, 20 bp, Artificial Sequence
  Synthetic
gcatcgttgaccaattcagg

SEQ ID NO: 29034 - DNA, 20 bp, Artificial Sequence
  Synthetic
cgataggtgttgaagcccat

SEQ ID NO: 29035 - DNA, 20 bp, Artificial Sequence
  Synthetic
aggtcggacatatgcacgtc

SEQ ID NO: 29036 - DNA, 19 bp, Artificial Sequence
  Synthetic
cccaatgtcagcgtgttcg

SEQ ID NO: 29037 - DNA, 16 bp, Artificial Sequence
  Synthetic
atgccgccgatggagc

SEQ ID NO: 29038 - DNA, 16 bp, Artificial Sequence
  Synthetic
tgcgttcgagcgaggc

SEQ ID NO: 29039 - DNA, 17 bp, Artificial Sequence
  Synthetic
tttggcgatgtggacgg

SEQ ID NO: 29040 - DNA, 20 bp, Artificial Sequence
  Synthetic
gcccaatagctgaatacggt

SEQ ID NO: 29041 - DNA, 16 bp, Artificial Sequence
  Synthetic
cttgtccgccgtcgtc

SEQ ID NO: 29042 - DNA, 18 bp, Artificial Sequence
  Synthetic
ctgcaggtagcggctgag

SEQ ID NO: 29043 - DNA, 17 bp, Artificial Sequence
  Synthetic
gcgcagggtcatggctt

SEQ ID NO: 29044 - DNA, 22 bp, Artificial Sequence
  Synthetic
aaggtttagatcagttttcgga

SEQ ID NO: 29045 - DNA, 19 bp, Artificial Sequence
  Synthetic
ccaaatattgcacgcccca

SEQ ID NO: 29046 - DNA, 18 bp, Artificial Sequence
  Synthetic
taaagctgcggcccattt

SEQ ID NO: 29047 - DNA, 16 bp, Artificial Sequence
  Synthetic
tgagggtggcgagcag

SEQ ID NO: 29048 - DNA, 19 bp, Artificial Sequence
  Synthetic
agacttcgcaggggacgta

SEQ ID NO: 29049 - DNA, 19 bp, Artificial Sequence
  Synthetic
gccgatgaggttttcgagg

SEQ ID NO: 29050 - DNA, 18 bp, Artificial Sequence
  Synthetic
tgacgaatggcaaaccgc

SEQ ID NO: 29051 - DNA, 18 bp, Artificial Sequence
  Synthetic
cgaatgccccgaaatgct

SEQ ID NO: 29052 - DNA, 19 bp, Artificial Sequence
  Synthetic
tcgtcccctatgctttggc

SEQ ID NO: 29053 - DNA, 18 bp, Artificial Sequence
  Synthetic
atcgtcaaaccgctcgac

SEQ ID NO: 29054 - DNA, 20 bp, Artificial Sequence
  Synthetic
atgcgctcttctctgctttg

SEQ ID NO: 29055 - DNA, 19 bp, Artificial Sequence
  Synthetic
agcgggtcaatacggtcag

SEQ ID NO: 29056 - DNA, 19 bp, Artificial Sequence
  Synthetic
tttgactttggcggcatcg

SEQ ID NO: 29057 - DNA, 17 bp, Artificial Sequence
  Synthetic
tcgggcatatcgagcgg

SEQ ID NO: 29058 - DNA, 16 bp, Artificial Sequence
  Synthetic
ttccatacgcgcgccg

SEQ ID NO: 29059 - DNA, 19 bp, Artificial Sequence
  Synthetic
gccgatgtcttccttacgc

SEQ ID NO: 29060 - DNA, 18 bp, Artificial Sequence
  Synthetic
ttcgtcgtgttcggcctg

SEQ ID NO: 29061 - DNA, 18 bp, Artificial Sequence
  Synthetic
ccattcccgcatcagggc

SEQ ID NO: 29062 - DNA, 20 bp, Artificial Sequence
  Synthetic
ggttgttcgggtaggcgata

SEQ ID NO: 29063 - DNA, 16 bp, Artificial Sequence
  Synthetic
agggcttcgtcgagcg

SEQ ID NO: 29064 - DNA, 20 bp, Artificial Sequence
  Synthetic
tgccgtaaacttttgctcct

SEQ ID NO: 29065 - DNA, 20 bp, Artificial Sequence
  Synthetic
acgttttgggttatgaggat

SEQ ID NO: 29066 - DNA, 17 bp, Artificial Sequence
  Synthetic
aggacagggtgtgccag

SEQ ID NO: 29067 - DNA, 17 bp, Artificial Sequence
  Synthetic
ttacggtttcgcgcagg

SEQ ID NO: 29068 - DNA, 15 bp, Artificial Sequence
  Synthetic
cgctgcacgggcttt

SEQ ID NO: 29069 - DNA, 19 bp, Artificial Sequence
  Synthetic
ccgatcatcgtgatgtcgg

SEQ ID NO: 29070 - DNA, 20 bp, Artificial Sequence
  Synthetic
ggttgagcacgatttggttc

SEQ ID NO: 29071 - DNA, 20 bp, Artificial Sequence
  Synthetic
gtagggcaggtaaacgtcga

SEQ ID NO: 29072 - DNA, 18 bp, Artificial Sequence
  Synthetic
taaagatggtcgggttgc

SEQ ID NO: 29073 - DNA, 19 bp, Artificial Sequence
  Synthetic
atcatccttgcaacaggtc

SEQ ID NO: 29074 - DNA, 18 bp, Artificial Sequence
  Synthetic
atcccgttcaagttgccg

SEQ ID NO: 29075 - DNA, 25 bp, Artificial Sequence
  Synthetic
taaaaaactgagcttcgagaattac

SEQ ID NO: 29076 - DNA, 18 bp, Artificial Sequence
  Synthetic
cctgacgaagcgacaacg

SEQ ID NO: 29077 - DNA, 20 bp, Artificial Sequence
  Synthetic
ttgggcttcgtattgttggt

SEQ ID NO: 29078 - DNA, 17 bp, Artificial Sequence
  Synthetic
atgttgggcggcgttcc

SEQ ID NO: 29079 - DNA, 18 bp, Artificial Sequence
  Synthetic
cggaatgggagcagatgc

SEQ ID NO: 29080 - DNA, 16 bp, Artificial Sequence
  Synthetic
ttcggcgggtgagagc

SEQ ID NO: 29081 - DNA, 20 bp, Artificial Sequence
  Synthetic
gctttcagttttgccgcttc

SEQ ID NO: 29082 - DNA, 16 bp, Artificial Sequence
  Synthetic
ggtgcggcaggtttcg

SEQ ID NO: 29083 - DNA, 16 bp, Artificial Sequence
  Synthetic
accctgaccctgctcg

SEQ ID NO: 29084 - DNA, 18 bp, Artificial Sequence
  Synthetic
gcaaaacctcgctcctgc

SEQ ID NO: 29085 - DNA, 20 bp, Artificial Sequence
  Synthetic
cgccgaaaatcgtcttgaac

SEQ ID NO: 29086 - DNA, 17 bp, Artificial Sequence
  Synthetic
acgtggtttcggggcaa

SEQ ID NO: 29087 - DNA, 19 bp, Artificial Sequence
  Synthetic
gggtttcagcctgtcatcg

SEQ ID NO: 29088 - DNA, 18 bp, Artificial Sequence
  Synthetic
accgattacgcccatccc

SEQ ID NO: 29089 - DNA, 16 bp, Artificial Sequence
  Synthetic
ttcgccgcccgatacg

SEQ ID NO: 29090 - DNA, 19 bp, Artificial Sequence
  Synthetic
ttttgacggcagggagcaa

SEQ ID NO: 29091 - DNA, 19 bp, Artificial Sequence
  Synthetic
aagtggtacgtgagctggg

SEQ ID NO: 29092 - DNA, 20 bp, Artificial Sequence
  Synthetic
tcagaagttgaagcaggtaa

SEQ ID NO: 29093 - DNA, 20 bp, Artificial Sequence
  Synthetic
cggatattgtggaacgggaa

SEQ ID NO: 29094 - DNA, 20 bp, Artificial Sequence
  Synthetic
atgcgttcgacaccaatgtt

SEQ ID NO: 29095 - DNA, 19 bp, Artificial Sequence
  Synthetic
cgcctctcccttgtccaac

SEQ ID NO: 29096 - DNA, 18 bp, Artificial Sequence
  Synthetic
tacaaaacaaccgccgcc

SEQ ID NO: 29097 - DNA, 19 bp, Artificial Sequence
  Synthetic
aagcgatgtacgaacccga

SEQ ID NO: 29098 - DNA, 19 bp, Artificial Sequence
  Synthetic
tccatttgtcggtactgcc

SEQ ID NO: 29099 - DNA, 18 bp, Artificial Sequence
  Synthetic
tcgggcaaatcgagttcg

SEQ ID NO: 29100 - DNA, 20 bp, Artificial Sequence
  Synthetic
ccacaaagaaacgctcggat

SEQ ID NO: 29101 - DNA, 19 bp, Artificial Sequence
  Synthetic
aatcggcaggatggatgca

SEQ ID NO: 29102 - DNA, 16 bp, Artificial Sequence
  Synthetic
tgcacttcgcggcgaa

SEQ ID NO: 29103 - DNA, 16 bp, Artificial Sequence
  Synthetic
gcggttgacgaagggc

SEQ ID NO: 29104 - DNA, 20 bp, Artificial Sequence
  Synthetic
cgcttcaggaacagcttctg

SEQ ID NO: 29105 - DNA, 20 bp, Artificial Sequence
  Synthetic
ggtttggacgtttaccgcag

SEQ ID NO: 29106 - DNA, 20 bp, Artificial Sequence
  Synthetic
gaactcttcctcgtcgaagg

SEQ ID NO: 29107 - DNA, 16 bp, Artificial Sequence
  Synthetic
aaagccgtgctgctgc

SEQ ID NO: 29108 - DNA, 18 bp, Artificial Sequence
  Synthetic
agccggtcaaagaacgtc

SEQ ID NO: 29109 - DNA, 19 bp, Artificial Sequence
  Synthetic
cgtgaaaactgtggcgttg

SEQ ID NO: 29110 - DNA, 17 bp, Artificial Sequence
  Synthetic
tgaatcgggcggacacc

SEQ ID NO: 29111 - DNA, 17 bp, Artificial Sequence
  Synthetic
gtccgcacgcttatccc

SEQ ID NO: 29112 - DNA, 20 bp, Artificial Sequence
  Synthetic
agcaaaatcagcacggaaac

SEQ ID NO: 29113 - DNA, 17 bp, Artificial Sequence
  Synthetic
gcggctttggcttccgt

SEQ ID NO: 29114 - DNA, 20 bp, Artificial Sequence
  Synthetic
ccgcattttggacacatgga

SEQ ID NO: 29115 - DNA, 16 bp, Artificial Sequence
  Synthetic
gtttgccgggcagacg

SEQ ID NO: 29116 - DNA, 19 bp, Artificial Sequence
  Synthetic
ggtttggaatgggtgcgtt

SEQ ID NO: 29117 - DNA, 17 bp, Artificial Sequence
  Synthetic
ccgttcctgcccgctat

SEQ ID NO: 29118 - DNA, 17 bp, Artificial Sequence
  Synthetic
ccacgccgtaatacgcg

SEQ ID NO: 29119 - DNA, 18 bp, Artificial Sequence
  Synthetic
tgcagggcgtattgttgc

SEQ ID NO: 29120 - DNA, 16 bp, Artificial Sequence
  Synthetic
tcggtttcccagccgc

SEQ ID NO: 29121 - DNA, 18 bp, Artificial Sequence
  Synthetic
tccgcatccgcacatcaa

SEQ ID NO: 29122 - DNA, 20 bp, Artificial Sequence
  Synthetic
cgaagtattgctcgaccgtc

SEQ ID NO: 29123 - DNA, 16 bp, Artificial Sequence
  Synthetic
tcctgcccacgcttgc

SEQ ID NO: 29124 - DNA, 19 bp, Artificial Sequence
  Synthetic
tttccaccgggcaggctat

SEQ ID NO: 29125 - DNA, 20 bp, Artificial Sequence
  Synthetic
tcgccgcagttgaaaatcga

SEQ ID NO: 29126 - DNA, 18 bp, Artificial Sequence
  Synthetic
atatcggcttggcggttg

SEQ ID NO: 29127 - DNA, 19 bp, Artificial Sequence
  Synthetic
gaaccccatatcggcgaag

SEQ ID NO: 29128 - DNA, 20 bp, Artificial Sequence
  Synthetic
gttgggtttgaacgacggag

SEQ ID NO: 29129 - DNA, 20 bp, Artificial Sequence
  Synthetic
gaaaccgaattggcgcaatt

SEQ ID NO: 29130 - DNA, 17 bp, Artificial Sequence
  Synthetic
ttcggacgttttgccgc

SEQ ID NO: 29131 - DNA, 19 bp, Artificial Sequence
  Synthetic
cgatttgaacgtccgctgg

SEQ ID NO: 29132 - DNA, 19 bp, Artificial Sequence
  Synthetic
gcacaagctgtccgaacat

SEQ ID NO: 29133 - DNA, 19 bp, Artificial Sequence
  Synthetic
tggaacttgggtgtcgttg

SEQ ID NO: 29134 - DNA, 20 bp, Artificial Sequence
  Synthetic
tacgaccatccgttccaatg

SEQ ID NO: 29135 - DNA, 18 bp, Artificial Sequence
  Synthetic
taatgccttcgaatgccc

SEQ ID NO: 29136 - DNA, 18 bp, Artificial Sequence
  Synthetic
tttgggcgtgagtttggc

SEQ ID NO: 29137 - DNA, 17 bp, Artificial Sequence
  Synthetic
cttccaagtcgcgggac

SEQ ID NO: 29138 - DNA, 20 bp, Artificial Sequence
  Synthetic
cgtttccttcctgaccaacc

SEQ ID NO: 29139 - DNA, 19 bp, Artificial Sequence
  Synthetic
acttgtccgccctgaaagg

SEQ ID NO: 29140 - DNA, 19 bp, Artificial Sequence
  Synthetic
ccttcggcaaacagggttt

SEQ ID NO: 29141 - DNA, 18 bp, Artificial Sequence
  Synthetic
atcccatttggcgcaacc

SEQ ID NO: 29142 - DNA, 17 bp, Artificial Sequence
  Synthetic
cgaaacgctggtgtccg

SEQ ID NO: 29143 - DNA, 18 bp, Artificial Sequence
  Synthetic
tgatgacggttgccaacc

SEQ ID NO: 29144 - DNA, 17 bp, Artificial Sequence
  Synthetic
gcgcaagagctgttggg

SEQ ID NO: 29145 - DNA, 20 bp, Artificial Sequence
  Synthetic
cattttttccagcagggcga

SEQ ID NO: 29146 - DNA, 19 bp, Artificial Sequence
  Synthetic
ctgatgtgggacagctcgg

SEQ ID NO: 29147 - DNA, 19 bp, Artificial Sequence
  Synthetic
cgagccggcttatgaggat

SEQ ID NO: 29148 - DNA, 18 bp, Artificial Sequence
  Synthetic
cacgggtttggcgggtac

SEQ ID NO: 29149 - DNA, 19 bp, Artificial Sequence
  Synthetic
agggtaatcaggtgcaggg

SEQ ID NO: 29150 - DNA, 16 bp, Artificial Sequence
  Synthetic
aaaccctcgccccgct

SEQ ID NO: 29151 - DNA, 19 bp, Artificial Sequence
  Synthetic
gaaatcaacctcacgccgc

SEQ ID NO: 29152 - DNA, 20 bp, Artificial Sequence
  Synthetic
aggatttgggtttggcaagt

SEQ ID NO: 29153 - DNA, 19 bp, Artificial Sequence
  Synthetic
tgaccatggaaatggcgga

SEQ ID NO: 29154 - DNA, 16 bp, Artificial Sequence
  Synthetic
ccggcggcgaaaaagc

SEQ ID NO: 29155 - DNA, 18 bp, Artificial Sequence
  Synthetic
caaaccaagctgccgcag

SEQ ID NO: 29156 - DNA, 15 bp, Artificial Sequence
  Synthetic
tctggcgcgcaccaa

SEQ ID NO: 29157 - DNA, 16 bp, Artificial Sequence
  Synthetic
tgccgaacgcctgcac

SEQ ID NO: 29158 - DNA, 20 bp, Artificial Sequence
  Synthetic
gcctgaagcagcaacacatt

SEQ ID NO: 29159 - DNA, 19 bp, Artificial Sequence
  Synthetic
cgtctgcccgaattggaag

SEQ ID NO: 29160 - DNA, 18 bp, Artificial Sequence
  Synthetic
cgttttgtgcggcaaccg

SEQ ID NO: 29161 - DNA, 16 bp, Artificial Sequence
  Synthetic
attgcccatcgcgccg

SEQ ID NO: 29162 - DNA, 16 bp, Artificial Sequence
  Synthetic
gtcggcaagcgggttg

SEQ ID NO: 29163 - DNA, 19 bp, Artificial Sequence
  Synthetic
tcgtcaaaggggacaaacg

SEQ ID NO: 29164 - DNA, 17 bp, Artificial Sequence
  Synthetic
tcggaagggatgccgac

SEQ ID NO: 29165 - DNA, 18 bp, Artificial Sequence
  Synthetic
tgtccgtagtcgcattgc

SEQ ID NO: 29166 - DNA, 16 bp, Artificial Sequence
  Synthetic
ttcggtcagcggctcg

SEQ ID NO: 29167 - DNA, 20 bp, Artificial Sequence
  Synthetic
acggtttatcctcctcacga

SEQ ID NO: 29168 - DNA, 18 bp, Artificial Sequence
  Synthetic
gtctcgacctcaacggcg

SEQ ID NO: 29169 - DNA, 18 bp, Artificial Sequence
  Synthetic
aaattcaccgccgaagcc

SEQ ID NO: 29170 - DNA, 18 bp, Artificial Sequence
  Synthetic
tgaaacacgccaatccgt

SEQ ID NO: 29171 - DNA, 18 bp, Artificial Sequence
  Synthetic
gctgcacactggaagacg

SEQ ID NO: 29172 - DNA, 19 bp, Artificial Sequence
  Synthetic
acagcgtcttccccgaaat

SEQ ID NO: 29173 - DNA, 19 bp, Artificial Sequence
  Synthetic
gtgtataacgtgccgctcg

SEQ ID NO: 29174 - DNA, 18 bp, Artificial Sequence
  Synthetic
gcgacggtgcgaacgata

SEQ ID NO: 29175 - DNA, 18 bp, Artificial Sequence
  Synthetic
gttcaggaaaggcattgc

SEQ ID NO: 29176 - DNA, 19 bp, Artificial Sequence
  Synthetic
agatgctttgatgtcggtt

SEQ ID NO: 29177 - DNA, 19 bp, Artificial Sequence
  Synthetic
tttctatccgccgtttgtc

SEQ ID NO: 29178 - DNA, 20 bp, Artificial Sequence
  Synthetic
tttcaaggatttccaaacgg

SEQ ID NO: 29179 - DNA, 18 bp, Artificial Sequence
  Synthetic
tgttccaatgcttcggag

SEQ ID NO: 29180 - DNA, 20 bp, Artificial Sequence
  Synthetic
cttcggtatctgcaatcggc

SEQ ID NO: 29181 - DNA, 21 bp, Artificial Sequence
  Synthetic
gaaaataggtaattgccaccg

SEQ ID NO: 29182 - DNA, 19 bp, Artificial Sequence
  Synthetic
cgtctgaaacaaccaacca

SEQ ID NO: 29183 - DNA, 24 bp, Artificial Sequence
  Synthetic
gttaaatattgctgataagtgcca

SEQ ID NO: 29184 - DNA, 19 bp, Artificial Sequence
  Synthetic
catcacatcggcaatcagt

SEQ ID NO: 29185 - DNA, 23 bp, Artificial Sequence
  Synthetic
tgacagaaagtgtgtaaaaactc

SEQ ID NO: 29186 - DNA, 19 bp, Artificial Sequence
  Synthetic
ctgccataaataaaccgcg

SEQ ID NO: 29187 - DNA, 18 bp, Artificial Sequence
  Synthetic
ttaacgggcaactttcct

SEQ ID NO: 29188 - DNA, 18 bp, Artificial Sequence
  Synthetic
ccctggttttggcactgc

SEQ ID NO: 29189 - DNA, 18 bp, Artificial Sequence
  Synthetic
tacgccgccgttccaaat

SEQ ID NO: 29190 - DNA, 20 bp, Artificial Sequence
  Synthetic
aaaggatgatgattgggagg

SEQ ID NO: 29191 - DNA, 19 bp, Artificial Sequence
  Synthetic
gcttcctcgttcggtatgg

SEQ ID NO: 29192 - DNA, 17 bp, Artificial Sequence
  Synthetic
gctttccagcgtcaggc

SEQ ID NO: 29193 - DNA, 17 bp, Artificial Sequence
  Synthetic
tggtcgcgcctttggtg

SEQ ID NO: 29194 - DNA, 18 bp, Artificial Sequence
  Synthetic
tagcgttggacacccgag

SEQ ID NO: 29195 - DNA, 16 bp, Artificial Sequence
  Synthetic
tacctgctcggctcgc

SEQ ID NO: 29196 - DNA, 16 bp, Artificial Sequence
  Synthetic
tcgccaaagccgtcgg

SEQ ID NO: 29197 - DNA, 16 bp, Artificial Sequence
  Synthetic
atgatgtcggcgcgcc

SEQ ID NO: 29198 - DNA, 17 bp, Artificial Sequence
  Synthetic
ttcgtccctgccagcgt

SEQ ID NO: 29199 - DNA, 16 bp, Artificial Sequence
  Synthetic
ctcgccgtcgaacgtc

SEQ ID NO: 29200 - DNA, 20 bp, Artificial Sequence
  Synthetic
gggattgtcgtccaatttgc

SEQ ID NO: 29201 - DNA, 17 bp, Artificial Sequence
  Synthetic
ctggtgttgttggcggg

SEQ ID NO: 29202 - DNA, 18 bp, Artificial Sequence
  Synthetic
gcgtgatgtcgaaaccga

SEQ ID NO: 29203 - DNA, 16 bp, Artificial Sequence
  Synthetic
ccgcgcctgtaaacgg

SEQ ID NO: 29204 - DNA, 17 bp, Artificial Sequence
  Synthetic
cagacggcatcggtgtc

SEQ ID NO: 29205 - DNA, 20 bp, Artificial Sequence
  Synthetic
ctgactttgggcatgatggc

SEQ ID NO: 29206 - DNA, 18 bp, Artificial Sequence
  Synthetic
cctgatgctgcccgaaga

SEQ ID NO: 29207 - DNA, 16 bp, Artificial Sequence
  Synthetic
tgcatcccgttcgccc

SEQ ID NO: 29208 - DNA, 16 bp, Artificial Sequence
  Synthetic
tcgcctcggtcgccat

SEQ ID NO: 29209 - DNA, 19 bp, Artificial Sequence
  Synthetic
tcagcgacgtatccgaagc

SEQ ID NO: 29210 - DNA, 20 bp, Artificial Sequence
  Synthetic
cgatgtccacctacatccgc

SEQ ID NO: 29211 - DNA, 17 bp, Artificial Sequence
  Synthetic
cacgcgcgttttgccac

SEQ ID NO: 29212 - DNA, 20 bp, Artificial Sequence
  Synthetic
ctgccacagacatcgtgttg

SEQ ID NO: 29213 - DNA, 17 bp, Artificial Sequence
  Synthetic
gatacctgcgtcggcac

SEQ ID NO: 29214 - DNA, 18 bp, Artificial Sequence
  Synthetic
cacaggaagcctaccgcc

SEQ ID NO: 29215 - DNA, 20 bp, Artificial Sequence
  Synthetic
tgaagcgatccaaaaaggct

SEQ ID NO: 29216 - DNA, 20 bp, Artificial Sequence
  Synthetic
cgggtagtggcatttttgga

SEQ ID NO: 29217 - DNA, 17 bp, Artificial Sequence
  Synthetic
aggacttcacgcccctg

SEQ ID NO: 29218 - DNA, 20 bp, Artificial Sequence
  Synthetic
tcgatattctggcgctcagt

SEQ ID NO: 29219 - DNA, 17 bp, Artificial Sequence
  Synthetic
gatgttcggcccgtgga

SEQ ID NO: 29220 - DNA, 16 bp, Artificial Sequence
  Synthetic
cggccgccacaatgtc

SEQ ID NO: 29221 - DNA, 17 bp, Artificial Sequence
  Synthetic
gtattcggttgcggcgg

SEQ ID NO: 29222 - DNA, 19 bp, Artificial Sequence
  Synthetic
cattggaagaaaccgcgca

SEQ ID NO: 29223 - DNA, 18 bp, Artificial Sequence
  Synthetic
cgcacgggggaaatcctc

SEQ ID NO: 29224 - DNA, 20 bp, Artificial Sequence
  Synthetic
ttgggtttggaaaactttgt

SEQ ID NO: 29225 - DNA, 19 bp, Artificial Sequence
  Synthetic
gtggggcaaagtgtctctt

SEQ ID NO: 29226 - DNA, 19 bp, Artificial Sequence
  Synthetic
gagcagtcggatgcggaaa

SEQ ID NO: 29227 - DNA, 18 bp, Artificial Sequence
  Synthetic
gggaatggaagcaggttt

SEQ ID NO: 29228 - DNA, 17 bp, Artificial Sequence
  Synthetic
aagtccccagcctgtcc

SEQ ID NO: 29229 - DNA, 17 bp, Artificial Sequence
  Synthetic
agttcgcccatcacgcg

SEQ ID NO: 29230 - DNA, 18 bp, Artificial Sequence
  Synthetic
ttgcgtcttgaggcaggg

SEQ ID NO: 29231 - DNA, 17 bp, Artificial Sequence
  Synthetic
agggcggaagtcgggat

SEQ ID NO: 29232 - DNA, 16 bp, Artificial Sequence
  Synthetic
gcgttttgtccgccgg

SEQ ID NO: 29233 - DNA, 19 bp, Artificial Sequence
  Synthetic
gacgtggttcacaccggtg

SEQ ID NO: 29234 - DNA, 19 bp, Artificial Sequence
  Synthetic
aatcagaagcggtagcgca

SEQ ID NO: 29235 - DNA, 17 bp, Artificial Sequence
  Synthetic
tatagccgcccacgcct

SEQ ID NO: 29236 - DNA, 19 bp, Artificial Sequence
  Synthetic
gggatactgcaccagcgtc

SEQ ID NO: 29237 - DNA, 20 bp, Artificial Sequence
  Synthetic
cgccaaacttttcctcgtca

SEQ ID NO: 29238 - DNA, 16 bp, Artificial Sequence
  Synthetic
tcgaacgccacgccct

SEQ ID NO: 29239 - DNA, 17 bp, Artificial Sequence
  Synthetic
tggcttggcgcgtgatg

SEQ ID NO: 29240 - DNA, 19 bp, Artificial Sequence
  Synthetic
aacccgaagttacccgcaa

SEQ ID NO: 29241 - DNA, 16 bp, Artificial Sequence
  Synthetic
cgtcttccaacgcgcg

SEQ ID NO: 29242 - DNA, 19 bp, Artificial Sequence
  Synthetic
ggaacgtgaaacgggtgtc

SEQ ID NO: 29243 - DNA, 16 bp, Artificial Sequence
  Synthetic
tgtcggtatggcggcg

SEQ ID NO: 29244 - DNA, 18 bp, Artificial Sequence
  Synthetic
agccgcacattatccaag

SEQ ID NO: 29245 - DNA, 15 bp, Artificial Sequence
  Synthetic
ttcggcggcggtttg

SEQ ID NO: 29246 - DNA, 17 bp, Artificial Sequence
  Synthetic
gcatattgcccggccct

SEQ ID NO: 29247 - DNA, 20 bp, Artificial Sequence
  Synthetic
gtccgttgtttttcgtcagg

SEQ ID NO: 29248 - DNA, 20 bp, Artificial Sequence
  Synthetic
tcaaacgactgagccggata

SEQ ID NO: 29249 - DNA, 18 bp, Artificial Sequence
  Synthetic
ttggccaaaccgataccg

SEQ ID NO: 29250 - DNA, 16 bp, Artificial Sequence
  Synthetic
gcaggcagcgtgatgc

SEQ ID NO: 29251 - DNA, 16 bp, Artificial Sequence
  Synthetic
tgcaagggcagggtcg

SEQ ID NO: 29252 - DNA, 18 bp, Artificial Sequence
  Synthetic
caggttcacgctgatgcc

SEQ ID NO: 29253 - DNA, 16 bp, Artificial Sequence
  Synthetic
gcctttgagccggtcg

SEQ ID NO: 29254 - DNA, 19 bp, Artificial Sequence
  Synthetic
caggctgtcaacgtagagc

SEQ ID NO: 29255 - DNA, 18 bp, Artificial Sequence
  Synthetic
acgacggcgagctggtat

SEQ ID NO: 29256 - DNA, 19 bp, Artificial Sequence
  Synthetic
cgaccatttctgcccttgc

SEQ ID NO: 29257 - DNA, 18 bp, Artificial Sequence
  Synthetic
tgatgcgcgaatgggaca

SEQ ID NO: 29258 - DNA, 16 bp, Artificial Sequence
  Synthetic
tcgccctgcaactggg

SEQ ID NO: 29259 - DNA, 18 bp, Artificial Sequence
  Synthetic
gggcattcaggcggacaa

SEQ ID NO: 29260 - DNA, 18 bp, Artificial Sequence
  Synthetic
ccggcagggaagttaagc

SEQ ID NO: 29261 - DNA, 18 bp, Artificial Sequence
  Synthetic
gttcccagcatctcgcac

SEQ ID NO: 29262 - DNA, 20 bp, Artificial Sequence
  Synthetic
ttccgtcgtagtagctttcg

SEQ ID NO: 29263 - DNA, 16 bp, Artificial Sequence
  Synthetic
ttcggacggcatcgcg

SEQ ID NO: 29264 - DNA, 18 bp, Artificial Sequence
  Synthetic
atcccgttcaagttgccg

SEQ ID NO: 29265 - DNA, 16 bp, Artificial Sequence
  Synthetic
tgcccaggctttggcg

SEQ ID NO: 29266 - DNA, 16 bp, Artificial Sequence
  Synthetic
taccggccgccttcag

SEQ ID NO: 29267 - DNA, 19 bp, Artificial Sequence
  Synthetic
ctgaaccttggttttgcct

SEQ ID NO: 29268 - DNA, 18 bp, Artificial Sequence
  Synthetic
tcaggcggctttcctgta

SEQ ID NO: 29269 - DNA, 19 bp, Artificial Sequence
  Synthetic
cggttacggtaatgctgcc

SEQ ID NO: 29270 - DNA, 18 bp, Artificial Sequence
  Synthetic
tgtattcgcgtacctgcg

SEQ ID NO: 29271 - DNA, 19 bp, Artificial Sequence
  Synthetic
acgcacaactgggatacgg

SEQ ID NO: 29272 - DNA, 18 bp, Artificial Sequence
  Synthetic
ccgatgccgacatgatgc

SEQ ID NO: 29273 - DNA, 20 bp, Artificial Sequence
  Synthetic
gttcatcggtcaatccacca

SEQ ID NO: 29274 - DNA, 20 bp, Artificial Sequence
  Synthetic
cggcaaaaacgtccacttga

SEQ ID NO: 29275 - DNA, 16 bp, Artificial Sequence
  Synthetic
cgatacggaagcggcg

SEQ ID NO: 29276 - DNA, 19 bp, Artificial Sequence
  Synthetic
ggcggatttggaagggaaa

SEQ ID NO: 29277 - DNA, 16 bp, Artificial Sequence
  Synthetic
gcgtccgcatcgatgc

SEQ ID NO: 29278 - DNA, 23 bp, Artificial Sequence
  Synthetic
ctgttctactttcaatttttcgc

SEQ ID NO: 29279 - DNA, 18 bp, Artificial Sequence
  Synthetic
cgatgtcttgaccgcgct

SEQ ID NO: 29280 - DNA, 18 bp, Artificial Sequence
  Synthetic
catcgagccgctggtcta

SEQ ID NO: 29281 - DNA, 19 bp, Artificial Sequence
  Synthetic
tccgcataagctcggaagc

SEQ ID NO: 29282 - DNA, 16 bp, Artificial Sequence
  Synthetic
cgtggcgatgtccagc

SEQ ID NO: 29283 - DNA, 19 bp, Artificial Sequence
  Synthetic
ttgatggagcaaaggttgt

SEQ ID NO: 29284 - DNA, 20 bp, Artificial Sequence
  Synthetic
gtaggtcactgccaaacacc

SEQ ID NO: 29285 - DNA, 19 bp, Artificial Sequence
  Synthetic
gcacagtcggacatagacg

SEQ ID NO: 29286 - DNA, 18 bp, Artificial Sequence
  Synthetic
aaatcgtgttccgccgcc

SEQ ID NO: 29287 - DNA, 18 bp, Artificial Sequence
  Synthetic
gaaatcggtcagctgccg

SEQ ID NO: 29288 - DNA, 16 bp, Artificial Sequence
  Synthetic
ttcgggcagccacagc

SEQ ID NO: 29289 - DNA, 19 bp, Artificial Sequence
  Synthetic
tttgcgcgaggaaaacagg

SEQ ID NO: 29290 - DNA, 16 bp, Artificial Sequence
  Synthetic
tcggtgcggatgaggc

SEQ ID NO: 29291 - DNA, 21 bp, Artificial Sequence
  Synthetic
ccatagagctttctacggttt

SEQ ID NO: 29292 - DNA, 17 bp, Artificial Sequence
  Synthetic
cgtgttgggtttcgccg

SEQ ID NO: 29293 - DNA, 20 bp, Artificial Sequence
  Synthetic
caccagcgaagacatcaaca

SEQ ID NO: 29294 - DNA, 16 bp, Artificial Sequence
  Synthetic
gtcatttcgggcggcg

SEQ ID NO: 29295 - DNA, 16 bp, Artificial Sequence
  Synthetic
atggcggcgacttggg

SEQ ID NO: 29296 - DNA, 17 bp, Artificial Sequence
  Synthetic
ccgttgcgccaataccg

SEQ ID NO: 29297 - DNA, 20 bp, Artificial Sequence
  Synthetic
cacaaaatcccgccctcaaa

SEQ ID NO: 29298 - DNA, 16 bp, Artificial Sequence
  Synthetic
ccgcattgctggcagc

SEQ ID NO: 29299 - DNA, 19 bp, Artificial Sequence
  Synthetic
ggcgaaaccctgacctaca

SEQ ID NO: 29300 - DNA, 16 bp, Artificial Sequence
  Synthetic
ttgcggcggaagaggc

SEQ ID NO: 29301 - DNA, 18 bp, Artificial Sequence
  Synthetic
tagtagtcgtgccggtcg

SEQ ID NO: 29302 - DNA, 20 bp, Artificial Sequence
  Synthetic
cggattaaccctttgctcgg

SEQ ID NO: 29303 - DNA, 16 bp, Artificial Sequence
  Synthetic
gcccaagccgtgtacg

SEQ ID NO: 29304 - DNA, 16 bp, Artificial Sequence
  Synthetic
cagccgtagcgttgcg

SEQ ID NO: 29305 - DNA, 18 bp, Artificial Sequence
  Synthetic
gcatcggcaggcggattt

SEQ ID NO: 29306 - DNA, 19 bp, Artificial Sequence
  Synthetic
gatgacgcttttgccgttt

SEQ ID NO: 29307 - DNA, 20 bp, Artificial Sequence
  Synthetic
ccaagaccatacgttcggcg

SEQ ID NO: 29308 - DNA, 16 bp, Artificial Sequence
  Synthetic
agggtttgcaggcgca

SEQ ID NO: 29309 - DNA, 18 bp, Artificial Sequence
  Synthetic
cggagagggtcagcgaag

SEQ ID NO: 29310 - DNA, 19 bp, Artificial Sequence
  Synthetic
tggggttgggtgtggaaat

SEQ ID NO: 29311 - DNA, 20 bp, Artificial Sequence
  Synthetic
acaacttgttcggcgttgac

SEQ ID NO: 29312 - DNA, 20 bp, Artificial Sequence
  Synthetic
ccttcctcacgaccagactg

SEQ ID NO: 29313 - DNA, 19 bp, Artificial Sequence
  Synthetic
acgggtttcatcctgttgg

SEQ ID NO: 29314 - DNA, 17 bp, Artificial Sequence
  Synthetic
ctgctgtcgctgctggt

SEQ ID NO: 29315 - DNA, 18 bp, Artificial Sequence
  Synthetic
cggcgtggaatggtcttt

SEQ ID NO: 29316 - DNA, 20 bp, Artificial Sequence
  Synthetic
ggtgaaaatggaagcggtca

SEQ ID NO: 29317 - DNA, 20 bp, Artificial Sequence
  Synthetic
taccgttaccgccaaaaacc

SEQ ID NO: 29318 - DNA, 18 bp, Artificial Sequence
  Synthetic
gaaagacgcgctggatgc

SEQ ID NO: 29319 - DNA, 17 bp, Artificial Sequence
  Synthetic
cgatgccgaagccgtca

SEQ ID NO: 29320 - DNA, 19 bp, Artificial Sequence
  Synthetic
tcgacaaatcaagcctcgg

SEQ ID NO: 29321 - DNA, 20 bp, Artificial Sequence
  Synthetic
cttgagtccttgaaccagcg

SEQ ID NO: 29322 - DNA, 19 bp, Artificial Sequence
  Synthetic
ggggttttgaaggcggttt

SEQ ID NO: 29323 - DNA, 17 bp, Artificial Sequence
  Synthetic
caggacaagcagggctg

SEQ ID NO: 29324 - DNA, 16 bp, Artificial Sequence
  Synthetic
tggattcccgcctgcg

SEQ ID NO: 29325 - DNA, 18 bp, Artificial Sequence
  Synthetic
ggtaacttggtgcagggc

SEQ ID NO: 29326 - DNA, 16 bp, Artificial Sequence
  Synthetic
tggtcttcgggcgagg

SEQ ID NO: 29327 - DNA, 20 bp, Artificial Sequence
  Synthetic
atttccaccggattcaccaa

SEQ ID NO: 29328 - DNA, 16 bp, Artificial Sequence
  Synthetic
agcgccgatgcctacg

SEQ ID NO: 29329 - DNA, 16 bp, Artificial Sequence
  Synthetic
ctgcaacttcgccccg

SEQ ID NO: 29330 - DNA, 17 bp, Artificial Sequence
  Synthetic
aatcgccgccgtcaaag

SEQ ID NO: 29331 - DNA, 18 bp, Artificial Sequence
  Synthetic
tcgcggtagatggtcagc

SEQ ID NO: 29332 - DNA, 17 bp, Artificial Sequence
  Synthetic
ggcgtgggggttgaact

SEQ ID NO: 29333 - DNA, 18 bp, Artificial Sequence
  Synthetic
ccacttgtttgggcgtgc

SEQ ID NO: 29334 - DNA, 19 bp, Artificial Sequence
  Synthetic
ggatgacttcgtcgagcga

SEQ ID NO: 29335 - DNA, 16 bp, Artificial Sequence
  Synthetic
aaaccgtccgccacgc

SEQ ID NO: 29336 - DNA, 17 bp, Artificial Sequence
  Synthetic
gtttgccgtatcgggcg

SEQ ID NO: 29337 - DNA, 15 bp, Artificial Sequence
  Synthetic
ttgcggacgcgcgtt

SEQ ID NO: 29338 - DNA, 15 bp, Artificial Sequence
  Synthetic
tgcacgttccgcgct

SEQ ID NO: 29339 - DNA, 18 bp, Artificial Sequence
  Synthetic
gtgcctgttcccgatgga

SEQ ID NO: 29340 - DNA, 20 bp, Artificial Sequence
  Synthetic
gagatacggtgcggattccg

SEQ ID NO: 29341 - DNA, 18 bp, Artificial Sequence
  Synthetic
tcgatgccgcggattacg

SEQ ID NO: 29342 - DNA, 20 bp, Artificial Sequence
  Synthetic
aggacgacgttcacatccaa

SEQ ID NO: 29343 - DNA, 20 bp, Artificial Sequence
  Synthetic
gttttccgctgtctgaacgg

SEQ ID NO: 29344 - DNA, 20 bp, Artificial Sequence
  Synthetic
tcataaatcagtgcgtcgcc

SEQ ID NO: 29345 - DNA, 18 bp, Artificial Sequence
  Synthetic
gcccatgccttcaatgcg

SEQ ID NO: 29346 - DNA, 16 bp, Artificial Sequence
  Synthetic
acagcttcgggcaggg

SEQ ID NO: 29347 - DNA, 16 bp, Artificial Sequence
  Synthetic
caaacgtccgccgagc

SEQ ID NO: 29348 - DNA, 20 bp, Artificial Sequence
  Synthetic
gaggttttcagacggcatcg

SEQ ID NO: 29349 - DNA, 19 bp, Artificial Sequence
  Synthetic
ccggcgtttatcaggtctt

SEQ ID NO: 29350 - DNA, 20 bp, Artificial Sequence
  Synthetic
gacatgagtgcgaacatcct

SEQ ID NO: 29351 - DNA, 20 bp, Artificial Sequence
  Synthetic
agcatgaaacgccacatcag

SEQ ID NO: 29352 - DNA, 19 bp, Artificial Sequence
  Synthetic
catcatggaggggctgatg

SEQ ID NO: 29353 - DNA, 16 bp, Artificial Sequence
  Synthetic
gttgatgagggcggcg

SEQ ID NO: 29354 - DNA, 17 bp, Artificial Sequence
  Synthetic
gttcgtgggcatccagc

SEQ ID NO: 29355 - DNA, 17 bp, Artificial Sequence
  Synthetic
tcagcatgggcatcggc

SEQ ID NO: 29356 - DNA, 16 bp, Artificial Sequence
  Synthetic
tgcgccttcccagctc

SEQ ID NO: 29357 - DNA, 18 bp, Artificial Sequence
  Synthetic
agaaaccggtggcgtaca

SEQ ID NO: 29358 - DNA, 18 bp, Artificial Sequence
  Synthetic
aggtgtttgccgctttcg

SEQ ID NO: 29359 - DNA, 19 bp, Artificial Sequence
  Synthetic
gccgtatttggtggccatg

SEQ ID NO: 29360 - DNA, 20 bp, Artificial Sequence
  Synthetic
gcggtaaatcaagccctgtt

SEQ ID NO: 29361 - DNA, 20 bp, Artificial Sequence
  Synthetic
cgatcaaatcctgcaacacg

SEQ ID NO: 29362 - DNA, 19 bp, Artificial Sequence
  Synthetic
ttgcaggggtaaatatccc

SEQ ID NO: 29363 - DNA, 21 bp, Artificial Sequence
  Synthetic
tgtctaagttgcatactcctg

SEQ ID NO: 29364 - DNA, 20 bp, Artificial Sequence
  Synthetic
atgcaaccaaatgacgttta

SEQ ID NO: 29365 - DNA, 19 bp, Artificial Sequence
  Synthetic
aatccccaagcaatcaatg

SEQ ID NO: 29366 - DNA, 16 bp, Artificial Sequence
  Synthetic
atcggcgtgcctgtcg

SEQ ID NO: 29367 - DNA, 19 bp, Artificial Sequence
  Synthetic
actttattgcgacccacgg

SEQ ID NO: 29368 - DNA, 19 bp, Artificial Sequence
  Synthetic
ctgcaccacttggttgacg

SEQ ID NO: 29369 - DNA, 19 bp, Artificial Sequence
  Synthetic
tggaaaacacccgcttcaa

SEQ ID NO: 29370 - DNA, 19 bp, Artificial Sequence
  Synthetic
caggttacgctggtggtcg

SEQ ID NO: 29371 - DNA, 17 bp, Artificial Sequence
  Synthetic
gtatcggcgcggcttct

SEQ ID NO: 29372 - DNA, 18 bp, Artificial Sequence
  Synthetic
cccgaagacaacggcaac

SEQ ID NO: 29373 - DNA, 18 bp, Artificial Sequence
  Synthetic
cggtgtcttccggcattt

SEQ ID NO: 29374 - DNA, 20 bp, Artificial Sequence
  Synthetic
caggtcttggaaatcggggt

SEQ ID NO: 29375 - DNA, 17 bp, Artificial Sequence
  Synthetic
tctttttccgcagccgc

SEQ ID NO: 29376 - DNA, 16 bp, Artificial Sequence
  Synthetic
tggtcgccggaatgca

SEQ ID NO: 29377 - DNA, 16 bp, Artificial Sequence
  Synthetic
gtctgccgcccattcg

SEQ ID NO: 29378 - DNA, 19 bp, Artificial Sequence
  Synthetic
tgaccttttctcaggagca

SEQ ID NO: 29379 - DNA, 18 bp, Artificial Sequence
  Synthetic
tccatcaggacggcttgg

SEQ ID NO: 29380 - DNA, 16 bp, Artificial Sequence
  Synthetic
tgtttccctgcgcggc

SEQ ID NO: 29381 - DNA, 16 bp, Artificial Sequence
  Synthetic
gctcatcgccatcggc

SEQ ID NO: 29382 - DNA, 17 bp, Artificial Sequence
  Synthetic
cttttggacgacggcgc

SEQ ID NO: 29383 - DNA, 19 bp, Artificial Sequence
  Synthetic
ggtattgccgtgccgtatt

SEQ ID NO: 29384 - DNA, 19 bp, Artificial Sequence
  Synthetic
atttgcattgcgaactgcc

SEQ ID NO: 29385 - DNA, 23 bp, Artificial Sequence
  Synthetic
gcatatctgaaaagtgtattccg

SEQ ID NO: 29386 - DNA, 20 bp, Artificial Sequence
  Synthetic
cgtgcaaaaatatccgcacc

SEQ ID NO: 29387 - DNA, 17 bp, Artificial Sequence
  Synthetic
acggcggtcagcgattc

SEQ ID NO: 29388 - DNA, 16 bp, Artificial Sequence
  Synthetic
ggtgttggcgtggagc

SEQ ID NO: 29389 - DNA, 20 bp, Artificial Sequence
  Synthetic
cggttgtccaaatcgaccag

SEQ ID NO: 29390 - DNA, 19 bp, Artificial Sequence
  Synthetic
gagtgcttcgtaggcgttg

SEQ ID NO: 29391 - DNA, 17 bp, Artificial Sequence
  Synthetic
gctgtgtcggagttggc

SEQ ID NO: 29392 - DNA, 18 bp, Artificial Sequence
  Synthetic
gcttcgacgatggtgcag

SEQ ID NO: 29393 - DNA, 20 bp, Artificial Sequence
  Synthetic
ccagagtttggtttcgacgg

SEQ ID NO: 29394 - DNA, 20 bp, Artificial Sequence
  Synthetic
aaggtggaactgtgcggtaa

SEQ ID NO: 29395 - DNA, 17 bp, Artificial Sequence
  Synthetic
agttgccgggcgatgag

SEQ ID NO: 29396 - DNA, 20 bp, Artificial Sequence
  Synthetic
cgcaggcagtacaaatggta

SEQ ID NO: 29397 - DNA, 20 bp, Artificial Sequence
  Synthetic
attcttgtttgccgccttcg

SEQ ID NO: 29398 - DNA, 16 bp, Artificial Sequence
  Synthetic
atcgccaccatcgggc

SEQ ID NO: 29399 - DNA, 17 bp, Artificial Sequence
  Synthetic
accggcggctttaagca

SEQ ID NO: 29400 - DNA, 19 bp, Artificial Sequence
  Synthetic
cactacttctcgctgcacg

SEQ ID NO: 29401 - DNA, 18 bp, Artificial Sequence
  Synthetic
tctaccacggcgcagaag

SEQ ID NO: 29402 - DNA, 19 bp, Artificial Sequence
  Synthetic
gtctgttcgagttggcaca

SEQ ID NO: 29403 - DNA, 18 bp, Artificial Sequence
  Synthetic
acagtatctggcgcgcct

SEQ ID NO: 29404 - DNA, 21 bp, Artificial Sequence
  Synthetic
cataagccgcaatatcaagtt

SEQ ID NO: 29405 - DNA, 18 bp, Artificial Sequence
  Synthetic
tttcaacagatacgccgc

SEQ ID NO: 29406 - DNA, 20 bp, Artificial Sequence
  Synthetic
tgataaaccaaatctgcggt

SEQ ID NO: 29407 - DNA, 20 bp, Artificial Sequence
  Synthetic
tgaagtaaaggctgcaattg

SEQ ID NO: 29408 - DNA, 19 bp, Artificial Sequence
  Synthetic
gtaaaaacctgccccaccc

SEQ ID NO: 29409 - DNA, 17 bp, Artificial Sequence
  Synthetic
gaagggacggcggaact

SEQ ID NO: 29410 - DNA, 19 bp, Artificial Sequence
  Synthetic
cgatttgggcatcggcaac

SEQ ID NO: 29411 - DNA, 16 bp, Artificial Sequence
  Synthetic
cctacgggcacaacgc

SEQ ID NO: 29412 - DNA, 20 bp, Artificial Sequence
  Synthetic
agacatccgttcgctcgatt

SEQ ID NO: 29413 - DNA, 20 bp, Artificial Sequence
  Synthetic
gtgttcgacaccgtcaacat

SEQ ID NO: 29414 - DNA, 20 bp, Artificial Sequence
  Synthetic
gcagtatgtttcctcggctg

SEQ ID NO: 29415 - DNA, 18 bp, Artificial Sequence
  Synthetic
cgacggcaaaatcgggac

SEQ ID NO: 29416 - DNA, 16 bp, Artificial Sequence
  Synthetic
ggtatgtgcgcgaccg

SEQ ID NO: 29417 - DNA, 16 bp, Artificial Sequence
  Synthetic
cttctccggcggttgc

SEQ ID NO: 29418 - DNA, 19 bp, Artificial Sequence
  Synthetic
cttgtagctgcaatgaacg

SEQ ID NO: 29419 - DNA, 18 bp, Artificial Sequence
  Synthetic
agtctgccaccctatccg

SEQ ID NO: 29420 - DNA, 20 bp, Artificial Sequence
  Synthetic
ctctatgatggcgggcatag

SEQ ID NO: 29421 - DNA, 17 bp, Artificial Sequence
  Synthetic
caacacaccgacagccc

SEQ ID NO: 29422 - DNA, 16 bp, Artificial Sequence
  Synthetic
gcgcgcaaaccgatga

SEQ ID NO: 29423 - DNA, 17 bp, Artificial Sequence
  Synthetic
cgacggcggcaaaatcg

SEQ ID NO: 29424 - DNA, 18 bp, Artificial Sequence
  Synthetic
attgttttggggcgcggt

SEQ ID NO: 29425 - DNA, 18 bp, Artificial Sequence
  Synthetic
atgcagggtggtgaaggg

SEQ ID NO: 29426 - DNA, 18 bp, Artificial Sequence
  Synthetic
gcgggattgacggtttcg

SEQ ID NO: 29427 - DNA, 20 bp, Artificial Sequence
  Synthetic
caagttcgggcgtaaccatc

SEQ ID NO: 29428 - DNA, 17 bp, Artificial Sequence
  Synthetic
gcccgccaaagttaccg

SEQ ID NO: 29429 - DNA, 20 bp, Artificial Sequence
  Synthetic
cggcctgttccaaaacgatt

SEQ ID NO: 29430 - DNA, 16 bp, Artificial Sequence
  Synthetic
aattgctgctggcgcg

SEQ ID NO: 29431 - DNA, 18 bp, Artificial Sequence
  Synthetic
cagccgccaatagccgtc

SEQ ID NO: 29432 - DNA, 20 bp, Artificial Sequence
  Synthetic
tgatttgcgtttccaaaccc

SEQ ID NO: 29433 - DNA, 18 bp, Artificial Sequence
  Synthetic
acttgagccggctgttcc

SEQ ID NO: 29434 - DNA, 18 bp, Artificial Sequence
  Synthetic
aaccgtcatacgcgacac

SEQ ID NO: 29435 - DNA, 16 bp, Artificial Sequence
  Synthetic
cccgaatccgcgctca

SEQ ID NO: 29436 - DNA, 16 bp, Artificial Sequence
  Synthetic
cgggcttgggtttgcc

SEQ ID NO: 29437 - DNA, 17 bp, Artificial Sequence
  Synthetic
cgccggtttgcgtttgg

SEQ ID NO: 29438 - DNA, 20 bp, Artificial Sequence
  Synthetic
agacctgcaagcccaatacg

SEQ ID NO: 29439 - DNA, 17 bp, Artificial Sequence
  Synthetic
tgggcaggcagagcatt

SEQ ID NO: 29440 - DNA, 16 bp, Artificial Sequence
  Synthetic
gcccgccgtttcagac

SEQ ID NO: 29441 - DNA, 18 bp, Artificial Sequence
  Synthetic
ctccttcatcttccgccg

SEQ ID NO: 29442 - DNA, 20 bp, Artificial Sequence
  Synthetic
tgtttggcgatgacggtaac

SEQ ID NO: 29443 - DNA, 18 bp, Artificial Sequence
  Synthetic
ccggattcaggcacaggg

SEQ ID NO: 29444 - DNA, 18 bp, Artificial Sequence
  Synthetic
ggtcgactttgccggaac

SEQ ID NO: 29445 - DNA, 20 bp, Artificial Sequence
  Synthetic
agtggaaaaggacgaaccga

SEQ ID NO: 29446 - DNA, 16 bp, Artificial Sequence
  Synthetic
tatggtcgtgccgccc

SEQ ID NO: 29447 - DNA, 18 bp, Artificial Sequence
  Synthetic
catcgtcggctgcacaca

SEQ ID NO: 29448 - DNA, 15 bp, Artificial Sequence
  Synthetic
atggcgcggcggtaa

SEQ ID NO: 29449 - DNA, 20 bp, Artificial Sequence
  Synthetic
cagtttggcatcagggtctt

SEQ ID NO: 29450 - DNA, 18 bp, Artificial Sequence
  Synthetic
cattttgccccgatgcgg

SEQ ID NO: 29451 - DNA, 19 bp, Artificial Sequence
  Synthetic
tgcttctcaatccggcaac

SEQ ID NO: 29452 - DNA, 16 bp, Artificial Sequence
  Synthetic
aacccaagccgacgcg

SEQ ID NO: 29453 - DNA, 20 bp, Artificial Sequence
  Synthetic
gccaaacgggttttccttac

SEQ ID NO: 29454 - DNA, 19 bp, Artificial Sequence
  Synthetic
cctttatatacgcggccgg

SEQ ID NO: 29455 - DNA, 19 bp, Artificial Sequence
  Synthetic
atggcgtagaacggtgtga

SEQ ID NO: 29456 - DNA, 25 bp, Artificial Sequence
  Synthetic
gtttcagaccttttcctaattcaat

SEQ ID NO: 29457 - DNA, 16 bp, Artificial Sequence
  Synthetic
tttcctgccctgccgc

SEQ ID NO: 29458 - DNA, 16 bp, Artificial Sequence
  Synthetic
tcaggtgggcgcaacc

SEQ ID NO: 29459 - DNA, 16 bp, Artificial Sequence
  Synthetic
actgggaggcaggctg

SEQ ID NO: 29460 - DNA, 20 bp, Artificial Sequence
  Synthetic
gcttaagcggaattggtcgc

SEQ ID NO: 29461 - DNA, 20 bp, Artificial Sequence
  Synthetic
gcgtgaaaacggttcggtaa

SEQ ID NO: 29462 - DNA, 17 bp, Artificial Sequence
  Synthetic
cgaacgcctgcacgaag

SEQ ID NO: 29463 - DNA, 16 bp, Artificial Sequence
  Synthetic
cggcctcaaacgcctc

SEQ ID NO: 29464 - DNA, 18 bp, Artificial Sequence
  Synthetic
agcccttgtccgcatcag

SEQ ID NO: 29465 - DNA, 16 bp, Artificial Sequence
  Synthetic
gccgcacctgtccatg

SEQ ID NO: 29466 - DNA, 16 bp, Artificial Sequence
  Synthetic
gcggcagccaaaaccc

SEQ ID NO: 29467 - DNA, 16 bp, Artificial Sequence
  Synthetic
ccgccgttgtgcgaaa

SEQ ID NO: 29468 - DNA, 25 bp, Artificial Sequence
  Synthetic
gataataaaaattctggcaaccatc

SEQ ID NO: 29469 - DNA, 17 bp, Artificial Sequence
  Synthetic
aatcccgaacccgaccc

SEQ ID NO: 29470 - DNA, 15 bp, Artificial Sequence
  Synthetic
aacgacgccggcaac

SEQ ID NO: 29471 - DNA, 18 bp, Artificial Sequence
  Synthetic
gttttcctggatggcggc

SEQ ID NO: 29472 - DNA, 16 bp, Artificial Sequence
  Synthetic
actgacccgccgcttc

SEQ ID NO: 29473 - DNA, 18 bp, Artificial Sequence
  Synthetic
gcccttaccgcccatcaa

SEQ ID NO: 29474 - DNA, 20 bp, Artificial Sequence
  Synthetic
atcctcaactggtcgctcaa

SEQ ID NO: 29475 - DNA, 19 bp, Artificial Sequence
  Synthetic
cagcaccacaaaccagacc

SEQ ID NO: 29476 - DNA, 19 bp, Artificial Sequence
  Synthetic
ttggaaaaacaccgcccga

SEQ ID NO: 29477 - DNA, 17 bp, Artificial Sequence
  Synthetic
tcttccaaccctccgcc

SEQ ID NO: 29478 - DNA, 16 bp, Artificial Sequence
  Synthetic
aagctcgccgttgccg

SEQ ID NO: 29479 - DNA, 20 bp, Artificial Sequence
  Synthetic
cttgggctacctgcaccata

SEQ ID NO: 29480 - DNA, 16 bp, Artificial Sequence
  Synthetic
catcttcgtcggcggc

SEQ ID NO: 29481 - DNA, 20 bp, Artificial Sequence
  Synthetic
caccggtatggaaacactgc

SEQ ID NO: 29482 - DNA, 20 bp, Artificial Sequence
  Synthetic
atggttgccgagattgtcct

SEQ ID NO: 29483 - DNA, 17 bp, Artificial Sequence
  Synthetic
caacaggcgcaaaacgg

SEQ ID NO: 29484 - DNA, 16 bp, Artificial Sequence
  Synthetic
ctgcggcaagaccacc

SEQ ID NO: 29485 - DNA, 20 bp, Artificial Sequence
  Synthetic
gttggaaaaaaccgtggacg

SEQ ID NO: 29486 - DNA, 19 bp, Artificial Sequence
  Synthetic
tgattttgggtctgccgac

SEQ ID NO: 29487 - DNA, 20 bp, Artificial Sequence
  Synthetic
gtcatgctgcccatcgtatt

SEQ ID NO: 29488 - DNA, 17 bp, Artificial Sequence
  Synthetic
ccgccgccaaagtcaga

SEQ ID NO: 29489 - DNA, 16 bp, Artificial Sequence
  Synthetic
acggcattcacgcccg

SEQ ID NO: 29490 - DNA, 18 bp, Artificial Sequence
  Synthetic
ggcaataagacgggacat

SEQ ID NO: 29491 - DNA, 16 bp, Artificial Sequence
  Synthetic
tgctgctggggcggta

SEQ ID NO: 29492 - DNA, 20 bp, Artificial Sequence
  Synthetic
ccccattttggagacaccct

SEQ ID NO: 29493 - DNA, 19 bp, Artificial Sequence
  Synthetic
gaacactggagcttcagcg

SEQ ID NO: 29494 - DNA, 19 bp, Artificial Sequence
  Synthetic
tcatgcagtcggtcgtcag

SEQ ID NO: 29495 - DNA, 16 bp, Artificial Sequence
  Synthetic
accggctcgaaccagc

SEQ ID NO: 29496 - DNA, 18 bp, Artificial Sequence
  Synthetic
ggtaaacacgacgcaggc

SEQ ID NO: 29497 - DNA, 16 bp, Artificial Sequence
  Synthetic
ttccctctgaccggcc

SEQ ID NO: 29498 - DNA, 15 bp, Artificial Sequence
  Synthetic
gcgcagtgccgaaca

SEQ ID NO: 29499 - DNA, 17 bp, Artificial Sequence
  Synthetic
catcggcaactcggcac

SEQ ID NO: 29500 - DNA, 16 bp, Artificial Sequence
  Synthetic
aagcggcatccgggac

SEQ ID NO: 29501 - DNA, 20 bp, Artificial Sequence
  Synthetic
gatccgaaatacaccaccgc

SEQ ID NO: 29502 - DNA, 18 bp, Artificial Sequence
  Synthetic
ccgcatccgtttgaagcc

SEQ ID NO: 29503 - DNA, 20 bp, Artificial Sequence
  Synthetic
gctttatacgggcagcatcg

SEQ ID NO: 29504 - DNA, 18 bp, Artificial Sequence
  Synthetic
accgaaccgatgaaaggc

SEQ ID NO: 29505 - DNA, 16 bp, Artificial Sequence
  Synthetic
tttgccgactgcgccg

SEQ ID NO: 29506 - DNA, 16 bp, Artificial Sequence
  Synthetic
gcgctacggcaaccct

SEQ ID NO: 29507 - DNA, 16 bp, Artificial Sequence
  Synthetic
tctgcggcggttttgc

SEQ ID NO: 29508 - DNA, 18 bp, Artificial Sequence
  Synthetic
cggcggtatagacggcag

SEQ ID NO: 29509 - DNA, 17 bp, Artificial Sequence
  Synthetic
gggtgcgtggcttttcg

SEQ ID NO: 29510 - DNA, 16 bp, Artificial Sequence
  Synthetic
gctcaggcggaatggc

SEQ ID NO: 29511 - DNA, 17 bp, Artificial Sequence
  Synthetic
gcaacgatgcctggagg

SEQ ID NO: 29512 - DNA, 20 bp, Artificial Sequence
  Synthetic
ttgccggtgctttgaatcag

SEQ ID NO: 29513 - DNA, 18 bp, Artificial Sequence
  Synthetic
tcggcgacaacctcttga

SEQ ID NO: 29514 - DNA, 16 bp, Artificial Sequence
  Synthetic
cattcgaccagcgcgg

SEQ ID NO: 29515 - DNA, 19 bp, Artificial Sequence
  Synthetic
caaaatacccaaggcggcg

SEQ ID NO: 29516 - DNA, 18 bp, Artificial Sequence
  Synthetic
ttcgtcctgttgcagcag

SEQ ID NO: 29517 - DNA, 17 bp, Artificial Sequence
  Synthetic
ccccaaacggtgcagtc

SEQ ID NO: 29518 - DNA, 17 bp, Artificial Sequence
  Synthetic
agccgactgttcctgcc

SEQ ID NO: 29519 - DNA, 18 bp, Artificial Sequence
  Synthetic
ccgaccgcttcatctgcg

SEQ ID NO: 29520 - DNA, 19 bp, Artificial Sequence
  Synthetic
cggggcattaccgtcaact

SEQ ID NO: 29521 - DNA, 17 bp, Artificial Sequence
  Synthetic
gcccatcggatcgaacg

SEQ ID NO: 29522 - DNA, 20 bp, Artificial Sequence
  Synthetic
caaatgtacgcccccatcaa

SEQ ID NO: 29523 - DNA, 19 bp, Artificial Sequence
  Synthetic
gccctgattgccattttcg

SEQ ID NO: 29524 - DNA, 17 bp, Artificial Sequence
  Synthetic
actcgcccggacaagtc

SEQ ID NO: 29525 - DNA, 19 bp, Artificial Sequence
  Synthetic
gtccgccggaaattcgaca

SEQ ID NO: 29526 - DNA, 18 bp, Artificial Sequence
  Synthetic
ccatatctcgcacacagc

SEQ ID NO: 29527 - DNA, 21 bp, Artificial Sequence
  Synthetic
aatggcaaaagatgtagcaag

SEQ ID NO: 29528 - DNA, 22 bp, Artificial Sequence
  Synthetic
ctgaacattatggttttcagct

SEQ ID NO: 29529 - DNA, 25 bp, Artificial Sequence
  Synthetic
cccattgaatcattttagaaagttc

SEQ ID NO: 29530 - DNA, 20 bp, Artificial Sequence
  Synthetic
gcaaattgatcagagcttgt

SEQ ID NO: 29531 - DNA, 19 bp, Artificial Sequence
  Synthetic
cagacctcctagaagagct

SEQ ID NO: 29532 - DNA, 21 bp, Artificial Sequence
  Synthetic
gtgtttcttcttgtgtaaccc

SEQ ID NO: 29533 - DNA, 18 bp, Artificial Sequence
  Synthetic
acactgcgtctattgtgg

SEQ ID NO: 29534 - DNA, 18 bp, Artificial Sequence
  Synthetic
gtgtcaaaggcgggattt

SEQ ID NO: 29535 - DNA, 22 bp, Artificial Sequence
  Synthetic
tctgttacaggatgatacacta

SEQ ID NO: 29536 - DNA, 19 bp, Artificial Sequence
  Synthetic
cgatccagtaaagggtgac

SEQ ID NO: 29537 - DNA, 18 bp, Artificial Sequence
  Synthetic
gaggagtaccatcagctg

SEQ ID NO: 29538 - DNA, 24 bp, Artificial Sequence
  Synthetic
tatctgtaagtatcttccaaaccc

SEQ ID NO: 29539 - DNA, 22 bp, Artificial Sequence
  Synthetic
aggaaacagaatgattcaacat

SEQ ID NO: 29540 - DNA, 25 bp, Artificial Sequence
  Synthetic
gaaaatctgaatacatgaagcatac

SEQ ID NO: 29541 - DNA, 21 bp, Artificial Sequence
  Synthetic
tggatgtgtgtattctcagat

SEQ ID NO: 29542 - DNA, 18 bp, Artificial Sequence
  Synthetic
tattccctccccttcgtg

SEQ ID NO: 29543 - DNA, 22 bp, Artificial Sequence
  Synthetic
tgtctctacagttgtcaaagtc

SEQ ID NO: 29544 - DNA, 25 bp, Artificial Sequence
  Synthetic
atacccccttcattatatattctgt

SEQ ID NO: 29545 - DNA, 19 bp, Artificial Sequence
  Synthetic
aggacacagtacttctccc

SEQ ID NO: 29546 - DNA, 18 bp, Artificial Sequence
  Synthetic
ctgcagaccttcccaatg

SEQ ID NO: 29547 - DNA, 16 bp, Artificial Sequence
  Synthetic
ctagccccgctgctct

SEQ ID NO: 29548 - DNA, 16 bp, Artificial Sequence
  Synthetic
tcccgccattcctggg

SEQ ID NO: 29549 - DNA, 18 bp, Artificial Sequence
  Synthetic
tttcctcttcgggtcggc

SEQ ID NO: 29550 - DNA, 17 bp, Artificial Sequence
  Synthetic
aagaatagccggcccgc

SEQ ID NO: 29551 - DNA, 18 bp, Artificial Sequence
  Synthetic
aaggatggagagggggct

SEQ ID NO: 29552 - DNA, 19 bp, Artificial Sequence
  Synthetic
acacactgtacctgcaaat

SEQ ID NO: 29553 - DNA, 19 bp, Artificial Sequence
  Synthetic
gccctgctatttcgtgaaa

SEQ ID NO: 29554 - DNA, 18 bp, Artificial Sequence
  Synthetic
tcttgtccagcttgtctg

SEQ ID NO: 29555 - DNA, 22 bp, Artificial Sequence
  Synthetic
attgtctgtttcatcatctgat

SEQ ID NO: 29556 - DNA, 19 bp, Artificial Sequence
  Synthetic
tgtattctgctgactgtcg

SEQ ID NO: 29557 - DNA, 18 bp, Artificial Sequence
  Synthetic
tattttctcctggcacgc

SEQ ID NO: 29558 - DNA, 22 bp, Artificial Sequence
  Synthetic
aacaatgtttaggttctgtcat

SEQ ID NO: 29559 - DNA, 18 bp, Artificial Sequence
  Synthetic
accacacacatgtacagc

SEQ ID NO: 29560 - DNA, 19 bp, Artificial Sequence
  Synthetic
ggcctccacttgtactgtg

SEQ ID NO: 29561 - DNA, 18 bp, Artificial Sequence
  Synthetic
gatgtccaacacagcagg

SEQ ID NO: 29562 - DNA, 21 bp, Artificial Sequence
  Synthetic
ttccactacgtgttttcatag

SEQ ID NO: 29563 - DNA, 24 bp, Artificial Sequence
  Synthetic
gtaacattggtagtggaagtatta

SEQ ID NO: 29564 - DNA, 18 bp, Artificial Sequence
  Synthetic
ttgacaacccgagacaca

SEQ ID NO: 29565 - DNA, 19 bp, Artificial Sequence
  Synthetic
acttcaacaccaacacagg

SEQ ID NO: 29566 - DNA, 21 bp, Artificial Sequence
  Synthetic
gtatcaatcatatcgccatcc

SEQ ID NO: 29567 - DNA, 18 bp, Artificial Sequence
  Synthetic
agaagatgtagggggctc

SEQ ID NO: 29568 - DNA, 21 bp, Artificial Sequence
  Synthetic
aacacataaccatgcatacat

SEQ ID NO: 29569 - DNA, 18 bp, Artificial Sequence
  Synthetic
gggccatccaagtcaagc

SEQ ID NO: 29570 - DNA, 18 bp, Artificial Sequence
  Synthetic
gcgcaggtacaggacttg

SEQ ID NO: 29571 - DNA, 20 bp, Artificial Sequence
  Synthetic
caggccaaagatagcagaca

SEQ ID NO: 29572 - DNA, 18 bp, Artificial Sequence
  Synthetic
cacaggtcacaagagcgc

SEQ ID NO: 29573 - DNA, 18 bp, Artificial Sequence
  Synthetic
atagtgcagtacgatggc

SEQ ID NO: 29574 - DNA, 19 bp, Artificial Sequence
  Synthetic
cctgtggctaggtctttca

SEQ ID NO: 29575 - DNA, 20 bp, Artificial Sequence
  Synthetic
tgagcaaagaagccaaaacg

SEQ ID NO: 29576 - DNA, 25 bp, Artificial Sequence
  Synthetic
cactaagaggaaaaacttaagaaca

SEQ ID NO: 29577 - DNA, 19 bp, Artificial Sequence
  Synthetic
tgccacgttcagagagaca

SEQ ID NO: 29578 - DNA, 18 bp, Artificial Sequence
  Synthetic
accaatgaccccagtcgt

SEQ ID NO: 29579 - DNA, 18 bp, Artificial Sequence
  Synthetic
tcgcgtgcatgtactttg

SEQ ID NO: 29580 - DNA, 23 bp, Artificial Sequence
  Synthetic
tcttcagattttcctccttaatc

SEQ ID NO: 29581 - DNA, 18 bp, Artificial Sequence
  Synthetic
atgaaggttcggggttga

SEQ ID NO: 29582 - DNA, 21 bp, Artificial Sequence
  Synthetic
ggattgtcaggtaaagtgact

SEQ ID NO: 29583 - DNA, 20 bp, Artificial Sequence
  Synthetic
ccctgctgttgtcaaagcaa

SEQ ID NO: 29584 - DNA, 22 bp, Artificial Sequence
  Synthetic
tgtgatctcccattttctcata

SEQ ID NO: 29585 - DNA, 20 bp, Artificial Sequence
  Synthetic
tgcacatccaattgcagtga

SEQ ID NO: 29586 - DNA, 18 bp, Artificial Sequence
  Synthetic
ttctaagctccgcatccc

SEQ ID NO: 29587 - DNA, 20 bp, Artificial Sequence
  Synthetic
agacctcctcctttggaact

SEQ ID NO: 29588 - DNA, 20 bp, Artificial Sequence
  Synthetic
gtcctccagcgtataactgc

SEQ ID NO: 29589 - DNA, 19 bp, Artificial Sequence
  Synthetic
tcttgtggtgcacccatca

SEQ ID NO: 29590 - DNA, 20 bp, Artificial Sequence
  Synthetic
gatctcagcgttggtgtagc

SEQ ID NO: 29591 - DNA, 21 bp, Artificial Sequence
  Synthetic
acttctgcaatcttctctgtg

SEQ ID NO: 29592 - DNA, 18 bp, Artificial Sequence
  Synthetic
tcctcacccacccgagac

SEQ ID NO: 29593 - DNA, 25 bp, Artificial Sequence
  Synthetic
gatacactatctctgttatgtttct

SEQ ID NO: 29594 - DNA, 19 bp, Artificial Sequence
  Synthetic
ccaagggcaaattggtaac

SEQ ID NO: 29595 - DNA, 21 bp, Artificial Sequence
  Synthetic
aatactatctacaagcctccc

SEQ ID NO: 29596 - DNA, 21 bp, Artificial Sequence
  Synthetic
tgtttatatctacgatgggcc

SEQ ID NO: 29597 - DNA, 21 bp, Artificial Sequence
  Synthetic
tcaatgactttgaaggtttca

SEQ ID NO: 29598 - DNA, 18 bp, Artificial Sequence
  Synthetic
tgatatcaggttgtgccc

SEQ ID NO: 29599 - DNA, 19 bp, Artificial Sequence
  Synthetic
ttagttaggtctgccatgg

SEQ ID NO: 29600 - DNA, 22 bp, Artificial Sequence
  Synthetic
gctctgatattgctttattgca

SEQ ID NO: 29601 - DNA, 24 bp, Artificial Sequence
  Synthetic
cacagcttttctattactacatct

SEQ ID NO: 29602 - DNA, 23 bp, Artificial Sequence
  Synthetic
caatagatacagcattaccatct

SEQ ID NO: 29603 - DNA, 20 bp, Artificial Sequence
  Synthetic
cctgatggggctgatgatga

SEQ ID NO: 29604 - DNA, 25 bp, Artificial Sequence
  Synthetic
gaccttttaaaattaggatgaatgg

SEQ ID NO: 29605 - DNA, 18 bp, Artificial Sequence
  Synthetic
tgggccttgtaactgatg

SEQ ID NO: 29606 - DNA, 25 bp, Artificial Sequence
  Synthetic
ttccaagtctactaaatctgactaa

SEQ ID NO: 29607 - DNA, 19 bp, Artificial Sequence
  Synthetic
tctgaacctgtttgggatc

SEQ ID NO: 29608 - DNA, 18 bp, Artificial Sequence
  Synthetic
tgctcccgttttgtgaaa

SEQ ID NO: 29609 - DNA, 18 bp, Artificial Sequence
  Synthetic
agccagtaacaaaagcgg

SEQ ID NO: 29610 - DNA, 22 bp, Artificial Sequence
  Synthetic
aactaaaaagtgtcctgagttc

SEQ ID NO: 29611 - DNA, 25 bp, Artificial Sequence
  Synthetic
gtgtcgtttcttatgtacaaatttg

SEQ ID NO: 29612 - DNA, 21 bp, Artificial Sequence
  Synthetic
attgcactacacaattaccac

SEQ ID NO: 29613 - DNA, 21 bp, Artificial Sequence
  Synthetic
gccttttgagttgaatcccta

SEQ ID NO: 29614 - DNA, 18 bp, Artificial Sequence
  Synthetic
ctcgaaacagcctttccc

SEQ ID NO: 29615 - DNA, 20 bp, Artificial Sequence
  Synthetic
cactactcggctagcagtct

SEQ ID NO: 29616 - DNA, 16 bp, Artificial Sequence
  Synthetic
tccacggggttgcgac

SEQ ID NO: 29617 - DNA, 16 bp, Artificial Sequence
  Synthetic
aaggcagcccctcctg

SEQ ID NO: 29618 - DNA, 18 bp, Artificial Sequence
  Synthetic
tacgaactgcaactgccg

SEQ ID NO: 29619 - DNA, 18 bp, Artificial Sequence
  Synthetic
actggaccgcagacatcc

SEQ ID NO: 29620 - DNA, 19 bp, Artificial Sequence
  Synthetic
acccacatctggtgtaggt

SEQ ID NO: 29621 - DNA, 20 bp, Artificial Sequence
  Synthetic
gccgtagaggtattgggtgt

SEQ ID NO: 29622 - DNA, 20 bp, Artificial Sequence
  Synthetic
acggactaagagtagtggcc

SEQ ID NO: 29623 - DNA, 20 bp, Artificial Sequence
  Synthetic
cccagtatcccgaagaggat

SEQ ID NO: 29624 - DNA, 20 bp, Artificial Sequence
  Synthetic
gctgataccggaagaacagc

SEQ ID NO: 29625 - DNA, 20 bp, Artificial Sequence
  Synthetic
cccaccaggtctttgtctac

SEQ ID NO: 29626 - DNA, 20 bp, Artificial Sequence
  Synthetic
gtggtctccaggttttcgac

SEQ ID NO: 29627 - DNA, 18 bp, Artificial Sequence
  Synthetic
cgtcggcgaagaacttgc

SEQ ID NO: 29628 - DNA, 18 bp, Artificial Sequence
  Synthetic
gtcatgagcgcgtcagtg

SEQ ID NO: 29629 - DNA, 20 bp, Artificial Sequence
  Synthetic
actcacagagcaccacagag

SEQ ID NO: 29630 - DNA, 18 bp, Artificial Sequence
  Synthetic
gtctgcggacatgcaagc

SEQ ID NO: 29631 - DNA, 16 bp, Artificial Sequence
  Synthetic
aacgacgaacgcggtg

SEQ ID NO: 29632 - DNA, 18 bp, Artificial Sequence
  Synthetic
atgattgccccgggaagc

SEQ ID NO: 29633 - DNA, 18 bp, Artificial Sequence
  Synthetic
cagatatcgtcgctccgc

SEQ ID NO: 29634 - DNA, 20 bp, Artificial Sequence
  Synthetic
ccacggagaaagtaacctcc

SEQ ID NO: 29635 - DNA, 20 bp, Artificial Sequence
  Synthetic
catgcactgtctccatagca

SEQ ID NO: 29636 - DNA, 18 bp, Artificial Sequence
  Synthetic
cggccatgacttgggaca

SEQ ID NO: 29637 - DNA, 20 bp, Artificial Sequence
  Synthetic
tggcgtaataaggtgttgct

SEQ ID NO: 29638 - DNA, 20 bp, Artificial Sequence
  Synthetic
tcggcaatggggtatcagag

SEQ ID NO: 29639 - DNA, 20 bp, Artificial Sequence
  Synthetic
ggagtacctggtcatagcct

SEQ ID NO: 29640 - DNA, 20 bp, Artificial Sequence
  Synthetic
agatccagcggagtaacaga

SEQ ID NO: 29641 - DNA, 18 bp, Artificial Sequence
  Synthetic
ggacaagtccagccggtc

SEQ ID NO: 29642 - DNA, 19 bp, Artificial Sequence
  Synthetic
tgatgatcgactgcaacac

SEQ ID NO: 29643 - DNA, 19 bp, Artificial Sequence
  Synthetic
ggccgtgattggtgcttaa

SEQ ID NO: 29644 - DNA, 19 bp, Artificial Sequence
  Synthetic
gagatgcaacagggtacac

SEQ ID NO: 29645 - DNA, 21 bp, Artificial Sequence
  Synthetic
cgactcagtatctcaaggaga

SEQ ID NO: 29646 - DNA, 18 bp, Artificial Sequence
  Synthetic
tttgctgcatcaagtgtg

SEQ ID NO: 29647 - DNA, 21 bp, Artificial Sequence
  Synthetic
taggcctgagtttttcaacag

SEQ ID NO: 29648 - DNA, 18 bp, Artificial Sequence
  Synthetic
gagtagttgcagctgctc

SEQ ID NO: 29649 - DNA, 20 bp, Artificial Sequence
  Synthetic
tcttctccaaaggttacacc

SEQ ID NO: 29650 - DNA, 18 bp, Artificial Sequence
  Synthetic
caccaaattccagaggga

SEQ ID NO: 29651 - DNA, 18 bp, Artificial Sequence
  Synthetic
ccttttgcatggcaccat

SEQ ID NO: 29652 - DNA, 19 bp, Artificial Sequence
  Synthetic
ccatgacaacctgctcata

SEQ ID NO: 29653 - DNA, 19 bp, Artificial Sequence
  Synthetic
gagagcatctcagtagtgc

SEQ ID NO: 29654 - DNA, 19 bp, Artificial Sequence
  Synthetic
tagtcaacgatgccctctt

SEQ ID NO: 29655 - DNA, 22 bp, Artificial Sequence
  Synthetic
ctgaataggaccaatctctgta

SEQ ID NO: 29656 - DNA, 19 bp, Artificial Sequence
  Synthetic
accaccaacttgaggaaat

SEQ ID NO: 29657 - DNA, 20 bp, Artificial Sequence
  Synthetic
cacacacatggaatggaaac

SEQ ID NO: 29658 - DNA, 22 bp, Artificial Sequence
  Synthetic
attttggttcaatctctgtgta

SEQ ID NO: 29659 - DNA, 21 bp, Artificial Sequence
  Synthetic
ggttaatgtgccaaacaattg

SEQ ID NO: 29660 - DNA, 23 bp, Artificial Sequence
  Synthetic
tcttaatggtaatgcttgtgttt

SEQ ID NO: 29661 - DNA, 19 bp, Artificial Sequence
  Synthetic
gaaatcgtcacctgaatgg

SEQ ID NO: 29662 - DNA, 19 bp, Artificial Sequence
  Synthetic
ttgcgcttatagcacatca

SEQ ID NO: 29663 - DNA, 21 bp, Artificial Sequence
  Synthetic
ggatgtctctcataggtcttt

SEQ ID NO: 29664 - DNA, 21 bp, Artificial Sequence
  Synthetic
acacgaatgtagaaaggacac

SEQ ID NO: 29665 - DNA, 21 bp, Artificial Sequence
  Synthetic
tgtctagttgtagcacaagtt

SEQ ID NO: 29666 - DNA, 20 bp, Artificial Sequence
  Synthetic
tgatagcagctactacaggg

SEQ ID NO: 29667 - DNA, 18 bp, Artificial Sequence
  Synthetic
ctaacagaaccctccagg

SEQ ID NO: 29668 - DNA, 19 bp, Artificial Sequence
  Synthetic
actcaccaaaaacacgtct

SEQ ID NO: 29669 - DNA, 23 bp, Artificial Sequence
  Synthetic
ccactgaaatacttgtacttgtt

SEQ ID NO: 29670 - DNA, 21 bp, Artificial Sequence
  Synthetic
gttccacaggttacttgtacc

SEQ ID NO: 29671 - DNA, 20 bp, Artificial Sequence
  Synthetic
cactgataaacaccagatgg

SEQ ID NO: 29672 - DNA, 19 bp, Artificial Sequence
  Synthetic
ctttcaaagcagcacacat

SEQ ID NO: 29673 - DNA, 18 bp, Artificial Sequence
  Synthetic
caagcagcatagcacatg

SEQ ID NO: 29674 - DNA, 19 bp, Artificial Sequence
  Synthetic
ctgtaaggtgttgccagta

SEQ ID NO: 29675 - DNA, 19 bp, Artificial Sequence
  Synthetic
taccacagatgtgcacttt

SEQ ID NO: 29676 - DNA, 19 bp, Artificial Sequence
  Synthetic
aagcggcatatgatggtaa

SEQ ID NO: 29677 - DNA, 21 bp, Artificial Sequence
  Synthetic
cgcattgttgataatgttgtt

SEQ ID NO: 29678 - DNA, 23 bp, Artificial Sequence
  Synthetic
gaattgttatagtaggcaagtgc

SEQ ID NO: 29679 - DNA, 24 bp, Artificial Sequence
  Synthetic
taggtaatccttatatgctttagc

SEQ ID NO: 29680 - DNA, 18 bp, Artificial Sequence
  Synthetic
gactgcatcaagggttcg

SEQ ID NO: 29681 - DNA, 22 bp, Artificial Sequence
  Synthetic
ttaccctcatcaaaatgacgta

SEQ ID NO: 29682 - DNA, 18 bp, Artificial Sequence
  Synthetic
caataggaactccgcagc

SEQ ID NO: 29683 - DNA, 20 bp, Artificial Sequence
  Synthetic
caacaaaaggaacaccatct

SEQ ID NO: 29684 - DNA, 23 bp, Artificial Sequence
  Synthetic
gaagtgttttagttcaacagaac

SEQ ID NO: 29685 - DNA, 20 bp, Artificial Sequence
  Synthetic
ccgtaaaacttgcttgttcc

SEQ ID NO: 29686 - DNA, 19 bp, Artificial Sequence
  Synthetic
atgatgttccacctggttt

SEQ ID NO: 29687 - DNA, 22 bp, Artificial Sequence
  Synthetic
actgccttaaagttcttaatgc

SEQ ID NO: 29688 - DNA, 25 bp, Artificial Sequence
  Synthetic
gtgttatcattagttagcattacgg

SEQ ID NO: 29689 - DNA, 23 bp, Artificial Sequence
  Synthetic
gcaataatagctcatacctccta

SEQ ID NO: 29690 - DNA, 19 bp, Artificial Sequence
  Synthetic
aacctcccatgaaagatgc

SEQ ID NO: 29691 - DNA, 18 bp, Artificial Sequence
  Synthetic
cttaccagtaccaggtgg

SEQ ID NO: 29692 - DNA, 19 bp, Artificial Sequence
  Synthetic
cctttagtcagcaatgtgc

SEQ ID NO: 29693 - DNA, 24 bp, Artificial Sequence
  Synthetic
gagataaaaacagcttttctccaa

SEQ ID NO: 29694 - DNA, 23 bp, Artificial Sequence
  Synthetic
atgaagaccagtaatgatcttac

SEQ ID NO: 29695 - DNA, 21 bp, Artificial Sequence
  Synthetic
cctgtagaaaatcctagctgg

SEQ ID NO: 29696 - DNA, 21 bp, Artificial Sequence
  Synthetic
tgaagtagaaaagcaagttgc

SEQ ID NO: 29697 - DNA, 19 bp, Artificial Sequence
  Synthetic
attctacttcagcctgagg

SEQ ID NO: 29698 - DNA, 21 bp, Artificial Sequence
  Synthetic
gtaaaagaaaggcaattgctt

SEQ ID NO: 29699 - DNA, 21 bp, Artificial Sequence
  Synthetic
acctttgtgtaaacagcatta

SEQ ID NO: 29700 - DNA, 23 bp, Artificial Sequence
  Synthetic
tgttattaaaacaccattacggg

SEQ ID NO: 29701 - DNA, 19 bp, Artificial Sequence
  Synthetic
aatgaagaccgccaagttg

SEQ ID NO: 29702 - DNA, 18 bp, Artificial Sequence
  Synthetic
gttaggcatcgcaacacc

SEQ ID NO: 29703 - DNA, 22 bp, Artificial Sequence
  Synthetic
ctagggtcatacatatcgctaa

SEQ ID NO: 29704 - DNA, 22 bp, Artificial Sequence
  Synthetic
ggaagacaactggataggattt

SEQ ID NO: 29705 - DNA, 25 bp, Artificial Sequence
  Synthetic
ctcgtaagtgtttaaaattacctga

SEQ ID NO: 29706 - DNA, 19 bp, Artificial Sequence
  Synthetic
cagagcatttgagttcagc

SEQ ID NO: 29707 - DNA, 20 bp, Artificial Sequence
  Synthetic
gcaataacaccagtttgtcc

SEQ ID NO: 29708 - DNA, 21 bp, Artificial Sequence
  Synthetic
ccggtgcatttaaaagttcaa

SEQ ID NO: 29709 - DNA, 21 bp, Artificial Sequence
  Synthetic
cagtagaatatatgcgccaag

SEQ ID NO: 29710 - DNA, 19 bp, Artificial Sequence
  Synthetic
gtagaatctccgcagatgt

SEQ ID NO: 29711 - DNA, 18 bp, Artificial Sequence
  Synthetic
atcagtgagcagaggtgg

SEQ ID NO: 29712 - DNA, 23 bp, Artificial Sequence
  Synthetic
gctaagttgtttaacaagtgtgt

SEQ ID NO: 29713 - DNA, 19 bp, Artificial Sequence
  Synthetic
gagggaagtatgctttgcc

SEQ ID NO: 29714 - DNA, 22 bp, Artificial Sequence
  Synthetic
ttttgaatgttgacgacagaag

SEQ ID NO: 29715 - DNA, 22 bp, Artificial Sequence
  Synthetic
taatttgacacccttgagaact

SEQ ID NO: 29716 - DNA, 20 bp, Artificial Sequence
  Synthetic
atcaaggcatagaggtacaa

SEQ ID NO: 29717 - DNA, 22 bp, Artificial Sequence
  Synthetic
tgtagcattttcaataccagtg

SEQ ID NO: 29718 - DNA, 21 bp, Artificial Sequence
  Synthetic
cacgttaacaatattgcagca

SEQ ID NO: 29719 - DNA, 22 bp, Artificial Sequence
  Synthetic
attaattctgtagacagcagca

SEQ ID NO: 29720 - DNA, 20 bp, Artificial Sequence
  Synthetic
gcaaaacctgaatcagtgcc

SEQ ID NO: 29721 - DNA, 18 bp, Artificial Sequence
  Synthetic
ttgccctcgtatgttcct

SEQ ID NO: 29722 - DNA, 20 bp, Artificial Sequence
  Synthetic
acctttcctagagcacaaag

SEQ ID NO: 29723 - DNA, 19 bp, Artificial Sequence
  Synthetic
ctccttgccatgctgagtg

SEQ ID NO: 29724 - DNA, 20 bp, Artificial Sequence
  Synthetic
tctgcgtagaagccttttgg

SEQ ID NO: 29725 - DNA, 20 bp, Artificial Sequence
  Synthetic
tgagtgacgttgtactgttt

SEQ ID NO: 29726 - DNA, 23 bp, Artificial Sequence
  Synthetic
cagtctttttctttttgtccttt

SEQ ID NO: 29727 - DNA, 18 bp, Artificial Sequence
  Synthetic
taccctcgatcgtactcc

SEQ ID NO: 29728 - DNA, 19 bp, Artificial Sequence
  Synthetic
catatcctcattgaccggg

SEQ ID NO: 29729 - DNA, 20 bp, Artificial Sequence
  Synthetic
aaggttagccacattcaggg

SEQ ID NO: 29730 - DNA, 24 bp, Artificial Sequence
  Synthetic
gctgcgtctttaaaataattgatg

SEQ ID NO: 29731 - DNA, 19 bp, Artificial Sequence
  Synthetic
acaccataagcaacaactg

SEQ ID NO: 29732 - DNA, 23 bp, Artificial Sequence
  Synthetic
ctgatgaaacttgctagaattac

SEQ ID NO: 29733 - DNA, 24 bp, Artificial Sequence
  Synthetic
gtaaaataagggtagctgaattgt

SEQ ID NO: 29734 - DNA, 18 bp, Artificial Sequence
  Synthetic
aaacgctgatggggattg

SEQ ID NO: 29735 - DNA, 18 bp, Artificial Sequence
  Synthetic
aaagcgcagactaccagt

SEQ ID NO: 29736 - DNA, 22 bp, Artificial Sequence
  Synthetic
ggtgtagtgaatctaaaatggc

SEQ ID NO: 29737 - DNA, 18 bp, Artificial Sequence
  Synthetic
tttccgcagcatccaatg

SEQ ID NO: 29738 - DNA, 22 bp, Artificial Sequence
  Synthetic
gctcataaaagggattgtgaat

SEQ ID NO: 29739 - DNA, 18 bp, Artificial Sequence
  Synthetic
atctgagttgtggcctca

SEQ ID NO: 29740 - DNA, 21 bp, Artificial Sequence
  Synthetic
ccaatcatgtgcagtaactct

SEQ ID NO: 29741 - DNA, 19 bp, Artificial Sequence
  Synthetic
cgaagcctacaccaaagac

SEQ ID NO: 29742 - DNA, 22 bp, Artificial Sequence
  Synthetic
cacgcttcagtaaatttcttga

SEQ ID NO: 29743 - DNA, 21 bp, Artificial Sequence
  Synthetic
cttcaccactaggattttgca

SEQ ID NO: 29744 - DNA, 23 bp, Artificial Sequence
  Synthetic
tttgccatctaaaagatactctt

SEQ ID NO: 29745 - DNA, 18 bp, Artificial Sequence
  Synthetic
caaactcttcctctgggc

SEQ ID NO: 29746 - DNA, 23 bp, Artificial Sequence
  Synthetic
tctgatgtctttaaacttctcat

SEQ ID NO: 29747 - DNA, 23 bp, Artificial Sequence
  Synthetic
aaataagatttgagaagcattgc

SEQ ID NO: 29748 - DNA, 21 bp, Artificial Sequence
  Synthetic
attctccatctagcatgagag

SEQ ID NO: 29749 - DNA, 20 bp, Artificial Sequence
  Synthetic
ggtttttggtccatctgatg

SEQ ID NO: 29750 - DNA, 19 bp, Artificial Sequence
  Synthetic
cacccagaacaaagcaaat

SEQ ID NO: 29751 - DNA, 20 bp, Artificial Sequence
  Synthetic
aaaatggaaagcacttctgc

SEQ ID NO: 29752 - DNA, 22 bp, Artificial Sequence
  Synthetic
tgtttgctcagatttaacatct

SEQ ID NO: 29753 - DNA, 25 bp, Artificial Sequence
  Synthetic
gcaaacctaaattagaatatccttc

SEQ ID NO: 29754 - DNA, 18 bp, Artificial Sequence
  Synthetic
tatgtggtgttcgaggtg

SEQ ID NO: 29755 - DNA, 20 bp, Artificial Sequence
  Synthetic
tgggtaaagtcacagtttct

SEQ ID NO: 29756 - DNA, 18 bp, Artificial Sequence
  Synthetic
ttctccccctactcctgg

SEQ ID NO: 29757 - DNA, 18 bp, Artificial Sequence
  Synthetic
tacatctgggtcaaaggc

SEQ ID NO: 29758 - DNA, 25 bp, Artificial Sequence
  Synthetic
ctcaactggtaaattatttggtagt

SEQ ID NO: 29759 - DNA, 20 bp, Artificial Sequence
  Synthetic
cctgtagaaccaacacctaa

SEQ ID NO: 29760 - DNA, 23 bp, Artificial Sequence
  Synthetic
gtctctagtatcatccacctttc

SEQ ID NO: 29761 - DNA, 19 bp, Artificial Sequence
  Synthetic
ggcacatagttgccaaaga

SEQ ID NO: 29762 - DNA, 18 bp, Artificial Sequence
  Synthetic
gttgtccagatgtccagc

SEQ ID NO: 29763 - DNA, 19 bp, Artificial Sequence
  Synthetic
gatttgttggctcctcctc

SEQ ID NO: 29764 - DNA, 23 bp, Artificial Sequence
  Synthetic
tgctttgttcaaataagtcatct

SEQ ID NO: 29765 - DNA, 20 bp, Artificial Sequence
  Synthetic
tcaattccactgtcctgaaa

SEQ ID NO: 29766 - DNA, 23 bp, Artificial Sequence
  Synthetic
ctttctacttagttcccaatgtt

SEQ ID NO: 29767 - DNA, 19 bp, Artificial Sequence
  Synthetic
cggtgaggattctctatgc

SEQ ID NO: 29768 - DNA, 20 bp, Artificial Sequence
  Synthetic
attgtgcgacggaactgatc

SEQ ID NO: 29769 - DNA, 20 bp, Artificial Sequence
  Synthetic
tccagtgtctgtaatgggaa

SEQ ID NO: 29770 - DNA, 21 bp, Artificial Sequence
  Synthetic
aatgtatatgtcacgtcatcg

SEQ ID NO: 29771 - DNA, 19 bp, Artificial Sequence
  Synthetic
caggctgtaaatacgaccg

SEQ ID NO: 29772 - DNA, 23 bp, Artificial Sequence
  Synthetic
gttttttatccattccaaagcag

SEQ ID NO: 29773 - DNA, 20 bp, Artificial Sequence
  Synthetic
tcagggtttaggtacatgac

SEQ ID NO: 29774 - DNA, 21 bp, Artificial Sequence
  Synthetic
caatgttgttttgcagctctt

SEQ ID NO: 29775 - DNA, 19 bp, Artificial Sequence
  Synthetic
ccaattccaccaaccattc

SEQ ID NO: 29776 - DNA, 18 bp, Artificial Sequence
  Synthetic
atgtgagtgagaccagca

SEQ ID NO: 29777 - DNA, 18 bp, Artificial Sequence
  Synthetic
catatccactggccacgg

SEQ ID NO: 29778 - DNA, 21 bp, Artificial Sequence
  Synthetic
ccattgtttccatgttctcat

SEQ ID NO: 29779 - DNA, 23 bp, Artificial Sequence
  Synthetic
caatcattaggtcttcttcgaaa

SEQ ID NO: 29780 - DNA, 25 bp, Artificial Sequence
  Synthetic
gcatttggattttctaatagtacag

SEQ ID NO: 29781 - DNA, 20 bp, Artificial Sequence
  Synthetic
atttctttgacggtaacacc

SEQ ID NO: 29782 - DNA, 21 bp, Artificial Sequence
  Synthetic
tattgaaaacaacctccgtct

SEQ ID NO: 29783 - DNA, 20 bp, Artificial Sequence
  Synthetic
gactttcatggttgcagtac

SEQ ID NO: 29784 - DNA, 22 bp, Artificial Sequence
  Synthetic
aggtgtaatcaattctgtcaat

SEQ ID NO: 29785 - DNA, 22 bp, Artificial Sequence
  Synthetic
acctttaacaacttttgcttca

SEQ ID NO: 29786 - DNA, 22 bp, Artificial Sequence
  Synthetic
tgctgtaaaataggttccaagg

SEQ ID NO: 29787 - DNA, 23 bp, Artificial Sequence
  Synthetic
ataaaagtacttcctatctgtgc

SEQ ID NO: 29788 - DNA, 22 bp, Artificial Sequence
  Synthetic
ctctgtcaagagttaacgaaat

SEQ ID NO: 29789 - DNA, 21 bp, Artificial Sequence
  Synthetic
cgtaaaatggaaactgaagca

SEQ ID NO: 29790 - DNA, 21 bp, Artificial Sequence
  Synthetic
gtttgagaggtaagataaggc

SEQ ID NO: 29791 - DNA, 18 bp, Artificial Sequence
  Synthetic
gacggtttagtggaggtc

SEQ ID NO: 29792 - DNA, 25 bp, Artificial Sequence
  Synthetic
gattttattaacacccactacacta

SEQ ID NO: 29793 - DNA, 18 bp, Artificial Sequence
  Synthetic
gggcgtctagttggacta

SEQ ID NO: 29794 - DNA, 20 bp, Artificial Sequence
  Synthetic
gcatgtaacacattcccaaa

SEQ ID NO: 29795 - DNA, 19 bp, Artificial Sequence
  Synthetic
ttcggctgttatacccatg

SEQ ID NO: 29796 - DNA, 18 bp, Artificial Sequence
  Synthetic
ataaaattgccgctgctc

SEQ ID NO: 29797 - DNA, 24 bp, Artificial Sequence
  Synthetic
catttctgctaataaggtgactaa

SEQ ID NO: 29798 - DNA, 18 bp, Artificial Sequence
  Synthetic
tttttccaacaccgcgat

SEQ ID NO: 29799 - DNA, 19 bp, Artificial Sequence
  Synthetic
atttgcttttcggtgatgc

SEQ ID NO: 29800 - DNA, 22 bp, Artificial Sequence
  Synthetic
accaatacatacaaagaccaaa

SEQ ID NO: 29801 - DNA, 25 bp, Artificial Sequence
  Synthetic
cagttataattacatgcttaaaggc

SEQ ID NO: 29802 - DNA, 20 bp, Artificial Sequence
  Synthetic
tgttaataacgccaatagcc

SEQ ID NO: 29803 - DNA, 20 bp, Artificial Sequence
  Synthetic
gccttattttttgcagcaag

SEQ ID NO: 29804 - DNA, 25 bp, Artificial Sequence
  Synthetic
cgccattagtcaaaatataatccaa

SEQ ID NO: 29805 - DNA, 25 bp, Artificial Sequence
  Synthetic
caacttctttaaaatctacttcacc

SEQ ID NO: 29806 - DNA, 20 bp, Artificial Sequence
  Synthetic
ctgaactcacccttgtcaaa

SEQ ID NO: 29807 - DNA, 18 bp, Artificial Sequence
  Synthetic
tttggcatcttgacctgc

SEQ ID NO: 29808 - DNA, 21 bp, Artificial Sequence
  Synthetic
acagattgtttgaaagactgg

SEQ ID NO: 29809 - DNA, 20 bp, Artificial Sequence
  Synthetic
aaaagtggtgtcatcaaaca

SEQ ID NO: 29810 - DNA, 22 bp, Artificial Sequence
  Synthetic
agtgtcaccgtattttacagta

SEQ ID NO: 29811 - DNA, 20 bp, Artificial Sequence
  Synthetic
gttgggacatcagatggtgt

SEQ ID NO: 29812 - DNA, 18 bp, Artificial Sequence
  Synthetic
cctggacggtaaccacta

SEQ ID NO: 29813 - DNA, 19 bp, Artificial Sequence
  Synthetic
aaaaactcacgcctaaacg

SEQ ID NO: 29814 - DNA, 20 bp, Artificial Sequence
  Synthetic
cgaataaggaaaacagctgc

SEQ ID NO: 29815 - DNA, 19 bp, Artificial Sequence
  Synthetic
gactgtttaccgagcgtat

SEQ ID NO: 29816 - DNA, 21 bp, Artificial Sequence
  Synthetic
ccacctgaatatcagtgactt

SEQ ID NO: 29817 - DNA, 20 bp, Artificial Sequence
  Synthetic
tgttttatggttgctgtagc

SEQ ID NO: 29818 - DNA, 18 bp, Artificial Sequence
  Synthetic
tcaacaggtaccccaagg

SEQ ID NO: 29819 - DNA, 21 bp, Artificial Sequence
  Synthetic
aagaatatggccgttgacaaa

SEQ ID NO: 29820 - DNA, 18 bp, Artificial Sequence
  Synthetic
aaaatcagccgccttagt

SEQ ID NO: 29821 - DNA, 21 bp, Artificial Sequence
  Synthetic
aattgccaacaaatctctgta

SEQ ID NO: 29822 - DNA, 18 bp, Artificial Sequence
  Synthetic
atctggtagggccgtaaa

SEQ ID NO: 29823 - DNA, 21 bp, Artificial Sequence
  Synthetic
tctcacaagtacctcaatcag

SEQ ID NO: 29824 - DNA, 21 bp, Artificial Sequence
  Synthetic
tcacttcacaggattcgtaaa

SEQ ID NO: 29825 - DNA, 18 bp, Artificial Sequence
  Synthetic
ttcaatactggccaggct

SEQ ID NO: 29826 - DNA, 20 bp, Artificial Sequence
  Synthetic
cctacagtagaaccaggaaa

SEQ ID NO: 29827 - DNA, 18 bp, Artificial Sequence
  Synthetic
tcgagtttgatgccacag

SEQ ID NO: 29828 - DNA, 24 bp, Artificial Sequence
  Synthetic
agacgtattcttaactgtcttgaa

SEQ ID NO: 29829 - DNA, 22 bp, Artificial Sequence
  Synthetic
accagtctgtaaactagacaaa

SEQ ID NO: 29830 - DNA, 20 bp, Artificial Sequence
  Synthetic
acaggtgcttctaaggtaac

SEQ ID NO: 29831 - DNA, 23 bp, Artificial Sequence
  Synthetic
agttctaattgtgagaactgttt

SEQ ID NO: 29832 - DNA, 23 bp, Artificial Sequence
  Synthetic
ttgaaaacatcactcaattgtca

SEQ ID NO: 29833 - DNA, 18 bp, Artificial Sequence
  Synthetic
aaagcccgagataatgcc

SEQ ID NO: 29834 - DNA, 19 bp, Artificial Sequence
  Synthetic
gcatcctcatgaagtgtca

SEQ ID NO: 29835 - DNA, 19 bp, Artificial Sequence
  Synthetic
acgtcctgaaaaggcaata

SEQ ID NO: 29836 - DNA, 23 bp, Artificial Sequence
  Synthetic
cgacaacaaaatctttaagcaat

SEQ ID NO: 29837 - DNA, 18 bp, Artificial Sequence
  Synthetic
caagattgctgacggctt

SEQ ID NO: 29838 - DNA, 23 bp, Artificial Sequence
  Synthetic
aatttcctctattccatttttcg

SEQ ID NO: 29839 - DNA, 23 bp, Artificial Sequence
  Synthetic
ttaaaaccactttttcttgctca

SEQ ID NO: 29840 - DNA, 20 bp, Artificial Sequence
  Synthetic
tcaagtctccattgctgttt

SEQ ID NO: 29841 - DNA, 21 bp, Artificial Sequence
  Synthetic
ccataagcttttccagacaaa

SEQ ID NO: 29842 - DNA, 24 bp, Artificial Sequence
  Synthetic
tgtaaatcataaattctcgttggg

SEQ ID NO: 29843 - DNA, 25 bp, Artificial Sequence
  Synthetic
ccataaatatcaagatctgtctgtt

SEQ ID NO: 29844 - DNA, 23 bp, Artificial Sequence
  Synthetic
gaccatttttaattttgccaaag

SEQ ID NO: 29845 - DNA, 23 bp, Artificial Sequence
  Synthetic
aacattttcaaatatagtggcgg

SEQ ID NO: 29846 - DNA, 18 bp, Artificial Sequence
  Synthetic
atcaatacggccatagcg

SEQ ID NO: 29847 - DNA, 20 bp, Artificial Sequence
  Synthetic
agcttggtcaaaaaacttgg

SEQ ID NO: 29848 - DNA, 18 bp, Artificial Sequence
  Synthetic
cgaattcttggcacagct

SEQ ID NO: 29849 - DNA, 20 bp, Artificial Sequence
  Synthetic
gccgtaaactcctctttagg

SEQ ID NO: 29850 - DNA, 22 bp, Artificial Sequence
  Synthetic
ctttccttatataagcctctgg

SEQ ID NO: 29851 - DNA, 18 bp, Artificial Sequence
  Synthetic
ttcatcggtagcgcttac

SEQ ID NO: 29852 - DNA, 23 bp, Artificial Sequence
  Synthetic
tcaacccaaatattgttttttgg

SEQ ID NO: 29853 - DNA, 22 bp, Artificial Sequence
  Synthetic
tctgttcttctttaaaggctcc

SEQ ID NO: 29854 - DNA, 18 bp, Artificial Sequence
  Synthetic
atcggtgggttttccttt

SEQ ID NO: 29855 - DNA, 25 bp, Artificial Sequence
  Synthetic
ctccaaatagcaagatatcaatgtc

SEQ ID NO: 29856 - DNA, 20 bp, Artificial Sequence
  Synthetic
caaaacaagccaaggcatat

SEQ ID NO: 29857 - DNA, 20 bp, Artificial Sequence
  Synthetic
agccatatccctagctgaaa

SEQ ID NO: 29858 - DNA, 23 bp, Artificial Sequence
  Synthetic
tctgccacattaatcataaaacc

SEQ ID NO: 29859 - DNA, 25 bp, Artificial Sequence
  Synthetic
gttaccaactttattagaacctgta

SEQ ID NO: 29860 - DNA, 20 bp, Artificial Sequence
  Synthetic
tctgtcttgacaatgggtat

SEQ ID NO: 29861 - DNA, 20 bp, Artificial Sequence
  Synthetic
ggggtctgtgtcttgtttgt

SEQ ID NO: 29862 - DNA, 18 bp, Artificial Sequence
  Synthetic
gtgtaaaaaatgcggccg

SEQ ID NO: 29863 - DNA, 23 bp, Artificial Sequence
  Synthetic
aacattgttacacatatgggata

SEQ ID NO: 29864 - DNA, 20 bp, Artificial Sequence
  Synthetic
caaagtcaagagcaagactc

SEQ ID NO: 29865 - DNA, 18 bp, Artificial Sequence
  Synthetic
gtggtggttcaggtacag

SEQ ID NO: 29866 - DNA, 22 bp, Artificial Sequence
  Synthetic
tgagcttagagaggaagacttt

SEQ ID NO: 29867 - DNA, 23 bp, Artificial Sequence
  Synthetic
ctaaaagataagcgtcaagaagg

SEQ ID NO: 29868 - DNA, 20 bp, Artificial Sequence
  Synthetic
tgttctggtgaaggaatgtt

SEQ ID NO: 29869 - DNA, 20 bp, Artificial Sequence
  Synthetic
acaaacaggtctcttgagaa

SEQ ID NO: 29870 - DNA, 23 bp, Artificial Sequence
  Synthetic
cttatgaagaccaactgactttc

SEQ ID NO: 29871 - DNA, 18 bp, Artificial Sequence
  Synthetic
acgtgaccatcccagaaa

SEQ ID NO: 29872 - DNA, 19 bp, Artificial Sequence
  Synthetic
aaccaaaccatcgaagttg

SEQ ID NO: 29873 - DNA, 18 bp, Artificial Sequence
  Synthetic
tcaatgtcggcaaccatg

SEQ ID NO: 29874 - DNA, 22 bp, Artificial Sequence
  Synthetic
cttacagctcgtagacctatag

SEQ ID NO: 29875 - DNA, 19 bp, Artificial Sequence
  Synthetic
cggtatgtctattgcagct

SEQ ID NO: 29876 - DNA, 22 bp, Artificial Sequence
  Synthetic
ctacggtactatatggggctaa

SEQ ID NO: 29877 - DNA, 18 bp, Artificial Sequence
  Synthetic
atgggagcacagattgtc

SEQ ID NO: 29878 - DNA, 19 bp, Artificial Sequence
  Synthetic
ctgctcaggttaagtcagc

SEQ ID NO: 29879 - DNA, 24 bp, Artificial Sequence
  Synthetic
tcaagaggatattttagaagcttg

SEQ ID NO: 29880 - DNA, 18 bp, Artificial Sequence
  Synthetic
gcaacgattactgacgct

SEQ ID NO: 29881 - DNA, 21 bp, Artificial Sequence
  Synthetic
gcatgctccatataaggctat

SEQ ID NO: 29882 - DNA, 20 bp, Artificial Sequence
  Synthetic
atcaatcatttggtggcaaa

SEQ ID NO: 29883 - DNA, 22 bp, Artificial Sequence
  Synthetic
gatcaatcactcttacccattt

SEQ ID NO: 29884 - DNA, 21 bp, Artificial Sequence
  Synthetic
agtacattgtgacagaacacc

SEQ ID NO: 29885 - DNA, 21 bp, Artificial Sequence
  Synthetic
aacctgtttattggtcatggt

SEQ ID NO: 29886 - DNA, 19 bp, Artificial Sequence
  Synthetic
ccttatgtacctggttggg

SEQ ID NO: 29887 - DNA, 18 bp, Artificial Sequence
  Synthetic
cacgagctttcgtccttt

SEQ ID NO: 29888 - DNA, 22 bp, Artificial Sequence
  Synthetic
ttgatgaaagcaataaggagtt

SEQ ID NO: 29889 - DNA, 21 bp, Artificial Sequence
  Synthetic
agacttcttctcagtgtcatt

SEQ ID NO: 29890 - DNA, 18 bp, Artificial Sequence
  Synthetic
gataagcgtgaggtcggt

SEQ ID NO: 29891 - DNA, 22 bp, Artificial Sequence
  Synthetic
tgggttatgaaaatagcacatt

SEQ ID NO: 29892 - DNA, 19 bp, Artificial Sequence
  Synthetic
ctgggttcagaacgtcgtg

SEQ ID NO: 29893 - DNA, 20 bp, Artificial Sequence
  Synthetic
ggttccctcagattggttgg

SEQ ID NO: 29894 - DNA, 20 bp, Artificial Sequence
  Synthetic
gcctcaggtgatcgagagaa

SEQ ID NO: 29895 - DNA, 20 bp, Artificial Sequence
  Synthetic
gccaacaggttgatattcct

SEQ ID NO: 29896 - DNA, 22 bp, Artificial Sequence
  Synthetic
gacaactaggatgttagcttag

SEQ ID NO: 29897 - DNA, 20 bp, Artificial Sequence
  Synthetic
ggaccatctcccaaccctaa

SEQ ID NO: 29898 - DNA, 20 bp, Artificial Sequence
  Synthetic
gatgattggggtgaagtcgt

SEQ ID NO: 29899 - DNA, 20 bp, Artificial Sequence
  Synthetic
gacggactttctgaagaaga

SEQ ID NO: 29900 - DNA, 20 bp, Artificial Sequence
  Synthetic
tcactaaattgatcgaccgc

SEQ ID NO: 29901 - DNA, 18 bp, Artificial Sequence
  Synthetic
tttgacgatctcactcgc

SEQ ID NO: 29902 - DNA, 21 bp, Artificial Sequence
  Synthetic
ggataagactgacaaggatga

SEQ ID NO: 29903 - DNA, 19 bp, Artificial Sequence
  Synthetic
aactcagcagtagcagttc

SEQ ID NO: 29904 - DNA, 18 bp, Artificial Sequence
  Synthetic
gaacatccagccgatagc

SEQ ID NO: 29905 - DNA, 18 bp, Artificial Sequence
  Synthetic
gagctcatgcagaaatgc

SEQ ID NO: 29906 - DNA, 22 bp, Artificial Sequence
  Synthetic
tgtgtcagttttaactcacaaa

SEQ ID NO: 29907 - DNA, 20 bp, Artificial Sequence
  Synthetic
gttcagcttagcaaccatga

SEQ ID NO: 29908 - DNA, 19 bp, Artificial Sequence
  Synthetic
aactcatgaaccagtaggg

SEQ ID NO: 29909 - DNA, 22 bp, Artificial Sequence
  Synthetic
tcaatgcattgatgattctgag

SEQ ID NO: 29910 - DNA, 18 bp, Artificial Sequence
  Synthetic
tatagccagacttgcggt

SEQ ID NO: 29911 - DNA, 22 bp, Artificial Sequence
  Synthetic
tttggagtgtcataactttcca

SEQ ID NO: 29912 - DNA, 20 bp, Artificial Sequence
  Synthetic
actcaacttgaaagcctaga

SEQ ID NO: 29913 - DNA, 23 bp, Artificial Sequence
  Synthetic
agtcttctagatttttggtcatt

SEQ ID NO: 29914 - DNA, 25 bp, Artificial Sequence
  Synthetic
ccgtaatgttttctactttcaaaga

SEQ ID NO: 29915 - DNA, 21 bp, Artificial Sequence
  Synthetic
catctgataacccaacctcac

SEQ ID NO: 29916 - DNA, 19 bp, Artificial Sequence
  Synthetic
tcataggctttgggttctt

SEQ ID NO: 29917 - DNA, 19 bp, Artificial Sequence
  Synthetic
caaaaccgtcaaagcgata

SEQ ID NO: 29918 - DNA, 21 bp, Artificial Sequence
  Synthetic
tctttaagggttgctagcttt

SEQ ID NO: 29919 - DNA, 20 bp, Artificial Sequence
  Synthetic
tgtcaatcgtgtctttgttg

SEQ ID NO: 29920 - DNA, 18 bp, Artificial Sequence
  Synthetic
gaacatggctatgcggtg

SEQ ID NO: 29921 - DNA, 18 bp, Artificial Sequence
  Synthetic
gttgggattcgggattgg

SEQ ID NO: 29922 - DNA, 23 bp, Artificial Sequence
  Synthetic
tcggtatagataaagtccacgta

SEQ ID NO: 29923 - DNA, 20 bp, Artificial Sequence
  Synthetic
gaaaacagcctgatagtctg

SEQ ID NO: 29924 - DNA, 24 bp, Artificial Sequence
  Synthetic
gcaaaacatataccttacacaaag

SEQ ID NO: 29925 - DNA, 22 bp, Artificial Sequence
  Synthetic
tacgctcaaaatggtatttcag

SEQ ID NO: 29926 - DNA, 24 bp, Artificial Sequence
  Synthetic
ctaacgtatatggctatacactag

SEQ ID NO: 29927 - DNA, 23 bp, Artificial Sequence
  Synthetic
ctatggtaaaacatttgggttag

SEQ ID NO: 29928 - DNA, 18 bp, Artificial Sequence
  Synthetic
acggtagctctgctcaag

SEQ ID NO: 29929 - DNA, 20 bp, Artificial Sequence
  Synthetic
agaggggagaagagctcaac

SEQ ID NO: 29930 - DNA, 17 bp, Artificial Sequence
  Synthetic
cataatgccggcagcgt

SEQ ID NO: 29931 - DNA, 20 bp, Artificial Sequence
  Synthetic
tatgtgactatcaggcgccc

SEQ ID NO: 29932 - DNA, 16 bp, Artificial Sequence
  Synthetic
atgcccgcccgcacta

SEQ ID NO: 29933 - DNA, 19 bp, Artificial Sequence
  Synthetic
tatgccttgcgtccgaatc

SEQ ID NO: 29934 - DNA, 19 bp, Artificial Sequence
  Synthetic
acatcctttacgcacagcc

SEQ ID NO: 29935 - DNA, 17 bp, Artificial Sequence
  Synthetic
cagccagttttgcgccg

SEQ ID NO: 29936 - DNA, 16 bp, Artificial Sequence
  Synthetic
agaagcccgcagaccc

SEQ ID NO: 29937 - DNA, 19 bp, Artificial Sequence
  Synthetic
gtcgaaggcctctggaaag

SEQ ID NO: 29938 - DNA, 20 bp, Artificial Sequence
  Synthetic
cttcgggagggacttggtat

SEQ ID NO: 29939 - DNA, 19 bp, Artificial Sequence
  Synthetic
aatcaccagcctcttgccc

SEQ ID NO: 29940 - DNA, 18 bp, Artificial Sequence
  Synthetic
ttcgaggtggtcatcccg

SEQ ID NO: 29941 - DNA, 20 bp, Artificial Sequence
  Synthetic
gggtgtaaagcttaccctgc

SEQ ID NO: 29942 - DNA, 18 bp, Artificial Sequence
  Synthetic
agttgagaaccgcagtgc

SEQ ID NO: 29943 - DNA, 18 bp, Artificial Sequence
  Synthetic
tagcagtgtaccgggctc

SEQ ID NO: 29944 - DNA, 18 bp, Artificial Sequence
  Synthetic
gagagcctccccaggaac

SEQ ID NO: 29945 - DNA, 20 bp, Artificial Sequence
  Synthetic
ggccaggtgtactccttcag

SEQ ID NO: 29946 - DNA, 17 bp, Artificial Sequence
  Synthetic
tcgggtacgacggcaac

SEQ ID NO: 29947 - DNA, 16 bp, Artificial Sequence
  Synthetic
acgacgagctctgcgg

SEQ ID NO: 29948 - DNA, 18 bp, Artificial Sequence
  Synthetic
ttgatcttgtgcggggct

SEQ ID NO: 29949 - DNA, 20 bp, Artificial Sequence
  Synthetic
aatgattgtcgcctcctcag

SEQ ID NO: 29950 - DNA, 24 bp, Artificial Sequence
  Synthetic
agcatagtagtataggtagaaaca

SEQ ID NO: 29951 - DNA, 24 bp, Artificial Sequence
  Synthetic
ggaacaccacttaaatatcaatgt

SEQ ID NO: 29952 - DNA, 25 bp, Artificial Sequence
  Synthetic
gggtctatcagaaaaaggtaaaatt

SEQ ID NO: 29953 - DNA, 20 bp, Artificial Sequence
  Synthetic
aaagtttcttagcaggtgtg

SEQ ID NO: 29954 - DNA, 22 bp, Artificial Sequence
  Synthetic
accaaggtttattgtttgtcaa

SEQ ID NO: 29955 - DNA, 22 bp, Artificial Sequence
  Synthetic
atcaccagtaaaaacaggatca

SEQ ID NO: 29956 - DNA, 23 bp, Artificial Sequence
  Synthetic
ggttattactctgcaagatagca

SEQ ID NO: 29957 - DNA, 24 bp, Artificial Sequence
  Synthetic
accactaataactacatatggaac

SEQ ID NO: 29958 - DNA, 24 bp, Artificial Sequence
  Synthetic
cattactaataggccattgtgaaa

SEQ ID NO: 29959 - DNA, 21 bp, Artificial Sequence
  Synthetic
aagcatcaatgtcaataggtg

SEQ ID NO: 29960 - DNA, 18 bp, Artificial Sequence
  Synthetic
aatagcacgtgcaacacc

SEQ ID NO: 29961 - DNA, 23 bp, Artificial Sequence
  Synthetic
aagtcaaacttgaaagaagcttt

SEQ ID NO: 29962 - DNA, 21 bp, Artificial Sequence
  Synthetic
gctttacatccaaagaagcaa

SEQ ID NO: 29963 - DNA, 21 bp, Artificial Sequence
  Synthetic
caacacgtccattaacaaact

SEQ ID NO: 29964 - DNA, 24 bp, Artificial Sequence
  Synthetic
gagtctttcctaccaaatatacat

SEQ ID NO: 29965 - DNA, 24 bp, Artificial Sequence
  Synthetic
gatgaactaaagattgagagtaca

SEQ ID NO: 29966 - DNA, 20 bp, Artificial Sequence
  Synthetic
tctctcaacacaaccagatg

SEQ ID NO: 29967 - DNA, 20 bp, Artificial Sequence
  Synthetic
accttaatacgcaacacaga

SEQ ID NO: 29968 - DNA, 19 bp, Artificial Sequence
  Synthetic
gcagcatacaaaaaggcaa

SEQ ID NO: 29969 - DNA, 20 bp, Artificial Sequence
  Synthetic
gtcaccaccaataccaagta

SEQ ID NO: 29970 - DNA, 19 bp, Artificial Sequence
  Synthetic
tgagtagcagcttgttcag

SEQ ID NO: 29971 - DNA, 22 bp, Artificial Sequence
  Synthetic
gcttaagtttaccaggcataat

SEQ ID NO: 29972 - DNA, 20 bp, Artificial Sequence
  Synthetic
tgcaccatgtttaacagctt

SEQ ID NO: 29973 - DNA, 25 bp, Artificial Sequence
  Synthetic
cttgctcgtttaaataagaaatgtc

SEQ ID NO: 29974 - DNA, 22 bp, Artificial Sequence
  Synthetic
gcatagaccaagtccatcatag

SEQ ID NO: 29975 - DNA, 25 bp, Artificial Sequence
  Synthetic
cttggttatctaatgttaaaacacc

SEQ ID NO: 29976 - DNA, 18 bp, Artificial Sequence
  Synthetic
ttgatcaacgagtgctgg

SEQ ID NO: 29977 - DNA, 23 bp, Artificial Sequence
  Synthetic
atgtttttgatggtattgtcttg

SEQ ID NO: 29978 - DNA, 19 bp, Artificial Sequence
  Synthetic
tcgtaccacctggcttaaa

SEQ ID NO: 29979 - DNA, 23 bp, Artificial Sequence
  Synthetic
tgtcttaacaacatcatcaacaa

SEQ ID NO: 29980 - DNA, 20 bp, Artificial Sequence
  Synthetic
acatgatcatatgcgcattt

SEQ ID NO: 29981 - DNA, 20 bp, Artificial Sequence
  Synthetic
ggaggaccctgtattgtagt

SEQ ID NO: 29982 - DNA, 20 bp, Artificial Sequence
  Synthetic
gacacacaaccttcagtttg

SEQ ID NO: 29983 - DNA, 18 bp, Artificial Sequence
  Synthetic
taacagcatcaccagagg

SEQ ID NO: 29984 - DNA, 23 bp, Artificial Sequence
  Synthetic
acacaattgaaaattctggatac

SEQ ID NO: 29985 - DNA, 21 bp, Artificial Sequence
  Synthetic
acaacaccgagatttttgaga

SEQ ID NO: 29986 - DNA, 19 bp, Artificial Sequence
  Synthetic
ggcatagcataaccacact

SEQ ID NO: 29987 - DNA, 23 bp, Artificial Sequence
  Synthetic
tgcatcactaacataatcattga

SEQ ID NO: 29988 - DNA, 18 bp, Artificial Sequence
  Synthetic
agaaaccattggctgagt

SEQ ID NO: 29989 - DNA, 18 bp, Artificial Sequence
  Synthetic
acacggccattatgtgtg

SEQ ID NO: 29990 - DNA, 23 bp, Artificial Sequence
  Synthetic
ggcattaaaataaacaaaaccag

SEQ ID NO: 29991 - DNA, 23 bp, Artificial Sequence
  Synthetic
ccattaatataaaactggccagt

SEQ ID NO: 29992 - DNA, 19 bp, Artificial Sequence
  Synthetic
caccaaaagatgcagttgc

SEQ ID NO: 29993 - DNA, 23 bp, Artificial Sequence
  Synthetic
gtaactgtagtaagttttgcaag

SEQ ID NO: 29994 - DNA, 25 bp, Artificial Sequence
  Synthetic
tagaaagacctttagtacaagactt

SEQ ID NO: 29995 - DNA, 21 bp, Artificial Sequence
  Synthetic
aaacaaatgcattcaaagctg

SEQ ID NO: 29996 - DNA, 21 bp, Artificial Sequence
  Synthetic
gcacaaaatcagacaaaacag

SEQ ID NO: 29997 - DNA, 18 bp, Artificial Sequence
  Synthetic
ccacaatcacaacagcct

SEQ ID NO: 29998 - DNA, 21 bp, Artificial Sequence
  Synthetic
gcaacacaactataaaaagcg

SEQ ID NO: 29999 - DNA, 18 bp, Artificial Sequence
  Synthetic
actgacccacttgaacac

SEQ ID NO: 30000 - DNA, 19 bp, Artificial Sequence
  Synthetic
aagattcctgggaatgacc

SEQ ID NO: 30001 - DNA, 19 bp, Artificial Sequence
  Synthetic
gagcgatcctcaaactcaa

SEQ ID NO: 30002 - DNA, 19 bp, Artificial Sequence
  Synthetic
ttatcagccctgggttgag

SEQ ID NO: 30003 - DNA, 24 bp, Artificial Sequence
  Synthetic
aggttcttattatccttagctaca

SEQ ID NO: 30004 - DNA, 20 bp, Artificial Sequence
  Synthetic
ttttcagcaacactcagttt

SEQ ID NO: 30005 - DNA, 20 bp, Artificial Sequence
  Synthetic
gattcttgcttgtggaacaa

SEQ ID NO: 30006 - DNA, 23 bp, Artificial Sequence
  Synthetic
gcaataattcttttacactgtca

SEQ ID NO: 30007 - DNA, 20 bp, Artificial Sequence
  Synthetic
gggactttcggaatctaact

SEQ ID NO: 30008 - DNA, 19 bp, Artificial Sequence
  Synthetic
ctttgccttctcctgtgag

SEQ ID NO: 30009 - DNA, 21 bp, Artificial Sequence
  Synthetic
catcgtccccattttgataat

SEQ ID NO: 30010 - DNA, 19 bp, Artificial Sequence
  Synthetic
tctttgtcggacctgcgag

SEQ ID NO: 30011 - DNA, 23 bp, Artificial Sequence
  Synthetic
acttccattaattttaagaccca

SEQ ID NO: 30012 - DNA, 18 bp, Artificial Sequence
  Synthetic
ttcttcctccagagcctc

SEQ ID NO: 30013 - DNA, 22 bp, Artificial Sequence
  Synthetic
agattctccttcatttgttgaa

SEQ ID NO: 30014 - DNA, 18 bp, Artificial Sequence
  Synthetic
tcagcaattggtgtgctg

SEQ ID NO: 30015 - DNA, 19 bp, Artificial Sequence
  Synthetic
tgaacttttgccaaggcgg

SEQ ID NO: 30016 - DNA, 24 bp, Artificial Sequence
  Synthetic
ggtgtttctaaagagataacttct

SEQ ID NO: 30017 - DNA, 25 bp, Artificial Sequence
  Synthetic
cacttttggtatagttacagtttga

SEQ ID NO: 30018 - DNA, 18 bp, Artificial Sequence
  Synthetic
agtgttcacctgaagcag

SEQ ID NO: 30019 - DNA, 18 bp, Artificial Sequence
  Synthetic
atacatttgctcgcgacg

SEQ ID NO: 30020 - DNA, 22 bp, Artificial Sequence
  Synthetic
tcctctggtattatctccaact

SEQ ID NO: 30021 - DNA, 18 bp, Artificial Sequence
  Synthetic
cgggtgcggtgttaatag

SEQ ID NO: 30022 - DNA, 18 bp, Artificial Sequence
  Synthetic
gttttaggtgcttggcag

SEQ ID NO: 30023 - DNA, 21 bp, Artificial Sequence
  Synthetic
tccatcagtacctttgtgatc

SEQ ID NO: 30024 - DNA, 20 bp, Artificial Sequence
  Synthetic
ttgtgaaggactctgaaagt

SEQ ID NO: 30025 - DNA, 18 bp, Artificial Sequence
  Synthetic
gaagtaccaagtcgcctc

SEQ ID NO: 30026 - DNA, 25 bp, Artificial Sequence
  Synthetic
atctgtatgttcattatcataagcc

SEQ ID NO: 30027 - DNA, 25 bp, Artificial Sequence
  Synthetic
tgatataggattaccatctaatgca

SEQ ID NO: 30028 - DNA, 18 bp, Artificial Sequence
  Synthetic
agctgccagtgtaggtat

SEQ ID NO: 30029 - DNA, 18 bp, Artificial Sequence
  Synthetic
atcctccaactcgaacac

SEQ ID NO: 30030 - DNA, 22 bp, Artificial Sequence
  Synthetic
cttaatgaaggtgaatcaacac

SEQ ID NO: 30031 - DNA, 19 bp, Artificial Sequence
  Synthetic
aaatcgagtaggacgttcc

SEQ ID NO: 30032 - DNA, 21 bp, Artificial Sequence
  Synthetic
ttcacatccaaccataaacac

SEQ ID NO: 30033 - DNA, 25 bp, Artificial Sequence
  Synthetic
ccttctggaaaaaaagaataaggaa

SEQ ID NO: 30034 - DNA, 18 bp, Artificial Sequence
  Synthetic
gttttgaccttgggcctg

SEQ ID NO: 30035 - DNA, 18 bp, Artificial Sequence
  Synthetic
cagaaaatcagcagctgc

SEQ ID NO: 30036 - DNA, 18 bp, Artificial Sequence
  Synthetic
ctgtgtaggcggtcttga

SEQ ID NO: 30037 - DNA, 18 bp, Artificial Sequence
  Synthetic
tggggttggagggtaatc

SEQ ID NO: 30038 - DNA, 18 bp, Artificial Sequence
  Synthetic
caacaagccctccattct

SEQ ID NO: 30039 - DNA, 24 bp, Artificial Sequence
  Synthetic
tactcaagagataaagttcttccg

SEQ ID NO: 30040 - DNA, 18 bp, Artificial Sequence
  Synthetic
taagaaccctgaacctgc

SEQ ID NO: 30041 - DNA, 20 bp, Artificial Sequence
  Synthetic
tccaaggcatctcttcatag

SEQ ID NO: 30042 - DNA, 19 bp, Artificial Sequence
  Synthetic
tgatccaacctcagctgta

SEQ ID NO: 30043 - DNA, 18 bp, Artificial Sequence
  Synthetic
tcaccaggaaccatagca

SEQ ID NO: 30044 - DNA, 25 bp, Artificial Sequence
  Synthetic
ctccaaatctgtaaatctagctaaa

SEQ ID NO: 30045 - DNA, 20 bp, Artificial Sequence
  Synthetic
gttgaccaactgagtctgaa

SEQ ID NO: 30046 - DNA, 21 bp, Artificial Sequence
  Synthetic
tgcactcctgtaatatccatt

SEQ ID NO: 30047 - DNA, 21 bp, Artificial Sequence
  Synthetic
aggagcaaaacattccaagtt

SEQ ID NO: 30048 - DNA, 21 bp, Artificial Sequence
  Synthetic
tgatgtatgtctggattctcc

SEQ ID NO: 30049 - DNA, 18 bp, Artificial Sequence
  Synthetic
acctactggagtgaacca

SEQ ID NO: 30050 - DNA, 18 bp, Artificial Sequence
  Synthetic
gggggtggaagtacttca

SEQ ID NO: 30051 - DNA, 22 bp, Artificial Sequence
  Synthetic
caatctaatcagtctcccagta

SEQ ID NO: 30052 - DNA, 19 bp, Artificial Sequence
  Synthetic
cctacccttctcctcaaga

SEQ ID NO: 30053 - DNA, 18 bp, Artificial Sequence
  Synthetic
ttgcgggagaaatgctta

SEQ ID NO: 30054 - DNA, 18 bp, Artificial Sequence
  Synthetic
acaagcagccaatcatct

SEQ ID NO: 30055 - DNA, 23 bp, Artificial Sequence
  Synthetic
tttggaacatttcttgagtaacc

SEQ ID NO: 30056 - DNA, 22 bp, Artificial Sequence
  Synthetic
ctaactgagtcttacccactat

SEQ ID NO: 30057 - DNA, 23 bp, Artificial Sequence
  Synthetic
agaacaattttccatcatgacag

SEQ ID NO: 30058 - DNA, 22 bp, Artificial Sequence
  Synthetic
catctccgaatcttatcattgt

SEQ ID NO: 30059 - DNA, 21 bp, Artificial Sequence
  Synthetic
acttcaatttggtcattcgtg

SEQ ID NO: 30060 - DNA, 18 bp, Artificial Sequence
  Synthetic
ttaaactccagtgtgccg

SEQ ID NO: 30061 - DNA, 22 bp, Artificial Sequence
  Synthetic
gagactgtgattcttcctgatg

SEQ ID NO: 30062 - DNA, 19 bp, Artificial Sequence
  Synthetic
ttgtcattgggaatgcttc

SEQ ID NO: 30063 - DNA, 18 bp, Artificial Sequence
  Synthetic
tgtcctgttccctcagaa

SEQ ID NO: 30064 - DNA, 23 bp, Artificial Sequence
  Synthetic
agtttgttcatttctgagtcagt

SEQ ID NO: 30065 - DNA, 18 bp, Artificial Sequence
  Synthetic
caggcccacatgatgaac

SEQ ID NO: 30066 - DNA, 19 bp, Artificial Sequence
  Synthetic
acaggctaacaacaggtct

SEQ ID NO: 30067 - DNA, 23 bp, Artificial Sequence
  Synthetic
aaataatctaacagtcgcaaaca

SEQ ID NO: 30068 - DNA, 19 bp, Artificial Sequence
  Synthetic
tccacctctgctactgtag

SEQ ID NO: 30069 - DNA, 23 bp, Artificial Sequence
  Synthetic
ttcttcaaacagcttttccaaat

SEQ ID NO: 30070 - DNA, 20 bp, Artificial Sequence
  Synthetic
gtcctgttccataaatagcc

SEQ ID NO: 30071 - DNA, 22 bp, Artificial Sequence
  Synthetic
gtaacagttgcttacatccttc

SEQ ID NO: 30072 - DNA, 21 bp, Artificial Sequence
  Synthetic
ttccctctgatcttctgaaac

SEQ ID NO: 30073 - DNA, 21 bp, Artificial Sequence
  Synthetic
cctttgcctgtactaataccc

SEQ ID NO: 30074 - DNA, 18 bp, Artificial Sequence
  Synthetic
cctcagcaatggtctcaa

SEQ ID NO: 30075 - DNA, 18 bp, Artificial Sequence
  Synthetic
agcatccccagaatgttc

SEQ ID NO: 30076 - DNA, 18 bp, Artificial Sequence
  Synthetic
gtaggagtccgtgctttg

SEQ ID NO: 30077 - DNA, 18 bp, Artificial Sequence
  Synthetic
aacagcccataccaaacg

SEQ ID NO: 30078 - DNA, 23 bp, Artificial Sequence
  Synthetic
catgtccccatcttcaataatag

SEQ ID NO: 30079 - DNA, 25 bp, Artificial Sequence
  Synthetic
cagcctttaaataataatggttgtc

SEQ ID NO: 30080 - DNA, 25 bp, Artificial Sequence
  Synthetic
tttctattattattggttcacacgg

SEQ ID NO: 30081 - DNA, 22 bp, Artificial Sequence
  Synthetic
aattgataacacttgccaggat

SEQ ID NO: 30082 - DNA, 20 bp, Artificial Sequence
  Synthetic
accaatactgtccataagcc

SEQ ID NO: 30083 - DNA, 20 bp, Artificial Sequence
  Synthetic
tatgtctatgacgggcctat

SEQ ID NO: 30084 - DNA, 21 bp, Artificial Sequence
  Synthetic
cgatttggaattaggtgtgga

SEQ ID NO: 30085 - DNA, 19 bp, Artificial Sequence
  Synthetic
taggatcacgagccaaggg

SEQ ID NO: 30086 - DNA, 16 bp, Artificial Sequence
  Synthetic
tgggcgcgtctctctg

SEQ ID NO: 30087 - DNA, 16 bp, Artificial Sequence
  Synthetic
atgcgccacacggagg

SEQ ID NO: 30088 - DNA, 17 bp, Artificial Sequence
  Synthetic
aactgtgccctgttgcg

SEQ ID NO: 30089 - DNA, 17 bp, Artificial Sequence
  Synthetic
ctggtccggcagctcta

SEQ ID NO: 30090 - DNA, 18 bp, Artificial Sequence
  Synthetic
tacaccctctctcgcgcc

SEQ ID NO: 30091 - DNA, 19 bp, Artificial Sequence
  Synthetic
tgacgacgtcctggctttc

SEQ ID NO: 30092 - DNA, 17 bp, Artificial Sequence
  Synthetic
tgctggtcggagagtgc

SEQ ID NO: 30093 - DNA, 23 bp, Artificial Sequence
  Synthetic
atacttacttgagtgatggagtt

SEQ ID NO: 30094 - DNA, 24 bp, Artificial Sequence
  Synthetic
agacctattctttgtattgggaaa

SEQ ID NO: 30095 - DNA, 20 bp, Artificial Sequence
  Synthetic
tgttgttcaacattcgcaag

SEQ ID NO: 30096 - DNA, 21 bp, Artificial Sequence
  Synthetic
accggcttaactatacagttt

SEQ ID NO: 30097 - DNA, 18 bp, Artificial Sequence
  Synthetic
tctcggcagtttgtttca

SEQ ID NO: 30098 - DNA, 19 bp, Artificial Sequence
  Synthetic
gtgactatgagcagaccga

SEQ ID NO: 30099 - DNA, 23 bp, Artificial Sequence
  Synthetic
aagttaacctgtgtttttaacga

SEQ ID NO: 30100 - DNA, 20 bp, Artificial Sequence
  Synthetic
tcaacgcctggaaaaaaatt

SEQ ID NO: 30101 - DNA, 18 bp, Artificial Sequence
  Synthetic
ttggagaccgttgaacat

SEQ ID NO: 30102 - DNA, 21 bp, Artificial Sequence
  Synthetic
actcagaatacggtagcattt

SEQ ID NO: 30103 - DNA, 18 bp, Artificial Sequence
  Synthetic
taacgtagtgttgccgga

SEQ ID NO: 30104 - DNA, 19 bp, Artificial Sequence
  Synthetic
ttaactttttcaccacgcc

SEQ ID NO: 30105 - DNA, 21 bp, Artificial Sequence
  Synthetic
agtgcaagttaagcagtttac

SEQ ID NO: 30106 - DNA, 19 bp, Artificial Sequence
  Synthetic
taaaaaaacggccaacctc

SEQ ID NO: 30107 - DNA, 20 bp, Artificial Sequence
  Synthetic
tgtttgagctgaagatggtg

SEQ ID NO: 30108 - DNA, 21 bp, Artificial Sequence
  Synthetic
aggtgttttcggttttcttac

SEQ ID NO: 30109 - DNA, 21 bp, Artificial Sequence
  Synthetic
gtaagataacaggtaccgtgt

SEQ ID NO: 30110 - DNA, 23 bp, Artificial Sequence
  Synthetic
aatacctgtttataaactccgaa

SEQ ID NO: 30111 - DNA, 19 bp, Artificial Sequence
  Synthetic
tgaaatgctacacggacac

SEQ ID NO: 30112 - DNA, 20 bp, Artificial Sequence
  Synthetic
gcccgtctttagaaagagcg

SEQ ID NO: 30113 - DNA, 20 bp, Artificial Sequence
  Synthetic
tggagagaaacgcgaaggga

SEQ ID NO: 30114 - DNA, 16 bp, Artificial Sequence
  Synthetic
tctgacacaggccgcc

SEQ ID NO: 30115 - DNA, 20 bp, Artificial Sequence
  Synthetic
gacagatcttgccggtatcg

SEQ ID NO: 30116 - DNA, 19 bp, Artificial Sequence
  Synthetic
caccctgtgtgtgactgtc

SEQ ID NO: 30117 - DNA, 19 bp, Artificial Sequence
  Synthetic
agttccatgctattcccca

SEQ ID NO: 30118 - DNA, 22 bp, Artificial Sequence
  Synthetic
tgtctatgtaacttctcatccc

SEQ ID NO: 30119 - DNA, 20 bp, Artificial Sequence
  Synthetic
tcttggactttccttcagtc

SEQ ID NO: 30120 - DNA, 25 bp, Artificial Sequence
  Synthetic
actctacatttattgggtattttgg

SEQ ID NO: 30121 - DNA, 22 bp, Artificial Sequence
  Synthetic
tggattttgtttgtaccattca

SEQ ID NO: 30122 - DNA, 22 bp, Artificial Sequence
  Synthetic
cataatgcatcaaacatttggt

SEQ ID NO: 30123 - DNA, 22 bp, Artificial Sequence
  Synthetic
gcaatgttacatttacccaaat

SEQ ID NO: 30124 - DNA, 21 bp, Artificial Sequence
  Synthetic
ggggaatatctcaaacctttc

SEQ ID NO: 30125 - DNA, 20 bp, Artificial Sequence
  Synthetic
tattgctatttccggcttga

SEQ ID NO: 30126 - DNA, 23 bp, Artificial Sequence
  Synthetic
atgtatattctgaaatgggaggc

SEQ ID NO: 30127 - DNA, 24 bp, Artificial Sequence
  Synthetic
ctttgttagtaatctcgtcaatgg

SEQ ID NO: 30128 - DNA, 19 bp, Artificial Sequence
  Synthetic
ggagatagagccggccttg

SEQ ID NO: 30129 - DNA, 19 bp, Artificial Sequence
  Synthetic
tctgtcgctgcgttccatg

SEQ ID NO: 30130 - DNA, 17 bp, Artificial Sequence
  Synthetic
agagcaggagcaggctc

SEQ ID NO: 30131 - DNA, 19 bp, Artificial Sequence
  Synthetic
gatctggccctcaggtgac

SEQ ID NO: 30132 - DNA, 16 bp, Artificial Sequence
  Synthetic
ggcgttcgggggactt

SEQ ID NO: 30133 - DNA, 20 bp, Artificial Sequence
  Synthetic
cacgtcgaacagatgtctga

SEQ ID NO: 30134 - DNA, 18 bp, Artificial Sequence
  Synthetic
gacgatcacccaagccgt

SEQ ID NO: 30135 - DNA, 18 bp, Artificial Sequence
  Synthetic
ctctcgtgccgttgcctt

SEQ ID NO: 30136 - DNA, 19 bp, Artificial Sequence
  Synthetic
gtttaacggcgtgttcgac

SEQ ID NO: 30137 - DNA, 18 bp, Artificial Sequence
  Synthetic
cgtgggggcagaactgag

SEQ ID NO: 30138 - DNA, 18 bp, Artificial Sequence
  Synthetic
gtaagatacggcgtcctg

SEQ ID NO: 30139 - DNA, 23 bp, Artificial Sequence
  Synthetic
gcttatgctatatgaacagactg

SEQ ID NO: 30140 - DNA, 19 bp, Artificial Sequence
  Synthetic
tgtttaagggggttcgttt

SEQ ID NO: 30141 - DNA, 18 bp, Artificial Sequence
  Synthetic
aatcttacttgtcgggcg

SEQ ID NO: 30142 - DNA, 19 bp, Artificial Sequence
  Synthetic
ggtctcgacttcgtgaatg

SEQ ID NO: 30143 - DNA, 20 bp, Artificial Sequence
  Synthetic
tctcgttttttgctgtgaaa

SEQ ID NO: 30144 - DNA, 18 bp, Artificial Sequence
  Synthetic
tatcgtcctccgcaagtt

SEQ ID NO: 30145 - DNA, 20 bp, Artificial Sequence
  Synthetic
ctgtaacagggagaagtttg

SEQ ID NO: 30146 - DNA, 22 bp, Artificial Sequence
  Synthetic
tttcatttgctcttccatatgt

SEQ ID NO: 30147 - DNA, 19 bp, Artificial Sequence
  Synthetic
ttacttgtccaaaggtcga

SEQ ID NO: 30148 - DNA, 18 bp, Artificial Sequence
  Synthetic
atccaaccgcagattgtc

SEQ ID NO: 30149 - DNA, 19 bp, Artificial Sequence
  Synthetic
taattcggtttttaggcgc

SEQ ID NO: 30150 - DNA, 23 bp, Artificial Sequence
  Synthetic
aagttttgtagatatgggcttag

SEQ ID NO: 30151 - DNA, 18 bp, Artificial Sequence
  Synthetic
tagtcgttggtgtcccat

SEQ ID NO: 30152 - DNA, 25 bp, Artificial Sequence
  Synthetic
cttttttaatgaagctgaacaactc

SEQ ID NO: 30153 - DNA, 20 bp, Artificial Sequence
  Synthetic
ttttcagttcaaacgcagac

SEQ ID NO: 30154 - DNA, 25 bp, Artificial Sequence
  Synthetic
cgttagtaaatataacagtaggaga

SEQ ID NO: 30155 - DNA, 22 bp, Artificial Sequence
  Synthetic
caaagatctacactctttgctc

SEQ ID NO: 30156 - DNA, 22 bp, Artificial Sequence
  Synthetic
aataaacttatgctgaaccgag

SEQ ID NO: 30157 - DNA, 18 bp, Artificial Sequence
  Synthetic
taacgacgttgtccacca

SEQ ID NO: 30158 - DNA, 18 bp, Artificial Sequence
  Synthetic
tagagccggccttggaac

SEQ ID NO: 30159 - DNA, 18 bp, Artificial Sequence
  Synthetic
cgtcactcgaggaaacgc

SEQ ID NO: 30160 - DNA, 18 bp, Artificial Sequence
  Synthetic
ggtgactccgcagactgg

SEQ ID NO: 30161 - DNA, 16 bp, Artificial Sequence
  Synthetic
agggtgacgacggacc

SEQ ID NO: 30162 - DNA, 17 bp, Artificial Sequence
  Synthetic
tcgttccgcacatacgc

SEQ ID NO: 30163 - DNA, 18 bp, Artificial Sequence
  Synthetic
atacaactggcaagtgca

SEQ ID NO: 30164 - DNA, 24 bp, Artificial Sequence
  Synthetic
cgatattcttccctcatagacttt

SEQ ID NO: 30165 - DNA, 20 bp, Artificial Sequence
  Synthetic
tgtttcccaacaagagtggc

SEQ ID NO: 30166 - DNA, 21 bp, Artificial Sequence
  Synthetic
agcccttagtagtatcaaggt

SEQ ID NO: 30167 - DNA, 21 bp, Artificial Sequence
  Synthetic
aatttctgtcccaattgctct

SEQ ID NO: 30168 - DNA, 20 bp, Artificial Sequence
  Synthetic
ttgcactggtcacataattc

SEQ ID NO: 30169 - DNA, 20 bp, Artificial Sequence
  Synthetic
caatgtggttggttttttcc

SEQ ID NO: 30170 - DNA, 22 bp, Artificial Sequence
  Synthetic
cagtgacaaaatacacaatgtg

SEQ ID NO: 30171 - DNA, 23 bp, Artificial Sequence
  Synthetic
catcttctgaaactacatcacct

SEQ ID NO: 30172 - DNA, 22 bp, Artificial Sequence
  Synthetic
cactccaaaaagttccttaaac

SEQ ID NO: 30173 - DNA, 24 bp, Artificial Sequence
  Synthetic
gaactttgtaatttaggtggttgt

SEQ ID NO: 30174 - DNA, 25 bp, Artificial Sequence
  Synthetic
cacaatctctaacatatttagcttg

SEQ ID NO: 30175 - DNA, 19 bp, Artificial Sequence
  Synthetic
gcccatttgtcttgctgta

SEQ ID NO: 30176 - DNA, 21 bp, Artificial Sequence
  Synthetic
ttctactgtctttcctccttt

SEQ ID NO: 30177 - DNA, 24 bp, Artificial Sequence
  Synthetic
cttccagttgtattataggtgtag

SEQ ID NO: 30178 - DNA, 20 bp, Artificial Sequence
  Synthetic
gatacgaccactagcctcta

SEQ ID NO: 30179 - DNA, 22 bp, Artificial Sequence
  Synthetic
tctgaaatagtatgcaggattc

SEQ ID NO: 30180 - DNA, 25 bp, Artificial Sequence
  Synthetic
ggtttcagaattaaataaagacgtg

SEQ ID NO: 30181 - DNA, 25 bp, Artificial Sequence
  Synthetic
tcactttttaattctagtacaggac

SEQ ID NO: 30182 - DNA, 23 bp, Artificial Sequence
  Synthetic
acaacacatacatacattccaga

SEQ ID NO: 30183 - DNA, 24 bp, Artificial Sequence
  Synthetic
ccaaactgctattagctaaatgtt

SEQ ID NO: 30184 - DNA, 18 bp, Artificial Sequence
  Synthetic
gaacacacagccaagttg

SEQ ID NO: 30185 - DNA, 22 bp, Artificial Sequence
  Synthetic
cgtttcttatagtcacagtgta

SEQ ID NO: 30186 - DNA, 18 bp, Artificial Sequence
  Synthetic
tgttgttcgtcccgtcta

SEQ ID NO: 30187 - DNA, 19 bp, Artificial Sequence
  Synthetic
ccggcacttctgtatcaat

SEQ ID NO: 30188 - DNA, 20 bp, Artificial Sequence
  Synthetic
tacaatatagcttggcctgc

SEQ ID NO: 30189 - DNA, 22 bp, Artificial Sequence
  Synthetic
tgtgcattactgtctacatctg

SEQ ID NO: 30190 - DNA, 24 bp, Artificial Sequence
  Synthetic
acaattatgttttggtgtaccttg

SEQ ID NO: 30191 - DNA, 18 bp, Artificial Sequence
  Synthetic
gaattttctcctggcacg

SEQ ID NO: 30192 - DNA, 18 bp, Artificial Sequence
  Synthetic
tcccatatgcacttccca

SEQ ID NO: 30193 - DNA, 19 bp, Artificial Sequence
  Synthetic
ttccttgcgacacactctg

SEQ ID NO: 30194 - DNA, 20 bp, Artificial Sequence
  Synthetic
gtaccagtgatacactaggg

SEQ ID NO: 30195 - DNA, 18 bp, Artificial Sequence
  Synthetic
aaacacagaggcagactg

SEQ ID NO: 30196 - DNA, 18 bp, Artificial Sequence
  Synthetic
attgcctgtaccctgaac

SEQ ID NO: 30197 - DNA, 18 bp, Artificial Sequence
  Synthetic
gcctactaaaacgcacac

SEQ ID NO: 30198 - DNA, 20 bp, Artificial Sequence
  Synthetic
taggaggcagataaaccttg

SEQ ID NO: 30199 - DNA, 18 bp, Artificial Sequence
  Synthetic
gtgggtcctgcttttcag

SEQ ID NO: 30200 - DNA, 18 bp, Artificial Sequence
  Synthetic
agaacgtatgctgcaagc

SEQ ID NO: 30201 - DNA, 19 bp, Artificial Sequence
  Synthetic
gcatatcaacatcaaccgg

SEQ ID NO: 30202 - DNA, 20 bp, Artificial Sequence
  Synthetic
ggactcaaagtgagcacacg

SEQ ID NO: 30203 - DNA, 21 bp, Artificial Sequence
  Synthetic
gcatttgctacatcttgagat

SEQ ID NO: 30204 - DNA, 18 bp, Artificial Sequence
  Synthetic
taccagggtagtgcacaa

SEQ ID NO: 30205 - DNA, 19 bp, Artificial Sequence
  Synthetic
aaactaaatcgcagactgc

SEQ ID NO: 30206 - DNA, 25 bp, Artificial Sequence
  Synthetic
catggagtatttattatctgcagtt

SEQ ID NO: 30207 - DNA, 22 bp, Artificial Sequence
  Synthetic
ggttatttctgagtcaaacctg

SEQ ID NO: 30208 - DNA, 21 bp, Artificial Sequence
  Synthetic
ttgtctccatcatatccatca

SEQ ID NO: 30209 - DNA, 25 bp, Artificial Sequence
  Synthetic
gttctttaacactatctacaaaacc

SEQ ID NO: 30210 - DNA, 23 bp, Artificial Sequence
  Synthetic
atttcttaagccatgaatcagac

SEQ ID NO: 30211 - DNA, 18 bp, Artificial Sequence
  Synthetic
tatagctggtggtggtgg

SEQ ID NO: 30212 - DNA, 19 bp, Artificial Sequence
  Synthetic
aatagttgtaccactcccg

SEQ ID NO: 30213 - DNA, 19 bp, Artificial Sequence
  Synthetic
ctctccaagtacctctcac

SEQ ID NO: 30214 - DNA, 25 bp, Artificial Sequence
  Synthetic
ccacagttacttgattattgtacaa

SEQ ID NO: 30215 - DNA, 23 bp, Artificial Sequence
  Synthetic
tctctactctttgcactcttaaa

SEQ ID NO: 30216 - DNA, 20 bp, Artificial Sequence
  Synthetic
accctctgttttacaacgat

SEQ ID NO: 30217 - DNA, 23 bp, Artificial Sequence
  Synthetic
tgttaggaaactgtatacattgt

SEQ ID NO: 30218 - DNA, 23 bp, Artificial Sequence
  Synthetic
ttaaaacagtattttggctctgt

SEQ ID NO: 30219 - DNA, 18 bp, Artificial Sequence
  Synthetic
tccgtcgtttggctcctc

SEQ ID NO: 30220 - DNA, 18 bp, Artificial Sequence
  Synthetic
gcccatgtatcaccttct

SEQ ID NO: 30221 - DNA, 20 bp, Artificial Sequence
  Synthetic
ccacatctaaagcaaaccgt

SEQ ID NO: 30222 - DNA, 18 bp, Artificial Sequence
  Synthetic
aattgtagctcgctcacc

SEQ ID NO: 30223 - DNA, 20 bp, Artificial Sequence
  Synthetic
acagccatctgcaaaaaatt

SEQ ID NO: 30224 - DNA, 22 bp, Artificial Sequence
  Synthetic
tgaacacttgattctgtttagg

SEQ ID NO: 30225 - DNA, 18 bp, Artificial Sequence
  Synthetic
tctttgcaaccaaaacgg

SEQ ID NO: 30226 - DNA, 18 bp, Artificial Sequence
  Synthetic
aatcgtctgcccaaagac

SEQ ID NO: 30227 - DNA, 20 bp, Artificial Sequence
  Synthetic
cacacgagactcttcacacc

SEQ ID NO: 30228 - DNA, 18 bp, Artificial Sequence
  Synthetic
tgagttttcatgcgagcc

SEQ ID NO: 30229 - DNA, 25 bp, Artificial Sequence
  Synthetic
cagtatagagtttagtgtatcttgt

SEQ ID NO: 30230 - DNA, 22 bp, Artificial Sequence
  Synthetic
gaattttgtggcattacattgg

SEQ ID NO: 30231 - DNA, 25 bp, Artificial Sequence
  Synthetic
ggtacacaattaatgtatggtacaa

SEQ ID NO: 30232 - DNA, 22 bp, Artificial Sequence
  Synthetic
gacactaaagtctggtagaaga

SEQ ID NO: 30233 - DNA, 24 bp, Artificial Sequence
  Synthetic
ctgtactaaagctatcacaaacac

SEQ ID NO: 30234 - DNA, 18 bp, Artificial Sequence
  Synthetic
atggtggttgaagatgcc

SEQ ID NO: 30235 - DNA, 19 bp, Artificial Sequence
  Synthetic
ccaggtggtacaaacatga

SEQ ID NO: 30236 - DNA, 21 bp, Artificial Sequence
  Synthetic
gtgtcttccatagctctgaag

SEQ ID NO: 30237 - DNA, 18 bp, Artificial Sequence
  Synthetic
taagtgcgcattcctgta

SEQ ID NO: 30238 - DNA, 20 bp, Artificial Sequence
  Synthetic
acaatgtccttcaccaatca

SEQ ID NO: 30239 - DNA, 22 bp, Artificial Sequence
  Synthetic
gccatttaactacctttgaagt

SEQ ID NO: 30240 - DNA, 18 bp, Artificial Sequence
  Synthetic
atgccaatccactcaagg

SEQ ID NO: 30241 - DNA, 20 bp, Artificial Sequence
  Synthetic
gacaccatctgacagaacat

SEQ ID NO: 30242 - DNA, 20 bp, Artificial Sequence
  Synthetic
gtggtggcttactacagttc

SEQ ID NO: 30243 - DNA, 19 bp, Artificial Sequence
  Synthetic
tcaattgagccatggactg

SEQ ID NO: 30244 - DNA, 23 bp, Artificial Sequence
  Synthetic
gtaatgatatggcagtttcttct

SEQ ID NO: 30245 - DNA, 25 bp, Artificial Sequence
  Synthetic
tcagcaaaatatttcctaagtagtg

SEQ ID NO: 30246 - DNA, 19 bp, Artificial Sequence
  Synthetic
gttctgggttgatgtcaag

SEQ ID NO: 30247 - DNA, 19 bp, Artificial Sequence
  Synthetic
tccacaatcctggtcttac

SEQ ID NO: 30248 - DNA, 18 bp, Artificial Sequence
  Synthetic
cgctttaaaccacactgg

SEQ ID NO: 30249 - DNA, 19 bp, Artificial Sequence
  Synthetic
acaaacacaacgaatggac

SEQ ID NO: 30250 - DNA, 20 bp, Artificial Sequence
  Synthetic
ttctcttgtctgctgtgatt

SEQ ID NO: 30251 - DNA, 23 bp, Artificial Sequence
  Synthetic
catgttttaacctttcaaccttc

SEQ ID NO: 30252 - DNA, 19 bp, Artificial Sequence
  Synthetic
gaaatctggttttgcggac

SEQ ID NO: 30253 - DNA, 23 bp, Artificial Sequence
  Synthetic
cttactatcaactgaatcagcct

SEQ ID NO: 30254 - DNA, 21 bp, Artificial Sequence
  Synthetic
catccccatgacattgtcaat

SEQ ID NO: 30255 - DNA, 18 bp, Artificial Sequence
  Synthetic
caggaccgttgatttccc

SEQ ID NO: 30256 - DNA, 19 bp, Artificial Sequence
  Synthetic
ttacttgcaaccgcccaaa

SEQ ID NO: 30257 - DNA, 19 bp, Artificial Sequence
  Synthetic
ggcactcaagagtagtctc

SEQ ID NO: 30258 - DNA, 18 bp, Artificial Sequence
  Synthetic
taggtataggcggcagag

SEQ ID NO: 30259 - DNA, 23 bp, Artificial Sequence
  Synthetic
cttactgtaaataaagctgaagc

SEQ ID NO: 30260 - DNA, 19 bp, Artificial Sequence
  Synthetic
ccttgcatgcgtcacacat

SEQ ID NO: 30261 - DNA, 24 bp, Artificial Sequence
  Synthetic
tttcaaattcctcgctataatcct

SEQ ID NO: 30262 - DNA, 20 bp, Artificial Sequence
  Synthetic
gcctccctcatttcttcctc

SEQ ID NO: 30263 - DNA, 19 bp, Artificial Sequence
  Synthetic
aggctgacttgtccagagt

SEQ ID NO: 30264 - DNA, 20 bp, Artificial Sequence
  Synthetic
gtgcagccctttaccacatt

SEQ ID NO: 30265 - DNA, 18 bp, Artificial Sequence
  Synthetic
gctgcatcctggtgtgtc

SEQ ID NO: 30266 - DNA, 16 bp, Artificial Sequence
  Synthetic
tgtcatggcggctgcg

SEQ ID NO: 30267 - DNA, 20 bp, Artificial Sequence
  Synthetic
cccctgctatgactggatca

SEQ ID NO: 30268 - DNA, 20 bp, Artificial Sequence
  Synthetic
gcattcccttccaagttgca

SEQ ID NO: 30269 - DNA, 19 bp, Artificial Sequence
  Synthetic
gacggcagttgcatctcct

SEQ ID NO: 30270 - DNA, 17 bp, Artificial Sequence
  Synthetic
aggacatgacgctggcc

SEQ ID NO: 30271 - DNA, 16 bp, Artificial Sequence
  Synthetic
tgcgagaccgtctgcg

SEQ ID NO: 30272 - DNA, 19 bp, Artificial Sequence
  Synthetic
gaccccctggtggaaaacg

SEQ ID NO: 30273 - DNA, 19 bp, Artificial Sequence
  Synthetic
tgccaccaagcttgacaat

SEQ ID NO: 30274 - DNA, 17 bp, Artificial Sequence
  Synthetic
actaacgagcccctgcg

SEQ ID NO: 30275 - DNA, 16 bp, Artificial Sequence
  Synthetic
ctttcgcgccgagcag

SEQ ID NO: 30276 - DNA, 18 bp, Artificial Sequence
  Synthetic
tgcgacgactcggacttt

SEQ ID NO: 30277 - DNA, 18 bp, Artificial Sequence
  Synthetic
ttcaggagtgggcactgg

SEQ ID NO: 30278 - DNA, 20 bp, Artificial Sequence
  Synthetic
gcggctctttgttacctacg

SEQ ID NO: 30279 - DNA, 18 bp, Artificial Sequence
  Synthetic
tctccgtcctcgaggagc

SEQ ID NO: 30280 - DNA, 19 bp, Artificial Sequence
  Synthetic
ctaccaggacaactcgggc

SEQ ID NO: 30281 - DNA, 15 bp, Artificial Sequence
  Synthetic
tgcgccgctggatca

SEQ ID NO: 30282 - DNA, 18 bp, Artificial Sequence
  Synthetic
caccgaaaccatgcgtcg

SEQ ID NO: 30283 - DNA, 20 bp, Artificial Sequence
  Synthetic
cgcaattctaacagcgtcca

SEQ ID NO: 30284 - DNA, 20 bp, Artificial Sequence
  Synthetic
tgttgacatggacgacttcc

SEQ ID NO: 30285 - DNA, 16 bp, Artificial Sequence
  Synthetic
tctggaaccgcgtccg

SEQ ID NO: 30286 - DNA, 16 bp, Artificial Sequence
  Synthetic
ggcggctatcgggctt

SEQ ID NO: 30287 - DNA, 16 bp, Artificial Sequence
  Synthetic
ttgtacagcgccggcg

SEQ ID NO: 30288 - DNA, 16 bp, Artificial Sequence
  Synthetic
tgcacgatggcctccg

SEQ ID NO: 30289 - DNA, 17 bp, Artificial Sequence
  Synthetic
acggccttgtggatgcg

SEQ ID NO: 30290 - DNA, 16 bp, Artificial Sequence
  Synthetic
gttgcatcgcggcctc

SEQ ID NO: 30291 - DNA, 16 bp, Artificial Sequence
  Synthetic
tgaaccgctcgcgctg

SEQ ID NO: 30292 - DNA, 18 bp, Artificial Sequence
  Synthetic
gtgaagggtgcgatcagc

SEQ ID NO: 30293 - DNA, 16 bp, Artificial Sequence
  Synthetic
gccccctcctgcatca

SEQ ID NO: 30294 - DNA, 19 bp, Artificial Sequence
  Synthetic
cccacagaaacccgtcgtt

SEQ ID NO: 30295 - DNA, 18 bp, Artificial Sequence
  Synthetic
tcccgcccaagtccaaca

SEQ ID NO: 30296 - DNA, 19 bp, Artificial Sequence
  Synthetic
aatgctgtttctgccctcc

SEQ ID NO: 30297 - DNA, 18 bp, Artificial Sequence
  Synthetic
ggctctcggtgaagtcca

SEQ ID NO: 30298 - DNA, 21 bp, Artificial Sequence
  Synthetic
caatctctagctccttctcag

SEQ ID NO: 30299 - DNA, 20 bp, Artificial Sequence
  Synthetic
ggcgagatcgttgtaaaagc

SEQ ID NO: 30300 - DNA, 20 bp, Artificial Sequence
  Synthetic
tgttattgctgggcgagatg

SEQ ID NO: 30301 - DNA, 16 bp, Artificial Sequence
  Synthetic
tagtcgcgcgcgtcag

SEQ ID NO: 30302 - DNA, 19 bp, Artificial Sequence
  Synthetic
gatcagggacgaggaggac

SEQ ID NO: 30303 - DNA, 20 bp, Artificial Sequence
  Synthetic
atagctacgcttgctcctga

SEQ ID NO: 30304 - DNA, 16 bp, Artificial Sequence
  Synthetic
tccacggtctgcacgc

SEQ ID NO: 30305 - DNA, 20 bp, Artificial Sequence
  Synthetic
tggaaggatgcaacacgtag

SEQ ID NO: 30306 - DNA, 17 bp, Artificial Sequence
  Synthetic
aggaacccgccactcag

SEQ ID NO: 30307 - DNA, 18 bp, Artificial Sequence
  Synthetic
taggtccggagcgttgag

SEQ ID NO: 30308 - DNA, 18 bp, Artificial Sequence
  Synthetic
aagggcctcctcgtacga

SEQ ID NO: 30309 - DNA, 19 bp, Artificial Sequence
  Synthetic
cttaatagcatcggcggcg

SEQ ID NO: 30310 - DNA, 18 bp, Artificial Sequence
  Synthetic
gatccacgggcacaaagc

SEQ ID NO: 30311 - DNA, 21 bp, Artificial Sequence
  Synthetic
ttcgtttgcatagataggctc

SEQ ID NO: 30312 - DNA, 19 bp, Artificial Sequence
  Synthetic
ttccacaccgtgattctca

SEQ ID NO: 30313 - DNA, 20 bp, Artificial Sequence
  Synthetic
cgccaatgttaacgtaagcg

SEQ ID NO: 30314 - DNA, 16 bp, Artificial Sequence
  Synthetic
tgtgcgccatggggaa

SEQ ID NO: 30315 - DNA, 19 bp, Artificial Sequence
  Synthetic
gccctggtagccaatgttg

SEQ ID NO: 30316 - DNA, 16 bp, Artificial Sequence
  Synthetic
tgggtgacggagggca

SEQ ID NO: 30317 - DNA, 15 bp, Artificial Sequence
  Synthetic
tcgcgcacaatggcc

SEQ ID NO: 30318 - DNA, 18 bp, Artificial Sequence
  Synthetic
tgctcgaggctgagacag

SEQ ID NO: 30319 - DNA, 19 bp, Artificial Sequence
  Synthetic
agcgaaagtagggggagtg

SEQ ID NO: 30320 - DNA, 18 bp, Artificial Sequence
  Synthetic
cggtcccaactgcgattt

SEQ ID NO: 30321 - DNA, 18 bp, Artificial Sequence
  Synthetic
ttagcgggaaaagctgcg

SEQ ID NO: 30322 - DNA, 17 bp, Artificial Sequence
  Synthetic
aactgggagtgcaccgg

SEQ ID NO: 30323 - DNA, 18 bp, Artificial Sequence
  Synthetic
tctgaacgtgtgcaaccc

SEQ ID NO: 30324 - DNA, 16 bp, Artificial Sequence
  Synthetic
aaaggagcccctcgcc

SEQ ID NO: 30325 - DNA, 19 bp, Artificial Sequence
  Synthetic
agcagcacatcctcctgtc

SEQ ID NO: 30326 - DNA, 18 bp, Artificial Sequence
  Synthetic
gatccatgatgcgacgca

SEQ ID NO: 30327 - DNA, 17 bp, Artificial Sequence
  Synthetic
agcacagtctgccccag

SEQ ID NO: 30328 - DNA, 19 bp, Artificial Sequence
  Synthetic
ctcataaagtcgggcagcc

SEQ ID NO: 30329 - DNA, 16 bp, Artificial Sequence
  Synthetic
ggagctgggggttgca

SEQ ID NO: 30330 - DNA, 20 bp, Artificial Sequence
  Synthetic
ccaggtagacccctttaccc

SEQ ID NO: 30331 - DNA, 18 bp, Artificial Sequence
  Synthetic
tgtgggccctccatgatc

SEQ ID NO: 30332 - DNA, 20 bp, Artificial Sequence
  Synthetic
gctgcagctgatcttcgttt

SEQ ID NO: 30333 - DNA, 20 bp, Artificial Sequence
  Synthetic
agttgtatgcctttgcctcg

SEQ ID NO: 30334 - DNA, 18 bp, Artificial Sequence
  Synthetic
ttcagtcgtagccgtcga

SEQ ID NO: 30335 - DNA, 19 bp, Artificial Sequence
  Synthetic
aaagttcacctgttcctgg

SEQ ID NO: 30336 - DNA, 24 bp, Artificial Sequence
  Synthetic
tactgtacatataacactcctctc

SEQ ID NO: 30337 - DNA, 21 bp, Artificial Sequence
  Synthetic
agcaatttttccttctgctca

SEQ ID NO: 30338 - DNA, 23 bp, Artificial Sequence
  Synthetic
tctacttttcccttactgtcatg

SEQ ID NO: 30339 - DNA, 18 bp, Artificial Sequence
  Synthetic
ttgccatttggaggtcca

SEQ ID NO: 30340 - DNA, 18 bp, Artificial Sequence
  Synthetic
atcactcccaccacgatt

SEQ ID NO: 30341 - DNA, 18 bp, Artificial Sequence
  Synthetic
ggctgaggattcccgatt

SEQ ID NO: 30342 - DNA, 20 bp, Artificial Sequence
  Synthetic
tgtattcgggactgtggtga

SEQ ID NO: 30343 - DNA, 18 bp, Artificial Sequence
  Synthetic
aactgatttctgcgggga

SEQ ID NO: 30344 - DNA, 20 bp, Artificial Sequence
  Synthetic
gcaaagggtcttaaggaggg

SEQ ID NO: 30345 - DNA, 22 bp, Artificial Sequence
  Synthetic
caaaggtggttcagtattaact

SEQ ID NO: 30346 - DNA, 21 bp, Artificial Sequence
  Synthetic
atcctgatcaattctgcaatt

SEQ ID NO: 30347 - DNA, 21 bp, Artificial Sequence
  Synthetic
gtattcacatccagtttcctg

SEQ ID NO: 30348 - DNA, 18 bp, Artificial Sequence
  Synthetic
aatcaccgacccccgttt

SEQ ID NO: 30349 - DNA, 20 bp, Artificial Sequence
  Synthetic
cagtgtgtttataaggggca

SEQ ID NO: 30350 - DNA, 25 bp, Artificial Sequence
  Synthetic
gcagattatcataatgtaagttctg

SEQ ID NO: 30351 - DNA, 19 bp, Artificial Sequence
  Synthetic
cctgcgtgacttgcacttt

SEQ ID NO: 30352 - DNA, 22 bp, Artificial Sequence
  Synthetic
gtttctattatgaaggtttgcc

SEQ ID NO: 30353 - DNA, 20 bp, Artificial Sequence
  Synthetic
tctactaaccatgcttcagc

SEQ ID NO: 30354 - DNA, 20 bp, Artificial Sequence
  Synthetic
tgtactcgttcctactggat

SEQ ID NO: 30355 - DNA, 18 bp, Artificial Sequence
  Synthetic
ggaagtgtgtttgcgaaa

SEQ ID NO: 30356 - DNA, 19 bp, Artificial Sequence
  Synthetic
gggcctaatgtgaagacag

SEQ ID NO: 30357 - DNA, 25 bp, Artificial Sequence
  Synthetic
gcttctaatctattgaagaatcctt

SEQ ID NO: 30358 - DNA, 22 bp, Artificial Sequence
  Synthetic
ccatgtccaaatatgttcttcc

SEQ ID NO: 30359 - DNA, 18 bp, Artificial Sequence
  Synthetic
tcttctgcaccacgaatc

SEQ ID NO: 30360 - DNA, 24 bp, Artificial Sequence
  Synthetic
cttctattgtccaagtatcctgtt

SEQ ID NO: 30361 - DNA, 18 bp, Artificial Sequence
  Synthetic
tatcgtcggctttgcatg

SEQ ID NO: 30362 - DNA, 20 bp, Artificial Sequence
  Synthetic
tgcccatattctcaggtaga

SEQ ID NO: 30363 - DNA, 18 bp, Artificial Sequence
  Synthetic
ttacgcttgatggtcgtc

SEQ ID NO: 30364 - DNA, 21 bp, Artificial Sequence
  Synthetic
tggactttttgtgttgttgtt

SEQ ID NO: 30365 - DNA, 21 bp, Artificial Sequence
  Synthetic
ctctcttatcaagtcaggctt

SEQ ID NO: 30366 - DNA, 23 bp, Artificial Sequence
  Synthetic
atctcctaccttgactattctga

SEQ ID NO: 30367 - DNA, 23 bp, Artificial Sequence
  Synthetic
ctagagctactttattggcatta

SEQ ID NO: 30368 - DNA, 18 bp, Artificial Sequence
  Synthetic
aacggggaggattccttt

SEQ ID NO: 30369 - DNA, 18 bp, Artificial Sequence
  Synthetic
ttggaacacagcatcgac

SEQ ID NO: 30370 - DNA, 23 bp, Artificial Sequence
  Synthetic
ttgcttttgttcttgtttgtgat

SEQ ID NO: 30371 - DNA, 18 bp, Artificial Sequence
  Synthetic
tcagctaatgcaatgccc

SEQ ID NO: 30372 - DNA, 25 bp, Artificial Sequence
  Synthetic
cctggtatttctgataaaattggta

SEQ ID NO: 30373 - DNA, 23 bp, Artificial Sequence
  Synthetic
cccttttattggcatatagttct

SEQ ID NO: 30374 - DNA, 24 bp, Artificial Sequence
  Synthetic
ccaatatgaactatttgttttccc

SEQ ID NO: 30375 - DNA, 25 bp, Artificial Sequence
  Synthetic
gataatgaaggtagtctaacacatc

SEQ ID NO: 30376 - DNA, 19 bp, Artificial Sequence
  Synthetic
ccttcactcgagtagtctg

SEQ ID NO: 30377 - DNA, 23 bp, Artificial Sequence
  Synthetic
tgattaacattggtacatctgtt

SEQ ID NO: 30378 - DNA, 18 bp, Artificial Sequence
  Synthetic
gacaggacttcatgaggc

SEQ ID NO: 30379 - DNA, 25 bp, Artificial Sequence
  Synthetic
gagtgatacatgatgtagtagtgta

SEQ ID NO: 30380 - DNA, 24 bp, Artificial Sequence
  Synthetic
tcagagactgaaaaaatggatctt

SEQ ID NO: 30381 - DNA, 24 bp, Artificial Sequence
  Synthetic
agtgataaaggttctagtagtgat

SEQ ID NO: 30382 - DNA, 20 bp, Artificial Sequence
  Synthetic
atcttggaacacctgagaca

SEQ ID NO: 30383 - DNA, 22 bp, Artificial Sequence
  Synthetic
gtgatttcttcatagacgtgag

SEQ ID NO: 30384 - DNA, 21 bp, Artificial Sequence
  Synthetic
acctgctttgatgaatctctt

SEQ ID NO: 30385 - DNA, 23 bp, Artificial Sequence
  Synthetic
tttacatatttctgagccttcaa

SEQ ID NO: 30386 - DNA, 22 bp, Artificial Sequence
  Synthetic
gtagcagtatctctcaatctgt

SEQ ID NO: 30387 - DNA, 24 bp, Artificial Sequence
  Synthetic
ccagaatcgtttgaatattttagg

SEQ ID NO: 30388 - DNA, 18 bp, Artificial Sequence
  Synthetic
cccttaacccccagaagg

SEQ ID NO: 30389 - DNA, 19 bp, Artificial Sequence
  Synthetic
gttcatgcagggtcctaat

SEQ ID NO: 30390 - DNA, 21 bp, Artificial Sequence
  Synthetic
attgatgtgttctgttgactg

SEQ ID NO: 30391 - DNA, 18 bp, Artificial Sequence
  Synthetic
tatagtgttggctagcgc

SEQ ID NO: 30392 - DNA, 25 bp, Artificial Sequence
  Synthetic
ttatcagatagcttctcttgttcaa

SEQ ID NO: 30393 - DNA, 21 bp, Artificial Sequence
  Synthetic
ctcattccatttggtgttgtc

SEQ ID NO: 30394 - DNA, 25 bp, Artificial Sequence
  Synthetic
ggttgattcattaaagtatttcagg

SEQ ID NO: 30395 - DNA, 19 bp, Artificial Sequence
  Synthetic
cctgcttgtattccctcat

SEQ ID NO: 30396 - DNA, 18 bp, Artificial Sequence
  Synthetic
gttgaagagccatttggg

SEQ ID NO: 30397 - DNA, 21 bp, Artificial Sequence
  Synthetic
cattaccacagcattgtttac

SEQ ID NO: 30398 - DNA, 18 bp, Artificial Sequence
  Synthetic
aatccgagccctagacac

SEQ ID NO: 30399 - DNA, 23 bp, Artificial Sequence
  Synthetic
agcaattcttctgttgttaattc

SEQ ID NO: 30400 - DNA, 19 bp, Artificial Sequence
  Synthetic
gcctgtacctgatgctcct

SEQ ID NO: 30401 - DNA, 18 bp, Artificial Sequence
  Synthetic
tgcaccaccagcctaact

SEQ ID NO: 30402 - DNA, 18 bp, Artificial Sequence
  Synthetic
tttacagcctctgccaca

SEQ ID NO: 30403 - DNA, 18 bp, Artificial Sequence
  Synthetic
gtttcgccatacacctcg

SEQ ID NO: 30404 - DNA, 23 bp, Artificial Sequence
  Synthetic
atgcttacacattgtaattgcat

SEQ ID NO: 30405 - DNA, 19 bp, Artificial Sequence
  Synthetic
accaaaaatggctgcttga

SEQ ID NO: 30406 - DNA, 21 bp, Artificial Sequence
  Synthetic
taacattgcattttccaaacg

SEQ ID NO: 30407 - DNA, 22 bp, Artificial Sequence
  Synthetic
caaatttaactgttagtctgcg

SEQ ID NO: 30408 - DNA, 19 bp, Artificial Sequence
  Synthetic
acatatgagcagcagtgta

SEQ ID NO: 30409 - DNA, 18 bp, Artificial Sequence
  Synthetic
tagagggatcggcagcac

SEQ ID NO: 30410 - DNA, 20 bp, Artificial Sequence
  Synthetic
tgtgcattgggatttcctca

SEQ ID NO: 30411 - DNA, 20 bp, Artificial Sequence
  Synthetic
gccctgtactgtaagtgtgg

SEQ ID NO: 30412 - DNA, 18 bp, Artificial Sequence
  Synthetic
tataccttgccgtcacca

SEQ ID NO: 30413 - DNA, 20 bp, Artificial Sequence
  Synthetic
attagggtcaggaagctgta

SEQ ID NO: 30414 - DNA, 20 bp, Artificial Sequence
  Synthetic
taataagagtcaggcagtgc

SEQ ID NO: 30415 - DNA, 18 bp, Artificial Sequence
  Synthetic
gggggatgtagcagtaca

SEQ ID NO: 30416 - DNA, 21 bp, Artificial Sequence
  Synthetic
gtggaaaacttgtctcgtaaa

SEQ ID NO: 30417 - DNA, 18 bp, Artificial Sequence
  Synthetic
tcatacaaaccaggcacc

SEQ ID NO: 30418 - DNA, 20 bp, Artificial Sequence
  Synthetic
caacaaaaaaggcgggagac

SEQ ID NO: 30419 - DNA, 20 bp, Artificial Sequence
  Synthetic
agtttcctggctagaaaagt

SEQ ID NO: 30420 - DNA, 18 bp, Artificial Sequence
  Synthetic
gggtttggacaggacttt

SEQ ID NO: 30421 - DNA, 19 bp, Artificial Sequence
  Synthetic
ggctgttcacagttggtat

SEQ ID NO: 30422 - DNA, 16 bp, Artificial Sequence
  Synthetic
atgggggatgcggagg

SEQ ID NO: 30423 - DNA, 18 bp, Artificial Sequence
  Synthetic
taggggccaatgggaggc

SEQ ID NO: 30424 - DNA, 19 bp, Artificial Sequence
  Synthetic
ttgactttcaaacaacccg

SEQ ID NO: 30425 - DNA, 19 bp, Artificial Sequence
  Synthetic
ttctaagtaagcgccccaa

SEQ ID NO: 30426 - DNA, 16 bp, Artificial Sequence
  Synthetic
acccgctgaacccacc

SEQ ID NO: 30427 - DNA, 16 bp, Artificial Sequence
  Synthetic
attcagcggccccgtg

SEQ ID NO: 30428 - DNA, 20 bp, Artificial Sequence
  Synthetic
gccccaccttatcgttcaag

SEQ ID NO: 30429 - DNA, 18 bp, Artificial Sequence
  Synthetic
ccgccttctgccatggta

SEQ ID NO: 30430 - DNA, 19 bp, Artificial Sequence
  Synthetic
gccccccttggtagatgtt

SEQ ID NO: 30431 - DNA, 18 bp, Artificial Sequence
  Synthetic
gtttcgggcgaacgtgag

SEQ ID NO: 30432 - DNA, 20 bp, Artificial Sequence
  Synthetic
ctacggatcatgctctcacc

SEQ ID NO: 30433 - DNA, 18 bp, Artificial Sequence
  Synthetic
caggagaacgcattcggc

SEQ ID NO: 30434 - DNA, 18 bp, Artificial Sequence
  Synthetic
ccgttcccttttcagcgc

SEQ ID NO: 30435 - DNA, 20 bp, Artificial Sequence
  Synthetic
gtacttatggcagcctttgt

SEQ ID NO: 30436 - DNA, 16 bp, Artificial Sequence
  Synthetic
gtccggacggccttga

SEQ ID NO: 30437 - DNA, 20 bp, Artificial Sequence
  Synthetic
ggtcacatctcacgcatacg

SEQ ID NO: 30438 - DNA, 16 bp, Artificial Sequence
  Synthetic
atacccccacacggcg

SEQ ID NO: 30439 - DNA, 17 bp, Artificial Sequence
  Synthetic
tgcaggagtggacgctg

SEQ ID NO: 30440 - DNA, 20 bp, Artificial Sequence
  Synthetic
cgttgaatctctacacggca

SEQ ID NO: 30441 - DNA, 18 bp, Artificial Sequence
  Synthetic
cgctggcaattgacctgc

SEQ ID NO: 30442 - DNA, 16 bp, Artificial Sequence
  Synthetic
ggctcctcagggtgct

SEQ ID NO: 30443 - DNA, 18 bp, Artificial Sequence
  Synthetic
gcccccagttggattccg

SEQ ID NO: 30444 - DNA, 18 bp, Artificial Sequence
  Synthetic
cgtccccgtggatacctg

SEQ ID NO: 30445 - DNA, 20 bp, Artificial Sequence
  Synthetic
ccgctattacaatgttggcg

SEQ ID NO: 30446 - DNA, 20 bp, Artificial Sequence
  Synthetic
cggaattggagtctccggat

SEQ ID NO: 30447 - DNA, 20 bp, Artificial Sequence
  Synthetic
cggactggtccatgtgttcc

SEQ ID NO: 30448 - DNA, 20 bp, Artificial Sequence
  Synthetic
attccaagcaggggtttagc

SEQ ID NO: 30449 - DNA, 20 bp, Artificial Sequence
  Synthetic
gctttggagaacccctttgg

SEQ ID NO: 30450 - DNA, 19 bp, Artificial Sequence
  Synthetic
gggcgccattactcgaatg

SEQ ID NO: 30451 - DNA, 17 bp, Artificial Sequence
  Synthetic
tgcagtgtcccaacccg

SEQ ID NO: 30452 - DNA, 17 bp, Artificial Sequence
  Synthetic
acgccatgcttgggtca

SEQ ID NO: 30453 - DNA, 19 bp, Artificial Sequence
  Synthetic
cagtcgaacagggtgttgg

SEQ ID NO: 30454 - DNA, 19 bp, Artificial Sequence
  Synthetic
gagcagcagcaggatgagc

SEQ ID NO: 30455 - DNA, 20 bp, Artificial Sequence
  Synthetic
agtcctactttaccggtggc

SEQ ID NO: 30456 - DNA, 20 bp, Artificial Sequence
  Synthetic
aacccgctcgaacttatggt

SEQ ID NO: 30457 - DNA, 20 bp, Artificial Sequence
  Synthetic
tggaggtccttcccttcaac

SEQ ID NO: 30458 - DNA, 16 bp, Artificial Sequence
  Synthetic
taactggcgccgtggc

SEQ ID NO: 30459 - DNA, 16 bp, Artificial Sequence
  Synthetic
aacaggctggcgtggg

SEQ ID NO: 30460 - DNA, 16 bp, Artificial Sequence
  Synthetic
tgagcccacggacgga

SEQ ID NO: 30461 - DNA, 21 bp, Artificial Sequence
  Synthetic
atatgtcagcctctgataacg

SEQ ID NO: 30462 - DNA, 16 bp, Artificial Sequence
  Synthetic
tcctcctcggtcccgt

SEQ ID NO: 30463 - DNA, 20 bp, Artificial Sequence
  Synthetic
cctgactgtggagtgtgtac

SEQ ID NO: 30464 - DNA, 23 bp, Artificial Sequence
  Synthetic
ggtcatatgcatactgtaccata

SEQ ID NO: 30465 - DNA, 19 bp, Artificial Sequence
  Synthetic
taggaactgcaacaagctc

SEQ ID NO: 30466 - DNA, 23 bp, Artificial Sequence
  Synthetic
gcaaaaggaaatggattcttaaa

SEQ ID NO: 30467 - DNA, 19 bp, Artificial Sequence
  Synthetic
catgcctccgtgctatagg

SEQ ID NO: 30468 - DNA, 16 bp, Artificial Sequence
  Synthetic
caacgcttgggtgggc

SEQ ID NO: 30469 - DNA, 23 bp, Artificial Sequence
  Synthetic
ttgaaatgtattggaccatatgt

SEQ ID NO: 30470 - DNA, 22 bp, Artificial Sequence
  Synthetic
gcagcaaatacaaaaaaaacac

SEQ ID NO: 30471 - DNA, 20 bp, Artificial Sequence
  Synthetic
tggctcagtgtatagtgggt

SEQ ID NO: 30472 - DNA, 18 bp, Artificial Sequence
  Synthetic
tagatgcggaggtggcag

SEQ ID NO: 30473 - DNA, 18 bp, Artificial Sequence
  Synthetic
cccacagtgagaagccta

SEQ ID NO: 30474 - DNA, 18 bp, Artificial Sequence
  Synthetic
atttgttccctacgcagc

SEQ ID NO: 30475 - DNA, 18 bp, Artificial Sequence
  Synthetic
ctgtaaactggcagacgg

SEQ ID NO: 30476 - DNA, 18 bp, Artificial Sequence
  Synthetic
ttaagctgggttggcaac

SEQ ID NO: 30477 - DNA, 22 bp, Artificial Sequence
  Synthetic
ggactcaaagctaatactgaat

SEQ ID NO: 30478 - DNA, 23 bp, Artificial Sequence
  Synthetic
ccaaatgattctttaaactttgc

SEQ ID NO: 30479 - DNA, 22 bp, Artificial Sequence
  Synthetic
aactgaaatgtcattaccatct

SEQ ID NO: 30480 - DNA, 21 bp, Artificial Sequence
  Synthetic
ttttctctgccaaattcagaa

SEQ ID NO: 30481 - DNA, 20 bp, Artificial Sequence
  Synthetic
ccgatatctgcgttttccgt

SEQ ID NO: 30482 - DNA, 18 bp, Artificial Sequence
  Synthetic
cacttccacctcccaaag

SEQ ID NO: 30483 - DNA, 19 bp, Artificial Sequence
  Synthetic
gctgcacttctagtactgc

SEQ ID NO: 30484 - DNA, 22 bp, Artificial Sequence
  Synthetic
tagttcctaatctgctaagcct

SEQ ID NO: 30485 - DNA, 21 bp, Artificial Sequence
  Synthetic
tcattggaagcaaaatcatct

SEQ ID NO: 30486 - DNA, 20 bp, Artificial Sequence
  Synthetic
agccttagtcctactgtcag

SEQ ID NO: 30487 - DNA, 23 bp, Artificial Sequence
  Synthetic
ctactattaaaagctgggtttgt

SEQ ID NO: 30488 - DNA, 21 bp, Artificial Sequence
  Synthetic
tcaaaatatcaggccacttac

SEQ ID NO: 30489 - DNA, 20 bp, Artificial Sequence
  Synthetic
gtaagggcgatttaggatca

SEQ ID NO: 30490 - DNA, 25 bp, Artificial Sequence
  Synthetic
ggttattcctttgtttaacaatcct

SEQ ID NO: 30491 - DNA, 18 bp, Artificial Sequence
  Synthetic
caaaagcagggtggagtg

SEQ ID NO: 30492 - DNA, 20 bp, Artificial Sequence
  Synthetic
ggagaattacccctcattct

SEQ ID NO: 30493 - DNA, 20 bp, Artificial Sequence
  Synthetic
ttcacagtcctcagttaact

SEQ ID NO: 30494 - DNA, 19 bp, Artificial Sequence
  Synthetic
gtaaaagcaagcgacatgc

SEQ ID NO: 30495 - DNA, 23 bp, Artificial Sequence
  Synthetic
tctgaatcttctgtaaatccatt

SEQ ID NO: 30496 - DNA, 19 bp, Artificial Sequence
  Synthetic
tgtaagtcgcgagagaccc

SEQ ID NO: 30497 - DNA, 20 bp, Artificial Sequence
  Synthetic
acgtcttttattggcttgca

SEQ ID NO: 30498 - DNA, 18 bp, Artificial Sequence
  Synthetic
ctacagtgccacctagtg

SEQ ID NO: 30499 - DNA, 18 bp, Artificial Sequence
  Synthetic
gctatcagcagtaccacc

SEQ ID NO: 30500 - DNA, 23 bp, Artificial Sequence
  Synthetic
tcttctaattcaaattcactcct

SEQ ID NO: 30501 - DNA, 25 bp, Artificial Sequence
  Synthetic
ggcctatttaaaattcttacatcag

SEQ ID NO: 30502 - DNA, 25 bp, Artificial Sequence
  Synthetic
cgttttctttttcgagaatacaaac

SEQ ID NO: 30503 - DNA, 24 bp, Artificial Sequence
  Synthetic
tctaaataccctgaattgattacc

SEQ ID NO: 30504 - DNA, 22 bp, Artificial Sequence
  Synthetic
caattgattttgtttgggatca

SEQ ID NO: 30505 - DNA, 18 bp, Artificial Sequence
  Synthetic
atttgcaccctgagctct

SEQ ID NO: 30506 - DNA, 22 bp, Artificial Sequence
  Synthetic
gatatgttttgaagtgccaaat

SEQ ID NO: 30507 - DNA, 25 bp, Artificial Sequence
  Synthetic
gatgaaaattttagcaatacatccg

SEQ ID NO: 30508 - DNA, 19 bp, Artificial Sequence
  Synthetic
agcaaagtgtctgcattct

SEQ ID NO: 30509 - DNA, 24 bp, Artificial Sequence
  Synthetic
gcttctccatattttattttgacc

SEQ ID NO: 30510 - DNA, 19 bp, Artificial Sequence
  Synthetic
gtctctacaggcacattct

SEQ ID NO: 30511 - DNA, 18 bp, Artificial Sequence
  Synthetic
tcgttcgggagtaccatc

SEQ ID NO: 30512 - DNA, 18 bp, Artificial Sequence
  Synthetic
tatcaacgcctgtgacag

SEQ ID NO: 30513 - DNA, 22 bp, Artificial Sequence
  Synthetic
tcctgtctgtattctttccaag

SEQ ID NO: 30514 - DNA, 18 bp, Artificial Sequence
  Synthetic
gcctccaactcttgttca

SEQ ID NO: 30515 - DNA, 18 bp, Artificial Sequence
  Synthetic
tcgctacacccttctttg

SEQ ID NO: 30516 - DNA, 20 bp, Artificial Sequence
  Synthetic
gtgggctaagttgttgaact

SEQ ID NO: 30517 - DNA, 23 bp, Artificial Sequence
  Synthetic
cactatttgccattttagcataa

SEQ ID NO: 30518 - DNA, 19 bp, Artificial Sequence
  Synthetic
attgaaacgagcgttgagt

SEQ ID NO: 30519 - DNA, 20 bp, Artificial Sequence
  Synthetic
ggagacttttgcaagctttg

SEQ ID NO: 30520 - DNA, 19 bp, Artificial Sequence
  Synthetic
gttgttaatgcggacttca

SEQ ID NO: 30521 - DNA, 17 bp, Artificial Sequence
  Synthetic
ctgtggctgtggctgtg

SEQ ID NO: 30522 - DNA, 19 bp, Artificial Sequence
  Synthetic
tacttctccctcccctccc

SEQ ID NO: 30523 - DNA, 23 bp, Artificial Sequence
  Synthetic
cgcttcttatctctgtatctgta

SEQ ID NO: 30524 - DNA, 20 bp, Artificial Sequence
  Synthetic
ctacagcttgtgtgatgttg

SEQ ID NO: 30525 - DNA, 19 bp, Artificial Sequence
  Synthetic
gtaaagagggcggcttaat

SEQ ID NO: 30526 - DNA, 22 bp, Artificial Sequence
  Synthetic
ggcagttcctgaacatttaaat

SEQ ID NO: 30527 - DNA, 23 bp, Artificial Sequence
  Synthetic
gaattattacagttggcaaatcg

SEQ ID NO: 30528 - DNA, 23 bp, Artificial Sequence
  Synthetic
caaaatatggatgtcctacagtt

SEQ ID NO: 30529 - DNA, 24 bp, Artificial Sequence
  Synthetic
tcctgtctatcatctttagaagtt

SEQ ID NO: 30530 - DNA, 20 bp, Artificial Sequence
  Synthetic
acggtagggaaatagatgga

SEQ ID NO: 30531 - DNA, 18 bp, Artificial Sequence
  Synthetic
gttgtagcccagcttgaa

SEQ ID NO: 30532 - DNA, 21 bp, Artificial Sequence
  Synthetic
ctccttcttccgtaaaagctc

SEQ ID NO: 30533 - DNA, 22 bp, Artificial Sequence
  Synthetic
cttcttgcattgatttcctttc

SEQ ID NO: 30534 - DNA, 21 bp, Artificial Sequence
  Synthetic
tgctcattacaaaagccttct

SEQ ID NO: 30535 - DNA, 18 bp, Artificial Sequence
  Synthetic
accacagaaagcctgact

SEQ ID NO: 30536 - DNA, 20 bp, Artificial Sequence
  Synthetic
ttttgctgctgattgttctg

SEQ ID NO: 30537 - DNA, 18 bp, Artificial Sequence
  Synthetic
aaacagtttctgggtggc

SEQ ID NO: 30538 - DNA, 18 bp, Artificial Sequence
  Synthetic
cctcttgggtgtcagaaa

SEQ ID NO: 30539 - DNA, 20 bp, Artificial Sequence
  Synthetic
acaaacacattgacatcagc

SEQ ID NO: 30540 - DNA, 20 bp, Artificial Sequence
  Synthetic
cctccatttgaccttgtgct

SEQ ID NO: 30541 - DNA, 23 bp, Artificial Sequence
  Synthetic
gaaggtccaataggtatagtagg

SEQ ID NO: 30542 - DNA, 20 bp, Artificial Sequence
  Synthetic
tgtagcaaaattaactgccc

SEQ ID NO: 30543 - DNA, 22 bp, Artificial Sequence
  Synthetic
cctaaatttaagtctggtggtg

SEQ ID NO: 30544 - DNA, 21 bp, Artificial Sequence
  Synthetic
ctgacaaatcaactgtccaaa

SEQ ID NO: 30545 - DNA, 18 bp, Artificial Sequence
  Synthetic
tgaaaattctcccggcag

SEQ ID NO: 30546 - DNA, 24 bp, Artificial Sequence
  Synthetic
ggctgttaatatactttcgcttta

SEQ ID NO: 30547 - DNA, 22 bp, Artificial Sequence
  Synthetic
tttagcaagaataacagctctt

SEQ ID NO: 30548 - DNA, 23 bp, Artificial Sequence
  Synthetic
tctgctaataatgcatagtgaaa

SEQ ID NO: 30549 - DNA, 22 bp, Artificial Sequence
  Synthetic
gaacctttcactaagaggacat

SEQ ID NO: 30550 - DNA, 20 bp, Artificial Sequence
  Synthetic
cttggttttggaagggattc

SEQ ID NO: 30551 - DNA, 21 bp, Artificial Sequence
  Synthetic
ggcaaagtttgtacatcaagt

SEQ ID NO: 30552 - DNA, 18 bp, Artificial Sequence
  Synthetic
tgcatagaagccctttgg

SEQ ID NO: 30553 - DNA, 25 bp, Artificial Sequence
  Synthetic
cctacaataaatatctgagtttgct

SEQ ID NO: 30554 - DNA, 23 bp, Artificial Sequence
  Synthetic
gcaaagaaaaacaattcattacc

SEQ ID NO: 30555 - DNA, 19 bp, Artificial Sequence
  Synthetic
ggtggaggaacaaaagcta

SEQ ID NO: 30556 - DNA, 22 bp, Artificial Sequence
  Synthetic
atgtttggaatgatactgacag

SEQ ID NO: 30557 - DNA, 24 bp, Artificial Sequence
  Synthetic
aatcttaaacacattccataaccg

SEQ ID NO: 30558 - DNA, 19 bp, Artificial Sequence
  Synthetic
aatagtaggttcctggccc

SEQ ID NO: 30559 - DNA, 18 bp, Artificial Sequence
  Synthetic
tagtgggatctgccatgg

SEQ ID NO: 30560 - DNA, 20 bp, Artificial Sequence
  Synthetic
ggcccttgtattactctgta

SEQ ID NO: 30561 - DNA, 20 bp, Artificial Sequence
  Synthetic
ctaacgccaattctgcatat

SEQ ID NO: 30562 - DNA, 20 bp, Artificial Sequence
  Synthetic
gggctcgaggtactagcaac

SEQ ID NO: 30563 - DNA, 25 bp, Artificial Sequence
  Synthetic
agctagcatatttctgattacatct

SEQ ID NO: 30564 - DNA, 22 bp, Artificial Sequence
  Synthetic
ggtggtcctatagggtctatag

SEQ ID NO: 30565 - DNA, 23 bp, Artificial Sequence
  Synthetic
taatgtgaaccaattgatatggt

SEQ ID NO: 30566 - DNA, 18 bp, Artificial Sequence
  Synthetic
agttgttggcacctgttg

SEQ ID NO: 30567 - DNA, 18 bp, Artificial Sequence
  Synthetic
aatctcctggctgtttgg

SEQ ID NO: 30568 - DNA, 21 bp, Artificial Sequence
  Synthetic
tctagcccaaaaatgtctagc

SEQ ID NO: 30569 - DNA, 23 bp, Artificial Sequence
  Synthetic
tcacagttttctttcttacagta

SEQ ID NO: 30570 - DNA, 21 bp, Artificial Sequence
  Synthetic
aaaagagtaaagccgtccaaa

SEQ ID NO: 30571 - DNA, 19 bp, Artificial Sequence
  Synthetic
accgttttcgttgcaagta

SEQ ID NO: 30572 - DNA, 20 bp, Artificial Sequence
  Synthetic
tctcccaattccatcaatca

SEQ ID NO: 30573 - DNA, 20 bp, Artificial Sequence
  Synthetic
cctctttttcgaagtcgtac

SEQ ID NO: 30574 - DNA, 22 bp, Artificial Sequence
  Synthetic
tgttctcatttgaagcaatttg

SEQ ID NO: 30575 - DNA, 18 bp, Artificial Sequence
  Synthetic
ggttttgcaccttccatc

SEQ ID NO: 30576 - DNA, 21 bp, Artificial Sequence
  Synthetic
cgatgtttcttgtacctcaca

SEQ ID NO: 30577 - DNA, 18 bp, Artificial Sequence
  Synthetic
ttgtctagcttgctgtgg

SEQ ID NO: 30578 - DNA, 18 bp, Artificial Sequence
  Synthetic
ttttactccttcccggca

SEQ ID NO: 30579 - DNA, 19 bp, Artificial Sequence
  Synthetic
aacacagctttgcctgtac

SEQ ID NO: 30580 - DNA, 23 bp, Artificial Sequence
  Synthetic
ctgtgcattactatctacatctg

SEQ ID NO: 30581 - DNA, 19 bp, Artificial Sequence
  Synthetic
actttcctgtgtttggtgg

SEQ ID NO: 30582 - DNA, 19 bp, Artificial Sequence
  Synthetic
cgacaacagtttcaacagg

SEQ ID NO: 30583 - DNA, 20 bp, Artificial Sequence
  Synthetic
aacaggtagaaaacaacgag

SEQ ID NO: 30584 - DNA, 19 bp, Artificial Sequence
  Synthetic
acgtttgatacagctgagt

SEQ ID NO: 30585 - DNA, 24 bp, Artificial Sequence
  Synthetic
tcataactatgtacaccagatgtg

SEQ ID NO: 30586 - DNA, 20 bp, Artificial Sequence
  Synthetic
caagcctactaaaacgcaca

SEQ ID NO: 30587 - DNA, 18 bp, Artificial Sequence
  Synthetic
ggtgtaggaggcaggtaa

SEQ ID NO: 30588 - DNA, 19 bp, Artificial Sequence
  Synthetic
acttattgggatcgggcaa

SEQ ID NO: 30589 - DNA, 23 bp, Artificial Sequence
  Synthetic
acatactgtttaatttggcttga

SEQ ID NO: 30590 - DNA, 19 bp, Artificial Sequence
  Synthetic
ttagctagtgggtcctctt

SEQ ID NO: 30591 - DNA, 25 bp, Artificial Sequence
  Synthetic
catacaaaaacatacattcatgcac

SEQ ID NO: 30592 - DNA, 21 bp, Artificial Sequence
  Synthetic
gcataaaatggacactactgt

SEQ ID NO: 30593 - DNA, 20 bp, Artificial Sequence
  Synthetic
agacacatagttggctacca

SEQ ID NO: 30594 - DNA, 22 bp, Artificial Sequence
  Synthetic
acagtccaattctatttcatgt

SEQ ID NO: 30595 - DNA, 19 bp, Artificial Sequence
  Synthetic
attctgtaccaggcttgct

SEQ ID NO: 30596 - DNA, 19 bp, Artificial Sequence
  Synthetic
attgcatcccctgttttcc

SEQ ID NO: 30597 - DNA, 23 bp, Artificial Sequence
  Synthetic
cctcagatgctaataatgcatat

SEQ ID NO: 30598 - DNA, 24 bp, Artificial Sequence
  Synthetic
gatgttattagtaatggaggacat

SEQ ID NO: 30599 - DNA, 18 bp, Artificial Sequence
  Synthetic
tgcacagtgtctccatca

SEQ ID NO: 30600 - DNA, 23 bp, Artificial Sequence
  Synthetic
ttctgtgttatagcttgattcat

SEQ ID NO: 30601 - DNA, 19 bp, Artificial Sequence
  Synthetic
cacatatcctgtacgaccc

SEQ ID NO: 30602 - DNA, 22 bp, Artificial Sequence
  Synthetic
cagatacttgtgtagtgtcact

SEQ ID NO: 30603 - DNA, 22 bp, Artificial Sequence
  Synthetic
cacttctagtaaacatagtggc

SEQ ID NO: 30604 - DNA, 23 bp, Artificial Sequence
  Synthetic
gttacatactcttcagtgcttac

SEQ ID NO: 30605 - DNA, 21 bp, Artificial Sequence
  Synthetic
gtggtgttctttaattcaagc

SEQ ID NO: 30606 - DNA, 18 bp, Artificial Sequence
  Synthetic
cacaactggatggcgatg

SEQ ID NO: 30607 - DNA, 18 bp, Artificial Sequence
  Synthetic
aatccaagttgcctgcag

SEQ ID NO: 30608 - DNA, 18 bp, Artificial Sequence
  Synthetic
atcgcagagcttcccatt

SEQ ID NO: 30609 - DNA, 20 bp, Artificial Sequence
  Synthetic
aaatggtttgttctgctcaa

SEQ ID NO: 30610 - DNA, 20 bp, Artificial Sequence
  Synthetic
tgatgttccaacggaaatgt

SEQ ID NO: 30611 - DNA, 21 bp, Artificial Sequence
  Synthetic
tggcatactagagtttatcgc

SEQ ID NO: 30612 - DNA, 21 bp, Artificial Sequence
  Synthetic
gtgactccatctattgccttt

SEQ ID NO: 30613 - DNA, 20 bp, Artificial Sequence
  Synthetic
cctttgcattatccctaagc

SEQ ID NO: 30614 - DNA, 21 bp, Artificial Sequence
  Synthetic
aaagatagaccagctaccatg

SEQ ID NO: 30615 - DNA, 19 bp, Artificial Sequence
  Synthetic
cgtccaattccaccaatca

SEQ ID NO: 30616 - DNA, 18 bp, Artificial Sequence
  Synthetic
ccattattagcttggcgc

SEQ ID NO: 30617 - DNA, 23 bp, Artificial Sequence
  Synthetic
aattcttgtttttcgtccattct

SEQ ID NO: 30618 - DNA, 21 bp, Artificial Sequence
  Synthetic
acttgattccatagtctccat

SEQ ID NO: 30619 - DNA, 18 bp, Artificial Sequence
  Synthetic
aggttttgtgacactgcc

SEQ ID NO: 30620 - DNA, 20 bp, Artificial Sequence
  Synthetic
cctagtccactgtcctcaaa

SEQ ID NO: 30621 - DNA, 23 bp, Artificial Sequence
  Synthetic
gtacatgcaatacattacacaat

SEQ ID NO: 30622 - DNA, 24 bp, Artificial Sequence
  Synthetic
agtccattcctcatatatacatcc

SEQ ID NO: 30623 - DNA, 18 bp, Artificial Sequence
  Synthetic
catctatgtctgtgcggc

SEQ ID NO: 30624 - DNA, 18 bp, Artificial Sequence
  Synthetic
ctgcagatacctgtccac

SEQ ID NO: 30625 - DNA, 23 bp, Artificial Sequence
  Synthetic
gtttcattctatacctccaacat

SEQ ID NO: 30626 - DNA, 24 bp, Artificial Sequence
  Synthetic
tgtctaaaggtatagattcaccta

SEQ ID NO: 30627 - DNA, 18 bp, Artificial Sequence
  Synthetic
gggccaacaagtgtatga

SEQ ID NO: 30628 - DNA, 23 bp, Artificial Sequence
  Synthetic
ctgcaaaacattaaaaaccagac

SEQ ID NO: 30629 - DNA, 18 bp, Artificial Sequence
  Synthetic
gacaggtgcctttaggag

SEQ ID NO: 30630 - DNA, 24 bp, Artificial Sequence
  Synthetic
cataatacagcattattagcaccc

SEQ ID NO: 30631 - DNA, 18 bp, Artificial Sequence
  Synthetic
aaaagcgcctaccaagag

SEQ ID NO: 30632 - DNA, 18 bp, Artificial Sequence
  Synthetic
actgtaaaagcaccgctc

SEQ ID NO: 30633 - DNA, 20 bp, Artificial Sequence
  Synthetic
aaatggagtctggaacactg

SEQ ID NO: 30634 - DNA, 20 bp, Artificial Sequence
  Synthetic
atctacatctgcatgcattg

SEQ ID NO: 30635 - DNA, 19 bp, Artificial Sequence
  Synthetic
tggggctttatgttttgca

SEQ ID NO: 30636 - DNA, 21 bp, Artificial Sequence
  Synthetic
tggtgaattttgtaagcttct

SEQ ID NO: 30637 - DNA, 16 bp, Artificial Sequence
  Synthetic
actggagtctgcggcg

SEQ ID NO: 30638 - DNA, 20 bp, Artificial Sequence
  Synthetic
ttgcaatcaatggatcccga

SEQ ID NO: 30639 - DNA, 21 bp, Artificial Sequence
  Synthetic
tgctaggattcatagtgcaat

SEQ ID NO: 30640 - DNA, 19 bp, Artificial Sequence
  Synthetic
cttgctctacatgcctttg

SEQ ID NO: 30641 - DNA, 18 bp, Artificial Sequence
  Synthetic
ttctggtttgcatggtcc

SEQ ID NO: 30642 - DNA, 25 bp, Artificial Sequence
  Synthetic
gttgagcttctaatattaattgtgc

SEQ ID NO: 30643 - DNA, 21 bp, Artificial Sequence
  Synthetic
ggatccatagcaacatctact

SEQ ID NO: 30644 - DNA, 23 bp, Artificial Sequence
  Synthetic
cgttattagcaccttgtgaatta

SEQ ID NO: 30645 - DNA, 19 bp, Artificial Sequence
  Synthetic
catcggtccttacacgttt

SEQ ID NO: 30646 - DNA, 18 bp, Artificial Sequence
  Synthetic
aaaacatggaagggctgc

SEQ ID NO: 30647 - DNA, 24 bp, Artificial Sequence
  Synthetic
gatgaaactattacttcctcactt

SEQ ID NO: 30648 - DNA, 22 bp, Artificial Sequence
  Synthetic
tgcttgatctacaataaaccat

SEQ ID NO: 30649 - DNA, 21 bp, Artificial Sequence
  Synthetic
ttgctgtttctttcagaactt

SEQ ID NO: 30650 - DNA, 23 bp, Artificial Sequence
  Synthetic
gtctgactcaatatgtttcagaa

SEQ ID NO: 30651 - DNA, 20 bp, Artificial Sequence
  Synthetic
cgtcttcgtcgaagtggaat

SEQ ID NO: 30652 - DNA, 23 bp, Artificial Sequence
  Synthetic
attttccagaagcatttgttagc

SEQ ID NO: 30653 - DNA, 20 bp, Artificial Sequence
  Synthetic
attacagtagtctcagctgg

SEQ ID NO: 30654 - DNA, 22 bp, Artificial Sequence
  Synthetic
agaagatttaggcctaacatct

SEQ ID NO: 30655 - DNA, 18 bp, Artificial Sequence
  Synthetic
cttgttgaacccgccttc

SEQ ID NO: 30656 - DNA, 22 bp, Artificial Sequence
  Synthetic
tcataataaaagtgcactgcct

SEQ ID NO: 30657 - DNA, 18 bp, Artificial Sequence
  Synthetic
atactctggccacaggtt

SEQ ID NO: 30658 - DNA, 22 bp, Artificial Sequence
  Synthetic
cacctttctcaattaaagcaaa

SEQ ID NO: 30659 - DNA, 22 bp, Artificial Sequence
  Synthetic
cctttctaacttgtactccttc

SEQ ID NO: 30660 - DNA, 19 bp, Artificial Sequence
  Synthetic
gtttccccagcatattcca

SEQ ID NO: 30661 - DNA, 17 bp, Artificial Sequence
  Synthetic
tcggctagcagtctcgc

SEQ ID NO: 30662 - DNA, 18 bp, Artificial Sequence
  Synthetic
accctgtgaagaggcagc

SEQ ID NO: 30663 - DNA, 18 bp, Artificial Sequence
  Synthetic
aggagcaaccaggcaagt

SEQ ID NO: 30664 - DNA, 18 bp, Artificial Sequence
  Synthetic
gtagctgacgccaccact

SEQ ID NO: 30665 - DNA, 20 bp, Artificial Sequence
  Synthetic
ccaaagtaagcgaggccaaa

SEQ ID NO: 30666 - DNA, 19 bp, Artificial Sequence
  Synthetic
caataccacacggcgatgg

SEQ ID NO: 30667 - DNA, 19 bp, Artificial Sequence
  Synthetic
caagcggagtatgtggcac

SEQ ID NO: 30668 - DNA, 19 bp, Artificial Sequence
  Synthetic
ggtgcaggtggatcagtcc

SEQ ID NO: 30669 - DNA, 19 bp, Artificial Sequence
  Synthetic
acgtcaccagagggacaac

SEQ ID NO: 30670 - DNA, 20 bp, Artificial Sequence
  Synthetic
tgtcaaagacaaggcctgga

SEQ ID NO: 30671 - DNA, 18 bp, Artificial Sequence
  Synthetic
ccgagccgagctgagaca

SEQ ID NO: 30672 - DNA, 18 bp, Artificial Sequence
  Synthetic
tctggaggacaggcccac

SEQ ID NO: 30673 - DNA, 20 bp, Artificial Sequence
  Synthetic
gcatcttctcgatgggaaca

SEQ ID NO: 30674 - DNA, 20 bp, Artificial Sequence
  Synthetic
tggcatggcattcatcacat

SEQ ID NO: 30675 - DNA, 20 bp, Artificial Sequence
  Synthetic
gggatcaccgaaacatccaa

SEQ ID NO: 30676 - DNA, 18 bp, Artificial Sequence
  Synthetic
cgaacataccggatggcc

SEQ ID NO: 30677 - DNA, 18 bp, Artificial Sequence
  Synthetic
tatccaagacggcgaggg

SEQ ID NO: 30678 - DNA, 19 bp, Artificial Sequence
  Synthetic
gccaacactacccactgcc

SEQ ID NO: 30679 - DNA, 18 bp, Artificial Sequence
  Synthetic
atgtagtgggtcggcgac

SEQ ID NO: 30680 - DNA, 18 bp, Artificial Sequence
  Synthetic
gtttcggcaggtcttggg

SEQ ID NO: 30681 - DNA, 18 bp, Artificial Sequence
  Synthetic
cttcccggatcatgggct

SEQ ID NO: 30682 - DNA, 18 bp, Artificial Sequence
  Synthetic
acctctcagcgagttccg

SEQ ID NO: 30683 - DNA, 18 bp, Artificial Sequence
  Synthetic
tagctggctttttcccgc

SEQ ID NO: 30684 - DNA, 19 bp, Artificial Sequence
  Synthetic
aaccgaccctctgaccttt

SEQ ID NO: 30685 - DNA, 18 bp, Artificial Sequence
  Synthetic
ggtcataagcgggctggg

SEQ ID NO: 30686 - DNA, 16 bp, Artificial Sequence
  Synthetic
atgggctctgggcgtg

SEQ ID NO: 30687 - DNA, 22 bp, Artificial Sequence
  Synthetic
ttccatggttttatttcaggat

SEQ ID NO: 30688 - DNA, 18 bp, Artificial Sequence
  Synthetic
gtagtcgtctgggtgatc

SEQ ID NO: 30689 - DNA, 19 bp, Artificial Sequence
  Synthetic
ggtaatggcccatttgttg

SEQ ID NO: 30690 - DNA, 24 bp, Artificial Sequence
  Synthetic
gctccatttaaatcattcaaccta

SEQ ID NO: 30691 - DNA, 18 bp, Artificial Sequence
  Synthetic
tgtctcctgtcacagtca

SEQ ID NO: 30692 - DNA, 18 bp, Artificial Sequence
  Synthetic
tcttcccttccactttgg

SEQ ID NO: 30693 - DNA, 20 bp, Artificial Sequence
  Synthetic
tgcttctttgataccctcaa

SEQ ID NO: 30694 - DNA, 20 bp, Artificial Sequence
  Synthetic
tcgtgcatccattcttaatc

SEQ ID NO: 30695 - DNA, 18 bp, Artificial Sequence
  Synthetic
gatgtccttggcatgagt

SEQ ID NO: 30696 - DNA, 23 bp, Artificial Sequence
  Synthetic
ggcaaaatcttaactttctcaaa

SEQ ID NO: 30697 - DNA, 20 bp, Artificial Sequence
  Synthetic
ggaaacataggttcccacat

SEQ ID NO: 30698 - DNA, 21 bp, Artificial Sequence
  Synthetic
ggacattgtgaaaaggtagtg

SEQ ID NO: 30699 - DNA, 21 bp, Artificial Sequence
  Synthetic
ccttttgagtggattctttgt

SEQ ID NO: 30700 - DNA, 25 bp, Artificial Sequence
  Synthetic
caagttttctcactatacattcatg

SEQ ID NO: 30701 - DNA, 25 bp, Artificial Sequence
  Synthetic
gcacatcataattaggagtatcaat

SEQ ID NO: 30702 - DNA, 18 bp, Artificial Sequence
  Synthetic
gccacctctggtagaaga

SEQ ID NO: 30703 - DNA, 22 bp, Artificial Sequence
  Synthetic
actgtagttaatcacaccattt

SEQ ID NO: 30704 - DNA, 20 bp, Artificial Sequence
  Synthetic
tgatgtgtcttttgccatct

SEQ ID NO: 30705 - DNA, 24 bp, Artificial Sequence
  Synthetic
ccccatctttttttgtaactatag

SEQ ID NO: 30706 - DNA, 19 bp, Artificial Sequence
  Synthetic
cagcttgcttctttcatcc

SEQ ID NO: 30707 - DNA, 21 bp, Artificial Sequence
  Synthetic
ttttctaggtaagctccaaga

SEQ ID NO: 30708 - DNA, 18 bp, Artificial Sequence
  Synthetic
tggttgattttgcctggc

SEQ ID NO: 30709 - DNA, 18 bp, Artificial Sequence
  Synthetic
actttgtggtttgccgag

SEQ ID NO: 30710 - DNA, 18 bp, Artificial Sequence
  Synthetic
tttttgtgggcttggtgg

SEQ ID NO: 30711 - DNA, 25 bp, Artificial Sequence
  Synthetic
ctttttaatgactactggtttgttg

SEQ ID NO: 30712 - DNA, 19 bp, Artificial Sequence
  Synthetic
gcactaagatagcctttgc

SEQ ID NO: 30713 - DNA, 18 bp, Artificial Sequence
  Synthetic
tgctacagctttgcttgt

SEQ ID NO: 30714 - DNA, 25 bp, Artificial Sequence
  Synthetic
gagatttacttcacttggtaatgtt

SEQ ID NO: 30715 - DNA, 21 bp, Artificial Sequence
  Synthetic
gagtttcgatgaagttcagat

SEQ ID NO: 30716 - DNA, 21 bp, Artificial Sequence
  Synthetic
cttatcttgggtgaatttggc

SEQ ID NO: 30717 - DNA, 25 bp, Artificial Sequence
  Synthetic
catatcttgtaagactttcaggaaa

SEQ ID NO: 30718 - DNA, 25 bp, Artificial Sequence
  Synthetic
gttagttatagattttgtaccggat

SEQ ID NO: 30719 - DNA, 24 bp, Artificial Sequence
  Synthetic
ccatacttttctgttaatatgcga

SEQ ID NO: 30720 - DNA, 18 bp, Artificial Sequence
  Synthetic
caggcattgagcgggttt

SEQ ID NO: 30721 - DNA, 16 bp, Artificial Sequence
  Synthetic
gctgagcccaggtcct

SEQ ID NO: 30722 - DNA, 18 bp, Artificial Sequence
  Synthetic
gcagggccagaaggaaga

SEQ ID NO: 30723 - DNA, 20 bp, Artificial Sequence
  Synthetic
tcccgacaagcagatcgata

SEQ ID NO: 30724 - DNA, 18 bp, Artificial Sequence
  Synthetic
aggaccttcgcccagttc

SEQ ID NO: 30725 - DNA, 18 bp, Artificial Sequence
  Synthetic
tctttgcgggcacaatgc

SEQ ID NO: 30726 - DNA, 18 bp, Artificial Sequence
  Synthetic
ggcttccggatgtttgcg

SEQ ID NO: 30727 - DNA, 16 bp, Artificial Sequence
  Synthetic
gccggtggacaaggct

SEQ ID NO: 30728 - DNA, 15 bp, Artificial Sequence
  Synthetic
tgcccgctgaggcaa

SEQ ID NO: 30729 - DNA, 20 bp, Artificial Sequence
  Synthetic
gccatttgcacgtaatgacc

SEQ ID NO: 30730 - DNA, 18 bp, Artificial Sequence
  Synthetic
atctcctggcccctacgg

SEQ ID NO: 30731 - DNA, 19 bp, Artificial Sequence
  Synthetic
ggtgtcaatgagcgggaac

SEQ ID NO: 30732 - DNA, 16 bp, Artificial Sequence
  Synthetic
gctctggggcactgct

SEQ ID NO: 30733 - DNA, 18 bp, Artificial Sequence
  Synthetic
caaggacagtgccgatgc

SEQ ID NO: 30734 - DNA, 19 bp, Artificial Sequence
  Synthetic
tcgacacgacgacaacatc

SEQ ID NO: 30735 - DNA, 20 bp, Artificial Sequence
  Synthetic
gttcatgtacgctcgtagcc

SEQ ID NO: 30736 - DNA, 16 bp, Artificial Sequence
  Synthetic
gccagagcagccagga

SEQ ID NO: 30737 - DNA, 18 bp, Artificial Sequence
  Synthetic
acatgtgcttcgcccaaa

SEQ ID NO: 30738 - DNA, 20 bp, Artificial Sequence
  Synthetic
gccataccctgcaagaatgt

SEQ ID NO: 30739 - DNA, 20 bp, Artificial Sequence
  Synthetic
actccgagcttatccactga

SEQ ID NO: 30740 - DNA, 18 bp, Artificial Sequence
  Synthetic
tgcagacaccctccacag

SEQ ID NO: 30741 - DNA, 20 bp, Artificial Sequence
  Synthetic
cgcctctgctgttatatggg

SEQ ID NO: 30742 - DNA, 16 bp, Artificial Sequence
  Synthetic
ttgtagtccggccgcg

SEQ ID NO: 30743 - DNA, 18 bp, Artificial Sequence
  Synthetic
atccggatccccaggctc

SEQ ID NO: 30744 - DNA, 20 bp, Artificial Sequence
  Synthetic
agcttcctctacggatagca

SEQ ID NO: 30745 - DNA, 19 bp, Artificial Sequence
  Synthetic
aattcaacccgctgtcctg

SEQ ID NO: 30746 - DNA, 20 bp, Artificial Sequence
  Synthetic
agcaagtgagggtgttacca

SEQ ID NO: 30747 - DNA, 20 bp, Artificial Sequence
  Synthetic
agtatcatcctcgcccacag

SEQ ID NO: 30748 - DNA, 18 bp, Artificial Sequence
  Synthetic
ccacatatggcagccctg

SEQ ID NO: 30749 - DNA, 23 bp, Artificial Sequence
  Synthetic
tcatcaataaagtggaaatctga

SEQ ID NO: 30750 - DNA, 23 bp, Artificial Sequence
  Synthetic
tcagattttatcttgttggcttt

SEQ ID NO: 30751 - DNA, 21 bp, Artificial Sequence
  Synthetic
catctttgcaatcctcaaagt

SEQ ID NO: 30752 - DNA, 20 bp, Artificial Sequence
  Synthetic
gcattcaacaaagctgtgtt

SEQ ID NO: 30753 - DNA, 18 bp, Artificial Sequence
  Synthetic
ccttgacacttggcctat

SEQ ID NO: 30754 - DNA, 21 bp, Artificial Sequence
  Synthetic
ttgaaaacagatttagccagt

SEQ ID NO: 30755 - DNA, 18 bp, Artificial Sequence
  Synthetic
ggtctctagccggtcaaa

SEQ ID NO: 30756 - DNA, 22 bp, Artificial Sequence
  Synthetic
tcttcgaacttttgacctaatt

SEQ ID NO: 30757 - DNA, 18 bp, Artificial Sequence
  Synthetic
acaccgtcttcttgcaaa

SEQ ID NO: 30758 - DNA, 21 bp, Artificial Sequence
  Synthetic
cactggcttaacaccttaaat

SEQ ID NO: 30759 - DNA, 24 bp, Artificial Sequence
  Synthetic
acactattatcaataaagtccacc

SEQ ID NO: 30760 - DNA, 20 bp, Artificial Sequence
  Synthetic
acgtcagtatggccatttgg

SEQ ID NO: 30761 - DNA, 18 bp, Artificial Sequence
  Synthetic
gccatctgtcgtctgtac

SEQ ID NO: 30762 - DNA, 18 bp, Artificial Sequence
  Synthetic
ctccaggcgtatgcattt

SEQ ID NO: 30763 - DNA, 23 bp, Artificial Sequence
  Synthetic
acatattgcattgtgttatcctg

SEQ ID NO: 30764 - DNA, 21 bp, Artificial Sequence
  Synthetic
gtactagatacagatgcagga

SEQ ID NO: 30765 - DNA, 21 bp, Artificial Sequence
  Synthetic
gctggtctatgtaaagcaaat

SEQ ID NO: 30766 - DNA, 23 bp, Artificial Sequence
  Synthetic
agaaaatatgggaaacgtttacg

SEQ ID NO: 30767 - DNA, 23 bp, Artificial Sequence
  Synthetic
gccctatttaacatatgcctaac

SEQ ID NO: 30768 - DNA, 20 bp, Artificial Sequence
  Synthetic
gcacacaatgttaggttagt

SEQ ID NO: 30769 - DNA, 18 bp, Artificial Sequence
  Synthetic
tccttttcctttgcaggg

SEQ ID NO: 30770 - DNA, 20 bp, Artificial Sequence
  Synthetic
agtctaggtaggctccaagg

SEQ ID NO: 30771 - DNA, 16 bp, Artificial Sequence
  Synthetic
gtgatgagcggccagc

SEQ ID NO: 30772 - DNA, 16 bp, Artificial Sequence
  Synthetic
ttggggggctgtaggc

SEQ ID NO: 30773 - DNA, 20 bp, Artificial Sequence
  Synthetic
tcggcctctgatataaggct

SEQ ID NO: 30774 - DNA, 20 bp, Artificial Sequence
  Synthetic
cagcccattgtcaagagcta

SEQ ID NO: 30775 - DNA, 20 bp, Artificial Sequence
  Synthetic
cgcttccagtgagttggatc

SEQ ID NO: 30776 - DNA, 18 bp, Artificial Sequence
  Synthetic
cctggaggcgttctggtt

SEQ ID NO: 30777 - DNA, 19 bp, Artificial Sequence
  Synthetic
gtgggctagtgtagttggc

SEQ ID NO: 30778 - DNA, 19 bp, Artificial Sequence
  Synthetic
gtagttgcaggtccgcatg

SEQ ID NO: 30779 - DNA, 18 bp, Artificial Sequence
  Synthetic
gttctgtgacagggcctg

SEQ ID NO: 30780 - DNA, 20 bp, Artificial Sequence
  Synthetic
gaaggtttgggtggagatgt

SEQ ID NO: 30781 - DNA, 18 bp, Artificial Sequence
  Synthetic
aggtctgcaggagagagc

SEQ ID NO: 30782 - DNA, 20 bp, Artificial Sequence
  Synthetic
ataggtaggtcgggtttgtc

SEQ ID NO: 30783 - DNA, 17 bp, Artificial Sequence
  Synthetic
tctttgggatcggcggg

SEQ ID NO: 30784 - DNA, 19 bp, Artificial Sequence
  Synthetic
tggcatggtagctggagta

SEQ ID NO: 30785 - DNA, 20 bp, Artificial Sequence
  Synthetic
gagaaggaaaaaccgcattt

SEQ ID NO: 30786 - DNA, 18 bp, Artificial Sequence
  Synthetic
gggacatggagccggtaa

SEQ ID NO: 30787 - DNA, 20 bp, Artificial Sequence
  Synthetic
agttgggggttgatggctat

SEQ ID NO: 30788 - DNA, 16 bp, Artificial Sequence
  Synthetic
agaggaaagccgcggc

SEQ ID NO: 30789 - DNA, 20 bp, Artificial Sequence
  Synthetic
cagtcgccttgtacacagtc

SEQ ID NO: 30790 - DNA, 19 bp, Artificial Sequence
  Synthetic
agtatttgcgcatggcctg

SEQ ID NO: 30791 - DNA, 24 bp, Artificial Sequence
  Synthetic
ttaaaaagtagagaaatggggatg

SEQ ID NO: 30792 - DNA, 18 bp, Artificial Sequence
  Synthetic
ttgtcgtcaacgcctgag

SEQ ID NO: 30793 - DNA, 19 bp, Artificial Sequence
  Synthetic
ggtctcgacctgagctcta

SEQ ID NO: 30794 - DNA, 21 bp, Artificial Sequence
  Synthetic
tcttgtcagctgtaattggat

SEQ ID NO: 30795 - DNA, 21 bp, Artificial Sequence
  Synthetic
cagggtttatgtcaactcttc

SEQ ID NO: 30796 - DNA, 20 bp, Artificial Sequence
  Synthetic
cacttcaatgtacacactgc

SEQ ID NO: 30797 - DNA, 23 bp, Artificial Sequence
  Synthetic
atatatccacagcttgttcttcc

SEQ ID NO: 30798 - DNA, 20 bp, Artificial Sequence
  Synthetic
ttcttgtgaaaacaccatgg

SEQ ID NO: 30799 - DNA, 20 bp, Artificial Sequence
  Synthetic
cctctcattgacatctctgt

SEQ ID NO: 30800 - DNA, 21 bp, Artificial Sequence
  Synthetic
agtttctgatgatccactgat

SEQ ID NO: 30801 - DNA, 21 bp, Artificial Sequence
  Synthetic
agtcaatgaagagaactgcat

SEQ ID NO: 30802 - DNA, 25 bp, Artificial Sequence
  Synthetic
ttagtacattagccttttctccttt

SEQ ID NO: 30803 - DNA, 20 bp, Artificial Sequence
  Synthetic
aatattagagtctccagccg

SEQ ID NO: 30804 - DNA, 18 bp, Artificial Sequence
  Synthetic
tttggagtgagtggaggt

SEQ ID NO: 30805 - DNA, 19 bp, Artificial Sequence
  Synthetic
cagtctctgtgtttgtcgt

SEQ ID NO: 30806 - DNA, 21 bp, Artificial Sequence
  Synthetic
gccattcgatctaaagacttc

SEQ ID NO: 30807 - DNA, 19 bp, Artificial Sequence
  Synthetic
ctaatctgcatcccaggtg

SEQ ID NO: 30808 - DNA, 23 bp, Artificial Sequence
  Synthetic
ggttgatttctggtgatatatgt

SEQ ID NO: 30809 - DNA, 18 bp, Artificial Sequence
  Synthetic
gactcagtgatgctgtgc

SEQ ID NO: 30810 - DNA, 20 bp, Artificial Sequence
  Synthetic
gttgattcccactaacttgc

SEQ ID NO: 30811 - DNA, 20 bp, Artificial Sequence
  Synthetic
tctcgtctgaatttgtgtgt

SEQ ID NO: 30812 - DNA, 16 bp, Artificial Sequence
  Synthetic
agagacgccgtcctcg

SEQ ID NO: 30813 - DNA, 17 bp, Artificial Sequence
  Synthetic
cgatgcggtggatgtgg

SEQ ID NO: 30814 - DNA, 16 bp, Artificial Sequence
  Synthetic
tgtctcggccggcatc

SEQ ID NO: 30815 - DNA, 16 bp, Artificial Sequence
  Synthetic
cgggatgggtggacgt

SEQ ID NO: 30816 - DNA, 17 bp, Artificial Sequence
  Synthetic
tctcttccgcgtctccc

SEQ ID NO: 30817 - DNA, 23 bp, Artificial Sequence
  Synthetic
tgtacgtagtgttatgaatggtt

SEQ ID NO: 30818 - DNA, 18 bp, Artificial Sequence
  Synthetic
caatgtccaagccgtggg

SEQ ID NO: 30819 - DNA, 18 bp, Artificial Sequence
  Synthetic
gatccagaccaaagcggc

SEQ ID NO: 30820 - DNA, 16 bp, Artificial Sequence
  Synthetic
gctgcggaccgtcaga

SEQ ID NO: 30821 - DNA, 16 bp, Artificial Sequence
  Synthetic
accagcgccgtggtct

SEQ ID NO: 30822 - DNA, 18 bp, Artificial Sequence
  Synthetic
gccggggatgtagtggac

SEQ ID NO: 30823 - DNA, 16 bp, Artificial Sequence
  Synthetic
gccagcagcccgatct

SEQ ID NO: 30824 - DNA, 18 bp, Artificial Sequence
  Synthetic
gtttactcccgctgctgc

SEQ ID NO: 30825 - DNA, 16 bp, Artificial Sequence
  Synthetic
cggtttacgcctcgcc

SEQ ID NO: 30826 - DNA, 15 bp, Artificial Sequence
  Synthetic
ttcgcccgctgttgc

SEQ ID NO: 30827 - DNA, 16 bp, Artificial Sequence
  Synthetic
accgctgtgtgcctca

SEQ ID NO: 30828 - DNA, 18 bp, Artificial Sequence
  Synthetic
cgtatgttgagcggggac

SEQ ID NO: 30829 - DNA, 16 bp, Artificial Sequence
  Synthetic
atcgctctggccgtgg

SEQ ID NO: 30830 - DNA, 16 bp, Artificial Sequence
  Synthetic
acgctgcgtcggtttc

SEQ ID NO: 30831 - DNA, 17 bp, Artificial Sequence
  Synthetic
ggccctgcgttcaagac

SEQ ID NO: 30832 - DNA, 18 bp, Artificial Sequence
  Synthetic
ctgctcggtgatggacac

SEQ ID NO: 30833 - DNA, 16 bp, Artificial Sequence
  Synthetic
gtgaaaggcacggcgt

SEQ ID NO: 30834 - DNA, 17 bp, Artificial Sequence
  Synthetic
gggctcgttgagaagcg

SEQ ID NO: 30835 - DNA, 16 bp, Artificial Sequence
  Synthetic
aagggcgccgctagtg

SEQ ID NO: 30836 - DNA, 16 bp, Artificial Sequence
  Synthetic
aaggcgcgtgaccacc

SEQ ID NO: 30837 - DNA, 17 bp, Artificial Sequence
  Synthetic
tgcacctctacgcccag

SEQ ID NO: 30838 - DNA, 20 bp, Artificial Sequence
  Synthetic
gtggttagcgagaatgcaga

SEQ ID NO: 30839 - DNA, 16 bp, Artificial Sequence
  Synthetic
tacatcgtcggcgccc

SEQ ID NO: 30840 - DNA, 17 bp, Artificial Sequence
  Synthetic
gccgagagtcgcctgta

SEQ ID NO: 30841 - DNA, 20 bp, Artificial Sequence
  Synthetic
gcgactgcatctacgagctg

SEQ ID NO: 30842 - DNA, 19 bp, Artificial Sequence
  Synthetic
gacgacctggtgatggtct

SEQ ID NO: 30843 - DNA, 17 bp, Artificial Sequence
  Synthetic
cgcgtcagctggtgttg

SEQ ID NO: 30844 - DNA, 18 bp, Artificial Sequence
  Synthetic
attcccgtcagccgtcag

SEQ ID NO: 30845 - DNA, 18 bp, Artificial Sequence
  Synthetic
gtccgctcgtgttccagg

SEQ ID NO: 30846 - DNA, 16 bp, Artificial Sequence
  Synthetic
tggagcccacgccgat

SEQ ID NO: 30847 - DNA, 18 bp, Artificial Sequence
  Synthetic
gcctgtggtggaatcgct

SEQ ID NO: 30848 - DNA, 16 bp, Artificial Sequence
  Synthetic
cattgtgcccgcccaa

SEQ ID NO: 30849 - DNA, 16 bp, Artificial Sequence
  Synthetic
gtatcggttgccgcgg

SEQ ID NO: 30850 - DNA, 16 bp, Artificial Sequence
  Synthetic
ggggaacacgcgacgt

SEQ ID NO: 30851 - DNA, 19 bp, Artificial Sequence
  Synthetic
ctgcgtcacatggaggatc

SEQ ID NO: 30852 - DNA, 18 bp, Artificial Sequence
  Synthetic
tgctcacctccagcatcg

SEQ ID NO: 30853 - DNA, 16 bp, Artificial Sequence
  Synthetic
tgccgccgctctgttc

SEQ ID NO: 30854 - DNA, 20 bp, Artificial Sequence
  Synthetic
gtgtcggcttacttcctctg

SEQ ID NO: 30855 - DNA, 20 bp, Artificial Sequence
  Synthetic
aagacaagatgtcctgctgc

SEQ ID NO: 30856 - DNA, 17 bp, Artificial Sequence
  Synthetic
tcggtgaagaccacggc

SEQ ID NO: 30857 - DNA, 18 bp, Artificial Sequence
  Synthetic
ggcgatctcagcctctgg

SEQ ID NO: 30858 - DNA, 18 bp, Artificial Sequence
  Synthetic
gacggtccaggtccatct

SEQ ID NO: 30859 - DNA, 18 bp, Artificial Sequence
  Synthetic
acgagagtccgtcgagga

SEQ ID NO: 30860 - DNA, 17 bp, Artificial Sequence
  Synthetic
cacgccgtgcagacact

SEQ ID NO: 30861 - DNA, 18 bp, Artificial Sequence
  Synthetic
gttgttgcgtggctttgc

SEQ ID NO: 30862 - DNA, 20 bp, Artificial Sequence
  Synthetic
ggctgcgttttgttcgattt

SEQ ID NO: 30863 - DNA, 16 bp, Artificial Sequence
  Synthetic
cgcgtctcctgcgtct

SEQ ID NO: 30864 - DNA, 16 bp, Artificial Sequence
  Synthetic
agtctgggccgtggct

SEQ ID NO: 30865 - DNA, 19 bp, Artificial Sequence
  Synthetic
cgaggagatcaagccctcg

SEQ ID NO: 30866 - DNA, 19 bp, Artificial Sequence
  Synthetic
ctgattgaggacgcggaaa

SEQ ID NO: 30867 - DNA, 17 bp, Artificial Sequence
  Synthetic
tcaaggcgcacgaatgc

SEQ ID NO: 30868 - DNA, 17 bp, Artificial Sequence
  Synthetic
ctgtaaccaccggcgtg

SEQ ID NO: 30869 - DNA, 16 bp, Artificial Sequence
  Synthetic
gacggcgtttcacccg

SEQ ID NO: 30870 - DNA, 20 bp, Artificial Sequence
  Synthetic
gcgattttatcctgcccaac

SEQ ID NO: 30871 - DNA, 20 bp, Artificial Sequence
  Synthetic
ggaggaggcaagaaagctgt

SEQ ID NO: 30872 - DNA, 18 bp, Artificial Sequence
  Synthetic
cacgagcatcgcaacaac

SEQ ID NO: 30873 - DNA, 18 bp, Artificial Sequence
  Synthetic
gctggacgccgagaactt

SEQ ID NO: 30874 - DNA, 20 bp, Artificial Sequence
  Synthetic
ggattactgccgcaagatgc

SEQ ID NO: 30875 - DNA, 20 bp, Artificial Sequence
  Synthetic
ctgtccttttgcgctctact

SEQ ID NO: 30876 - DNA, 18 bp, Artificial Sequence
  Synthetic
cagcaggttgaacgcaga

SEQ ID NO: 30877 - DNA, 18 bp, Artificial Sequence
  Synthetic
acgttagttggcggtgac

SEQ ID NO: 30878 - DNA, 18 bp, Artificial Sequence
  Synthetic
ccacggcaaaatcggaga

SEQ ID NO: 30879 - DNA, 15 bp, Artificial Sequence
  Synthetic
atgacgccgtcgcct

SEQ ID NO: 30880 - DNA, 18 bp, Artificial Sequence
  Synthetic
ctacacggccgagagtct

SEQ ID NO: 30881 - DNA, 16 bp, Artificial Sequence
  Synthetic
tcgcggactacgacgc

SEQ ID NO: 30882 - DNA, 16 bp, Artificial Sequence
  Synthetic
tggcaccgctgctgga

SEQ ID NO: 30883 - DNA, 16 bp, Artificial Sequence
  Synthetic
acggtctgcgtgcact

SEQ ID NO: 30884 - DNA, 16 bp, Artificial Sequence
  Synthetic
tgctgttgcacgggct

SEQ ID NO: 30885 - DNA, 18 bp, Artificial Sequence
  Synthetic
gggtgggaaaaggcctcc

SEQ ID NO: 30886 - DNA, 16 bp, Artificial Sequence
  Synthetic
tgttacccgcggcgac

SEQ ID NO: 30887 - DNA, 17 bp, Artificial Sequence
  Synthetic
gcaccagctcctccgtt

SEQ ID NO: 30888 - DNA, 16 bp, Artificial Sequence
  Synthetic
acgtagaccggcgcca

SEQ ID NO: 30889 - DNA, 17 bp, Artificial Sequence
  Synthetic
tgtcctacaacggccgt

SEQ ID NO: 30890 - DNA, 17 bp, Artificial Sequence
  Synthetic
agagacgacacagccgg

SEQ ID NO: 30891 - DNA, 18 bp, Artificial Sequence
  Synthetic
ccggacggtggttcatcc

SEQ ID NO: 30892 - DNA, 16 bp, Artificial Sequence
  Synthetic
acgctttcgtgcccgg

SEQ ID NO: 30893 - DNA, 16 bp, Artificial Sequence
  Synthetic
tccacaccgacgccga

SEQ ID NO: 30894 - DNA, 20 bp, Artificial Sequence
  Synthetic
gacaccatctttttcccgga

SEQ ID NO: 30895 - DNA, 18 bp, Artificial Sequence
  Synthetic
ccgtagacctgaccgact

SEQ ID NO: 30896 - DNA, 18 bp, Artificial Sequence
  Synthetic
gaagctttggtcgcctgc

SEQ ID NO: 30897 - DNA, 16 bp, Artificial Sequence
  Synthetic
accactacccgtcggc

SEQ ID NO: 30898 - DNA, 16 bp, Artificial Sequence
  Synthetic
tcgacgccatgccacc

SEQ ID NO: 30899 - DNA, 16 bp, Artificial Sequence
  Synthetic
gcggttgcctgtcagc

SEQ ID NO: 30900 - DNA, 16 bp, Artificial Sequence
  Synthetic
ggctgcgacgcgaaac

SEQ ID NO: 30901 - DNA, 17 bp, Artificial Sequence
  Synthetic
agaacgcggcttccgtc

SEQ ID NO: 30902 - DNA, 18 bp, Artificial Sequence
  Synthetic
ccgatccggtcatcgacc

SEQ ID NO: 30903 - DNA, 16 bp, Artificial Sequence
  Synthetic
tgggccagtgggagct

SEQ ID NO: 30904 - DNA, 16 bp, Artificial Sequence
  Synthetic
tgcggcctgggactca

SEQ ID NO: 30905 - DNA, 16 bp, Artificial Sequence
  Synthetic
tctggtcgccgtgctg

SEQ ID NO: 30906 - DNA, 16 bp, Artificial Sequence
  Synthetic
gacgcgctcaagacgc

SEQ ID NO: 30907 - DNA, 16 bp, Artificial Sequence
  Synthetic
attctccgggtcgcgc

SEQ ID NO: 30908 - DNA, 17 bp, Artificial Sequence
  Synthetic
cccgcgacaaaactgcg

SEQ ID NO: 30909 - DNA, 18 bp, Artificial Sequence
  Synthetic
cgccaggacagtcgcaaa

SEQ ID NO: 30910 - DNA, 19 bp, Artificial Sequence
  Synthetic
gcgagatgatgcacacgta

SEQ ID NO: 30911 - DNA, 20 bp, Artificial Sequence
  Synthetic
cggctagatgtttacgacgt

SEQ ID NO: 30912 - DNA, 19 bp, Artificial Sequence
  Synthetic
cttacctggacgaactgcg

SEQ ID NO: 30913 - DNA, 17 bp, Artificial Sequence
  Synthetic
cgcgcctcaacaatgcg

SEQ ID NO: 30914 - DNA, 17 bp, Artificial Sequence
  Synthetic
gtctgagcgtcgctgac

SEQ ID NO: 30915 - DNA, 16 bp, Artificial Sequence
  Synthetic
tcgcgctcgaccacct

SEQ ID NO: 30916 - DNA, 17 bp, Artificial Sequence
  Synthetic
gaagcgcaagagccacc

SEQ ID NO: 30917 - DNA, 16 bp, Artificial Sequence
  Synthetic
cgtccgcgacaacgtg

SEQ ID NO: 30918 - DNA, 16 bp, Artificial Sequence
  Synthetic
tccaccgagcacaggg

SEQ ID NO: 30919 - DNA, 16 bp, Artificial Sequence
  Synthetic
gaggtttcgcggcagc

SEQ ID NO: 30920 - DNA, 17 bp, Artificial Sequence
  Synthetic
agcccagcacgttaccc

SEQ ID NO: 30921 - DNA, 18 bp, Artificial Sequence
  Synthetic
tgctcgcccaggagacag

SEQ ID NO: 30922 - DNA, 18 bp, Artificial Sequence
  Synthetic
ccacatgatgatggcggc

SEQ ID NO: 30923 - DNA, 17 bp, Artificial Sequence
  Synthetic
actgtcgtttcccccgc

SEQ ID NO: 30924 - DNA, 16 bp, Artificial Sequence
  Synthetic
cgcgtgggtgccatac

SEQ ID NO: 30925 - DNA, 18 bp, Artificial Sequence
  Synthetic
ccacgaaaccgacaggcg

SEQ ID NO: 30926 - DNA, 17 bp, Artificial Sequence
  Synthetic
tggagcggactaccacc

SEQ ID NO: 30927 - DNA, 16 bp, Artificial Sequence
  Synthetic
tgctgtgcacctcggc

SEQ ID NO: 30928 - DNA, 17 bp, Artificial Sequence
  Synthetic
aggccctgatgatccgc

SEQ ID NO: 30929 - DNA, 17 bp, Artificial Sequence
  Synthetic
gccgaaccgctggctta

SEQ ID NO: 30930 - DNA, 19 bp, Artificial Sequence
  Synthetic
gctctacggagtgtgcaag

SEQ ID NO: 30931 - DNA, 17 bp, Artificial Sequence
  Synthetic
tgctctcgcacagctcc

SEQ ID NO: 30932 - DNA, 16 bp, Artificial Sequence
  Synthetic
tagcggctctccagcg

SEQ ID NO: 30933 - DNA, 19 bp, Artificial Sequence
  Synthetic
gggatccgcgtacagactg

SEQ ID NO: 30934 - DNA, 20 bp, Artificial Sequence
  Synthetic
ggccttgaacaccacgttac

SEQ ID NO: 30935 - DNA, 16 bp, Artificial Sequence
  Synthetic
caccagccgcgaaagg

SEQ ID NO: 30936 - DNA, 16 bp, Artificial Sequence
  Synthetic
tctcgagcgacaggcc

SEQ ID NO: 30937 - DNA, 16 bp, Artificial Sequence
  Synthetic
ttcagcgtccggcctc

SEQ ID NO: 30938 - DNA, 19 bp, Artificial Sequence
  Synthetic
ctttcctggacactctggc

SEQ ID NO: 30939 - DNA, 18 bp, Artificial Sequence
  Synthetic
tggctccttaccgtcaca

SEQ ID NO: 30940 - DNA, 18 bp, Artificial Sequence
  Synthetic
ttcctggccctgtgcttt

SEQ ID NO: 30941 - DNA, 19 bp, Artificial Sequence
  Synthetic
gctcatcacgcagacgatg

SEQ ID NO: 30942 - DNA, 18 bp, Artificial Sequence
  Synthetic
agctggacgtttaggcgt

SEQ ID NO: 30943 - DNA, 19 bp, Artificial Sequence
  Synthetic
cgctgaccatcaatgccac

SEQ ID NO: 30944 - DNA, 16 bp, Artificial Sequence
  Synthetic
tccagcggctcatggt

SEQ ID NO: 30945 - DNA, 17 bp, Artificial Sequence
  Synthetic
ctcgtactgctggccct

SEQ ID NO: 30946 - DNA, 18 bp, Artificial Sequence
  Synthetic
cgtcatactctagcctgg

SEQ ID NO: 30947 - DNA, 20 bp, Artificial Sequence
  Synthetic
gcactcaatgtaacgtcact

SEQ ID NO: 30948 - DNA, 18 bp, Artificial Sequence
  Synthetic
cacggcctcatcatgcaa

SEQ ID NO: 30949 - DNA, 16 bp, Artificial Sequence
  Synthetic
ccgctgacatcgccga

SEQ ID NO: 30950 - DNA, 17 bp, Artificial Sequence
  Synthetic
cggtacatgtggcggtc

SEQ ID NO: 30951 - DNA, 18 bp, Artificial Sequence
  Synthetic
gcttcgacacggtggaaa

SEQ ID NO: 30952 - DNA, 16 bp, Artificial Sequence
  Synthetic
aaacaccgccgcccac

SEQ ID NO: 30953 - DNA, 16 bp, Artificial Sequence
  Synthetic
cgggagcgaacgggat

SEQ ID NO: 30954 - DNA, 16 bp, Artificial Sequence
  Synthetic
ccggcgttttcgggac

SEQ ID NO: 30955 - DNA, 16 bp, Artificial Sequence
  Synthetic
acacgttgtacgccgc

SEQ ID NO: 30956 - DNA, 16 bp, Artificial Sequence
  Synthetic
agctacgccgcgagtc

SEQ ID NO: 30957 - DNA, 16 bp, Artificial Sequence
  Synthetic
agctggaagccgacgc

SEQ ID NO: 30958 - DNA, 18 bp, Artificial Sequence
  Synthetic
gtcgcctccacgagagaa

SEQ ID NO: 30959 - DNA, 19 bp, Artificial Sequence
  Synthetic
cagcgacatgttgcttcgt

SEQ ID NO: 30960 - DNA, 16 bp, Artificial Sequence
  Synthetic
ggccgtgcagtctgga

SEQ ID NO: 30961 - DNA, 20 bp, Artificial Sequence
  Synthetic
agcgttggtcgtaacattct

SEQ ID NO: 30962 - DNA, 18 bp, Artificial Sequence
  Synthetic
acgtgtggtgtaactgcg

SEQ ID NO: 30963 - DNA, 16 bp, Artificial Sequence
  Synthetic
cggtgttggtgctcgc

SEQ ID NO: 30964 - DNA, 19 bp, Artificial Sequence
  Synthetic
ccgcatgggaaagtacggt

SEQ ID NO: 30965 - DNA, 20 bp, Artificial Sequence
  Synthetic
cgggctgtcacatcaactct

SEQ ID NO: 30966 - DNA, 19 bp, Artificial Sequence
  Synthetic
tgaaaaacacgacgaaagc

SEQ ID NO: 30967 - DNA, 17 bp, Artificial Sequence
  Synthetic
tcgtctgccccagtacc

SEQ ID NO: 30968 - DNA, 16 bp, Artificial Sequence
  Synthetic
ggcagcccatcctcgt

SEQ ID NO: 30969 - DNA, 18 bp, Artificial Sequence
  Synthetic
agctcaccgaccacagac

SEQ ID NO: 30970 - DNA, 20 bp, Artificial Sequence
  Synthetic
cgatcgtcatgcgtgtctac

SEQ ID NO: 30971 - DNA, 18 bp, Artificial Sequence
  Synthetic
ggacagagcagccgtttc

SEQ ID NO: 30972 - DNA, 16 bp, Artificial Sequence
  Synthetic
ttgtctgggcgcccga

SEQ ID NO: 30973 - DNA, 19 bp, Artificial Sequence
  Synthetic
tcaagcctgttagaaccgc

SEQ ID NO: 30974 - DNA, 19 bp, Artificial Sequence
  Synthetic
tgttgcaccggctttatgc

SEQ ID NO: 30975 - DNA, 16 bp, Artificial Sequence
  Synthetic
gcgcgcctttggacaa

SEQ ID NO: 30976 - DNA, 18 bp, Artificial Sequence
  Synthetic
gatgaccctggcgttgtt

SEQ ID NO: 30977 - DNA, 16 bp, Artificial Sequence
  Synthetic
cgagggaacgagcggt

SEQ ID NO: 30978 - DNA, 18 bp, Artificial Sequence
  Synthetic
ggcctctatctgcgccag

SEQ ID NO: 30979 - DNA, 16 bp, Artificial Sequence
  Synthetic
gaacacggtctgcggc

SEQ ID NO: 30980 - DNA, 19 bp, Artificial Sequence
  Synthetic
cgaagccgtataccgtcag

SEQ ID NO: 30981 - DNA, 19 bp, Artificial Sequence
  Synthetic
ggcgactttcagggcatct

SEQ ID NO: 30982 - DNA, 17 bp, Artificial Sequence
  Synthetic
tggctcggcttctgtca

SEQ ID NO: 30983 - DNA, 18 bp, Artificial Sequence
  Synthetic
gccgtgacactttggctc

SEQ ID NO: 30984 - DNA, 18 bp, Artificial Sequence
  Synthetic
actacctggcgcacagtc

SEQ ID NO: 30985 - DNA, 16 bp, Artificial Sequence
  Synthetic
aacaccacgcggtccg

SEQ ID NO: 30986 - DNA, 16 bp, Artificial Sequence
  Synthetic
taccggagcccccaga

SEQ ID NO: 30987 - DNA, 16 bp, Artificial Sequence
  Synthetic
gccctgttgcgcgtgt

SEQ ID NO: 30988 - DNA, 16 bp, Artificial Sequence
  Synthetic
ttcgccgtcgccgtac

SEQ ID NO: 30989 - DNA, 18 bp, Artificial Sequence
  Synthetic
attgattcgcctcgttcg

SEQ ID NO: 30990 - DNA, 23 bp, Artificial Sequence
  Synthetic
tgaaaagatgtggatatgtgttt

SEQ ID NO: 30991 - DNA, 21 bp, Artificial Sequence
  Synthetic
tttgaatccatccacataggc

SEQ ID NO: 30992 - DNA, 18 bp, Artificial Sequence
  Synthetic
ctcactctggatccagct

SEQ ID NO: 30993 - DNA, 23 bp, Artificial Sequence
  Synthetic
ttatcattggaatcagttggaag

SEQ ID NO: 30994 - DNA, 18 bp, Artificial Sequence
  Synthetic
cagtccgcaagagcattt

SEQ ID NO: 30995 - DNA, 22 bp, Artificial Sequence
  Synthetic
tgaatataggctgttgaacaca

SEQ ID NO: 30996 - DNA, 21 bp, Artificial Sequence
  Synthetic
aaatgcagagagtaccattct

SEQ ID NO: 30997 - DNA, 22 bp, Artificial Sequence
  Synthetic
ataggtagcatcattcaggttg

SEQ ID NO: 30998 - DNA, 19 bp, Artificial Sequence
  Synthetic
tgatccatcattgcccttt

SEQ ID NO: 30999 - DNA, 18 bp, Artificial Sequence
  Synthetic
gttggttggtgttccctc

SEQ ID NO: 31000 - DNA, 19 bp, Artificial Sequence
  Synthetic
gtatcgaaacccacacgta

SEQ ID NO: 31001 - DNA, 21 bp, Artificial Sequence
  Synthetic
tccacatcaagatcatacagt

SEQ ID NO: 31002 - DNA, 20 bp, Artificial Sequence
  Synthetic
gggcaactctggatggtcta

SEQ ID NO: 31003 - DNA, 25 bp, Artificial Sequence
  Synthetic
attatacatgactcacaaaaaccac

SEQ ID NO: 31004 - DNA, 24 bp, Artificial Sequence
  Synthetic
tcaaattcctctctatagtcttct

SEQ ID NO: 31005 - DNA, 20 bp, Artificial Sequence
  Synthetic
cttgcacctgttgttccatg

SEQ ID NO: 31006 - DNA, 18 bp, Artificial Sequence
  Synthetic
ttccatccaaacccacca

SEQ ID NO: 31007 - DNA, 19 bp, Artificial Sequence
  Synthetic
tttccatcagcacaggtaa

SEQ ID NO: 31008 - DNA, 19 bp, Artificial Sequence
  Synthetic
acttctcagctcctcagtt

SEQ ID NO: 31009 - DNA, 18 bp, Artificial Sequence
  Synthetic
tcctctcgaactgcggtg

SEQ ID NO: 31010 - DNA, 20 bp, Artificial Sequence
  Synthetic
gttgttgctatgactggatt

SEQ ID NO: 31011 - DNA, 18 bp, Artificial Sequence
  Synthetic
caaaggcgtttccaagtt

SEQ ID NO: 31012 - DNA, 20 bp, Artificial Sequence
  Synthetic
aactggccaagcaaaacatc

SEQ ID NO: 31013 - DNA, 19 bp, Artificial Sequence
  Synthetic
gcacattacgtccctggaa

SEQ ID NO: 31014 - DNA, 21 bp, Artificial Sequence
  Synthetic
gttgaatgtgaaactgtttgt

SEQ ID NO: 31015 - DNA, 23 bp, Artificial Sequence
  Synthetic
caccttagaaagttctaaccctt

SEQ ID NO: 31016 - DNA, 23 bp, Artificial Sequence
  Synthetic
gatcttttgctaccaaactagat

SEQ ID NO: 31017 - DNA, 19 bp, Artificial Sequence
  Synthetic
ggaccaatgaaagcttgcg

SEQ ID NO: 31018 - DNA, 18 bp, Artificial Sequence
  Synthetic
cttgggcccaacatcctg

SEQ ID NO: 31019 - DNA, 22 bp, Artificial Sequence
  Synthetic
ctttgctcttactcatacatct

SEQ ID NO: 31020 - DNA, 19 bp, Artificial Sequence
  Synthetic
gcaattaagggtgagccaa

SEQ ID NO: 31021 - DNA, 18 bp, Artificial Sequence
  Synthetic
actgtctggggatgacaa

SEQ ID NO: 31022 - DNA, 18 bp, Artificial Sequence
  Synthetic
gcagctgccaagtggtat

SEQ ID NO: 31023 - DNA, 18 bp, Artificial Sequence
  Synthetic
aagtcaacttgcgcgctg

SEQ ID NO: 31024 - DNA, 18 bp, Artificial Sequence
  Synthetic
acttcgggctcaacacct

SEQ ID NO: 31025 - DNA, 20 bp, Artificial Sequence
  Synthetic
ggtagtatacagccgagtct

SEQ ID NO: 31026 - DNA, 18 bp, Artificial Sequence
  Synthetic
tccctacctaacgcccct

SEQ ID NO: 31027 - DNA, 19 bp, Artificial Sequence
  Synthetic
ttggacgatgtcaaagtga

SEQ ID NO: 31028 - DNA, 23 bp, Artificial Sequence
  Synthetic
aatgactatgtttttgactctcg

SEQ ID NO: 31029 - DNA, 18 bp, Artificial Sequence
  Synthetic
attcaagactgcgcacgc

SEQ ID NO: 31030 - DNA, 18 bp, Artificial Sequence
  Synthetic
cgcaggacaggatgcatc

SEQ ID NO: 31031 - DNA, 16 bp, Artificial Sequence
  Synthetic
ctcacgcagcagtcgc

SEQ ID NO: 31032 - DNA, 19 bp, Artificial Sequence
  Synthetic
gcattgcatccctaaaagt

SEQ ID NO: 31033 - DNA, 18 bp, Artificial Sequence
  Synthetic
ccgcgggatccaggttag

SEQ ID NO: 31034 - DNA, 20 bp, Artificial Sequence
  Synthetic
taagttagcctgcacattgg

SEQ ID NO: 31035 - DNA, 18 bp, Artificial Sequence
  Synthetic
aacgatcgcctactggag

SEQ ID NO: 31036 - DNA, 21 bp, Artificial Sequence
  Synthetic
ttcctttttaccatggtgtcc

SEQ ID NO: 31037 - DNA, 19 bp, Artificial Sequence
  Synthetic
accctatgcaaccctgtgg

SEQ ID NO: 31038 - DNA, 20 bp, Artificial Sequence
  Synthetic
acaaattctgcccactcata

SEQ ID NO: 31039 - DNA, 25 bp, Artificial Sequence
  Synthetic
ctttcttatacctagtatgttgctt

SEQ ID NO: 31040 - DNA, 22 bp, Artificial Sequence
  Synthetic
tgttacatctggagttgttagt

SEQ ID NO: 31041 - DNA, 18 bp, Artificial Sequence
  Synthetic
gtacttgcgagcatcggc

SEQ ID NO: 31042 - DNA, 16 bp, Artificial Sequence
  Synthetic
gcgtcccggtcactga

SEQ ID NO: 31043 - DNA, 20 bp, Artificial Sequence
  Synthetic
gacgcataatcgttcgctct

SEQ ID NO: 31044 - DNA, 22 bp, Artificial Sequence
  Synthetic
aatttgaatgtccactgtttga

SEQ ID NO: 31045 - DNA, 16 bp, Artificial Sequence
  Synthetic
ttagtgtgcgccccct

SEQ ID NO: 31046 - DNA, 19 bp, Artificial Sequence
  Synthetic
tgcttcctcataggacggc

SEQ ID NO: 31047 - DNA, 18 bp, Artificial Sequence
  Synthetic
aattgcaccagaccggga

SEQ ID NO: 31048 - DNA, 20 bp, Artificial Sequence
  Synthetic
gcgcctgagcaaaggtatta

SEQ ID NO: 31049 - DNA, 21 bp, Artificial Sequence
  Synthetic
agcaattgttccattggtaac

SEQ ID NO: 31050 - DNA, 19 bp, Artificial Sequence
  Synthetic
ccgttatctggcttaatgc

SEQ ID NO: 31051 - DNA, 24 bp, Artificial Sequence
  Synthetic
aaaagggtttacattatccatcac

SEQ ID NO: 31052 - DNA, 22 bp, Artificial Sequence
  Synthetic
gtcatttcttaacatggcttct

SEQ ID NO: 31053 - DNA, 19 bp, Artificial Sequence
  Synthetic
ccatccacagaacgcttta

SEQ ID NO: 31054 - DNA, 21 bp, Artificial Sequence
  Synthetic
taacacgatcgcatagaaact

SEQ ID NO: 31055 - DNA, 18 bp, Artificial Sequence
  Synthetic
ccatccaaaagccagcca

SEQ ID NO: 31056 - DNA, 23 bp, Artificial Sequence
  Synthetic
atacaattcattctgattgcgtt

SEQ ID NO: 31057 - DNA, 20 bp, Artificial Sequence
  Synthetic
gcgcaaatccagtttatcgc

SEQ ID NO: 31058 - DNA, 18 bp, Artificial Sequence
  Synthetic
ttcatgatgttggctgcg

SEQ ID NO: 31059 - DNA, 18 bp, Artificial Sequence
  Synthetic
gcggtttgcagctgactt

SEQ ID NO: 31060 - DNA, 18 bp, Artificial Sequence
  Synthetic
atcatgcagacggttctc

SEQ ID NO: 31061 - DNA, 19 bp, Artificial Sequence
  Synthetic
cagatatggcgtcgcgaac

SEQ ID NO: 31062 - DNA, 21 bp, Artificial Sequence
  Synthetic
attttctttttgcagggcatt

SEQ ID NO: 31063 - DNA, 20 bp, Artificial Sequence
  Synthetic
ggcggccatcatgagtttac

SEQ ID NO: 31064 - DNA, 19 bp, Artificial Sequence
  Synthetic
tatgtcagctagctctgca

SEQ ID NO: 31065 - DNA, 22 bp, Artificial Sequence
  Synthetic
taaaaattgatactgtgggcgt

SEQ ID NO: 31066 - DNA, 18 bp, Artificial Sequence
  Synthetic
agtcctcgacctcgtcct

SEQ ID NO: 31067 - DNA, 20 bp, Artificial Sequence
  Synthetic
gggctgtagagatgacggta

SEQ ID NO: 31068 - DNA, 24 bp, Artificial Sequence
  Synthetic
ctttttttactctttaagcgagag

SEQ ID NO: 31069 - DNA, 18 bp, Artificial Sequence
  Synthetic
tatggacttcggcctggg

SEQ ID NO: 31070 - DNA, 18 bp, Artificial Sequence
  Synthetic
tgcggatgacagttaggt

SEQ ID NO: 31071 - DNA, 23 bp, Artificial Sequence
  Synthetic
aaagtacacaatttcctctgtac

SEQ ID NO: 31072 - DNA, 18 bp, Artificial Sequence
  Synthetic
tggtgtgaaccagaaagg

SEQ ID NO: 31073 - DNA, 25 bp, Artificial Sequence
  Synthetic
ctcattaaaagggtaagtgtgatta

SEQ ID NO: 31074 - DNA, 18 bp, Artificial Sequence
  Synthetic
aaagggggctaaacactc

SEQ ID NO: 31075 - DNA, 21 bp, Artificial Sequence
  Synthetic
accggtgaacttaaaatagct

SEQ ID NO: 31076 - DNA, 18 bp, Artificial Sequence
  Synthetic
tgcttgttgggacacttt

SEQ ID NO: 31077 - DNA, 24 bp, Artificial Sequence
  Synthetic
catcattttcttctgtttcttcag

SEQ ID NO: 31078 - DNA, 22 bp, Artificial Sequence
  Synthetic
ggttattaaggctaagctttca

SEQ ID NO: 31079 - DNA, 19 bp, Artificial Sequence
  Synthetic
tgttgaggggagcagttgt

SEQ ID NO: 31080 - DNA, 22 bp, Artificial Sequence
  Synthetic
acattaaacctttttcggtact

SEQ ID NO: 31081 - DNA, 21 bp, Artificial Sequence
  Synthetic
gcataaaacctagaccattgg

SEQ ID NO: 31082 - DNA, 18 bp, Artificial Sequence
  Synthetic
agtgcagttgttttcagc

SEQ ID NO: 31083 - DNA, 18 bp, Artificial Sequence
  Synthetic
gttatcgtcagcaactgc

SEQ ID NO: 31084 - DNA, 24 bp, Artificial Sequence
  Synthetic
ccactataaatgttgaagttactc

SEQ ID NO: 31085 - DNA, 18 bp, Artificial Sequence
  Synthetic
gttgtttacgatgcagcg

SEQ ID NO: 31086 - DNA, 21 bp, Artificial Sequence
  Synthetic
ttatcgaaatcagagctgtgg

SEQ ID NO: 31087 - DNA, 21 bp, Artificial Sequence
  Synthetic
cgcttactaatatgggtccat

SEQ ID NO: 31088 - DNA, 23 bp, Artificial Sequence
  Synthetic
gttttgttgtttaatcattccga

SEQ ID NO: 31089 - DNA, 19 bp, Artificial Sequence
  Synthetic
gcctggctttgtactgttt

SEQ ID NO: 31090 - DNA, 19 bp, Artificial Sequence
  Synthetic
ggctagatcaccatcgctg

SEQ ID NO: 31091 - DNA, 20 bp, Artificial Sequence
  Synthetic
gccattctccatatgccaca

SEQ ID NO: 31092 - DNA, 19 bp, Artificial Sequence
  Synthetic
cgtgacctttctcacctgg

SEQ ID NO: 31093 - DNA, 24 bp, Artificial Sequence
  Synthetic
atccataattgtcttgatttcacc

SEQ ID NO: 31094 - DNA, 18 bp, Artificial Sequence
  Synthetic
tgtcagaacatgcagagc

SEQ ID NO: 31095 - DNA, 20 bp, Artificial Sequence
  Synthetic
tcacaatggtaatctcgaga

SEQ ID NO: 31096 - DNA, 23 bp, Artificial Sequence
  Synthetic
caggttctttatgtcattcctag

SEQ ID NO: 31097 - DNA, 18 bp, Artificial Sequence
  Synthetic
gccttgatgctcactgag

SEQ ID NO: 31098 - DNA, 20 bp, Artificial Sequence
  Synthetic
ggaatcttcttgcattcctt

SEQ ID NO: 31099 - DNA, 22 bp, Artificial Sequence
  Synthetic
atgacgtaatcactagtgaatg

SEQ ID NO: 31100 - DNA, 23 bp, Artificial Sequence
  Synthetic
cgttctatttttgaatgtttgga

SEQ ID NO: 31101 - DNA, 18 bp, Artificial Sequence
  Synthetic
tacattggtcacaaggcg

SEQ ID NO: 31102 - DNA, 22 bp, Artificial Sequence
  Synthetic
tctcaatttggacatttccttt

SEQ ID NO: 31103 - DNA, 23 bp, Artificial Sequence
  Synthetic
gtttttccattgaagcataaagc

SEQ ID NO: 31104 - DNA, 19 bp, Artificial Sequence
  Synthetic
ccctctcttcaggaacgta

SEQ ID NO: 31105 - DNA, 22 bp, Artificial Sequence
  Synthetic
gatagaataaagcaagatccgc

SEQ ID NO: 31106 - DNA, 18 bp, Artificial Sequence
  Synthetic
ttccaaggtccgtagtcc

SEQ ID NO: 31107 - DNA, 18 bp, Artificial Sequence
  Synthetic
ccctgatcaacgacatcg

SEQ ID NO: 31108 - DNA, 20 bp, Artificial Sequence
  Synthetic
tctcggattctacctgtgta

SEQ ID NO: 31109 - DNA, 20 bp, Artificial Sequence
  Synthetic
actcaaaagtctctgcagta

SEQ ID NO: 31110 - DNA, 21 bp, Artificial Sequence
  Synthetic
ccttgttttcgagcataatgc

SEQ ID NO: 31111 - DNA, 20 bp, Artificial Sequence
  Synthetic
ggtaactgttgttcctcagt

SEQ ID NO: 31112 - DNA, 19 bp, Artificial Sequence
  Synthetic
ggagatggtgcagatccca

SEQ ID NO: 31113 - DNA, 22 bp, Artificial Sequence
  Synthetic
gttttacaaaagcgtctctttg

SEQ ID NO: 31114 - DNA, 19 bp, Artificial Sequence
  Synthetic
gactctacttggagctcca

SEQ ID NO: 31115 - DNA, 20 bp, Artificial Sequence
  Synthetic
tgaagagtagtctcccctat

SEQ ID NO: 31116 - DNA, 22 bp, Artificial Sequence
  Synthetic
ttctgtataaccaatggaatcg

SEQ ID NO: 31117 - DNA, 21 bp, Artificial Sequence
  Synthetic
tcaaatgtttgagtgatgtca

SEQ ID NO: 31118 - DNA, 21 bp, Artificial Sequence
  Synthetic
ttctcctgaatgttgacctaa

SEQ ID NO: 31119 - DNA, 21 bp, Artificial Sequence
  Synthetic
gattttctgtgtctccaaact

SEQ ID NO: 31120 - DNA, 20 bp, Artificial Sequence
  Synthetic
gaggtagcttcaaaaggttc

SEQ ID NO: 31121 - DNA, 23 bp, Artificial Sequence
  Synthetic
cactggaaaatctttcacttaaa

SEQ ID NO: 31122 - DNA, 22 bp, Artificial Sequence
  Synthetic
tcttttgtagcttacagttgtt

SEQ ID NO: 31123 - DNA, 18 bp, Artificial Sequence
  Synthetic
gcgtttggccacaatcga

SEQ ID NO: 31124 - DNA, 18 bp, Artificial Sequence
  Synthetic
ttccctggaattcgcctt

SEQ ID NO: 31125 - DNA, 21 bp, Artificial Sequence
  Synthetic
acgtatgataacagcactaca

SEQ ID NO: 31126 - DNA, 17 bp, Artificial Sequence
  Synthetic
ggattctcgctgcagcc

SEQ ID NO: 31127 - DNA, 23 bp, Artificial Sequence
  Synthetic
ctttcgatgttttttcaactgat

SEQ ID NO: 31128 - DNA, 23 bp, Artificial Sequence
  Synthetic
ctttcagaagtccaatcatatgt

SEQ ID NO: 31129 - DNA, 21 bp, Artificial Sequence
  Synthetic
atgtaagccaaaagtgctaaa

SEQ ID NO: 31130 - DNA, 20 bp, Artificial Sequence
  Synthetic
cctttcactcttgaatccca

SEQ ID NO: 31131 - DNA, 23 bp, Artificial Sequence
  Synthetic
ctcttttcattttagctctctct

SEQ ID NO: 31132 - DNA, 18 bp, Artificial Sequence
  Synthetic
ctgtggtcagtgcattct

SEQ ID NO: 31133 - DNA, 24 bp, Artificial Sequence
  Synthetic
ccttggttagtatatgttttacct

SEQ ID NO: 31134 - DNA, 18 bp, Artificial Sequence
  Synthetic
gtcacatccacagcaaca

SEQ ID NO: 31135 - DNA, 23 bp, Artificial Sequence
  Synthetic
aattgtgtgtaatattgctgtca

SEQ ID NO: 31136 - DNA, 18 bp, Artificial Sequence
  Synthetic
cactgtccgttagttccc

SEQ ID NO: 31137 - DNA, 24 bp, Artificial Sequence
  Synthetic
aaatctataaaagacagcccaaag

SEQ ID NO: 31138 - DNA, 23 bp, Artificial Sequence
  Synthetic
acaatctttcacatattttgcct

SEQ ID NO: 31139 - DNA, 21 bp, Artificial Sequence
  Synthetic
gcaatacatgtttgtgtaggt

SEQ ID NO: 31140 - DNA, 18 bp, Artificial Sequence
  Synthetic
tgtttgcacagccatcaa

SEQ ID NO: 31141 - DNA, 25 bp, Artificial Sequence
  Synthetic
aatcaaataaatgtctgtgtctgtc

SEQ ID NO: 31142 - DNA, 18 bp, Artificial Sequence
  Synthetic
caggcaccacttccatac

SEQ ID NO: 31143 - DNA, 23 bp, Artificial Sequence
  Synthetic
ctccatcattaaattgacatgtt

SEQ ID NO: 31144 - DNA, 25 bp, Artificial Sequence
  Synthetic
gcattgtgtatagaatcatgactaa

SEQ ID NO: 31145 - DNA, 23 bp, Artificial Sequence
  Synthetic
gcaaataaaatccagaacctgta

SEQ ID NO: 31146 - DNA, 18 bp, Artificial Sequence
  Synthetic
tatcctgacacctttggc

SEQ ID NO: 31147 - DNA, 22 bp, Artificial Sequence
  Synthetic
ctgttaaaaaaatgtctggcaa

SEQ ID NO: 31148 - DNA, 20 bp, Artificial Sequence
  Synthetic
ttacggatgcacataatgtc

SEQ ID NO: 31149 - DNA, 21 bp, Artificial Sequence
  Synthetic
gtgtgaccttaggttactcat

SEQ ID NO: 31150 - DNA, 16 bp, Artificial Sequence
  Synthetic
ggggcactcgcaagca

SEQ ID NO: 31151 - DNA, 16 bp, Artificial Sequence
  Synthetic
acgcgccttggggata

SEQ ID NO: 31152 - DNA, 19 bp, Artificial Sequence
  Synthetic
atagttaacggccgaagcg

SEQ ID NO: 31153 - DNA, 16 bp, Artificial Sequence
  Synthetic
agcagacagtggcggc

SEQ ID NO: 31154 - DNA, 18 bp, Artificial Sequence
  Synthetic
acacgtgagtctcggcat

SEQ ID NO: 31155 - DNA, 18 bp, Artificial Sequence
  Synthetic
gggccacacacactggat

SEQ ID NO: 31156 - DNA, 20 bp, Artificial Sequence
  Synthetic
gtaggtagtctccggatgct

SEQ ID NO: 31157 - DNA, 20 bp, Artificial Sequence
  Synthetic
ggtactggacgtccacgata

SEQ ID NO: 31158 - DNA, 20 bp, Artificial Sequence
  Synthetic
gcggagacagtgtcagaatg

SEQ ID NO: 31159 - DNA, 19 bp, Artificial Sequence
  Synthetic
gcctggagtatgtggaggg

SEQ ID NO: 31160 - DNA, 18 bp, Artificial Sequence
  Synthetic
ctgtgatgggggcaagga

SEQ ID NO: 31161 - DNA, 18 bp, Artificial Sequence
  Synthetic
ccaccccaccaagtcttg

SEQ ID NO: 31162 - DNA, 19 bp, Artificial Sequence
  Synthetic
gctcttgccacttcctgtt

SEQ ID NO: 31163 - DNA, 20 bp, Artificial Sequence
  Synthetic
gtggaatagcactcgtcaca

SEQ ID NO: 31164 - DNA, 19 bp, Artificial Sequence
  Synthetic
gggaatcaccgaaacgtct

SEQ ID NO: 31165 - DNA, 18 bp, Artificial Sequence
  Synthetic
ccggcatcgtagcactcg

SEQ ID NO: 31166 - DNA, 19 bp, Artificial Sequence
  Synthetic
cattctgcacagaccccag

SEQ ID NO: 31167 - DNA, 20 bp, Artificial Sequence
  Synthetic
gcttgccagcgaaatttagg

SEQ ID NO: 31168 - DNA, 19 bp, Artificial Sequence
  Synthetic
gggcagaatgtccaccaaa

SEQ ID NO: 31169 - DNA, 19 bp, Artificial Sequence
  Synthetic
gactcagggacgtaatgcg

SEQ ID NO: 31170 - DNA, 19 bp, Artificial Sequence
  Synthetic
tcgagccgttcttgatgtg

SEQ ID NO: 31171 - DNA, 18 bp, Artificial Sequence
  Synthetic
gttagcactgccacgtcc

SEQ ID NO: 31172 - DNA, 18 bp, Artificial Sequence
  Synthetic
ctcaaccctggtagcggt

SEQ ID NO: 31173 - DNA, 17 bp, Artificial Sequence
  Synthetic
tctttgcggccagctct

SEQ ID NO: 31174 - DNA, 20 bp, Artificial Sequence
  Synthetic
tggtcgtggcatacaccata

SEQ ID NO: 31175 - DNA, 20 bp, Artificial Sequence
  Synthetic
gttcacagcgaagacctcat

SEQ ID NO: 31176 - DNA, 19 bp, Artificial Sequence
  Synthetic
tctatctgtgagggcggtg

SEQ ID NO: 31177 - DNA, 18 bp, Artificial Sequence
  Synthetic
gtcatatgctggctgcgg

SEQ ID NO: 31178 - DNA, 20 bp, Artificial Sequence
  Synthetic
ggcacaggagtaaatagcgg

SEQ ID NO: 31179 - DNA, 21 bp, Artificial Sequence
  Synthetic
tgatccattggtcaaaatgtt

SEQ ID NO: 31180 - DNA, 18 bp, Artificial Sequence
  Synthetic
aggtactctggccattca

SEQ ID NO: 31181 - DNA, 18 bp, Artificial Sequence
  Synthetic
tgtggcattgcactgaac

SEQ ID NO: 31182 - DNA, 21 bp, Artificial Sequence
  Synthetic
accagtatacatcgaagagaa

SEQ ID NO: 31183 - DNA, 18 bp, Artificial Sequence
  Synthetic
ataagtagacctggccgg

SEQ ID NO: 31184 - DNA, 20 bp, Artificial Sequence
  Synthetic
ctgtttcgtttgcagttagt

SEQ ID NO: 31185 - DNA, 24 bp, Artificial Sequence
  Synthetic
aacaattatatgctgatgccaatc

SEQ ID NO: 31186 - DNA, 18 bp, Artificial Sequence
  Synthetic
caccgtacctaggtccta

SEQ ID NO: 31187 - DNA, 19 bp, Artificial Sequence
  Synthetic
ttcatcactcctgcttgaa

SEQ ID NO: 31188 - DNA, 23 bp, Artificial Sequence
  Synthetic
acttcttgtagttctgtgacttt

SEQ ID NO: 31189 - DNA, 19 bp, Artificial Sequence
  Synthetic
caatccctttgcagcatta

SEQ ID NO: 31190 - DNA, 21 bp, Artificial Sequence
  Synthetic
ccataatcacaacttcctgtt

SEQ ID NO: 31191 - DNA, 21 bp, Artificial Sequence
  Synthetic
tccattctttgtgtaggtagt

SEQ ID NO: 31192 - DNA, 19 bp, Artificial Sequence
  Synthetic
ccattaccgccaacatgaa

SEQ ID NO: 31193 - DNA, 21 bp, Artificial Sequence
  Synthetic
gtgggttccgtatttacattc

SEQ ID NO: 31194 - DNA, 19 bp, Artificial Sequence
  Synthetic
caagggatgacagaccaaa

SEQ ID NO: 31195 - DNA, 21 bp, Artificial Sequence
  Synthetic
ctttgtccatctgattgactc

SEQ ID NO: 31196 - DNA, 19 bp, Artificial Sequence
  Synthetic
ggtccctgagattgatgcg

SEQ ID NO: 31197 - DNA, 18 bp, Artificial Sequence
  Synthetic
gcacggagagattggtgg

SEQ ID NO: 31198 - DNA, 20 bp, Artificial Sequence
  Synthetic
tgccggaaaaaactggaagt

SEQ ID NO: 31199 - DNA, 19 bp, Artificial Sequence
  Synthetic
ggtgattggggttccgagt

SEQ ID NO: 31200 - DNA, 20 bp, Artificial Sequence
  Synthetic
cgaccttctctgttgggtac

SEQ ID NO: 31201 - DNA, 21 bp, Artificial Sequence
  Synthetic
gcacactgaaagtacttttcc

SEQ ID NO: 31202 - DNA, 19 bp, Artificial Sequence
  Synthetic
gagggcaaacaatcgatag

SEQ ID NO: 31203 - DNA, 18 bp, Artificial Sequence
  Synthetic
tctcttcacaagcagagc

SEQ ID NO: 31204 - DNA, 22 bp, Artificial Sequence
  Synthetic
acatcttctgtagctaacaaag

SEQ ID NO: 31205 - DNA, 20 bp, Artificial Sequence
  Synthetic
gaatccacagacatagggtt

SEQ ID NO: 31206 - DNA, 18 bp, Artificial Sequence
  Synthetic
atgtcctggtggcagagc

SEQ ID NO: 31207 - DNA, 25 bp, Artificial Sequence
  Synthetic
tattttttgtcacatctatacctcc

SEQ ID NO: 31208 - DNA, 18 bp, Artificial Sequence
  Synthetic
tttcacatcggttggaca

SEQ ID NO: 31209 - DNA, 18 bp, Artificial Sequence
  Synthetic
tattgcaggggcgtctgg

SEQ ID NO: 31210 - DNA, 18 bp, Artificial Sequence
  Synthetic
gctggaacctgttgaaca

SEQ ID NO: 31211 - DNA, 18 bp, Artificial Sequence
  Synthetic
tcattccaggacgtcttc

SEQ ID NO: 31212 - DNA, 18 bp, Artificial Sequence
  Synthetic
acaggaaccttgagctgg

SEQ ID NO: 31213 - DNA, 22 bp, Artificial Sequence
  Synthetic
cctgaggaatactatcaccatt

SEQ ID NO: 31214 - DNA, 19 bp, Artificial Sequence
  Synthetic
tgttgtctgcaatggtaac

SEQ ID NO: 31215 - DNA, 18 bp, Artificial Sequence
  Synthetic
acgtttcctgagcgtaga

SEQ ID NO: 31216 - DNA, 18 bp, Artificial Sequence
  Synthetic
accactcccggtacaaag

SEQ ID NO: 31217 - DNA, 19 bp, Artificial Sequence
  Synthetic
gcgacagtaaagctccagc

SEQ ID NO: 31218 - DNA, 18 bp, Artificial Sequence
  Synthetic
gccagaaaacccgtcgaa

SEQ ID NO: 31219 - DNA, 20 bp, Artificial Sequence
  Synthetic
agcactagtgtcaccctcat

SEQ ID NO: 31220 - DNA, 20 bp, Artificial Sequence
  Synthetic
cgacttagtggagcatgagg

SEQ ID NO: 31221 - DNA, 18 bp, Artificial Sequence
  Synthetic
gccaactgtagaggcgtg

SEQ ID NO: 31222 - DNA, 18 bp, Artificial Sequence
  Synthetic
gttgtcatggccctggtc

SEQ ID NO: 31223 - DNA, 16 bp, Artificial Sequence
  Synthetic
atcgatccgcccgtcg

SEQ ID NO: 31224 - DNA, 16 bp, Artificial Sequence
  Synthetic
gaccggggtgaaacgc

SEQ ID NO: 31225 - DNA, 16 bp, Artificial Sequence
  Synthetic
tgacagagcccaccgc

SEQ ID NO: 31226 - DNA, 19 bp, Artificial Sequence
  Synthetic
tcaaaactgggaccgatcg

SEQ ID NO: 31227 - DNA, 16 bp, Artificial Sequence
  Synthetic
gccggatccaggcaca

SEQ ID NO: 31228 - DNA, 20 bp, Artificial Sequence
  Synthetic
ggatctgattcgggtcacca

SEQ ID NO: 31229 - DNA, 16 bp, Artificial Sequence
  Synthetic
gcgccctgtgcctcat

SEQ ID NO: 31230 - DNA, 18 bp, Artificial Sequence
  Synthetic
ggcagccaaggtgtcaac

SEQ ID NO: 31231 - DNA, 20 bp, Artificial Sequence
  Synthetic
ccactttaccatgggcgatg

SEQ ID NO: 31232 - DNA, 19 bp, Artificial Sequence
  Synthetic
gaacgagtccaggggaaac

SEQ ID NO: 31233 - DNA, 16 bp, Artificial Sequence
  Synthetic
tggcggggtgtcatgg

SEQ ID NO: 31234 - DNA, 20 bp, Artificial Sequence
  Synthetic
ttcatgaagcgggtagcagc

SEQ ID NO: 31235 - DNA, 18 bp, Artificial Sequence
  Synthetic
ctgctgggtggtggaaag

SEQ ID NO: 31236 - DNA, 19 bp, Artificial Sequence
  Synthetic
ggcagggtagtccatggta

SEQ ID NO: 31237 - DNA, 18 bp, Artificial Sequence
  Synthetic
atcacagaggcaacactc

SEQ ID NO: 31238 - DNA, 20 bp, Artificial Sequence
  Synthetic
ccagaaagtttcaggtcatc

SEQ ID NO: 31239 - DNA, 18 bp, Artificial Sequence
  Synthetic
tatacgccccgatcttca

SEQ ID NO: 31240 - DNA, 18 bp, Artificial Sequence
  Synthetic
ctttgttgcctgacacac

SEQ ID NO: 31241 - DNA, 18 bp, Artificial Sequence
  Synthetic
tcatggtcactctccgtt

SEQ ID NO: 31242 - DNA, 19 bp, Artificial Sequence
  Synthetic
gaaagagtcctcatcggag

SEQ ID NO: 31243 - DNA, 20 bp, Artificial Sequence
  Synthetic
tcctcttttaagtgcggaaa

SEQ ID NO: 31244 - DNA, 20 bp, Artificial Sequence
  Synthetic
cgcatatcaatgtcgtttga

SEQ ID NO: 31245 - DNA, 21 bp, Artificial Sequence
  Synthetic
ggctttatgtacgtaccaaac

SEQ ID NO: 31246 - DNA, 20 bp, Artificial Sequence
  Synthetic
atatcgaattgagccgagta

SEQ ID NO: 31247 - DNA, 20 bp, Artificial Sequence
  Synthetic
attcggtaaatgcaaacgta

SEQ ID NO: 31248 - DNA, 19 bp, Artificial Sequence
  Synthetic
ggggggataaaaggcatat

SEQ ID NO: 31249 - DNA, 16 bp, Artificial Sequence
  Synthetic
cgtgcttccacccgtg

SEQ ID NO: 31250 - DNA, 17 bp, Artificial Sequence
  Synthetic
cggtgggaacgtcgcat

SEQ ID NO: 31251 - DNA, 16 bp, Artificial Sequence
  Synthetic
gccgcgatccagaacc

SEQ ID NO: 31252 - DNA, 20 bp, Artificial Sequence
  Synthetic
gagcaattgtaccacgtcct

SEQ ID NO: 31253 - DNA, 18 bp, Artificial Sequence
  Synthetic
ggatggttgtagctgtcc

SEQ ID NO: 31254 - DNA, 22 bp, Artificial Sequence
  Synthetic
tgcatttaaagttctaggtgat

SEQ ID NO: 31255 - DNA, 25 bp, Artificial Sequence
  Synthetic
cttttataaatttctcctactggga

SEQ ID NO: 31256 - DNA, 20 bp, Artificial Sequence
  Synthetic
gttacttggctcattgcttc

SEQ ID NO: 31257 - DNA, 23 bp, Artificial Sequence
  Synthetic
agatcctacatacaaatcatcca

SEQ ID NO: 31258 - DNA, 20 bp, Artificial Sequence
  Synthetic
ttagtgctttggttcctcta

SEQ ID NO: 31259 - DNA, 20 bp, Artificial Sequence
  Synthetic
aggggtattaacaaactccc

SEQ ID NO: 31260 - DNA, 19 bp, Artificial Sequence
  Synthetic
tgcatggcttctcctttta

SEQ ID NO: 31261 - DNA, 20 bp, Artificial Sequence
  Synthetic
gggattgtagggaattccaa

SEQ ID NO: 31262 - DNA, 18 bp, Artificial Sequence
  Synthetic
tatggagactccctgacc

SEQ ID NO: 31263 - DNA, 18 bp, Artificial Sequence
  Synthetic
ttcattgtgtggctccct

SEQ ID NO: 31264 - DNA, 18 bp, Artificial Sequence
  Synthetic
ggctccatttcttgctct

SEQ ID NO: 31265 - DNA, 24 bp, Artificial Sequence
  Synthetic
ccacatgttaaaattttctgtcac

SEQ ID NO: 31266 - DNA, 24 bp, Artificial Sequence
  Synthetic
gctgtactattatggttttagcat

SEQ ID NO: 31267 - DNA, 25 bp, Artificial Sequence
  Synthetic
ctactcctaatggttcaatttttac

SEQ ID NO: 31268 - DNA, 19 bp, Artificial Sequence
  Synthetic
atccccaggagctgttgat

SEQ ID NO: 31269 - DNA, 20 bp, Artificial Sequence
  Synthetic
aaggtacctgaggtgtgact

SEQ ID NO: 31270 - DNA, 18 bp, Artificial Sequence
  Synthetic
caggcaaaaagcagctgc

SEQ ID NO: 31271 - DNA, 16 bp, Artificial Sequence
  Synthetic
tggccgcgtccatcag

SEQ ID NO: 31272 - DNA, 17 bp, Artificial Sequence
  Synthetic
tcgactccacggagctg

SEQ ID NO: 31273 - DNA, 19 bp, Artificial Sequence
  Synthetic
ccagtttgggctcctgaag

SEQ ID NO: 31274 - DNA, 17 bp, Artificial Sequence
  Synthetic
gggagcgtgcgttcaat

SEQ ID NO: 31275 - DNA, 19 bp, Artificial Sequence
  Synthetic
cgacatcacgtacgtcctc

SEQ ID NO: 31276 - DNA, 17 bp, Artificial Sequence
  Synthetic
cgctttgtcgtcccgga

SEQ ID NO: 31277 - DNA, 17 bp, Artificial Sequence
  Synthetic
ccgggagtttccgttcg

SEQ ID NO: 31278 - DNA, 17 bp, Artificial Sequence
  Synthetic
acgaaggaggcgatcgc

SEQ ID NO: 31279 - DNA, 16 bp, Artificial Sequence
  Synthetic
agaaggcagcggacgc

SEQ ID NO: 31280 - DNA, 16 bp, Artificial Sequence
  Synthetic
agagctctgcggggtg

SEQ ID NO: 31281 - DNA, 18 bp, Artificial Sequence
  Synthetic
tcggagcttcccaccgag

SEQ ID NO: 31282 - DNA, 16 bp, Artificial Sequence
  Synthetic
tgggactcgatggccg

SEQ ID NO: 31283 - DNA, 19 bp, Artificial Sequence
  Synthetic
catagcagcgccatcttcc

SEQ ID NO: 31284 - DNA, 19 bp, Artificial Sequence
  Synthetic
tgttcgcctacgtgaaacc

SEQ ID NO: 31285 - DNA, 16 bp, Artificial Sequence
  Synthetic
cggtctccttcgcgga

SEQ ID NO: 31286 - DNA, 19 bp, Artificial Sequence
  Synthetic
gggatctaccgggacatcc

SEQ ID NO: 31287 - DNA, 17 bp, Artificial Sequence
  Synthetic
gcacgggtacaaccagc

SEQ ID NO: 31288 - DNA, 18 bp, Artificial Sequence
  Synthetic
cgtgaagaccatccggga

SEQ ID NO: 31289 - DNA, 17 bp, Artificial Sequence
  Synthetic
gccgaggtgtacaggga

SEQ ID NO: 31290 - DNA, 18 bp, Artificial Sequence
  Synthetic
cttggcccgtttcttcgg

SEQ ID NO: 31291 - DNA, 17 bp, Artificial Sequence
  Synthetic
tcggtcgatctcgggga

SEQ ID NO: 31292 - DNA, 16 bp, Artificial Sequence
  Synthetic
aacaccgcggcgtacc

SEQ ID NO: 31293 - DNA, 20 bp, Artificial Sequence
  Synthetic
acgcgagcagagtaaatgtc

SEQ ID NO: 31294 - DNA, 15 bp, Artificial Sequence
  Synthetic
agacaacgcgcgtgc

SEQ ID NO: 31295 - DNA, 16 bp, Artificial Sequence
  Synthetic
cctcccctcgcctgtt

SEQ ID NO: 31296 - DNA, 16 bp, Artificial Sequence
  Synthetic
agtgtagcggcccgtc

SEQ ID NO: 31297 - DNA, 16 bp, Artificial Sequence
  Synthetic
gcgcttcgatctcgcc

SEQ ID NO: 31298 - DNA, 18 bp, Artificial Sequence
  Synthetic
actcgggggtgatgaagc

SEQ ID NO: 31299 - DNA, 16 bp, Artificial Sequence
  Synthetic
cgaacgcaacgggagc

SEQ ID NO: 31300 - DNA, 19 bp, Artificial Sequence
  Synthetic
gctttttatggcgcccgag

SEQ ID NO: 31301 - DNA, 19 bp, Artificial Sequence
  Synthetic
gcgctacttcatcttcggc

SEQ ID NO: 31302 - DNA, 18 bp, Artificial Sequence
  Synthetic
tgttcgaccactccaccc

SEQ ID NO: 31303 - DNA, 16 bp, Artificial Sequence
  Synthetic
gcagttccacgcggtc

SEQ ID NO: 31304 - DNA, 17 bp, Artificial Sequence
  Synthetic
tcgtcgcactcgctgta

SEQ ID NO: 31305 - DNA, 19 bp, Artificial Sequence
  Synthetic
gcacatgagcttgtaggcc

SEQ ID NO: 31306 - DNA, 16 bp, Artificial Sequence
  Synthetic
cgcccctgtctggtct

SEQ ID NO: 31307 - DNA, 20 bp, Artificial Sequence
  Synthetic
agtgcagaatcacgttggtc

SEQ ID NO: 31308 - DNA, 16 bp, Artificial Sequence
  Synthetic
acacaggatccgccgc

SEQ ID NO: 31309 - DNA, 16 bp, Artificial Sequence
  Synthetic
atcacccgggcagtcg

SEQ ID NO: 31310 - DNA, 17 bp, Artificial Sequence
  Synthetic
agaacccccaggatgcg

SEQ ID NO: 31311 - DNA, 16 bp, Artificial Sequence
  Synthetic
acgtcgctgtgccagg

SEQ ID NO: 31312 - DNA, 17 bp, Artificial Sequence
  Synthetic
acctcggcgatgtgtgt

SEQ ID NO: 31313 - DNA, 19 bp, Artificial Sequence
  Synthetic
tgtagaagtaccgctcggg

SEQ ID NO: 31314 - DNA, 16 bp, Artificial Sequence
  Synthetic
tcaccaggtcgtccgc

SEQ ID NO: 31315 - DNA, 16 bp, Artificial Sequence
  Synthetic
tactcaccccgcccga

SEQ ID NO: 31316 - DNA, 16 bp, Artificial Sequence
  Synthetic
tggtgggtacggggga

SEQ ID NO: 31317 - DNA, 19 bp, Artificial Sequence
  Synthetic
ccaaaggtgtttttccgcc

SEQ ID NO: 31318 - DNA, 17 bp, Artificial Sequence
  Synthetic
acggcccattcggagtc

SEQ ID NO: 31319 - DNA, 19 bp, Artificial Sequence
  Synthetic
gtacgcgtcgtagctgaat

SEQ ID NO: 31320 - DNA, 17 bp, Artificial Sequence
  Synthetic
acggcctccacgaagtc

SEQ ID NO: 31321 - DNA, 17 bp, Artificial Sequence
  Synthetic
tcgtagcggcccagaac

SEQ ID NO: 31322 - DNA, 18 bp, Artificial Sequence
  Synthetic
cgacggtaaacagcgtgt

SEQ ID NO: 31323 - DNA, 16 bp, Artificial Sequence
  Synthetic
tatgcggccggcgtag

SEQ ID NO: 31324 - DNA, 16 bp, Artificial Sequence
  Synthetic
agggccacgaagcgga

SEQ ID NO: 31325 - DNA, 17 bp, Artificial Sequence
  Synthetic
caggaggcgcggactaa

SEQ ID NO: 31326 - DNA, 16 bp, Artificial Sequence
  Synthetic
ttgggcgacgtctgcg

SEQ ID NO: 31327 - DNA, 17 bp, Artificial Sequence
  Synthetic
cacaccacaccacacgg

SEQ ID NO: 31328 - DNA, 15 bp, Artificial Sequence
  Synthetic
acgtgtgcgccgtgt

SEQ ID NO: 31329 - DNA, 16 bp, Artificial Sequence
  Synthetic
tacggcgtggtggtgc

SEQ ID NO: 31330 - DNA, 16 bp, Artificial Sequence
  Synthetic
accccgacgtcttccg

SEQ ID NO: 31331 - DNA, 19 bp, Artificial Sequence
  Synthetic
ggctcggctgaatgtggta

SEQ ID NO: 31332 - DNA, 17 bp, Artificial Sequence
  Synthetic
ccaggcgatggtcaggt

SEQ ID NO: 31333 - DNA, 16 bp, Artificial Sequence
  Synthetic
aagggaagctgcgccg

SEQ ID NO: 31334 - DNA, 17 bp, Artificial Sequence
  Synthetic
acgtgcgatcggatccc

SEQ ID NO: 31335 - DNA, 19 bp, Artificial Sequence
  Synthetic
acctcacacacctcacctc

SEQ ID NO: 31336 - DNA, 18 bp, Artificial Sequence
  Synthetic
gcattctcaggtacctcc

SEQ ID NO: 31337 - DNA, 19 bp, Artificial Sequence
  Synthetic
ggtgtctgagaccctggac

SEQ ID NO: 31338 - DNA, 19 bp, Artificial Sequence
  Synthetic
gcacgttgtattccaggaa

SEQ ID NO: 31339 - DNA, 25 bp, Artificial Sequence
  Synthetic
ctaaagctaacatatgttcatcttg

SEQ ID NO: 31340 - DNA, 18 bp, Artificial Sequence
  Synthetic
tacacatgaagggcagga

SEQ ID NO: 31341 - DNA, 24 bp, Artificial Sequence
  Synthetic
tcaatggaaatctcatatccatct

SEQ ID NO: 31342 - DNA, 23 bp, Artificial Sequence
  Synthetic
catgtcaaatctcacatagtaca

SEQ ID NO: 31343 - DNA, 19 bp, Artificial Sequence
  Synthetic
gtaagctcctcgtcttcgc

SEQ ID NO: 31344 - DNA, 20 bp, Artificial Sequence
  Synthetic
aggtgtagtttgctcatagc

SEQ ID NO: 31345 - DNA, 17 bp, Artificial Sequence
  Synthetic
gcactgacggccgaaag

SEQ ID NO: 31346 - DNA, 20 bp, Artificial Sequence
  Synthetic
cttgctgatactgtctgcca

SEQ ID NO: 31347 - DNA, 20 bp, Artificial Sequence
  Synthetic
ctggaaaaaatgagcagcgg

SEQ ID NO: 31348 - DNA, 19 bp, Artificial Sequence
  Synthetic
ctggtcttcttcaccatcc

SEQ ID NO: 31349 - DNA, 24 bp, Artificial Sequence
  Synthetic
gaactgattagaggaaactttagg

SEQ ID NO: 31350 - DNA, 18 bp, Artificial Sequence
  Synthetic
cctttgcaggtttagcac

SEQ ID NO: 31351 - DNA, 22 bp, Artificial Sequence
  Synthetic
ggtagtcaggatatttgcagat

SEQ ID NO: 31352 - DNA, 20 bp, Artificial Sequence
  Synthetic
ccattgtgtgtatgtaagcc

SEQ ID NO: 31353 - DNA, 20 bp, Artificial Sequence
  Synthetic
tgactgagtgataccagttt

SEQ ID NO: 31354 - DNA, 20 bp, Artificial Sequence
  Synthetic
tggcagcaaccaaaaggttt

SEQ ID NO: 31355 - DNA, 23 bp, Artificial Sequence
  Synthetic
atttcttcagttaaaagttgctc

SEQ ID NO: 31356 - DNA, 18 bp, Artificial Sequence
  Synthetic
gcgctacctgttcagaaa

SEQ ID NO: 31357 - DNA, 21 bp, Artificial Sequence
  Synthetic
aacctaatctttgcaaacctt

SEQ ID NO: 31358 - DNA, 22 bp, Artificial Sequence
  Synthetic
agctgtaggaatagattttggt

SEQ ID NO: 31359 - DNA, 18 bp, Artificial Sequence
  Synthetic
taaggccctgacatttgc

SEQ ID NO: 31360 - DNA, 25 bp, Artificial Sequence
  Synthetic
ctgtgtattgaatatctgaatccaa

SEQ ID NO: 31361 - DNA, 22 bp, Artificial Sequence
  Synthetic
caatactctataagcgtttcca

SEQ ID NO: 31362 - DNA, 18 bp, Artificial Sequence
  Synthetic
catttgggattgcttggg

SEQ ID NO: 31363 - DNA, 21 bp, Artificial Sequence
  Synthetic
ttacagatgaaacagagcatc

SEQ ID NO: 31364 - DNA, 18 bp, Artificial Sequence
  Synthetic
gcagcactaactcctgta

SEQ ID NO: 31365 - DNA, 25 bp, Artificial Sequence
  Synthetic
ctcagcactagaatttatagagttt

SEQ ID NO: 31366 - DNA, 18 bp, Artificial Sequence
  Synthetic
ttagagactgcagcgttg

SEQ ID NO: 31367 - DNA, 22 bp, Artificial Sequence
  Synthetic
ttaaattttgcaagtgctgttg

SEQ ID NO: 31368 - DNA, 18 bp, Artificial Sequence
  Synthetic
gcagcagcattagcatct

SEQ ID NO: 31369 - DNA, 21 bp, Artificial Sequence
  Synthetic
aatattgcatcttgtagtgca

SEQ ID NO: 31370 - DNA, 18 bp, Artificial Sequence
  Synthetic
tcctccagatcgaaggcg

SEQ ID NO: 31371 - DNA, 18 bp, Artificial Sequence
  Synthetic
gaagcctattgcgccagc

SEQ ID NO: 31372 - DNA, 20 bp, Artificial Sequence
  Synthetic
gacggtctgcaagagtatta

SEQ ID NO: 31373 - DNA, 22 bp, Artificial Sequence
  Synthetic
ggaatattggaagcagaactga

SEQ ID NO: 31374 - DNA, 22 bp, Artificial Sequence
  Synthetic
ttggtagtttcaatgatcactc

SEQ ID NO: 31375 - DNA, 20 bp, Artificial Sequence
  Synthetic
ttccgtgtagatacctgatc

SEQ ID NO: 31376 - DNA, 23 bp, Artificial Sequence
  Synthetic
taatttttcctctgaggcctaat

SEQ ID NO: 31377 - DNA, 19 bp, Artificial Sequence
  Synthetic
ttgaacacctccagatgtc

SEQ ID NO: 31378 - DNA, 20 bp, Artificial Sequence
  Synthetic
gaacctgttttggatcaaca

SEQ ID NO: 31379 - DNA, 22 bp, Artificial Sequence
  Synthetic
ccatagatatcctgctccattt

SEQ ID NO: 31380 - DNA, 21 bp, Artificial Sequence
  Synthetic
gcttgcaatgtttagtactgt

SEQ ID NO: 31381 - DNA, 25 bp, Artificial Sequence
  Synthetic
cagctattactattggaaagtgttt

SEQ ID NO: 31382 - DNA, 23 bp, Artificial Sequence
  Synthetic
ttctcttgttagctattattggg

SEQ ID NO: 31383 - DNA, 25 bp, Artificial Sequence
  Synthetic
ctattgtaatccattctagtgatct

SEQ ID NO: 31384 - DNA, 19 bp, Artificial Sequence
  Synthetic
attagcgcttcataccctt

SEQ ID NO: 31385 - DNA, 21 bp, Artificial Sequence
  Synthetic
agtctaactttttgcccaaat

SEQ ID NO: 31386 - DNA, 22 bp, Artificial Sequence
  Synthetic
actcacccctaaagatacaatc

SEQ ID NO: 31387 - DNA, 18 bp, Artificial Sequence
  Synthetic
ccttacacctgcttcaca

SEQ ID NO: 31388 - DNA, 20 bp, Artificial Sequence
  Synthetic
cttcatcttctcctatgcca

SEQ ID NO: 31389 - DNA, 20 bp, Artificial Sequence
  Synthetic
gcatcatctaggaagcctaa

SEQ ID NO: 31390 - DNA, 18 bp, Artificial Sequence
  Synthetic
attctgaaaccgctggtg

SEQ ID NO: 31391 - DNA, 19 bp, Artificial Sequence
  Synthetic
tcgcgagagaccagatctt

SEQ ID NO: 31392 - DNA, 20 bp, Artificial Sequence
  Synthetic
tcaacaggagcttctatagg

SEQ ID NO: 31393 - DNA, 21 bp, Artificial Sequence
  Synthetic
ctaatgggatttcttcaccaa

SEQ ID NO: 31394 - DNA, 22 bp, Artificial Sequence
  Synthetic
cccaacctaattatatctgcaa

SEQ ID NO: 31395 - DNA, 21 bp, Artificial Sequence
  Synthetic
tgactcaaaaggtgctatagg

SEQ ID NO: 31396 - DNA, 19 bp, Artificial Sequence
  Synthetic
tgggatctccatcattcct

SEQ ID NO: 31397 - DNA, 23 bp, Artificial Sequence
  Synthetic
cattaggattttcagtatctgga

SEQ ID NO: 31398 - DNA, 18 bp, Artificial Sequence
  Synthetic
cctgctttgtcttgcaaa

SEQ ID NO: 31399 - DNA, 25 bp, Artificial Sequence
  Synthetic
catgagatcccattttaaaattcac

SEQ ID NO: 31400 - DNA, 19 bp, Artificial Sequence
  Synthetic
ggtcaagttcactggagaa

SEQ ID NO: 31401 - DNA, 22 bp, Artificial Sequence
  Synthetic
aatacatgagtgtctgaacttg

SEQ ID NO: 31402 - DNA, 18 bp, Artificial Sequence
  Synthetic
atgactcttcagcagcca

SEQ ID NO: 31403 - DNA, 19 bp, Artificial Sequence
  Synthetic
aatttctctggagcaagct

SEQ ID NO: 31404 - DNA, 22 bp, Artificial Sequence
  Synthetic
gactcccaatatactttcgttt

SEQ ID NO: 31405 - DNA, 21 bp, Artificial Sequence
  Synthetic
aaattgccttgtaagatcagt

SEQ ID NO: 31406 - DNA, 23 bp, Artificial Sequence
  Synthetic
ggctttaaaaaacaaagatgcaa

SEQ ID NO: 31407 - DNA, 23 bp, Artificial Sequence
  Synthetic
gagcttctggatttataatgtct

SEQ ID NO: 31408 - DNA, 19 bp, Artificial Sequence
  Synthetic
gggaaggcttagtaacgaa

SEQ ID NO: 31409 - DNA, 20 bp, Artificial Sequence
  Synthetic
tccaaactaagcgttcttca

SEQ ID NO: 31410 - DNA, 23 bp, Artificial Sequence
  Synthetic
ggtaaatcattacaaggtttagc

SEQ ID NO: 31411 - DNA, 19 bp, Artificial Sequence
  Synthetic
gctttagttttgcgccttt

SEQ ID NO: 31412 - DNA, 20 bp, Artificial Sequence
  Synthetic
cgccttttttgtaccagagt

SEQ ID NO: 31413 - DNA, 20 bp, Artificial Sequence
  Synthetic
agctcaccatcttttattgc

SEQ ID NO: 31414 - DNA, 21 bp, Artificial Sequence
  Synthetic
acagttgcaattcattgtctt

SEQ ID NO: 31415 - DNA, 23 bp, Artificial Sequence
  Synthetic
tcaatatctggtgtttcatttcc

SEQ ID NO: 31416 - DNA, 20 bp, Artificial Sequence
  Synthetic
ggaggaatcacaaccaagca

SEQ ID NO: 31417 - DNA, 18 bp, Artificial Sequence
  Synthetic
gttagctgcttcctgagt

SEQ ID NO: 31418 - DNA, 18 bp, Artificial Sequence
  Synthetic
acaaccaataggcagcca

SEQ ID NO: 31419 - DNA, 22 bp, Artificial Sequence
  Synthetic
caactattgtagcagtgttgtt

SEQ ID NO: 31420 - DNA, 21 bp, Artificial Sequence
  Synthetic
gttcataactaggtaaggcac

SEQ ID NO: 31421 - DNA, 19 bp, Artificial Sequence
  Synthetic
atctttgcactggataggg

SEQ ID NO: 31422 - DNA, 20 bp, Artificial Sequence
  Synthetic
gatgtctgataccagcatga

SEQ ID NO: 31423 - DNA, 21 bp, Artificial Sequence
  Synthetic
acttctttctaagctggacaa

SEQ ID NO: 31424 - DNA, 23 bp, Artificial Sequence
  Synthetic
attatatgctgatgctatgccta

SEQ ID NO: 31425 - DNA, 23 bp, Artificial Sequence
  Synthetic
tgtttttatgtttgtcctcttct

SEQ ID NO: 31426 - DNA, 22 bp, Artificial Sequence
  Synthetic
ttcattactccagcttggtatc

SEQ ID NO: 31427 - DNA, 20 bp, Artificial Sequence
  Synthetic
ttgatcagtaaaaccagtgc

SEQ ID NO: 31428 - DNA, 20 bp, Artificial Sequence
  Synthetic
gaggcatataagggtgagaa

SEQ ID NO: 31429 - DNA, 19 bp, Artificial Sequence
  Synthetic
tgttgctggtaaccatcaa

SEQ ID NO: 31430 - DNA, 23 bp, Artificial Sequence
  Synthetic
ttcaacttaccattctttgtgta

SEQ ID NO: 31431 - DNA, 24 bp, Artificial Sequence
  Synthetic
tctaactctattatggtgagttct

SEQ ID NO: 31432 - DNA, 21 bp, Artificial Sequence
  Synthetic
ccaccaacatgtattccaaat

SEQ ID NO: 31433 - DNA, 23 bp, Artificial Sequence
  Synthetic
agattcagctaatttcacttcaa

SEQ ID NO: 31434 - DNA, 20 bp, Artificial Sequence
  Synthetic
ccttgctcattgatgaagtg

SEQ ID NO: 31435 - DNA, 18 bp, Artificial Sequence
  Synthetic
tccctctccttcatgact

SEQ ID NO: 31436 - DNA, 21 bp, Artificial Sequence
  Synthetic
acaagatgcattaagtaaggc

SEQ ID NO: 31437 - DNA, 18 bp, Artificial Sequence
  Synthetic
ttgaaacctggcctatgg

SEQ ID NO: 31438 - DNA, 20 bp, Artificial Sequence
  Synthetic
tgctaataaagtcctgcaga

SEQ ID NO: 31439 - DNA, 20 bp, Artificial Sequence
  Synthetic
atttctttccgggatcatct

SEQ ID NO: 31440 - DNA, 20 bp, Artificial Sequence
  Synthetic
atgatgacatcctgtgcttc

SEQ ID NO: 31441 - DNA, 18 bp, Artificial Sequence
  Synthetic
ttgggtcaaatgcaacac

SEQ ID NO: 31442 - DNA, 21 bp, Artificial Sequence
  Synthetic
ccttacatatatccacagcct

SEQ ID NO: 31443 - DNA, 19 bp, Artificial Sequence
  Synthetic
cgattgattgctcgtcttt

SEQ ID NO: 31444 - DNA, 19 bp, Artificial Sequence
  Synthetic
aatgacatctctgtgctgg

SEQ ID NO: 31445 - DNA, 24 bp, Artificial Sequence
  Synthetic
cattttcccaatttctaatgatcc

SEQ ID NO: 31446 - DNA, 20 bp, Artificial Sequence
  Synthetic
ttgccttgttgtagttgaac

SEQ ID NO: 31447 - DNA, 20 bp, Artificial Sequence
  Synthetic
aaatgcaactcaacatcctt

SEQ ID NO: 31448 - DNA, 23 bp, Artificial Sequence
  Synthetic
tcgttttagtagtgaaacagttt

SEQ ID NO: 31449 - DNA, 19 bp, Artificial Sequence
  Synthetic
ccgcttacatttgctgttt

SEQ ID NO: 31450 - DNA, 17 bp, Artificial Sequence
  Synthetic
cgtcgtccgaccgaaga

SEQ ID NO: 31451 - DNA, 21 bp, Artificial Sequence
  Synthetic
aattggcttttgtttggattc

SEQ ID NO: 31452 - DNA, 20 bp, Artificial Sequence
  Synthetic
cttcacctggaactactgta

SEQ ID NO: 31453 - DNA, 19 bp, Artificial Sequence
  Synthetic
ctaaaagaatccgcttggg

SEQ ID NO: 31454 - DNA, 18 bp, Artificial Sequence
  Synthetic
ccacaggtttagcaggag

SEQ ID NO: 31455 - DNA, 25 bp, Artificial Sequence
  Synthetic
ccttttctggattataaacagactt

SEQ ID NO: 31456 - DNA, 19 bp, Artificial Sequence
  Synthetic
cctgttgctggtaaacaac

SEQ ID NO: 31457 - DNA, 20 bp, Artificial Sequence
  Synthetic
gatccaatggaaaggacccg

SEQ ID NO: 31458 - DNA, 18 bp, Artificial Sequence
  Synthetic
aggggtagccaggctgac

SEQ ID NO: 31459 - DNA, 16 bp, Artificial Sequence
  Synthetic
gcgcctgcgaggagat

SEQ ID NO: 31460 - DNA, 19 bp, Artificial Sequence
  Synthetic
cctctacccctgcaaacag

SEQ ID NO: 31461 - DNA, 20 bp, Artificial Sequence
  Synthetic
ggcactacactacactccct

SEQ ID NO: 31462 - DNA, 19 bp, Artificial Sequence
  Synthetic
gtttccggaagcagtcagt

SEQ ID NO: 31463 - DNA, 19 bp, Artificial Sequence
  Synthetic
gcatattcgagcatccgcc

SEQ ID NO: 31464 - DNA, 20 bp, Artificial Sequence
  Synthetic
ccacatgcctagagctgtgt

SEQ ID NO: 31465 - DNA, 17 bp, Artificial Sequence
  Synthetic
cctccgtgacgcatgtc

SEQ ID NO: 31466 - DNA, 20 bp, Artificial Sequence
  Synthetic
accaggtagaggtcgctaga

SEQ ID NO: 31467 - DNA, 16 bp, Artificial Sequence
  Synthetic
ggtctgaggcaccgca

SEQ ID NO: 31468 - DNA, 18 bp, Artificial Sequence
  Synthetic
gggggacagtgacagagc

SEQ ID NO: 31469 - DNA, 20 bp, Artificial Sequence
  Synthetic
aagttgggtccaagctgaag

SEQ ID NO: 31470 - DNA, 18 bp, Artificial Sequence
  Synthetic
caggtggtcttggcagac

SEQ ID NO: 31471 - DNA, 20 bp, Artificial Sequence
  Synthetic
ccacctacgattacccacgt

SEQ ID NO: 31472 - DNA, 18 bp, Artificial Sequence
  Synthetic
ataagcccgccaggtact

SEQ ID NO: 31473 - DNA, 15 bp, Artificial Sequence
  Synthetic
agtgcacccgccaca

SEQ ID NO: 31474 - DNA, 18 bp, Artificial Sequence
  Synthetic
acacacccagtcccacac

SEQ ID NO: 31475 - DNA, 18 bp, Artificial Sequence
  Synthetic
gtttgtagttgggggccg

SEQ ID NO: 31476 - DNA, 18 bp, Artificial Sequence
  Synthetic
cggtgatgtgtgaggggt

SEQ ID NO: 31477 - DNA, 18 bp, Artificial Sequence
  Synthetic
acatccagacacgacggg

SEQ ID NO: 31478 - DNA, 19 bp, Artificial Sequence
  Synthetic
gctcaagtctgggtctcca

SEQ ID NO: 31479 - DNA, 20 bp, Artificial Sequence
  Synthetic
ggggagtactggaaaccgta

SEQ ID NO: 31480 - DNA, 20 bp, Artificial Sequence
  Synthetic
ccgcataccagcatgtcaaa

SEQ ID NO: 31481 - DNA, 19 bp, Artificial Sequence
  Synthetic
ccatattgtgggggcgtac

SEQ ID NO: 31482 - DNA, 19 bp, Artificial Sequence
  Synthetic
cgcatatcgctgctttccc

SEQ ID NO: 31483 - DNA, 22 bp, Artificial Sequence
  Synthetic
ctgatactttccatcacaacat

SEQ ID NO: 31484 - DNA, 20 bp, Artificial Sequence
  Synthetic
cgagtctttttcctgcaatt

SEQ ID NO: 31485 - DNA, 22 bp, Artificial Sequence
  Synthetic
ctcaattttacattggcatcaa

SEQ ID NO: 31486 - DNA, 21 bp, Artificial Sequence
  Synthetic
cagaaattggcaaactcatct

SEQ ID NO: 31487 - DNA, 20 bp, Artificial Sequence
  Synthetic
gcccatcttgtgaatctcaa

SEQ ID NO: 31488 - DNA, 20 bp, Artificial Sequence
  Synthetic
ggtcaattgatccaaaggtt

SEQ ID NO: 31489 - DNA, 20 bp, Artificial Sequence
  Synthetic
tggaacacaacattgacaat

SEQ ID NO: 31490 - DNA, 18 bp, Artificial Sequence
  Synthetic
ttggagtctcccatggtg

SEQ ID NO: 31491 - DNA, 20 bp, Artificial Sequence
  Synthetic
gaaaactgacaccaaagagg

SEQ ID NO: 31492 - DNA, 19 bp, Artificial Sequence
  Synthetic
cactgcgtcatttttgaga

SEQ ID NO: 31493 - DNA, 22 bp, Artificial Sequence
  Synthetic
acatttccacattttgtcatca

SEQ ID NO: 31494 - DNA, 18 bp, Artificial Sequence
  Synthetic
agttctgcactggtctca

SEQ ID NO: 31495 - DNA, 19 bp, Artificial Sequence
  Synthetic
cgctgatgtggatatctcg

SEQ ID NO: 31496 - DNA, 19 bp, Artificial Sequence
  Synthetic
accactagttgcagtacaa

SEQ ID NO: 31497 - DNA, 25 bp, Artificial Sequence
  Synthetic
tggtatattagataaggtaccttct

SEQ ID NO: 31498 - DNA, 18 bp, Artificial Sequence
  Synthetic
atttcagggtcaaaggcg

SEQ ID NO: 31499 - DNA, 24 bp, Artificial Sequence
  Synthetic
ccaacatcatctacaaatatacgt

SEQ ID NO: 31500 - DNA, 23 bp, Artificial Sequence
  Synthetic
ctaatctttctgtttctgggtta

SEQ ID NO: 31501 - DNA, 22 bp, Artificial Sequence
  Synthetic
tgtggtgttaaaaagaactctg

SEQ ID NO: 31502 - DNA, 23 bp, Artificial Sequence
  Synthetic
gccaaactgttaatatacctgta

SEQ ID NO: 31503 - DNA, 21 bp, Artificial Sequence
  Synthetic
cagatgttatcgagatgttgt

SEQ ID NO: 31504 - DNA, 18 bp, Artificial Sequence
  Synthetic
acttcagtggttacagcc

SEQ ID NO: 31505 - DNA, 21 bp, Artificial Sequence
  Synthetic
tcctttcgatattcttccctc

SEQ ID NO: 31506 - DNA, 18 bp, Artificial Sequence
  Synthetic
aaacaacgcatgtgctgt

SEQ ID NO: 31507 - DNA, 19 bp, Artificial Sequence
  Synthetic
tactgtactgactgcaacc

SEQ ID NO: 31508 - DNA, 18 bp, Artificial Sequence
  Synthetic
aatcccatttctctggcc

SEQ ID NO: 31509 - DNA, 18 bp, Artificial Sequence
  Synthetic
acttgaccctctaccaca

SEQ ID NO: 31510 - DNA, 25 bp, Artificial Sequence
  Synthetic
actaatagtggatgatgaaagtgta

SEQ ID NO: 31511 - DNA, 21 bp, Artificial Sequence
  Synthetic
ggaaaatagggatgtccaact

SEQ ID NO: 31512 - DNA, 21 bp, Artificial Sequence
  Synthetic
cactagcattttctgtgtcat

SEQ ID NO: 31513 - DNA, 24 bp, Artificial Sequence
  Synthetic
gcaaatagatgtacaaatatccag

SEQ ID NO: 31514 - DNA, 21 bp, Artificial Sequence
  Synthetic
caacaaatgccattattgtgg

SEQ ID NO: 31515 - DNA, 18 bp, Artificial Sequence
  Synthetic
aggtagatgaggtggtgg

SEQ ID NO: 31516 - DNA, 20 bp, Artificial Sequence
  Synthetic
gtgattcagtagttgcacat

SEQ ID NO: 31517 - DNA, 25 bp, Artificial Sequence
  Synthetic
tcccatctctatatactatgcataa

SEQ ID NO: 31518 - DNA, 20 bp, Artificial Sequence
  Synthetic
gattacagctgggtttctct

SEQ ID NO: 31519 - DNA, 18 bp, Artificial Sequence
  Synthetic
aatgtctacgtgtgtgct

SEQ ID NO: 31520 - DNA, 18 bp, Artificial Sequence
  Synthetic
tgtttcagcagcgcattt

SEQ ID NO: 31521 - DNA, 19 bp, Artificial Sequence
  Synthetic
tgtgtgtcttctcggattt

SEQ ID NO: 31522 - DNA, 19 bp, Artificial Sequence
  Synthetic
agtcgttgacatctttgca

SEQ ID NO: 31523 - DNA, 18 bp, Artificial Sequence
  Synthetic
aaagtcatccatggctgc

SEQ ID NO: 31524 - DNA, 19 bp, Artificial Sequence
  Synthetic
agaaacatgggtcttgaca

SEQ ID NO: 31525 - DNA, 23 bp, Artificial Sequence
  Synthetic
tgttgaatacagattttgctagt

SEQ ID NO: 31526 - DNA, 18 bp, Artificial Sequence
  Synthetic
ttcagcttgcctctttca

SEQ ID NO: 31527 - DNA, 18 bp, Artificial Sequence
  Synthetic
tttggtgttgtccccagt

SEQ ID NO: 31528 - DNA, 24 bp, Artificial Sequence
  Synthetic
gtagaggtcttattttctcgattt

SEQ ID NO: 31529 - DNA, 20 bp, Artificial Sequence
  Synthetic
atcccaactaatttgcaggt

SEQ ID NO: 31530 - DNA, 21 bp, Artificial Sequence
  Synthetic
cctcgtttgaatttgcgtatc

SEQ ID NO: 31531 - DNA, 19 bp, Artificial Sequence
  Synthetic
atcaccacagcattgttga

SEQ ID NO: 31532 - DNA, 19 bp, Artificial Sequence
  Synthetic
attgcaaggaacaaccaaa

SEQ ID NO: 31533 - DNA, 22 bp, Artificial Sequence
  Synthetic
actttatgaactctttctccag

SEQ ID NO: 31534 - DNA, 18 bp, Artificial Sequence
  Synthetic
gacaggtcagaaacgcag

SEQ ID NO: 31535 - DNA, 20 bp, Artificial Sequence
  Synthetic
tgctgcgtatcgtctaatag

SEQ ID NO: 31536 - DNA, 23 bp, Artificial Sequence
  Synthetic
gtcattttgtgtaaatagttgct

SEQ ID NO: 31537 - DNA, 18 bp, Artificial Sequence
  Synthetic
acactgctatgacccagt

SEQ ID NO: 31538 - DNA, 22 bp, Artificial Sequence
  Synthetic
tcatatagagttagaagctgct

SEQ ID NO: 31539 - DNA, 23 bp, Artificial Sequence
  Synthetic
ccctttttgaatgtatgatctgg

SEQ ID NO: 31540 - DNA, 16 bp, Artificial Sequence
  Synthetic
accggcagaggctctg

SEQ ID NO: 31541 - DNA, 20 bp, Artificial Sequence
  Synthetic
gcaactgttgtttgttcaat

SEQ ID NO: 31542 - DNA, 18 bp, Artificial Sequence
  Synthetic
cccggcgtatctacatct

SEQ ID NO: 31543 - DNA, 21 bp, Artificial Sequence
  Synthetic
ttcaaatgcaggattctcaaa

SEQ ID NO: 31544 - DNA, 22 bp, Artificial Sequence
  Synthetic
aatgttctgcttcaataggatc

SEQ ID NO: 31545 - DNA, 21 bp, Artificial Sequence
  Synthetic
cacataatcatcgctgcttag

SEQ ID NO: 31546 - DNA, 21 bp, Artificial Sequence
  Synthetic
ctaccgatttctatgcctcta

SEQ ID NO: 31547 - DNA, 22 bp, Artificial Sequence
  Synthetic
cctatgtcaaacatatcaccat

SEQ ID NO: 31548 - DNA, 21 bp, Artificial Sequence
  Synthetic
gccaaagtcaagaattcacaa

SEQ ID NO: 31549 - DNA, 18 bp, Artificial Sequence
  Synthetic
acaagttggaacagtggt

SEQ ID NO: 31550 - DNA, 25 bp, Artificial Sequence
  Synthetic
tctctattgttatgctattctggat

SEQ ID NO: 31551 - DNA, 18 bp, Artificial Sequence
  Synthetic
atccatcattgccctctg

SEQ ID NO: 31552 - DNA, 20 bp, Artificial Sequence
  Synthetic
gactcttgtgagctgggttt

SEQ ID NO: 31553 - DNA, 18 bp, Artificial Sequence
  Synthetic
tttcctccactcctggtc

SEQ ID NO: 31554 - DNA, 19 bp, Artificial Sequence
  Synthetic
cctataagggcttctgtcc

SEQ ID NO: 31555 - DNA, 18 bp, Artificial Sequence
  Synthetic
attttgtacgaggccagc

SEQ ID NO: 31556 - DNA, 18 bp, Artificial Sequence
  Synthetic
gaaaaccccactgcagat

SEQ ID NO: 31557 - DNA, 18 bp, Artificial Sequence
  Synthetic
ctcccgctataccctgac

SEQ ID NO: 31558 - DNA, 21 bp, Artificial Sequence
  Synthetic
ctggtttcttttcaatgtcca

SEQ ID NO: 31559 - DNA, 19 bp, Artificial Sequence
  Synthetic
tccatttggtgttgtctcc

SEQ ID NO: 31560 - DNA, 20 bp, Artificial Sequence
  Synthetic
tctcgttgattcgttgaagt

SEQ ID NO: 31561 - DNA, 22 bp, Artificial Sequence
  Synthetic
aagtcctatagaacctatccac

SEQ ID NO: 31562 - DNA, 20 bp, Artificial Sequence
  Synthetic
tggatttgtgtatcccccct

SEQ ID NO: 31563 - DNA, 22 bp, Artificial Sequence
  Synthetic
gtcttgcaatatacacaggtta

SEQ ID NO: 31564 - DNA, 21 bp, Artificial Sequence
  Synthetic
tgtctaagtttttctgctgga

SEQ ID NO: 31565 - DNA, 22 bp, Artificial Sequence
  Synthetic
ggctggtaaatgttgatgatta

SEQ ID NO: 31566 - DNA, 23 bp, Artificial Sequence
  Synthetic
aaagatatttcttgtaaccgtgg

SEQ ID NO: 31567 - DNA, 23 bp, Artificial Sequence
  Synthetic
gtcttttaattgtgctatggtac

SEQ ID NO: 31568 - DNA, 23 bp, Artificial Sequence
  Synthetic
gggggttccttttaaaaatgatt

SEQ ID NO: 31569 - DNA, 18 bp, Artificial Sequence
  Synthetic
cttgtagggccatttgca

SEQ ID NO: 31570 - DNA, 23 bp, Artificial Sequence
  Synthetic
cccatatttttcacattcacttt

SEQ ID NO: 31571 - DNA, 18 bp, Artificial Sequence
  Synthetic
acaatgctgcttctccgc

SEQ ID NO: 31572 - DNA, 22 bp, Artificial Sequence
  Synthetic
actatctggaattgcaacagta

SEQ ID NO: 31573 - DNA, 23 bp, Artificial Sequence
  Synthetic
actgtaaagacaatatagcatgt

SEQ ID NO: 31574 - DNA, 18 bp, Artificial Sequence
  Synthetic
acatagttgcccgttgac

SEQ ID NO: 31575 - DNA, 23 bp, Artificial Sequence
  Synthetic
cgttacattactataggaagagg

SEQ ID NO: 31576 - DNA, 24 bp, Artificial Sequence
  Synthetic
atatccagtatctaccatatcacc

SEQ ID NO: 31577 - DNA, 19 bp, Artificial Sequence
  Synthetic
ggagaatacacacagctgc

SEQ ID NO: 31578 - DNA, 23 bp, Artificial Sequence
  Synthetic
cacaactgaaaaataaactgcaa

SEQ ID NO: 31579 - DNA, 19 bp, Artificial Sequence
  Synthetic
gcgtactgtattgtgcaga

SEQ ID NO: 31580 - DNA, 20 bp, Artificial Sequence
  Synthetic
ccatcttgccttttctgagt

SEQ ID NO: 31581 - DNA, 22 bp, Artificial Sequence
  Synthetic
ggctggtttctatttaaagtcc

SEQ ID NO: 31582 - DNA, 20 bp, Artificial Sequence
  Synthetic
gttatctccagtgatggtca

SEQ ID NO: 31583 - DNA, 20 bp, Artificial Sequence
  Synthetic
tcgataaaacctgtcgactc

SEQ ID NO: 31584 - DNA, 18 bp, Artificial Sequence
  Synthetic
gaagggccatttgagctg

SEQ ID NO: 31585 - DNA, 20 bp, Artificial Sequence
  Synthetic
cagattcgaaatcaatccgt

SEQ ID NO: 31586 - DNA, 16 bp, Artificial Sequence
  Synthetic
acgacccgctccagga

SEQ ID NO: 31587 - DNA, 16 bp, Artificial Sequence
  Synthetic
aatgccacccggggtc

SEQ ID NO: 31588 - DNA, 18 bp, Artificial Sequence
  Synthetic
aggagtcccgcacagaaa

SEQ ID NO: 31589 - DNA, 20 bp, Artificial Sequence
  Synthetic
cgtcccattaccacggtagt

SEQ ID NO: 31590 - DNA, 20 bp, Artificial Sequence
  Synthetic
ccgcatagaaggtgcaaaga

SEQ ID NO: 31591 - DNA, 19 bp, Artificial Sequence
  Synthetic
ttccggtgatgcaagcatt

SEQ ID NO: 31592 - DNA, 19 bp, Artificial Sequence
  Synthetic
gcctcagccaacttcatca

SEQ ID NO: 31593 - DNA, 17 bp, Artificial Sequence
  Synthetic
cgacccaactggcgaca

SEQ ID NO: 31594 - DNA, 16 bp, Artificial Sequence
  Synthetic
ggaatgccgctctcgc

SEQ ID NO: 31595 - DNA, 20 bp, Artificial Sequence
  Synthetic
ccacaacatccagaaagcca

SEQ ID NO: 31596 - DNA, 18 bp, Artificial Sequence
  Synthetic
acttcgtctcccctacgg

SEQ ID NO: 31597 - DNA, 18 bp, Artificial Sequence
  Synthetic
ttcccgagagtgccatgg

SEQ ID NO: 31598 - DNA, 20 bp, Artificial Sequence
  Synthetic
gggagatacagaggagcctc

SEQ ID NO: 31599 - DNA, 17 bp, Artificial Sequence
  Synthetic
catgtgcggccattggg

SEQ ID NO: 31600 - DNA, 18 bp, Artificial Sequence
  Synthetic
gtctgtggcacaaacgca

SEQ ID NO: 31601 - DNA, 20 bp, Artificial Sequence
  Synthetic
cggtcaagtcaggttcaagg

SEQ ID NO: 31602 - DNA, 17 bp, Artificial Sequence
  Synthetic
atagcgaggcccaccaa

SEQ ID NO: 31603 - DNA, 18 bp, Artificial Sequence
  Synthetic
gcccacctcacaggcttt

SEQ ID NO: 31604 - DNA, 18 bp, Artificial Sequence
  Synthetic
gcatggtgcctcccacac

SEQ ID NO: 31605 - DNA, 18 bp, Artificial Sequence
  Synthetic
gcatcaccgaacttcgcg

SEQ ID NO: 31606 - DNA, 20 bp, Artificial Sequence
  Synthetic
cgtgcagctcaccatcatag

SEQ ID NO: 31607 - DNA, 17 bp, Artificial Sequence
  Synthetic
gggcctcccaagagaca

SEQ ID NO: 31608 - DNA, 19 bp, Artificial Sequence
  Synthetic
gccttgaaacgcctcttca

SEQ ID NO: 31609 - DNA, 20 bp, Artificial Sequence
  Synthetic
ggtgattgggggaggtatga

SEQ ID NO: 31610 - DNA, 20 bp, Artificial Sequence
  Synthetic
ccctcgacatagtacctgca

SEQ ID NO: 31611 - DNA, 20 bp, Artificial Sequence
  Synthetic
caattgggtccgtgtactcg

SEQ ID NO: 31612 - DNA, 20 bp, Artificial Sequence
  Synthetic
ggcccatgtaatgagaccaa

SEQ ID NO: 31613 - DNA, 18 bp, Artificial Sequence
  Synthetic
tcataagttgcagtggcg

SEQ ID NO: 31614 - DNA, 18 bp, Artificial Sequence
  Synthetic
caactggtagcacttcgg

SEQ ID NO: 31615 - DNA, 23 bp, Artificial Sequence
  Synthetic
tttggactaagatactttcgttt

SEQ ID NO: 31616 - DNA, 19 bp, Artificial Sequence
  Synthetic
aattgccgtgtcaattcat

SEQ ID NO: 31617 - DNA, 22 bp, Artificial Sequence
  Synthetic
tgcacatttaacattgaggtaa

SEQ ID NO: 31618 - DNA, 22 bp, Artificial Sequence
  Synthetic
accatatatgcacattctctca

SEQ ID NO: 31619 - DNA, 21 bp, Artificial Sequence
  Synthetic
catgtatatccaacaagggtc

SEQ ID NO: 31620 - DNA, 18 bp, Artificial Sequence
  Synthetic
tagctgatcttgcagagc

SEQ ID NO: 31621 - DNA, 18 bp, Artificial Sequence
  Synthetic
ggcctccgtccgtacctt

SEQ ID NO: 31622 - DNA, 16 bp, Artificial Sequence
  Synthetic
gcccgctgtgaccgtt

SEQ ID NO: 31623 - DNA, 24 bp, Artificial Sequence
  Synthetic
tagtactaaatgacctaaacagtc

SEQ ID NO: 31624 - DNA, 18 bp, Artificial Sequence
  Synthetic
cttgaccgtttttgcacg

SEQ ID NO: 31625 - DNA, 18 bp, Artificial Sequence
  Synthetic
actgtgtgcgtgaaaccc

SEQ ID NO: 31626 - DNA, 18 bp, Artificial Sequence
  Synthetic
aatagtggctcgagtccc

SEQ ID NO: 31627 - DNA, 20 bp, Artificial Sequence
  Synthetic
tctcgaatgcaaatcacaaa

SEQ ID NO: 31628 - DNA, 18 bp, Artificial Sequence
  Synthetic
aggacaaaggccagtttg

SEQ ID NO: 31629 - DNA, 18 bp, Artificial Sequence
  Synthetic
tgattagcccacaggatg

SEQ ID NO: 31630 - DNA, 24 bp, Artificial Sequence
  Synthetic
ggaagacttatacttagtcagagt

SEQ ID NO: 31631 - DNA, 25 bp, Artificial Sequence
  Synthetic
ctctatggtagtattattcaaatgc

SEQ ID NO: 31632 - DNA, 22 bp, Artificial Sequence
  Synthetic
atcatgtattgtgccatttgag

SEQ ID NO: 31633 - DNA, 25 bp, Artificial Sequence
  Synthetic
attactactgtacaagttccattga

SEQ ID NO: 31634 - DNA, 22 bp, Artificial Sequence
  Synthetic
agaatcaacactataatctgcc

SEQ ID NO: 31635 - DNA, 24 bp, Artificial Sequence
  Synthetic
agagaatataccagaatacccaga

SEQ ID NO: 31636 - DNA, 20 bp, Artificial Sequence
  Synthetic
tttctggagatggatttcgg

SEQ ID NO: 31637 - DNA, 21 bp, Artificial Sequence
  Synthetic
ggcattccttttcttttggta

SEQ ID NO: 31638 - DNA, 22 bp, Artificial Sequence
  Synthetic
attgctttaataatcgaggtca

SEQ ID NO: 31639 - DNA, 20 bp, Artificial Sequence
  Synthetic
gctttgcagaacatgtcttt

SEQ ID NO: 31640 - DNA, 19 bp, Artificial Sequence
  Synthetic
ggactcgttgcttaagaga

SEQ ID NO: 31641 - DNA, 25 bp, Artificial Sequence
  Synthetic
cagttataaaccattcattaccaga

SEQ ID NO: 31642 - DNA, 18 bp, Artificial Sequence
  Synthetic
acttaaatctgcgtccgg

SEQ ID NO: 31643 - DNA, 20 bp, Artificial Sequence
  Synthetic
acaaattttgcctgactgtt

SEQ ID NO: 31644 - DNA, 21 bp, Artificial Sequence
  Synthetic
gtgattaacattggtggcaat

SEQ ID NO: 31645 - DNA, 23 bp, Artificial Sequence
  Synthetic
gcatctattgttttaggatcaga

SEQ ID NO: 31646 - DNA, 20 bp, Artificial Sequence
  Synthetic
gttctccttgttgtgctcgt

SEQ ID NO: 31647 - DNA, 25 bp, Artificial Sequence
  Synthetic
ccagttatactttcaaatagaggat

SEQ ID NO: 31648 - DNA, 18 bp, Artificial Sequence
  Synthetic
cgggaaacatcacctagt

SEQ ID NO: 31649 - DNA, 19 bp, Artificial Sequence
  Synthetic
acatattcgtccgtgttgt

SEQ ID NO: 31650 - DNA, 20 bp, Artificial Sequence
  Synthetic
cctcgatccatttgaaatcc

SEQ ID NO: 31651 - DNA, 18 bp, Artificial Sequence
  Synthetic
aattcagcggtatcccag

SEQ ID NO: 31652 - DNA, 19 bp, Artificial Sequence
  Synthetic
acacctgctctggttaaat

SEQ ID NO: 31653 - DNA, 20 bp, Artificial Sequence
  Synthetic
ctggtaacgtatcaccttct

SEQ ID NO: 31654 - DNA, 22 bp, Artificial Sequence
  Synthetic
atgttacatttttctccttcgt

SEQ ID NO: 31655 - DNA, 21 bp, Artificial Sequence
  Synthetic
tttctgtatttgtcgtccact

SEQ ID NO: 31656 - DNA, 25 bp, Artificial Sequence
  Synthetic
gttgatttctgtttaatgtccaatc

SEQ ID NO: 31657 - DNA, 20 bp, Artificial Sequence
  Synthetic
tcatcgtgttcaatgtcaaa

SEQ ID NO: 31658 - DNA, 18 bp, Artificial Sequence
  Synthetic
tgttgtccccagtgattg

SEQ ID NO: 31659 - DNA, 23 bp, Artificial Sequence
  Synthetic
tctcaattttcttccttgttgat

SEQ ID NO: 31660 - DNA, 20 bp, Artificial Sequence
  Synthetic
tttgctcatgttgattccca

SEQ ID NO: 31661 - DNA, 20 bp, Artificial Sequence
  Synthetic
ctcgtctgaatttgtgtgtc

SEQ ID NO: 31662 - DNA, 21 bp, Artificial Sequence
  Synthetic
ttctttatggctgacaaaggg

SEQ ID NO: 31663 - DNA, 20 bp, Artificial Sequence
  Synthetic
ttaatccgtccagactcgaa

SEQ ID NO: 31664 - DNA, 20 bp, Artificial Sequence
  Synthetic
ctagctaagtcaggcaaagt

SEQ ID NO: 31665 - DNA, 18 bp, Artificial Sequence
  Synthetic
aaacacacggatagctgc

SEQ ID NO: 31666 - DNA, 20 bp, Artificial Sequence
  Synthetic
atcatcctgtacctgaacaa

SEQ ID NO: 31667 - DNA, 19 bp, Artificial Sequence
  Synthetic
gatctttcctgttggctct

SEQ ID NO: 31668 - DNA, 21 bp, Artificial Sequence
  Synthetic
cgaagcattatagagagtcca

SEQ ID NO: 31669 - DNA, 19 bp, Artificial Sequence
  Synthetic
tcttgcgataggtagttcc

SEQ ID NO: 31670 - DNA, 18 bp, Artificial Sequence
  Synthetic
gcaattggttgtgcatct

SEQ ID NO: 31671 - DNA, 19 bp, Artificial Sequence
  Synthetic
acagatctcttgccctaga

SEQ ID NO: 31672 - DNA, 20 bp, Artificial Sequence
  Synthetic
tgttaaagctgctctggtac

SEQ ID NO: 31673 - DNA, 24 bp, Artificial Sequence
  Synthetic
gtattgatttgctgatactttagg

SEQ ID NO: 31674 - DNA, 21 bp, Artificial Sequence
  Synthetic
cagcctacaatcaataactgt

SEQ ID NO: 31675 - DNA, 23 bp, Artificial Sequence
  Synthetic
ccccatagacatctttagtcatt

SEQ ID NO: 31676 - DNA, 22 bp, Artificial Sequence
  Synthetic
gtaaaactttaacttcacccca

SEQ ID NO: 31677 - DNA, 19 bp, Artificial Sequence
  Synthetic
gtactttgggactgctcag

SEQ ID NO: 31678 - DNA, 20 bp, Artificial Sequence
  Synthetic
cgggtaagatgatctggtgg

SEQ ID NO: 31679 - DNA, 19 bp, Artificial Sequence
  Synthetic
attctctgatcgcctaagc

SEQ ID NO: 31680 - DNA, 25 bp, Artificial Sequence
  Synthetic
taataatatctagctctcctgtgtt

SEQ ID NO: 31681 - DNA, 22 bp, Artificial Sequence
  Synthetic
agtggtttctggtaatacagta

SEQ ID NO: 31682 - DNA, 18 bp, Artificial Sequence
  Synthetic
ttgtcaaaggcgggattt

SEQ ID NO: 31683 - DNA, 21 bp, Artificial Sequence
  Synthetic
accatcacctacatcatcaat

SEQ ID NO: 31684 - DNA, 25 bp, Artificial Sequence
  Synthetic
gaaagaataatgatgtttcttggac

SEQ ID NO: 31685 - DNA, 20 bp, Artificial Sequence
  Synthetic
agttgcaaagattcacagtg

SEQ ID NO: 31686 - DNA, 18 bp, Artificial Sequence
  Synthetic
caaatccaaccgctatcg

SEQ ID NO: 31687 - DNA, 21 bp, Artificial Sequence
  Synthetic
tcatacaacttctacaacacg

SEQ ID NO: 31688 - DNA, 22 bp, Artificial Sequence
  Synthetic
accttgtacaaataaaggacag

SEQ ID NO: 31689 - DNA, 18 bp, Artificial Sequence
  Synthetic
aagctgcacaatagcgtc

SEQ ID NO: 31690 - DNA, 21 bp, Artificial Sequence
  Synthetic
cccattgaaccatttctgaaa

SEQ ID NO: 31691 - DNA, 25 bp, Artificial Sequence
  Synthetic
ggtgctttatgttttgaatctatag

SEQ ID NO: 31692 - DNA, 25 bp, Artificial Sequence
  Synthetic
gatgaaagcctattcttttaattcc

SEQ ID NO: 31693 - DNA, 18 bp, Artificial Sequence
  Synthetic
ctttcgtcgtacctcctc

SEQ ID NO: 31694 - DNA, 23 bp, Artificial Sequence
  Synthetic
acaaatgttttacagaatccctt

SEQ ID NO: 31695 - DNA, 24 bp, Artificial Sequence
  Synthetic
tttctgttataatggctatttccc

SEQ ID NO: 31696 - DNA, 19 bp, Artificial Sequence
  Synthetic
cacgtcctgttgaaattgt

SEQ ID NO: 31697 - DNA, 22 bp, Artificial Sequence
  Synthetic
atcactagcagattctaagtct

SEQ ID NO: 31698 - DNA, 21 bp, Artificial Sequence
  Synthetic
ggttttcagtgtcccctaatt

SEQ ID NO: 31699 - DNA, 18 bp, Artificial Sequence
  Synthetic
aaaaggtcctggaatggc

SEQ ID NO: 31700 - DNA, 21 bp, Artificial Sequence
  Synthetic
aggatcgactttttctgaagt

SEQ ID NO: 31701 - DNA, 20 bp, Artificial Sequence
  Synthetic
tgtgtatgtccgatcctttc

SEQ ID NO: 31702 - DNA, 18 bp, Artificial Sequence
  Synthetic
tttgctgctgattctgca

SEQ ID NO: 31703 - DNA, 16 bp, Artificial Sequence
  Synthetic
gccgggtcgccatgtt

SEQ ID NO: 31704 - DNA, 18 bp, Artificial Sequence
  Synthetic
gaggtatcggttcgccac

SEQ ID NO: 31705 - DNA, 17 bp, Artificial Sequence
  Synthetic
tggggagaaagacggcg

SEQ ID NO: 31706 - DNA, 18 bp, Artificial Sequence
  Synthetic
tctacggagctggccatg

SEQ ID NO: 31707 - DNA, 16 bp, Artificial Sequence
  Synthetic
acgcacgggtgtttgc

SEQ ID NO: 31708 - DNA, 17 bp, Artificial Sequence
  Synthetic
cgacggctgacacacca

SEQ ID NO: 31709 - DNA, 17 bp, Artificial Sequence
  Synthetic
acatcaccaaccccgcc

SEQ ID NO: 31710 - DNA, 20 bp, Artificial Sequence
  Synthetic
gtggatgattaacgccctgt

SEQ ID NO: 31711 - DNA, 16 bp, Artificial Sequence
  Synthetic
aatggggacgtgcggc

SEQ ID NO: 31712 - DNA, 16 bp, Artificial Sequence
  Synthetic
gtcggggtggcacaga

SEQ ID NO: 31713 - DNA, 19 bp, Artificial Sequence
  Synthetic
gacttctgctctcggagga

SEQ ID NO: 31714 - DNA, 17 bp, Artificial Sequence
  Synthetic
gggagctgttgtgcctg

SEQ ID NO: 31715 - DNA, 16 bp, Artificial Sequence
  Synthetic
tggaagcgcgccttgg

SEQ ID NO: 31716 - DNA, 16 bp, Artificial Sequence
  Synthetic
atcgagcggcagcagc

SEQ ID NO: 31717 - DNA, 16 bp, Artificial Sequence
  Synthetic
ccgtgcacctgacgca

SEQ ID NO: 31718 - DNA, 20 bp, Artificial Sequence
  Synthetic
ccctgatcattacccccgtc

SEQ ID NO: 31719 - DNA, 18 bp, Artificial Sequence
  Synthetic
cagggctacgtgctcgac

SEQ ID NO: 31720 - DNA, 19 bp, Artificial Sequence
  Synthetic
cagtcttccgctgacaacc

SEQ ID NO: 31721 - DNA, 16 bp, Artificial Sequence
  Synthetic
gcgccacctccgcaat

SEQ ID NO: 31722 - DNA, 16 bp, Artificial Sequence
  Synthetic
taaccgcacccccctc

SEQ ID NO: 31723 - DNA, 20 bp, Artificial Sequence
  Synthetic
gcgcgacctgtgttaaaatt

SEQ ID NO: 31724 - DNA, 16 bp, Artificial Sequence
  Synthetic
cgagacgcacctccga

SEQ ID NO: 31725 - DNA, 20 bp, Artificial Sequence
  Synthetic
gaacaccttctttgccctct

SEQ ID NO: 31726 - DNA, 16 bp, Artificial Sequence
  Synthetic
gtgtggcgcgtcgttc

SEQ ID NO: 31727 - DNA, 18 bp, Artificial Sequence
  Synthetic
cctccgttggcgaatacg

SEQ ID NO: 31728 - DNA, 19 bp, Artificial Sequence
  Synthetic
cgtacaaatcgggggccat

SEQ ID NO: 31729 - DNA, 16 bp, Artificial Sequence
  Synthetic
tgggcgctcacgagac

SEQ ID NO: 31730 - DNA, 19 bp, Artificial Sequence
  Synthetic
aacgctctactgcagatgc

SEQ ID NO: 31731 - DNA, 16 bp, Artificial Sequence
  Synthetic
agggccaagcgacgga

SEQ ID NO: 31732 - DNA, 16 bp, Artificial Sequence
  Synthetic
acctcaacggggcctc

SEQ ID NO: 31733 - DNA, 17 bp, Artificial Sequence
  Synthetic
tcagtcccgtggccttg

SEQ ID NO: 31734 - DNA, 17 bp, Artificial Sequence
  Synthetic
acgaccgcaactacccg

SEQ ID NO: 31735 - DNA, 16 bp, Artificial Sequence
  Synthetic
gtatcggcgcgcatcg

SEQ ID NO: 31736 - DNA, 15 bp, Artificial Sequence
  Synthetic
tttcccgcgtgcgct

SEQ ID NO: 31737 - DNA, 18 bp, Artificial Sequence
  Synthetic
gatcgtctgccgttgtcg

SEQ ID NO: 31738 - DNA, 18 bp, Artificial Sequence
  Synthetic
cgcacacaaagtaggccc

SEQ ID NO: 31739 - DNA, 19 bp, Artificial Sequence
  Synthetic
cctccctgcgctttgatct

SEQ ID NO: 31740 - DNA, 16 bp, Artificial Sequence
  Synthetic
ctgtcgcgggcatacg

SEQ ID NO: 31741 - DNA, 16 bp, Artificial Sequence
  Synthetic
tgctggcgttcgtggc

SEQ ID NO: 31742 - DNA, 20 bp, Artificial Sequence
  Synthetic
tcgcatattaaggtgacgcg

SEQ ID NO: 31743 - DNA, 16 bp, Artificial Sequence
  Synthetic
tcccgccggatccaaa

SEQ ID NO: 31744 - DNA, 16 bp, Artificial Sequence
  Synthetic
tgcgctgggcctgtag

SEQ ID NO: 31745 - DNA, 16 bp, Artificial Sequence
  Synthetic
acggcgcactcgaagg

SEQ ID NO: 31746 - DNA, 19 bp, Artificial Sequence
  Synthetic
cccgctaaccaccaaggag

SEQ ID NO: 31747 - DNA, 16 bp, Artificial Sequence
  Synthetic
ggacaccggcgctact

SEQ ID NO: 31748 - DNA, 18 bp, Artificial Sequence
  Synthetic
cgatatgttgggccgcgt

SEQ ID NO: 31749 - DNA, 17 bp, Artificial Sequence
  Synthetic
accgagtacccgctctc

SEQ ID NO: 31750 - DNA, 18 bp, Artificial Sequence
  Synthetic
acgacccccaagttcacc

SEQ ID NO: 31751 - DNA, 18 bp, Artificial Sequence
  Synthetic
gcctaccagaagcccgac

SEQ ID NO: 31752 - DNA, 18 bp, Artificial Sequence
  Synthetic
gccgtgtaccaggacctg

SEQ ID NO: 31753 - DNA, 16 bp, Artificial Sequence
  Synthetic
acggatccgagaccgc

SEQ ID NO: 31754 - DNA, 16 bp, Artificial Sequence
  Synthetic
accgcgccctcctgta

SEQ ID NO: 31755 - DNA, 16 bp, Artificial Sequence
  Synthetic
accttgtcgggcgtcc

SEQ ID NO: 31756 - DNA, 18 bp, Artificial Sequence
  Synthetic
ccccaccctcgtacttct

SEQ ID NO: 31757 - DNA, 20 bp, Artificial Sequence
  Synthetic
cgtacaccgagttacacacg

SEQ ID NO: 31758 - DNA, 17 bp, Artificial Sequence
  Synthetic
tggcgatcagcagcagc

SEQ ID NO: 31759 - DNA, 18 bp, Artificial Sequence
  Synthetic
ggattcttggccaacccg

SEQ ID NO: 31760 - DNA, 16 bp, Artificial Sequence
  Synthetic
tgcgaagagtcccccg

SEQ ID NO: 31761 - DNA, 16 bp, Artificial Sequence
  Synthetic
cgtccgtccggcatct

SEQ ID NO: 31762 - DNA, 19 bp, Artificial Sequence
  Synthetic
catcctgttgcgggatctg

SEQ ID NO: 31763 - DNA, 18 bp, Artificial Sequence
  Synthetic
gtgtcttctcgcgcgtat

SEQ ID NO: 31764 - DNA, 18 bp, Artificial Sequence
  Synthetic
aacaggccgggtctctgg

SEQ ID NO: 31765 - DNA, 16 bp, Artificial Sequence
  Synthetic
aacgtcctcgccgacc

SEQ ID NO: 31766 - DNA, 16 bp, Artificial Sequence
  Synthetic
aagatggcgccggtcc

SEQ ID NO: 31767 - DNA, 16 bp, Artificial Sequence
  Synthetic
ccccagatcgcgacct

SEQ ID NO: 31768 - DNA, 18 bp, Artificial Sequence
  Synthetic
gacgcaagctcacaggag

SEQ ID NO: 31769 - DNA, 18 bp, Artificial Sequence
  Synthetic
ccaccagcgagtcaagga

SEQ ID NO: 31770 - DNA, 16 bp, Artificial Sequence
  Synthetic
acgcatcgggccagat

SEQ ID NO: 31771 - DNA, 20 bp, Artificial Sequence
  Synthetic
gaaacgcctgcctatctacc

SEQ ID NO: 31772 - DNA, 20 bp, Artificial Sequence
  Synthetic
ggtcaattgtatggagccgg

SEQ ID NO: 31773 - DNA, 17 bp, Artificial Sequence
  Synthetic
acacgctcaggagggag

SEQ ID NO: 31774 - DNA, 16 bp, Artificial Sequence
  Synthetic
cctcgcgggcagcaaa

SEQ ID NO: 31775 - DNA, 17 bp, Artificial Sequence
  Synthetic
acctccacacggaccac

SEQ ID NO: 31776 - DNA, 17 bp, Artificial Sequence
  Synthetic
tgtggtgaacccgtcgg

SEQ ID NO: 31777 - DNA, 16 bp, Artificial Sequence
  Synthetic
tcgtcctgcagcggct

SEQ ID NO: 31778 - DNA, 18 bp, Artificial Sequence
  Synthetic
tgctcgatctcccggacg

SEQ ID NO: 31779 - DNA, 18 bp, Artificial Sequence
  Synthetic
gacaggagccaatgtggg

SEQ ID NO: 31780 - DNA, 19 bp, Artificial Sequence
  Synthetic
cctcaacgaactccttggc

SEQ ID NO: 31781 - DNA, 18 bp, Artificial Sequence
  Synthetic
aagactctcccccaccgc

SEQ ID NO: 31782 - DNA, 16 bp, Artificial Sequence
  Synthetic
tggggtccctggacga

SEQ ID NO: 31783 - DNA, 17 bp, Artificial Sequence
  Synthetic
acgtagctcccgatggc

SEQ ID NO: 31784 - DNA, 20 bp, Artificial Sequence
  Synthetic
cgtcaatggtaaacagcgtg

SEQ ID NO: 31785 - DNA, 16 bp, Artificial Sequence
  Synthetic
acacgagggcggtgtc

SEQ ID NO: 31786 - DNA, 18 bp, Artificial Sequence
  Synthetic
cacgctcgatacgatgcg

SEQ ID NO: 31787 - DNA, 16 bp, Artificial Sequence
  Synthetic
tatcggctccggtccg

SEQ ID NO: 31788 - DNA, 17 bp, Artificial Sequence
  Synthetic
ccgctggtctcacagga

SEQ ID NO: 31789 - DNA, 16 bp, Artificial Sequence
  Synthetic
tcttgtcgggcctccc

SEQ ID NO: 31790 - DNA, 16 bp, Artificial Sequence
  Synthetic
atggagcgcggggaac

SEQ ID NO: 31791 - DNA, 16 bp, Artificial Sequence
  Synthetic
acgcatgccagcccaa

SEQ ID NO: 31792 - DNA, 18 bp, Artificial Sequence
  Synthetic
ccctgtcgtttgggtccc

SEQ ID NO: 31793 - DNA, 20 bp, Artificial Sequence
  Synthetic
gtcataagaccagtcggacg

SEQ ID NO: 31794 - DNA, 16 bp, Artificial Sequence
  Synthetic
gcggcgtccgtgttgt

SEQ ID NO: 31795 - DNA, 16 bp, Artificial Sequence
  Synthetic
acccaaacccacccgc

SEQ ID NO: 31796 - DNA, 20 bp, Artificial Sequence
  Synthetic
cgtaatgaccctccttgacc

SEQ ID NO: 31797 - DNA, 17 bp, Artificial Sequence
  Synthetic
tgtcccccgtaaacgcg

SEQ ID NO: 31798 - DNA, 19 bp, Artificial Sequence
  Synthetic
ggcaaggatctcctgcaga

SEQ ID NO: 31799 - DNA, 17 bp, Artificial Sequence
  Synthetic
cagtcaccagcttggcc

SEQ ID NO: 31800 - DNA, 17 bp, Artificial Sequence
  Synthetic
atgcaggtccaggaggg

SEQ ID NO: 31801 - DNA, 18 bp, Artificial Sequence
  Synthetic
tgtcgcggtggataatgc

SEQ ID NO: 31802 - DNA, 16 bp, Artificial Sequence
  Synthetic
cgaggtgaggcgcgat

SEQ ID NO: 31803 - DNA, 16 bp, Artificial Sequence
  Synthetic
atgttcgccgtccccg

SEQ ID NO: 31804 - DNA, 20 bp, Artificial Sequence
  Synthetic
gccaagtcgtgtgctgtttc

SEQ ID NO: 31805 - DNA, 16 bp, Artificial Sequence
  Synthetic
acggcaaagcccccca

SEQ ID NO: 31806 - DNA, 20 bp, Artificial Sequence
  Synthetic
tgtggtcggtatggacgata

SEQ ID NO: 31807 - DNA, 18 bp, Artificial Sequence
  Synthetic
gtaggtggtgtgggggac

SEQ ID NO: 31808 - DNA, 18 bp, Artificial Sequence
  Synthetic
ggtcgcaggagccatagg

SEQ ID NO: 31809 - DNA, 16 bp, Artificial Sequence
  Synthetic
aactggggccggttgc

SEQ ID NO: 31810 - DNA, 16 bp, Artificial Sequence
  Synthetic
tgcgtctgcgtcgacg

SEQ ID NO: 31811 - DNA, 17 bp, Artificial Sequence
  Synthetic
tgggtgcaaattgcggg

SEQ ID NO: 31812 - DNA, 21 bp, Artificial Sequence
  Synthetic
attgctgatgttgacatatgt

SEQ ID NO: 31813 - DNA, 22 bp, Artificial Sequence
  Synthetic
tacagtaaagcaagagccattt

SEQ ID NO: 31814 - DNA, 20 bp, Artificial Sequence
  Synthetic
ccgaaaactccactgcatat

SEQ ID NO: 31815 - DNA, 23 bp, Artificial Sequence
  Synthetic
agttattgctacgatatcttgtt

SEQ ID NO: 31816 - DNA, 19 bp, Artificial Sequence
  Synthetic
caaacagtgggggaaagcc

SEQ ID NO: 31817 - DNA, 23 bp, Artificial Sequence
  Synthetic
cgttgacatactttccaatcaat

SEQ ID NO: 31818 - DNA, 20 bp, Artificial Sequence
  Synthetic
cccaactcctcccagtcttt

SEQ ID NO: 31819 - DNA, 24 bp, Artificial Sequence
  Synthetic
ataactgtttctcttccaaaagtg

SEQ ID NO: 31820 - DNA, 19 bp, Artificial Sequence
  Synthetic
ctaccttgttggcgtctgg

SEQ ID NO: 31821 - DNA, 20 bp, Artificial Sequence
  Synthetic
ttcattgccatcatccattt

SEQ ID NO: 31822 - DNA, 18 bp, Artificial Sequence
  Synthetic
gaacagggccaaaggttc

SEQ ID NO: 31823 - DNA, 23 bp, Artificial Sequence
  Synthetic
atatatccacagcttgttcttca

SEQ ID NO: 31824 - DNA, 19 bp, Artificial Sequence
  Synthetic
ctcactatgagctgaacca

SEQ ID NO: 31825 - DNA, 21 bp, Artificial Sequence
  Synthetic
ctggtaatactccaaccattc

SEQ ID NO: 31826 - DNA, 19 bp, Artificial Sequence
  Synthetic
gacagcttcccaatttctg

SEQ ID NO: 31827 - DNA, 20 bp, Artificial Sequence
  Synthetic
cagtgaagagaactgcattc

SEQ ID NO: 31828 - DNA, 18 bp, Artificial Sequence
  Synthetic
gcacattagccttttccc

SEQ ID NO: 31829 - DNA, 18 bp, Artificial Sequence
  Synthetic
ctttcatacgcagctgtg

SEQ ID NO: 31830 - DNA, 21 bp, Artificial Sequence
  Synthetic
tgattgttgcttgtttacctt

SEQ ID NO: 31831 - DNA, 19 bp, Artificial Sequence
  Synthetic
gcaaatgactcctggaaca

SEQ ID NO: 31832 - DNA, 19 bp, Artificial Sequence
  Synthetic
cgctttaggaactggattg

SEQ ID NO: 31833 - DNA, 21 bp, Artificial Sequence
  Synthetic
aatgatacaccaaacgtttct

SEQ ID NO: 31834 - DNA, 21 bp, Artificial Sequence
  Synthetic
tacttcattagcataggcaga

SEQ ID NO: 31835 - DNA, 20 bp, Artificial Sequence
  Synthetic
gtagatgttttcgccctggg

SEQ ID NO: 31836 - DNA, 18 bp, Artificial Sequence
  Synthetic
gccgtacaggaattgcat

SEQ ID NO: 31837 - DNA, 18 bp, Artificial Sequence
  Synthetic
ttaggagcttggggtgtc

SEQ ID NO: 31838 - DNA, 19 bp, Artificial Sequence
  Synthetic
aatgattgttccccgtctg

SEQ ID NO: 31839 - DNA, 24 bp, Artificial Sequence
  Synthetic
cccttcaaaattttctacttgagt

SEQ ID NO: 31840 - DNA, 20 bp, Artificial Sequence
  Synthetic
gattaccagatacctttggc

SEQ ID NO: 31841 - DNA, 19 bp, Artificial Sequence
  Synthetic
caatgagcccctattggag

SEQ ID NO: 31842 - DNA, 25 bp, Artificial Sequence
  Synthetic
cgtaaaagaaaagttcatcaccata

SEQ ID NO: 31843 - DNA, 18 bp, Artificial Sequence
  Synthetic
gttttacgcgtcgtgttg

SEQ ID NO: 31844 - DNA, 19 bp, Artificial Sequence
  Synthetic
aaataattgttgggtgcgg

SEQ ID NO: 31845 - DNA, 19 bp, Artificial Sequence
  Synthetic
atgaaacgtttacggtcgt

SEQ ID NO: 31846 - DNA, 18 bp, Artificial Sequence
  Synthetic
tgtcacccttatgcgaca

SEQ ID NO: 31847 - DNA, 18 bp, Artificial Sequence
  Synthetic
gccattttgatttcccgc

SEQ ID NO: 31848 - DNA, 20 bp, Artificial Sequence
  Synthetic
atcccgagcttcttcctgta

SEQ ID NO: 31849 - DNA, 25 bp, Artificial Sequence
  Synthetic
gtactatactttgaggacctatagg

SEQ ID NO: 31850 - DNA, 19 bp, Artificial Sequence
  Synthetic
ggcacttggtaaagcatct

SEQ ID NO: 31851 - DNA, 24 bp, Artificial Sequence
  Synthetic
gtactgttccataaatctactgta

SEQ ID NO: 31852 - DNA, 20 bp, Artificial Sequence
  Synthetic
attctgctgactctgactaa

SEQ ID NO: 31853 - DNA, 20 bp, Artificial Sequence
  Synthetic
gcagctgtatagtctgttct

SEQ ID NO: 31854 - DNA, 21 bp, Artificial Sequence
  Synthetic
atgaaacttaccgaaaacggt

SEQ ID NO: 31855 - DNA, 18 bp, Artificial Sequence
  Synthetic
cctctgcctcttgtgaga

SEQ ID NO: 31856 - DNA, 19 bp, Artificial Sequence
  Synthetic
ggaacacccaggctctacc

SEQ ID NO: 31857 - DNA, 19 bp, Artificial Sequence
  Synthetic
cgcctttctaggagcactc

SEQ ID NO: 31858 - DNA, 20 bp, Artificial Sequence
  Synthetic
gaatcttttggcaaccttct

SEQ ID NO: 31859 - DNA, 20 bp, Artificial Sequence
  Synthetic
aatcctggcactacttctgc

SEQ ID NO: 31860 - DNA, 20 bp, Artificial Sequence
  Synthetic
agcttttgtagaacctgtct

SEQ ID NO: 31861 - DNA, 18 bp, Artificial Sequence
  Synthetic
acctgcctgtctttccgg

SEQ ID NO: 31862 - DNA, 18 bp, Artificial Sequence
  Synthetic
ttaggggccattgtttca

SEQ ID NO: 31863 - DNA, 22 bp, Artificial Sequence
  Synthetic
ttcctggttccatattgtttac

SEQ ID NO: 31864 - DNA, 19 bp, Artificial Sequence
  Synthetic
gtttctgcagcttccattt

SEQ ID NO: 31865 - DNA, 24 bp, Artificial Sequence
  Synthetic
ggtatgggtattttttatctttgc

SEQ ID NO: 31866 - DNA, 23 bp, Artificial Sequence
  Synthetic
ctttgtcttttcctctatctgtt

SEQ ID NO: 31867 - DNA, 21 bp, Artificial Sequence
  Synthetic
actagaaggggtattccaaat

SEQ ID NO: 31868 - DNA, 20 bp, Artificial Sequence
  Synthetic
ggctttgtgggttgtaaggt

SEQ ID NO: 31869 - DNA, 18 bp, Artificial Sequence
  Synthetic
atgactgctccttctccc

SEQ ID NO: 31870 - DNA, 18 bp, Artificial Sequence
  Synthetic
ccctctgatggctcttct

SEQ ID NO: 31871 - DNA, 20 bp, Artificial Sequence
  Synthetic
accctctcttgaaatgtgta

SEQ ID NO: 31872 - DNA, 21 bp, Artificial Sequence
  Synthetic
ttgtttagccaattcttgagc

SEQ ID NO: 31873 - DNA, 20 bp, Artificial Sequence
  Synthetic
gccatagaaaacagtcacat

SEQ ID NO: 31874 - DNA, 25 bp, Artificial Sequence
  Synthetic
tagaagtttcatttattatggaggc

SEQ ID NO: 31875 - DNA, 22 bp, Artificial Sequence
  Synthetic
caaagcctgaatagttggtatc

SEQ ID NO: 31876 - DNA, 22 bp, Artificial Sequence
  Synthetic
ttgtatctgggatgttgtacaa

SEQ ID NO: 31877 - DNA, 23 bp, Artificial Sequence
  Synthetic
cactaaaggtaatgttggtatga

SEQ ID NO: 31878 - DNA, 23 bp, Artificial Sequence
  Synthetic
attcttttcttgttgaatttggg

SEQ ID NO: 31879 - DNA, 20 bp, Artificial Sequence
  Synthetic
ccgcaagagtctctctcgta

SEQ ID NO: 31880 - DNA, 25 bp, Artificial Sequence
  Synthetic
ccccctttttcttttataaaatgtg

SEQ ID NO: 31881 - DNA, 22 bp, Artificial Sequence
  Synthetic
tttcttagtagctacttcctgc

SEQ ID NO: 31882 - DNA, 20 bp, Artificial Sequence
  Synthetic
ggagagatgggaacacacac

SEQ ID NO: 31883 - DNA, 19 bp, Artificial Sequence
  Synthetic
aggtgttgttgttagtggt

SEQ ID NO: 31884 - DNA, 25 bp, Artificial Sequence
  Synthetic
ctgtattgataacattactggttga

SEQ ID NO: 31885 - DNA, 21 bp, Artificial Sequence
  Synthetic
catagagtctttccatttggg

SEQ ID NO: 31886 - DNA, 19 bp, Artificial Sequence
  Synthetic
ccaattaaaggcaaggacc

SEQ ID NO: 31887 - DNA, 19 bp, Artificial Sequence
  Synthetic
atgagatgtgtatccgtgc

SEQ ID NO: 31888 - DNA, 20 bp, Artificial Sequence
  Synthetic
ctttcaagtgccaagagatg

SEQ ID NO: 31889 - DNA, 24 bp, Artificial Sequence
  Synthetic
gctatcattaatgttacagccaag

SEQ ID NO: 31890 - DNA, 18 bp, Artificial Sequence
  Synthetic
acttctgtggtcaccgtt

SEQ ID NO: 31891 - DNA, 20 bp, Artificial Sequence
  Synthetic
gcactggagctaggatgagt

SEQ ID NO: 31892 - DNA, 18 bp, Artificial Sequence
  Synthetic
gactcaggtaccccttcc

SEQ ID NO: 31893 - DNA, 18 bp, Artificial Sequence
  Synthetic
ccatccacacattctgct

SEQ ID NO: 31894 - DNA, 19 bp, Artificial Sequence
  Synthetic
gtttagggctcaaatcagc

SEQ ID NO: 31895 - DNA, 21 bp, Artificial Sequence
  Synthetic
tcgctttcatacagagtcatt

SEQ ID NO: 31896 - DNA, 19 bp, Artificial Sequence
  Synthetic
agtccattgtccagattgt

SEQ ID NO: 31897 - DNA, 20 bp, Artificial Sequence
  Synthetic
cctgtaccaatacccaaacc

SEQ ID NO: 31898 - DNA, 22 bp, Artificial Sequence
  Synthetic
acctaaagctgtagtaggattt

SEQ ID NO: 31899 - DNA, 20 bp, Artificial Sequence
  Synthetic
tttcctcaacatctccaact

SEQ ID NO: 31900 - DNA, 20 bp, Artificial Sequence
  Synthetic
tgcatcaaatacaggattgg

SEQ ID NO: 31901 - DNA, 19 bp, Artificial Sequence
  Synthetic
gcatttcaaagctctctgc

SEQ ID NO: 31902 - DNA, 25 bp, Artificial Sequence
  Synthetic
gtttctgtaacatattcatctgttg

SEQ ID NO: 31903 - DNA, 20 bp, Artificial Sequence
  Synthetic
aatagggatgtccagaacaa

SEQ ID NO: 31904 - DNA, 21 bp, Artificial Sequence
  Synthetic
ctttctataggaggacagtca

SEQ ID NO: 31905 - DNA, 20 bp, Artificial Sequence
  Synthetic
gtactctccattggtattgc

SEQ ID NO: 31906 - DNA, 20 bp, Artificial Sequence
  Synthetic
cagttggacatttagtagcc

SEQ ID NO: 31907 - DNA, 21 bp, Artificial Sequence
  Synthetic
ttcaagtttattcaggttgca

SEQ ID NO: 31908 - DNA, 23 bp, Artificial Sequence
  Synthetic
acagtaaaaacatcgaatggtaa

SEQ ID NO: 31909 - DNA, 21 bp, Artificial Sequence
  Synthetic
ccaataagtgaattgctccag

SEQ ID NO: 31910 - DNA, 20 bp, Artificial Sequence
  Synthetic
gctttctgattgctacttga

SEQ ID NO: 31911 - DNA, 23 bp, Artificial Sequence
  Synthetic
ttcttctgctaataaggcataat

SEQ ID NO: 31912 - DNA, 22 bp, Artificial Sequence
  Synthetic
acctaacacttcatatccttct

SEQ ID NO: 31913 - DNA, 20 bp, Artificial Sequence
  Synthetic
ctttcagctcgtcttcgtct

SEQ ID NO: 31914 - DNA, 21 bp, Artificial Sequence
  Synthetic
cctaccagtaccaatccctaa

SEQ ID NO: 31915 - DNA, 20 bp, Artificial Sequence
  Synthetic
acaatggatccacagaagtg

SEQ ID NO: 31916 - DNA, 19 bp, Artificial Sequence
  Synthetic
gttaccacgtcatcaaagg

SEQ ID NO: 31917 - DNA, 23 bp, Artificial Sequence
  Synthetic
attaatatcaaaacctgggacaa

SEQ ID NO: 31918 - DNA, 24 bp, Artificial Sequence
  Synthetic
aaatctatcaaaaagaggatgacc

SEQ ID NO: 31919 - DNA, 20 bp, Artificial Sequence
  Synthetic
tggataaaaaaaacgtccgt

SEQ ID NO: 31920 - DNA, 18 bp, Artificial Sequence
  Synthetic
gctgcttacgaggaacat

SEQ ID NO: 31921 - DNA, 18 bp, Artificial Sequence
  Synthetic
cgaaaatcagcgaccgaa

SEQ ID NO: 31922 - DNA, 19 bp, Artificial Sequence
  Synthetic
cctttcagggatcatctcc

SEQ ID NO: 31923 - DNA, 18 bp, Artificial Sequence
  Synthetic
aatgaacagggccaaagg

SEQ ID NO: 31924 - DNA, 20 bp, Artificial Sequence
  Synthetic
atatatacgctgcttgtccc

SEQ ID NO: 31925 - DNA, 21 bp, Artificial Sequence
  Synthetic
atgtctaccattcttactccg

SEQ ID NO: 31926 - DNA, 19 bp, Artificial Sequence
  Synthetic
ccacaataattgcctcagc

SEQ ID NO: 31927 - DNA, 23 bp, Artificial Sequence
  Synthetic
gcaatattccaatcatacccatg

SEQ ID NO: 31928 - DNA, 23 bp, Artificial Sequence
  Synthetic
gatatgtgttaactagcactgat

SEQ ID NO: 31929 - DNA, 21 bp, Artificial Sequence
  Synthetic
agtcagagaagaaaattgcat

SEQ ID NO: 31930 - DNA, 22 bp, Artificial Sequence
  Synthetic
gtaagattgctcagttcattga

SEQ ID NO: 31931 - DNA, 18 bp, Artificial Sequence
  Synthetic
ttttgagcagatcctggg

SEQ ID NO: 31932 - DNA, 18 bp, Artificial Sequence
  Synthetic
tcctacatgcactggttg

SEQ ID NO: 31933 - DNA, 22 bp, Artificial Sequence
  Synthetic
tttagcattagccaatgaaagt

SEQ ID NO: 31934 - DNA, 18 bp, Artificial Sequence
  Synthetic
catccctgttgctagcag

SEQ ID NO: 31935 - DNA, 22 bp, Artificial Sequence
  Synthetic
ggttttttctataagccggttt

SEQ ID NO: 31936 - DNA, 22 bp, Artificial Sequence
  Synthetic
catacagtcatcatcacacttg

SEQ ID NO: 31937 - DNA, 22 bp, Artificial Sequence
  Synthetic
tggttaagtggtttttacacca

SEQ ID NO: 31938 - DNA, 18 bp, Artificial Sequence
  Synthetic
ttctctgcactgggtaca

SEQ ID NO: 31939 - DNA, 18 bp, Artificial Sequence
  Synthetic
gtgtgtccagaagcatct

SEQ ID NO: 31940 - DNA, 23 bp, Artificial Sequence
  Synthetic
tgtacaactacttttgtcacttt

SEQ ID NO: 31941 - DNA, 18 bp, Artificial Sequence
  Synthetic
cactttgtaatcgtggcg

SEQ ID NO: 31942 - DNA, 21 bp, Artificial Sequence
  Synthetic
catacgtttcatttgtgcttt

SEQ ID NO: 31943 - DNA, 19 bp, Artificial Sequence
  Synthetic
tgtcctacttgtgcatagc

SEQ ID NO: 31944 - DNA, 18 bp, Artificial Sequence
  Synthetic
tgccatctagtgtttgca

SEQ ID NO: 31945 - DNA, 18 bp, Artificial Sequence
  Synthetic
gtgaccctttgcgatccg

SEQ ID NO: 31946 - DNA, 18 bp, Artificial Sequence
  Synthetic
tagtagctgcaaccagga

SEQ ID NO: 31947 - DNA, 22 bp, Artificial Sequence
  Synthetic
tggcattgataatacactttgg

SEQ ID NO: 31948 - DNA, 23 bp, Artificial Sequence
  Synthetic
atgttaagagtctaccattaccc

SEQ ID NO: 31949 - DNA, 21 bp, Artificial Sequence
  Synthetic
acataaacatcaaacaggcca

SEQ ID NO: 31950 - DNA, 25 bp, Artificial Sequence
  Synthetic
tcttaatagtataatatggatgccc

SEQ ID NO: 31951 - DNA, 25 bp, Artificial Sequence
  Synthetic
caggatatttactaatggagttcat

SEQ ID NO: 31952 - DNA, 20 bp, Artificial Sequence
  Synthetic
gttaccttagcttgacatcg

SEQ ID NO: 31953 - DNA, 20 bp, Artificial Sequence
  Synthetic
aaatgcaaagctatgccaac

SEQ ID NO: 31954 - DNA, 23 bp, Artificial Sequence
  Synthetic
gcattagaatcttcatctgctaa

SEQ ID NO: 31955 - DNA, 21 bp, Artificial Sequence
  Synthetic
tcttaaggcagtaaggaactc

SEQ ID NO: 31956 - DNA, 20 bp, Artificial Sequence
  Synthetic
tgttctccttctcctcctcg

SEQ ID NO: 31957 - DNA, 22 bp, Artificial Sequence
  Synthetic
taactgtaaggcttaggacatt

SEQ ID NO: 31958 - DNA, 24 bp, Artificial Sequence
  Synthetic
taaaactaggatctaaagcaatgc

SEQ ID NO: 31959 - DNA, 18 bp, Artificial Sequence
  Synthetic
tacgccatctggaatgct

SEQ ID NO: 31960 - DNA, 21 bp, Artificial Sequence
  Synthetic
cccaaaggatagcattattgc

SEQ ID NO: 31961 - DNA, 25 bp, Artificial Sequence
  Synthetic
aataaatctatacgaatcctccaag

SEQ ID NO: 31962 - DNA, 19 bp, Artificial Sequence
  Synthetic
atgagactgctctggtaac

SEQ ID NO: 31963 - DNA, 20 bp, Artificial Sequence
  Synthetic
gtggtaaggataaaggcaac

SEQ ID NO: 31964 - DNA, 18 bp, Artificial Sequence
  Synthetic
ggtacaaaggctgacagc

SEQ ID NO: 31965 - DNA, 20 bp, Artificial Sequence
  Synthetic
ggtgagtcccaattgtcctc

SEQ ID NO: 31966 - DNA, 19 bp, Artificial Sequence
  Synthetic
gccgatactcttccctcat

SEQ ID NO: 31967 - DNA, 20 bp, Artificial Sequence
  Synthetic
aaatcctccatacttttgcc

SEQ ID NO: 31968 - DNA, 18 bp, Artificial Sequence
  Synthetic
gtcaccgctcaataccag

SEQ ID NO: 31969 - DNA, 24 bp, Artificial Sequence
  Synthetic
tccttatatgtctcttcaagcttt

SEQ ID NO: 31970 - DNA, 19 bp, Artificial Sequence
  Synthetic
tgattgtgtcgttttccga

SEQ ID NO: 31971 - DNA, 24 bp, Artificial Sequence
  Synthetic
gagtccttatccatctttctaatt

SEQ ID NO: 31972 - DNA, 22 bp, Artificial Sequence
  Synthetic
ttttgtataagttgatccggag

SEQ ID NO: 31973 - DNA, 23 bp, Artificial Sequence
  Synthetic
tcacttttttgggtattagtctt

SEQ ID NO: 31974 - DNA, 20 bp, Artificial Sequence
  Synthetic
agaagcctagtaggaagaca

SEQ ID NO: 31975 - DNA, 21 bp, Artificial Sequence
  Synthetic
caaggttattgatccaattgc

SEQ ID NO: 31976 - DNA, 19 bp, Artificial Sequence
  Synthetic
ttgttggtgttgacctctt

SEQ ID NO: 31977 - DNA, 19 bp, Artificial Sequence
  Synthetic
cagagcaatggttccaatt

SEQ ID NO: 31978 - DNA, 24 bp, Artificial Sequence
  Synthetic
ctgaatgcttctatacattctttg

SEQ ID NO: 31979 - DNA, 20 bp, Artificial Sequence
  Synthetic
atcaagtgcaacagaattgt

SEQ ID NO: 31980 - DNA, 22 bp, Artificial Sequence
  Synthetic
caccaggattattgtccataat

SEQ ID NO: 31981 - DNA, 25 bp, Artificial Sequence
  Synthetic
agatcatttataattaaggacggag

SEQ ID NO: 31982 - DNA, 21 bp, Artificial Sequence
  Synthetic
tcctcctatctgaaaaccatg

SEQ ID NO: 31983 - DNA, 20 bp, Artificial Sequence
  Synthetic
gtaatgcagcttgttgttgt

SEQ ID NO: 31984 - DNA, 23 bp, Artificial Sequence
  Synthetic
cccaatttgatttttttggagat

SEQ ID NO: 31985 - DNA, 20 bp, Artificial Sequence
  Synthetic
gcatgcatatcctagaacag

SEQ ID NO: 31986 - DNA, 22 bp, Artificial Sequence
  Synthetic
ggtctaatagattcgccttgat

SEQ ID NO: 31987 - DNA, 20 bp, Artificial Sequence
  Synthetic
gtttgtgccatctgaagaat

SEQ ID NO: 31988 - DNA, 22 bp, Artificial Sequence
  Synthetic
gtactggagaatttcatctgag

SEQ ID NO: 31989 - DNA, 20 bp, Artificial Sequence
  Synthetic
gtaaggcgtttgtagaatgg

SEQ ID NO: 31990 - DNA, 24 bp, Artificial Sequence
  Synthetic
ggtcagaaaatttcattatgttgc

SEQ ID NO: 31991 - DNA, 19 bp, Artificial Sequence
  Synthetic
gcgtagtgtatgcaaagca

SEQ ID NO: 31992 - DNA, 18 bp, Artificial Sequence
  Synthetic
cgggaacaacacacagtt

SEQ ID NO: 31993 - DNA, 20 bp, Artificial Sequence
  Synthetic
gaagcaacttgtcttctgac

SEQ ID NO: 31994 - DNA, 19 bp, Artificial Sequence
  Synthetic
ccttaagctttgtggtgac

SEQ ID NO: 31995 - DNA, 19 bp, Artificial Sequence
  Synthetic
gtcactaacaaagtacgcc

SEQ ID NO: 31996 - DNA, 22 bp, Artificial Sequence
  Synthetic
aacaatagtatcaacgaaagct

SEQ ID NO: 31997 - DNA, 22 bp, Artificial Sequence
  Synthetic
ccttacacacgatatcacgtat

SEQ ID NO: 31998 - DNA, 22 bp, Artificial Sequence
  Synthetic
tgatggataataaacaccatcc

SEQ ID NO: 31999 - DNA, 18 bp, Artificial Sequence
  Synthetic
cgggcaaactcaagtcat

SEQ ID NO: 32000 - DNA, 18 bp, Artificial Sequence
  Synthetic
acatcacccatagcacca

SEQ ID NO: 32001 - DNA, 23 bp, Artificial Sequence
  Synthetic
gcacaaatattatggtaccttgt

SEQ ID NO: 32002 - DNA, 23 bp, Artificial Sequence
  Synthetic
gcagcatttacaataaagtcaaa

SEQ ID NO: 32003 - DNA, 18 bp, Artificial Sequence
  Synthetic
atgggtttgtcatcagcg

SEQ ID NO: 32004 - DNA, 20 bp, Artificial Sequence
  Synthetic
cttcagcagctttaagttca

SEQ ID NO: 32005 - DNA, 24 bp, Artificial Sequence
  Synthetic
tcacccaacaattattatcactag

SEQ ID NO: 32006 - DNA, 19 bp, Artificial Sequence
  Synthetic
aggtccagaaaaagcagta

SEQ ID NO: 32007 - DNA, 19 bp, Artificial Sequence
  Synthetic
ggtccaaaacgtacacaaa

SEQ ID NO: 32008 - DNA, 22 bp, Artificial Sequence
  Synthetic
ccaaatataagcagcaaaacca

SEQ ID NO: 32009 - DNA, 21 bp, Artificial Sequence
  Synthetic
gagtcacaatcaacacagaaa

SEQ ID NO: 32010 - DNA, 18 bp, Artificial Sequence
  Synthetic
caaccttagcacctgcac

SEQ ID NO: 32011 - DNA, 20 bp, Artificial Sequence
  Synthetic
ggcatgaaaaagcacaagta

SEQ ID NO: 32012 - DNA, 21 bp, Artificial Sequence
  Synthetic
gcagaagtaaaaatgcacttt

SEQ ID NO: 32013 - DNA, 18 bp, Artificial Sequence
  Synthetic
ccacaaaccagtaccaca

SEQ ID NO: 32014 - DNA, 22 bp, Artificial Sequence
  Synthetic
agatttgtcgaaactttaagct

SEQ ID NO: 32015 - DNA, 20 bp, Artificial Sequence
  Synthetic
ccattcaacacagtgtttcc

SEQ ID NO: 32016 - DNA, 22 bp, Artificial Sequence
  Synthetic
cggatagtccaattagttctca

SEQ ID NO: 32017 - DNA, 18 bp, Artificial Sequence
  Synthetic
aaaccattagcctgtgcc

SEQ ID NO: 32018 - DNA, 22 bp, Artificial Sequence
  Synthetic
cacttgcaaaaacaaaacctta

SEQ ID NO: 32019 - DNA, 22 bp, Artificial Sequence
  Synthetic
agaaattgcacaaagtagcata

SEQ ID NO: 32020 - DNA, 18 bp, Artificial Sequence
  Synthetic
ggttctaggaccgccaat

SEQ ID NO: 32021 - DNA, 22 bp, Artificial Sequence
  Synthetic
agaccaaaatcactatgcttag

SEQ ID NO: 32022 - DNA, 18 bp, Artificial Sequence
  Synthetic
catgtccaaacgtcggag

SEQ ID NO: 32023 - DNA, 22 bp, Artificial Sequence
  Synthetic
gcattatttcattgttctgcaa

SEQ ID NO: 32024 - DNA, 20 bp, Artificial Sequence
  Synthetic
agcacctctccttaaattgt

SEQ ID NO: 32025 - DNA, 18 bp, Artificial Sequence
  Synthetic
aatacaaacagacgcgcc

SEQ ID NO: 32026 - DNA, 22 bp, Artificial Sequence
  Synthetic
cgcatctttattgtaaacgtca

SEQ ID NO: 32027 - DNA, 18 bp, Artificial Sequence
  Synthetic
cacggtgtatgtcctcat

SEQ ID NO: 32028 - DNA, 21 bp, Artificial Sequence
  Synthetic
aaagttttgaagtcttgacca

SEQ ID NO: 32029 - DNA, 25 bp, Artificial Sequence
  Synthetic
cagtaatagtaagtctggtagaatg

SEQ ID NO: 32030 - DNA, 22 bp, Artificial Sequence
  Synthetic
gtaggtctgttgtaacgataat

SEQ ID NO: 32031 - DNA, 23 bp, Artificial Sequence
  Synthetic
ttctttaacatattatcccaccc

SEQ ID NO: 32032 - DNA, 23 bp, Artificial Sequence
  Synthetic
gcaaaattcatgaggtcctatag

SEQ ID NO: 32033 - DNA, 21 bp, Artificial Sequence
  Synthetic
ccttcgttaagagtcttgttg

SEQ ID NO: 32034 - DNA, 21 bp, Artificial Sequence
  Synthetic
atcattagcaagcttgtagtc

SEQ ID NO: 32035 - DNA, 18 bp, Artificial Sequence
  Synthetic
ctcctggtttgccattgt

SEQ ID NO: 32036 - DNA, 23 bp, Artificial Sequence
  Synthetic
tgtgcactattattgttaggttt

SEQ ID NO: 32037 - DNA, 20 bp, Artificial Sequence
  Synthetic
cctatagcacacatacgttg

SEQ ID NO: 32038 - DNA, 20 bp, Artificial Sequence
  Synthetic
gagcagtatctgatgtctgt

SEQ ID NO: 32039 - DNA, 21 bp, Artificial Sequence
  Synthetic
acatcaaacctgaaacccata

SEQ ID NO: 32040 - DNA, 19 bp, Artificial Sequence
  Synthetic
gttttacaacactgccagt

SEQ ID NO: 32041 - DNA, 23 bp, Artificial Sequence
  Synthetic
ggattataaacatagtcacagcc

SEQ ID NO: 32042 - DNA, 22 bp, Artificial Sequence
  Synthetic
ccttaggattaccaatgtcatg

SEQ ID NO: 32043 - DNA, 19 bp, Artificial Sequence
  Synthetic
acatgaaccgtcgtcatag

SEQ ID NO: 32044 - DNA, 20 bp, Artificial Sequence
  Synthetic
cgtacgaacactttatcacc

SEQ ID NO: 32045 - DNA, 23 bp, Artificial Sequence
  Synthetic
gagaataacacagcattagttga

SEQ ID NO: 32046 - DNA, 22 bp, Artificial Sequence
  Synthetic
gttgaaatcctctagaccatac

SEQ ID NO: 32047 - DNA, 21 bp, Artificial Sequence
  Synthetic
tgaggatagaatgtagcaacg

SEQ ID NO: 32048 - DNA, 21 bp, Artificial Sequence
  Synthetic
cacatagtcaacaacatcgtt

SEQ ID NO: 32049 - DNA, 18 bp, Artificial Sequence
  Synthetic
cacaacaacagtcgcttt

SEQ ID NO: 32050 - DNA, 20 bp, Artificial Sequence
  Synthetic
acaacaccatctacaacaga

SEQ ID NO: 32051 - DNA, 22 bp, Artificial Sequence
  Synthetic
acctaaagtgaaatagcgatag

SEQ ID NO: 32052 - DNA, 22 bp, Artificial Sequence
  Synthetic
tgtaatattaacaccagcagga

SEQ ID NO: 32053 - DNA, 19 bp, Artificial Sequence
  Synthetic
gacaacatagcaccaacaa

SEQ ID NO: 32054 - DNA, 23 bp, Artificial Sequence
  Synthetic
acgataggtgtacttgtaatttg

SEQ ID NO: 32055 - DNA, 23 bp, Artificial Sequence
  Synthetic
ccagaagtaacaagtttgctaaa

SEQ ID NO: 32056 - DNA, 21 bp, Artificial Sequence
  Synthetic
ctactatgttggtcattgctt

SEQ ID NO: 32057 - DNA, 21 bp, Artificial Sequence
  Synthetic
tttgacacactcattcacttt

SEQ ID NO: 32058 - DNA, 20 bp, Artificial Sequence
  Synthetic
caactcagagcgagaaatgt

SEQ ID NO: 32059 - DNA, 18 bp, Artificial Sequence
  Synthetic
taagtctcaacccggttg

SEQ ID NO: 32060 - DNA, 22 bp, Artificial Sequence
  Synthetic
tgaaacttcagcactaactttc

SEQ ID NO: 32061 - DNA, 19 bp, Artificial Sequence
  Synthetic
acacttaccttgcatagca

SEQ ID NO: 32062 - DNA, 19 bp, Artificial Sequence
  Synthetic
ggaaagggtctatgtgcat

SEQ ID NO: 32063 - DNA, 18 bp, Artificial Sequence
  Synthetic
cgaagtacatcacccaca

SEQ ID NO: 32064 - DNA, 20 bp, Artificial Sequence
  Synthetic
gccatcttttcgttcagttt

SEQ ID NO: 32065 - DNA, 21 bp, Artificial Sequence
  Synthetic
cgctctctaaattttgcatct

SEQ ID NO: 32066 - DNA, 19 bp, Artificial Sequence
  Synthetic
gaagaagcaggactctgat

SEQ ID NO: 32067 - DNA, 19 bp, Artificial Sequence
  Synthetic
cagcaaattgtggatagcc

SEQ ID NO: 32068 - DNA, 21 bp, Artificial Sequence
  Synthetic
tgaatttcaaacaacacagtg

SEQ ID NO: 32069 - DNA, 18 bp, Artificial Sequence
  Synthetic
ccattgttggctcgtcaa

SEQ ID NO: 32070 - DNA, 21 bp, Artificial Sequence
  Synthetic
agaacccacaaaaatgcataa

SEQ ID NO: 32071 - DNA, 23 bp, Artificial Sequence
  Synthetic
gctaggactagtatactttcgtt

SEQ ID NO: 32072 - DNA, 18 bp, Artificial Sequence
  Synthetic
gctgttgcaagcctgttg

SEQ ID NO: 32073 - DNA, 25 bp, Artificial Sequence
  Synthetic
tcccatatattattatcatatgccc

SEQ ID NO: 32074 - DNA, 23 bp, Artificial Sequence
  Synthetic
tggaataatagacacatcctgat

SEQ ID NO: 32075 - DNA, 19 bp, Artificial Sequence
  Synthetic
tctacctgtgcatgtgttt

SEQ ID NO: 32076 - DNA, 25 bp, Artificial Sequence
  Synthetic
ctatattttgttttacacctgtacc

SEQ ID NO: 32077 - DNA, 20 bp, Artificial Sequence
  Synthetic
cctcctcctgttcctatagg

SEQ ID NO: 32078 - DNA, 20 bp, Artificial Sequence
  Synthetic
agggacaacaatatcgggct

SEQ ID NO: 32079 - DNA, 24 bp, Artificial Sequence
  Synthetic
aggttcaatatcaaaggtagaaga

SEQ ID NO: 32080 - DNA, 19 bp, Artificial Sequence
  Synthetic
tgcaaaatccgggtcagga

SEQ ID NO: 32081 - DNA, 22 bp, Artificial Sequence
  Synthetic
ggtataggaaaagtggtaggac

SEQ ID NO: 32082 - DNA, 22 bp, Artificial Sequence
  Synthetic
ggaagaatactgaagtttccac

SEQ ID NO: 32083 - DNA, 21 bp, Artificial Sequence
  Synthetic
tttcagtgtcctttagcttgt

SEQ ID NO: 32084 - DNA, 19 bp, Artificial Sequence
  Synthetic
gaggctgtattctgctctt

SEQ ID NO: 32085 - DNA, 21 bp, Artificial Sequence
  Synthetic
acttttcatatggatctgcct

SEQ ID NO: 32086 - DNA, 19 bp, Artificial Sequence
  Synthetic
gggcgttgtcaaacaggac

SEQ ID NO: 32087 - DNA, 16 bp, Artificial Sequence
  Synthetic
ctgtgccacgcgtcct

SEQ ID NO: 32088 - DNA, 16 bp, Artificial Sequence
  Synthetic
cggccgagttgtctgc

SEQ ID NO: 32089 - DNA, 16 bp, Artificial Sequence
  Synthetic
gcacctcacccacgct

SEQ ID NO: 32090 - DNA, 18 bp, Artificial Sequence
  Synthetic
gcactcgtactgctcgct

SEQ ID NO: 32091 - DNA, 19 bp, Artificial Sequence
  Synthetic
gcgatctggtgggcattct

SEQ ID NO: 32092 - DNA, 18 bp, Artificial Sequence
  Synthetic
tttcctgcatgccgttta

SEQ ID NO: 32093 - DNA, 18 bp, Artificial Sequence
  Synthetic
cccctggacatctggaca

SEQ ID NO: 32094 - DNA, 17 bp, Artificial Sequence
  Synthetic
agtgtgtgcctgggtgt

SEQ ID NO: 32095 - DNA, 20 bp, Artificial Sequence
  Synthetic
ccctggagaggtcaggttac

SEQ ID NO: 32096 - DNA, 18 bp, Artificial Sequence
  Synthetic
agaggagcagggggacag

SEQ ID NO: 32097 - DNA, 18 bp, Artificial Sequence
  Synthetic
ccctgaaggtgaaccgct

SEQ ID NO: 32098 - DNA, 20 bp, Artificial Sequence
  Synthetic
cgaccagaaatagctgcagg

SEQ ID NO: 32099 - DNA, 19 bp, Artificial Sequence
  Synthetic
tcctcttcttgctggacga

SEQ ID NO: 32100 - DNA, 19 bp, Artificial Sequence
  Synthetic
gggtaaaagtgggagggca

SEQ ID NO: 32101 - DNA, 17 bp, Artificial Sequence
  Synthetic
ggggtgcctcacgagtt

SEQ ID NO: 32102 - DNA, 16 bp, Artificial Sequence
  Synthetic
tgcaaaaggccacggc

SEQ ID NO: 32103 - DNA, 16 bp, Artificial Sequence
  Synthetic
tcgcgaatctcccggg

SEQ ID NO: 32104 - DNA, 16 bp, Artificial Sequence
  Synthetic
taccccgggattggcc

SEQ ID NO: 32105 - DNA, 19 bp, Artificial Sequence
  Synthetic
cgaccgatgtactcaaccc

SEQ ID NO: 32106 - DNA, 16 bp, Artificial Sequence
  Synthetic
agtcccagctgcaggg

SEQ ID NO: 32107 - DNA, 18 bp, Artificial Sequence
  Synthetic
agctaacacggctcctgg

SEQ ID NO: 32108 - DNA, 20 bp, Artificial Sequence
  Synthetic
actccctcacacagatcctt

SEQ ID NO: 32109 - DNA, 20 bp, Artificial Sequence
  Synthetic
ctttttggcgctgttgacag

SEQ ID NO: 32110 - DNA, 16 bp, Artificial Sequence
  Synthetic
tcaggaggcgggggaa

SEQ ID NO: 32111 - DNA, 18 bp, Artificial Sequence
  Synthetic
gccacgacactcgaacca

SEQ ID NO: 32112 - DNA, 16 bp, Artificial Sequence
  Synthetic
agcccctcggttctcg

SEQ ID NO: 32113 - DNA, 16 bp, Artificial Sequence
  Synthetic
acgcagagaccgggag

SEQ ID NO: 32114 - DNA, 16 bp, Artificial Sequence
  Synthetic
accaccgcttgcctgg

SEQ ID NO: 32115 - DNA, 17 bp, Artificial Sequence
  Synthetic
ggacagacgtcgaggca

SEQ ID NO: 32116 - DNA, 18 bp, Artificial Sequence
  Synthetic
gctcaaactcctccccgt

SEQ ID NO: 32117 - DNA, 16 bp, Artificial Sequence
  Synthetic
gcgttcatggcctcgc

SEQ ID NO: 32118 - DNA, 16 bp, Artificial Sequence
  Synthetic
gagggccagcaggagt

SEQ ID NO: 32119 - DNA, 20 bp, Artificial Sequence
  Synthetic
gccagacctgtaaaacctca

SEQ ID NO: 32120 - DNA, 19 bp, Artificial Sequence
  Synthetic
gcctccgacgatgtccttt

SEQ ID NO: 32121 - DNA, 18 bp, Artificial Sequence
  Synthetic
tggagaatgtctgcgcca

SEQ ID NO: 32122 - DNA, 16 bp, Artificial Sequence
  Synthetic
acaggggctttgcgga

SEQ ID NO: 32123 - DNA, 16 bp, Artificial Sequence
  Synthetic
ttgcggaggccatcct

SEQ ID NO: 32124 - DNA, 17 bp, Artificial Sequence
  Synthetic
gggggaactccggctaa

SEQ ID NO: 32125 - DNA, 16 bp, Artificial Sequence
  Synthetic
ggcggctcaccttggt

SEQ ID NO: 32126 - DNA, 18 bp, Artificial Sequence
  Synthetic
gcccagatggaggcaaag

SEQ ID NO: 32127 - DNA, 19 bp, Artificial Sequence
  Synthetic
gtggagctgacatgctatt

SEQ ID NO: 32128 - DNA, 16 bp, Artificial Sequence
  Synthetic
ggtgcacacgccactc

SEQ ID NO: 32129 - DNA, 19 bp, Artificial Sequence
  Synthetic
gcacctcaacactagcctg

SEQ ID NO: 32130 - DNA, 17 bp, Artificial Sequence
  Synthetic
tttggccaccttcccct

SEQ ID NO: 32131 - DNA, 20 bp, Artificial Sequence
  Synthetic
tctgtacaatgccagcactg

SEQ ID NO: 32132 - DNA, 19 bp, Artificial Sequence
  Synthetic
caaggggcgcatagggata

SEQ ID NO: 32133 - DNA, 16 bp, Artificial Sequence
  Synthetic
accgaggcccgctact

SEQ ID NO: 32134 - DNA, 19 bp, Artificial Sequence
  Synthetic
tcgcgaattttgactgcaa

SEQ ID NO: 32135 - DNA, 20 bp, Artificial Sequence
  Synthetic
tttcctcaggcttggctaag

SEQ ID NO: 32136 - DNA, 20 bp, Artificial Sequence
  Synthetic
ggtgtcagacctgaagactg

SEQ ID NO: 32137 - DNA, 19 bp, Artificial Sequence
  Synthetic
ccgactcatctacggaggc

SEQ ID NO: 32138 - DNA, 17 bp, Artificial Sequence
  Synthetic
attgccgccgagttcag

SEQ ID NO: 32139 - DNA, 18 bp, Artificial Sequence
  Synthetic
ccgcacagaacctctccc

SEQ ID NO: 32140 - DNA, 16 bp, Artificial Sequence
  Synthetic
tccagcgtgcggtagc

SEQ ID NO: 32141 - DNA, 18 bp, Artificial Sequence
  Synthetic
gatggcgttatggcggtt

SEQ ID NO: 32142 - DNA, 20 bp, Artificial Sequence
  Synthetic
gggggaatatgttgaggtgg

SEQ ID NO: 32143 - DNA, 18 bp, Artificial Sequence
  Synthetic
caccgcgtcagcctgaaa

SEQ ID NO: 32144 - DNA, 17 bp, Artificial Sequence
  Synthetic
ggatgagcagggcctca

SEQ ID NO: 32145 - DNA, 21 bp, Artificial Sequence
  Synthetic
acaaacatcacaaagtacaca

SEQ ID NO: 32146 - DNA, 15 bp, Artificial Sequence
  Synthetic
tgcacgctcggctca

SEQ ID NO: 32147 - DNA, 18 bp, Artificial Sequence
  Synthetic
cggctactcgctgctcta

SEQ ID NO: 32148 - DNA, 19 bp, Artificial Sequence
  Synthetic
ccactcccttggatgtggg

SEQ ID NO: 32149 - DNA, 18 bp, Artificial Sequence
  Synthetic
agagggaggaggctaggc

SEQ ID NO: 32150 - DNA, 16 bp, Artificial Sequence
  Synthetic
tgtccggggagagcgt

SEQ ID NO: 32151 - DNA, 18 bp, Artificial Sequence
  Synthetic
acgctcagactcctcgtc

SEQ ID NO: 32152 - DNA, 16 bp, Artificial Sequence
  Synthetic
aagagggccgggatgg

SEQ ID NO: 32153 - DNA, 17 bp, Artificial Sequence
  Synthetic
ggcattgcccagcttgg

SEQ ID NO: 32154 - DNA, 19 bp, Artificial Sequence
  Synthetic
gattttgacaacctccacg

SEQ ID NO: 32155 - DNA, 20 bp, Artificial Sequence
  Synthetic
caccgtgctacctcagccta

SEQ ID NO: 32156 - DNA, 19 bp, Artificial Sequence
  Synthetic
cctgtttatcggcagccac

SEQ ID NO: 32157 - DNA, 19 bp, Artificial Sequence
  Synthetic
cggtcaagatggaggagct

SEQ ID NO: 32158 - DNA, 19 bp, Artificial Sequence
  Synthetic
gcaagggtaagccttctgg

SEQ ID NO: 32159 - DNA, 16 bp, Artificial Sequence
  Synthetic
tccagctccacgcgga

SEQ ID NO: 32160 - DNA, 16 bp, Artificial Sequence
  Synthetic
acaggggccgtctgtg

SEQ ID NO: 32161 - DNA, 17 bp, Artificial Sequence
  Synthetic
tccggcaggtgttccac

SEQ ID NO: 32162 - DNA, 18 bp, Artificial Sequence
  Synthetic
ccagtcacaggccccata

SEQ ID NO: 32163 - DNA, 19 bp, Artificial Sequence
  Synthetic
gcggggacaagctaaacac

SEQ ID NO: 32164 - DNA, 16 bp, Artificial Sequence
  Synthetic
tagcatgggaggcgcg

SEQ ID NO: 32165 - DNA, 18 bp, Artificial Sequence
  Synthetic
accaggcctacacagacc

SEQ ID NO: 32166 - DNA, 16 bp, Artificial Sequence
  Synthetic
agcgagaccctgcgct

SEQ ID NO: 32167 - DNA, 17 bp, Artificial Sequence
  Synthetic
ccaagcgcaaggccatc

SEQ ID NO: 32168 - DNA, 15 bp, Artificial Sequence
  Synthetic
atgcgggcaagggct

SEQ ID NO: 32169 - DNA, 16 bp, Artificial Sequence
  Synthetic
tgggggaggagggctt

SEQ ID NO: 32170 - DNA, 16 bp, Artificial Sequence
  Synthetic
tggccaccgagggtct

SEQ ID NO: 32171 - DNA, 16 bp, Artificial Sequence
  Synthetic
gggccctggatctgct

SEQ ID NO: 32172 - DNA, 16 bp, Artificial Sequence
  Synthetic
gagccccgctacacct

SEQ ID NO: 32173 - DNA, 16 bp, Artificial Sequence
  Synthetic
aggcctcgcacgagac

SEQ ID NO: 32174 - DNA, 18 bp, Artificial Sequence
  Synthetic
cttgggcatcatgcaggg

SEQ ID NO: 32175 - DNA, 19 bp, Artificial Sequence
  Synthetic
atgttcagggccatgtacg

SEQ ID NO: 32176 - DNA, 19 bp, Artificial Sequence
  Synthetic
ccgccacctcattctgaaa

SEQ ID NO: 32177 - DNA, 23 bp, Artificial Sequence
  Synthetic
accctgtccaaattaaacttaaa

SEQ ID NO: 32178 - DNA, 18 bp, Artificial Sequence
  Synthetic
gacttgcaacaggtgtct

SEQ ID NO: 32179 - DNA, 18 bp, Artificial Sequence
  Synthetic
ctactatgccactgtccc

SEQ ID NO: 32180 - DNA, 18 bp, Artificial Sequence
  Synthetic
aaagtttctgcagctgct

SEQ ID NO: 32181 - DNA, 20 bp, Artificial Sequence
  Synthetic
gagtcattaacctttcctgc

SEQ ID NO: 32182 - DNA, 18 bp, Artificial Sequence
  Synthetic
cttggcaggaatggagtc

SEQ ID NO: 32183 - DNA, 23 bp, Artificial Sequence
  Synthetic
acagtaatttctggttgatcaat

SEQ ID NO: 32184 - DNA, 23 bp, Artificial Sequence
  Synthetic
agtctggatttcttgttgaaact

SEQ ID NO: 32185 - DNA, 18 bp, Artificial Sequence
  Synthetic
ccttaggaactgcaacct

SEQ ID NO: 32186 - DNA, 25 bp, Artificial Sequence
  Synthetic
gatctccataaatatctttggtcat

SEQ ID NO: 32187 - DNA, 19 bp, Artificial Sequence
  Synthetic
ttcagcagacagtttctct

SEQ ID NO: 32188 - DNA, 18 bp, Artificial Sequence
  Synthetic
tttggcgcctttaggaac

SEQ ID NO: 32189 - DNA, 19 bp, Artificial Sequence
  Synthetic
tagttttccgttgtggctg

SEQ ID NO: 32190 - DNA, 19 bp, Artificial Sequence
  Synthetic
tttggttgtgttgtggttg

SEQ ID NO: 32191 - DNA, 22 bp, Artificial Sequence
  Synthetic
cactacagagacataagcattt

SEQ ID NO: 32192 - DNA, 19 bp, Artificial Sequence
  Synthetic
ctgtttatagctcccaggg

SEQ ID NO: 32193 - DNA, 21 bp, Artificial Sequence
  Synthetic
tttgtgtgcttttttgatccg

SEQ ID NO: 32194 - DNA, 21 bp, Artificial Sequence
  Synthetic
agatccattagaacacatcca

SEQ ID NO: 32195 - DNA, 25 bp, Artificial Sequence
  Synthetic
catggcaccttatatatttatgtct

SEQ ID NO: 32196 - DNA, 21 bp, Artificial Sequence
  Synthetic
gctgttccttctacagtttct

SEQ ID NO: 32197 - DNA, 18 bp, Artificial Sequence
  Synthetic
acaagctcttgcagttct

SEQ ID NO: 32198 - DNA, 21 bp, Artificial Sequence
  Synthetic
gcttctaacgataaccaagca

SEQ ID NO: 32199 - DNA, 22 bp, Artificial Sequence
  Synthetic
ggggactgatatactttcgttt

SEQ ID NO: 32200 - DNA, 21 bp, Artificial Sequence
  Synthetic
gcctctttaaacttagccatt

SEQ ID NO: 32201 - DNA, 21 bp, Artificial Sequence
  Synthetic
ggaggctcacttaataattgc

SEQ ID NO: 32202 - DNA, 22 bp, Artificial Sequence
  Synthetic
ttttactagtctggcttgactg

SEQ ID NO: 32203 - DNA, 18 bp, Artificial Sequence
  Synthetic
cagtgcattgaaacgtgc

SEQ ID NO: 32204 - DNA, 19 bp, Artificial Sequence
  Synthetic
gctgatctttgaaggcttt

SEQ ID NO: 32205 - DNA, 20 bp, Artificial Sequence
  Synthetic
aggcttttcgttggtatcgt

SEQ ID NO: 32206 - DNA, 17 bp, Artificial Sequence
  Synthetic
aagcagtccctcctcgg

SEQ ID NO: 32207 - DNA, 20 bp, Artificial Sequence
  Synthetic
atgaattgttgtctgtgctc

SEQ ID NO: 32208 - DNA, 24 bp, Artificial Sequence
  Synthetic
gctccactttattaattacatctg

SEQ ID NO: 32209 - DNA, 20 bp, Artificial Sequence
  Synthetic
tgacaatactgggtgctgtg

SEQ ID NO: 32210 - DNA, 23 bp, Artificial Sequence
  Synthetic
cagaaataatttgaaaagctgga

SEQ ID NO: 32211 - DNA, 18 bp, Artificial Sequence
  Synthetic
agaaatgaacctgtgcgc

SEQ ID NO: 32212 - DNA, 23 bp, Artificial Sequence
  Synthetic
cctcatctaacagtaagtcttca

SEQ ID NO: 32213 - DNA, 18 bp, Artificial Sequence
  Synthetic
ggcccgatactgattacc

SEQ ID NO: 32214 - DNA, 19 bp, Artificial Sequence
  Synthetic
gtacctgtttggggtcaaa

SEQ ID NO: 32215 - DNA, 24 bp, Artificial Sequence
  Synthetic
cctattaaacaattgagcatctga

SEQ ID NO: 32216 - DNA, 20 bp, Artificial Sequence
  Synthetic
gtttttgcctagtggggaat

SEQ ID NO: 32217 - DNA, 18 bp, Artificial Sequence
  Synthetic
aacgaggcaaactttcct

SEQ ID NO: 32218 - DNA, 19 bp, Artificial Sequence
  Synthetic
cgtgcttgtcttaggagat

SEQ ID NO: 32219 - DNA, 25 bp, Artificial Sequence
  Synthetic
caaactattttttcttcttagcagg

SEQ ID NO: 32220 - DNA, 19 bp, Artificial Sequence
  Synthetic
ccggaatcatagcttacct

SEQ ID NO: 32221 - DNA, 18 bp, Artificial Sequence
  Synthetic
caataccaacacccccac

SEQ ID NO: 32222 - DNA, 18 bp, Artificial Sequence
  Synthetic
tcttaatgcactgcgtgt

SEQ ID NO: 32223 - DNA, 22 bp, Artificial Sequence
  Synthetic
cggctacttagaaaatcatcga

SEQ ID NO: 32224 - DNA, 20 bp, Artificial Sequence
  Synthetic
tttctgcttgttgtgcataa

SEQ ID NO: 32225 - DNA, 18 bp, Artificial Sequence
  Synthetic
tagctctcgaatcgcttg

SEQ ID NO: 32226 - DNA, 18 bp, Artificial Sequence
  Synthetic
aaatccttgcagagctcc

SEQ ID NO: 32227 - DNA, 18 bp, Artificial Sequence
  Synthetic
tcatagctgcagccaatt

SEQ ID NO: 32228 - DNA, 22 bp, Artificial Sequence
  Synthetic
ccacaataaaggatctagctct

SEQ ID NO: 32229 - DNA, 21 bp, Artificial Sequence
  Synthetic
agggactttagatccttttgc

SEQ ID NO: 32230 - DNA, 20 bp, Artificial Sequence
  Synthetic
gtcatcaagacctgatcctt

SEQ ID NO: 32231 - DNA, 21 bp, Artificial Sequence
  Synthetic
gtcaaattgcattacaacgaa

SEQ ID NO: 32232 - DNA, 21 bp, Artificial Sequence
  Synthetic
aatgcgactaattttcacagc

SEQ ID NO: 32233 - DNA, 22 bp, Artificial Sequence
  Synthetic
gctaaacagtaatctcctccat

SEQ ID NO: 32234 - DNA, 18 bp, Artificial Sequence
  Synthetic
tcaaaaggaagcattcgc

SEQ ID NO: 32235 - DNA, 20 bp, Artificial Sequence
  Synthetic
ttactcgtttagcctcttca

SEQ ID NO: 32236 - DNA, 18 bp, Artificial Sequence
  Synthetic
atccggttttgcaaatgg

SEQ ID NO: 32237 - DNA, 20 bp, Artificial Sequence
  Synthetic
accacagaggaatctcaaac

SEQ ID NO: 32238 - DNA, 18 bp, Artificial Sequence
  Synthetic
aatgggacgagctgctag

SEQ ID NO: 32239 - DNA, 19 bp, Artificial Sequence
  Synthetic
gttaccggattgcatcact

SEQ ID NO: 32240 - DNA, 18 bp, Artificial Sequence
  Synthetic
agctaaagtgatggcctc

SEQ ID NO: 32241 - DNA, 21 bp, Artificial Sequence
  Synthetic
gctctactaatgagaaagcca

SEQ ID NO: 32242 - DNA, 18 bp, Artificial Sequence
  Synthetic
atacttgcggtctggcta

SEQ ID NO: 32243 - DNA, 19 bp, Artificial Sequence
  Synthetic
gagttgaactgaggcaaga

SEQ ID NO: 32244 - DNA, 18 bp, Artificial Sequence
  Synthetic
gtagggaagacaagcctc

SEQ ID NO: 32245 - DNA, 23 bp, Artificial Sequence
  Synthetic
gggaactttatgaatcaggaaat

SEQ ID NO: 32246 - DNA, 23 bp, Artificial Sequence
  Synthetic
ggtttcctgtagaaaattttccg

SEQ ID NO: 32247 - DNA, 21 bp, Artificial Sequence
  Synthetic
aaggaatccatagataggtcc

SEQ ID NO: 32248 - DNA, 18 bp, Artificial Sequence
  Synthetic
gaacagccagtgacaaag

SEQ ID NO: 32249 - DNA, 18 bp, Artificial Sequence
  Synthetic
accgccatttatgaagcc

SEQ ID NO: 32250 - DNA, 18 bp, Artificial Sequence
  Synthetic
cctaacgtgacagagtcg

SEQ ID NO: 32251 - DNA, 18 bp, Artificial Sequence
  Synthetic
tggccctttgtaatgtgc

SEQ ID NO: 32252 - DNA, 19 bp, Artificial Sequence
  Synthetic
tcgaggagatgtacttgga

SEQ ID NO: 32253 - DNA, 18 bp, Artificial Sequence
  Synthetic
gtcgctcaggatgtcatt

SEQ ID NO: 32254 - DNA, 19 bp, Artificial Sequence
  Synthetic
gccctatggtagtagatgc

SEQ ID NO: 32255 - DNA, 20 bp, Artificial Sequence
  Synthetic
aagagtgatcagcaaattcg

SEQ ID NO: 32256 - DNA, 20 bp, Artificial Sequence
  Synthetic
tgctgtttacgttttgcaaa

SEQ ID NO: 32257 - DNA, 25 bp, Artificial Sequence
  Synthetic
gtcttagagatactaaagaaacgat

SEQ ID NO: 32258 - DNA, 20 bp, Artificial Sequence
  Synthetic
ttcaataactcgtgttggac

SEQ ID NO: 32259 - DNA, 22 bp, Artificial Sequence
  Synthetic
aattctctgaagataaagaggc

SEQ ID NO: 32260 - DNA, 20 bp, Artificial Sequence
  Synthetic
atttcaagaatgtcggcaat

SEQ ID NO: 32261 - DNA, 20 bp, Artificial Sequence
  Synthetic
tatcaccagaaatcggagaa

SEQ ID NO: 32262 - DNA, 19 bp, Artificial Sequence
  Synthetic
aaggttgttttgccagatc

SEQ ID NO: 32263 - DNA, 21 bp, Artificial Sequence
  Synthetic
tttctttgaagggctttttgg

SEQ ID NO: 32264 - DNA, 18 bp, Artificial Sequence
  Synthetic
ggctgttgtccatatgcg

SEQ ID NO: 32265 - DNA, 22 bp, Artificial Sequence
  Synthetic
attttcttttgtacctgcagta

SEQ ID NO: 32266 - DNA, 21 bp, Artificial Sequence
  Synthetic
cctcagactataacaaaggct

SEQ ID NO: 32267 - DNA, 20 bp, Artificial Sequence
  Synthetic
tgaaaaaaagcataggcctt

SEQ ID NO: 32268 - DNA, 20 bp, Artificial Sequence
  Synthetic
gttgtattaggggttgcatt

SEQ ID NO: 32269 - DNA, 20 bp, Artificial Sequence
  Synthetic
aaacgatctgaaagaaggtg

SEQ ID NO: 32270 - DNA, 19 bp, Artificial Sequence
  Synthetic
ggtttgggagagatgagat

SEQ ID NO: 32271 - DNA, 19 bp, Artificial Sequence
  Synthetic
cctttattacagcgtgtgc

SEQ ID NO: 32272 - DNA, 21 bp, Artificial Sequence
  Synthetic
tctgcaggtagaaatcatgaa

SEQ ID NO: 32273 - DNA, 19 bp, Artificial Sequence
  Synthetic
ttgcgagagaagttctgtt

SEQ ID NO: 32274 - DNA, 22 bp, Artificial Sequence
  Synthetic
gggaactacaaaaaagatagcc

SEQ ID NO: 32275 - DNA, 20 bp, Artificial Sequence
  Synthetic
ggtagtcagaaaggaatccc

SEQ ID NO: 32276 - DNA, 21 bp, Artificial Sequence
  Synthetic
ttagaggtacgctttgcttta

SEQ ID NO: 32277 - DNA, 18 bp, Artificial Sequence
  Synthetic
atatcgttgttggcggga

SEQ ID NO: 32278 - DNA, 21 bp, Artificial Sequence
  Synthetic
tatcccatttcccataggtgt

SEQ ID NO: 32279 - DNA, 19 bp, Artificial Sequence
  Synthetic
cttggccagagaagttctc

SEQ ID NO: 32280 - DNA, 19 bp, Artificial Sequence
  Synthetic
tgtgggccttaaaagcaat

SEQ ID NO: 32281 - DNA, 20 bp, Artificial Sequence
  Synthetic
cggataaggcaatgaaacga

SEQ ID NO: 32282 - DNA, 19 bp, Artificial Sequence
  Synthetic
atacgttaagcagtctggt

SEQ ID NO: 32283 - DNA, 21 bp, Artificial Sequence
  Synthetic
aaaagcaagaaaaaaccacag

SEQ ID NO: 32284 - DNA, 22 bp, Artificial Sequence
  Synthetic
aacaaaacgtctaagtcaagaa

SEQ ID NO: 32285 - DNA, 18 bp, Artificial Sequence
  Synthetic
ttcggtgatccatgagac

SEQ ID NO: 32286 - DNA, 19 bp, Artificial Sequence
  Synthetic
ttcagctccaaatggtctt

SEQ ID NO: 32287 - DNA, 18 bp, Artificial Sequence
  Synthetic
cggatcagcgaacgattt

SEQ ID NO: 32288 - DNA, 19 bp, Artificial Sequence
  Synthetic
atacgctggtgaaagatgt

SEQ ID NO: 32289 - DNA, 22 bp, Artificial Sequence
  Synthetic
cggaatttctgtgatttcatct

SEQ ID NO: 32290 - DNA, 20 bp, Artificial Sequence
  Synthetic
tcaaaagtcctgaacgtact

SEQ ID NO: 32291 - DNA, 19 bp, Artificial Sequence
  Synthetic
gtttcttgcccaccttagt

SEQ ID NO: 32292 - DNA, 21 bp, Artificial Sequence
  Synthetic
gttcatgacaggatttcttca

SEQ ID NO: 32293 - DNA, 18 bp, Artificial Sequence
  Synthetic
aagggagatgtaggtcgg

SEQ ID NO: 32294 - DNA, 18 bp, Artificial Sequence
  Synthetic
taagggagcaacgtttgt

SEQ ID NO: 32295 - DNA, 18 bp, Artificial Sequence
  Synthetic
tgtaatggatgcaggtgc

SEQ ID NO: 32296 - DNA, 19 bp, Artificial Sequence
  Synthetic
gcaggattgatgagaaacc

SEQ ID NO: 32297 - DNA, 20 bp, Artificial Sequence
  Synthetic
agggattatgagtagatcgc

SEQ ID NO: 32298 - DNA, 18 bp, Artificial Sequence
  Synthetic
agaggacgatcggaagtt

SEQ ID NO: 32299 - DNA, 18 bp, Artificial Sequence
  Synthetic
actttcgttgcggtagac

SEQ ID NO: 32300 - DNA, 19 bp, Artificial Sequence
  Synthetic
gagcaagtaatcgcacatc

SEQ ID NO: 32301 - DNA, 19 bp, Artificial Sequence
  Synthetic
aagagggagagagatggat

SEQ ID NO: 32302 - DNA, 18 bp, Artificial Sequence
  Synthetic
aacagaaagccgatgagt

SEQ ID NO: 32303 - DNA, 19 bp, Artificial Sequence
  Synthetic
gtcggagggttatttgttg

SEQ ID NO: 32304 - DNA, 24 bp, Artificial Sequence
  Synthetic
tctttaagaactttatattccggc

SEQ ID NO: 32305 - DNA, 19 bp, Artificial Sequence
  Synthetic
ccaagaattctccttgcgt

SEQ ID NO: 32306 - DNA, 18 bp, Artificial Sequence
  Synthetic
tttagctgggcgaatctc

SEQ ID NO: 32307 - DNA, 19 bp, Artificial Sequence
  Synthetic
agcttctgcagtttctgta

SEQ ID NO: 32308 - DNA, 23 bp, Artificial Sequence
  Synthetic
tcagaaaataaagaacgatggtt

SEQ ID NO: 32309 - DNA, 21 bp, Artificial Sequence
  Synthetic
ttctaaagagatagaaacgcg

SEQ ID NO: 32310 - DNA, 18 bp, Artificial Sequence
  Synthetic
cggcttcttcgatagtcg

SEQ ID NO: 32311 - DNA, 21 bp, Artificial Sequence
  Synthetic
cgatgtttttgtgtacgatgt

SEQ ID NO: 32312 - DNA, 20 bp, Artificial Sequence
  Synthetic
caagacctaccagaaagact

SEQ ID NO: 32313 - DNA, 22 bp, Artificial Sequence
  Synthetic
atacgagagactattgaaaagc

SEQ ID NO: 32314 - DNA, 19 bp, Artificial Sequence
  Synthetic
cccaaagcagataggaagc

SEQ ID NO: 32315 - DNA, 21 bp, Artificial Sequence
  Synthetic
atttgcatttccagttggtag

SEQ ID NO: 32316 - DNA, 18 bp, Artificial Sequence
  Synthetic
tactgaaccctgccatga

SEQ ID NO: 32317 - DNA, 18 bp, Artificial Sequence
  Synthetic
tctcttgcggttttcgtt

SEQ ID NO: 32318 - DNA, 18 bp, Artificial Sequence
  Synthetic
atgtgatatgtggctcgc

SEQ ID NO: 32319 - DNA, 20 bp, Artificial Sequence
  Synthetic
gttacagtctgtgtttgcac

SEQ ID NO: 32320 - DNA, 18 bp, Artificial Sequence
  Synthetic
gacttcgaaccctccttt

SEQ ID NO: 32321 - DNA, 18 bp, Artificial Sequence
  Synthetic
tctttcgccgtaagaacc

SEQ ID NO: 32322 - DNA, 21 bp, Artificial Sequence
  Synthetic
gatgaagagctttctttctcg

SEQ ID NO: 32323 - DNA, 19 bp, Artificial Sequence
  Synthetic
accgcttcttatcttcgat

SEQ ID NO: 32324 - DNA, 18 bp, Artificial Sequence
  Synthetic
aatcaccatggctccttc

SEQ ID NO: 32325 - DNA, 18 bp, Artificial Sequence
  Synthetic
ggaaagcacttcgttagc

SEQ ID NO: 32326 - DNA, 20 bp, Artificial Sequence
  Synthetic
ttcctttctccttgggaaat

SEQ ID NO: 32327 - DNA, 20 bp, Artificial Sequence
  Synthetic
atacactaccaggtcctagt

SEQ ID NO: 32328 - DNA, 19 bp, Artificial Sequence
  Synthetic
caaaaaagagcaccgagaa

SEQ ID NO: 32329 - DNA, 20 bp, Artificial Sequence
  Synthetic
gtctgattgtcaatgtgctt

SEQ ID NO: 32330 - DNA, 21 bp, Artificial Sequence
  Synthetic
ccttagggatatacacgaacg

SEQ ID NO: 32331 - DNA, 21 bp, Artificial Sequence
  Synthetic
tctagctcttccataagatgc

SEQ ID NO: 32332 - DNA, 21 bp, Artificial Sequence
  Synthetic
ttttgccgtatagaacaccaa

SEQ ID NO: 32333 - DNA, 21 bp, Artificial Sequence
  Synthetic
cgagagaaacagttacggaat

SEQ ID NO: 32334 - DNA, 18 bp, Artificial Sequence
  Synthetic
gacatgttgaggccagtt

SEQ ID NO: 32335 - DNA, 18 bp, Artificial Sequence
  Synthetic
aattgcatgacccagtcc

SEQ ID NO: 32336 - DNA, 20 bp, Artificial Sequence
  Synthetic
agttctccatccaaatagct

SEQ ID NO: 32337 - DNA, 19 bp, Artificial Sequence
  Synthetic
cacagcaataatggtctgc

SEQ ID NO: 32338 - DNA, 20 bp, Artificial Sequence
  Synthetic
ttgaacgacgtgtaatcttg

SEQ ID NO: 32339 - DNA, 20 bp, Artificial Sequence
  Synthetic
ggactgaaacaatactaccg

SEQ ID NO: 32340 - DNA, 19 bp, Artificial Sequence
  Synthetic
ccggcaaaaatgatctcat

SEQ ID NO: 32341 - DNA, 22 bp, Artificial Sequence
  Synthetic
tctgtagttatggataagacgg

SEQ ID NO: 32342 - DNA, 20 bp, Artificial Sequence
  Synthetic
acctatcacacaaccattct

SEQ ID NO: 32343 - DNA, 22 bp, Artificial Sequence
  Synthetic
gattaggatttgatggctcttc

SEQ ID NO: 32344 - DNA, 19 bp, Artificial Sequence
  Synthetic
tcgaatgtaatacggcaga

SEQ ID NO: 32345 - DNA, 18 bp, Artificial Sequence
  Synthetic
ccttctcttgttcccacc

SEQ ID NO: 32346 - DNA, 18 bp, Artificial Sequence
  Synthetic
acgccagatcagcttaaa

SEQ ID NO: 32347 - DNA, 20 bp, Artificial Sequence
  Synthetic
atcctacaactctctcctcc

SEQ ID NO: 32348 - DNA, 18 bp, Artificial Sequence
  Synthetic
gtcttatcgacacacccg

SEQ ID NO: 32349 - DNA, 22 bp, Artificial Sequence
  Synthetic
aaagagcatatactaacaggcg

SEQ ID NO: 32350 - DNA, 19 bp, Artificial Sequence
  Synthetic
ggaacagcatctaaagcag

SEQ ID NO: 32351 - DNA, 19 bp, Artificial Sequence
  Synthetic
tcataaacagcactgccaa

SEQ ID NO: 32352 - DNA, 20 bp, Artificial Sequence
  Synthetic
actctacaatagctctgctc

SEQ ID NO: 32353 - DNA, 22 bp, Artificial Sequence
  Synthetic
cccaatagctaaggtaacaatc

SEQ ID NO: 32354 - DNA, 23 bp, Artificial Sequence
  Synthetic
gatcgttttgtagaggaaactac

SEQ ID NO: 32355 - DNA, 20 bp, Artificial Sequence
  Synthetic
ggcacatacgaagaaatcct

SEQ ID NO: 32356 - DNA, 19 bp, Artificial Sequence
  Synthetic
ctatccgcaactcatggaa

SEQ ID NO: 32357 - DNA, 21 bp, Artificial Sequence
  Synthetic
gcgaagagaaagtatcgtaga

SEQ ID NO: 32358 - DNA, 19 bp, Artificial Sequence
  Synthetic
gagatgtccaagaagcact

SEQ ID NO: 32359 - DNA, 22 bp, Artificial Sequence
  Synthetic
ccaagtagtgatacaaagaggg

SEQ ID NO: 32360 - DNA, 20 bp, Artificial Sequence
  Synthetic
aataggaagagacaaccctg

SEQ ID NO: 32361 - DNA, 18 bp, Artificial Sequence
  Synthetic
atcgctaatcctgcacca

SEQ ID NO: 32362 - DNA, 22 bp, Artificial Sequence
  Synthetic
gggtaagtctaaaaattggctc

SEQ ID NO: 32363 - DNA, 23 bp, Artificial Sequence
  Synthetic
tctacttcttttccattgtaagc

SEQ ID NO: 32364 - DNA, 18 bp, Artificial Sequence
  Synthetic
gatccacgacttcctgga

SEQ ID NO: 32365 - DNA, 22 bp, Artificial Sequence
  Synthetic
cacaacttctttaactacctga

SEQ ID NO: 32366 - DNA, 20 bp, Artificial Sequence
  Synthetic
gttcagcattcagacgatag

SEQ ID NO: 32367 - DNA, 18 bp, Artificial Sequence
  Synthetic
agaatgctgcttatgcct

SEQ ID NO: 32368 - DNA, 18 bp, Artificial Sequence
  Synthetic
tacgcccccctaaactag

SEQ ID NO: 32369 - DNA, 18 bp, Artificial Sequence
  Synthetic
ctcccaggaaaagaaggg

SEQ ID NO: 32370 - DNA, 18 bp, Artificial Sequence
  Synthetic
agctaaacaagggcgtag

SEQ ID NO: 32371 - DNA, 21 bp, Artificial Sequence
  Synthetic
aaaacatttaaccaactccct

SEQ ID NO: 32372 - DNA, 19 bp, Artificial Sequence
  Synthetic
actcactacccaagtcagt

SEQ ID NO: 32373 - DNA, 18 bp, Artificial Sequence
  Synthetic
ttggcaatggctcaccta

SEQ ID NO: 32374 - DNA, 19 bp, Artificial Sequence
  Synthetic
ccatctgtaaagcttcgct

SEQ ID NO: 32375 - DNA, 21 bp, Artificial Sequence
  Synthetic
accagttcctttatctccatc

SEQ ID NO: 32376 - DNA, 18 bp, Artificial Sequence
  Synthetic
caagagactcggggagtg

SEQ ID NO: 32377 - DNA, 18 bp, Artificial Sequence
  Synthetic
ggttagcgcattaacagc

SEQ ID NO: 32378 - DNA, 20 bp, Artificial Sequence
  Synthetic
tggagagtagaatagcgaac

SEQ ID NO: 32379 - DNA, 20 bp, Artificial Sequence
  Synthetic
gattttgggattctctagcg

SEQ ID NO: 32380 - DNA, 22 bp, Artificial Sequence
  Synthetic
tcttggtgttattttacccatt

SEQ ID NO: 32381 - DNA, 21 bp, Artificial Sequence
  Synthetic
ccatcattagcgatattccct

SEQ ID NO: 32382 - DNA, 18 bp, Artificial Sequence
  Synthetic
cgcggtcatgatagaaga

SEQ ID NO: 32383 - DNA, 19 bp, Artificial Sequence
  Synthetic
cacaatcggtaatcccact

SEQ ID NO: 32384 - DNA, 22 bp, Artificial Sequence
  Synthetic
cggtaaaaatcacagatccatt

SEQ ID NO: 32385 - DNA, 18 bp, Artificial Sequence
  Synthetic
gcctgtgatatcgcttct

SEQ ID NO: 32386 - DNA, 21 bp, Artificial Sequence
  Synthetic
tagggatctctctctaagact

SEQ ID NO: 32387 - DNA, 24 bp, Artificial Sequence
  Synthetic
attctctctattgttaagctgttc

SEQ ID NO: 32388 - DNA, 18 bp, Artificial Sequence
  Synthetic
gtgcgaacaagagctctt

SEQ ID NO: 32389 - DNA, 18 bp, Artificial Sequence
  Synthetic
ctttgtgcagctgtttga

SEQ ID NO: 32390 - DNA, 18 bp, Artificial Sequence
  Synthetic
gcacagaaaatgcaggtt

SEQ ID NO: 32391 - DNA, 23 bp, Artificial Sequence
  Synthetic
taatggttccattggaatgtttg

SEQ ID NO: 32392 - DNA, 21 bp, Artificial Sequence
  Synthetic
acagtaaagcaagaaccattt

SEQ ID NO: 32393 - DNA, 23 bp, Artificial Sequence
  Synthetic
actgcatatgtatcctatctgat

SEQ ID NO: 32394 - DNA, 21 bp, Artificial Sequence
  Synthetic
cctgaccactcatttattcct

SEQ ID NO: 32395 - DNA, 21 bp, Artificial Sequence
  Synthetic
gctctatgctgacaaaatgac

SEQ ID NO: 32396 - DNA, 20 bp, Artificial Sequence
  Synthetic
agccaatccatgtactttga

SEQ ID NO: 32397 - DNA, 23 bp, Artificial Sequence
  Synthetic
cagttcataaatgtttttctgga

SEQ ID NO: 32398 - DNA, 18 bp, Artificial Sequence
  Synthetic
gggttggaagtgtgaaga

SEQ ID NO: 32399 - DNA, 23 bp, Artificial Sequence
  Synthetic
gcttcttactgaatatcttccag

SEQ ID NO: 32400 - DNA, 21 bp, Artificial Sequence
  Synthetic
aatttgggaggaaggaggtat

SEQ ID NO: 32401 - DNA, 21 bp, Artificial Sequence
  Synthetic
ttctacttccaagcagatagc

SEQ ID NO: 32402 - DNA, 23 bp, Artificial Sequence
  Synthetic
gctctatttgttatttctgaagc

SEQ ID NO: 32403 - DNA, 18 bp, Artificial Sequence
  Synthetic
ccagagatcaccaaagct

SEQ ID NO: 32404 - DNA, 19 bp, Artificial Sequence
  Synthetic
aatctgttcacaagtggca

SEQ ID NO: 32405 - DNA, 19 bp, Artificial Sequence
  Synthetic
gcatctgcactcccattcg

SEQ ID NO: 32406 - DNA, 23 bp, Artificial Sequence
  Synthetic
cctcacaaaaattacaatgcaat

SEQ ID NO: 32407 - DNA, 21 bp, Artificial Sequence
  Synthetic
cacacgaggaaactatcttgt

SEQ ID NO: 32408 - DNA, 18 bp, Artificial Sequence
  Synthetic
ctcctctctctcctgcag

SEQ ID NO: 32409 - DNA, 18 bp, Artificial Sequence
  Synthetic
ttttgaccccggtacctc

SEQ ID NO: 32410 - DNA, 23 bp, Artificial Sequence
  Synthetic
ctacttaaatcaaattgctgtgt

SEQ ID NO: 32411 - DNA, 18 bp, Artificial Sequence
  Synthetic
aacacctgctcctgtctt

SEQ ID NO: 32412 - DNA, 19 bp, Artificial Sequence
  Synthetic
ggtccctttcttcttcgga

SEQ ID NO: 32413 - DNA, 18 bp, Artificial Sequence
  Synthetic
tgactgtgaggagggtcc

SEQ ID NO: 32414 - DNA, 19 bp, Artificial Sequence
  Synthetic
cttcccacttgctcaggtg

SEQ ID NO: 32415 - DNA, 22 bp, Artificial Sequence
  Synthetic
cgccctttggtaatttcataat

SEQ ID NO: 32416 - DNA, 22 bp, Artificial Sequence
  Synthetic
gttgactctgttaaaggtatga

SEQ ID NO: 32417 - DNA, 22 bp, Artificial Sequence
  Synthetic
ggttgagtatcaatactgctaa

SEQ ID NO: 32418 - DNA, 22 bp, Artificial Sequence
  Synthetic
cctttgaacaaattcatccgta

SEQ ID NO: 32419 - DNA, 19 bp, Artificial Sequence
  Synthetic
gcctttccttgtctggatt

SEQ ID NO: 32420 - DNA, 22 bp, Artificial Sequence
  Synthetic
tccatcagagataacagtgttt

SEQ ID NO: 32421 - DNA, 22 bp, Artificial Sequence
  Synthetic
gtcttcatttacaactgcatct

SEQ ID NO: 32422 - DNA, 24 bp, Artificial Sequence
  Synthetic
gtattcctggtattatcacaaact

SEQ ID NO: 32423 - DNA, 20 bp, Artificial Sequence
  Synthetic
ccgtatttgttgatcttcga

SEQ ID NO: 32424 - DNA, 19 bp, Artificial Sequence
  Synthetic
acatacctaagggggttgt

SEQ ID NO: 32425 - DNA, 18 bp, Artificial Sequence
  Synthetic
aaacatgtccaaaaccgc

SEQ ID NO: 32426 - DNA, 23 bp, Artificial Sequence
  Synthetic
cacaggttcttttataacaacag

SEQ ID NO: 32427 - DNA, 18 bp, Artificial Sequence
  Synthetic
aggcaaaacacctgaaga

SEQ ID NO: 32428 - DNA, 23 bp, Artificial Sequence
  Synthetic
cgccgcatattaaaataatcaat

SEQ ID NO: 32429 - DNA, 23 bp, Artificial Sequence
  Synthetic
tcataaacatctaatggcaattg

SEQ ID NO: 32430 - DNA, 18 bp, Artificial Sequence
  Synthetic
atgtaacacgccttccag

SEQ ID NO: 32431 - DNA, 21 bp, Artificial Sequence
  Synthetic
catcatccaaagtgtcctcta

SEQ ID NO: 32432 - DNA, 23 bp, Artificial Sequence
  Synthetic
tcacatttaatgcatttccagta

SEQ ID NO: 32433 - DNA, 23 bp, Artificial Sequence
  Synthetic
acagtcatagttgttaagatgtt

SEQ ID NO: 32434 - DNA, 19 bp, Artificial Sequence
  Synthetic
gttcgtgcatcatcatcaa

SEQ ID NO: 32435 - DNA, 22 bp, Artificial Sequence
  Synthetic
acagcctttaaatcttcactag

SEQ ID NO: 32436 - DNA, 18 bp, Artificial Sequence
  Synthetic
cacctttggccaaaacca

SEQ ID NO: 32437 - DNA, 21 bp, Artificial Sequence
  Synthetic
tggtacatcaaatcgtacaca

SEQ ID NO: 32438 - DNA, 25 bp, Artificial Sequence
  Synthetic
ccactcagtaatcttatattcaaca

SEQ ID NO: 32439 - DNA, 23 bp, Artificial Sequence
  Synthetic
atgacactatcttcaaccttaaa

SEQ ID NO: 32440 - DNA, 21 bp, Artificial Sequence
  Synthetic
caacatgcctaaacaagctaa

SEQ ID NO: 32441 - DNA, 20 bp, Artificial Sequence
  Synthetic
cgcatagaacaaccaacttg

SEQ ID NO: 32442 - DNA, 19 bp, Artificial Sequence
  Synthetic
gcaccccctttaagactaa

SEQ ID NO: 32443 - DNA, 18 bp, Artificial Sequence
  Synthetic
cagaggaaagcacacagc

SEQ ID NO: 32444 - DNA, 18 bp, Artificial Sequence
  Synthetic
aagcacccaagaaccatt

SEQ ID NO: 32445 - DNA, 21 bp, Artificial Sequence
  Synthetic
cttgaaacacaaaaagcatca

SEQ ID NO: 32446 - DNA, 21 bp, Artificial Sequence
  Synthetic
caacacatggttctaccttag

SEQ ID NO: 32447 - DNA, 21 bp, Artificial Sequence
  Synthetic
gtaccagtatgacaaccagta

SEQ ID NO: 32448 - DNA, 21 bp, Artificial Sequence
  Synthetic
cataatctgacgtccttggaa

SEQ ID NO: 32449 - DNA, 22 bp, Artificial Sequence
  Synthetic
tgccataaataacttcatcagt

SEQ ID NO: 32450 - DNA, 19 bp, Artificial Sequence
  Synthetic
aagccccaataacagctaa

SEQ ID NO: 32451 - DNA, 20 bp, Artificial Sequence
  Synthetic
agtgctacaataatgccaca

SEQ ID NO: 32452 - DNA, 24 bp, Artificial Sequence
  Synthetic
cgttcataagcagatttagcaata

SEQ ID NO: 32453 - DNA, 20 bp, Artificial Sequence
  Synthetic
actagtggccagttacaatc

SEQ ID NO: 32454 - DNA, 18 bp, Artificial Sequence
  Synthetic
ggtgttcctccttgttgt

SEQ ID NO: 32455 - DNA, 19 bp, Artificial Sequence
  Synthetic
tccacaaactcgacaaaca

SEQ ID NO: 32456 - DNA, 20 bp, Artificial Sequence
  Synthetic
gtgttcagccacaaacttac

SEQ ID NO: 32457 - DNA, 19 bp, Artificial Sequence
  Synthetic
ccaatgcatgacacatggt

SEQ ID NO: 32458 - DNA, 21 bp, Artificial Sequence
  Synthetic
tgaaattttacaccgcttgtt

SEQ ID NO: 32459 - DNA, 18 bp, Artificial Sequence
  Synthetic
gttggcaggacattacgc

SEQ ID NO: 32460 - DNA, 18 bp, Artificial Sequence
  Synthetic
agcacgatcacacttagg

SEQ ID NO: 32461 - DNA, 24 bp, Artificial Sequence
  Synthetic
cgcataatcagaattataacacac

SEQ ID NO: 32462 - DNA, 25 bp, Artificial Sequence
  Synthetic
cgttctattaaaagaacactatcag

SEQ ID NO: 32463 - DNA, 18 bp, Artificial Sequence
  Synthetic
cttgcagcaaagaagagg

SEQ ID NO: 32464 - DNA, 20 bp, Artificial Sequence
  Synthetic
cgctcactaacaatctcttg

SEQ ID NO: 32465 - DNA, 23 bp, Artificial Sequence
  Synthetic
caatagaatacagcaagaccaat

SEQ ID NO: 32466 - DNA, 25 bp, Artificial Sequence
  Synthetic
gagcattaataacagaaagctcata

SEQ ID NO: 32467 - DNA, 23 bp, Artificial Sequence
  Synthetic
tgaagcgattaacatttacagaa

SEQ ID NO: 32468 - DNA, 18 bp, Artificial Sequence
  Synthetic
ataccaagacacacggct

SEQ ID NO: 32469 - DNA, 19 bp, Artificial Sequence
  Synthetic
atcaaagggatgaggtgct

SEQ ID NO: 32470 - DNA, 22 bp, Artificial Sequence
  Synthetic
ccaatatatccccactgttgaa

SEQ ID NO: 32471 - DNA, 18 bp, Artificial Sequence
  Synthetic
caactgcattcggtggat

SEQ ID NO: 32472 - DNA, 22 bp, Artificial Sequence
  Synthetic
gcatgttttaaacaaactgcac

SEQ ID NO: 32473 - DNA, 18 bp, Artificial Sequence
  Synthetic
gcttccaacacacgtcta

SEQ ID NO: 32474 - DNA, 23 bp, Artificial Sequence
  Synthetic
gcaaaataaaacacacaatcagt

SEQ ID NO: 32475 - DNA, 19 bp, Artificial Sequence
  Synthetic
gagtgtatgctggagtcat

SEQ ID NO: 32476 - DNA, 24 bp, Artificial Sequence
  Synthetic
cataactgagtatacttagcaaca

SEQ ID NO: 32477 - DNA, 18 bp, Artificial Sequence
  Synthetic
accttgggcttacacaaa

SEQ ID NO: 32478 - DNA, 20 bp, Artificial Sequence
  Synthetic
ttcctaggatgtgaggattc

SEQ ID NO: 32479 - DNA, 22 bp, Artificial Sequence
  Synthetic
tgtattcaaaacgaattcccat

SEQ ID NO: 32480 - DNA, 23 bp, Artificial Sequence
  Synthetic
gccatattcttataaacctgagt

SEQ ID NO: 32481 - DNA, 18 bp, Artificial Sequence
  Synthetic
tacggaggttgacaagca

SEQ ID NO: 32482 - DNA, 19 bp, Artificial Sequence
  Synthetic
tctttgcgatgattaccca

SEQ ID NO: 32483 - DNA, 25 bp, Artificial Sequence
  Synthetic
gtgttttacacttaatctcactcat

SEQ ID NO: 32484 - DNA, 21 bp, Artificial Sequence
  Synthetic
agttatgctggaaaaacacat

SEQ ID NO: 32485 - DNA, 21 bp, Artificial Sequence
  Synthetic
acgaaccattcaatttacacg

SEQ ID NO: 32486 - DNA, 25 bp, Artificial Sequence
  Synthetic
caaaaatattacacttgtctccttg

SEQ ID NO: 32487 - DNA, 23 bp, Artificial Sequence
  Synthetic
caacacaaccaagataactatca

SEQ ID NO: 32488 - DNA, 23 bp, Artificial Sequence
  Synthetic
gtagttcatttacttctgtgagt

SEQ ID NO: 32489 - DNA, 20 bp, Artificial Sequence
  Synthetic
ggaaatagactagcagaggt

SEQ ID NO: 32490 - DNA, 20 bp, Artificial Sequence
  Synthetic
ttggcttttgacacattcat

SEQ ID NO: 32491 - DNA, 18 bp, Artificial Sequence
  Synthetic
tcagcattacatacggcg

SEQ ID NO: 32492 - DNA, 21 bp, Artificial Sequence
  Synthetic
acatcctgtacaacagcatat

SEQ ID NO: 32493 - DNA, 23 bp, Artificial Sequence
  Synthetic
tgtgaaaccatttattactccaa

SEQ ID NO: 32494 - DNA, 20 bp, Artificial Sequence
  Synthetic
aaatctgccaaagaatagcc

SEQ ID NO: 32495 - DNA, 19 bp, Artificial Sequence
  Synthetic
ctacccctggtttgaacat

SEQ ID NO: 32496 - DNA, 18 bp, Artificial Sequence
  Synthetic
gccaggcggaaacctagt

SEQ ID NO: 32497 - DNA, 25 bp, Artificial Sequence
  Synthetic
gcttattcaaaattttctgtctgac

SEQ ID NO: 32498 - DNA, 22 bp, Artificial Sequence
  Synthetic
attcatcataccatcttgttgt

SEQ ID NO: 32499 - DNA, 23 bp, Artificial Sequence
  Synthetic
cattacaacacaaaactttcaac

SEQ ID NO: 32500 - DNA, 21 bp, Artificial Sequence
  Synthetic
cggtcaaaaatcacactgaaa

SEQ ID NO: 32501 - DNA, 18 bp, Artificial Sequence
  Synthetic
gttctcgccattttccgt

SEQ ID NO: 32502 - DNA, 20 bp, Artificial Sequence
  Synthetic
tccagaatccgctccactat

SEQ ID NO: 32503 - DNA, 23 bp, Artificial Sequence
  Synthetic
tcaagtcgattaaaaatcacact

SEQ ID NO: 32504 - DNA, 20 bp, Artificial Sequence
  Synthetic
tttctgttttggagggagtg

SEQ ID NO: 32505 - DNA, 18 bp, Artificial Sequence
  Synthetic
gctccaagaaaggacccg

SEQ ID NO: 32506 - DNA, 18 bp, Artificial Sequence
  Synthetic
ataggctgtcgtcgtccg

SEQ ID NO: 32507 - DNA, 20 bp, Artificial Sequence
  Synthetic
gcaagttccctgttgcgaaa

SEQ ID NO: 32508 - DNA, 19 bp, Artificial Sequence
  Synthetic
tatcacccacgtagagcgc

SEQ ID NO: 32509 - DNA, 20 bp, Artificial Sequence
  Synthetic
catggagtaataggccaggc

SEQ ID NO: 32510 - DNA, 20 bp, Artificial Sequence
  Synthetic
tggtgtgaagcagtacacag

SEQ ID NO: 32511 - DNA, 19 bp, Artificial Sequence
  Synthetic
cctcgcccccatagatgtt

SEQ ID NO: 32512 - DNA, 18 bp, Artificial Sequence
  Synthetic
gacctgttgacagcgcag

SEQ ID NO: 32513 - DNA, 18 bp, Artificial Sequence
  Synthetic
aggctgtaggtcaccagc

SEQ ID NO: 32514 - DNA, 18 bp, Artificial Sequence
  Synthetic
ccaacaacacctcacggc

SEQ ID NO: 32515 - DNA, 18 bp, Artificial Sequence
  Synthetic
aagagacttggcccctgg

SEQ ID NO: 32516 - DNA, 18 bp, Artificial Sequence
  Synthetic
atggagacctagcctgcg

SEQ ID NO: 32517 - DNA, 18 bp, Artificial Sequence
  Synthetic
acatcatatgcccccccg

SEQ ID NO: 32518 - DNA, 18 bp, Artificial Sequence
  Synthetic
tcgtaccatgagcagccc

SEQ ID NO: 32519 - DNA, 20 bp, Artificial Sequence
  Synthetic
gccgatatagaaggggcgta

SEQ ID NO: 32520 - DNA, 20 bp, Artificial Sequence
  Synthetic
gctgcagcaatccaaggatt

SEQ ID NO: 32521 - DNA, 19 bp, Artificial Sequence
  Synthetic
gaccctgcccaggcctata

SEQ ID NO: 32522 - DNA, 19 bp, Artificial Sequence
  Synthetic
catagtgcgtcggtgagac

SEQ ID NO: 32523 - DNA, 18 bp, Artificial Sequence
  Synthetic
acccgttcttcacatggc

SEQ ID NO: 32524 - DNA, 20 bp, Artificial Sequence
  Synthetic
ggaatgcaaccctaccatga

SEQ ID NO: 32525 - DNA, 18 bp, Artificial Sequence
  Synthetic
tgtctcagactccacccg

SEQ ID NO: 32526 - DNA, 18 bp, Artificial Sequence
  Synthetic
tggactgtgtgtcgaccc

SEQ ID NO: 32527 - DNA, 20 bp, Artificial Sequence
  Synthetic
accttcttctgacgctgaga

SEQ ID NO: 32528 - DNA, 18 bp, Artificial Sequence
  Synthetic
cccccaggtcagggtaca

SEQ ID NO: 32529 - DNA, 18 bp, Artificial Sequence
  Synthetic
agaactccactggcacgg

SEQ ID NO: 32530 - DNA, 20 bp, Artificial Sequence
  Synthetic
gttggaggagcaagatgtga

SEQ ID NO: 32531 - DNA, 21 bp, Artificial Sequence
  Synthetic
tcttgtctgctgtaattggat

SEQ ID NO: 32532 - DNA, 20 bp, Artificial Sequence
  Synthetic
ggatttatgtcaactctccg

SEQ ID NO: 32533 - DNA, 18 bp, Artificial Sequence
  Synthetic
gttttgcggaccagttct

SEQ ID NO: 32534 - DNA, 18 bp, Artificial Sequence
  Synthetic
ttgctcttctgttgggtt

SEQ ID NO: 32535 - DNA, 19 bp, Artificial Sequence
  Synthetic
ccactcactatcagctgaa

SEQ ID NO: 32536 - DNA, 18 bp, Artificial Sequence
  Synthetic
atgcttggagtcatgtcg

SEQ ID NO: 32537 - DNA, 24 bp, Artificial Sequence
  Synthetic
gaattttaacagtttcccagtttc

SEQ ID NO: 32538 - DNA, 20 bp, Artificial Sequence
  Synthetic
aaatgaggagaactgcattc

SEQ ID NO: 32539 - DNA, 20 bp, Artificial Sequence
  Synthetic
tccttgcccaattagcacat

SEQ ID NO: 32540 - DNA, 19 bp, Artificial Sequence
  Synthetic
agggtagtgccagcagtag

SEQ ID NO: 32541 - DNA, 18 bp, Artificial Sequence
  Synthetic
gtggcttccggatgcttg

SEQ ID NO: 32542 - DNA, 16 bp, Artificial Sequence
  Synthetic
gccggtggacaaggct

SEQ ID NO: 32543 - DNA, 15 bp, Artificial Sequence
  Synthetic
acgccagcaggagca

SEQ ID NO: 32544 - DNA, 20 bp, Artificial Sequence
  Synthetic
gccatttgcacgtaatgacc

SEQ ID NO: 32545 - DNA, 16 bp, Artificial Sequence
  Synthetic
attccgtcggctggcc

SEQ ID NO: 32546 - DNA, 18 bp, Artificial Sequence
  Synthetic
ggcgcacgggaatgacat

SEQ ID NO: 32547 - DNA, 16 bp, Artificial Sequence
  Synthetic
gctcttaccgctgccg

SEQ ID NO: 32548 - DNA, 18 bp, Artificial Sequence
  Synthetic
gagcacaaccagtctcgc

SEQ ID NO: 32549 - DNA, 19 bp, Artificial Sequence
  Synthetic
gccggtaaagccagtcatg

SEQ ID NO: 32550 - DNA, 19 bp, Artificial Sequence
  Synthetic
ggtgttcatgtacgctcgt

SEQ ID NO: 32551 - DNA, 18 bp, Artificial Sequence
  Synthetic
ctatgaccacgcagcctg

SEQ ID NO: 32552 - DNA, 18 bp, Artificial Sequence
  Synthetic
taccaggcagcgttgaca

SEQ ID NO: 32553 - DNA, 16 bp, Artificial Sequence
  Synthetic
acaagggctccaggcg

SEQ ID NO: 32554 - DNA, 17 bp, Artificial Sequence
  Synthetic
ccggagcatggagtggt

SEQ ID NO: 32555 - DNA, 18 bp, Artificial Sequence
  Synthetic
tgcagacaccctccacag

SEQ ID NO: 32556 - DNA, 17 bp, Artificial Sequence
  Synthetic
tcgccaaccttctcccg

SEQ ID NO: 32557 - DNA, 16 bp, Artificial Sequence
  Synthetic
aggtggtagcgggcag

SEQ ID NO: 32558 - DNA, 18 bp, Artificial Sequence
  Synthetic
cccactactgaccgtcga

SEQ ID NO: 32559 - DNA, 18 bp, Artificial Sequence
  Synthetic
gttgatgtgggctacggc

SEQ ID NO: 32560 - DNA, 19 bp, Artificial Sequence
  Synthetic
ccacgcttgcacgaggaat

SEQ ID NO: 32561 - DNA, 16 bp, Artificial Sequence
  Synthetic
tcgtcgccacacacga

SEQ ID NO: 32562 - DNA, 20 bp, Artificial Sequence
  Synthetic
cctggctatgaggacgctaa

SEQ ID NO: 32563 - DNA, 20 bp, Artificial Sequence
  Synthetic
gccgctattggagtgagttt

SEQ ID NO: 32564 - DNA, 23 bp, Artificial Sequence
  Synthetic
taattctctaagtgcaaatgctg

SEQ ID NO: 32565 - DNA, 18 bp, Artificial Sequence
  Synthetic
actacctctccagtaccc

SEQ ID NO: 32566 - DNA, 18 bp, Artificial Sequence
  Synthetic
cccttatatctgcgtggc

SEQ ID NO: 32567 - DNA, 19 bp, Artificial Sequence
  Synthetic
tggtcccgattccgtatcc

SEQ ID NO: 32568 - DNA, 18 bp, Artificial Sequence
  Synthetic
atctggctttccggtaca

SEQ ID NO: 32569 - DNA, 21 bp, Artificial Sequence
  Synthetic
ctaacagtcctattttggctt

SEQ ID NO: 32570 - DNA, 18 bp, Artificial Sequence
  Synthetic
agcattttgtcctggcac

SEQ ID NO: 32571 - DNA, 20 bp, Artificial Sequence
  Synthetic
catggtgaattactttgcct

SEQ ID NO: 32572 - DNA, 20 bp, Artificial Sequence
  Synthetic
cggggtgtgcacttctagtg

SEQ ID NO: 32573 - DNA, 21 bp, Artificial Sequence
  Synthetic
ctgtacaatacgtgtcacaat

SEQ ID NO: 32574 - DNA, 18 bp, Artificial Sequence
  Synthetic
gaacataccccgtgcgac

SEQ ID NO: 32575 - DNA, 19 bp, Artificial Sequence
  Synthetic
gaacttctacaagggacgg

SEQ ID NO: 32576 - DNA, 21 bp, Artificial Sequence
  Synthetic
tatccctctgtaaaagcaaca

SEQ ID NO: 32577 - DNA, 25 bp, Artificial Sequence
  Synthetic
acatctaccttattgttacttgact

SEQ ID NO: 32578 - DNA, 19 bp, Artificial Sequence
  Synthetic
tcttgcaaacagttgttcc

SEQ ID NO: 32579 - DNA, 20 bp, Artificial Sequence
  Synthetic
gtaatggctgaagaggacaa

SEQ ID NO: 32580 - DNA, 22 bp, Artificial Sequence
  Synthetic
caggatatagatcagcatgact

SEQ ID NO: 32581 - DNA, 18 bp, Artificial Sequence
  Synthetic
aatattccgtgcacaccg

SEQ ID NO: 32582 - DNA, 23 bp, Artificial Sequence
  Synthetic
ttgtatactttcgttttagctgt

SEQ ID NO: 32583 - DNA, 21 bp, Artificial Sequence
  Synthetic
tctgtcaccatttgtttcttg

SEQ ID NO: 32584 - DNA, 19 bp, Artificial Sequence
  Synthetic
ggggtgtctgttgggtaga

SEQ ID NO: 32585 - DNA, 20 bp, Artificial Sequence
  Synthetic
agcctccatctccaacactt

SEQ ID NO: 32586 - DNA, 20 bp, Artificial Sequence
  Synthetic
caaatcctccacctataggg

SEQ ID NO: 32587 - DNA, 21 bp, Artificial Sequence
  Synthetic
acatctggtaaaccttcactt

SEQ ID NO: 32588 - DNA, 20 bp, Artificial Sequence
  Synthetic
tgccaagatacctaacatcc

SEQ ID NO: 32589 - DNA, 21 bp, Artificial Sequence
  Synthetic
cgtttacgtttttgtaaagca

SEQ ID NO: 32590 - DNA, 20 bp, Artificial Sequence
  Synthetic
ttggaacagttagggcatta

SEQ ID NO: 32591 - DNA, 21 bp, Artificial Sequence
  Synthetic
ctgtgtttgtttaggatccat

SEQ ID NO: 32592 - DNA, 23 bp, Artificial Sequence
  Synthetic
agtcaggatatttacaagtttca

SEQ ID NO: 32593 - DNA, 25 bp, Artificial Sequence
  Synthetic
ggtctgttaaataattgattatcgg

SEQ ID NO: 32594 - DNA, 23 bp, Artificial Sequence
  Synthetic
cagccaatatagatgttatcgtc

SEQ ID NO: 32595 - DNA, 20 bp, Artificial Sequence
  Synthetic
gtattccaaggggattcgat

SEQ ID NO: 32596 - DNA, 20 bp, Artificial Sequence
  Synthetic
gcgggtttagtagtactctt

SEQ ID NO: 32597 - DNA, 18 bp, Artificial Sequence
  Synthetic
ctctgctgatgttgctcc

SEQ ID NO: 32598 - DNA, 21 bp, Artificial Sequence
  Synthetic
gctcttattatgtcacaggct

SEQ ID NO: 32599 - DNA, 19 bp, Artificial Sequence
  Synthetic
tcactccttggaacatcct

SEQ ID NO: 32600 - DNA, 22 bp, Artificial Sequence
  Synthetic
ttttgttactacaacccctttc

SEQ ID NO: 32601 - DNA, 20 bp, Artificial Sequence
  Synthetic
gaaactgagccttcaatgtt

SEQ ID NO: 32602 - DNA, 19 bp, Artificial Sequence
  Synthetic
ctcctttcagcataagcct

SEQ ID NO: 32603 - DNA, 25 bp, Artificial Sequence
  Synthetic
ggataaagcactatatcttttcctt

SEQ ID NO: 32604 - DNA, 19 bp, Artificial Sequence
  Synthetic
agaccgtatttgctggttt

SEQ ID NO: 32605 - DNA, 22 bp, Artificial Sequence
  Synthetic
ggctgttttagttagaacttct

SEQ ID NO: 32606 - DNA, 21 bp, Artificial Sequence
  Synthetic
ggtgtgacagaataaccatac

SEQ ID NO: 32607 - DNA, 19 bp, Artificial Sequence
  Synthetic
acggggaattaaaccatct

SEQ ID NO: 32608 - DNA, 20 bp, Artificial Sequence
  Synthetic
atcaaagacggaatctccat

SEQ ID NO: 32609 - DNA, 23 bp, Artificial Sequence
  Synthetic
agcagcagtttctttagaaaatt

SEQ ID NO: 32610 - DNA, 20 bp, Artificial Sequence
  Synthetic
agtagcatctgatggttcat

SEQ ID NO: 32611 - DNA, 19 bp, Artificial Sequence
  Synthetic
tggtaaggtgaaccacatt

SEQ ID NO: 32612 - DNA, 21 bp, Artificial Sequence
  Synthetic
accaaaagtttcacatccttt

SEQ ID NO: 32613 - DNA, 23 bp, Artificial Sequence
  Synthetic
gatgtttaacacaaaaaccagta

SEQ ID NO: 32614 - DNA, 20 bp, Artificial Sequence
  Synthetic
cacctaaatcagcagctaca

SEQ ID NO: 32615 - DNA, 21 bp, Artificial Sequence
  Synthetic
gcgttcttacaatacgtacaa

SEQ ID NO: 32616 - DNA, 25 bp, Artificial Sequence
  Synthetic
acctttaatagtataactactacgc

SEQ ID NO: 32617 - DNA, 21 bp, Artificial Sequence
  Synthetic
gcttttacttggctaaaacca

SEQ ID NO: 32618 - DNA, 24 bp, Artificial Sequence
  Synthetic
ccagaatagaatttaaagcctgat

SEQ ID NO: 32619 - DNA, 24 bp, Artificial Sequence
  Synthetic
aataggatcttttatacccaaagg

SEQ ID NO: 32620 - DNA, 23 bp, Artificial Sequence
  Synthetic
tcacaatctaatacatgacacat

SEQ ID NO: 32621 - DNA, 19 bp, Artificial Sequence
  Synthetic
ccacttgtaatggcagcta

SEQ ID NO: 32622 - DNA, 21 bp, Artificial Sequence
  Synthetic
agctgctatactcttcaaaca

SEQ ID NO: 32623 - DNA, 21 bp, Artificial Sequence
  Synthetic
cgccacacataactatttcac

SEQ ID NO: 32624 - DNA, 25 bp, Artificial Sequence
  Synthetic
gagtaccaagatcattatacagttt

SEQ ID NO: 32625 - DNA, 24 bp, Artificial Sequence
  Synthetic
ctctatcactaacaatctcttgaa

SEQ ID NO: 32626 - DNA, 24 bp, Artificial Sequence
  Synthetic
tgtagtaataaacagctagaccta

SEQ ID NO: 32627 - DNA, 18 bp, Artificial Sequence
  Synthetic
accaggaggagctttagc

SEQ ID NO: 32628 - DNA, 23 bp, Artificial Sequence
  Synthetic
tccaaaacatacataaaccatct

SEQ ID NO: 32629 - DNA, 22 bp, Artificial Sequence
  Synthetic
aagcctgctgtagtaactatat

SEQ ID NO: 32630 - DNA, 20 bp, Artificial Sequence
  Synthetic
agtaatggcttgagcatagg

SEQ ID NO: 32631 - DNA, 22 bp, Artificial Sequence
  Synthetic
tcgctaacaaatgggtttaaat

SEQ ID NO: 32632 - DNA, 21 bp, Artificial Sequence
  Synthetic
agggtcataagcagttatagg

SEQ ID NO: 32633 - DNA, 21 bp, Artificial Sequence
  Synthetic
ccacagactcaatactgtcat

SEQ ID NO: 32634 - DNA, 23 bp, Artificial Sequence
  Synthetic
agattgacttttaacacactcat

SEQ ID NO: 32635 - DNA, 20 bp, Artificial Sequence
  Synthetic
caaagtacttgcaccttagc

SEQ ID NO: 32636 - DNA, 21 bp, Artificial Sequence
  Synthetic
agtatttccttgtggttgagt

SEQ ID NO: 32637 - DNA, 22 bp, Artificial Sequence
  Synthetic
aagaataggaaactgaggatca

SEQ ID NO: 32638 - DNA, 22 bp, Artificial Sequence
  Synthetic
agcaacagagtcttctacataa

SEQ ID NO: 32639 - DNA, 23 bp, Artificial Sequence
  Synthetic
ggatcatcaagttctaccactat

SEQ ID NO: 32640 - DNA, 21 bp, Artificial Sequence
  Synthetic
tctaaaattctcaaggcagga

SEQ ID NO: 32641 - DNA, 19 bp, Artificial Sequence
  Synthetic
ctccttcatgacttgggtc

SEQ ID NO: 32642 - DNA, 18 bp, Artificial Sequence
  Synthetic
cgcttatgtctctgcagt

SEQ ID NO: 32643 - DNA, 18 bp, Artificial Sequence
  Synthetic
aaaatcgtccattgctgc

SEQ ID NO: 32644 - DNA, 21 bp, Artificial Sequence
  Synthetic
cctcacatacaagaacatagg

SEQ ID NO: 32645 - DNA, 22 bp, Artificial Sequence
  Synthetic
aaatccttccaattgtggtgat

SEQ ID NO: 32646 - DNA, 25 bp, Artificial Sequence
  Synthetic
ttctctctattgttatactgttctg

SEQ ID NO: 32647 - DNA, 18 bp, Artificial Sequence
  Synthetic
ctttgtgctgctgtttga

SEQ ID NO: 32648 - DNA, 20 bp, Artificial Sequence
  Synthetic
ccagagagtacccttccctc

SEQ ID NO: 32649 - DNA, 19 bp, Artificial Sequence
  Synthetic
tctcagttcaagagtgctg

SEQ ID NO: 32650 - DNA, 20 bp, Artificial Sequence
  Synthetic
acctttagttggatctccca

SEQ ID NO: 32651 - DNA, 18 bp, Artificial Sequence
  Synthetic
tcctcgtcgtcgtcgaag

SEQ ID NO: 32652 - DNA, 18 bp, Artificial Sequence
  Synthetic
gtcatctccaacccagtg

SEQ ID NO: 32653 - DNA, 23 bp, Artificial Sequence
  Synthetic
ccaaatatttttaacagccagtc

SEQ ID NO: 32654 - DNA, 24 bp, Artificial Sequence
  Synthetic
agtaaatacactaatgtctggacc

SEQ ID NO: 32655 - DNA, 19 bp, Artificial Sequence
  Synthetic
agcaggatctgaagaaaca

SEQ ID NO: 32656 - DNA, 18 bp, Artificial Sequence
  Synthetic
aactgaactaggcgggaa

SEQ ID NO: 32657 - DNA, 24 bp, Artificial Sequence
  Synthetic
ccatactttcagcttctactatat

SEQ ID NO: 32658 - DNA, 19 bp, Artificial Sequence
  Synthetic
caccatcctgtattgtgct

SEQ ID NO: 32659 - DNA, 25 bp, Artificial Sequence
  Synthetic
ggtgtaaataattagactctggtat

SEQ ID NO: 32660 - DNA, 20 bp, Artificial Sequence
  Synthetic
ggagattcctcattttcgtc

SEQ ID NO: 32661 - DNA, 18 bp, Artificial Sequence
  Synthetic
gctcacatggctcagaaa

SEQ ID NO: 32662 - DNA, 20 bp, Artificial Sequence
  Synthetic
actttaggttgtctgcactt

SEQ ID NO: 32663 - DNA, 18 bp, Artificial Sequence
  Synthetic
tctcaaatcggtgcttca

SEQ ID NO: 32664 - DNA, 21 bp, Artificial Sequence
  Synthetic
tgaatgtgtgtcttctcagat

SEQ ID NO: 32665 - DNA, 18 bp, Artificial Sequence
  Synthetic
agttttcaaggctgggga

SEQ ID NO: 32666 - DNA, 18 bp, Artificial Sequence
  Synthetic
attttggacccagcttgc

SEQ ID NO: 32667 - DNA, 20 bp, Artificial Sequence
  Synthetic
cttatcattgggatcagctg

SEQ ID NO: 32668 - DNA, 20 bp, Artificial Sequence
  Synthetic
ggttccattggttctcacat

SEQ ID NO: 32669 - DNA, 22 bp, Artificial Sequence
  Synthetic
aagcaattttctagattcagcc

SEQ ID NO: 32670 - DNA, 20 bp, Artificial Sequence
  Synthetic
agccactcttaaatcgagtc

SEQ ID NO: 32671 - DNA, 20 bp, Artificial Sequence
  Synthetic
ccctcagagagactaatgtc

SEQ ID NO: 32672 - DNA, 18 bp, Artificial Sequence
  Synthetic
caactcgtttcgccatgt

SEQ ID NO: 32673 - DNA, 21 bp, Artificial Sequence
  Synthetic
gtgtcagtgctcttattaggt

SEQ ID NO: 32674 - DNA, 20 bp, Artificial Sequence
  Synthetic
aactgtaaaggagagctctg

SEQ ID NO: 32675 - DNA, 24 bp, Artificial Sequence
  Synthetic
caagtcctatagaatctatccact

SEQ ID NO: 32676 - DNA, 18 bp, Artificial Sequence
  Synthetic
gtggcatcggtaggtgta

SEQ ID NO: 32677 - DNA, 24 bp, Artificial Sequence
  Synthetic
attcttctttcttaatccttccag

SEQ ID NO: 32678 - DNA, 24 bp, Artificial Sequence
  Synthetic
cgcttttacaatatacacagctta

SEQ ID NO: 32679 - DNA, 22 bp, Artificial Sequence
  Synthetic
aattgcattatctggttcatct

SEQ ID NO: 32680 - DNA, 21 bp, Artificial Sequence
  Synthetic
tggtgagcttaaattgctatg

SEQ ID NO: 32681 - DNA, 22 bp, Artificial Sequence
  Synthetic
acaatcagctaactgtgcatat

SEQ ID NO: 32682 - DNA, 23 bp, Artificial Sequence
  Synthetic
agaatcttttcctgtaacacatt

SEQ ID NO: 32683 - DNA, 19 bp, Artificial Sequence
  Synthetic
tgcaatgtccacagttcat

SEQ ID NO: 32684 - DNA, 21 bp, Artificial Sequence
  Synthetic
aatccacaatgtctgaatggt

SEQ ID NO: 32685 - DNA, 20 bp, Artificial Sequence
  Synthetic
gatgtgcctgtaaatgtagg

SEQ ID NO: 32686 - DNA, 20 bp, Artificial Sequence
  Synthetic
taacaccaggaataggggta

SEQ ID NO: 32687 - DNA, 19 bp, Artificial Sequence
  Synthetic
ttgtttaccactgcgagta

SEQ ID NO: 32688 - DNA, 18 bp, Artificial Sequence
  Synthetic
agggatgaccactaaggc

SEQ ID NO: 32689 - DNA, 25 bp, Artificial Sequence
  Synthetic
tgtatttactagttctaatggagga

SEQ ID NO: 32690 - DNA, 23 bp, Artificial Sequence
  Synthetic
tgccctatcattagtacctttta

SEQ ID NO: 32691 - DNA, 20 bp, Artificial Sequence
  Synthetic
tttgagtgtttccctctgat

SEQ ID NO: 32692 - DNA, 21 bp, Artificial Sequence
  Synthetic
cattcagattcctgtgttctt

SEQ ID NO: 32693 - DNA, 20 bp, Artificial Sequence
  Synthetic
ggggattgtctgtaagaaca

SEQ ID NO: 32694 - DNA, 21 bp, Artificial Sequence
  Synthetic
acaattgtctgaccttgaatg

SEQ ID NO: 32695 - DNA, 21 bp, Artificial Sequence
  Synthetic
ccattattctcttgtctgctg

SEQ ID NO: 32696 - DNA, 20 bp, Artificial Sequence
  Synthetic
ccagggtttgtatcaactct

SEQ ID NO: 32697 - DNA, 19 bp, Artificial Sequence
  Synthetic
cttgggttaagtgcaacac

SEQ ID NO: 32698 - DNA, 20 bp, Artificial Sequence
  Synthetic
cttgttcctcagttggattc

SEQ ID NO: 32699 - DNA, 19 bp, Artificial Sequence
  Synthetic
ccacaattattgcctcagc

SEQ ID NO: 32700 - DNA, 19 bp, Artificial Sequence
  Synthetic
gggatcttgtgaccattga

SEQ ID NO: 32701 - DNA, 23 bp, Artificial Sequence
  Synthetic
ttgttgtaattgaatactggaga

SEQ ID NO: 32702 - DNA, 23 bp, Artificial Sequence
  Synthetic
ttttcgtttcattaccaacacta

SEQ ID NO: 32703 - DNA, 22 bp, Artificial Sequence
  Synthetic
gctgaatagaatcaatccagtg

SEQ ID NO: 32704 - DNA, 19 bp, Artificial Sequence
  Synthetic
cagaaactgcagttctctg

SEQ ID NO: 32705 - DNA, 20 bp, Artificial Sequence
  Synthetic
cggtagttttcgctacagaa

SEQ ID NO: 32706 - DNA, 25 bp, Artificial Sequence
  Synthetic
cattttaaggtattagcagaacctt

SEQ ID NO: 32707 - DNA, 21 bp, Artificial Sequence
  Synthetic
tttctgcatctacaggaacaa

SEQ ID NO: 32708 - DNA, 23 bp, Artificial Sequence
  Synthetic
ctgtataggcttttcacctatag

SEQ ID NO: 32709 - DNA, 22 bp, Artificial Sequence
  Synthetic
actcttactataccctctgatg

SEQ ID NO: 32710 - DNA, 24 bp, Artificial Sequence
  Synthetic
gactgtataactaactgtgcatta

SEQ ID NO: 32711 - DNA, 24 bp, Artificial Sequence
  Synthetic
gcccactataaacatttgaatttg

SEQ ID NO: 32712 - DNA, 22 bp, Artificial Sequence
  Synthetic
caaaaaaacacagcatctccat

SEQ ID NO: 32713 - DNA, 18 bp, Artificial Sequence
  Synthetic
ggtgtgtgtaaatgccct

SEQ ID NO: 32714 - DNA, 23 bp, Artificial Sequence
  Synthetic
gtttctataaactcacaagcatt

SEQ ID NO: 32715 - DNA, 20 bp, Artificial Sequence
  Synthetic
actttgaaatggcctggtta

SEQ ID NO: 32716 - DNA, 20 bp, Artificial Sequence
  Synthetic
tgtcttttaagccagtcagg

SEQ ID NO: 32717 - DNA, 22 bp, Artificial Sequence
  Synthetic
tctatgttggaggtaacaagta

SEQ ID NO: 32718 - DNA, 23 bp, Artificial Sequence
  Synthetic
aatagttcatggcttgtatctgt

SEQ ID NO: 32719 - DNA, 23 bp, Artificial Sequence
  Synthetic
agaaggaccaaataatacatcag

SEQ ID NO: 32720 - DNA, 23 bp, Artificial Sequence
  Synthetic
cctttaggtaatttcacagtttg

SEQ ID NO: 32721 - DNA, 20 bp, Artificial Sequence
  Synthetic
ggactgtggtgtaactgcat

SEQ ID NO: 32722 - DNA, 24 bp, Artificial Sequence
  Synthetic
ttctaatggtatagattccccaat

SEQ ID NO: 32723 - DNA, 20 bp, Artificial Sequence
  Synthetic
caatagattgtgctgttgct

SEQ ID NO: 32724 - DNA, 22 bp, Artificial Sequence
  Synthetic
aagaaaatagacgtttccacaa

SEQ ID NO: 32725 - DNA, 23 bp, Artificial Sequence
  Synthetic
tcaataatggaactaacaagctc

SEQ ID NO: 32726 - DNA, 19 bp, Artificial Sequence
  Synthetic
tgggctaatacatcagctg

SEQ ID NO: 32727 - DNA, 23 bp, Artificial Sequence
  Synthetic
acaaaaatataaagtgcatgtgc

SEQ ID NO: 32728 - DNA, 19 bp, Artificial Sequence
  Synthetic
gcccaatacagcttctact

SEQ ID NO: 32729 - DNA, 22 bp, Artificial Sequence
  Synthetic
agttattacagcagaaggagta

SEQ ID NO: 32730 - DNA, 22 bp, Artificial Sequence
  Synthetic
gatccatctgtactttcttcaa

SEQ ID NO: 32731 - DNA, 23 bp, Artificial Sequence
  Synthetic
ctaaagagttcgaaactaccttt

SEQ ID NO: 32732 - DNA, 23 bp, Artificial Sequence
  Synthetic
aaacccatatgaaataacctgta

SEQ ID NO: 32733 - DNA, 18 bp, Artificial Sequence
  Synthetic
gatgaggcgaagaagtgg

SEQ ID NO: 32734 - DNA, 18 bp, Artificial Sequence
  Synthetic
ttcagcagttggggcaga

SEQ ID NO: 32735 - DNA, 22 bp, Artificial Sequence
  Synthetic
ccctgaggatcaacaaatacat

SEQ ID NO: 32736 - DNA, 18 bp, Artificial Sequence
  Synthetic
ttcaaattgtacagcgcg

SEQ ID NO: 32737 - DNA, 19 bp, Artificial Sequence
  Synthetic
ctgcagctggaatatcact

SEQ ID NO: 32738 - DNA, 21 bp, Artificial Sequence
  Synthetic
ggatgaaccacatttaacacg

SEQ ID NO: 32739 - DNA, 22 bp, Artificial Sequence
  Synthetic
gctgtacatattcatccgtact

SEQ ID NO: 32740 - DNA, 20 bp, Artificial Sequence
  Synthetic
aagttccaattcctaaaggc

SEQ ID NO: 32741 - DNA, 22 bp, Artificial Sequence
  Synthetic
gtgttaatttaattgggggaca

SEQ ID NO: 32742 - DNA, 18 bp, Artificial Sequence
  Synthetic
tcaggagaacgaaaacgg

SEQ ID NO: 32743 - DNA, 19 bp, Artificial Sequence
  Synthetic
ggcgttgtcaaacaggaca

SEQ ID NO: 32744 - DNA, 18 bp, Artificial Sequence
  Synthetic
gcactcgtactgctcgct

SEQ ID NO: 32745 - DNA, 18 bp, Artificial Sequence
  Synthetic
tttcctgcatgccgttta

SEQ ID NO: 32746 - DNA, 18 bp, Artificial Sequence
  Synthetic
cccctggacatctggaca

SEQ ID NO: 32747 - DNA, 17 bp, Artificial Sequence
  Synthetic
agtgtgtgcctgggtgt

SEQ ID NO: 32748 - DNA, 17 bp, Artificial Sequence
  Synthetic
ggctggtccagggactt

SEQ ID NO: 32749 - DNA, 20 bp, Artificial Sequence
  Synthetic
ggcttagtgtgtcatggtga

SEQ ID NO: 32750 - DNA, 19 bp, Artificial Sequence
  Synthetic
tcaatgtcgacgaagatgc

SEQ ID NO: 32751 - DNA, 20 bp, Artificial Sequence
  Synthetic
tcccaggtctacgtgtgaaa

SEQ ID NO: 32752 - DNA, 18 bp, Artificial Sequence
  Synthetic
acgtgttccacccgtgaa

SEQ ID NO: 32753 - DNA, 18 bp, Artificial Sequence
  Synthetic
aggccaatagagccgagg

SEQ ID NO: 32754 - DNA, 19 bp, Artificial Sequence
  Synthetic
gcagtaaccgcagtccatg

SEQ ID NO: 32755 - DNA, 18 bp, Artificial Sequence
  Synthetic
cagggttggtgccttcac

SEQ ID NO: 32756 - DNA, 18 bp, Artificial Sequence
  Synthetic
agagaaggtggcccctgg

SEQ ID NO: 32757 - DNA, 18 bp, Artificial Sequence
  Synthetic
cgggagatgatggcgctg

SEQ ID NO: 32758 - DNA, 16 bp, Artificial Sequence
  Synthetic
aatggagccccgaccc

SEQ ID NO: 32759 - DNA, 16 bp, Artificial Sequence
  Synthetic
tgctgaccgaggccga

SEQ ID NO: 32760 - DNA, 19 bp, Artificial Sequence
  Synthetic
ggcgcaaggaaaaggagaa

SEQ ID NO: 32761 - DNA, 20 bp, Artificial Sequence
  Synthetic
acctcgcaaacatgctatca

SEQ ID NO: 32762 - DNA, 18 bp, Artificial Sequence
  Synthetic
gcgcggaatcaggaccat

SEQ ID NO: 32763 - DNA, 18 bp, Artificial Sequence
  Synthetic
cacccgccatggacctaa

SEQ ID NO: 32764 - DNA, 16 bp, Artificial Sequence
  Synthetic
cttgacgggggcagct

SEQ ID NO: 32765 - DNA, 16 bp, Artificial Sequence
  Synthetic
tacacccaccccggct

SEQ ID NO: 32766 - DNA, 16 bp, Artificial Sequence
  Synthetic
ctcgagggctgcagca

SEQ ID NO: 32767 - DNA, 18 bp, Artificial Sequence
  Synthetic
cgggctagcgagaatcca

SEQ ID NO: 32768 - DNA, 20 bp, Artificial Sequence
  Synthetic
tgagaagagctgacggtact

SEQ ID NO: 32769 - DNA, 16 bp, Artificial Sequence
  Synthetic
tgacgtcagcaggccg

SEQ ID NO: 32770 - DNA, 20 bp, Artificial Sequence
  Synthetic
tgcttcactttcttggggtg

SEQ ID NO: 32771 - DNA, 15 bp, Artificial Sequence
  Synthetic
aagggtgcagcggct

SEQ ID NO: 32772 - DNA, 19 bp, Artificial Sequence
  Synthetic
tggggcattccttgtacga

SEQ ID NO: 32773 - DNA, 19 bp, Artificial Sequence
  Synthetic
tgagcgctaagaagcagcc

SEQ ID NO: 32774 - DNA, 19 bp, Artificial Sequence
  Synthetic
gtcgtcatcaaggcccttg

SEQ ID NO: 32775 - DNA, 17 bp, Artificial Sequence
  Synthetic
cgttaacgcgagctccg

SEQ ID NO: 32776 - DNA, 19 bp, Artificial Sequence
  Synthetic
cggtcacgtctcatgttgg

SEQ ID NO: 32777 - DNA, 16 bp, Artificial Sequence
  Synthetic
cccgtggcctgcgtaa

SEQ ID NO: 32778 - DNA, 16 bp, Artificial Sequence
  Synthetic
cgcacctgcaagcaca

SEQ ID NO: 32779 - DNA, 20 bp, Artificial Sequence
  Synthetic
cctctgcttatcaatcggta

SEQ ID NO: 32780 - DNA, 18 bp, Artificial Sequence
  Synthetic
caaccctgttaggcacgg

SEQ ID NO: 32781 - DNA, 16 bp, Artificial Sequence
  Synthetic
gtgtccggagccgaca

SEQ ID NO: 32782 - DNA, 17 bp, Artificial Sequence
  Synthetic
acggttcctcactgggc

SEQ ID NO: 32783 - DNA, 19 bp, Artificial Sequence
  Synthetic
cctcctcctgctcctgttc

SEQ ID NO: 32784 - DNA, 18 bp, Artificial Sequence
  Synthetic
tactgggactcctgggcc

SEQ ID NO: 32785 - DNA, 20 bp, Artificial Sequence
  Synthetic
gtcttctttggcatccgagg

SEQ ID NO: 32786 - DNA, 16 bp, Artificial Sequence
  Synthetic
aggaactccagcggcg

SEQ ID NO: 32787 - DNA, 18 bp, Artificial Sequence
  Synthetic
acacgatggactgcctgg

SEQ ID NO: 32788 - DNA, 17 bp, Artificial Sequence
  Synthetic
gtcccccctggcattgt

SEQ ID NO: 32789 - DNA, 17 bp, Artificial Sequence
  Synthetic
gatgggtggagaggcca

SEQ ID NO: 32790 - DNA, 16 bp, Artificial Sequence
  Synthetic
tcagacacgcgacggg

SEQ ID NO: 32791 - DNA, 16 bp, Artificial Sequence
  Synthetic
acccgagaccgcagac

SEQ ID NO: 32792 - DNA, 20 bp, Artificial Sequence
  Synthetic
cactcccatacctggacctc

SEQ ID NO: 32793 - DNA, 16 bp, Artificial Sequence
  Synthetic
gcagccttgcgtggtg

SEQ ID NO: 32794 - DNA, 19 bp, Artificial Sequence
  Synthetic
cggatgcctgcctatggat

SEQ ID NO: 32795 - DNA, 18 bp, Artificial Sequence
  Synthetic
ttgagtggcctcgggacc

SEQ ID NO: 32796 - DNA, 17 bp, Artificial Sequence
  Synthetic
ggctgtggcgagtacca

SEQ ID NO: 32797 - DNA, 20 bp, Artificial Sequence
  Synthetic
tgcggatgtgttgttggtat

SEQ ID NO: 32798 - DNA, 20 bp, Artificial Sequence
  Synthetic
gctaccttcacctcctccaa

SEQ ID NO: 32799 - DNA, 18 bp, Artificial Sequence
  Synthetic
ttcctacgccctgcttca

SEQ ID NO: 32800 - DNA, 16 bp, Artificial Sequence
  Synthetic
agggacctcagcgcct

SEQ ID NO: 32801 - DNA, 20 bp, Artificial Sequence
  Synthetic
cgggttttctcagtacgtgc

SEQ ID NO: 32802 - DNA, 20 bp, Artificial Sequence
  Synthetic
ggggtgatttcacggatcag

SEQ ID NO: 32803 - DNA, 19 bp, Artificial Sequence
  Synthetic
cggtgctctcatgttggtc

SEQ ID NO: 32804 - DNA, 20 bp, Artificial Sequence
  Synthetic
agacagttgcagggatgaga

SEQ ID NO: 32805 - DNA, 19 bp, Artificial Sequence
  Synthetic
ccaggaagtccaaaactcc

SEQ ID NO: 32806 - DNA, 16 bp, Artificial Sequence
  Synthetic
aaccgccacccccttt

SEQ ID NO: 32807 - DNA, 16 bp, Artificial Sequence
  Synthetic
gcttggggcccacatg

SEQ ID NO: 32808 - DNA, 19 bp, Artificial Sequence
  Synthetic
gggtctcttttccgcttgt

SEQ ID NO: 32809 - DNA, 18 bp, Artificial Sequence
  Synthetic
ggacttgaggtgggctga

SEQ ID NO: 32810 - DNA, 19 bp, Artificial Sequence
  Synthetic
gcaaaggccaaagggagac

SEQ ID NO: 32811 - DNA, 18 bp, Artificial Sequence
  Synthetic
ctgcagacaccacccagt

SEQ ID NO: 32812 - DNA, 19 bp, Artificial Sequence
  Synthetic
gctctcagcctacaagagc

SEQ ID NO: 32813 - DNA, 20 bp, Artificial Sequence
  Synthetic
ggccctacattctggacaga

SEQ ID NO: 32814 - DNA, 16 bp, Artificial Sequence
  Synthetic
tccagacaccaggcgc

SEQ ID NO: 32815 - DNA, 18 bp, Artificial Sequence
  Synthetic
ctgacgcacagcctgtac

SEQ ID NO: 32816 - DNA, 18 bp, Artificial Sequence
  Synthetic
tggtctactgggagctgg

SEQ ID NO: 32817 - DNA, 16 bp, Artificial Sequence
  Synthetic
tgtgtgggcgagctga

SEQ ID NO: 32818 - DNA, 19 bp, Artificial Sequence
  Synthetic
gcctcaaccatcagtcacc

SEQ ID NO: 32819 - DNA, 16 bp, Artificial Sequence
  Synthetic
cctaccttggggcggt

SEQ ID NO: 32820 - DNA, 18 bp, Artificial Sequence
  Synthetic
taccccctggccacctac

SEQ ID NO: 32821 - DNA, 20 bp, Artificial Sequence
  Synthetic
tgcgaaactacctggatgac

SEQ ID NO: 32822 - DNA, 19 bp, Artificial Sequence
  Synthetic
tcatcaaggcctccctgag

SEQ ID NO: 32823 - DNA, 20 bp, Artificial Sequence
  Synthetic
ggccagccaagtctacagat

SEQ ID NO: 32824 - DNA, 15 bp, Artificial Sequence
  Synthetic
aatgcgcggcccatg

SEQ ID NO: 32825 - DNA, 18 bp, Artificial Sequence
  Synthetic
ttgtgacacacgtagcac

SEQ ID NO: 32826 - DNA, 19 bp, Artificial Sequence
  Synthetic
caagcctaactgcacgaca

SEQ ID NO: 32827 - DNA, 19 bp, Artificial Sequence
  Synthetic
agtgttgctgtatcaaggt

SEQ ID NO: 32828 - DNA, 18 bp, Artificial Sequence
  Synthetic
atccattctggcgtttcc

SEQ ID NO: 32829 - DNA, 19 bp, Artificial Sequence
  Synthetic
ccaatccccttcttctgtt

SEQ ID NO: 32830 - DNA, 24 bp, Artificial Sequence
  Synthetic
gggttacatcatctattagtccta

SEQ ID NO: 32831 - DNA, 23 bp, Artificial Sequence
  Synthetic
ccaactgaatttcaattgcttta

SEQ ID NO: 32832 - DNA, 19 bp, Artificial Sequence
  Synthetic
tttccctccaacatgtgta

SEQ ID NO: 32833 - DNA, 18 bp, Artificial Sequence
  Synthetic
gcttaaatggcggggtcg

SEQ ID NO: 32834 - DNA, 18 bp, Artificial Sequence
  Synthetic
agcactacaggtaggtgt

SEQ ID NO: 32835 - DNA, 18 bp, Artificial Sequence
  Synthetic
taatgtccgccttgggaa

SEQ ID NO: 32836 - DNA, 23 bp, Artificial Sequence
  Synthetic
gacacgtttagttttttaggaaa

SEQ ID NO: 32837 - DNA, 24 bp, Artificial Sequence
  Synthetic
ttgtataatgaagcatcaggtagt

SEQ ID NO: 32838 - DNA, 20 bp, Artificial Sequence
  Synthetic
ccaatgttcacctaagggag

SEQ ID NO: 32839 - DNA, 22 bp, Artificial Sequence
  Synthetic
tgcctgcctattataaaatgtc

SEQ ID NO: 32840 - DNA, 24 bp, Artificial Sequence
  Synthetic
acatatttgtactacgtgatgtgt

SEQ ID NO: 32841 - DNA, 18 bp, Artificial Sequence
  Synthetic
tctgcataggggtccttt

SEQ ID NO: 32842 - DNA, 20 bp, Artificial Sequence
  Synthetic
tatagtagcccgccaaaacg

SEQ ID NO: 32843 - DNA, 21 bp, Artificial Sequence
  Synthetic
cagacacattcttggacagaa

SEQ ID NO: 32844 - DNA, 19 bp, Artificial Sequence
  Synthetic
cttacatggttgttggcaa

SEQ ID NO: 32845 - DNA, 24 bp, Artificial Sequence
  Synthetic
cgttgctaatatagacaatctaac

SEQ ID NO: 32846 - DNA, 22 bp, Artificial Sequence
  Synthetic
tttactctttccttctccagta

SEQ ID NO: 32847 - DNA, 24 bp, Artificial Sequence
  Synthetic
ccatgtttaaaagatacattcgac

SEQ ID NO: 32848 - DNA, 25 bp, Artificial Sequence
  Synthetic
ctctaaaaagtttattccctggtat

SEQ ID NO: 32849 - DNA, 25 bp, Artificial Sequence
  Synthetic
gtcctgataataaatgtatttccag

SEQ ID NO: 32850 - DNA, 18 bp, Artificial Sequence
  Synthetic
aagaccttgtcgcggagg

SEQ ID NO: 32851 - DNA, 18 bp, Artificial Sequence
  Synthetic
aggtctagttggtctgct

SEQ ID NO: 32852 - DNA, 18 bp, Artificial Sequence
  Synthetic
aaattcaggtggaggcac

SEQ ID NO: 32853 - DNA, 22 bp, Artificial Sequence
  Synthetic
ggtgttatggcttaattcatct

SEQ ID NO: 32854 - DNA, 22 bp, Artificial Sequence
  Synthetic
tcatcagtgcttaatactttgg

SEQ ID NO: 32855 - DNA, 18 bp, Artificial Sequence
  Synthetic
aaagctgaattgggggac

SEQ ID NO: 32856 - DNA, 21 bp, Artificial Sequence
  Synthetic
ttttgtgctattggaagtacc

SEQ ID NO: 32857 - DNA, 20 bp, Artificial Sequence
  Synthetic
atggaaaatgctttctccac

SEQ ID NO: 32858 - DNA, 19 bp, Artificial Sequence
  Synthetic
agctggctaattgctcgtt

SEQ ID NO: 32859 - DNA, 20 bp, Artificial Sequence
  Synthetic
cctcactatcgtccccattg

SEQ ID NO: 32860 - DNA, 19 bp, Artificial Sequence
  Synthetic
tgtctacacataccccggc

SEQ ID NO: 32861 - DNA, 20 bp, Artificial Sequence
  Synthetic
atctgtacctgattgtgccg

SEQ ID NO: 32862 - DNA, 18 bp, Artificial Sequence
  Synthetic
acattttgccaccgtgtc

SEQ ID NO: 32863 - DNA, 18 bp, Artificial Sequence
  Synthetic
tggtcatatgcccattgc

SEQ ID NO: 32864 - DNA, 22 bp, Artificial Sequence
  Synthetic
aataaactctatgtcgtggtgt

SEQ ID NO: 32865 - DNA, 18 bp, Artificial Sequence
  Synthetic
attgccatccagtgcatt

SEQ ID NO: 32866 - DNA, 18 bp, Artificial Sequence
  Synthetic
ttaaacggctggccaatg

SEQ ID NO: 32867 - DNA, 19 bp, Artificial Sequence
  Synthetic
cttcctgtgcaaacctaac

SEQ ID NO: 32868 - DNA, 16 bp, Artificial Sequence
  Synthetic
tcccgtgctgctttgc

SEQ ID NO: 32869 - DNA, 18 bp, Artificial Sequence
  Synthetic
ttgataggaaggttgccc

SEQ ID NO: 32870 - DNA, 18 bp, Artificial Sequence
  Synthetic
ttggtcaagggactgcaa

SEQ ID NO: 32871 - DNA, 18 bp, Artificial Sequence
  Synthetic
aactactgcaacagacgc

SEQ ID NO: 32872 - DNA, 16 bp, Artificial Sequence
  Synthetic
atcggatgcccccacg

SEQ ID NO: 32873 - DNA, 19 bp, Artificial Sequence
  Synthetic
gtctgtgtagagccacaat

SEQ ID NO: 32874 - DNA, 18 bp, Artificial Sequence
  Synthetic
tagcgatgcatcaggaag

SEQ ID NO: 32875 - DNA, 23 bp, Artificial Sequence
  Synthetic
agatttaagttctataggagggc

SEQ ID NO: 32876 - DNA, 20 bp, Artificial Sequence
  Synthetic
tgttccttttagcacaaagc

SEQ ID NO: 32877 - DNA, 23 bp, Artificial Sequence
  Synthetic
cataactggaaaataaactgcaa

SEQ ID NO: 32878 - DNA, 20 bp, Artificial Sequence
  Synthetic
caacacatgacacacacatt

SEQ ID NO: 32879 - DNA, 18 bp, Artificial Sequence
  Synthetic
acaagcatgcacacctgc

SEQ ID NO: 32880 - DNA, 19 bp, Artificial Sequence
  Synthetic
cagtcttcccggcaattcc

SEQ ID NO: 32881 - DNA, 18 bp, Artificial Sequence
  Synthetic
gatttgccagtggagcgc

SEQ ID NO: 32882 - DNA, 18 bp, Artificial Sequence
  Synthetic
gcagggccagcaagaaga

SEQ ID NO: 32883 - DNA, 18 bp, Artificial Sequence
  Synthetic
ggcggacatcacaaccat

SEQ ID NO: 32884 - DNA, 18 bp, Artificial Sequence
  Synthetic
caacagtatgggtgcgcg

SEQ ID NO: 32885 - DNA, 19 bp, Artificial Sequence
  Synthetic
acactgccttggtgggtag

SEQ ID NO: 32886 - DNA, 18 bp, Artificial Sequence
  Synthetic
gtcgatcaggcaccttgg

SEQ ID NO: 32887 - DNA, 18 bp, Artificial Sequence
  Synthetic
tgagggcaggtgataggc

SEQ ID NO: 32888 - DNA, 18 bp, Artificial Sequence
  Synthetic
ccgctcctatctggccat

SEQ ID NO: 32889 - DNA, 18 bp, Artificial Sequence
  Synthetic
cgagatgccttgccatgg

SEQ ID NO: 32890 - DNA, 20 bp, Artificial Sequence
  Synthetic
ccactatggtgcccaaaagg

SEQ ID NO: 32891 - DNA, 16 bp, Artificial Sequence
  Synthetic
ggtcgaccgctccaca

SEQ ID NO: 32892 - DNA, 20 bp, Artificial Sequence
  Synthetic
gccactgagggattaagcac

SEQ ID NO: 32893 - DNA, 18 bp, Artificial Sequence
  Synthetic
ggggttgtcactgaccca

SEQ ID NO: 32894 - DNA, 20 bp, Artificial Sequence
  Synthetic
tctacaacttgagtgaccgc

SEQ ID NO: 32895 - DNA, 18 bp, Artificial Sequence
  Synthetic
tgtgtgaggccggtgaaa

SEQ ID NO: 32896 - DNA, 16 bp, Artificial Sequence
  Synthetic
ggcaatacgcggcgac

SEQ ID NO: 32897 - DNA, 18 bp, Artificial Sequence
  Synthetic
gctactgcagggttccct

SEQ ID NO: 32898 - DNA, 16 bp, Artificial Sequence
  Synthetic
ttggacggcgccttcc

SEQ ID NO: 32899 - DNA, 18 bp, Artificial Sequence
  Synthetic
gtggtatgacccgtgctg

SEQ ID NO: 32900 - DNA, 16 bp, Artificial Sequence
  Synthetic
ggtggtgcaggtggct

SEQ ID NO: 32901 - DNA, 18 bp, Artificial Sequence
  Synthetic
aggaggagggagagcaca

SEQ ID NO: 32902 - DNA, 18 bp, Artificial Sequence
  Synthetic
gtcctcctcggagcaagt

SEQ ID NO: 32903 - DNA, 20 bp, Artificial Sequence
  Synthetic
tccttagccccaaacccata

SEQ ID NO: 32904 - DNA, 20 bp, Artificial Sequence
  Synthetic
gttgagtcaaagcatcgggt

SEQ ID NO: 32905 - DNA, 18 bp, Artificial Sequence
  Synthetic
gcctccgtgaaggctctc

SEQ ID NO: 32906 - DNA, 18 bp, Artificial Sequence
  Synthetic
ccatatggtcggggcgta

SEQ ID NO: 32907 - DNA, 16 bp, Artificial Sequence
  Synthetic
aaacggccgctctccc

SEQ ID NO: 32908 - DNA, 20 bp, Artificial Sequence
  Synthetic
cggggttgttcaacagtttg

SEQ ID NO: 32909 - DNA, 17 bp, Artificial Sequence
  Synthetic
gtgtacggcgtgttcgg

SEQ ID NO: 32910 - DNA, 16 bp, Artificial Sequence
  Synthetic
aactgtgtggcggcgg

SEQ ID NO: 32911 - DNA, 18 bp, Artificial Sequence
  Synthetic
gcctgaaacagaccgtcc

SEQ ID NO: 32912 - DNA, 18 bp, Artificial Sequence
  Synthetic
ctgttttgccgacgaccg

SEQ ID NO: 32913 - DNA, 18 bp, Artificial Sequence
  Synthetic
tggacgatgggaatcggg

SEQ ID NO: 32914 - DNA, 18 bp, Artificial Sequence
  Synthetic
aaaccttcgtcgcgcatc

SEQ ID NO: 32915 - DNA, 20 bp, Artificial Sequence
  Synthetic
ccatgaatttcactgcgcct

SEQ ID NO: 32916 - DNA, 18 bp, Artificial Sequence
  Synthetic
tcagggagaaggaggcac

SEQ ID NO: 32917 - DNA, 18 bp, Artificial Sequence
  Synthetic
ccagagcggcaacaccta

SEQ ID NO: 32918 - DNA, 16 bp, Artificial Sequence
  Synthetic
gcttccgccagcccta

SEQ ID NO: 32919 - DNA, 18 bp, Artificial Sequence
  Synthetic
aattgccgaccatcaccg

SEQ ID NO: 32920 - DNA, 19 bp, Artificial Sequence
  Synthetic
ggataacgcgctggtatgc

SEQ ID NO: 32921 - DNA, 18 bp, Artificial Sequence
  Synthetic
cctgtcgcggattttcgg

SEQ ID NO: 32922 - DNA, 17 bp, Artificial Sequence
  Synthetic
ggcagcagggtttcgga

SEQ ID NO: 32923 - DNA, 20 bp, Artificial Sequence
  Synthetic
agcgttgatgatttgttggc

SEQ ID NO: 32924 - DNA, 18 bp, Artificial Sequence
  Synthetic
ttttgtggtggcaagcct

SEQ ID NO: 32925 - DNA, 20 bp, Artificial Sequence
  Synthetic
ggacatcttttgctgacgct

SEQ ID NO: 32926 - DNA, 20 bp, Artificial Sequence
  Synthetic
gagggcggttttcactttcc

SEQ ID NO: 32927 - DNA, 19 bp, Artificial Sequence
  Synthetic
actgtccacaaataccggc

SEQ ID NO: 32928 - DNA, 20 bp, Artificial Sequence
  Synthetic
accttaaataagctcgccgc

SEQ ID NO: 32929 - DNA, 18 bp, Artificial Sequence
  Synthetic
gcatcaccaagcttgccg

SEQ ID NO: 32930 - DNA, 16 bp, Artificial Sequence
  Synthetic
ttactgcgccgccgac

SEQ ID NO: 32931 - DNA, 16 bp, Artificial Sequence
  Synthetic
atatgccgaccgccgc

SEQ ID NO: 32932 - DNA, 15 bp, Artificial Sequence
  Synthetic
tgcggacgcgcgtat

SEQ ID NO: 32933 - DNA, 19 bp, Artificial Sequence
  Synthetic
cccgagcagaatgttgagc

SEQ ID NO: 32934 - DNA, 17 bp, Artificial Sequence
  Synthetic
cgtagctgtggcgcatc

SEQ ID NO: 32935 - DNA, 16 bp, Artificial Sequence
  Synthetic
cgcgtgccagacggat

SEQ ID NO: 32936 - DNA, 20 bp, Artificial Sequence
  Synthetic
gccctaccaacaaatcaccg

SEQ ID NO: 32937 - DNA, 16 bp, Artificial Sequence
  Synthetic
cgggctacggcttcct

SEQ ID NO: 32938 - DNA, 17 bp, Artificial Sequence
  Synthetic
cgcgaaatgggcattgc

SEQ ID NO: 32939 - DNA, 16 bp, Artificial Sequence
  Synthetic
aggacggcgtggtgtt

SEQ ID NO: 32940 - DNA, 18 bp, Artificial Sequence
  Synthetic
aactgcaaccccgaaacc

SEQ ID NO: 32941 - DNA, 16 bp, Artificial Sequence
  Synthetic
gcttccacgcctccga

SEQ ID NO: 32942 - DNA, 17 bp, Artificial Sequence
  Synthetic
aaaaggccgtccgttcg

SEQ ID NO: 32943 - DNA, 18 bp, Artificial Sequence
  Synthetic
cgcaaccggacgtttctg

SEQ ID NO: 32944 - DNA, 18 bp, Artificial Sequence
  Synthetic
gcataccgtttcccgacg

SEQ ID NO: 32945 - DNA, 20 bp, Artificial Sequence
  Synthetic
aacggcttgtttttcggatg

SEQ ID NO: 32946 - DNA, 20 bp, Artificial Sequence
  Synthetic
ggttaattggctgcgtatgc

SEQ ID NO: 32947 - DNA, 19 bp, Artificial Sequence
  Synthetic
gggtcagaccgaacacttg

SEQ ID NO: 32948 - DNA, 17 bp, Artificial Sequence
  Synthetic
gccggtcgaaacgcaaa

SEQ ID NO: 32949 - DNA, 18 bp, Artificial Sequence
  Synthetic
aattcggtgtcgtccacg

SEQ ID NO: 32950 - DNA, 17 bp, Artificial Sequence
  Synthetic
cggcgcggtaatttcgg

SEQ ID NO: 32951 - DNA, 20 bp, Artificial Sequence
  Synthetic
gtcggcattcggatattccc

SEQ ID NO: 32952 - DNA, 16 bp, Artificial Sequence
  Synthetic
agacagcgtgcgcctc

SEQ ID NO: 32953 - DNA, 15 bp, Artificial Sequence
  Synthetic
agcgcgtcggcaaag

SEQ ID NO: 32954 - DNA, 18 bp, Artificial Sequence
  Synthetic
cgcggtttgggtatgcac

SEQ ID NO: 32955 - DNA, 20 bp, Artificial Sequence
  Synthetic
caacccgcttccttcagttt

SEQ ID NO: 32956 - DNA, 16 bp, Artificial Sequence
  Synthetic
tcggcgcgatttgctg

SEQ ID NO: 32957 - DNA, 18 bp, Artificial Sequence
  Synthetic
ctcatcggcgacaacgtc

SEQ ID NO: 32958 - DNA, 15 bp, Artificial Sequence
  Synthetic
aacgcgcgcaacgtc

SEQ ID NO: 32959 - DNA, 16 bp, Artificial Sequence
  Synthetic
cgcgcccgattcttcg

SEQ ID NO: 32960 - DNA, 17 bp, Artificial Sequence
  Synthetic
gcaaacctgctgctgct

SEQ ID NO: 32961 - DNA, 16 bp, Artificial Sequence
  Synthetic
ttctcgcccctcgcct

SEQ ID NO: 32962 - DNA, 16 bp, Artificial Sequence
  Synthetic
tatggaagggcgcgcc

SEQ ID NO: 32963 - DNA, 17 bp, Artificial Sequence
  Synthetic
cgtcatcatcctgccgc

SEQ ID NO: 32964 - DNA, 19 bp, Artificial Sequence
  Synthetic
gcaaaaccgccctttcaga

SEQ ID NO: 32965 - DNA, 16 bp, Artificial Sequence
  Synthetic
gcacgctcgaaaccgc

SEQ ID NO: 32966 - DNA, 16 bp, Artificial Sequence
  Synthetic
cacgccgacggtttcg

SEQ ID NO: 32967 - DNA, 20 bp, Artificial Sequence
  Synthetic
cgaaaccgaacagggcatac

SEQ ID NO: 32968 - DNA, 18 bp, Artificial Sequence
  Synthetic
tgccaacgtaccagcaga

SEQ ID NO: 32969 - DNA, 16 bp, Artificial Sequence
  Synthetic
tcatcgggcgcggaaa

SEQ ID NO: 32970 - DNA, 16 bp, Artificial Sequence
  Synthetic
ggcgaagggctgctgt

SEQ ID NO: 32971 - DNA, 17 bp, Artificial Sequence
  Synthetic
gcaatatcacggggcgc

SEQ ID NO: 32972 - DNA, 17 bp, Artificial Sequence
  Synthetic
caaagccctcgccttcg

SEQ ID NO: 32973 - DNA, 17 bp, Artificial Sequence
  Synthetic
agaccacatcggcgtgt

SEQ ID NO: 32974 - DNA, 16 bp, Artificial Sequence
  Synthetic
tccagcccgccttcct

SEQ ID NO: 32975 - DNA, 16 bp, Artificial Sequence
  Synthetic
ttgagccgctgccacg

SEQ ID NO: 32976 - DNA, 16 bp, Artificial Sequence
  Synthetic
ttggtgaagctgcgcc

SEQ ID NO: 32977 - DNA, 19 bp, Artificial Sequence
  Synthetic
gacggcattttgctcacac

SEQ ID NO: 32978 - DNA, 16 bp, Artificial Sequence
  Synthetic
tcagacggcagcgacc

SEQ ID NO: 32979 - DNA, 17 bp, Artificial Sequence
  Synthetic
tcggttcgctgttgtgc

SEQ ID NO: 32980 - DNA, 16 bp, Artificial Sequence
  Synthetic
cttcgccacgcccaac

SEQ ID NO: 32981 - DNA, 16 bp, Artificial Sequence
  Synthetic
cctgcttgccgcccat

SEQ ID NO: 32982 - DNA, 19 bp, Artificial Sequence
  Synthetic
ttcatcccattcccaatca

SEQ ID NO: 32983 - DNA, 17 bp, Artificial Sequence
  Synthetic
cggcaggatttccgcct

SEQ ID NO: 32984 - DNA, 19 bp, Artificial Sequence
  Synthetic
gcgacaccaaagcaaacac

SEQ ID NO: 32985 - DNA, 16 bp, Artificial Sequence
  Synthetic
cgcagcctcgacgaac

SEQ ID NO: 32986 - DNA, 16 bp, Artificial Sequence
  Synthetic
cggcgaccactgttcg

SEQ ID NO: 32987 - DNA, 18 bp, Artificial Sequence
  Synthetic
gcttcctgcccgtcatcc

SEQ ID NO: 32988 - DNA, 16 bp, Artificial Sequence
  Synthetic
cgtcggtgcgattgcc

SEQ ID NO: 32989 - DNA, 16 bp, Artificial Sequence
  Synthetic
gccgtcattacccgcc

SEQ ID NO: 32990 - DNA, 18 bp, Artificial Sequence
  Synthetic
atccaaaccgacgttgcc

SEQ ID NO: 32991 - DNA, 20 bp, Artificial Sequence
  Synthetic
caactcccctttcgagcttt

SEQ ID NO: 32992 - DNA, 16 bp, Artificial Sequence
  Synthetic
attgccgctgcccgtc

SEQ ID NO: 32993 - DNA, 17 bp, Artificial Sequence
  Synthetic
tctgttcggggtcgctg

SEQ ID NO: 32994 - DNA, 17 bp, Artificial Sequence
  Synthetic
agggtaacgggtacgcc

SEQ ID NO: 32995 - DNA, 18 bp, Artificial Sequence
  Synthetic
cggctctgcattctgcca

SEQ ID NO: 32996 - DNA, 20 bp, Artificial Sequence
  Synthetic
actcgttttcagacggcatt

SEQ ID NO: 32997 - DNA, 16 bp, Artificial Sequence
  Synthetic
tctttcgccgccttgc

SEQ ID NO: 32998 - DNA, 19 bp, Artificial Sequence
  Synthetic
cggcatcggtttcgcaata

SEQ ID NO: 32999 - DNA, 16 bp, Artificial Sequence
  Synthetic
caaggttggcggcgac

SEQ ID NO: 33000 - DNA, 20 bp, Artificial Sequence
  Synthetic
accagacaccatgaacctct

SEQ ID NO: 33001 - DNA, 18 bp, Artificial Sequence
  Synthetic
ttgcccgcctgaacaaag

SEQ ID NO: 33002 - DNA, 19 bp, Artificial Sequence
  Synthetic
cgcagaagccaaacagcag

SEQ ID NO: 33003 - DNA, 19 bp, Artificial Sequence
  Synthetic
ggcatcaccctcaacctca

SEQ ID NO: 33004 - DNA, 16 bp, Artificial Sequence
  Synthetic
tcctgaccgcacgctg

SEQ ID NO: 33005 - DNA, 18 bp, Artificial Sequence
  Synthetic
aaacaggcacagctcgac

SEQ ID NO: 33006 - DNA, 16 bp, Artificial Sequence
  Synthetic
ccgaatggctgcacgc

SEQ ID NO: 33007 - DNA, 20 bp, Artificial Sequence
  Synthetic
cgctgattctccacatcacc

SEQ ID NO: 33008 - DNA, 17 bp, Artificial Sequence
  Synthetic
tcccgccacatcaacct

SEQ ID NO: 33009 - DNA, 18 bp, Artificial Sequence
  Synthetic
caaaccctgcacaccacg

SEQ ID NO: 33010 - DNA, 18 bp, Artificial Sequence
  Synthetic
tgctctttctgtcccccg

SEQ ID NO: 33011 - DNA, 17 bp, Artificial Sequence
  Synthetic
gccgtctgaacgttccg

SEQ ID NO: 33012 - DNA, 18 bp, Artificial Sequence
  Synthetic
cgcctatcccctgtcgtc

SEQ ID NO: 33013 - DNA, 20 bp, Artificial Sequence
  Synthetic
caccaaggcatttaggggat

SEQ ID NO: 33014 - DNA, 19 bp, Artificial Sequence
  Synthetic
ggcagttcaggcagtcgat

SEQ ID NO: 33015 - DNA, 19 bp, Artificial Sequence
  Synthetic
cctgaaactctacgccctg

SEQ ID NO: 33016 - DNA, 19 bp, Artificial Sequence
  Synthetic
cgataatggcagatacggc

SEQ ID NO: 33017 - DNA, 16 bp, Artificial Sequence
  Synthetic
cgaatggggacgcgac

SEQ ID NO: 33018 - DNA, 18 bp, Artificial Sequence
  Synthetic
catgcgcttcaccgacaa

SEQ ID NO: 33019 - DNA, 17 bp, Artificial Sequence
  Synthetic
acgaagccgccggattt

SEQ ID NO: 33020 - DNA, 17 bp, Artificial Sequence
  Synthetic
tcatccgacaaccgcga

SEQ ID NO: 33021 - DNA, 17 bp, Artificial Sequence
  Synthetic
gcccaatccgtccgcat

SEQ ID NO: 33022 - DNA, 18 bp, Artificial Sequence
  Synthetic
caggacaggcaaccgttt

SEQ ID NO: 33023 - DNA, 20 bp, Artificial Sequence
  Synthetic
aaaacgtcgaactggcattg

SEQ ID NO: 33024 - DNA, 18 bp, Artificial Sequence
  Synthetic
gcactggacgcacaagtt

SEQ ID NO: 33025 - DNA, 16 bp, Artificial Sequence
  Synthetic
gcgtgctgttccccca

SEQ ID NO: 33026 - DNA, 16 bp, Artificial Sequence
  Synthetic
tgccgtccatcctgcc

SEQ ID NO: 33027 - DNA, 17 bp, Artificial Sequence
  Synthetic
actcgccaccctttccg

SEQ ID NO: 33028 - DNA, 18 bp, Artificial Sequence
  Synthetic
gtcagcttcggacaccac

SEQ ID NO: 33029 - DNA, 18 bp, Artificial Sequence
  Synthetic
gtcgaaccgtcgcaaacc

SEQ ID NO: 33030 - DNA, 20 bp, Artificial Sequence
  Synthetic
cgtgtttgaaaaccgcgaac

SEQ ID NO: 33031 - DNA, 17 bp, Artificial Sequence
  Synthetic
cgcttatgccctgcacg

SEQ ID NO: 33032 - DNA, 20 bp, Artificial Sequence
  Synthetic
gcatttcccaagtggcgaaa

SEQ ID NO: 33033 - DNA, 16 bp, Artificial Sequence
  Synthetic
atcccccacgtcgacg

SEQ ID NO: 33034 - DNA, 16 bp, Artificial Sequence
  Synthetic
atcctgcccatcgccc

SEQ ID NO: 33035 - DNA, 18 bp, Artificial Sequence
  Synthetic
cgtccgaaccgcaacact

SEQ ID NO: 33036 - DNA, 17 bp, Artificial Sequence
  Synthetic
gcccaccttcaaacgcg

SEQ ID NO: 33037 - DNA, 18 bp, Artificial Sequence
  Synthetic
gccgttgccgtttcagac

SEQ ID NO: 33038 - DNA, 18 bp, Artificial Sequence
  Synthetic
ccgcacaacgcatacacg

SEQ ID NO: 33039 - DNA, 17 bp, Artificial Sequence
  Synthetic
gcattcaaccgccaggc

SEQ ID NO: 33040 - DNA, 16 bp, Artificial Sequence
  Synthetic
aactgcacgcactgcc

SEQ ID NO: 33041 - DNA, 16 bp, Artificial Sequence
  Synthetic
cgacggcgaaacggtg

SEQ ID NO: 33042 - DNA, 18 bp, Artificial Sequence
  Synthetic
gggaaacgggagaaacgg

SEQ ID NO: 33043 - DNA, 16 bp, Artificial Sequence
  Synthetic
gcggctcggtcgagat

SEQ ID NO: 33044 - DNA, 16 bp, Artificial Sequence
  Synthetic
agctccggatgcgctg

SEQ ID NO: 33045 - DNA, 20 bp, Artificial Sequence
  Synthetic
cctgtccaaatcttcctgcg

SEQ ID NO: 33046 - DNA, 20 bp, Artificial Sequence
  Synthetic
tgcatcagcgagtttacacc

SEQ ID NO: 33047 - DNA, 15 bp, Artificial Sequence
  Synthetic
tggcttcgcgcacga

SEQ ID NO: 33048 - DNA, 18 bp, Artificial Sequence
  Synthetic
gttgcggttgagcaggag

SEQ ID NO: 33049 - DNA, 18 bp, Artificial Sequence
  Synthetic
ctgaacataccggcgcag

SEQ ID NO: 33050 - DNA, 18 bp, Artificial Sequence
  Synthetic
ggacgcgttctgcaaaca

SEQ ID NO: 33051 - DNA, 16 bp, Artificial Sequence
  Synthetic
ggcgtgtgcttgggca

SEQ ID NO: 33052 - DNA, 18 bp, Artificial Sequence
  Synthetic
ttggcggaatattcgggc

SEQ ID NO: 33053 - DNA, 16 bp, Artificial Sequence
  Synthetic
tgcgggctacggcatg

SEQ ID NO: 33054 - DNA, 16 bp, Artificial Sequence
  Synthetic
caatcccgcaccgcag

SEQ ID NO: 33055 - DNA, 16 bp, Artificial Sequence
  Synthetic
cccttccccgcattgc

SEQ ID NO: 33056 - DNA, 16 bp, Artificial Sequence
  Synthetic
tggctgtgttccgggc

SEQ ID NO: 33057 - DNA, 20 bp, Artificial Sequence
  Synthetic
gcgaagaaaacgaaaaagga

SEQ ID NO: 33058 - DNA, 18 bp, Artificial Sequence
  Synthetic
ggtcaaaacatcggcaac

SEQ ID NO: 33059 - DNA, 17 bp, Artificial Sequence
  Synthetic
agggaattttgcgccgg

SEQ ID NO: 33060 - DNA, 20 bp, Artificial Sequence
  Synthetic
gcccaaacttttaacggctt

SEQ ID NO: 33061 - DNA, 17 bp, Artificial Sequence
  Synthetic
cggatacagcagcgcga

SEQ ID NO: 33062 - DNA, 17 bp, Artificial Sequence
  Synthetic
cacagaagcagcaccgg

SEQ ID NO: 33063 - DNA, 17 bp, Artificial Sequence
  Synthetic
tttgagcgcgtcaagca

SEQ ID NO: 33064 - DNA, 17 bp, Artificial Sequence
  Synthetic
cgccctgcaaaccgaag

SEQ ID NO: 33065 - DNA, 16 bp, Artificial Sequence
  Synthetic
aacccgcctcgccgaa

SEQ ID NO: 33066 - DNA, 20 bp, Artificial Sequence
  Synthetic
ccacatggttacactggcaa

SEQ ID NO: 33067 - DNA, 17 bp, Artificial Sequence
  Synthetic
gcgttttgccgcctctt

SEQ ID NO: 33068 - DNA, 16 bp, Artificial Sequence
  Synthetic
cgctgtgcgtggtcga

SEQ ID NO: 33069 - DNA, 18 bp, Artificial Sequence
  Synthetic
tgtccctccgcttcagat

SEQ ID NO: 33070 - DNA, 16 bp, Artificial Sequence
  Synthetic
atgctgcacgccgtcg

SEQ ID NO: 33071 - DNA, 23 bp, Artificial Sequence
  Synthetic
catgattttgaccacatcataat

SEQ ID NO: 33072 - DNA, 19 bp, Artificial Sequence
  Synthetic
gaaaacttactccgaagcg

SEQ ID NO: 33073 - DNA, 20 bp, Artificial Sequence
  Synthetic
agcaggttgtatttttgacg

SEQ ID NO: 33074 - DNA, 19 bp, Artificial Sequence
  Synthetic
gggcgacttcttcttcgtc

SEQ ID NO: 33075 - DNA, 19 bp, Artificial Sequence
  Synthetic
acatttaccgccacacaca

SEQ ID NO: 33076 - DNA, 18 bp, Artificial Sequence
  Synthetic
acacccgctcaacctgat

SEQ ID NO: 33077 - DNA, 17 bp, Artificial Sequence
  Synthetic
accgcctcaaagggacc

SEQ ID NO: 33078 - DNA, 19 bp, Artificial Sequence
  Synthetic
accgtagaagattggcaat

SEQ ID NO: 33079 - DNA, 17 bp, Artificial Sequence
  Synthetic
caaaacaacgcgctccg

SEQ ID NO: 33080 - DNA, 20 bp, Artificial Sequence
  Synthetic
acctgattaaaacacaaccg

SEQ ID NO: 33081 - DNA, 16 bp, Artificial Sequence
  Synthetic
gcccggacaccaaacc

SEQ ID NO: 33082 - DNA, 17 bp, Artificial Sequence
  Synthetic
ggcgaattggcgggaaa

SEQ ID NO: 33083 - DNA, 17 bp, Artificial Sequence
  Synthetic
ctccagcagctttgccc

SEQ ID NO: 33084 - DNA, 18 bp, Artificial Sequence
  Synthetic
ccagcttgggatctcatc

SEQ ID NO: 33085 - DNA, 18 bp, Artificial Sequence
  Synthetic
acctccgtccgaaaacct

SEQ ID NO: 33086 - DNA, 18 bp, Artificial Sequence
  Synthetic
ccggtttgcgttccgaag

SEQ ID NO: 33087 - DNA, 18 bp, Artificial Sequence
  Synthetic
agaacctgcaacgcatcg

SEQ ID NO: 33088 - DNA, 18 bp, Artificial Sequence
  Synthetic
gtgcttcggctttttgcg

SEQ ID NO: 33089 - DNA, 16 bp, Artificial Sequence
  Synthetic
tcctgccggcttaccc

SEQ ID NO: 33090 - DNA, 18 bp, Artificial Sequence
  Synthetic
attttcaggatgtggcgg

SEQ ID NO: 33091 - DNA, 17 bp, Artificial Sequence
  Synthetic
cggtcgagttcgcccat

SEQ ID NO: 33092 - DNA, 16 bp, Artificial Sequence
  Synthetic
ccgcctacacacggca

SEQ ID NO: 33093 - DNA, 20 bp, Artificial Sequence
  Synthetic
gccgcctattcttccgatac

SEQ ID NO: 33094 - DNA, 15 bp, Artificial Sequence
  Synthetic
tttgggcgcgttcgg

SEQ ID NO: 33095 - DNA, 16 bp, Artificial Sequence
  Synthetic
gcggccccgaactgat

SEQ ID NO: 33096 - DNA, 16 bp, Artificial Sequence
  Synthetic
agcaacaccgcctccg

SEQ ID NO: 33097 - DNA, 16 bp, Artificial Sequence
  Synthetic
gctgcaccgcgtgatc

SEQ ID NO: 33098 - DNA, 20 bp, Artificial Sequence
  Synthetic
gcgaaatccaagacttcggt

SEQ ID NO: 33099 - DNA, 16 bp, Artificial Sequence
  Synthetic
ggggctggcgacatca

SEQ ID NO: 33100 - DNA, 19 bp, Artificial Sequence
  Synthetic
cgataaagcgcgagaatgc

SEQ ID NO: 33101 - DNA, 16 bp, Artificial Sequence
  Synthetic
gaatgcgcgcagtccc

SEQ ID NO: 33102 - DNA, 19 bp, Artificial Sequence
  Synthetic
ggcaatgtcggcagtttct

SEQ ID NO: 33103 - DNA, 17 bp, Artificial Sequence
  Synthetic
accgaaccgacctcacc

SEQ ID NO: 33104 - DNA, 16 bp, Artificial Sequence
  Synthetic
gcttcgaccgcttcgc

SEQ ID NO: 33105 - DNA, 18 bp, Artificial Sequence
  Synthetic
tcggcgcgattttcagac

SEQ ID NO: 33106 - DNA, 20 bp, Artificial Sequence
  Synthetic
cacgcagtttttcaggatgc

SEQ ID NO: 33107 - DNA, 18 bp, Artificial Sequence
  Synthetic
caatgcctttgccacggg

SEQ ID NO: 33108 - DNA, 17 bp, Artificial Sequence
  Synthetic
ggtttgccacgcggttc

SEQ ID NO: 33109 - DNA, 19 bp, Artificial Sequence
  Synthetic
agaccttctttcatgcggc

SEQ ID NO: 33110 - DNA, 20 bp, Artificial Sequence
  Synthetic
gcttccagaaaatcgacgtg

SEQ ID NO: 33111 - DNA, 17 bp, Artificial Sequence
  Synthetic
cgaacaactcgccgcca

SEQ ID NO: 33112 - DNA, 18 bp, Artificial Sequence
  Synthetic
cgtcagcttcgccgaatc

SEQ ID NO: 33113 - DNA, 18 bp, Artificial Sequence
  Synthetic
cccaacgcaaagcccata

SEQ ID NO: 33114 - DNA, 19 bp, Artificial Sequence
  Synthetic
cgcaagtgcagattgggaa

SEQ ID NO: 33115 - DNA, 19 bp, Artificial Sequence
  Synthetic
gcagccgtctttttgcaac

SEQ ID NO: 33116 - DNA, 16 bp, Artificial Sequence
  Synthetic
ggcagcgaaggcacac

SEQ ID NO: 33117 - DNA, 15 bp, Artificial Sequence
  Synthetic
cgcctgccgcaacat

SEQ ID NO: 33118 - DNA, 16 bp, Artificial Sequence
  Synthetic
aacgcctgcgccttgc

SEQ ID NO: 33119 - DNA, 19 bp, Artificial Sequence
  Synthetic
ccatttccaaggcgcgttc

SEQ ID NO: 33120 - DNA, 16 bp, Artificial Sequence
  Synthetic
ttccgcaccctgccga

SEQ ID NO: 33121 - DNA, 23 bp, Artificial Sequence
  Synthetic
ggtttattaaaatcgcaaaaccc

SEQ ID NO: 33122 - DNA, 16 bp, Artificial Sequence
  Synthetic
accaactctccggcgg

SEQ ID NO: 33123 - DNA, 16 bp, Artificial Sequence
  Synthetic
gccgtgcagccggtat

SEQ ID NO: 33124 - DNA, 16 bp, Artificial Sequence
  Synthetic
ttcggctccggttggg

SEQ ID NO: 33125 - DNA, 20 bp, Artificial Sequence
  Synthetic
aagcgatatgattgaaggtg

SEQ ID NO: 33126 - DNA, 18 bp, Artificial Sequence
  Synthetic
gcgaaggaatcaacgcgg

SEQ ID NO: 33127 - DNA, 18 bp, Artificial Sequence
  Synthetic
gcctgttgagtatcgccc

SEQ ID NO: 33128 - DNA, 16 bp, Artificial Sequence
  Synthetic
agcaggcgcaggttgc

SEQ ID NO: 33129 - DNA, 17 bp, Artificial Sequence
  Synthetic
gagcgggaatggttcgc

SEQ ID NO: 33130 - DNA, 16 bp, Artificial Sequence
  Synthetic
aaccggcaaaccaggc

SEQ ID NO: 33131 - DNA, 18 bp, Artificial Sequence
  Synthetic
aggcaatccgaaacgcac

SEQ ID NO: 33132 - DNA, 18 bp, Artificial Sequence
  Synthetic
cgatacggcggacggttt

SEQ ID NO: 33133 - DNA, 16 bp, Artificial Sequence
  Synthetic
caatgcgccgcacctg

SEQ ID NO: 33134 - DNA, 17 bp, Artificial Sequence
  Synthetic
tcgccctataccacgcg

SEQ ID NO: 33135 - DNA, 16 bp, Artificial Sequence
  Synthetic
tgcctgcagccgagct

SEQ ID NO: 33136 - DNA, 18 bp, Artificial Sequence
  Synthetic
tgataaaacatccggcgc

SEQ ID NO: 33137 - DNA, 18 bp, Artificial Sequence
  Synthetic
ggcgtgtcagggctgttc

SEQ ID NO: 33138 - DNA, 16 bp, Artificial Sequence
  Synthetic
ataccggcggcaggtt

SEQ ID NO: 33139 - DNA, 20 bp, Artificial Sequence
  Synthetic
cgtcttttgcggttatccac

SEQ ID NO: 33140 - DNA, 20 bp, Artificial Sequence
  Synthetic
gccgatggaaaagcctttgt

SEQ ID NO: 33141 - DNA, 17 bp, Artificial Sequence
  Synthetic
gtaaccgcgcccagttt

SEQ ID NO: 33142 - DNA, 20 bp, Artificial Sequence
  Synthetic
atacgctgcttgaactcctc

SEQ ID NO: 33143 - DNA, 17 bp, Artificial Sequence
  Synthetic
acgacaccgacaggacg

SEQ ID NO: 33144 - DNA, 16 bp, Artificial Sequence
  Synthetic
tcacgggtatgggcgc

SEQ ID NO: 33145 - DNA, 16 bp, Artificial Sequence
  Synthetic
gaggcgcaaacgtggg

SEQ ID NO: 33146 - DNA, 17 bp, Artificial Sequence
  Synthetic
cgacacgcgccctgaaa

SEQ ID NO: 33147 - DNA, 19 bp, Artificial Sequence
  Synthetic
tccggctgttttcggttac

SEQ ID NO: 33148 - DNA, 16 bp, Artificial Sequence
  Synthetic
tgaacgcatcgcccgc

SEQ ID NO: 33149 - DNA, 18 bp, Artificial Sequence
  Synthetic
cccaatgtgtagcgtccc

SEQ ID NO: 33150 - DNA, 16 bp, Artificial Sequence
  Synthetic
gtcgccaagccgaagc

SEQ ID NO: 33151 - DNA, 20 bp, Artificial Sequence
  Synthetic
cggcgttcaacttatcgaca

SEQ ID NO: 33152 - DNA, 16 bp, Artificial Sequence
  Synthetic
agccctgtcgcccaga

SEQ ID NO: 33153 - DNA, 17 bp, Artificial Sequence
  Synthetic
cgtcaaacgctaccgcc

SEQ ID NO: 33154 - DNA, 17 bp, Artificial Sequence
  Synthetic
tctgccttccgcgtctt

SEQ ID NO: 33155 - DNA, 19 bp, Artificial Sequence
  Synthetic
gccttttgcgcctgatacg

SEQ ID NO: 33156 - DNA, 15 bp, Artificial Sequence
  Synthetic
tcatcacgcgcccga

SEQ ID NO: 33157 - DNA, 17 bp, Artificial Sequence
  Synthetic
cccttcccaagcctgca

SEQ ID NO: 33158 - DNA, 19 bp, Artificial Sequence
  Synthetic
gtctttgcggcgttggttt

SEQ ID NO: 33159 - DNA, 16 bp, Artificial Sequence
  Synthetic
gttgatgcctgccggg

SEQ ID NO: 33160 - DNA, 16 bp, Artificial Sequence
  Synthetic
aaagcccgcagcgtcg

SEQ ID NO: 33161 - DNA, 17 bp, Artificial Sequence
  Synthetic
tggttccggggctgtac

SEQ ID NO: 33162 - DNA, 18 bp, Artificial Sequence
  Synthetic
ggaatcaggcattggggc

SEQ ID NO: 33163 - DNA, 20 bp, Artificial Sequence
  Synthetic
caaaatagaaaaggcggctt

SEQ ID NO: 33164 - DNA, 18 bp, Artificial Sequence
  Synthetic
aactgcgttttgaacacc

SEQ ID NO: 33165 - DNA, 19 bp, Artificial Sequence
  Synthetic
gcggctaccaaagaaaccg

SEQ ID NO: 33166 - DNA, 18 bp, Artificial Sequence
  Synthetic
caagaacccagtctcgcc

SEQ ID NO: 33167 - DNA, 20 bp, Artificial Sequence
  Synthetic
gctattccgaagcggtttgc

SEQ ID NO: 33168 - DNA, 20 bp, Artificial Sequence
  Synthetic
aactcggttttcagctggaa

SEQ ID NO: 33169 - DNA, 19 bp, Artificial Sequence
  Synthetic
gctgctgtagttgtcgacg

SEQ ID NO: 33170 - DNA, 19 bp, Artificial Sequence
  Synthetic
gcttccaaggccgtctgaa

SEQ ID NO: 33171 - DNA, 18 bp, Artificial Sequence
  Synthetic
ctgcctcgaccaattccc

SEQ ID NO: 33172 - DNA, 23 bp, Artificial Sequence
  Synthetic
ttttgaaacatgaaaatccatcc

SEQ ID NO: 33173 - DNA, 17 bp, Artificial Sequence
  Synthetic
ccgaacggtggcgacat

SEQ ID NO: 33174 - DNA, 19 bp, Artificial Sequence
  Synthetic
tcggtttccaacgtatcgg

SEQ ID NO: 33175 - DNA, 17 bp, Artificial Sequence
  Synthetic
cgtggcggtctttcagg

SEQ ID NO: 33176 - DNA, 19 bp, Artificial Sequence
  Synthetic
caaaaacatccccatgcgg

SEQ ID NO: 33177 - DNA, 18 bp, Artificial Sequence
  Synthetic
tgatactcggtcgggtcg

SEQ ID NO: 33178 - DNA, 17 bp, Artificial Sequence
  Synthetic
cgcaaggcgttttcgga

SEQ ID NO: 33179 - DNA, 20 bp, Artificial Sequence
  Synthetic
ggctttcatggagtcggtaa

SEQ ID NO: 33180 - DNA, 17 bp, Artificial Sequence
  Synthetic
aaactcaaagccgccgg

SEQ ID NO: 33181 - DNA, 17 bp, Artificial Sequence
  Synthetic
gccgttgccgttttggt

SEQ ID NO: 33182 - DNA, 16 bp, Artificial Sequence
  Synthetic
acgcatcgctgccgac

SEQ ID NO: 33183 - DNA, 18 bp, Artificial Sequence
  Synthetic
tcgtactctccaacggct

SEQ ID NO: 33184 - DNA, 16 bp, Artificial Sequence
  Synthetic
ccacactgttcggcgc

SEQ ID NO: 33185 - DNA, 20 bp, Artificial Sequence
  Synthetic
gccatcgcggtattcatctc

SEQ ID NO: 33186 - DNA, 18 bp, Artificial Sequence
  Synthetic
gcctttatcgcgccgatt

SEQ ID NO: 33187 - DNA, 20 bp, Artificial Sequence
  Synthetic
ggataatcagcaggctgccc

SEQ ID NO: 33188 - DNA, 19 bp, Artificial Sequence
  Synthetic
ttgaaagaattgatggccg

SEQ ID NO: 33189 - DNA, 20 bp, Artificial Sequence
  Synthetic
tggaagaaagctttaccctg

SEQ ID NO: 33190 - DNA, 16 bp, Artificial Sequence
  Synthetic
ccgtcgcacctttgcc

SEQ ID NO: 33191 - DNA, 20 bp, Artificial Sequence
  Synthetic
tccgtccaaaccttccaaag

SEQ ID NO: 33192 - DNA, 16 bp, Artificial Sequence
  Synthetic
cgtggttggcggcaac

SEQ ID NO: 33193 - DNA, 20 bp, Artificial Sequence
  Synthetic
acatcaccaaagacgcagaa

SEQ ID NO: 33194 - DNA, 17 bp, Artificial Sequence
  Synthetic
gcgatgtcggtttcggc

SEQ ID NO: 33195 - DNA, 17 bp, Artificial Sequence
  Synthetic
cgaatacgcgggcgaag

SEQ ID NO: 33196 - DNA, 20 bp, Artificial Sequence
  Synthetic
ttacgagcgtttttctccgc

SEQ ID NO: 33197 - DNA, 16 bp, Artificial Sequence
  Synthetic
aaccgcgccgactacc

SEQ ID NO: 33198 - DNA, 18 bp, Artificial Sequence
  Synthetic
acatacaaaccggtgccg

SEQ ID NO: 33199 - DNA, 16 bp, Artificial Sequence
  Synthetic
attgcagacggcgggc

SEQ ID NO: 33200 - DNA, 19 bp, Artificial Sequence
  Synthetic
gcccgaactacgacggtag

SEQ ID NO: 33201 - DNA, 18 bp, Artificial Sequence
  Synthetic
tggcggtgaaagaactcg

SEQ ID NO: 33202 - DNA, 20 bp, Artificial Sequence
  Synthetic
gcgtttgtttcatgccgaaa

SEQ ID NO: 33203 - DNA, 19 bp, Artificial Sequence
  Synthetic
aaaccggttgaagactgat

SEQ ID NO: 33204 - DNA, 17 bp, Artificial Sequence
  Synthetic
aattcgacaccgccgtc

SEQ ID NO: 33205 - DNA, 16 bp, Artificial Sequence
  Synthetic
ctttcggcggcaaccc

SEQ ID NO: 33206 - DNA, 15 bp, Artificial Sequence
  Synthetic
tgcgccgcctgttgt

SEQ ID NO: 33207 - DNA, 17 bp, Artificial Sequence
  Synthetic
cgacaacgaagccaccc

SEQ ID NO: 33208 - DNA, 20 bp, Artificial Sequence
  Synthetic
cggttttaatcgcttgggca

SEQ ID NO: 33209 - DNA, 18 bp, Artificial Sequence
  Synthetic
ggcaacgaaatcggcgag

SEQ ID NO: 33210 - DNA, 15 bp, Artificial Sequence
  Synthetic
atgacggcggcggtt

SEQ ID NO: 33211 - DNA, 18 bp, Artificial Sequence
  Synthetic
cgggcgttttcaggagaa

SEQ ID NO: 33212 - DNA, 16 bp, Artificial Sequence
  Synthetic
acaggcttctgcggcg

SEQ ID NO: 33213 - DNA, 17 bp, Artificial Sequence
  Synthetic
ggcgcgcaaaatcaggg

SEQ ID NO: 33214 - DNA, 18 bp, Artificial Sequence
  Synthetic
acatcgccgaaaaacgcc

SEQ ID NO: 33215 - DNA, 19 bp, Artificial Sequence
  Synthetic
gcggtctcaatcccaaaga

SEQ ID NO: 33216 - DNA, 17 bp, Artificial Sequence
  Synthetic
gcggcggacgtattgca

SEQ ID NO: 33217 - DNA, 24 bp, Artificial Sequence
  Synthetic
ggtaacatatctgctaatctggta

SEQ ID NO: 33218 - DNA, 19 bp, Artificial Sequence
  Synthetic
aagtcgaagccaacgaagg

SEQ ID NO: 33219 - DNA, 20 bp, Artificial Sequence
  Synthetic
gtaaaaacttcggttgcggc

SEQ ID NO: 33220 - DNA, 19 bp, Artificial Sequence
  Synthetic
cgtttcaacgccgaagaca

SEQ ID NO: 33221 - DNA, 18 bp, Artificial Sequence
  Synthetic
ccagggcatcgtacacgt

SEQ ID NO: 33222 - DNA, 18 bp, Artificial Sequence
  Synthetic
ccgtccccatccctttgt

SEQ ID NO: 33223 - DNA, 17 bp, Artificial Sequence
  Synthetic
gcgcgtgcaaaccgatt

SEQ ID NO: 33224 - DNA, 18 bp, Artificial Sequence
  Synthetic
gtctgtgcgcaaaagctg

SEQ ID NO: 33225 - DNA, 17 bp, Artificial Sequence
  Synthetic
gtccgcccagcaggaaa

SEQ ID NO: 33226 - DNA, 17 bp, Artificial Sequence
  Synthetic
tgtccttcacgccggaa

SEQ ID NO: 33227 - DNA, 17 bp, Artificial Sequence
  Synthetic
cggcgttcggatgcgaa

SEQ ID NO: 33228 - DNA, 16 bp, Artificial Sequence
  Synthetic
cgcgtccgtagcccaa

SEQ ID NO: 33229 - DNA, 16 bp, Artificial Sequence
  Synthetic
aaccctcgtccgcgtc

SEQ ID NO: 33230 - DNA, 15 bp, Artificial Sequence
  Synthetic
cgcttcgcgcccaaa

SEQ ID NO: 33231 - DNA, 23 bp, Artificial Sequence
  Synthetic
gtattatcaatgacaacggtaga

SEQ ID NO: 33232 - DNA, 18 bp, Artificial Sequence
  Synthetic
cctacggtactgcctgta

SEQ ID NO: 33233 - DNA, 17 bp, Artificial Sequence
  Synthetic
gccgtacccagcatcct

SEQ ID NO: 33234 - DNA, 16 bp, Artificial Sequence
  Synthetic
caaacgcaggtcgccg

SEQ ID NO: 33235 - DNA, 18 bp, Artificial Sequence
  Synthetic
cacgataatggcggcagg

SEQ ID NO: 33236 - DNA, 16 bp, Artificial Sequence
  Synthetic
atccctcgccagagcc

SEQ ID NO: 33237 - DNA, 17 bp, Artificial Sequence
  Synthetic
cgtaccggcgacctgat

SEQ ID NO: 33238 - DNA, 20 bp, Artificial Sequence
  Synthetic
ggtatgcccgaattgcacaa

SEQ ID NO: 33239 - DNA, 16 bp, Artificial Sequence
  Synthetic
gcaacatcggacgcgg

SEQ ID NO: 33240 - DNA, 17 bp, Artificial Sequence
  Synthetic
tcgaagcgggactgctt

SEQ ID NO: 33241 - DNA, 18 bp, Artificial Sequence
  Synthetic
gcgtttcctgcgtggtaa

SEQ ID NO: 33242 - DNA, 18 bp, Artificial Sequence
  Synthetic
cctgcgctttgagttcgg

SEQ ID NO: 33243 - DNA, 17 bp, Artificial Sequence
  Synthetic
tcagcccaccgatccaa

SEQ ID NO: 33244 - DNA, 18 bp, Artificial Sequence
  Synthetic
gccccaaagccctggttt

SEQ ID NO: 33245 - DNA, 17 bp, Artificial Sequence
  Synthetic
gcatgaacggccaaggc

SEQ ID NO: 33246 - DNA, 19 bp, Artificial Sequence
  Synthetic
cagtttgcgcaaagcctga

SEQ ID NO: 33247 - DNA, 17 bp, Artificial Sequence
  Synthetic
aatgggcgcattcaccc

SEQ ID NO: 33248 - DNA, 19 bp, Artificial Sequence
  Synthetic
cggcccaaaaccttttccg

SEQ ID NO: 33249 - DNA, 17 bp, Artificial Sequence
  Synthetic
cccgaagccgtggatgt

SEQ ID NO: 33250 - DNA, 18 bp, Artificial Sequence
  Synthetic
gctctatggcgcgattgc

SEQ ID NO: 33251 - DNA, 17 bp, Artificial Sequence
  Synthetic
cgaccaaatcgtccggc

SEQ ID NO: 33252 - DNA, 17 bp, Artificial Sequence
  Synthetic
atcgtcagccgttcggc

SEQ ID NO: 33253 - DNA, 16 bp, Artificial Sequence
  Synthetic
actggctcgccctgct

SEQ ID NO: 33254 - DNA, 16 bp, Artificial Sequence
  Synthetic
ccgccttcgccgaaga

SEQ ID NO: 33255 - DNA, 16 bp, Artificial Sequence
  Synthetic
tgcgcccggtacaacc

SEQ ID NO: 33256 - DNA, 19 bp, Artificial Sequence
  Synthetic
cgtaatttcctgttgccaa

SEQ ID NO: 33257 - DNA, 18 bp, Artificial Sequence
  Synthetic
ccaactggccggtacact

SEQ ID NO: 33258 - DNA, 18 bp, Artificial Sequence
  Synthetic
agccgaaacacgaaacgc

SEQ ID NO: 33259 - DNA, 20 bp, Artificial Sequence
  Synthetic
ccaagaaggaaataccggat

SEQ ID NO: 33260 - DNA, 18 bp, Artificial Sequence
  Synthetic
cagtcctcttgagcagtt

SEQ ID NO: 33261 - DNA, 20 bp, Artificial Sequence
  Synthetic
ggcaagctttattatcgtgt

SEQ ID NO: 33262 - DNA, 18 bp, Artificial Sequence
  Synthetic
cttcttgtgaagcagtgc

SEQ ID NO: 33263 - DNA, 20 bp, Artificial Sequence
  Synthetic
tcattaaaagcttgttggcc

SEQ ID NO: 33264 - DNA, 21 bp, Artificial Sequence
  Synthetic
cagttcaactttttgttcgtg

SEQ ID NO: 33265 - DNA, 18 bp, Artificial Sequence
  Synthetic
attcgacgtgacagtctg

SEQ ID NO: 33266 - DNA, 22 bp, Artificial Sequence
  Synthetic
cgtcaaacaagatgtcaatttg

SEQ ID NO: 33267 - DNA, 18 bp, Artificial Sequence
  Synthetic
ctgtttgagcaggtcggg

SEQ ID NO: 33268 - DNA, 15 bp, Artificial Sequence
  Synthetic
agtggtcggcggcaa

SEQ ID NO: 33269 - DNA, 18 bp, Artificial Sequence
  Synthetic
cgatacgggtggtgcaaa

SEQ ID NO: 33270 - DNA, 16 bp, Artificial Sequence
  Synthetic
tccgtgccggcaaaca

SEQ ID NO: 33271 - DNA, 18 bp, Artificial Sequence
  Synthetic
ctttgtagggaacgcggc

SEQ ID NO: 33272 - DNA, 17 bp, Artificial Sequence
  Synthetic
cggcgcgatgatttcgg

SEQ ID NO: 33273 - DNA, 16 bp, Artificial Sequence
  Synthetic
aggaatgcgggggacg

SEQ ID NO: 33274 - DNA, 19 bp, Artificial Sequence
  Synthetic
cggttgctgacattgtcgt

SEQ ID NO: 33275 - DNA, 16 bp, Artificial Sequence
  Synthetic
cgccctgcttcgagga

SEQ ID NO: 33276 - DNA, 19 bp, Artificial Sequence
  Synthetic
cgacgatttggttgcccaa

SEQ ID NO: 33277 - DNA, 17 bp, Artificial Sequence
  Synthetic
cggcaaacggcatcacc

SEQ ID NO: 33278 - DNA, 19 bp, Artificial Sequence
  Synthetic
gtgctgcaccatcattggg

SEQ ID NO: 33279 - DNA, 16 bp, Artificial Sequence
  Synthetic
ccaacgcgggtttggg

SEQ ID NO: 33280 - DNA, 18 bp, Artificial Sequence
  Synthetic
gtgcaagatccgggcaat

SEQ ID NO: 33281 - DNA, 19 bp, Artificial Sequence
  Synthetic
ttaccgtacaggcaatgcg

SEQ ID NO: 33282 - DNA, 20 bp, Artificial Sequence
  Synthetic
cctacggtttggacgatgac

SEQ ID NO: 33283 - DNA, 16 bp, Artificial Sequence
  Synthetic
ccgacggcgaatggct

SEQ ID NO: 33284 - DNA, 19 bp, Artificial Sequence
  Synthetic
cctatttcgacgacgcgca

SEQ ID NO: 33285 - DNA, 18 bp, Artificial Sequence
  Synthetic
ttgaggacgttttgcgcg

SEQ ID NO: 33286 - DNA, 20 bp, Artificial Sequence
  Synthetic
gcgaaggttttgatatgccg

SEQ ID NO: 33287 - DNA, 19 bp, Artificial Sequence
  Synthetic
gcggttgtcgaatgttccg

SEQ ID NO: 33288 - DNA, 16 bp, Artificial Sequence
  Synthetic
aaggcgagctggcgga

SEQ ID NO: 33289 - DNA, 18 bp, Artificial Sequence
  Synthetic
gtgtccaccattacgggc

SEQ ID NO: 33290 - DNA, 15 bp, Artificial Sequence
  Synthetic
tgggcgcggacatca

SEQ ID NO: 33291 - DNA, 20 bp, Artificial Sequence
  Synthetic
cctgtgtcttcgatgagctg

SEQ ID NO: 33292 - DNA, 17 bp, Artificial Sequence
  Synthetic
atgtgccgtctgaacgc

SEQ ID NO: 33293 - DNA, 18 bp, Artificial Sequence
  Synthetic
gagacaacgatgcgggga

SEQ ID NO: 33294 - DNA, 19 bp, Artificial Sequence
  Synthetic
gttatgcggcaaatcaggc

SEQ ID NO: 33295 - DNA, 19 bp, Artificial Sequence
  Synthetic
ttaggcggcgaaaccattt

SEQ ID NO: 33296 - DNA, 17 bp, Artificial Sequence
  Synthetic
gcgcggcaaagtcagag

SEQ ID NO: 33297 - DNA, 18 bp, Artificial Sequence
  Synthetic
tgaatattgcccgtgccc

SEQ ID NO: 33298 - DNA, 18 bp, Artificial Sequence
  Synthetic
ctttggcgaggttggctt

SEQ ID NO: 33299 - DNA, 22 bp, Artificial Sequence
  Synthetic
gaaatcgcagtattgaaaaagt

SEQ ID NO: 33300 - DNA, 18 bp, Artificial Sequence
  Synthetic
gccgaactcgctgactgc

SEQ ID NO: 33301 - DNA, 20 bp, Artificial Sequence
  Synthetic
gggtctgatatgctgcaatt

SEQ ID NO: 33302 - DNA, 18 bp, Artificial Sequence
  Synthetic
gttttcaggatgccgggc

SEQ ID NO: 33303 - DNA, 18 bp, Artificial Sequence
  Synthetic
cggggaagtcggctttgt

SEQ ID NO: 33304 - DNA, 17 bp, Artificial Sequence
  Synthetic
ttatgcgcgaactcggc

SEQ ID NO: 33305 - DNA, 17 bp, Artificial Sequence
  Synthetic
ggcgcaaagggcaacag

SEQ ID NO: 33306 - DNA, 18 bp, Artificial Sequence
  Synthetic
aacaaacgctccgaaccg

SEQ ID NO: 33307 - DNA, 18 bp, Artificial Sequence
  Synthetic
aatccccctgaccgtacg

SEQ ID NO: 33308 - DNA, 18 bp, Artificial Sequence
  Synthetic
gccgcagtcttgacgttt

SEQ ID NO: 33309 - DNA, 15 bp, Artificial Sequence
  Synthetic
tggcaagcgcgacga

SEQ ID NO: 33310 - DNA, 17 bp, Artificial Sequence
  Synthetic
tgctcctcgcctcatgc

SEQ ID NO: 33311 - DNA, 16 bp, Artificial Sequence
  Synthetic
acctcgacccccgttc

SEQ ID NO: 33312 - DNA, 18 bp, Artificial Sequence
  Synthetic
gaggacaccgttttcgcc

SEQ ID NO: 33313 - DNA, 19 bp, Artificial Sequence
  Synthetic
cctcgacagccatcccaat

SEQ ID NO: 33314 - DNA, 20 bp, Artificial Sequence
  Synthetic
gcccctgatgtttcaagtcg

SEQ ID NO: 33315 - DNA, 20 bp, Artificial Sequence
  Synthetic
gcgtagtcatgcgttttcct

SEQ ID NO: 33316 - DNA, 19 bp, Artificial Sequence
  Synthetic
aaatgattgagcgcaaaga

SEQ ID NO: 33317 - DNA, 16 bp, Artificial Sequence
  Synthetic
tcggcacaacctgcgc

SEQ ID NO: 33318 - DNA, 17 bp, Artificial Sequence
  Synthetic
cgaagccgtccgtttcg

SEQ ID NO: 33319 - DNA, 16 bp, Artificial Sequence
  Synthetic
ttcgtgcagtcgggcg

SEQ ID NO: 33320 - DNA, 17 bp, Artificial Sequence
  Synthetic
gagtccgaccgtccaca

SEQ ID NO: 33321 - DNA, 19 bp, Artificial Sequence
  Synthetic
cgtgccgaacatgggtatg

SEQ ID NO: 33322 - DNA, 16 bp, Artificial Sequence
  Synthetic
gaatcgcggcggcttc

SEQ ID NO: 33323 - DNA, 20 bp, Artificial Sequence
  Synthetic
cgcagaacatggtgtcgtaa

SEQ ID NO: 33324 - DNA, 19 bp, Artificial Sequence
  Synthetic
tgttgttgaggtcgaggat

SEQ ID NO: 33325 - DNA, 16 bp, Artificial Sequence
  Synthetic
ggccaaacgtgtcgct

SEQ ID NO: 33326 - DNA, 18 bp, Artificial Sequence
  Synthetic
cgcccccgaatttttgca

SEQ ID NO: 33327 - DNA, 16 bp, Artificial Sequence
  Synthetic
caaacgcccgatgccc

SEQ ID NO: 33328 - DNA, 20 bp, Artificial Sequence
  Synthetic
ccatgcctgcatcaaatcgg

SEQ ID NO: 33329 - DNA, 19 bp, Artificial Sequence
  Synthetic
tcatatggcgtgtctcccg

SEQ ID NO: 33330 - DNA, 17 bp, Artificial Sequence
  Synthetic
acgtcgagggcttggaa

SEQ ID NO: 33331 - DNA, 16 bp, Artificial Sequence
  Synthetic
aagggtcgccgctgtc

SEQ ID NO: 33332 - DNA, 20 bp, Artificial Sequence
  Synthetic
gctttttctgccggtttacg

SEQ ID NO: 33333 - DNA, 20 bp, Artificial Sequence
  Synthetic
tgcccgtaaattccaacacg

SEQ ID NO: 33334 - DNA, 20 bp, Artificial Sequence
  Synthetic
ccttgtttcagcgtgttgcc

SEQ ID NO: 33335 - DNA, 20 bp, Artificial Sequence
  Synthetic
ggcaattttgacgaaacgcc

SEQ ID NO: 33336 - DNA, 19 bp, Artificial Sequence
  Synthetic
cggcaaccaaatcgtcgat

SEQ ID NO: 33337 - DNA, 21 bp, Artificial Sequence
  Synthetic
ttgttgatacggtttcccaaa

SEQ ID NO: 33338 - DNA, 19 bp, Artificial Sequence
  Synthetic
cggcatttccacaggttcg

SEQ ID NO: 33339 - DNA, 18 bp, Artificial Sequence
  Synthetic
tcaatcgtgttcaaacgc

SEQ ID NO: 33340 - DNA, 18 bp, Artificial Sequence
  Synthetic
tttcaagcgcatacaggc

SEQ ID NO: 33341 - DNA, 18 bp, Artificial Sequence
  Synthetic
tagtccattgtgcgccct

SEQ ID NO: 33342 - DNA, 21 bp, Artificial Sequence
  Synthetic
aataaataggcagcctgaaac

SEQ ID NO: 33343 - DNA, 19 bp, Artificial Sequence
  Synthetic
ttttggttagcagcacggt

SEQ ID NO: 33344 - DNA, 18 bp, Artificial Sequence
  Synthetic
aatccaagctgcctgaaa

SEQ ID NO: 33345 - DNA, 23 bp, Artificial Sequence
  Synthetic
tatgacgaacttcatcatcatgt

SEQ ID NO: 33346 - DNA, 18 bp, Artificial Sequence
  Synthetic
ttgtgtcgtgtctcatcg

SEQ ID NO: 33347 - DNA, 15 bp, Artificial Sequence
  Synthetic
aagcattgccgcccg

SEQ ID NO: 33348 - DNA, 17 bp, Artificial Sequence
  Synthetic
gtagcgcagattgccgg

SEQ ID NO: 33349 - DNA, 21 bp, Artificial Sequence
  Synthetic
ggatatggatgtccgacaatc

SEQ ID NO: 33350 - DNA, 20 bp, Artificial Sequence
  Synthetic
ctgaaacaatcgtctcaagg

SEQ ID NO: 33351 - DNA, 20 bp, Artificial Sequence
  Synthetic
gaaattgtagagcggctcca

SEQ ID NO: 33352 - DNA, 18 bp, Artificial Sequence
  Synthetic
cgcctgattcccctttcc

SEQ ID NO: 33353 - DNA, 23 bp, Artificial Sequence
  Synthetic
ggtatcaaaccgaattttttgtg

SEQ ID NO: 33354 - DNA, 20 bp, Artificial Sequence
  Synthetic
ggataggcaaaaaccggctc

SEQ ID NO: 33355 - DNA, 15 bp, Artificial Sequence
  Synthetic
catcgctgcgccgtt

SEQ ID NO: 33356 - DNA, 17 bp, Artificial Sequence
  Synthetic
tccgggtgcgttcaaac

SEQ ID NO: 33357 - DNA, 15 bp, Artificial Sequence
  Synthetic
ttcggcgcagtggca

SEQ ID NO: 33358 - DNA, 19 bp, Artificial Sequence
  Synthetic
ggtacacaattgtcccggg

SEQ ID NO: 33359 - DNA, 19 bp, Artificial Sequence
  Synthetic
cctcgtctatcagttccaa

SEQ ID NO: 33360 - DNA, 20 bp, Artificial Sequence
  Synthetic
ggtatgcagaccgtatcgtc

SEQ ID NO: 33361 - DNA, 18 bp, Artificial Sequence
  Synthetic
tttcccaaagccgcgaag

SEQ ID NO: 33362 - DNA, 20 bp, Artificial Sequence
  Synthetic
cgaagccacgaaaccgtaaa

SEQ ID NO: 33363 - DNA, 18 bp, Artificial Sequence
  Synthetic
acctttcgtatcggcggt

SEQ ID NO: 33364 - DNA, 18 bp, Artificial Sequence
  Synthetic
gcggatgattcggaggca

SEQ ID NO: 33365 - DNA, 17 bp, Artificial Sequence
  Synthetic
gttttcgcggcaatgcc

SEQ ID NO: 33366 - DNA, 17 bp, Artificial Sequence
  Synthetic
gcgtccagggtcagctt

SEQ ID NO: 33367 - DNA, 18 bp, Artificial Sequence
  Synthetic
tattttactgcgcccgcc

SEQ ID NO: 33368 - DNA, 20 bp, Artificial Sequence
  Synthetic
gactacggtgttgtcggaac

SEQ ID NO: 33369 - DNA, 16 bp, Artificial Sequence
  Synthetic
ttcttcgggcgcgagg

SEQ ID NO: 33370 - DNA, 20 bp, Artificial Sequence
  Synthetic
caacagcagtttttcggtgg

SEQ ID NO: 33371 - DNA, 17 bp, Artificial Sequence
  Synthetic
atagcggcaatgtcggc

SEQ ID NO: 33372 - DNA, 16 bp, Artificial Sequence
  Synthetic
aggtgcgcgaggtgtc

SEQ ID NO: 33373 - DNA, 17 bp, Artificial Sequence
  Synthetic
gcttgaccacggcaacc

SEQ ID NO: 33374 - DNA, 16 bp, Artificial Sequence
  Synthetic
ttccgccctgccgatt

SEQ ID NO: 33375 - DNA, 18 bp, Artificial Sequence
  Synthetic
gcggtggcttcgatgttg

SEQ ID NO: 33376 - DNA, 19 bp, Artificial Sequence
  Synthetic
cctggctgttccatcatgc

SEQ ID NO: 33377 - DNA, 16 bp, Artificial Sequence
  Synthetic
gcaggctttgacgggc

SEQ ID NO: 33378 - DNA, 17 bp, Artificial Sequence
  Synthetic
ccgcgcggaaactttga

SEQ ID NO: 33379 - DNA, 16 bp, Artificial Sequence
  Synthetic
tttcgggcaggtgcgc

SEQ ID NO: 33380 - DNA, 16 bp, Artificial Sequence
  Synthetic
ggcggcagatcgagga

SEQ ID NO: 33381 - DNA, 17 bp, Artificial Sequence
  Synthetic
cgcctcgccgaaagcat

SEQ ID NO: 33382 - DNA, 18 bp, Artificial Sequence
  Synthetic
tgaaaaccttgccgggac

SEQ ID NO: 33383 - DNA, 18 bp, Artificial Sequence
  Synthetic
cggactatacggcggacg

SEQ ID NO: 33384 - DNA, 16 bp, Artificial Sequence
  Synthetic
cggcggcttatgcgac

SEQ ID NO: 33385 - DNA, 18 bp, Artificial Sequence
  Synthetic
caggcctgaaaccgaccc

SEQ ID NO: 33386 - DNA, 17 bp, Artificial Sequence
  Synthetic
gcggacgcttggggtat

SEQ ID NO: 33387 - DNA, 16 bp, Artificial Sequence
  Synthetic
atgcggcagacgaggg

SEQ ID NO: 33388 - DNA, 15 bp, Artificial Sequence
  Synthetic
tccggcaaaagcgcg

SEQ ID NO: 33389 - DNA, 16 bp, Artificial Sequence
  Synthetic
gccggaagctggaagc

SEQ ID NO: 33390 - DNA, 17 bp, Artificial Sequence
  Synthetic
cggcttgccgtacatcg

SEQ ID NO: 33391 - DNA, 20 bp, Artificial Sequence
  Synthetic
gccgtccgtttgaaatgttc

SEQ ID NO: 33392 - DNA, 16 bp, Artificial Sequence
  Synthetic
ccgatgccgcgtcctt

SEQ ID NO: 33393 - DNA, 16 bp, Artificial Sequence
  Synthetic
acaccacggcggatgt

SEQ ID NO: 33394 - DNA, 19 bp, Artificial Sequence
  Synthetic
caagtcggcaagatggtta

SEQ ID NO: 33395 - DNA, 18 bp, Artificial Sequence
  Synthetic
aaccccttgggcgaagtg

SEQ ID NO: 33396 - DNA, 18 bp, Artificial Sequence
  Synthetic
taaacaacgggtgcacgc

SEQ ID NO: 33397 - DNA, 20 bp, Artificial Sequence
  Synthetic
ccattgcacatccataccga

SEQ ID NO: 33398 - DNA, 16 bp, Artificial Sequence
  Synthetic
ctttaccgcccggcac

SEQ ID NO: 33399 - DNA, 18 bp, Artificial Sequence
  Synthetic
cgtccaacacggtggtca

SEQ ID NO: 33400 - DNA, 17 bp, Artificial Sequence
  Synthetic
gcgatgtcggcaatgct

SEQ ID NO: 33401 - DNA, 17 bp, Artificial Sequence
  Synthetic
ggcgggtgctggtttct

SEQ ID NO: 33402 - DNA, 17 bp, Artificial Sequence
  Synthetic
cgtctgcctttacgccg

SEQ ID NO: 33403 - DNA, 16 bp, Artificial Sequence
  Synthetic
cggcggtcagctccat

SEQ ID NO: 33404 - DNA, 23 bp, Artificial Sequence
  Synthetic
gcttgaagttttaaaggagaaga

SEQ ID NO: 33405 - DNA, 20 bp, Artificial Sequence
  Synthetic
cgtgagctgggtttaaaacg

SEQ ID NO: 33406 - DNA, 20 bp, Artificial Sequence
  Synthetic
gcggcactgttttaccgtaa

SEQ ID NO: 33407 - DNA, 18 bp, Artificial Sequence
  Synthetic
cggatgatgccgtggaac

SEQ ID NO: 33408 - DNA, 19 bp, Artificial Sequence
  Synthetic
gctgtttgaggtcggggat

SEQ ID NO: 33409 - DNA, 16 bp, Artificial Sequence
  Synthetic
tcgaataccgcgccgc

SEQ ID NO: 33410 - DNA, 19 bp, Artificial Sequence
  Synthetic
cccatagacatcgcttcgc

SEQ ID NO: 33411 - DNA, 16 bp, Artificial Sequence
  Synthetic
ggaagcggccagccat

SEQ ID NO: 33412 - DNA, 18 bp, Artificial Sequence
  Synthetic
accatttggcagccgttg

SEQ ID NO: 33413 - DNA, 16 bp, Artificial Sequence
  Synthetic
ggcggtaatggcggga

SEQ ID NO: 33414 - DNA, 16 bp, Artificial Sequence
  Synthetic
atccccgcgtatgccg

SEQ ID NO: 33415 - DNA, 19 bp, Artificial Sequence
  Synthetic
cttcgtcgaaaaggtgcga

SEQ ID NO: 33416 - DNA, 16 bp, Artificial Sequence
  Synthetic
atgccgcccggaatgc

SEQ ID NO: 33417 - DNA, 18 bp, Artificial Sequence
  Synthetic
cgcgacccatggctaact

SEQ ID NO: 33418 - DNA, 16 bp, Artificial Sequence
  Synthetic
aggcggctgcggtttc

SEQ ID NO: 33419 - DNA, 17 bp, Artificial Sequence
  Synthetic
gcggggttgctgctgta

SEQ ID NO: 33420 - DNA, 20 bp, Artificial Sequence
  Synthetic
gcaaagtttgacaacgattc

SEQ ID NO: 33421 - DNA, 18 bp, Artificial Sequence
  Synthetic
gcgcgctggatttttgtc

SEQ ID NO: 33422 - DNA, 18 bp, Artificial Sequence
  Synthetic
cttcacgtttacgccgcc

SEQ ID NO: 33423 - DNA, 16 bp, Artificial Sequence
  Synthetic
cccaaatcgcgcaggc

SEQ ID NO: 33424 - DNA, 15 bp, Artificial Sequence
  Synthetic
agcgtttgccgtggc

SEQ ID NO: 33425 - DNA, 18 bp, Artificial Sequence
  Synthetic
catcgtttggccttggct

SEQ ID NO: 33426 - DNA, 16 bp, Artificial Sequence
  Synthetic
ccgtcgtcgccctgat

SEQ ID NO: 33427 - DNA, 20 bp, Artificial Sequence
  Synthetic
gctacgatgtggacagcatc

SEQ ID NO: 33428 - DNA, 18 bp, Artificial Sequence
  Synthetic
tgattatcggcggcgaag

SEQ ID NO: 33429 - DNA, 20 bp, Artificial Sequence
  Synthetic
tgaaagaacacggcgacatc

SEQ ID NO: 33430 - DNA, 16 bp, Artificial Sequence
  Synthetic
cacaacaccgccgcac

SEQ ID NO: 33431 - DNA, 19 bp, Artificial Sequence
  Synthetic
agaccgacatttcgctgtc

SEQ ID NO: 33432 - DNA, 18 bp, Artificial Sequence
  Synthetic
ggcagccaggaatgaggc

SEQ ID NO: 33433 - DNA, 19 bp, Artificial Sequence
  Synthetic
gccgctgaaacgtaccaat

SEQ ID NO: 33434 - DNA, 16 bp, Artificial Sequence
  Synthetic
acgaacagcccggcat

SEQ ID NO: 33435 - DNA, 19 bp, Artificial Sequence
  Synthetic
gccgtcggtcagtgtgaaa

SEQ ID NO: 33436 - DNA, 19 bp, Artificial Sequence
  Synthetic
tgaggatggcttgggcaat

SEQ ID NO: 33437 - DNA, 16 bp, Artificial Sequence
  Synthetic
cggatgccagttgcgc

SEQ ID NO: 33438 - DNA, 18 bp, Artificial Sequence
  Synthetic
tgaaacatacgccggtcg

SEQ ID NO: 33439 - DNA, 16 bp, Artificial Sequence
  Synthetic
gatgacgacgcggctg

SEQ ID NO: 33440 - DNA, 16 bp, Artificial Sequence
  Synthetic
aggcgcggacgagttc

SEQ ID NO: 33441 - DNA, 19 bp, Artificial Sequence
  Synthetic
gaatgactatgcggcaatt

SEQ ID NO: 33442 - DNA, 20 bp, Artificial Sequence
  Synthetic
cagataaaccgccgatggaa

SEQ ID NO: 33443 - DNA, 19 bp, Artificial Sequence
  Synthetic
gattttccggtcaggtcgg

SEQ ID NO: 33444 - DNA, 20 bp, Artificial Sequence
  Synthetic
gcgcatggcaaacaaaatgc

SEQ ID NO: 33445 - DNA, 19 bp, Artificial Sequence
  Synthetic
gaacaggtaggtcagcacg

SEQ ID NO: 33446 - DNA, 18 bp, Artificial Sequence
  Synthetic
gacgaccgcttcctgaac

SEQ ID NO: 33447 - DNA, 19 bp, Artificial Sequence
  Synthetic
gttatcccttgtccgctcc

SEQ ID NO: 33448 - DNA, 18 bp, Artificial Sequence
  Synthetic
cgagcctatgttctggct

SEQ ID NO: 33449 - DNA, 21 bp, Artificial Sequence
  Synthetic
ttctgaaaatgctgattgtca

SEQ ID NO: 33450 - DNA, 17 bp, Artificial Sequence
  Synthetic
cacggacaggaacggga

SEQ ID NO: 33451 - DNA, 20 bp, Artificial Sequence
  Synthetic
ccgaaacatgattttttgcc

SEQ ID NO: 33452 - DNA, 20 bp, Artificial Sequence
  Synthetic
ggttggtgtcttcggcaaat

SEQ ID NO: 33453 - DNA, 20 bp, Artificial Sequence
  Synthetic
ggtgtgtacggtttcttggc

SEQ ID NO: 33454 - DNA, 16 bp, Artificial Sequence
  Synthetic
ccactttggccgctgc

SEQ ID NO: 33455 - DNA, 16 bp, Artificial Sequence
  Synthetic
gccgaaccgcgatgtg

SEQ ID NO: 33456 - DNA, 18 bp, Artificial Sequence
  Synthetic
gatgacgatgcggctgac

SEQ ID NO: 33457 - DNA, 19 bp, Artificial Sequence
  Synthetic
tttgttgcctgcttttgcc

SEQ ID NO: 33458 - DNA, 16 bp, Artificial Sequence
  Synthetic
gcgctgaccacgggtt

SEQ ID NO: 33459 - DNA, 17 bp, Artificial Sequence
  Synthetic
tgcacaccgaccctgaa

SEQ ID NO: 33460 - DNA, 17 bp, Artificial Sequence
  Synthetic
gggacacaccaacaccg

SEQ ID NO: 33461 - DNA, 16 bp, Artificial Sequence
  Synthetic
accgtgtccgccgttt

SEQ ID NO: 33462 - DNA, 17 bp, Artificial Sequence
  Synthetic
ttttcagcagtccggcg

SEQ ID NO: 33463 - DNA, 20 bp, Artificial Sequence
  Synthetic
cgggttgaaagcctcatcac

SEQ ID NO: 33464 - DNA, 18 bp, Artificial Sequence
  Synthetic
ggagaaaggctcgtgcaa

SEQ ID NO: 33465 - DNA, 20 bp, Artificial Sequence
  Synthetic
tgtttcagcaaattccccca

SEQ ID NO: 33466 - DNA, 20 bp, Artificial Sequence
  Synthetic
caataccgtccggcatgatt

SEQ ID NO: 33467 - DNA, 19 bp, Artificial Sequence
  Synthetic
caagggtatggctgttcgc

SEQ ID NO: 33468 - DNA, 20 bp, Artificial Sequence
  Synthetic
cccatatatccgcaaagtca

SEQ ID NO: 33469 - DNA, 18 bp, Artificial Sequence
  Synthetic
acgaaatgccgctttggt

SEQ ID NO: 33470 - DNA, 19 bp, Artificial Sequence
  Synthetic
ccaattcgcgtgacaggat

SEQ ID NO: 33471 - DNA, 17 bp, Artificial Sequence
  Synthetic
caacggggacagaacgc

SEQ ID NO: 33472 - DNA, 18 bp, Artificial Sequence
  Synthetic
cggcaggatattggcagg

SEQ ID NO: 33473 - DNA, 18 bp, Artificial Sequence
  Synthetic
cttttgcctcgccgcttt

SEQ ID NO: 33474 - DNA, 19 bp, Artificial Sequence
  Synthetic
gccttggaatgcgtcgata

SEQ ID NO: 33475 - DNA, 16 bp, Artificial Sequence
  Synthetic
caatgcgtccgcctcg

SEQ ID NO: 33476 - DNA, 16 bp, Artificial Sequence
  Synthetic
ggatacacgcgcgcat

SEQ ID NO: 33477 - DNA, 20 bp, Artificial Sequence
  Synthetic
gcccatcatggtcaggtaca

SEQ ID NO: 33478 - DNA, 18 bp, Artificial Sequence
  Synthetic
tcgccgtcgatgactttc

SEQ ID NO: 33479 - DNA, 17 bp, Artificial Sequence
  Synthetic
gccgtacacgtcgtcca

SEQ ID NO: 33480 - DNA, 16 bp, Artificial Sequence
  Synthetic
cgcctgccgacaatgc

SEQ ID NO: 33481 - DNA, 18 bp, Artificial Sequence
  Synthetic
ccctacctgccgatggaa

SEQ ID NO: 33482 - DNA, 18 bp, Artificial Sequence
  Synthetic
gcgaagacatccgcgaaa

SEQ ID NO: 33483 - DNA, 16 bp, Artificial Sequence
  Synthetic
gcgtctattgcgcgcc

SEQ ID NO: 33484 - DNA, 18 bp, Artificial Sequence
  Synthetic
ccgtcctcaaaggcttgg

SEQ ID NO: 33485 - DNA, 20 bp, Artificial Sequence
  Synthetic
tgttggaaaaattggcgcaa

SEQ ID NO: 33486 - DNA, 18 bp, Artificial Sequence
  Synthetic
gcgtacagccgtctgaaa

SEQ ID NO: 33487 - DNA, 18 bp, Artificial Sequence
  Synthetic
ccgcaggcaaaaatcgcc

SEQ ID NO: 33488 - DNA, 17 bp, Artificial Sequence
  Synthetic
actgtatcccgccgtcg

SEQ ID NO: 33489 - DNA, 16 bp, Artificial Sequence
  Synthetic
tacacggcagcgtggc

SEQ ID NO: 33490 - DNA, 18 bp, Artificial Sequence
  Synthetic
cggaggtcgagaaagccg

SEQ ID NO: 33491 - DNA, 16 bp, Artificial Sequence
  Synthetic
gcggtgttcggcagca

SEQ ID NO: 33492 - DNA, 18 bp, Artificial Sequence
  Synthetic
cccgaggcatattggagc

SEQ ID NO: 33493 - DNA, 18 bp, Artificial Sequence
  Synthetic
ccgatgtcaggcgggaat

SEQ ID NO: 33494 - DNA, 16 bp, Artificial Sequence
  Synthetic
aggccggcgttcaaca

SEQ ID NO: 33495 - DNA, 15 bp, Artificial Sequence
  Synthetic
ttgcggcttggcgga

SEQ ID NO: 33496 - DNA, 18 bp, Artificial Sequence
  Synthetic
gctggcggcaatgtgttt

SEQ ID NO: 33497 - DNA, 19 bp, Artificial Sequence
  Synthetic
tcgagttggaaggctacga

SEQ ID NO: 33498 - DNA, 18 bp, Artificial Sequence
  Synthetic
gcctgccggtttgagttc

SEQ ID NO: 33499 - DNA, 18 bp, Artificial Sequence
  Synthetic
tgatcgagcgcaacaacc

SEQ ID NO: 33500 - DNA, 16 bp, Artificial Sequence
  Synthetic
ttcgcctgcaaccggc

SEQ ID NO: 33501 - DNA, 17 bp, Artificial Sequence
  Synthetic
ccggcggtttggaagac

SEQ ID NO: 33502 - DNA, 20 bp, Artificial Sequence
  Synthetic
tttccgcatgatggttgtct

SEQ ID NO: 33503 - DNA, 16 bp, Artificial Sequence
  Synthetic
gcagcttgcgtggagc

SEQ ID NO: 33504 - DNA, 20 bp, Artificial Sequence
  Synthetic
ccgttcaaagtcatctgcct

SEQ ID NO: 33505 - DNA, 17 bp, Artificial Sequence
  Synthetic
gggtcaaatggcaggcg

SEQ ID NO: 33506 - DNA, 18 bp, Artificial Sequence
  Synthetic
gtgaaccaaaccgccctg

SEQ ID NO: 33507 - DNA, 19 bp, Artificial Sequence
  Synthetic
ccgcttttgcacgacatgg

SEQ ID NO: 33508 - DNA, 19 bp, Artificial Sequence
  Synthetic
cgccgatgtatttgcagct

SEQ ID NO: 33509 - DNA, 18 bp, Artificial Sequence
  Synthetic
cttggtggcggaatctgc

SEQ ID NO: 33510 - DNA, 18 bp, Artificial Sequence
  Synthetic
tctgttgccggagagtcg

SEQ ID NO: 33511 - DNA, 23 bp, Artificial Sequence
  Synthetic
aaacaaatcgtcgtaataggatg

SEQ ID NO: 33512 - DNA, 18 bp, Artificial Sequence
  Synthetic
aagctcttgcaggttggg

SEQ ID NO: 33513 - DNA, 19 bp, Artificial Sequence
  Synthetic
ttcgagcgtgaacctcatg

SEQ ID NO: 33514 - DNA, 16 bp, Artificial Sequence
  Synthetic
accctgctcgccaacc

SEQ ID NO: 33515 - DNA, 19 bp, Artificial Sequence
  Synthetic
gccgccgtcaaagaaatgg

SEQ ID NO: 33516 - DNA, 18 bp, Artificial Sequence
  Synthetic
gaaagcgaacctcggcaa

SEQ ID NO: 33517 - DNA, 18 bp, Artificial Sequence
  Synthetic
tggcgttgctgttgagtt

SEQ ID NO: 33518 - DNA, 17 bp, Artificial Sequence
  Synthetic
gaggcaaggcagaaggc

SEQ ID NO: 33519 - DNA, 17 bp, Artificial Sequence
  Synthetic
cgccaaaaatccccggc

SEQ ID NO: 33520 - DNA, 20 bp, Artificial Sequence
  Synthetic
ccgtcggtattacccatcac

SEQ ID NO: 33521 - DNA, 18 bp, Artificial Sequence
  Synthetic
ttgcccagccttcatgtc

SEQ ID NO: 33522 - DNA, 16 bp, Artificial Sequence
  Synthetic
gccttcgcgtgcttcg

SEQ ID NO: 33523 - DNA, 19 bp, Artificial Sequence
  Synthetic
cggtgtacaggaacaggct

SEQ ID NO: 33524 - DNA, 18 bp, Artificial Sequence
  Synthetic
gggttttgagcgatcgcg

SEQ ID NO: 33525 - DNA, 19 bp, Artificial Sequence
  Synthetic
catcacgccacccgtcatg

SEQ ID NO: 33526 - DNA, 17 bp, Artificial Sequence
  Synthetic
tctcaacgccgccaaag

SEQ ID NO: 33527 - DNA, 20 bp, Artificial Sequence
  Synthetic
aggtgttgtttctgttgccc

SEQ ID NO: 33528 - DNA, 18 bp, Artificial Sequence
  Synthetic
gggcggacaaactcttgc

SEQ ID NO: 33529 - DNA, 19 bp, Artificial Sequence
  Synthetic
tacatctcccacaaccgcc

SEQ ID NO: 33530 - DNA, 18 bp, Artificial Sequence
  Synthetic
gcaccatccacctcctct

SEQ ID NO: 33531 - DNA, 17 bp, Artificial Sequence
  Synthetic
cccgcgtacaaaccctg

SEQ ID NO: 33532 - DNA, 15 bp, Artificial Sequence
  Synthetic
acgcaccgccgaact

SEQ ID NO: 33533 - DNA, 17 bp, Artificial Sequence
  Synthetic
gccctgtccgtcatcct

SEQ ID NO: 33534 - DNA, 19 bp, Artificial Sequence
  Synthetic
gcctcaaaccgcttccaaa

SEQ ID NO: 33535 - DNA, 16 bp, Artificial Sequence
  Synthetic
ggcgatgcaggttgcc

SEQ ID NO: 33536 - DNA, 18 bp, Artificial Sequence
  Synthetic
cttttgcaggatgcgccg

SEQ ID NO: 33537 - DNA, 19 bp, Artificial Sequence
  Synthetic
tgttgttgaggcacaccat

SEQ ID NO: 33538 - DNA, 16 bp, Artificial Sequence
  Synthetic
ttttccagcggcgcag

SEQ ID NO: 33539 - DNA, 18 bp, Artificial Sequence
  Synthetic
tcgcctggctcaactacc

SEQ ID NO: 33540 - DNA, 16 bp, Artificial Sequence
  Synthetic
tgccggtgagcgacac

SEQ ID NO: 33541 - DNA, 16 bp, Artificial Sequence
  Synthetic
tagcctacgccgtggc

SEQ ID NO: 33542 - DNA, 16 bp, Artificial Sequence
  Synthetic
agccacgcttttgccg

SEQ ID NO: 33543 - DNA, 16 bp, Artificial Sequence
  Synthetic
gtgctcctggcgcaga

SEQ ID NO: 33544 - DNA, 17 bp, Artificial Sequence
  Synthetic
gcaaagcgcaagatgcc

SEQ ID NO: 33545 - DNA, 18 bp, Artificial Sequence
  Synthetic
gaagtcttgatggcgccg

SEQ ID NO: 33546 - DNA, 16 bp, Artificial Sequence
  Synthetic
cccgcctgcgtgattg

SEQ ID NO: 33547 - DNA, 16 bp, Artificial Sequence
  Synthetic
accatcgccaagcccg

SEQ ID NO: 33548 - DNA, 15 bp, Artificial Sequence
  Synthetic
ttttgcagccgccgc

SEQ ID NO: 33549 - DNA, 16 bp, Artificial Sequence
  Synthetic
tccggagcgggtttgg

SEQ ID NO: 33550 - DNA, 19 bp, Artificial Sequence
  Synthetic
catcaggtgttggcgatgg

SEQ ID NO: 33551 - DNA, 18 bp, Artificial Sequence
  Synthetic
atatcagcaatgcccgac

SEQ ID NO: 33552 - DNA, 19 bp, Artificial Sequence
  Synthetic
aacggttacgcaaatcact

SEQ ID NO: 33553 - DNA, 19 bp, Artificial Sequence
  Synthetic
gcgcgaatacgtttttgag

SEQ ID NO: 33554 - DNA, 21 bp, Artificial Sequence
  Synthetic
gccaatgtgaatatgtccttg

SEQ ID NO: 33555 - DNA, 18 bp, Artificial Sequence
  Synthetic
aaatccaaaatgggccga

SEQ ID NO: 33556 - DNA, 18 bp, Artificial Sequence
  Synthetic
ctatccactttgggcgcg

SEQ ID NO: 33557 - DNA, 23 bp, Artificial Sequence
  Synthetic
aagtatagttttgttctccttgt

SEQ ID NO: 33558 - DNA, 19 bp, Artificial Sequence
  Synthetic
tatcgtggcaaacctatgc

SEQ ID NO: 33559 - DNA, 19 bp, Artificial Sequence
  Synthetic
ttgccacaaattgcgtaag

SEQ ID NO: 33560 - DNA, 18 bp, Artificial Sequence
  Synthetic
atacggatgcctgtatcg

SEQ ID NO: 33561 - DNA, 18 bp, Artificial Sequence
  Synthetic
cgatacaacgggttttgc

SEQ ID NO: 33562 - DNA, 19 bp, Artificial Sequence
  Synthetic
ggcactatggaatcactga

SEQ ID NO: 33563 - DNA, 21 bp, Artificial Sequence
  Synthetic
accagttcttcatcacgttta

SEQ ID NO: 33564 - DNA, 16 bp, Artificial Sequence
  Synthetic
cctcgccattgccgca

SEQ ID NO: 33565 - DNA, 16 bp, Artificial Sequence
  Synthetic
tgttgaacgccgccgc

SEQ ID NO: 33566 - DNA, 23 bp, Artificial Sequence
  Synthetic
gcctaaagaaaaggaggttaaat

SEQ ID NO: 33567 - DNA, 17 bp, Artificial Sequence
  Synthetic
tggtcatagcggcaggc

SEQ ID NO: 33568 - DNA, 15 bp, Artificial Sequence
  Synthetic
tttgagcgcggcggt

SEQ ID NO: 33569 - DNA, 18 bp, Artificial Sequence
  Synthetic
agaatttggcggcagagc

SEQ ID NO: 33570 - DNA, 19 bp, Artificial Sequence
  Synthetic
cccgcttcaatacggatgt

SEQ ID NO: 33571 - DNA, 19 bp, Artificial Sequence
  Synthetic
gctcgattcagacggcaat

SEQ ID NO: 33572 - DNA, 17 bp, Artificial Sequence
  Synthetic
tgccgccaaagaagcct

SEQ ID NO: 33573 - DNA, 17 bp, Artificial Sequence
  Synthetic
gcaaatccaagccgcct

SEQ ID NO: 33574 - DNA, 17 bp, Artificial Sequence
  Synthetic
gcggcgtattggttccg

SEQ ID NO: 33575 - DNA, 20 bp, Artificial Sequence
  Synthetic
gggaagtgatgagcgaatgc

SEQ ID NO: 33576 - DNA, 17 bp, Artificial Sequence
  Synthetic
tccgcaaagcatcctgc

SEQ ID NO: 33577 - DNA, 16 bp, Artificial Sequence
  Synthetic
gctggttcggctgcct

SEQ ID NO: 33578 - DNA, 17 bp, Artificial Sequence
  Synthetic
gcgtccagggtcagctt

SEQ ID NO: 33579 - DNA, 19 bp, Artificial Sequence
  Synthetic
cgggtattttactgcgccc

SEQ ID NO: 33580 - DNA, 19 bp, Artificial Sequence
  Synthetic
tggatgccgtctgaaggtt

SEQ ID NO: 33581 - DNA, 16 bp, Artificial Sequence
  Synthetic
tcggggtcggcggtat

SEQ ID NO: 33582 - DNA, 17 bp, Artificial Sequence
  Synthetic
gcgggccgcttttaagc

SEQ ID NO: 33583 - DNA, 20 bp, Artificial Sequence
  Synthetic
tccttgacgaactgaaagcc

SEQ ID NO: 33584 - DNA, 18 bp, Artificial Sequence
  Synthetic
accacgctatgatgggca

SEQ ID NO: 33585 - DNA, 20 bp, Artificial Sequence
  Synthetic
cgcgctgaaaatgggtttga

SEQ ID NO: 33586 - DNA, 18 bp, Artificial Sequence
  Synthetic
cgctgtacgactggcgac

SEQ ID NO: 33587 - DNA, 16 bp, Artificial Sequence
  Synthetic
tggcaggcccgagcaa

SEQ ID NO: 33588 - DNA, 16 bp, Artificial Sequence
  Synthetic
cggcaggcgggcatta

SEQ ID NO: 33589 - DNA, 16 bp, Artificial Sequence
  Synthetic
aacggcgtggctttcc

SEQ ID NO: 33590 - DNA, 18 bp, Artificial Sequence
  Synthetic
ggacggacatcaatggcg

SEQ ID NO: 33591 - DNA, 16 bp, Artificial Sequence
  Synthetic
tggcgctggaagtcgg

SEQ ID NO: 33592 - DNA, 18 bp, Artificial Sequence
  Synthetic
gctccctaccgtgtgcag

SEQ ID NO: 33593 - DNA, 16 bp, Artificial Sequence
  Synthetic
ggcatgggcaaagggc

SEQ ID NO: 33594 - DNA, 20 bp, Artificial Sequence
  Synthetic
cgtctgaaagatgcgttgga

SEQ ID NO: 33595 - DNA, 17 bp, Artificial Sequence
  Synthetic
gccttggcgttttccct

SEQ ID NO: 33596 - DNA, 17 bp, Artificial Sequence
  Synthetic
gtggtgctgcctgttcc

SEQ ID NO: 33597 - DNA, 17 bp, Artificial Sequence
  Synthetic
gtgcggccttatggtgc

SEQ ID NO: 33598 - DNA, 17 bp, Artificial Sequence
  Synthetic
gcaacggcttttggggt

SEQ ID NO: 33599 - DNA, 19 bp, Artificial Sequence
  Synthetic
ggtggtggttttggatgcc

SEQ ID NO: 33600 - DNA, 18 bp, Artificial Sequence
  Synthetic
ttgccgaagaggtcaaag

SEQ ID NO: 33601 - DNA, 20 bp, Artificial Sequence
  Synthetic
gtgtcgattggtggggaatt

SEQ ID NO: 33602 - DNA, 19 bp, Artificial Sequence
  Synthetic
ggatgttgcgaaagaggca

SEQ ID NO: 33603 - DNA, 19 bp, Artificial Sequence
  Synthetic
cgtcgtgctttataggaac

SEQ ID NO: 33604 - DNA, 20 bp, Artificial Sequence
  Synthetic
ccgcatcgatttgaccatcg

SEQ ID NO: 33605 - DNA, 18 bp, Artificial Sequence
  Synthetic
tctttcaggcgaggcaac

SEQ ID NO: 33606 - DNA, 16 bp, Artificial Sequence
  Synthetic
acaatcgcgccgacgg

SEQ ID NO: 33607 - DNA, 17 bp, Artificial Sequence
  Synthetic
cgccgaggatgagttgc

SEQ ID NO: 33608 - DNA, 19 bp, Artificial Sequence
  Synthetic
gcggtggaatcgacaatca

SEQ ID NO: 33609 - DNA, 16 bp, Artificial Sequence
  Synthetic
agtgggcttagggcgg

SEQ ID NO: 33610 - DNA, 17 bp, Artificial Sequence
  Synthetic
acggcatcggtatcggg

SEQ ID NO: 33611 - DNA, 19 bp, Artificial Sequence
  Synthetic
cgctgctcttggtagtcca

SEQ ID NO: 33612 - DNA, 18 bp, Artificial Sequence
  Synthetic
gatggtcagcgtcgtgtc

SEQ ID NO: 33613 - DNA, 16 bp, Artificial Sequence
  Synthetic
catcgcgcccgacaaa

SEQ ID NO: 33614 - DNA, 20 bp, Artificial Sequence
  Synthetic
gcaggtcgttatgattccgg

SEQ ID NO: 33615 - DNA, 16 bp, Artificial Sequence
  Synthetic
agtgttgcacggggcg

SEQ ID NO: 33616 - DNA, 19 bp, Artificial Sequence
  Synthetic
ccgctctaccttgcactgg

SEQ ID NO: 33617 - DNA, 17 bp, Artificial Sequence
  Synthetic
cgctgccggcaaattcc

SEQ ID NO: 33618 - DNA, 20 bp, Artificial Sequence
  Synthetic
ggcatacgtatttgtgcgtg

SEQ ID NO: 33619 - DNA, 16 bp, Artificial Sequence
  Synthetic
tttgggtgtcggggcg

SEQ ID NO: 33620 - DNA, 19 bp, Artificial Sequence
  Synthetic
gctgaaacttgaaaccgtc

SEQ ID NO: 33621 - DNA, 19 bp, Artificial Sequence
  Synthetic
aggttttgactgcacagca

SEQ ID NO: 33622 - DNA, 17 bp, Artificial Sequence
  Synthetic
cgtccacgcgtccatca

SEQ ID NO: 33623 - DNA, 17 bp, Artificial Sequence
  Synthetic
ggagcgttcgcctttgc

SEQ ID NO: 33624 - DNA, 18 bp, Artificial Sequence
  Synthetic
cgtgaaaccattgcgcct

SEQ ID NO: 33625 - DNA, 18 bp, Artificial Sequence
  Synthetic
ttgacctgcgtgatgtcg

SEQ ID NO: 33626 - DNA, 16 bp, Artificial Sequence
  Synthetic
gctcatcgctgccgac

SEQ ID NO: 33627 - DNA, 18 bp, Artificial Sequence
  Synthetic
gcagacgcgttgttgcac

SEQ ID NO: 33628 - DNA, 16 bp, Artificial Sequence
  Synthetic
gggcgcgtgagaacag

SEQ ID NO: 33629 - DNA, 16 bp, Artificial Sequence
  Synthetic
agggcgatggcggttt

SEQ ID NO: 33630 - DNA, 18 bp, Artificial Sequence
  Synthetic
gacggtgttgacggtgtg

SEQ ID NO: 33631 - DNA, 15 bp, Artificial Sequence
  Synthetic
tcggcatcgtcggca

SEQ ID NO: 33632 - DNA, 17 bp, Artificial Sequence
  Synthetic
gaatccaatgcgggggc

SEQ ID NO: 33633 - DNA, 16 bp, Artificial Sequence
  Synthetic
gcgcgaggcataccac

SEQ ID NO: 33634 - DNA, 18 bp, Artificial Sequence
  Synthetic
tcaatgaaggcgagcagc

SEQ ID NO: 33635 - DNA, 20 bp, Artificial Sequence
  Synthetic
gcgaacctgctttacgatgt

SEQ ID NO: 33636 - DNA, 20 bp, Artificial Sequence
  Synthetic
ggggcttcaacatcacgata

SEQ ID NO: 33637 - DNA, 18 bp, Artificial Sequence
  Synthetic
cctcaccttgccgtttgg

SEQ ID NO: 33638 - DNA, 19 bp, Artificial Sequence
  Synthetic
gcaatgctcggattctcgt

SEQ ID NO: 33639 - DNA, 19 bp, Artificial Sequence
  Synthetic
ccgcacatatacggcaacc

SEQ ID NO: 33640 - DNA, 17 bp, Artificial Sequence
  Synthetic
cacggacaggaacggga

SEQ ID NO: 33641 - DNA, 20 bp, Artificial Sequence
  Synthetic
agtttcgtcaaacccgacat

SEQ ID NO: 33642 - DNA, 18 bp, Artificial Sequence
  Synthetic
gcgccctgcagtcgttat

SEQ ID NO: 33643 - DNA, 19 bp, Artificial Sequence
  Synthetic
tccgtactcaaatcttggg

SEQ ID NO: 33644 - DNA, 18 bp, Artificial Sequence
  Synthetic
ggttgccttggttgcagg

SEQ ID NO: 33645 - DNA, 18 bp, Artificial Sequence
  Synthetic
gggctttggcttcttcgc

SEQ ID NO: 33646 - DNA, 17 bp, Artificial Sequence
  Synthetic
aggatcgaggatggcgg

SEQ ID NO: 33647 - DNA, 18 bp, Artificial Sequence
  Synthetic
ccgacagcacggttttgg

SEQ ID NO: 33648 - DNA, 19 bp, Artificial Sequence
  Synthetic
cgatttggatccggcttgg

SEQ ID NO: 33649 - DNA, 18 bp, Artificial Sequence
  Synthetic
cgtgatttcgatgggcgt

SEQ ID NO: 33650 - DNA, 17 bp, Artificial Sequence
  Synthetic
ggctcttgcgcgcaaat

SEQ ID NO: 33651 - DNA, 15 bp, Artificial Sequence
  Synthetic
ttgcgcggtgtctgc

SEQ ID NO: 33652 - DNA, 16 bp, Artificial Sequence
  Synthetic
gctctgccgtcttgcg

SEQ ID NO: 33653 - DNA, 16 bp, Artificial Sequence
  Synthetic
agccgtcagcgagtgc

SEQ ID NO: 33654 - DNA, 18 bp, Artificial Sequence
  Synthetic
gtcgagttgggctggtat

SEQ ID NO: 33655 - DNA, 16 bp, Artificial Sequence
  Synthetic
aacaaggaagccgcgc

SEQ ID NO: 33656 - DNA, 19 bp, Artificial Sequence
  Synthetic
aggaaaaaggcggcttcaa

SEQ ID NO: 33657 - DNA, 15 bp, Artificial Sequence
  Synthetic
aggtgtgccgccgtt

SEQ ID NO: 33658 - DNA, 16 bp, Artificial Sequence
  Synthetic
ccgccgtgttgtccgt

SEQ ID NO: 33659 - DNA, 22 bp, Artificial Sequence
  Synthetic
tcagtatttaggaagtggatgt

SEQ ID NO: 33660 - DNA, 20 bp, Artificial Sequence
  Synthetic
gtgtggttcttccatgcgaa

SEQ ID NO: 33661 - DNA, 16 bp, Artificial Sequence
  Synthetic
atctggcgcacggcaa

SEQ ID NO: 33662 - DNA, 16 bp, Artificial Sequence
  Synthetic
agcagcctcaccagcg

SEQ ID NO: 33663 - DNA, 19 bp, Artificial Sequence
  Synthetic
cttggttgattgccgcatc

SEQ ID NO: 33664 - DNA, 16 bp, Artificial Sequence
  Synthetic
tgagggcgagggtggt

SEQ ID NO: 33665 - DNA, 18 bp, Artificial Sequence
  Synthetic
gggcgacatcctgcattt

SEQ ID NO: 33666 - DNA, 17 bp, Artificial Sequence
  Synthetic
cgcggccgtagtcttgt

SEQ ID NO: 33667 - DNA, 22 bp, Artificial Sequence
  Synthetic
agatttcaaccaaatgaggaaa

SEQ ID NO: 33668 - DNA, 16 bp, Artificial Sequence
  Synthetic
tgggcgtgggctatgc

SEQ ID NO: 33669 - DNA, 19 bp, Artificial Sequence
  Synthetic
agttcatccacttcgcctg

SEQ ID NO: 33670 - DNA, 19 bp, Artificial Sequence
  Synthetic
gtcggattcgggtattgcc

SEQ ID NO: 33671 - DNA, 16 bp, Artificial Sequence
  Synthetic
cccaagacgcaagcgc

SEQ ID NO: 33672 - DNA, 16 bp, Artificial Sequence
  Synthetic
gcatcaccctgcccga

SEQ ID NO: 33673 - DNA, 19 bp, Artificial Sequence
  Synthetic
gaaatcgatgccgtcgtcg

SEQ ID NO: 33674 - DNA, 18 bp, Artificial Sequence
  Synthetic
aagccctgatgattgccg

SEQ ID NO: 33675 - DNA, 19 bp, Artificial Sequence
  Synthetic
ccctccaacaggacggtac

SEQ ID NO: 33676 - DNA, 16 bp, Artificial Sequence
  Synthetic
tgtgccgccgataccg

SEQ ID NO: 33677 - DNA, 18 bp, Artificial Sequence
  Synthetic
ttgcaggaagtttggcgg

SEQ ID NO: 33678 - DNA, 16 bp, Artificial Sequence
  Synthetic
aatctcggcagggcgg

SEQ ID NO: 33679 - DNA, 15 bp, Artificial Sequence
  Synthetic
tttggcggcgcgtac

SEQ ID NO: 33680 - DNA, 17 bp, Artificial Sequence
  Synthetic
ggtgtgtcggggcagta

SEQ ID NO: 33681 - DNA, 17 bp, Artificial Sequence
  Synthetic
tcatactccggctgccg

SEQ ID NO: 33682 - DNA, 16 bp, Artificial Sequence
  Synthetic
cggtcgttgacgcgga

SEQ ID NO: 33683 - DNA, 15 bp, Artificial Sequence
  Synthetic
gcttgccgcgcagtt

SEQ ID NO: 33684 - DNA, 17 bp, Artificial Sequence
  Synthetic
cgcatagggaacacgcc

SEQ ID NO: 33685 - DNA, 16 bp, Artificial Sequence
  Synthetic
gccagatgcccagtgc

SEQ ID NO: 33686 - DNA, 20 bp, Artificial Sequence
  Synthetic
cggtgtcgttcatggtttct

SEQ ID NO: 33687 - DNA, 16 bp, Artificial Sequence
  Synthetic
ggctttggcgcggtaa

SEQ ID NO: 33688 - DNA, 18 bp, Artificial Sequence
  Synthetic
tcatctttgccaacgccc

SEQ ID NO: 33689 - DNA, 19 bp, Artificial Sequence
  Synthetic
gcctattccaccgtatcgc

SEQ ID NO: 33690 - DNA, 16 bp, Artificial Sequence
  Synthetic
actgcccgaagtcgcg

SEQ ID NO: 33691 - DNA, 20 bp, Artificial Sequence
  Synthetic
gccactatccagcttttccc

SEQ ID NO: 33692 - DNA, 18 bp, Artificial Sequence
  Synthetic
tcaaggccgtatgcgtct

SEQ ID NO: 33693 - DNA, 18 bp, Artificial Sequence
  Synthetic
tttgtacggtgcggttcg

SEQ ID NO: 33694 - DNA, 17 bp, Artificial Sequence
  Synthetic
cgataccgccgcgattc

SEQ ID NO: 33695 - DNA, 19 bp, Artificial Sequence
  Synthetic
gccgtctgaaagaacacgg

SEQ ID NO: 33696 - DNA, 18 bp, Artificial Sequence
  Synthetic
tcgctaccaacaccacca

SEQ ID NO: 33697 - DNA, 16 bp, Artificial Sequence
  Synthetic
gggcaggacgacgagt

SEQ ID NO: 33698 - DNA, 18 bp, Artificial Sequence
  Synthetic
ggtgcagcaggatgtagc

SEQ ID NO: 33699 - DNA, 16 bp, Artificial Sequence
  Synthetic
ttcggggttcgcggac

SEQ ID NO: 33700 - DNA, 17 bp, Artificial Sequence
  Synthetic
gtttctgtaccggcggg

SEQ ID NO: 33701 - DNA, 16 bp, Artificial Sequence
  Synthetic
gcggtcgctcatcacg

SEQ ID NO: 33702 - DNA, 19 bp, Artificial Sequence
  Synthetic
cgcgcgtttcaaaaggtct

SEQ ID NO: 33703 - DNA, 16 bp, Artificial Sequence
  Synthetic
tgcagccgcctcttgc

SEQ ID NO: 33704 - DNA, 18 bp, Artificial Sequence
  Synthetic
gcatgggccgaagtcctc

SEQ ID NO: 33705 - DNA, 16 bp, Artificial Sequence
  Synthetic
ccaccgcctacctcgt

SEQ ID NO: 33706 - DNA, 16 bp, Artificial Sequence
  Synthetic
accgccatcgccgaag

SEQ ID NO: 33707 - DNA, 20 bp, Artificial Sequence
  Synthetic
ggacgaagtgttctttgccg

SEQ ID NO: 33708 - DNA, 20 bp, Artificial Sequence
  Synthetic
ttttcgacacgttcctgtgt

SEQ ID NO: 33709 - DNA, 17 bp, Artificial Sequence
  Synthetic
ccatttcggcggcgttt

SEQ ID NO: 33710 - DNA, 17 bp, Artificial Sequence
  Synthetic
gccggtttgcagcatgg

SEQ ID NO: 33711 - DNA, 20 bp, Artificial Sequence
  Synthetic
gcaggattcggcgaaaatgg

SEQ ID NO: 33712 - DNA, 16 bp, Artificial Sequence
  Synthetic
gggcgtgccgttcaat

SEQ ID NO: 33713 - DNA, 16 bp, Artificial Sequence
  Synthetic
tcggtgtgtcgggcgt

SEQ ID NO: 33714 - DNA, 20 bp, Artificial Sequence
  Synthetic
cggtaattgttcccgaacgt

SEQ ID NO: 33715 - DNA, 16 bp, Artificial Sequence
  Synthetic
aggtcaaccgcgtgct

SEQ ID NO: 33716 - DNA, 17 bp, Artificial Sequence
  Synthetic
ccgacagccgtattgcg

SEQ ID NO: 33717 - DNA, 16 bp, Artificial Sequence
  Synthetic
gtgcagggcggtggat

SEQ ID NO: 33718 - DNA, 20 bp, Artificial Sequence
  Synthetic
cgaggtggatgttcggaatc

SEQ ID NO: 33719 - DNA, 16 bp, Artificial Sequence
  Synthetic
atacggttcgggcggc

SEQ ID NO: 33720 - DNA, 18 bp, Artificial Sequence
  Synthetic
gcacggcggattttttcc

SEQ ID NO: 33721 - DNA, 17 bp, Artificial Sequence
  Synthetic
ggacttcgggttgtgcc

SEQ ID NO: 33722 - DNA, 17 bp, Artificial Sequence
  Synthetic
gggctgcccgtgttgaa

SEQ ID NO: 33723 - DNA, 18 bp, Artificial Sequence
  Synthetic
cggcagcttcaattcgcg

SEQ ID NO: 33724 - DNA, 18 bp, Artificial Sequence
  Synthetic
gctcgatgacttcggcag

SEQ ID NO: 33725 - DNA, 17 bp, Artificial Sequence
  Synthetic
caaggcgggtttgcagt

SEQ ID NO: 33726 - DNA, 18 bp, Artificial Sequence
  Synthetic
catcagacgggacacggg

SEQ ID NO: 33727 - DNA, 16 bp, Artificial Sequence
  Synthetic
ggccaggttgtcggca

SEQ ID NO: 33728 - DNA, 16 bp, Artificial Sequence
  Synthetic
ggtgggcgtgctgcat

SEQ ID NO: 33729 - DNA, 16 bp, Artificial Sequence
  Synthetic
gtcgatgcggatgcgg

SEQ ID NO: 33730 - DNA, 16 bp, Artificial Sequence
  Synthetic
ttggcgcaggtgttgg

SEQ ID NO: 33731 - DNA, 16 bp, Artificial Sequence
  Synthetic
ttgcggcgttcctcgg

SEQ ID NO: 33732 - DNA, 15 bp, Artificial Sequence
  Synthetic
aaccgcaccgccgat

SEQ ID NO: 33733 - DNA, 20 bp, Artificial Sequence
  Synthetic
gcagtttcgactcgtacgtc

SEQ ID NO: 33734 - DNA, 16 bp, Artificial Sequence
  Synthetic
cgggaagatgccggca

SEQ ID NO: 33735 - DNA, 16 bp, Artificial Sequence
  Synthetic
ccgccaacacgccttc

SEQ ID NO: 33736 - DNA, 18 bp, Artificial Sequence
  Synthetic
gttcaccaagcgtttgcc

SEQ ID NO: 33737 - DNA, 16 bp, Artificial Sequence
  Synthetic
gcaggttgcggactgc

SEQ ID NO: 33738 - DNA, 19 bp, Artificial Sequence
  Synthetic
ggaaaaaacatggctcgta

SEQ ID NO: 33739 - DNA, 19 bp, Artificial Sequence
  Synthetic
cgtgcaacattagatggtt

SEQ ID NO: 33740 - DNA, 18 bp, Artificial Sequence
  Synthetic
gcaacgtattggctgaaa

SEQ ID NO: 33741 - DNA, 20 bp, Artificial Sequence
  Synthetic
ccaataattcggactgtcga

SEQ ID NO: 33742 - DNA, 17 bp, Artificial Sequence
  Synthetic
gcgacgtttgccgagga

SEQ ID NO: 33743 - DNA, 20 bp, Artificial Sequence
  Synthetic
gaaggtctgaccgtattgca

SEQ ID NO: 33744 - DNA, 20 bp, Artificial Sequence
  Synthetic
cagtcggtgtgatgcactat

SEQ ID NO: 33745 - DNA, 20 bp, Artificial Sequence
  Synthetic
cgctaccactattggggacg

SEQ ID NO: 33746 - DNA, 15 bp, Artificial Sequence
  Synthetic
attgccgcgctgtcg

SEQ ID NO: 33747 - DNA, 17 bp, Artificial Sequence
  Synthetic
ggacgggcaggaaatcg

SEQ ID NO: 33748 - DNA, 17 bp, Artificial Sequence
  Synthetic
gggcaaggcgacggtat

SEQ ID NO: 33749 - DNA, 19 bp, Artificial Sequence
  Synthetic
ggcaccatattgaagcggt

SEQ ID NO: 33750 - DNA, 17 bp, Artificial Sequence
  Synthetic
ctcaaccgttcggtgcg

SEQ ID NO: 33751 - DNA, 18 bp, Artificial Sequence
  Synthetic
ccgttgagcgaatcctgc

SEQ ID NO: 33752 - DNA, 18 bp, Artificial Sequence
  Synthetic
agccgctggtgatgatgt

SEQ ID NO: 33753 - DNA, 15 bp, Artificial Sequence
  Synthetic
ttgtttcgccgccgc

SEQ ID NO: 33754 - DNA, 21 bp, Artificial Sequence
  Synthetic
gcacacaccacttacctatat

SEQ ID NO: 33755 - DNA, 16 bp, Artificial Sequence
  Synthetic
ggcgcgttcgtggaca

SEQ ID NO: 33756 - DNA, 19 bp, Artificial Sequence
  Synthetic
gcgcgagtttcccgactta

SEQ ID NO: 33757 - DNA, 20 bp, Artificial Sequence
  Synthetic
cgcgcctgattaaacaacac

SEQ ID NO: 33758 - DNA, 20 bp, Artificial Sequence
  Synthetic
gcaaatcaatgccgctatcg

SEQ ID NO: 33759 - DNA, 19 bp, Artificial Sequence
  Synthetic
gggcatttcgattgcttgg

SEQ ID NO: 33760 - DNA, 18 bp, Artificial Sequence
  Synthetic
tccaacgcgatggtttgg

SEQ ID NO: 33761 - DNA, 22 bp, Artificial Sequence
  Synthetic
cctatctaagtttttgtgtcgt

SEQ ID NO: 33762 - DNA, 18 bp, Artificial Sequence
  Synthetic
cgcaggatatggaagccg

SEQ ID NO: 33763 - DNA, 20 bp, Artificial Sequence
  Synthetic
tcagcaggttttgggagatg

SEQ ID NO: 33764 - DNA, 16 bp, Artificial Sequence
  Synthetic
cgttcgagcgactgcg

SEQ ID NO: 33765 - DNA, 16 bp, Artificial Sequence
  Synthetic
tcagccgtccggtcag

SEQ ID NO: 33766 - DNA, 19 bp, Artificial Sequence
  Synthetic
gctttggcttcgaggtagc

SEQ ID NO: 33767 - DNA, 16 bp, Artificial Sequence
  Synthetic
tttcggcgggggagtc

SEQ ID NO: 33768 - DNA, 18 bp, Artificial Sequence
  Synthetic
gccgaggttgaggttgag

SEQ ID NO: 33769 - DNA, 18 bp, Artificial Sequence
  Synthetic
ggtaccggcgatgacgat

SEQ ID NO: 33770 - DNA, 16 bp, Artificial Sequence
  Synthetic
tgggcggtgtgttcgg

SEQ ID NO: 33771 - DNA, 18 bp, Artificial Sequence
  Synthetic
gcgcggtagtagggttcg

SEQ ID NO: 33772 - DNA, 16 bp, Artificial Sequence
  Synthetic
atcgggacaaggcggc

SEQ ID NO: 33773 - DNA, 17 bp, Artificial Sequence
  Synthetic
gcctgtctcaacgcctc

SEQ ID NO: 33774 - DNA, 17 bp, Artificial Sequence
  Synthetic
acactttgctgccggca

SEQ ID NO: 33775 - DNA, 16 bp, Artificial Sequence
  Synthetic
ccggcccgttccaaac

SEQ ID NO: 33776 - DNA, 18 bp, Artificial Sequence
  Synthetic
cgactcgcatgagcatca

SEQ ID NO: 33777 - DNA, 18 bp, Artificial Sequence
  Synthetic
acgcccatgtcgtagtcg

SEQ ID NO: 33778 - DNA, 19 bp, Artificial Sequence
  Synthetic
ttggcatctttacgcgaca

SEQ ID NO: 33779 - DNA, 16 bp, Artificial Sequence
  Synthetic
cgtttcacgcggcgga

SEQ ID NO: 33780 - DNA, 18 bp, Artificial Sequence
  Synthetic
aacggctgttgtttgttc

SEQ ID NO: 33781 - DNA, 18 bp, Artificial Sequence
  Synthetic
aactattccaaccgcgtg

SEQ ID NO: 33782 - DNA, 19 bp, Artificial Sequence
  Synthetic
aacacaatccatcagcgtt

SEQ ID NO: 33783 - DNA, 20 bp, Artificial Sequence
  Synthetic
gaatgttttcagacggcatt

SEQ ID NO: 33784 - DNA, 19 bp, Artificial Sequence
  Synthetic
tggcgttattccttgggac

SEQ ID NO: 33785 - DNA, 18 bp, Artificial Sequence
  Synthetic
agcctgaaattccggcac

SEQ ID NO: 33786 - DNA, 20 bp, Artificial Sequence
  Synthetic
cgtttcggacggattaacgc

SEQ ID NO: 33787 - DNA, 17 bp, Artificial Sequence
  Synthetic
acggcgactgggatgtc

SEQ ID NO: 33788 - DNA, 16 bp, Artificial Sequence
  Synthetic
acatcggcaaagcggc

SEQ ID NO: 33789 - DNA, 17 bp, Artificial Sequence
  Synthetic
ccccgcaaacgaacagc

SEQ ID NO: 33790 - DNA, 18 bp, Artificial Sequence
  Synthetic
gcactgctgtctgtcctg

SEQ ID NO: 33791 - DNA, 19 bp, Artificial Sequence
  Synthetic
ccgaaaacggccattacct

SEQ ID NO: 33792 - DNA, 16 bp, Artificial Sequence
  Synthetic
ttctccggcggcatct

SEQ ID NO: 33793 - DNA, 20 bp, Artificial Sequence
  Synthetic
aaactgccgccatatcttgg

SEQ ID NO: 33794 - DNA, 23 bp, Artificial Sequence
  Synthetic
tggtgcaaattacaactatgatt

SEQ ID NO: 33795 - DNA, 17 bp, Artificial Sequence
  Synthetic
cgcgttgccaatgctgt

SEQ ID NO: 33796 - DNA, 19 bp, Artificial Sequence
  Synthetic
cctgatcgacgtaacccac

SEQ ID NO: 33797 - DNA, 17 bp, Artificial Sequence
  Synthetic
ccctccaaaccgaaccg

SEQ ID NO: 33798 - DNA, 16 bp, Artificial Sequence
  Synthetic
tcgaccgccgaaccac

SEQ ID NO: 33799 - DNA, 16 bp, Artificial Sequence
  Synthetic
tcatcgccctgaccgg

SEQ ID NO: 33800 - DNA, 16 bp, Artificial Sequence
  Synthetic
tcgccttcttcgccgg

SEQ ID NO: 33801 - DNA, 16 bp, Artificial Sequence
  Synthetic
ccacgcccaagttcgg

SEQ ID NO: 33802 - DNA, 18 bp, Artificial Sequence
  Synthetic
atggcgagtgcttcttcg

SEQ ID NO: 33803 - DNA, 16 bp, Artificial Sequence
  Synthetic
gcggacacggctttgg

SEQ ID NO: 33804 - DNA, 16 bp, Artificial Sequence
  Synthetic
gcatccgcgagctgac

SEQ ID NO: 33805 - DNA, 19 bp, Artificial Sequence
  Synthetic
tgatgctgatggctttggg

SEQ ID NO: 33806 - DNA, 18 bp, Artificial Sequence
  Synthetic
cgaatattgtcggccgcc

SEQ ID NO: 33807 - DNA, 18 bp, Artificial Sequence
  Synthetic
atcgaaaaccgccaaggg

SEQ ID NO: 33808 - DNA, 17 bp, Artificial Sequence
  Synthetic
gcgtccgacgaccaaat

SEQ ID NO: 33809 - DNA, 17 bp, Artificial Sequence
  Synthetic
gttttccacccacgccc

SEQ ID NO: 33810 - DNA, 17 bp, Artificial Sequence
  Synthetic
gcatcggcggcattcac

SEQ ID NO: 33811 - DNA, 20 bp, Artificial Sequence
  Synthetic
ggtttcaccgcttttgcatc

SEQ ID NO: 33812 - DNA, 18 bp, Artificial Sequence
  Synthetic
cgccgctgattatcgacg

SEQ ID NO: 33813 - DNA, 16 bp, Artificial Sequence
  Synthetic
accttgccgccatcgc

SEQ ID NO: 33814 - DNA, 16 bp, Artificial Sequence
  Synthetic
acgaatgcgcccccca

SEQ ID NO: 33815 - DNA, 16 bp, Artificial Sequence
  Synthetic
ggcaacgcccgaagtc

SEQ ID NO: 33816 - DNA, 16 bp, Artificial Sequence
  Synthetic
gtccggcacaaacgcc

SEQ ID NO: 33817 - DNA, 17 bp, Artificial Sequence
  Synthetic
gtcgggcaatgcctcct

SEQ ID NO: 33818 - DNA, 15 bp, Artificial Sequence
  Synthetic
tgttcgcggcgttcg

SEQ ID NO: 33819 - DNA, 20 bp, Artificial Sequence
  Synthetic
gtgatttcgtccagcaggat

SEQ ID NO: 33820 - DNA, 20 bp, Artificial Sequence
  Synthetic
ggtaaagttggcgaggatga

SEQ ID NO: 33821 - DNA, 18 bp, Artificial Sequence
  Synthetic
cgcggcaataatcggcaa

SEQ ID NO: 33822 - DNA, 18 bp, Artificial Sequence
  Synthetic
ggatgacggaatcgcgga

SEQ ID NO: 33823 - DNA, 16 bp, Artificial Sequence
  Synthetic
cttcggcgtgctctcg

SEQ ID NO: 33824 - DNA, 18 bp, Artificial Sequence
  Synthetic
gcgcgccataatgtaggc

SEQ ID NO: 33825 - DNA, 18 bp, Artificial Sequence
  Synthetic
gtccgacaatgcctgcat

SEQ ID NO: 33826 - DNA, 18 bp, Artificial Sequence
  Synthetic
gccgtctgaaaggcgttc

SEQ ID NO: 33827 - DNA, 20 bp, Artificial Sequence
  Synthetic
cgtactgtttgagcagctct

SEQ ID NO: 33828 - DNA, 18 bp, Artificial Sequence
  Synthetic
gttccttgccttctgcca

SEQ ID NO: 33829 - DNA, 16 bp, Artificial Sequence
  Synthetic
gcagcgtctcccttgc

SEQ ID NO: 33830 - DNA, 16 bp, Artificial Sequence
  Synthetic
ggtcggggcaggaaca

SEQ ID NO: 33831 - DNA, 19 bp, Artificial Sequence
  Synthetic
ggaaggaatcgcacgcaaa

SEQ ID NO: 33832 - DNA, 18 bp, Artificial Sequence
  Synthetic
ccttaccatgctgcttgc

SEQ ID NO: 33833 - DNA, 20 bp, Artificial Sequence
  Synthetic
gcagacgccgtttaaaatgt

SEQ ID NO: 33834 - DNA, 16 bp, Artificial Sequence
  Synthetic
ttcctccgtaccgcgc

SEQ ID NO: 33835 - DNA, 17 bp, Artificial Sequence
  Synthetic
tgggctgagcgcatcaa

SEQ ID NO: 33836 - DNA, 16 bp, Artificial Sequence
  Synthetic
agctctcggcgcgttc

SEQ ID NO: 33837 - DNA, 17 bp, Artificial Sequence
  Synthetic
ctctccctgtgggccaa

SEQ ID NO: 33838 - DNA, 18 bp, Artificial Sequence
  Synthetic
gggagctcgccaaacaag

SEQ ID NO: 33839 - DNA, 20 bp, Artificial Sequence
  Synthetic
gtcgtcgattttctgaccga

SEQ ID NO: 33840 - DNA, 15 bp, Artificial Sequence
  Synthetic
tttgcggggcgggaa

SEQ ID NO: 33841 - DNA, 19 bp, Artificial Sequence
  Synthetic
gggccgtctataccgttgt

SEQ ID NO: 33842 - DNA, 17 bp, Artificial Sequence
  Synthetic
tcaacgcgccaatcacg

SEQ ID NO: 33843 - DNA, 18 bp, Artificial Sequence
  Synthetic
ccgaccaccagcggatac

SEQ ID NO: 33844 - DNA, 23 bp, Artificial Sequence
  Synthetic
acataaaagagttgggaagaaac

SEQ ID NO: 33845 - DNA, 18 bp, Artificial Sequence
  Synthetic
cgatgagaaccccggcac

SEQ ID NO: 33846 - DNA, 16 bp, Artificial Sequence
  Synthetic
acgacaccgtcaccgc

SEQ ID NO: 33847 - DNA, 19 bp, Artificial Sequence
  Synthetic
tcggacggcatttttttgc

SEQ ID NO: 33848 - DNA, 16 bp, Artificial Sequence
  Synthetic
agccccgccttttggg

SEQ ID NO: 33849 - DNA, 16 bp, Artificial Sequence
  Synthetic
ccacggcaggcagctt

SEQ ID NO: 33850 - DNA, 16 bp, Artificial Sequence
  Synthetic
agatggcgcgggtctg

SEQ ID NO: 33851 - DNA, 20 bp, Artificial Sequence
  Synthetic
ttttcagcctgtggaacagt

SEQ ID NO: 33852 - DNA, 18 bp, Artificial Sequence
  Synthetic
gccctcgaacacgggtac

SEQ ID NO: 33853 - DNA, 17 bp, Artificial Sequence
  Synthetic
accaactcccggttcgg

SEQ ID NO: 33854 - DNA, 18 bp, Artificial Sequence
  Synthetic
caaaccgaactgcccgtc

SEQ ID NO: 33855 - DNA, 16 bp, Artificial Sequence
  Synthetic
tcatctgcggcggcac

SEQ ID NO: 33856 - DNA, 18 bp, Artificial Sequence
  Synthetic
cctgctcacctacgccta

SEQ ID NO: 33857 - DNA, 19 bp, Artificial Sequence
  Synthetic
tgcattttcgccaacatcg

SEQ ID NO: 33858 - DNA, 18 bp, Artificial Sequence
  Synthetic
cgtggatgatgcccgaag

SEQ ID NO: 33859 - DNA, 16 bp, Artificial Sequence
  Synthetic
gcgcgactggatgacg

SEQ ID NO: 33860 - DNA, 18 bp, Artificial Sequence
  Synthetic
cgttatgggcgtatgcgg

SEQ ID NO: 33861 - DNA, 16 bp, Artificial Sequence
  Synthetic
gcaaacgcggcgaaag

SEQ ID NO: 33862 - DNA, 17 bp, Artificial Sequence
  Synthetic
gcgaacatcggccaggt

SEQ ID NO: 33863 - DNA, 19 bp, Artificial Sequence
  Synthetic
cttcgatgccggactgatc

SEQ ID NO: 33864 - DNA, 16 bp, Artificial Sequence
  Synthetic
tcgcccacacacgtcg

SEQ ID NO: 33865 - DNA, 16 bp, Artificial Sequence
  Synthetic
ccgccgccataccttg

SEQ ID NO: 33866 - DNA, 19 bp, Artificial Sequence
  Synthetic
ggtaaaagtaggcggaacc

SEQ ID NO: 33867 - DNA, 18 bp, Artificial Sequence
  Synthetic
agggcgacttttcaagcg

SEQ ID NO: 33868 - DNA, 16 bp, Artificial Sequence
  Synthetic
ggcggctttgccccaa

SEQ ID NO: 33869 - DNA, 15 bp, Artificial Sequence
  Synthetic
atttggcagccgcgc

SEQ ID NO: 33870 - DNA, 18 bp, Artificial Sequence
  Synthetic
cttcggggatttcggcaa

SEQ ID NO: 33871 - DNA, 16 bp, Artificial Sequence
  Synthetic
cacgttccaccagccg

SEQ ID NO: 33872 - DNA, 20 bp, Artificial Sequence
  Synthetic
gcatatagccgagcatcacg

SEQ ID NO: 33873 - DNA, 16 bp, Artificial Sequence
  Synthetic
tttcggcgggctgcac

SEQ ID NO: 33874 - DNA, 17 bp, Artificial Sequence
  Synthetic
gggcgagacgttttcgg

SEQ ID NO: 33875 - DNA, 18 bp, Artificial Sequence
  Synthetic
aaacaccttcgacgacgg

SEQ ID NO: 33876 - DNA, 16 bp, Artificial Sequence
  Synthetic
cgcaacgccgtttgga

SEQ ID NO: 33877 - DNA, 17 bp, Artificial Sequence
  Synthetic
gcagcagcgcgaaagac

SEQ ID NO: 33878 - DNA, 17 bp, Artificial Sequence
  Synthetic
gacaaggcggggaaacg

SEQ ID NO: 33879 - DNA, 17 bp, Artificial Sequence
  Synthetic
cgctcgaaaccgaagcg

SEQ ID NO: 33880 - DNA, 17 bp, Artificial Sequence
  Synthetic
cagacggcaccatcagc

SEQ ID NO: 33881 - DNA, 18 bp, Artificial Sequence
  Synthetic
aacattgccctgcactgg

SEQ ID NO: 33882 - DNA, 17 bp, Artificial Sequence
  Synthetic
gccgcgatgaaaggcgt

SEQ ID NO: 33883 - DNA, 19 bp, Artificial Sequence
  Synthetic
catcagggtgatgtcggct

SEQ ID NO: 33884 - DNA, 17 bp, Artificial Sequence
  Synthetic
gcctgccagtgcttcga

SEQ ID NO: 33885 - DNA, 19 bp, Artificial Sequence
  Synthetic
cctccatactccggacgac

SEQ ID NO: 33886 - DNA, 18 bp, Artificial Sequence
  Synthetic
gcgaaaatgcgccgtcag

SEQ ID NO: 33887 - DNA, 18 bp, Artificial Sequence
  Synthetic
catccggcttgttggacg

SEQ ID NO: 33888 - DNA, 16 bp, Artificial Sequence
  Synthetic
agtttccgcgccaacg

SEQ ID NO: 33889 - DNA, 16 bp, Artificial Sequence
  Synthetic
tgcctctgtcgcgcac

SEQ ID NO: 33890 - DNA, 19 bp, Artificial Sequence
  Synthetic
ggcttccaaaacaacaggc

SEQ ID NO: 33891 - DNA, 20 bp, Artificial Sequence
  Synthetic
ccaaaccgtactgcatcagc

SEQ ID NO: 33892 - DNA, 17 bp, Artificial Sequence
  Synthetic
ggcagcgtacagggctt

SEQ ID NO: 33893 - DNA, 19 bp, Artificial Sequence
  Synthetic
ctctgtgaaacgttccgca

SEQ ID NO: 33894 - DNA, 20 bp, Artificial Sequence
  Synthetic
ccccgaatattgttcccaca

SEQ ID NO: 33895 - DNA, 16 bp, Artificial Sequence
  Synthetic
gctatgccggctgctg

SEQ ID NO: 33896 - DNA, 17 bp, Artificial Sequence
  Synthetic
ctatggcgcgcgaagtc

SEQ ID NO: 33897 - DNA, 17 bp, Artificial Sequence
  Synthetic
gcctgatcgacgcatcc

SEQ ID NO: 33898 - DNA, 18 bp, Artificial Sequence
  Synthetic
ggcattcatcgtcgcgat

SEQ ID NO: 33899 - DNA, 19 bp, Artificial Sequence
  Synthetic
caaaatccgcatcgttgcc

SEQ ID NO: 33900 - DNA, 19 bp, Artificial Sequence
  Synthetic
gtcgaagccgtcaacttca

SEQ ID NO: 33901 - DNA, 19 bp, Artificial Sequence
  Synthetic
gccgcctcaggatttcgtc

SEQ ID NO: 33902 - DNA, 18 bp, Artificial Sequence
  Synthetic
acacaatgatgctccgat

SEQ ID NO: 33903 - DNA, 18 bp, Artificial Sequence
  Synthetic
aagacgctggaaagcttg

SEQ ID NO: 33904 - DNA, 21 bp, Artificial Sequence
  Synthetic
ccattttcatcttcctgtgta

SEQ ID NO: 33905 - DNA, 25 bp, Artificial Sequence
  Synthetic
gactcttctactttcttattgtcat

SEQ ID NO: 33906 - DNA, 19 bp, Artificial Sequence
  Synthetic
acagtttttagggggagag

SEQ ID NO: 33907 - DNA, 18 bp, Artificial Sequence
  Synthetic
gtttctctgtggtcccag

SEQ ID NO: 33908 - DNA, 18 bp, Artificial Sequence
  Synthetic
aggttaacagcatcctgc

SEQ ID NO: 33909 - DNA, 25 bp, Artificial Sequence
  Synthetic
tagtagatgttacactaggatgttc

SEQ ID NO: 33910 - DNA, 20 bp, Artificial Sequence
  Synthetic
cgtttgtgacatcagtctct

SEQ ID NO: 33911 - DNA, 22 bp, Artificial Sequence
  Synthetic
tggaataataatttgggtggtg

SEQ ID NO: 33912 - DNA, 22 bp, Artificial Sequence
  Synthetic
aggattttctgtatcttgcaaa

SEQ ID NO: 33913 - DNA, 23 bp, Artificial Sequence
  Synthetic
gaattttcctatactgttgtgtg

SEQ ID NO: 33914 - DNA, 22 bp, Artificial Sequence
  Synthetic
acacatagttgctaaagacttt

SEQ ID NO: 33915 - DNA, 24 bp, Artificial Sequence
  Synthetic
acttatataagagtaagggtggag

SEQ ID NO: 33916 - DNA, 18 bp, Artificial Sequence
  Synthetic
cgccttgctcattgatga

SEQ ID NO: 33917 - DNA, 19 bp, Artificial Sequence
  Synthetic
cttccccagtgaatgagaa

SEQ ID NO: 33918 - DNA, 21 bp, Artificial Sequence
  Synthetic
cttgatcgcatcatatagtgg

SEQ ID NO: 33919 - DNA, 22 bp, Artificial Sequence
  Synthetic
tcatattgcttcaaatcgctta

SEQ ID NO: 33920 - DNA, 21 bp, Artificial Sequence
  Synthetic
gcattaagcaaggcagtatta

SEQ ID NO: 33921 - DNA, 24 bp, Artificial Sequence
  Synthetic
cttagtagcatatctcctatctca

SEQ ID NO: 33922 - DNA, 22 bp, Artificial Sequence
  Synthetic
tattgaataccgacttggctaa

SEQ ID NO: 33923 - DNA, 18 bp, Artificial Sequence
  Synthetic
ctcactcgtcccctctcg

SEQ ID NO: 33924 - DNA, 16 bp, Artificial Sequence
  Synthetic
gcggaccctgcagagt

SEQ ID NO: 33925 - DNA, 18 bp, Artificial Sequence
  Synthetic
ttccactcgcaggtttgc

SEQ ID NO: 33926 - DNA, 20 bp, Artificial Sequence
  Synthetic
aggaagacgagagaagggaa

SEQ ID NO: 33927 - DNA, 20 bp, Artificial Sequence
  Synthetic
ggctgggaaacatcaaagga

SEQ ID NO: 33928 - DNA, 20 bp, Artificial Sequence
  Synthetic
ccattgtaaggtttccttgc

SEQ ID NO: 33929 - DNA, 19 bp, Artificial Sequence
  Synthetic
gtacacaaccctttccact

SEQ ID NO: 33930 - DNA, 21 bp, Artificial Sequence
  Synthetic
gcttcaattctgtaacacact

SEQ ID NO: 33931 - DNA, 25 bp, Artificial Sequence
  Synthetic
atcatctataaatcctattaggtcc

SEQ ID NO: 33932 - DNA, 22 bp, Artificial Sequence
  Synthetic
gcctgtgaattatttacttggt

SEQ ID NO: 33933 - DNA, 25 bp, Artificial Sequence
  Synthetic
cagttaatttattactgtccagttc

SEQ ID NO: 33934 - DNA, 19 bp, Artificial Sequence
  Synthetic
tgttaccgttgttccttct

SEQ ID NO: 33935 - DNA, 20 bp, Artificial Sequence
  Synthetic
ttcaggacaacagattacct

SEQ ID NO: 33936 - DNA, 18 bp, Artificial Sequence
  Synthetic
tactcgtgtcccttcccg

SEQ ID NO: 33937 - DNA, 22 bp, Artificial Sequence
  Synthetic
acttgttacatgtacagtacca

SEQ ID NO: 33938 - DNA, 21 bp, Artificial Sequence
  Synthetic
atgtactgtagctccaatttg

SEQ ID NO: 33939 - DNA, 18 bp, Artificial Sequence
  Synthetic
gaggtggataaaggcaca

SEQ ID NO: 33940 - DNA, 21 bp, Artificial Sequence
  Synthetic
cgagttacatattcatccgtg

SEQ ID NO: 33941 - DNA, 19 bp, Artificial Sequence
  Synthetic
taatggctgtcctctacca

SEQ ID NO: 33942 - DNA, 22 bp, Artificial Sequence
  Synthetic
agtaaaatccatagctccaaag

SEQ ID NO: 33943 - DNA, 18 bp, Artificial Sequence
  Synthetic
gccactaggtgtagcaga

SEQ ID NO: 33944 - DNA, 22 bp, Artificial Sequence
  Synthetic
caagtatgcatacaaacaggaa

SEQ ID NO: 33945 - DNA, 18 bp, Artificial Sequence
  Synthetic
acccatgaacgcccatca

SEQ ID NO: 33946 - DNA, 18 bp, Artificial Sequence
  Synthetic
tgttcttgcgcgttctgg

SEQ ID NO: 33947 - DNA, 20 bp, Artificial Sequence
  Synthetic
tttgtgtctgggtcagtgac

SEQ ID NO: 33948 - DNA, 18 bp, Artificial Sequence
  Synthetic
caccaatgtcaagggcgt

SEQ ID NO: 33949 - DNA, 18 bp, Artificial Sequence
  Synthetic
cgttccacactgcatcag

SEQ ID NO: 33950 - DNA, 23 bp, Artificial Sequence
  Synthetic
taagacctgataatttttccagg

SEQ ID NO: 33951 - DNA, 19 bp, Artificial Sequence
  Synthetic
agcacagcgaggtaacaag

SEQ ID NO: 33952 - DNA, 23 bp, Artificial Sequence
  Synthetic
aagtgcttatagaaaaacacacc

SEQ ID NO: 33953 - DNA, 17 bp, Artificial Sequence
  Synthetic
ctgccatcgctgacagc

SEQ ID NO: 33954 - DNA, 20 bp, Artificial Sequence
  Synthetic
gcacacacaccaataagggt

SEQ ID NO: 33955 - DNA, 23 bp, Artificial Sequence
  Synthetic
gtacatttgccattaaaatagca

SEQ ID NO: 33956 - DNA, 21 bp, Artificial Sequence
  Synthetic
gttttttggtagcctcaaaga

SEQ ID NO: 33957 - DNA, 23 bp, Artificial Sequence
  Synthetic
aacaaaacataattgtcagcagt

SEQ ID NO: 33958 - DNA, 19 bp, Artificial Sequence
  Synthetic
aaacacgcatgatgcaaag

SEQ ID NO: 33959 - DNA, 19 bp, Artificial Sequence
  Synthetic
ctgttgggccagtgatctg

SEQ ID NO: 33960 - DNA, 21 bp, Artificial Sequence
  Synthetic
acagacatttggagaggatac

SEQ ID NO: 33961 - DNA, 18 bp, Artificial Sequence
  Synthetic
tccgcctgtttcggtcat

SEQ ID NO: 33962 - DNA, 25 bp, Artificial Sequence
  Synthetic
gaggttgtctattaatagtgacttt

SEQ ID NO: 33963 - DNA, 18 bp, Artificial Sequence
  Synthetic
ttctggggggtcttcacg

SEQ ID NO: 33964 - DNA, 19 bp, Artificial Sequence
  Synthetic
cggccatcataagcgatca

SEQ ID NO: 33965 - DNA, 19 bp, Artificial Sequence
  Synthetic
tttgggttgaggcacacaa

SEQ ID NO: 33966 - DNA, 19 bp, Artificial Sequence
  Synthetic
gggcatggtcatgtctgtt

SEQ ID NO: 33967 - DNA, 21 bp, Artificial Sequence
  Synthetic
caaaaacaatgacagccaaat

SEQ ID NO: 33968 - DNA, 18 bp, Artificial Sequence
  Synthetic
gcttcccacacagccagg

SEQ ID NO: 33969 - DNA, 18 bp, Artificial Sequence
  Synthetic
ctatggtggtgttggtca

SEQ ID NO: 33970 - DNA, 20 bp, Artificial Sequence
  Synthetic
tcatttgaatgcacgttgtt

SEQ ID NO: 33971 - DNA, 22 bp, Artificial Sequence
  Synthetic
ggatttttttggaccatgaaac

SEQ ID NO: 33972 - DNA, 23 bp, Artificial Sequence
  Synthetic
tggaaacaatgctataatccttt

SEQ ID NO: 33973 - DNA, 22 bp, Artificial Sequence
  Synthetic
tgcctatttatctgcaatttgg

SEQ ID NO: 33974 - DNA, 22 bp, Artificial Sequence
  Synthetic
ttgaggcaatactaattcttgt

SEQ ID NO: 33975 - DNA, 22 bp, Artificial Sequence
  Synthetic
agtttcaaattgttcagtacct

SEQ ID NO: 33976 - DNA, 23 bp, Artificial Sequence
  Synthetic
gggcttttaatatactttcgttt

SEQ ID NO: 33977 - DNA, 23 bp, Artificial Sequence
  Synthetic
gaaaagctcacaccatataattc

SEQ ID NO: 33978 - DNA, 19 bp, Artificial Sequence
  Synthetic
acaggttgcctatgcttta

SEQ ID NO: 33979 - DNA, 18 bp, Artificial Sequence
  Synthetic
aggttagacgctggggac

SEQ ID NO: 33980 - DNA, 23 bp, Artificial Sequence
  Synthetic
tgtttatttctatttctccagca

SEQ ID NO: 33981 - DNA, 18 bp, Artificial Sequence
  Synthetic
taggtctgcttggtctgc

SEQ ID NO: 33982 - DNA, 21 bp, Artificial Sequence
  Synthetic
tggtactaatctttcctctgg

SEQ ID NO: 33983 - DNA, 18 bp, Artificial Sequence
  Synthetic
ccatagctggttcgcaac

SEQ ID NO: 33984 - DNA, 22 bp, Artificial Sequence
  Synthetic
caaaataatgtctggcataggc

SEQ ID NO: 33985 - DNA, 19 bp, Artificial Sequence
  Synthetic
taccactcccggtacaaag

SEQ ID NO: 33986 - DNA, 22 bp, Artificial Sequence
  Synthetic
tggattctttggtaggaactag

SEQ ID NO: 33987 - DNA, 18 bp, Artificial Sequence
  Synthetic
gttgtcacgcttgttgtt

SEQ ID NO: 33988 - DNA, 19 bp, Artificial Sequence
  Synthetic
ccacctttttcagtctgac

SEQ ID NO: 33989 - DNA, 25 bp, Artificial Sequence
  Synthetic
gactatattattcaccttggatgtt

SEQ ID NO: 33990 - DNA, 23 bp, Artificial Sequence
  Synthetic
actgatcatcacatttatggtat

SEQ ID NO: 33991 - DNA, 17 bp, Artificial Sequence
  Synthetic
ggcctttcgcgacccaa

SEQ ID NO: 33992 - DNA, 17 bp, Artificial Sequence
  Synthetic
tgggaataggctggcgc

SEQ ID NO: 33993 - DNA, 16 bp, Artificial Sequence
  Synthetic
ccacacgcgtctccga

SEQ ID NO: 33994 - DNA, 18 bp, Artificial Sequence
  Synthetic
gccagctcccgttggtat

SEQ ID NO: 33995 - DNA, 20 bp, Artificial Sequence
  Synthetic
tgggctaggtgtgaaacagt

SEQ ID NO: 33996 - DNA, 18 bp, Artificial Sequence
  Synthetic
tagtgcaccaaacaccgg

SEQ ID NO: 33997 - DNA, 18 bp, Artificial Sequence
  Synthetic
gacgatgctggagctcag

SEQ ID NO: 33998 - DNA, 17 bp, Artificial Sequence
  Synthetic
ttgagtccagggccagg

SEQ ID NO: 33999 - DNA, 19 bp, Artificial Sequence
  Synthetic
gttgcagcaggtacaaggg

SEQ ID NO: 34000 - DNA, 18 bp, Artificial Sequence
  Synthetic
aggaaaatttcgcggccc

SEQ ID NO: 34001 - DNA, 18 bp, Artificial Sequence
  Synthetic
gagcgaaccctttccagg

SEQ ID NO: 34002 - DNA, 18 bp, Artificial Sequence
  Synthetic
aacacaggtgagcgcatc

SEQ ID NO: 34003 - DNA, 16 bp, Artificial Sequence
  Synthetic
acgtcatacgcgccgc

SEQ ID NO: 34004 - DNA, 18 bp, Artificial Sequence
  Synthetic
aagtcgccggtaaaaccc

SEQ ID NO: 34005 - DNA, 18 bp, Artificial Sequence
  Synthetic
cataccatgcacacccgg

SEQ ID NO: 34006 - DNA, 20 bp, Artificial Sequence
  Synthetic
gtgctggtaatgacctccaa

SEQ ID NO: 34007 - DNA, 18 bp, Artificial Sequence
  Synthetic
ccgatgttaccgactgcg

SEQ ID NO: 34008 - DNA, 16 bp, Artificial Sequence
  Synthetic
ccgtctcgggcacgta

SEQ ID NO: 34009 - DNA, 20 bp, Artificial Sequence
  Synthetic
ggttccgttcttcacgtgac

SEQ ID NO: 34010 - DNA, 18 bp, Artificial Sequence
  Synthetic
ccacgtaggagtgcaacc

SEQ ID NO: 34011 - DNA, 19 bp, Artificial Sequence
  Synthetic
ctcgcgtgatattgcctcc

SEQ ID NO: 34012 - DNA, 16 bp, Artificial Sequence
  Synthetic
tgaacctggcgtccgc

SEQ ID NO: 34013 - DNA, 20 bp, Artificial Sequence
  Synthetic
cgagaggaggtggagtacac

SEQ ID NO: 34014 - DNA, 19 bp, Artificial Sequence
  Synthetic
gctccactgcgaacacttc

SEQ ID NO: 34015 - DNA, 19 bp, Artificial Sequence
  Synthetic
gtcataagctggaaccggg

SEQ ID NO: 34016 - DNA, 19 bp, Artificial Sequence
  Synthetic
gcgctaagtccatggagtc

SEQ ID NO: 34017 - DNA, 16 bp, Artificial Sequence
  Synthetic
aatgtcccccccgcca

SEQ ID NO: 34018 - DNA, 19 bp, Artificial Sequence
  Synthetic
ggacgaaacctaggtatgc

SEQ ID NO: 34019 - DNA, 19 bp, Artificial Sequence
  Synthetic
accagctcaacgaccttgt

SEQ ID NO: 34020 - DNA, 21 bp, Artificial Sequence
  Synthetic
tgcatattgttacactcctgt

SEQ ID NO: 34021 - DNA, 22 bp, Artificial Sequence
  Synthetic
ttcaaatgaaaatcgccaacaa

SEQ ID NO: 34022 - DNA, 20 bp, Artificial Sequence
  Synthetic
gcaaatcaggaattgagtgg

SEQ ID NO: 34023 - DNA, 20 bp, Artificial Sequence
  Synthetic
cgcctcaatccattcaaaga

SEQ ID NO: 34024 - DNA, 21 bp, Artificial Sequence
  Synthetic
gttacttcttttggtgcctta

SEQ ID NO: 34025 - DNA, 19 bp, Artificial Sequence
  Synthetic
ccttgaacttcccaaacag

SEQ ID NO: 34026 - DNA, 19 bp, Artificial Sequence
  Synthetic
cgaactgtttcagctgagg

SEQ ID NO: 34027 - DNA, 25 bp, Artificial Sequence
  Synthetic
ccatttagcttaatgtaatcatcac

SEQ ID NO: 34028 - DNA, 22 bp, Artificial Sequence
  Synthetic
ggcttcaggttatcaagataat

SEQ ID NO: 34029 - DNA, 20 bp, Artificial Sequence
  Synthetic
gcactttcttcaaagctctt

SEQ ID NO: 34030 - DNA, 19 bp, Artificial Sequence
  Synthetic
aaagaagaatcggacacca

SEQ ID NO: 34031 - DNA, 19 bp, Artificial Sequence
  Synthetic
cctaactctgtacgctgtc

SEQ ID NO: 34032 - DNA, 21 bp, Artificial Sequence
  Synthetic
tcagcccatttaattgaagtt

SEQ ID NO: 34033 - DNA, 18 bp, Artificial Sequence
  Synthetic
tgtgtagcatcacgacca

SEQ ID NO: 34034 - DNA, 25 bp, Artificial Sequence
  Synthetic
ctctgtatagtaagcattatccttt

SEQ ID NO: 34035 - DNA, 19 bp, Artificial Sequence
  Synthetic
gttgtcttggttgtagcct

SEQ ID NO: 34036 - DNA, 21 bp, Artificial Sequence
  Synthetic
gctagtgaaagctcattaggt

SEQ ID NO: 34037 - DNA, 23 bp, Artificial Sequence
  Synthetic
cctaaaattgtcaagtctagctt

SEQ ID NO: 34038 - DNA, 18 bp, Artificial Sequence
  Synthetic
ttgtacactcaacgcgtg

SEQ ID NO: 34039 - DNA, 20 bp, Artificial Sequence
  Synthetic
aattgacaaaatgggagagc

SEQ ID NO: 34040 - DNA, 18 bp, Artificial Sequence
  Synthetic
caacaacaccttgtcggg

SEQ ID NO: 34041 - DNA, 22 bp, Artificial Sequence
  Synthetic
agtagttatgacattgacaacc

SEQ ID NO: 34042 - DNA, 22 bp, Artificial Sequence
  Synthetic
ctatgaaaccaatctctcttgt

SEQ ID NO: 34043 - DNA, 20 bp, Artificial Sequence
  Synthetic
actcagcatcaaaagttgtt

SEQ ID NO: 34044 - DNA, 18 bp, Artificial Sequence
  Synthetic
agcagcaacaacatggtt

SEQ ID NO: 34045 - DNA, 20 bp, Artificial Sequence
  Synthetic
agctggtagtatctaaggct

SEQ ID NO: 34046 - DNA, 21 bp, Artificial Sequence
  Synthetic
ccacaatccattaagagttgt

SEQ ID NO: 34047 - DNA, 21 bp, Artificial Sequence
  Synthetic
ggtatgattaggtctcatggc

SEQ ID NO: 34048 - DNA, 18 bp, Artificial Sequence
  Synthetic
taccattctgcagcagct

SEQ ID NO: 34049 - DNA, 20 bp, Artificial Sequence
  Synthetic
gaatgcgtgcttatgcttaa

SEQ ID NO: 34050 - DNA, 24 bp, Artificial Sequence
  Synthetic
cctaagaaacaataaacaagcatg

SEQ ID NO: 34051 - DNA, 18 bp, Artificial Sequence
  Synthetic
ttgaagaaccgagagcag

SEQ ID NO: 34052 - DNA, 18 bp, Artificial Sequence
  Synthetic
ctacagcctgctcatagg

SEQ ID NO: 34053 - DNA, 18 bp, Artificial Sequence
  Synthetic
tggaacacaaccatcacg

SEQ ID NO: 34054 - DNA, 19 bp, Artificial Sequence
  Synthetic
cacaaacctacctcccttc

SEQ ID NO: 34055 - DNA, 19 bp, Artificial Sequence
  Synthetic
attggttgtcctccacttg

SEQ ID NO: 34056 - DNA, 21 bp, Artificial Sequence
  Synthetic
ttaaaaacgttgatgcatccg

SEQ ID NO: 34057 - DNA, 20 bp, Artificial Sequence
  Synthetic
gcaattgtatgtgacgagta

SEQ ID NO: 34058 - DNA, 23 bp, Artificial Sequence
  Synthetic
cagcaatgagtaatatgaatcca

SEQ ID NO: 34059 - DNA, 21 bp, Artificial Sequence
  Synthetic
cgaaaatggtatccagttgaa

SEQ ID NO: 34060 - DNA, 18 bp, Artificial Sequence
  Synthetic
tgccatcctgagcaaaga

SEQ ID NO: 34061 - DNA, 24 bp, Artificial Sequence
  Synthetic
gtttttaacatattatgccagcca

SEQ ID NO: 34062 - DNA, 18 bp, Artificial Sequence
  Synthetic
cagttgtagcatcaccgg

SEQ ID NO: 34063 - DNA, 20 bp, Artificial Sequence
  Synthetic
gcctcagacatgaacacatt

SEQ ID NO: 34064 - DNA, 18 bp, Artificial Sequence
  Synthetic
ctcaggttcccagtaccg

SEQ ID NO: 34065 - DNA, 19 bp, Artificial Sequence
  Synthetic
tgggaggcttatgtgactt

SEQ ID NO: 34066 - DNA, 20 bp, Artificial Sequence
  Synthetic
aatggtggtctaggttttcc

SEQ ID NO: 34067 - DNA, 18 bp, Artificial Sequence
  Synthetic
tccgatggcaaaatgact

SEQ ID NO: 34068 - DNA, 24 bp, Artificial Sequence
  Synthetic
gcacactgaattaaaatattctgg

SEQ ID NO: 34069 - DNA, 21 bp, Artificial Sequence
  Synthetic
gcgttctgtgaattataaggt

SEQ ID NO: 34070 - DNA, 18 bp, Artificial Sequence
  Synthetic
gtgtaggtgcctgtgtag

SEQ ID NO: 34071 - DNA, 20 bp, Artificial Sequence
  Synthetic
cagtcggtacagctactaag

SEQ ID NO: 34072 - DNA, 20 bp, Artificial Sequence
  Synthetic
cagcaggcataagtatctga

SEQ ID NO: 34073 - DNA, 19 bp, Artificial Sequence
  Synthetic
tgagcatcgtagaacttcc

SEQ ID NO: 34074 - DNA, 21 bp, Artificial Sequence
  Synthetic
gactcacaaggactatcagaa

SEQ ID NO: 34075 - DNA, 21 bp, Artificial Sequence
  Synthetic
atctccacatcaataccatct

SEQ ID NO: 34076 - DNA, 20 bp, Artificial Sequence
  Synthetic
agacctttgactgaaccttc

SEQ ID NO: 34077 - DNA, 18 bp, Artificial Sequence
  Synthetic
aatcttgtgagcgcttgg

SEQ ID NO: 34078 - DNA, 22 bp, Artificial Sequence
  Synthetic
cacacttttcaagaagcattct

SEQ ID NO: 34079 - DNA, 21 bp, Artificial Sequence
  Synthetic
tcttttgtcacatgtttggtc

SEQ ID NO: 34080 - DNA, 20 bp, Artificial Sequence
  Synthetic
gctcatgtcaaagagtgaat

SEQ ID NO: 34081 - DNA, 25 bp, Artificial Sequence
  Synthetic
ccttataaacatagagaaacccatc

SEQ ID NO: 34082 - DNA, 21 bp, Artificial Sequence
  Synthetic
tttgtcaatctcaaagctctt

SEQ ID NO: 34083 - DNA, 21 bp, Artificial Sequence
  Synthetic
ccatgaaatcatctggcaatt

SEQ ID NO: 34084 - DNA, 21 bp, Artificial Sequence
  Synthetic
gtggataattttggtccacaa

SEQ ID NO: 34085 - DNA, 22 bp, Artificial Sequence
  Synthetic
tgagtctggaatacattgtttc

SEQ ID NO: 34086 - DNA, 21 bp, Artificial Sequence
  Synthetic
agaagcaaattagcacattca

SEQ ID NO: 34087 - DNA, 18 bp, Artificial Sequence
  Synthetic
cagtgtaggcagcaatca

SEQ ID NO: 34088 - DNA, 23 bp, Artificial Sequence
  Synthetic
acttgaaattgcaccaaaattag

SEQ ID NO: 34089 - DNA, 22 bp, Artificial Sequence
  Synthetic
taataaaccaagaagtgccatt

SEQ ID NO: 34090 - DNA, 23 bp, Artificial Sequence
  Synthetic
ttaaatttttagcgacctcattg

SEQ ID NO: 34091 - DNA, 23 bp, Artificial Sequence
  Synthetic
atccataagttcgtttatgtgta

SEQ ID NO: 34092 - DNA, 19 bp, Artificial Sequence
  Synthetic
attctacatgcgttgatgc

SEQ ID NO: 34093 - DNA, 22 bp, Artificial Sequence
  Synthetic
acaagcttgttaaagatgaaga

SEQ ID NO: 34094 - DNA, 18 bp, Artificial Sequence
  Synthetic
gcgagtagacgtaaaccg

SEQ ID NO: 34095 - DNA, 19 bp, Artificial Sequence
  Synthetic
atacaagccattgcaatcg

SEQ ID NO: 34096 - DNA, 19 bp, Artificial Sequence
  Synthetic
acggtagcggttgtatgca

SEQ ID NO: 34097 - DNA, 19 bp, Artificial Sequence
  Synthetic
aagagggtgaaatggtgaa

SEQ ID NO: 34098 - DNA, 21 bp, Artificial Sequence
  Synthetic
gtgccatctatgaaaaggtaa

SEQ ID NO: 34099 - DNA, 18 bp, Artificial Sequence
  Synthetic
ttgattggaacgccctgg

SEQ ID NO: 34100 - DNA, 19 bp, Artificial Sequence
  Synthetic
cgagaagaggcttgactgc

SEQ ID NO: 34101 - DNA, 21 bp, Artificial Sequence
  Synthetic
aatttccttgggtttgttctg

SEQ ID NO: 34102 - DNA, 18 bp, Artificial Sequence
  Synthetic
tttgtctctgcggcaaag

SEQ ID NO: 34103 - DNA, 21 bp, Artificial Sequence
  Synthetic
tctccctagcattattcactg

SEQ ID NO: 34104 - DNA, 19 bp, Artificial Sequence
  Synthetic
aggtttttgccttgggtaa

SEQ ID NO: 34105 - DNA, 19 bp, Artificial Sequence
  Synthetic
ggattatgggcaacggctg

SEQ ID NO: 34106 - DNA, 20 bp, Artificial Sequence
  Synthetic
atctagaagcaccacttgaa

SEQ ID NO: 34107 - DNA, 19 bp, Artificial Sequence
  Synthetic
agtcaagtatgatggccac

SEQ ID NO: 34108 - DNA, 18 bp, Artificial Sequence
  Synthetic
ttgatgttctgggatggc

SEQ ID NO: 34109 - DNA, 22 bp, Artificial Sequence
  Synthetic
cattggtacagcattgacataa

SEQ ID NO: 34110 - DNA, 20 bp, Artificial Sequence
  Synthetic
aatatttccttggtcgggtg

SEQ ID NO: 34111 - DNA, 21 bp, Artificial Sequence
  Synthetic
agaaccacaaaacataaagct

SEQ ID NO: 34112 - DNA, 21 bp, Artificial Sequence
  Synthetic
ataaccagctgaggaatatgt

SEQ ID NO: 34113 - DNA, 18 bp, Artificial Sequence
  Synthetic
gaacagagctggtgtgtc

SEQ ID NO: 34114 - DNA, 21 bp, Artificial Sequence
  Synthetic
catgtaataggctgatgcaat

SEQ ID NO: 34115 - DNA, 22 bp, Artificial Sequence
  Synthetic
gtaaaaacatcaggtctggttt

SEQ ID NO: 34116 - DNA, 25 bp, Artificial Sequence
  Synthetic
ggtaatattctgattcttgaatctc

SEQ ID NO: 34117 - DNA, 19 bp, Artificial Sequence
  Synthetic
ctgttgtttgatgctgtct

SEQ ID NO: 34118 - DNA, 18 bp, Artificial Sequence
  Synthetic
aatccactctagcccacg

SEQ ID NO: 34119 - DNA, 19 bp, Artificial Sequence
  Synthetic
tggcaaaacaaagtcatgt

SEQ ID NO: 34120 - DNA, 18 bp, Artificial Sequence
  Synthetic
tggtcgaaagctttttgc

SEQ ID NO: 34121 - DNA, 19 bp, Artificial Sequence
  Synthetic
tgtttgagtagtgagcgac

SEQ ID NO: 34122 - DNA, 19 bp, Artificial Sequence
  Synthetic
catcttcacgtgagggtaa

SEQ ID NO: 34123 - DNA, 20 bp, Artificial Sequence
  Synthetic
ttagtgattaaaccctgggt

SEQ ID NO: 34124 - DNA, 20 bp, Artificial Sequence
  Synthetic
aggctaccatcatagtttga

SEQ ID NO: 34125 - DNA, 19 bp, Artificial Sequence
  Synthetic
cgtgttcctgcatacatga

SEQ ID NO: 34126 - DNA, 20 bp, Artificial Sequence
  Synthetic
ctcgaagactgaatctggaa

SEQ ID NO: 34127 - DNA, 19 bp, Artificial Sequence
  Synthetic
acagtaaggtggctctaac

SEQ ID NO: 34128 - DNA, 23 bp, Artificial Sequence
  Synthetic
gtaagcctactgtgtaaatacat

SEQ ID NO: 34129 - DNA, 18 bp, Artificial Sequence
  Synthetic
gctctgagactgctgtag

SEQ ID NO: 34130 - DNA, 18 bp, Artificial Sequence
  Synthetic
tccttctagggctttccg

SEQ ID NO: 34131 - DNA, 20 bp, Artificial Sequence
  Synthetic
cagagtcacttcagttcctt

SEQ ID NO: 34132 - DNA, 22 bp, Artificial Sequence
  Synthetic
atatccctagtaggatcggata

SEQ ID NO: 34133 - DNA, 20 bp, Artificial Sequence
  Synthetic
cgtcatgctcaaatgctaaa

SEQ ID NO: 34134 - DNA, 24 bp, Artificial Sequence
  Synthetic
agaatctgtgattataagagaagg

SEQ ID NO: 34135 - DNA, 23 bp, Artificial Sequence
  Synthetic
tgtttcctactttgttccataat

SEQ ID NO: 34136 - DNA, 23 bp, Artificial Sequence
  Synthetic
tggtgaaatacaaataagatcct

SEQ ID NO: 34137 - DNA, 18 bp, Artificial Sequence
  Synthetic
ctggtgtatccgttggtg

SEQ ID NO: 34138 - DNA, 18 bp, Artificial Sequence
  Synthetic
gcacaagaggtcaggaag

SEQ ID NO: 34139 - DNA, 19 bp, Artificial Sequence
  Synthetic
gccacaataggtgtcaacc

SEQ ID NO: 34140 - DNA, 20 bp, Artificial Sequence
  Synthetic
tgaaacaacagaaccacttg

SEQ ID NO: 34141 - DNA, 19 bp, Artificial Sequence
  Synthetic
atttgcagcttcatcttcc

SEQ ID NO: 34142 - DNA, 25 bp, Artificial Sequence
  Synthetic
cctcgaatagtacattaaaacattg

SEQ ID NO: 34143 - DNA, 18 bp, Artificial Sequence
  Synthetic
tctggaagaagtgccttc

SEQ ID NO: 34144 - DNA, 20 bp, Artificial Sequence
  Synthetic
agtcttccaagtcgtcccaa

SEQ ID NO: 34145 - DNA, 25 bp, Artificial Sequence
  Synthetic
ttgtagttacttcaacttcagctat

SEQ ID NO: 34146 - DNA, 20 bp, Artificial Sequence
  Synthetic
ggtctagtacatcctgctga

SEQ ID NO: 34147 - DNA, 23 bp, Artificial Sequence
  Synthetic
aattcctgactcagatactttcg

SEQ ID NO: 34148 - DNA, 23 bp, Artificial Sequence
  Synthetic
ttgtatatcagttaggcaccttt

SEQ ID NO: 34149 - DNA, 22 bp, Artificial Sequence
  Synthetic
ttcctagttttacttgcattga

SEQ ID NO: 34150 - DNA, 21 bp, Artificial Sequence
  Synthetic
tttgacttgctcctagagatc

SEQ ID NO: 34151 - DNA, 23 bp, Artificial Sequence
  Synthetic
tgcacatctgtatataaaacctc

SEQ ID NO: 34152 - DNA, 22 bp, Artificial Sequence
  Synthetic
catcatttagattggaatgcca

SEQ ID NO: 34153 - DNA, 20 bp, Artificial Sequence
  Synthetic
cgaccagagagtacccttct

SEQ ID NO: 34154 - DNA, 18 bp, Artificial Sequence
  Synthetic
gttcaagagtgctggagt

SEQ ID NO: 34155 - DNA, 21 bp, Artificial Sequence
  Synthetic
tgattttggtctgattttgct

SEQ ID NO: 34156 - DNA, 25 bp, Artificial Sequence
  Synthetic
ctcattaataaagttttcagctgtg

SEQ ID NO: 34157 - DNA, 22 bp, Artificial Sequence
  Synthetic
ttgtgttcgtttagtagcttta

SEQ ID NO: 34158 - DNA, 18 bp, Artificial Sequence
  Synthetic
agaaggcacgttccatag

SEQ ID NO: 34159 - DNA, 23 bp, Artificial Sequence
  Synthetic
tattggttgcaaatatagctaga

SEQ ID NO: 34160 - DNA, 18 bp, Artificial Sequence
  Synthetic
aggttgtcggaactgttt

SEQ ID NO: 34161 - DNA, 25 bp, Artificial Sequence
  Synthetic
gacattagctacatataaaacaggt

SEQ ID NO: 34162 - DNA, 19 bp, Artificial Sequence
  Synthetic
cacgaacctctttttcacc

SEQ ID NO: 34163 - DNA, 23 bp, Artificial Sequence
  Synthetic
aaaagtagtaggtttcacaaagt

SEQ ID NO: 34164 - DNA, 20 bp, Artificial Sequence
  Synthetic
aaacttgacagcattgacaa

SEQ ID NO: 34165 - DNA, 23 bp, Artificial Sequence
  Synthetic
ttgaatgattccaaaaataccag

SEQ ID NO: 34166 - DNA, 23 bp, Artificial Sequence
  Synthetic
ggaatagtataagccacaatttg

SEQ ID NO: 34167 - DNA, 24 bp, Artificial Sequence
  Synthetic
gacctattactcattttgctcata

SEQ ID NO: 34168 - DNA, 23 bp, Artificial Sequence
  Synthetic
tttctaaaagaagtcgattttgc

SEQ ID NO: 34169 - DNA, 20 bp, Artificial Sequence
  Synthetic
cgttttattccagcgtcaaa

SEQ ID NO: 34170 - DNA, 19 bp, Artificial Sequence
  Synthetic
aacattttgacccagacct

SEQ ID NO: 34171 - DNA, 20 bp, Artificial Sequence
  Synthetic
agtccatactgttgcacaat

SEQ ID NO: 34172 - DNA, 22 bp, Artificial Sequence
  Synthetic
tcagctttttctttactcatca

SEQ ID NO: 34173 - DNA, 18 bp, Artificial Sequence
  Synthetic
tctcacatcacgcttagc

SEQ ID NO: 34174 - DNA, 21 bp, Artificial Sequence
  Synthetic
tgaattgatgattagccacca

SEQ ID NO: 34175 - DNA, 23 bp, Artificial Sequence
  Synthetic
tcggaaattgaccaaaagaatta

SEQ ID NO: 34176 - DNA, 20 bp, Artificial Sequence
  Synthetic
tgtcaaacttgtagcccaaa

SEQ ID NO: 34177 - DNA, 20 bp, Artificial Sequence
  Synthetic
ccactatttttgctggacaa

SEQ ID NO: 34178 - DNA, 21 bp, Artificial Sequence
  Synthetic
agaacttttaagtgcgttagt

SEQ ID NO: 34179 - DNA, 21 bp, Artificial Sequence
  Synthetic
cgattaatttccctagtggtc

SEQ ID NO: 34180 - DNA, 18 bp, Artificial Sequence
  Synthetic
tcacatcagtcgttccac

SEQ ID NO: 34181 - DNA, 19 bp, Artificial Sequence
  Synthetic
ttatcgtcaagggctttga

SEQ ID NO: 34182 - DNA, 18 bp, Artificial Sequence
  Synthetic
tgggtaaagtcgtgcaac

SEQ ID NO: 34183 - DNA, 20 bp, Artificial Sequence
  Synthetic
agcatgttacgtaaggcttt

SEQ ID NO: 34184 - DNA, 21 bp, Artificial Sequence
  Synthetic
tctttaccaagagatgcttca

SEQ ID NO: 34185 - DNA, 22 bp, Artificial Sequence
  Synthetic
caaaatcattggtatgctttgg

SEQ ID NO: 34186 - DNA, 18 bp, Artificial Sequence
  Synthetic
aatccccattgcttcagc

SEQ ID NO: 34187 - DNA, 19 bp, Artificial Sequence
  Synthetic
tgcagatgcgaatggtgtc

SEQ ID NO: 34188 - DNA, 22 bp, Artificial Sequence
  Synthetic
ataaaatcaatggccaaacctt

SEQ ID NO: 34189 - DNA, 21 bp, Artificial Sequence
  Synthetic
gcttactctgtcagaattgtc

SEQ ID NO: 34190 - DNA, 18 bp, Artificial Sequence
  Synthetic
gatgaatgcgttccccag

SEQ ID NO: 34191 - DNA, 23 bp, Artificial Sequence
  Synthetic
tctgtcttcatgattaaatggat

SEQ ID NO: 34192 - DNA, 20 bp, Artificial Sequence
  Synthetic
cctttttaccagctgtttgc

SEQ ID NO: 34193 - DNA, 23 bp, Artificial Sequence
  Synthetic
acgttctatataaggctcgatag

SEQ ID NO: 34194 - DNA, 22 bp, Artificial Sequence
  Synthetic
tgatatagtcctgactcgctaa

SEQ ID NO: 34195 - DNA, 23 bp, Artificial Sequence
  Synthetic
aaggttgttttccaatataagct

SEQ ID NO: 34196 - DNA, 18 bp, Artificial Sequence
  Synthetic
caacacctgtcccacaac

SEQ ID NO: 34197 - DNA, 19 bp, Artificial Sequence
  Synthetic
cttggtcgatgtctttgac

SEQ ID NO: 34198 - DNA, 21 bp, Artificial Sequence
  Synthetic
aaaaactgatgaaaagcgtga

SEQ ID NO: 34199 - DNA, 24 bp, Artificial Sequence
  Synthetic
acaaatatcccttttcttagcttc

SEQ ID NO: 34200 - DNA, 18 bp, Artificial Sequence
  Synthetic
catctccacttccaaccc

SEQ ID NO: 34201 - DNA, 20 bp, Artificial Sequence
  Synthetic
tcaattgtcttaatgccacc

SEQ ID NO: 34202 - DNA, 20 bp, Artificial Sequence
  Synthetic
tgattgcccgaataaaggat

SEQ ID NO: 34203 - DNA, 18 bp, Artificial Sequence
  Synthetic
acaaaacatcctgacgct

SEQ ID NO: 34204 - DNA, 23 bp, Artificial Sequence
  Synthetic
tgttattggtctgtagaaagtcc

SEQ ID NO: 34205 - DNA, 21 bp, Artificial Sequence
  Synthetic
tgaaatagcaagatcagcttt

SEQ ID NO: 34206 - DNA, 18 bp, Artificial Sequence
  Synthetic
gctaaaaaaccagcagct

SEQ ID NO: 34207 - DNA, 18 bp, Artificial Sequence
  Synthetic
cccttgcttcttctggat

SEQ ID NO: 34208 - DNA, 23 bp, Artificial Sequence
  Synthetic
tattttaaacccagctttgaaag

SEQ ID NO: 34209 - DNA, 21 bp, Artificial Sequence
  Synthetic
tcttttccttatgaaatgggc

SEQ ID NO: 34210 - DNA, 22 bp, Artificial Sequence
  Synthetic
aaactgcatggtaaaatttagc

SEQ ID NO: 34211 - DNA, 18 bp, Artificial Sequence
  Synthetic
tttccatatcagctgccg

SEQ ID NO: 34212 - DNA, 24 bp, Artificial Sequence
  Synthetic
cattttattggggattctgacaat

SEQ ID NO: 34213 - DNA, 18 bp, Artificial Sequence
  Synthetic
ttggcattggtaaggtca

SEQ ID NO: 34214 - DNA, 23 bp, Artificial Sequence
  Synthetic
caacttgaacgttaaaagttgtt

SEQ ID NO: 34215 - DNA, 21 bp, Artificial Sequence
  Synthetic
tgtctagctcttttagaaggt

SEQ ID NO: 34216 - DNA, 23 bp, Artificial Sequence
  Synthetic
ccataggtttttgctaaatcaat

SEQ ID NO: 34217 - DNA, 20 bp, Artificial Sequence
  Synthetic
tggtcattttggtaagcaaa

SEQ ID NO: 34218 - DNA, 24 bp, Artificial Sequence
  Synthetic
caatctattctttctattgggtga

SEQ ID NO: 34219 - DNA, 22 bp, Artificial Sequence
  Synthetic
gtaagttttaatgccaattggt

SEQ ID NO: 34220 - DNA, 19 bp, Artificial Sequence
  Synthetic
tcttccaactcaacgtctt

SEQ ID NO: 34221 - DNA, 24 bp, Artificial Sequence
  Synthetic
ttgtgccattaaataatcacttcc

SEQ ID NO: 34222 - DNA, 22 bp, Artificial Sequence
  Synthetic
agccagcattattaatcaagac

SEQ ID NO: 34223 - DNA, 22 bp, Artificial Sequence
  Synthetic
agtaaatttaccaacgctttcc

SEQ ID NO: 34224 - DNA, 19 bp, Artificial Sequence
  Synthetic
gccctcttcaatagcttga

SEQ ID NO: 34225 - DNA, 23 bp, Artificial Sequence
  Synthetic
cctcatgttgttctttaaagaca

SEQ ID NO: 34226 - DNA, 24 bp, Artificial Sequence
  Synthetic
ttagagaaataacttcttgcctct

SEQ ID NO: 34227 - DNA, 18 bp, Artificial Sequence
  Synthetic
ttgatcacaggaaccacc

SEQ ID NO: 34228 - DNA, 21 bp, Artificial Sequence
  Synthetic
tgttgaacagatttggcaaat

SEQ ID NO: 34229 - DNA, 25 bp, Artificial Sequence
  Synthetic
aatcgactgacaattctaaatcaac

SEQ ID NO: 34230 - DNA, 19 bp, Artificial Sequence
  Synthetic
accaactgccttatagtgg

SEQ ID NO: 34231 - DNA, 21 bp, Artificial Sequence
  Synthetic
cctttgtgtcataaacctctt

SEQ ID NO: 34232 - DNA, 18 bp, Artificial Sequence
  Synthetic
gagattgctggcatttcc

SEQ ID NO: 34233 - DNA, 19 bp, Artificial Sequence
  Synthetic
cagagtgacggtaaccaaa

SEQ ID NO: 34234 - DNA, 21 bp, Artificial Sequence
  Synthetic
tcataatctttagctgtgcca

SEQ ID NO: 34235 - DNA, 22 bp, Artificial Sequence
  Synthetic
tgaatatgccaaaaaaggacct

SEQ ID NO: 34236 - DNA, 18 bp, Artificial Sequence
  Synthetic
ttcactaacgacaccagc

SEQ ID NO: 34237 - DNA, 20 bp, Artificial Sequence
  Synthetic
ggcacaggttttggaatcct

SEQ ID NO: 34238 - DNA, 18 bp, Artificial Sequence
  Synthetic
ttggaaaggagtggcaac

SEQ ID NO: 34239 - DNA, 22 bp, Artificial Sequence
  Synthetic
gttttcagatgaagtacaacag

SEQ ID NO: 34240 - DNA, 18 bp, Artificial Sequence
  Synthetic
aaaggggtcaacgctaaa

SEQ ID NO: 34241 - DNA, 21 bp, Artificial Sequence
  Synthetic
gcaagactgtcaatgttcaag

SEQ ID NO: 34242 - DNA, 18 bp, Artificial Sequence
  Synthetic
cctgatgaggtccgatca

SEQ ID NO: 34243 - DNA, 18 bp, Artificial Sequence
  Synthetic
aaggggaagggcaatttg

SEQ ID NO: 34244 - DNA, 20 bp, Artificial Sequence
  Synthetic
ctatcgtctttgatggacca

SEQ ID NO: 34245 - DNA, 22 bp, Artificial Sequence
  Synthetic
ttaaaccgtatgacgaaacaga

SEQ ID NO: 34246 - DNA, 18 bp, Artificial Sequence
  Synthetic
tgcagaccttggacatct

SEQ ID NO: 34247 - DNA, 19 bp, Artificial Sequence
  Synthetic
gggaaaaatggagttgagc

SEQ ID NO: 34248 - DNA, 21 bp, Artificial Sequence
  Synthetic
aatgaaaaatggggttgttcc

SEQ ID NO: 34249 - DNA, 18 bp, Artificial Sequence
  Synthetic
gctcgcacagataccatt

SEQ ID NO: 34250 - DNA, 24 bp, Artificial Sequence
  Synthetic
cgatatatcctaaagaagacagat

SEQ ID NO: 34251 - DNA, 23 bp, Artificial Sequence
  Synthetic
tggatgctattattgaagctaaa

SEQ ID NO: 34252 - DNA, 19 bp, Artificial Sequence
  Synthetic
ggcatgattatcaaaggcc

SEQ ID NO: 34253 - DNA, 20 bp, Artificial Sequence
  Synthetic
gggattcttgaagtggttga

SEQ ID NO: 34254 - DNA, 22 bp, Artificial Sequence
  Synthetic
acatataccttgcctatctctt

SEQ ID NO: 34255 - DNA, 18 bp, Artificial Sequence
  Synthetic
gtggcagaaaccttctcg

SEQ ID NO: 34256 - DNA, 23 bp, Artificial Sequence
  Synthetic
acaattgtctttaatcagttggt

SEQ ID NO: 34257 - DNA, 22 bp, Artificial Sequence
  Synthetic
cttaattacatctgtggctgtt

SEQ ID NO: 34258 - DNA, 22 bp, Artificial Sequence
  Synthetic
ctgatttgttccaagaaaatgg

SEQ ID NO: 34259 - DNA, 20 bp, Artificial Sequence
  Synthetic
ggtgatcttttattggcaca

SEQ ID NO: 34260 - DNA, 20 bp, Artificial Sequence
  Synthetic
ctagccataaaggagctgat

SEQ ID NO: 34261 - DNA, 21 bp, Artificial Sequence
  Synthetic
gttacatctatcgtggtgcta

SEQ ID NO: 34262 - DNA, 19 bp, Artificial Sequence
  Synthetic
tccatgtctggctttcaag

SEQ ID NO: 34263 - DNA, 20 bp, Artificial Sequence
  Synthetic
gctctgaactaaggtggtac

SEQ ID NO: 34264 - DNA, 18 bp, Artificial Sequence
  Synthetic
aagaattgcaacgtcgtg

SEQ ID NO: 34265 - DNA, 22 bp, Artificial Sequence
  Synthetic
cccacaatatcttctgtcagat

SEQ ID NO: 34266 - DNA, 18 bp, Artificial Sequence
  Synthetic
tcaggtggttagagtgca

SEQ ID NO: 34267 - DNA, 24 bp, Artificial Sequence
  Synthetic
ttacggattcttgttagactatag

SEQ ID NO: 34268 - DNA, 19 bp, Artificial Sequence
  Synthetic
gctgttcgcccattaaagc

SEQ ID NO: 34269 - DNA, 20 bp, Artificial Sequence
  Synthetic
ctaaagagtaacggaggcgc

SEQ ID NO: 34270 - DNA, 19 bp, Artificial Sequence
  Synthetic
caggtagtcgaggcgagta

SEQ ID NO: 34271 - DNA, 20 bp, Artificial Sequence
  Synthetic
acctaaggagagaccgaaag

SEQ ID NO: 34272 - DNA, 25 bp, Artificial Sequence
  Synthetic
caaaataactgttaagtggaaaagg

SEQ ID NO: 34273 - DNA, 20 bp, Artificial Sequence
  Synthetic
acacgtgaaatctcgttgga

SEQ ID NO: 34274 - DNA, 19 bp, Artificial Sequence
  Synthetic
acctattaggagccagccg

SEQ ID NO: 34275 - DNA, 22 bp, Artificial Sequence
  Synthetic
acacatcgttatcaaatcaaac

SEQ ID NO: 34276 - DNA, 18 bp, Artificial Sequence
  Synthetic
aaacaatgggtggtgtct

SEQ ID NO: 34277 - DNA, 21 bp, Artificial Sequence
  Synthetic
atgagcttatctcgtgctaaa

SEQ ID NO: 34278 - DNA, 19 bp, Artificial Sequence
  Synthetic
ccgcacttgcttatggtat

SEQ ID NO: 34279 - DNA, 22 bp, Artificial Sequence
  Synthetic
tggtattgacttaggtacaaca

SEQ ID NO: 34280 - DNA, 18 bp, Artificial Sequence
  Synthetic
cagttcagaccctcccag

SEQ ID NO: 34281 - DNA, 18 bp, Artificial Sequence
  Synthetic
acgtgctgatgagtttga

SEQ ID NO: 34282 - DNA, 18 bp, Artificial Sequence
  Synthetic
tagtcaagaagccgcact

SEQ ID NO: 34283 - DNA, 21 bp, Artificial Sequence
  Synthetic
cgtttaacagggtttgatgtt

SEQ ID NO: 34284 - DNA, 23 bp, Artificial Sequence
  Synthetic
ttaatcgttgagctatttacaca

SEQ ID NO: 34285 - DNA, 22 bp, Artificial Sequence
  Synthetic
ctttttgacttggttaaaagct

SEQ ID NO: 34286 - DNA, 18 bp, Artificial Sequence
  Synthetic
gaacctgttgtgtgccag

SEQ ID NO: 34287 - DNA, 21 bp, Artificial Sequence
  Synthetic
acgctcttttagtttcttgaa

SEQ ID NO: 34288 - DNA, 20 bp, Artificial Sequence
  Synthetic
gcatatcaggaatggttgtc

SEQ ID NO: 34289 - DNA, 19 bp, Artificial Sequence
  Synthetic
agtgccaaagaggtgatta

SEQ ID NO: 34290 - DNA, 19 bp, Artificial Sequence
  Synthetic
ttggaaagtcacaacctga

SEQ ID NO: 34291 - DNA, 25 bp, Artificial Sequence
  Synthetic
gtgcctttataagtatcaatcactt

SEQ ID NO: 34292 - DNA, 21 bp, Artificial Sequence
  Synthetic
tcataaacaatgcttttccct

SEQ ID NO: 34293 - DNA, 18 bp, Artificial Sequence
  Synthetic
tttcttcccactcccctt

SEQ ID NO: 34294 - DNA, 19 bp, Artificial Sequence
  Synthetic
cctgaggaaggtttgcttt

SEQ ID NO: 34295 - DNA, 25 bp, Artificial Sequence
  Synthetic
cctttattgaaagaaatgatatccc

SEQ ID NO: 34296 - DNA, 24 bp, Artificial Sequence
  Synthetic
aaaagaccttgataagcttgaaag

SEQ ID NO: 34297 - DNA, 18 bp, Artificial Sequence
  Synthetic
ttaacatctgctcaggcg

SEQ ID NO: 34298 - DNA, 21 bp, Artificial Sequence
  Synthetic
ttttggtgtctgagctgatta

SEQ ID NO: 34299 - DNA, 23 bp, Artificial Sequence
  Synthetic
gcttagcacattaaaaatagcaa

SEQ ID NO: 34300 - DNA, 19 bp, Artificial Sequence
  Synthetic
aaccaacacgtctagaagt

SEQ ID NO: 34301 - DNA, 22 bp, Artificial Sequence
  Synthetic
gccaatttcatgtagataatgc

SEQ ID NO: 34302 - DNA, 21 bp, Artificial Sequence
  Synthetic
aggtaccttttcaaatggaac

SEQ ID NO: 34303 - DNA, 23 bp, Artificial Sequence
  Synthetic
ctacattgaacgatatcggaatc

SEQ ID NO: 34304 - DNA, 22 bp, Artificial Sequence
  Synthetic
aactatttcctgtttcagctta

SEQ ID NO: 34305 - DNA, 20 bp, Artificial Sequence
  Synthetic
cgggttcaaagacaagctgc

SEQ ID NO: 34306 - DNA, 15 bp, Artificial Sequence
  Synthetic
acagcgcgatgccga

SEQ ID NO: 34307 - DNA, 18 bp, Artificial Sequence
  Synthetic
tagccggccgatgtatcc

SEQ ID NO: 34308 - DNA, 17 bp, Artificial Sequence
  Synthetic
attaatgggggggggcc

SEQ ID NO: 34309 - DNA, 18 bp, Artificial Sequence
  Synthetic
ggcgcttgatccccatag

SEQ ID NO: 34310 - DNA, 18 bp, Artificial Sequence
  Synthetic
tttcaacttacgggcggc

SEQ ID NO: 34311 - DNA, 17 bp, Artificial Sequence
  Synthetic
acccaatctccggccac

SEQ ID NO: 34312 - DNA, 18 bp, Artificial Sequence
  Synthetic
ggaagcgggagacgactc

SEQ ID NO: 34313 - DNA, 16 bp, Artificial Sequence
  Synthetic
ggccaccgacccgtta

SEQ ID NO: 34314 - DNA, 18 bp, Artificial Sequence
  Synthetic
atccaaccaggcctgcat

SEQ ID NO: 34315 - DNA, 16 bp, Artificial Sequence
  Synthetic
acggtgggggcctcat

SEQ ID NO: 34316 - DNA, 20 bp, Artificial Sequence
  Synthetic
ccagggatctaactacggga

SEQ ID NO: 34317 - DNA, 19 bp, Artificial Sequence
  Synthetic
cggccggacatgttgaaag

SEQ ID NO: 34318 - DNA, 20 bp, Artificial Sequence
  Synthetic
tgcatgccttatcggtgaaa

SEQ ID NO: 34319 - DNA, 20 bp, Artificial Sequence
  Synthetic
actgccatgttccagactgt

SEQ ID NO: 34320 - DNA, 16 bp, Artificial Sequence
  Synthetic
ccgggccccagttctt

SEQ ID NO: 34321 - DNA, 19 bp, Artificial Sequence
  Synthetic
ttcttcccctccaactgga

SEQ ID NO: 34322 - DNA, 18 bp, Artificial Sequence
  Synthetic
gctgtcattggcgactgc

SEQ ID NO: 34323 - DNA, 17 bp, Artificial Sequence
  Synthetic
taatgcagccgctcccg

SEQ ID NO: 34324 - DNA, 18 bp, Artificial Sequence
  Synthetic
tgcagtagccacctgagc

SEQ ID NO: 34325 - DNA, 18 bp, Artificial Sequence
  Synthetic
gttgaccagtggcaacgt

SEQ ID NO: 34326 - DNA, 19 bp, Artificial Sequence
  Synthetic
tgatattaacaggcccagc

SEQ ID NO: 34327 - DNA, 20 bp, Artificial Sequence
  Synthetic
cttccacaataagcagtgac

SEQ ID NO: 34328 - DNA, 18 bp, Artificial Sequence
  Synthetic
aaaatgagccaacctcgc

SEQ ID NO: 34329 - DNA, 20 bp, Artificial Sequence
  Synthetic
gacattaccaggaacaacac

SEQ ID NO: 34330 - DNA, 18 bp, Artificial Sequence
  Synthetic
ccagaagctttgcgtaca

SEQ ID NO: 34331 - DNA, 21 bp, Artificial Sequence
  Synthetic
ccatcaagcttaaaaccacta

SEQ ID NO: 34332 - DNA, 20 bp, Artificial Sequence
  Synthetic
tgcttgaacaatagcacatt

SEQ ID NO: 34333 - DNA, 22 bp, Artificial Sequence
  Synthetic
ctctacgaattacacgacttac

SEQ ID NO: 34334 - DNA, 20 bp, Artificial Sequence
  Synthetic
gcttcaacaacacaaccatt

SEQ ID NO: 34335 - DNA, 21 bp, Artificial Sequence
  Synthetic
aacatataggtttcacaggga

SEQ ID NO: 34336 - DNA, 22 bp, Artificial Sequence
  Synthetic
gataatgactgaagttgacctt

SEQ ID NO: 34337 - DNA, 24 bp, Artificial Sequence
  Synthetic
ccataacattactctctacaacaa

SEQ ID NO: 34338 - DNA, 23 bp, Artificial Sequence
  Synthetic
accaacaaaatcattagggtaac

SEQ ID NO: 34339 - DNA, 24 bp, Artificial Sequence
  Synthetic
gaaattataggttcaccaacattg

SEQ ID NO: 34340 - DNA, 18 bp, Artificial Sequence
  Synthetic
ttccaaaagcagcctgta

SEQ ID NO: 34341 - DNA, 19 bp, Artificial Sequence
  Synthetic
acatagccacaacgctaaa

SEQ ID NO: 34342 - DNA, 18 bp, Artificial Sequence
  Synthetic
ataacagacgcgaaccac

SEQ ID NO: 34343 - DNA, 24 bp, Artificial Sequence
  Synthetic
ggtgtatgtacattagattgtgaa

SEQ ID NO: 34344 - DNA, 20 bp, Artificial Sequence
  Synthetic
cacctacaaccattcaacaa

SEQ ID NO: 34345 - DNA, 25 bp, Artificial Sequence
  Synthetic
ggacagttgaaatttttatacaacg

SEQ ID NO: 34346 - DNA, 20 bp, Artificial Sequence
  Synthetic
gagcgtgcttctttatacat

SEQ ID NO: 34347 - DNA, 20 bp, Artificial Sequence
  Synthetic
ccctcagctttcataggttt

SEQ ID NO: 34348 - DNA, 25 bp, Artificial Sequence
  Synthetic
cagcaccattagataacatcttaat

SEQ ID NO: 34349 - DNA, 18 bp, Artificial Sequence
  Synthetic
tcgagctgcactagaacc

SEQ ID NO: 34350 - DNA, 21 bp, Artificial Sequence
  Synthetic
tgttcatcaaagttacgcata

SEQ ID NO: 34351 - DNA, 23 bp, Artificial Sequence
  Synthetic
caccaaaatcataaaagttacca

SEQ ID NO: 34352 - DNA, 21 bp, Artificial Sequence
  Synthetic
aacagaaaaacaaatagtgcg

SEQ ID NO: 34353 - DNA, 22 bp, Artificial Sequence
  Synthetic
tgcgtgtattaacaatggattt

SEQ ID NO: 34354 - DNA, 19 bp, Artificial Sequence
  Synthetic
gtactagcgtcaccagaag

SEQ ID NO: 34355 - DNA, 22 bp, Artificial Sequence
  Synthetic
gttctaacaaaacaacagcatc

SEQ ID NO: 34356 - DNA, 21 bp, Artificial Sequence
  Synthetic
aaataaacttgtggtcggtac

SEQ ID NO: 34357 - DNA, 20 bp, Artificial Sequence
  Synthetic
aatgtgacttaccactacca

SEQ ID NO: 34358 - DNA, 25 bp, Artificial Sequence
  Synthetic
ggtttaataacatcaccaaaattgg

SEQ ID NO: 34359 - DNA, 18 bp, Artificial Sequence
  Synthetic
tactgccaaacaacgtgt

SEQ ID NO: 34360 - DNA, 19 bp, Artificial Sequence
  Synthetic
gtacgtgtgtcaaaacgac

SEQ ID NO: 34361 - DNA, 22 bp, Artificial Sequence
  Synthetic
ctttcagcttcataatcccata

SEQ ID NO: 34362 - DNA, 21 bp, Artificial Sequence
  Synthetic
aaacacatacgttgaagctta

SEQ ID NO: 34363 - DNA, 22 bp, Artificial Sequence
  Synthetic
cacaatcacctgtaatgctaaa

SEQ ID NO: 34364 - DNA, 19 bp, Artificial Sequence
  Synthetic
gcaaaagcactacggtgat

SEQ ID NO: 34365 - DNA, 23 bp, Artificial Sequence
  Synthetic
ccattacaatcatcacaaacagt

SEQ ID NO: 34366 - DNA, 23 bp, Artificial Sequence
  Synthetic
ttacaattaacatcagaaccagt

SEQ ID NO: 34367 - DNA, 22 bp, Artificial Sequence
  Synthetic
tctatgaaacccaaatcgaaat

SEQ ID NO: 34368 - DNA, 23 bp, Artificial Sequence
  Synthetic
tggtttacaaacataacaagaac

SEQ ID NO: 34369 - DNA, 20 bp, Artificial Sequence
  Synthetic
gtgcaattgttaccaccatt

SEQ ID NO: 34370 - DNA, 18 bp, Artificial Sequence
  Synthetic
cacaagcaaggtcagcaa

SEQ ID NO: 34371 - DNA, 18 bp, Artificial Sequence
  Synthetic
tgaaccacgaacttcagt

SEQ ID NO: 34372 - DNA, 23 bp, Artificial Sequence
  Synthetic
acacgagatatgttaacaaaagt

SEQ ID NO: 34373 - DNA, 25 bp, Artificial Sequence
  Synthetic
ccttttcaaattcgtaataaggaag

SEQ ID NO: 34374 - DNA, 23 bp, Artificial Sequence
  Synthetic
tgctatacttataatgcccatac

SEQ ID NO: 34375 - DNA, 23 bp, Artificial Sequence
  Synthetic
agcaactattacatatttaggca

SEQ ID NO: 34376 - DNA, 20 bp, Artificial Sequence
  Synthetic
ttacccttaccaatagggac

SEQ ID NO: 34377 - DNA, 18 bp, Artificial Sequence
  Synthetic
gctagcacgagatgagtt

SEQ ID NO: 34378 - DNA, 20 bp, Artificial Sequence
  Synthetic
gtttcttcaactgagaaggc

SEQ ID NO: 34379 - DNA, 21 bp, Artificial Sequence
  Synthetic
aatctgctcaatgaacttagg

SEQ ID NO: 34380 - DNA, 18 bp, Artificial Sequence
  Synthetic
cgtttgacacaacctcca

SEQ ID NO: 34381 - DNA, 18 bp, Artificial Sequence
  Synthetic
ttcctgttcgctttccag

SEQ ID NO: 34382 - DNA, 22 bp, Artificial Sequence
  Synthetic
tgaatatacacacaatgggttt

SEQ ID NO: 34383 - DNA, 22 bp, Artificial Sequence
  Synthetic
gaaccattttacaaagctcaaa

SEQ ID NO: 34384 - DNA, 22 bp, Artificial Sequence
  Synthetic
gtaacaccatttcaatagctgt

SEQ ID NO: 34385 - DNA, 21 bp, Artificial Sequence
  Synthetic
ccactggatacttttctccat

SEQ ID NO: 34386 - DNA, 18 bp, Artificial Sequence
  Synthetic
gccgtctgcgtacaggtg

SEQ ID NO: 34387 - DNA, 18 bp, Artificial Sequence
  Synthetic
tacacacgtccaagcaaa

SEQ ID NO: 34388 - DNA, 18 bp, Artificial Sequence
  Synthetic
ccgaggggagtataacca

SEQ ID NO: 34389 - DNA, 22 bp, Artificial Sequence
  Synthetic
ctcgtaacacatctaatatggc

SEQ ID NO: 34390 - DNA, 23 bp, Artificial Sequence
  Synthetic
attatagaatcttgagggcctaa

SEQ ID NO: 34391 - DNA, 18 bp, Artificial Sequence
  Synthetic
ccaattgctgtgcccagg

SEQ ID NO: 34392 - DNA, 23 bp, Artificial Sequence
  Synthetic
gtctaaaagctcttcttctgaat

SEQ ID NO: 34393 - DNA, 21 bp, Artificial Sequence
  Synthetic
aactctaaatgcatttggtga

SEQ ID NO: 34394 - DNA, 18 bp, Artificial Sequence
  Synthetic
ggcaacgactacttgtcc

SEQ ID NO: 34395 - DNA, 20 bp, Artificial Sequence
  Synthetic
cgagtaaaaaagtgcctggt

SEQ ID NO: 34396 - DNA, 23 bp, Artificial Sequence
  Synthetic
cttgcattgtttttcatactgat

SEQ ID NO: 34397 - DNA, 20 bp, Artificial Sequence
  Synthetic
ccataagggattagccacaa

SEQ ID NO: 34398 - DNA, 23 bp, Artificial Sequence
  Synthetic
aattcttgaaaagagtacacacc

SEQ ID NO: 34399 - DNA, 21 bp, Artificial Sequence
  Synthetic
atctagtaaccaaccaccata

SEQ ID NO: 34400 - DNA, 22 bp, Artificial Sequence
  Synthetic
cggtttcatcaaagttacttct

SEQ ID NO: 34401 - DNA, 20 bp, Artificial Sequence
  Synthetic
aagtagctttggcattcttg

SEQ ID NO: 34402 - DNA, 19 bp, Artificial Sequence
  Synthetic
aggggcagctatagcatag

SEQ ID NO: 34403 - DNA, 22 bp, Artificial Sequence
  Synthetic
ttgggagctctatgttttaaat

SEQ ID NO: 34404 - DNA, 18 bp, Artificial Sequence
  Synthetic
tagcttgtttggctctgg

SEQ ID NO: 34405 - DNA, 18 bp, Artificial Sequence
  Synthetic
gcctcacaggaacagaag

SEQ ID NO: 34406 - DNA, 23 bp, Artificial Sequence
  Synthetic
tgtattgtgatctgctaacagtt

SEQ ID NO: 34407 - DNA, 23 bp, Artificial Sequence
  Synthetic
tctctttgttcaaaataccttct

SEQ ID NO: 34408 - DNA, 19 bp, Artificial Sequence
  Synthetic
tccagtgttctccttttgg

SEQ ID NO: 34409 - DNA, 24 bp, Artificial Sequence
  Synthetic
ccctactaaaaatatgtctggtat

SEQ ID NO: 34410 - DNA, 19 bp, Artificial Sequence
  Synthetic
ttctccatgctacaccatt

SEQ ID NO: 34411 - DNA, 19 bp, Artificial Sequence
  Synthetic
acggtgccaaacaaatttg

SEQ ID NO: 34412 - DNA, 23 bp, Artificial Sequence
  Synthetic
tgttgtgagtctttattcttgat

SEQ ID NO: 34413 - DNA, 23 bp, Artificial Sequence
  Synthetic
cttcttctatgtcatcaaggtac

SEQ ID NO: 34414 - DNA, 21 bp, Artificial Sequence
  Synthetic
gatcatcagtagcaacaagtt

SEQ ID NO: 34415 - DNA, 23 bp, Artificial Sequence
  Synthetic
gctattactgttttgtggaacaa

SEQ ID NO: 34416 - DNA, 25 bp, Artificial Sequence
  Synthetic
tgagtgttcttatagagaaacagat

SEQ ID NO: 34417 - DNA, 23 bp, Artificial Sequence
  Synthetic
tttttgtcttaacaactcaccaa

SEQ ID NO: 34418 - DNA, 19 bp, Artificial Sequence
  Synthetic
ggttctcaaaggttcaacc

SEQ ID NO: 34419 - DNA, 21 bp, Artificial Sequence
  Synthetic
gctatagaaccatagctctgg

SEQ ID NO: 34420 - DNA, 23 bp, Artificial Sequence
  Synthetic
ttgtgtagaaagaggagttaatc

SEQ ID NO: 34421 - DNA, 24 bp, Artificial Sequence
  Synthetic
gaaaaaatatgggtcaactggaat

SEQ ID NO: 34422 - DNA, 21 bp, Artificial Sequence
  Synthetic
acacgaaatctcaaagttgac

SEQ ID NO: 34423 - DNA, 22 bp, Artificial Sequence
  Synthetic
tgtagtaacatccatagcatga

SEQ ID NO: 34424 - DNA, 23 bp, Artificial Sequence
  Synthetic
aacttgtagatggacatatgatc

SEQ ID NO: 34425 - DNA, 18 bp, Artificial Sequence
  Synthetic
aggagtatcaacggcaag

SEQ ID NO: 34426 - DNA, 19 bp, Artificial Sequence
  Synthetic
acagtcccttcattttcct

SEQ ID NO: 34427 - DNA, 22 bp, Artificial Sequence
  Synthetic
catttctgtccatttctcatca

SEQ ID NO: 34428 - DNA, 25 bp, Artificial Sequence
  Synthetic
gaagttgctattataaaaggagaag

SEQ ID NO: 34429 - DNA, 18 bp, Artificial Sequence
  Synthetic
gggattggttcctcctct

SEQ ID NO: 34430 - DNA, 22 bp, Artificial Sequence
  Synthetic
caaatttataagcatgggaagg

SEQ ID NO: 34431 - DNA, 24 bp, Artificial Sequence
  Synthetic
cactttcataattctctgactttc

SEQ ID NO: 34432 - DNA, 21 bp, Artificial Sequence
  Synthetic
cctgtaatggccatatcaaga

SEQ ID NO: 34433 - DNA, 20 bp, Artificial Sequence
  Synthetic
tcatcttttggacaggttgt

SEQ ID NO: 34434 - DNA, 23 bp, Artificial Sequence
  Synthetic
agagaaatctaaatcaagaccaa

SEQ ID NO: 34435 - DNA, 21 bp, Artificial Sequence
  Synthetic
tgaaccagttcagtagcatta

SEQ ID NO: 34436 - DNA, 19 bp, Artificial Sequence
  Synthetic
ttttgagtgactccagtcc

SEQ ID NO: 34437 - DNA, 20 bp, Artificial Sequence
  Synthetic
tttgttggcttcttttggta

SEQ ID NO: 34438 - DNA, 21 bp, Artificial Sequence
  Synthetic
cccatatgtgatcctgtttac

SEQ ID NO: 34439 - DNA, 19 bp, Artificial Sequence
  Synthetic
tgcttttgagatctgctgc

SEQ ID NO: 34440 - DNA, 21 bp, Artificial Sequence
  Synthetic
tgcttctttgttctttcaaac

SEQ ID NO: 34441 - DNA, 20 bp, Artificial Sequence
  Synthetic
acctaatgttgcctttttgg

SEQ ID NO: 34442 - DNA, 22 bp, Artificial Sequence
  Synthetic
agctcctcaaaggttaaaaatt

SEQ ID NO: 34443 - DNA, 22 bp, Artificial Sequence
  Synthetic
aagttttcttgatacccacaaa

SEQ ID NO: 34444 - DNA, 23 bp, Artificial Sequence
  Synthetic
tacaatcttgtacagagttctct

SEQ ID NO: 34445 - DNA, 23 bp, Artificial Sequence
  Synthetic
ccccatcatcaattaaatcagat

SEQ ID NO: 34446 - DNA, 22 bp, Artificial Sequence
  Synthetic
agtatcttcacactcatgagtt

SEQ ID NO: 34447 - DNA, 24 bp, Artificial Sequence
  Synthetic
gccatatataaccacaatgttctt

SEQ ID NO: 34448 - DNA, 25 bp, Artificial Sequence
  Synthetic
cccttaggtaatttcataacattga

SEQ ID NO: 34449 - DNA, 18 bp, Artificial Sequence
  Synthetic
aaccagtactgcctccag

SEQ ID NO: 34450 - DNA, 21 bp, Artificial Sequence
  Synthetic
tgttacatctgacacaggatg

SEQ ID NO: 34451 - DNA, 18 bp, Artificial Sequence
  Synthetic
ctactgggccttgaacaa

SEQ ID NO: 34452 - DNA, 24 bp, Artificial Sequence
  Synthetic
cggtcagtattagcatgataatag

SEQ ID NO: 34453 - DNA, 20 bp, Artificial Sequence
  Synthetic
cgaccaatttccattcctct

SEQ ID NO: 34454 - DNA, 19 bp, Artificial Sequence
  Synthetic
ttccaaaccctatgtctcc

SEQ ID NO: 34455 - DNA, 22 bp, Artificial Sequence
  Synthetic
gtatctctgttttgatcactgg

SEQ ID NO: 34456 - DNA, 24 bp, Artificial Sequence
  Synthetic
aatacactatctctgttatgttcc

SEQ ID NO: 34457 - DNA, 23 bp, Artificial Sequence
  Synthetic
atttgaatgtttgttgtctagtg

SEQ ID NO: 34458 - DNA, 22 bp, Artificial Sequence
  Synthetic
tgaggatattttgagaccatga

SEQ ID NO: 34459 - DNA, 24 bp, Artificial Sequence
  Synthetic
ggaatcaatgctataatcttccat

SEQ ID NO: 34460 - DNA, 21 bp, Artificial Sequence
  Synthetic
gaccaattattgctgtcaact

SEQ ID NO: 34461 - DNA, 18 bp, Artificial Sequence
  Synthetic
gaacagagaccccccctg

SEQ ID NO: 34462 - DNA, 16 bp, Artificial Sequence
  Synthetic
aagtgttccgcgacgc

SEQ ID NO: 34463 - DNA, 16 bp, Artificial Sequence
  Synthetic
agctccaggtcgtccg

SEQ ID NO: 34464 - DNA, 16 bp, Artificial Sequence
  Synthetic
acagggggtgtgacgg

SEQ ID NO: 34465 - DNA, 19 bp, Artificial Sequence
  Synthetic
cgttcgttccgcacatacg

SEQ ID NO: 34466 - DNA, 16 bp, Artificial Sequence
  Synthetic
tctctacgcgcgtccg

SEQ ID NO: 34467 - DNA, 17 bp, Artificial Sequence
  Synthetic
ggcggcatgagtggagt

SEQ ID NO: 34468 - DNA, 17 bp, Artificial Sequence
  Synthetic
agaagtttccgcgctgg

SEQ ID NO: 34469 - DNA, 20 bp, Artificial Sequence
  Synthetic
aataaacgctgtctcggata

SEQ ID NO: 34470 - DNA, 22 bp, Artificial Sequence
  Synthetic
ccatgattacgagtctaaatgt

SEQ ID NO: 34471 - DNA, 19 bp, Artificial Sequence
  Synthetic
ccgaggaaatgaaggtgtt

SEQ ID NO: 34472 - DNA, 21 bp, Artificial Sequence
  Synthetic
tcgacatacgtagaacagaag

SEQ ID NO: 34473 - DNA, 21 bp, Artificial Sequence
  Synthetic
tgagtatgtgttttttgtcgt

SEQ ID NO: 34474 - DNA, 22 bp, Artificial Sequence
  Synthetic
tgtatgaggctattctgtttac

SEQ ID NO: 34475 - DNA, 19 bp, Artificial Sequence
  Synthetic
tcaacaaactcaacatggc

SEQ ID NO: 34476 - DNA, 20 bp, Artificial Sequence
  Synthetic
gcctcataagacttaccctc

SEQ ID NO: 34477 - DNA, 18 bp, Artificial Sequence
  Synthetic
gttgactccctgttacgg

SEQ ID NO: 34478 - DNA, 18 bp, Artificial Sequence
  Synthetic
tctgcaatcttagcagcc

SEQ ID NO: 34479 - DNA, 19 bp, Artificial Sequence
  Synthetic
ttctcacagtctttttgcg

SEQ ID NO: 34480 - DNA, 21 bp, Artificial Sequence
  Synthetic
actgcaacaaaatagaatgga

SEQ ID NO: 34481 - DNA, 20 bp, Artificial Sequence
  Synthetic
ggacatgtagactgttttcg

SEQ ID NO: 34482 - DNA, 18 bp, Artificial Sequence
  Synthetic
tcagcattaacgccgaag

SEQ ID NO: 34483 - DNA, 21 bp, Artificial Sequence
  Synthetic
tctctagctccagtttccatt

SEQ ID NO: 34484 - DNA, 22 bp, Artificial Sequence
  Synthetic
ggatttcccttgtaatcaatca

SEQ ID NO: 34485 - DNA, 18 bp, Artificial Sequence
  Synthetic
cgtagtctccgatacacc

SEQ ID NO: 34486 - DNA, 21 bp, Artificial Sequence
  Synthetic
atgtattcacaaagctgaact

SEQ ID NO: 34487 - DNA, 21 bp, Artificial Sequence
  Synthetic
cggagcagataatgactttta

SEQ ID NO: 34488 - DNA, 17 bp, Artificial Sequence
  Synthetic
agatggcctcgcagtgg

SEQ ID NO: 34489 - DNA, 18 bp, Artificial Sequence
  Synthetic
gccagacgtgcggagatg

SEQ ID NO: 34490 - DNA, 16 bp, Artificial Sequence
  Synthetic
aggacactccggcgtg

SEQ ID NO: 34491 - DNA, 20 bp, Artificial Sequence
  Synthetic
ggaaaacgagtttgccagac

SEQ ID NO: 34492 - DNA, 19 bp, Artificial Sequence
  Synthetic
catcagtaacacggagcgt

SEQ ID NO: 34493 - DNA, 22 bp, Artificial Sequence
  Synthetic
gtagtcttgattgtagctgaat

SEQ ID NO: 34494 - DNA, 21 bp, Artificial Sequence
  Synthetic
ctattgctcctttagggtcta

SEQ ID NO: 34495 - DNA, 23 bp, Artificial Sequence
  Synthetic
tttctagacattccttagctaag

SEQ ID NO: 34496 - DNA, 18 bp, Artificial Sequence
  Synthetic
tctctgcctgaacccaag

SEQ ID NO: 34497 - DNA, 18 bp, Artificial Sequence
  Synthetic
agcttccattccccattt

SEQ ID NO: 34498 - DNA, 21 bp, Artificial Sequence
  Synthetic
tccaattgagcatttccaaat

SEQ ID NO: 34499 - DNA, 18 bp, Artificial Sequence
  Synthetic
gatttcccaggatccagc

SEQ ID NO: 34500 - DNA, 18 bp, Artificial Sequence
  Synthetic
gggccatgaacttgtctt

SEQ ID NO: 34501 - DNA, 23 bp, Artificial Sequence
  Synthetic
agtaatagttcattctcccttct

SEQ ID NO: 34502 - DNA, 21 bp, Artificial Sequence
  Synthetic
acattttccaattgtgatcgg

SEQ ID NO: 34503 - DNA, 21 bp, Artificial Sequence
  Synthetic
tgctgtgaactgtgtattcat

SEQ ID NO: 34504 - DNA, 20 bp, Artificial Sequence
  Synthetic
gcccgtctttagaaagagcg

SEQ ID NO: 34505 - DNA, 16 bp, Artificial Sequence
  Synthetic
tcttttccccccgccg

SEQ ID NO: 34506 - DNA, 16 bp, Artificial Sequence
  Synthetic
aggaagccggagccct

SEQ ID NO: 34507 - DNA, 16 bp, Artificial Sequence
  Synthetic
tatcggggcggatcgg

SEQ ID NO: 34508 - DNA, 16 bp, Artificial Sequence
  Synthetic
ggagcgttgccgtgga

SEQ ID NO: 34509 - DNA, 16 bp, Artificial Sequence
  Synthetic
tcgtgttcgtcggcgg

SEQ ID NO: 34510 - DNA, 16 bp, Artificial Sequence
  Synthetic
acaacggtcccgccac

SEQ ID NO: 34511 - DNA, 20 bp, Artificial Sequence
  Synthetic
tttcgccgtgtctttcgata

SEQ ID NO: 34512 - DNA, 20 bp, Artificial Sequence
  Synthetic
gagtgcggggagatatacgc

SEQ ID NO: 34513 - DNA, 16 bp, Artificial Sequence
  Synthetic
ttggcgctctcgtggc

SEQ ID NO: 34514 - DNA, 23 bp, Artificial Sequence
  Synthetic
gtgtgtgataattttgagcaatt

SEQ ID NO: 34515 - DNA, 21 bp, Artificial Sequence
  Synthetic
tgttgcgattatagctagcat

SEQ ID NO: 34516 - DNA, 23 bp, Artificial Sequence
  Synthetic
agcatttattaagttggaaaacg

SEQ ID NO: 34517 - DNA, 19 bp, Artificial Sequence
  Synthetic
aaatgatttcagcgtctgc

SEQ ID NO: 34518 - DNA, 19 bp, Artificial Sequence
  Synthetic
gggagaagacgaacgattc

SEQ ID NO: 34519 - DNA, 22 bp, Artificial Sequence
  Synthetic
tgtcagttttgtaatgtgtctt

SEQ ID NO: 34520 - DNA, 19 bp, Artificial Sequence
  Synthetic
ggttgttttcggagactct

SEQ ID NO: 34521 - DNA, 20 bp, Artificial Sequence
  Synthetic
ttcgtgaaggttatgtacgt

SEQ ID NO: 34522 - DNA, 21 bp, Artificial Sequence
  Synthetic
tttgtcgttttcagcagtttg

SEQ ID NO: 34523 - DNA, 19 bp, Artificial Sequence
  Synthetic
tcctcacgaataccgaaat

SEQ ID NO: 34524 - DNA, 21 bp, Artificial Sequence
  Synthetic
gcaatttaacctggatcactc

SEQ ID NO: 34525 - DNA, 18 bp, Artificial Sequence
  Synthetic
ctttctttgcagtgcgtc

SEQ ID NO: 34526 - DNA, 18 bp, Artificial Sequence
  Synthetic
caacttcacccagcatct

SEQ ID NO: 34527 - DNA, 23 bp, Artificial Sequence
  Synthetic
gcatttacatccagatttcgata

SEQ ID NO: 34528 - DNA, 20 bp, Artificial Sequence
  Synthetic
attccggaaaccattcaact

SEQ ID NO: 34529 - DNA, 18 bp, Artificial Sequence
  Synthetic
agaactgcgactcaatcc

SEQ ID NO: 34530 - DNA, 18 bp, Artificial Sequence
  Synthetic
tatccctcgcacgacatt

SEQ ID NO: 34531 - DNA, 20 bp, Artificial Sequence
  Synthetic
accaaatgttcgaaaggaaa

SEQ ID NO: 34532 - DNA, 21 bp, Artificial Sequence
  Synthetic
accccctctataatagaccaa

SEQ ID NO: 34533 - DNA, 20 bp, Artificial Sequence
  Synthetic
aaatccaaacaagcaaatgc

SEQ ID NO: 34534 - DNA, 17 bp, Artificial Sequence
  Synthetic
cggagtgcgacaggaga

SEQ ID NO: 34535 - DNA, 18 bp, Artificial Sequence
  Synthetic
cgttccatgtgtctccgg

SEQ ID NO: 34536 - DNA, 16 bp, Artificial Sequence
  Synthetic
gcggatctggccctca

SEQ ID NO: 34537 - DNA, 16 bp, Artificial Sequence
  Synthetic
actaccgcgtggctga

SEQ ID NO: 34538 - DNA, 20 bp, Artificial Sequence
  Synthetic
gtcgaacagatgtctgacgt

SEQ ID NO: 34539 - DNA, 20 bp, Artificial Sequence
  Synthetic
tcctgttgtatatgaggccc

SEQ ID NO: 34540 - DNA, 18 bp, Artificial Sequence
  Synthetic
gcactctgctgttccttt

SEQ ID NO: 34541 - DNA, 20 bp, Artificial Sequence
  Synthetic
tgtctcgctggattcctctt

SEQ ID NO: 34542 - DNA, 21 bp, Artificial Sequence
  Synthetic
aatggtgaaatttctccaact

SEQ ID NO: 34543 - DNA, 24 bp, Artificial Sequence
  Synthetic
tcaattaaccaccttatttcctca

SEQ ID NO: 34544 - DNA, 18 bp, Artificial Sequence
  Synthetic
tgcaacgtaggcaatgtt

SEQ ID NO: 34545 - DNA, 19 bp, Artificial Sequence
  Synthetic
tccacgaatcttgcagttt

SEQ ID NO: 34546 - DNA, 18 bp, Artificial Sequence
  Synthetic
tggactactaggcgaact

SEQ ID NO: 34547 - DNA, 24 bp, Artificial Sequence
  Synthetic
atctaccatatcatatccactgtc

SEQ ID NO: 34548 - DNA, 22 bp, Artificial Sequence
  Synthetic
aaactgtctaaccaaatcgtga

SEQ ID NO: 34549 - DNA, 18 bp, Artificial Sequence
  Synthetic
caaaataaagccgctgca

SEQ ID NO: 34550 - DNA, 23 bp, Artificial Sequence
  Synthetic
cctataatgcttacacatagctg

SEQ ID NO: 34551 - DNA, 18 bp, Artificial Sequence
  Synthetic
taaacttggcaccacctg

SEQ ID NO: 34552 - DNA, 23 bp, Artificial Sequence
  Synthetic
gcattatgttcattacagtcaaa

SEQ ID NO: 34553 - DNA, 25 bp, Artificial Sequence
  Synthetic
ctttgttagcctatatctaaaacac

SEQ ID NO: 34554 - DNA, 18 bp, Artificial Sequence
  Synthetic
agaggaatgcgacacaat

SEQ ID NO: 34555 - DNA, 18 bp, Artificial Sequence
  Synthetic
gctaatatgcgctttcgg

SEQ ID NO: 34556 - DNA, 18 bp, Artificial Sequence
  Synthetic
cctcaacaccaacacagg

SEQ ID NO: 34557 - DNA, 18 bp, Artificial Sequence
  Synthetic
atcaaccatgtcgccatc

SEQ ID NO: 34558 - DNA, 23 bp, Artificial Sequence
  Synthetic
acattctcacacataaacaacat

SEQ ID NO: 34559 - DNA, 22 bp, Artificial Sequence
  Synthetic
ttaaccatagtgttatgtggtg

SEQ ID NO: 34560 - DNA, 19 bp, Artificial Sequence
  Synthetic
ctgtcaatgccttcttgca

SEQ ID NO: 34561 - DNA, 18 bp, Artificial Sequence
  Synthetic
gacccggtccacatatgt

SEQ ID NO: 34562 - DNA, 23 bp, Artificial Sequence
  Synthetic
gtgtttcaattaggtaacaagga

SEQ ID NO: 34563 - DNA, 18 bp, Artificial Sequence
  Synthetic
tattgccatacccgctgt

SEQ ID NO: 34564 - DNA, 20 bp, Artificial Sequence
  Synthetic
aactctgaaaatggtatgcc

SEQ ID NO: 34565 - DNA, 23 bp, Artificial Sequence
  Synthetic
gtcttttacatattttgcttgca

SEQ ID NO: 34566 - DNA, 18 bp, Artificial Sequence
  Synthetic
tacccgtgtttggaggac

SEQ ID NO: 34567 - DNA, 22 bp, Artificial Sequence
  Synthetic
gctatctctttcaaaacagtct

SEQ ID NO: 34568 - DNA, 22 bp, Artificial Sequence
  Synthetic
gtcgggacaataaatactttgt

SEQ ID NO: 34569 - DNA, 20 bp, Artificial Sequence
  Synthetic
gggaggtgttttctggtgtt

SEQ ID NO: 34570 - DNA, 23 bp, Artificial Sequence
  Synthetic
acattacatatcaacacatgtca

SEQ ID NO: 34571 - DNA, 23 bp, Artificial Sequence
  Synthetic
ccacaacaaaccaaaataaaagt

SEQ ID NO: 34572 - DNA, 23 bp, Artificial Sequence
  Synthetic
ataggagtactactgataggttc

SEQ ID NO: 34573 - DNA, 18 bp, Artificial Sequence
  Synthetic
atagtggcctttgtgcca

SEQ ID NO: 34574 - DNA, 20 bp, Artificial Sequence
  Synthetic
tttacataggcatccgttgt

SEQ ID NO: 34575 - DNA, 21 bp, Artificial Sequence
  Synthetic
gcaaattgacctcccaaaatt

SEQ ID NO: 34576 - DNA, 21 bp, Artificial Sequence
  Synthetic
actagacagatacttggctag

SEQ ID NO: 34577 - DNA, 20 bp, Artificial Sequence
  Synthetic
atctgttgtttttgccctgt

SEQ ID NO: 34578 - DNA, 18 bp, Artificial Sequence
  Synthetic
ggttagccgcattcaggg

SEQ ID NO: 34579 - DNA, 19 bp, Artificial Sequence
  Synthetic
ttaagtaatgcggccagac

SEQ ID NO: 34580 - DNA, 25 bp, Artificial Sequence
  Synthetic
cggaatagatatttctttagtagga

SEQ ID NO: 34581 - DNA, 18 bp, Artificial Sequence
  Synthetic
tgtttgcagtcccacaaa

SEQ ID NO: 34582 - DNA, 21 bp, Artificial Sequence
  Synthetic
ccaacatgtgatataaccagc

SEQ ID NO: 34583 - DNA, 18 bp, Artificial Sequence
  Synthetic
agcaatacaaggcaccaa

SEQ ID NO: 34584 - DNA, 20 bp, Artificial Sequence
  Synthetic
acgctaccatacttggaaga

SEQ ID NO: 34585 - DNA, 25 bp, Artificial Sequence
  Synthetic
ccttcttactaatgttattgattgg

SEQ ID NO: 34586 - DNA, 21 bp, Artificial Sequence
  Synthetic
cagcattacacatttcagtga

SEQ ID NO: 34587 - DNA, 24 bp, Artificial Sequence
  Synthetic
tgttctaactgattgtaacagatc

SEQ ID NO: 34588 - DNA, 23 bp, Artificial Sequence
  Synthetic
ttgtatatggcaatgatagttgg

SEQ ID NO: 34589 - DNA, 18 bp, Artificial Sequence
  Synthetic
tacaagttctacacggcc

SEQ ID NO: 34590 - DNA, 21 bp, Artificial Sequence
  Synthetic
catgaatagctctatcgcatt

SEQ ID NO: 34591 - DNA, 22 bp, Artificial Sequence
  Synthetic
tgtacattcattagtgtgcaaa

SEQ ID NO: 34592 - DNA, 19 bp, Artificial Sequence
  Synthetic
gtgcaatcggtttccaatc

SEQ ID NO: 34593 - DNA, 19 bp, Artificial Sequence
  Synthetic
aggttcaccatcatcagtt

SEQ ID NO: 34594 - DNA, 20 bp, Artificial Sequence
  Synthetic
ccacttcataaggttgcttt

SEQ ID NO: 34595 - DNA, 18 bp, Artificial Sequence
  Synthetic
ttcctctggagaaggcgc

SEQ ID NO: 34596 - DNA, 22 bp, Artificial Sequence
  Synthetic
aaaccatttaagaagtcgatca

SEQ ID NO: 34597 - DNA, 21 bp, Artificial Sequence
  Synthetic
tgttaaatgtgtacctgaagg

SEQ ID NO: 34598 - DNA, 18 bp, Artificial Sequence
  Synthetic
tagaccgcttctggttgt

SEQ ID NO: 34599 - DNA, 18 bp, Artificial Sequence
  Synthetic
ttgccgttgtctcgtaac

SEQ ID NO: 34600 - DNA, 19 bp, Artificial Sequence
  Synthetic
ccagtattctccccatgga

SEQ ID NO: 34601 - DNA, 19 bp, Artificial Sequence
  Synthetic
cattgtttgtaccctgagc

SEQ ID NO: 34602 - DNA, 20 bp, Artificial Sequence
  Synthetic
gcactctttttctggacaaa

SEQ ID NO: 34603 - DNA, 20 bp, Artificial Sequence
  Synthetic
cggaaggattctacgtggag

SEQ ID NO: 34604 - DNA, 21 bp, Artificial Sequence
  Synthetic
atacttaatcacggatccacc

SEQ ID NO: 34605 - DNA, 18 bp, Artificial Sequence
  Synthetic
aagtatttgggccactcc

SEQ ID NO: 34606 - DNA, 22 bp, Artificial Sequence
  Synthetic
gccactattagacaaccactat

SEQ ID NO: 34607 - DNA, 18 bp, Artificial Sequence
  Synthetic
cctgagcatgttgtccat

SEQ ID NO: 34608 - DNA, 21 bp, Artificial Sequence
  Synthetic
tatgtttgtgatcctaccagg

SEQ ID NO: 34609 - DNA, 22 bp, Artificial Sequence
  Synthetic
ggtgtgtatgctagcaaaaatt

SEQ ID NO: 34610 - DNA, 25 bp, Artificial Sequence
  Synthetic
atttgagttgattacatacctagtc

SEQ ID NO: 34611 - DNA, 21 bp, Artificial Sequence
  Synthetic
tcaatactatctggtgcatct

SEQ ID NO: 34612 - DNA, 21 bp, Artificial Sequence
  Synthetic
actctaatgctgtgttcattg

SEQ ID NO: 34613 - DNA, 20 bp, Artificial Sequence
  Synthetic
gttttgtcattcaagctggt

SEQ ID NO: 34614 - DNA, 18 bp, Artificial Sequence
  Synthetic
taacttccctccgcagtc

SEQ ID NO: 34615 - DNA, 20 bp, Artificial Sequence
  Synthetic
gtgcactgatgatacgtact

SEQ ID NO: 34616 - DNA, 23 bp, Artificial Sequence
  Synthetic
gcagtctatttttaagccattct

SEQ ID NO: 34617 - DNA, 20 bp, Artificial Sequence
  Synthetic
gggggaatgaaattagtggt

SEQ ID NO: 34618 - DNA, 21 bp, Artificial Sequence
  Synthetic
gcaaaggacaacattgtttgt

SEQ ID NO: 34619 - DNA, 20 bp, Artificial Sequence
  Synthetic
tgacataagcaaaatctcgc

SEQ ID NO: 34620 - DNA, 23 bp, Artificial Sequence
  Synthetic
ggttaaattctcctttgtcagtg

SEQ ID NO: 34621 - DNA, 19 bp, Artificial Sequence
  Synthetic
aaatgatggcaccttgttc

SEQ ID NO: 34622 - DNA, 19 bp, Artificial Sequence
  Synthetic
gcttgttccatggtgattg

SEQ ID NO: 34623 - DNA, 18 bp, Artificial Sequence
  Synthetic
tcattgacactagcagcc

SEQ ID NO: 34624 - DNA, 21 bp, Artificial Sequence
  Synthetic
ctgatctaacactttcccaag

SEQ ID NO: 34625 - DNA, 18 bp, Artificial Sequence
  Synthetic
cttctccattgtgccagg

SEQ ID NO: 34626 - DNA, 21 bp, Artificial Sequence
  Synthetic
cctttcaggaatcatctccat

SEQ ID NO: 34627 - DNA, 23 bp, Artificial Sequence
  Synthetic
cgtattttaacttggtttcggaa

SEQ ID NO: 34628 - DNA, 18 bp, Artificial Sequence
  Synthetic
tacacactgcttgttccg

SEQ ID NO: 34629 - DNA, 22 bp, Artificial Sequence
  Synthetic
gattgattgttcatctcttcca

SEQ ID NO: 34630 - DNA, 22 bp, Artificial Sequence
  Synthetic
tcatgtcaggtaatattccgat

SEQ ID NO: 34631 - DNA, 22 bp, Artificial Sequence
  Synthetic
taagtgttaacaagcactgact

SEQ ID NO: 34632 - DNA, 19 bp, Artificial Sequence
  Synthetic
gcgccaccatgtcctaatt

SEQ ID NO: 34633 - DNA, 21 bp, Artificial Sequence
  Synthetic
taaactttgggagcacagttt

SEQ ID NO: 34634 - DNA, 20 bp, Artificial Sequence
  Synthetic
agcttatcctcctcttccaa

SEQ ID NO: 34635 - DNA, 22 bp, Artificial Sequence
  Synthetic
tagcctctcttacatttactcc

SEQ ID NO: 34636 - DNA, 20 bp, Artificial Sequence
  Synthetic
cgcccatgagtcataaacca

SEQ ID NO: 34637 - DNA, 24 bp, Artificial Sequence
  Synthetic
aaaatttaaagaatctagcaggcc

SEQ ID NO: 34638 - DNA, 18 bp, Artificial Sequence
  Synthetic
cctcgggttctcgtccat

SEQ ID NO: 34639 - DNA, 19 bp, Artificial Sequence
  Synthetic
cccatcatgcaacacctga

SEQ ID NO: 34640 - DNA, 20 bp, Artificial Sequence
  Synthetic
tgttgtacatgcgctcatcc

SEQ ID NO: 34641 - DNA, 18 bp, Artificial Sequence
  Synthetic
tcacatccagggccactg

SEQ ID NO: 34642 - DNA, 16 bp, Artificial Sequence
  Synthetic
aggccagtctcgtcgc

SEQ ID NO: 34643 - DNA, 18 bp, Artificial Sequence
  Synthetic
catcatccagcaccacgc

SEQ ID NO: 34644 - DNA, 20 bp, Artificial Sequence
  Synthetic
ggcgtctccaaattcttcca

SEQ ID NO: 34645 - DNA, 18 bp, Artificial Sequence
  Synthetic
aaccaggtagcccccctc

SEQ ID NO: 34646 - DNA, 18 bp, Artificial Sequence
  Synthetic
ggaccctgagaccctgga

SEQ ID NO: 34647 - DNA, 18 bp, Artificial Sequence
  Synthetic
gctcacctggcttgtcga

SEQ ID NO: 34648 - DNA, 19 bp, Artificial Sequence
  Synthetic
gcacacggtggaaaaggtg

SEQ ID NO: 34649 - DNA, 18 bp, Artificial Sequence
  Synthetic
tccaacgccctctatggc

SEQ ID NO: 34650 - DNA, 17 bp, Artificial Sequence
  Synthetic
acctttttgctcgcgca

SEQ ID NO: 34651 - DNA, 19 bp, Artificial Sequence
  Synthetic
ccatctttcgccagatcgt

SEQ ID NO: 34652 - DNA, 20 bp, Artificial Sequence
  Synthetic
ccgattttgagctctgggag

SEQ ID NO: 34653 - DNA, 18 bp, Artificial Sequence
  Synthetic
tgcaagccaacccacatc

SEQ ID NO: 34654 - DNA, 18 bp, Artificial Sequence
  Synthetic
cggctctcatcctcgcac

SEQ ID NO: 34655 - DNA, 16 bp, Artificial Sequence
  Synthetic
ttggacctggctcccg

SEQ ID NO: 34656 - DNA, 20 bp, Artificial Sequence
  Synthetic
cagttcatgtccgagatcgc

SEQ ID NO: 34657 - DNA, 18 bp, Artificial Sequence
  Synthetic
gcgacatcagcgaaatgc

SEQ ID NO: 34658 - DNA, 16 bp, Artificial Sequence
  Synthetic
tcgcgaacagggtcgc

SEQ ID NO: 34659 - DNA, 19 bp, Artificial Sequence
  Synthetic
cgcctcaaaaacgcctact

SEQ ID NO: 34660 - DNA, 16 bp, Artificial Sequence
  Synthetic
gggcctaccaccgctt

SEQ ID NO: 34661 - DNA, 17 bp, Artificial Sequence
  Synthetic
cctaccgctgcgcaaca

SEQ ID NO: 34662 - DNA, 20 bp, Artificial Sequence
  Synthetic
gcaaaaaaggctcttcaccg

SEQ ID NO: 34663 - DNA, 20 bp, Artificial Sequence
  Synthetic
ccaagtccatctctgtctgc

SEQ ID NO: 34664 - DNA, 17 bp, Artificial Sequence
  Synthetic
gcttgctgtccgggttt

SEQ ID NO: 34665 - DNA, 16 bp, Artificial Sequence
  Synthetic
tcgcggtcgctcagct

SEQ ID NO: 34666 - DNA, 19 bp, Artificial Sequence
  Synthetic
gtcgtcagggccataatgc

SEQ ID NO: 34667 - DNA, 16 bp, Artificial Sequence
  Synthetic
cccaggccctcgttct

SEQ ID NO: 34668 - DNA, 16 bp, Artificial Sequence
  Synthetic
tacgctgccgctgtcg

SEQ ID NO: 34669 - DNA, 16 bp, Artificial Sequence
  Synthetic
cgcggtcatgtccagc

SEQ ID NO: 34670 - DNA, 16 bp, Artificial Sequence
  Synthetic
gcgctgtccacgtcgt

SEQ ID NO: 34671 - DNA, 16 bp, Artificial Sequence
  Synthetic
tgcgcgaacgggttgg

SEQ ID NO: 34672 - DNA, 18 bp, Artificial Sequence
  Synthetic
tggtgtcgtactgcggag

SEQ ID NO: 34673 - DNA, 18 bp, Artificial Sequence
  Synthetic
atgcccaggaggttgctc

SEQ ID NO: 34674 - DNA, 21 bp, Artificial Sequence
  Synthetic
taacttctgttgctgtcatcc

SEQ ID NO: 34675 - DNA, 20 bp, Artificial Sequence
  Synthetic
cggatgagctgggagtagac

SEQ ID NO: 34676 - DNA, 17 bp, Artificial Sequence
  Synthetic
agtaagaccccagccgg

SEQ ID NO: 34677 - DNA, 16 bp, Artificial Sequence
  Synthetic
ggctcttgcgtctggc

SEQ ID NO: 34678 - DNA, 20 bp, Artificial Sequence
  Synthetic
gggggaggacacaagcatta

SEQ ID NO: 34679 - DNA, 17 bp, Artificial Sequence
  Synthetic
tcgccgtacacctcgtc

SEQ ID NO: 34680 - DNA, 19 bp, Artificial Sequence
  Synthetic
gtcggtggggatctgaatg

SEQ ID NO: 34681 - DNA, 16 bp, Artificial Sequence
  Synthetic
aataccgggtgccgcg

SEQ ID NO: 34682 - DNA, 17 bp, Artificial Sequence
  Synthetic
tggggataagcgcaggc

SEQ ID NO: 34683 - DNA, 18 bp, Artificial Sequence
  Synthetic
ttccaggccttgttccca

SEQ ID NO: 34684 - DNA, 16 bp, Artificial Sequence
  Synthetic
tgtggtgggcatgccg

SEQ ID NO: 34685 - DNA, 20 bp, Artificial Sequence
  Synthetic
agctctccctttagtgtcct

SEQ ID NO: 34686 - DNA, 18 bp, Artificial Sequence
  Synthetic
agtacgtggtgtcctcgc

SEQ ID NO: 34687 - DNA, 18 bp, Artificial Sequence
  Synthetic
cttgaggttctggctgat

SEQ ID NO: 34688 - DNA, 22 bp, Artificial Sequence
  Synthetic
aagcaatagtttggaagttcat

SEQ ID NO: 34689 - DNA, 18 bp, Artificial Sequence
  Synthetic
tccatggggtccagtgac

SEQ ID NO: 34690 - DNA, 16 bp, Artificial Sequence
  Synthetic
agggtggaggcggtgt

SEQ ID NO: 34691 - DNA, 19 bp, Artificial Sequence
  Synthetic
ggtccttgtagccctcagg

SEQ ID NO: 34692 - DNA, 19 bp, Artificial Sequence
  Synthetic
ccctgtcgcagaggaactt

SEQ ID NO: 34693 - DNA, 16 bp, Artificial Sequence
  Synthetic
aagtagggcccgcagc

SEQ ID NO: 34694 - DNA, 16 bp, Artificial Sequence
  Synthetic
gcacggtctgggtgga

SEQ ID NO: 34695 - DNA, 15 bp, Artificial Sequence
  Synthetic
ttcaatggcggcgcg

SEQ ID NO: 34696 - DNA, 17 bp, Artificial Sequence
  Synthetic
cgtgtaccgcaactcgc

SEQ ID NO: 34697 - DNA, 18 bp, Artificial Sequence
  Synthetic
gggtgcgggaataaccag

SEQ ID NO: 34698 - DNA, 16 bp, Artificial Sequence
  Synthetic
cgggatcgcgcacaaa

SEQ ID NO: 34699 - DNA, 18 bp, Artificial Sequence
  Synthetic
aaacgcattgtccagccc

SEQ ID NO: 34700 - DNA, 16 bp, Artificial Sequence
  Synthetic
tatccgccggagcagg

SEQ ID NO: 34701 - DNA, 18 bp, Artificial Sequence
  Synthetic
ctggcgctgcaagtgttt

SEQ ID NO: 34702 - DNA, 18 bp, Artificial Sequence
  Synthetic
tgtggggcatgatgagct

SEQ ID NO: 34703 - DNA, 16 bp, Artificial Sequence
  Synthetic
cgtgcctcgcccttga

SEQ ID NO: 34704 - DNA, 20 bp, Artificial Sequence
  Synthetic
gcggtagttttgcaacatgc

SEQ ID NO: 34705 - DNA, 17 bp, Artificial Sequence
  Synthetic
gacctgggtctcgctca

SEQ ID NO: 34706 - DNA, 18 bp, Artificial Sequence
  Synthetic
taagcacttcgcccgtct

SEQ ID NO: 34707 - DNA, 19 bp, Artificial Sequence
  Synthetic
caggcaataatcgcggctt

SEQ ID NO: 34708 - DNA, 18 bp, Artificial Sequence
  Synthetic
cggcgtcttcaagagtgc

SEQ ID NO: 34709 - DNA, 20 bp, Artificial Sequence
  Synthetic
gagctcaccaactcgttgtt

SEQ ID NO: 34710 - DNA, 19 bp, Artificial Sequence
  Synthetic
gccgagtcaccataggaca

SEQ ID NO: 34711 - DNA, 18 bp, Artificial Sequence
  Synthetic
ttcttgtggggtttgcag

SEQ ID NO: 34712 - DNA, 22 bp, Artificial Sequence
  Synthetic
aaatgtaatgttgagagggcat

SEQ ID NO: 34713 - DNA, 24 bp, Artificial Sequence
  Synthetic
ggttaaagtattcatggtactgta

SEQ ID NO: 34714 - DNA, 21 bp, Artificial Sequence
  Synthetic
ggtggtatgactgtaacctta

SEQ ID NO: 34715 - DNA, 20 bp, Artificial Sequence
  Synthetic
agttcgccatcataccaaat

SEQ ID NO: 34716 - DNA, 18 bp, Artificial Sequence
  Synthetic
tagagttacaaagcccgc

SEQ ID NO: 34717 - DNA, 18 bp, Artificial Sequence
  Synthetic
tagacccccttccacttg

SEQ ID NO: 34718 - DNA, 20 bp, Artificial Sequence
  Synthetic
tttggctacgttcttgtccc

SEQ ID NO: 34719 - DNA, 22 bp, Artificial Sequence
  Synthetic
tcttctaagtactgaatcaggg

SEQ ID NO: 34720 - DNA, 18 bp, Artificial Sequence
  Synthetic
taggaggtcgcgaagtcc

SEQ ID NO: 34721 - DNA, 23 bp, Artificial Sequence
  Synthetic
cgtctaaagcaatacctaatttg

SEQ ID NO: 34722 - DNA, 21 bp, Artificial Sequence
  Synthetic
ccaaagttagcttagagtcct

SEQ ID NO: 34723 - DNA, 25 bp, Artificial Sequence
  Synthetic
gcccaactaaaatcaaatgtaatag

SEQ ID NO: 34724 - DNA, 20 bp, Artificial Sequence
  Synthetic
tcaaaggacggcttcatctc

SEQ ID NO: 34725 - DNA, 21 bp, Artificial Sequence
  Synthetic
attgtgaacagaaatatgccc

SEQ ID NO: 34726 - DNA, 20 bp, Artificial Sequence
  Synthetic
tttgactgaacaacaccctc

SEQ ID NO: 34727 - DNA, 18 bp, Artificial Sequence
  Synthetic
tttcaccaacacagcggc

SEQ ID NO: 34728 - DNA, 19 bp, Artificial Sequence
  Synthetic
gttttaaacacgctgcagg

SEQ ID NO: 34729 - DNA, 22 bp, Artificial Sequence
  Synthetic
ctttgtgtttttcagactttca

SEQ ID NO: 34730 - DNA, 24 bp, Artificial Sequence
  Synthetic
ggtattggtttacctaaaagtcag

SEQ ID NO: 34731 - DNA, 23 bp, Artificial Sequence
  Synthetic
ttaagtcacaaaatcgatacgag

SEQ ID NO: 34732 - DNA, 19 bp, Artificial Sequence
  Synthetic
tgcatcatctgtcacactc

SEQ ID NO: 34733 - DNA, 19 bp, Artificial Sequence
  Synthetic
ggttccatcctgtctgaat

SEQ ID NO: 34734 - DNA, 21 bp, Artificial Sequence
  Synthetic
atcagcatctttagctacagc

SEQ ID NO: 34735 - DNA, 22 bp, Artificial Sequence
  Synthetic
atcatttgtctcttcttcaagt

SEQ ID NO: 34736 - DNA, 23 bp, Artificial Sequence
  Synthetic
cattcaccctaagtttttcttac

SEQ ID NO: 34737 - DNA, 21 bp, Artificial Sequence
  Synthetic
ttgagattgctctgtctttgt

SEQ ID NO: 34738 - DNA, 20 bp, Artificial Sequence
  Synthetic
cgattctggtgtttctttca

SEQ ID NO: 34739 - DNA, 21 bp, Artificial Sequence
  Synthetic
gttctctctgatcttgtttgg

SEQ ID NO: 34740 - DNA, 19 bp, Artificial Sequence
  Synthetic
ttcctcttcatttgcggtt

SEQ ID NO: 34741 - DNA, 21 bp, Artificial Sequence
  Synthetic
tgatgtcatctctcagttcat

SEQ ID NO: 34742 - DNA, 21 bp, Artificial Sequence
  Synthetic
caagatacctgactccatgtt

SEQ ID NO: 34743 - DNA, 18 bp, Artificial Sequence
  Synthetic
ctgggagacattgaggtg

SEQ ID NO: 34744 - DNA, 21 bp, Artificial Sequence
  Synthetic
tcttttctccatcatcgtcta

SEQ ID NO: 34745 - DNA, 19 bp, Artificial Sequence
  Synthetic
attctttcggaattgcagg

SEQ ID NO: 34746 - DNA, 22 bp, Artificial Sequence
  Synthetic
tcttcccttttttgttcttgtt

SEQ ID NO: 34747 - DNA, 18 bp, Artificial Sequence
  Synthetic
tgtccttcctggcttctc

SEQ ID NO: 34748 - DNA, 21 bp, Artificial Sequence
  Synthetic
gaagctctgtatatcaacacg

SEQ ID NO: 34749 - DNA, 18 bp, Artificial Sequence
  Synthetic
cccaagtagtgtctcgtc

SEQ ID NO: 34750 - DNA, 20 bp, Artificial Sequence
  Synthetic
gaattgtcatttcgggttgt

SEQ ID NO: 34751 - DNA, 23 bp, Artificial Sequence
  Synthetic
gtgattaagtttgatgaatacgc

SEQ ID NO: 34752 - DNA, 23 bp, Artificial Sequence
  Synthetic
cccttgagatctaatatgtcaaa

SEQ ID NO: 34753 - DNA, 24 bp, Artificial Sequence
  Synthetic
caagttatcttaagagcatcattg

SEQ ID NO: 34754 - DNA, 18 bp, Artificial Sequence
  Synthetic
tcttggtttcctggtcga

SEQ ID NO: 34755 - DNA, 18 bp, Artificial Sequence
  Synthetic
agtagcccttcccgaaat

SEQ ID NO: 34756 - DNA, 23 bp, Artificial Sequence
  Synthetic
gaaatccagatgatagttctctt

SEQ ID NO: 34757 - DNA, 22 bp, Artificial Sequence
  Synthetic
gtcatccaactgtattaaagca

SEQ ID NO: 34758 - DNA, 23 bp, Artificial Sequence
  Synthetic
gggattattgtaaactgagttgg

SEQ ID NO: 34759 - DNA, 18 bp, Artificial Sequence
  Synthetic
ctctcaaggcaccgaaat

SEQ ID NO: 34760 - DNA, 23 bp, Artificial Sequence
  Synthetic
atcacacgatataatacctgttt

SEQ ID NO: 34761 - DNA, 23 bp, Artificial Sequence
  Synthetic
agaaccaagtatacatagggtta

SEQ ID NO: 34762 - DNA, 22 bp, Artificial Sequence
  Synthetic
agcacttgaaaatttcatctgt

SEQ ID NO: 34763 - DNA, 19 bp, Artificial Sequence
  Synthetic
gctctacaactcctgcatc

SEQ ID NO: 34764 - DNA, 18 bp, Artificial Sequence
  Synthetic
aagtcgcagaacttgtga

SEQ ID NO: 34765 - DNA, 22 bp, Artificial Sequence
  Synthetic
tcacaagaattaacacctgaat

SEQ ID NO: 34766 - DNA, 20 bp, Artificial Sequence
  Synthetic
ccacttccccttttctgaat

SEQ ID NO: 34767 - DNA, 20 bp, Artificial Sequence
  Synthetic
attagctgtcagtccattcg

SEQ ID NO: 34768 - DNA, 19 bp, Artificial Sequence
  Synthetic
gtgttcaatgtcagtgctc

SEQ ID NO: 34769 - DNA, 20 bp, Artificial Sequence
  Synthetic
ccagaaacactcgaggattt

SEQ ID NO: 34770 - DNA, 21 bp, Artificial Sequence
  Synthetic
ggagaggccttattttctcaa

SEQ ID NO: 34771 - DNA, 22 bp, Artificial Sequence
  Synthetic
ggttctgtagaatctattcacc

SEQ ID NO: 34772 - DNA, 23 bp, Artificial Sequence
  Synthetic
cgtgtatctgtagtctttgatga

SEQ ID NO: 34773 - DNA, 18 bp, Artificial Sequence
  Synthetic
attccatgctcttggctg

SEQ ID NO: 34774 - DNA, 21 bp, Artificial Sequence
  Synthetic
tttcttaatccgtccagactc

SEQ ID NO: 34775 - DNA, 18 bp, Artificial Sequence
  Synthetic
tcctttagtgcaaacgcc

SEQ ID NO: 34776 - DNA, 19 bp, Artificial Sequence
  Synthetic
ccgtccactgtccagctat

SEQ ID NO: 34777 - DNA, 18 bp, Artificial Sequence
  Synthetic
ttcaggtctgcgtctccg

SEQ ID NO: 34778 - DNA, 25 bp, Artificial Sequence
  Synthetic
cacacatataggttgtattaaggtt

SEQ ID NO: 34779 - DNA, 22 bp, Artificial Sequence
  Synthetic
ttgtcttactatccattcaggt

SEQ ID NO: 34780 - DNA, 18 bp, Artificial Sequence
  Synthetic
catttttgcctgctctgc

SEQ ID NO: 34781 - DNA, 22 bp, Artificial Sequence
  Synthetic
tcccactttagtatctgctaaa

SEQ ID NO: 34782 - DNA, 18 bp, Artificial Sequence
  Synthetic
tgcttgtcgtgccttaaa

SEQ ID NO: 34783 - DNA, 18 bp, Artificial Sequence
  Synthetic
cactgctttgtggtcctc

SEQ ID NO: 34784 - DNA, 20 bp, Artificial Sequence
  Synthetic
acagacacaaggaacactat

SEQ ID NO: 34785 - DNA, 20 bp, Artificial Sequence
  Synthetic
cgctggattcctctacaagg

SEQ ID NO: 34786 - DNA, 20 bp, Artificial Sequence
  Synthetic
accctcagaggtagcaaagg

SEQ ID NO: 34787 - DNA, 18 bp, Artificial Sequence
  Synthetic
tgcagcagagagggaagg

SEQ ID NO: 34788 - DNA, 22 bp, Artificial Sequence
  Synthetic
tgataactttagacacaggagt

SEQ ID NO: 34789 - DNA, 18 bp, Artificial Sequence
  Synthetic
ccatcaggcaaagcaaat

SEQ ID NO: 34790 - DNA, 18 bp, Artificial Sequence
  Synthetic
ttgtcattcgcaccctta

SEQ ID NO: 34791 - DNA, 23 bp, Artificial Sequence
  Synthetic
gtggctttatattcagatacagg

SEQ ID NO: 34792 - DNA, 19 bp, Artificial Sequence
  Synthetic
aataaaaacttgcgcccca

SEQ ID NO: 34793 - DNA, 22 bp, Artificial Sequence
  Synthetic
acaatacacaaccatagcaaat

SEQ ID NO: 34794 - DNA, 18 bp, Artificial Sequence
  Synthetic
acaaccaaaaaggcgggc

SEQ ID NO: 34795 - DNA, 18 bp, Artificial Sequence
  Synthetic
atgcccaaagttgcaaga

SEQ ID NO: 34796 - DNA, 23 bp, Artificial Sequence
  Synthetic
cctttccattttgtatttcacct

SEQ ID NO: 34797 - DNA, 19 bp, Artificial Sequence
  Synthetic
tgttggcaggattttaggt

SEQ ID NO: 34798 - DNA, 16 bp, Artificial Sequence
  Synthetic
ggctggcagaggtggt

SEQ ID NO: 34799 - DNA, 20 bp, Artificial Sequence
  Synthetic
cagcttgggagttctaggga

SEQ ID NO: 34800 - DNA, 22 bp, Artificial Sequence
  Synthetic
cctcattaaaaacaagtagctg

SEQ ID NO: 34801 - DNA, 20 bp, Artificial Sequence
  Synthetic
ttcttagaaaccctcacacc

SEQ ID NO: 34802 - DNA, 16 bp, Artificial Sequence
  Synthetic
cggtagttggcgcacc

SEQ ID NO: 34803 - DNA, 16 bp, Artificial Sequence
  Synthetic
actacaggccccacgc

SEQ ID NO: 34804 - DNA, 16 bp, Artificial Sequence
  Synthetic
gccaggcccctcaaga

SEQ ID NO: 34805 - DNA, 17 bp, Artificial Sequence
  Synthetic
accgagtccgctccaaa

SEQ ID NO: 34806 - DNA, 18 bp, Artificial Sequence
  Synthetic
tccacgggctttgagact

SEQ ID NO: 34807 - DNA, 20 bp, Artificial Sequence
  Synthetic
gccactagcgcatattttgc

SEQ ID NO: 34808 - DNA, 19 bp, Artificial Sequence
  Synthetic
gcacccggaactatcgttg

SEQ ID NO: 34809 - DNA, 18 bp, Artificial Sequence
  Synthetic
gcagatgacgctctccgg

SEQ ID NO: 34810 - DNA, 17 bp, Artificial Sequence
  Synthetic
gcggctggcgcaaaatt

SEQ ID NO: 34811 - DNA, 23 bp, Artificial Sequence
  Synthetic
tccatgttctgtcatataaacac

SEQ ID NO: 34812 - DNA, 15 bp, Artificial Sequence
  Synthetic
accggaagcgacgct

SEQ ID NO: 34813 - DNA, 19 bp, Artificial Sequence
  Synthetic
gtcctgtggaccaccctat

SEQ ID NO: 34814 - DNA, 20 bp, Artificial Sequence
  Synthetic
gcccagagttttgactctcc

SEQ ID NO: 34815 - DNA, 19 bp, Artificial Sequence
  Synthetic
catgcagcgacctgatctc

SEQ ID NO: 34816 - DNA, 16 bp, Artificial Sequence
  Synthetic
ttgtcgcctctgccgc

SEQ ID NO: 34817 - DNA, 18 bp, Artificial Sequence
  Synthetic
ctgacgtcgtcatcctgc

SEQ ID NO: 34818 - DNA, 18 bp, Artificial Sequence
  Synthetic
ggcatctacagaaggccg

SEQ ID NO: 34819 - DNA, 18 bp, Artificial Sequence
  Synthetic
agccagctgaatcctgct

SEQ ID NO: 34820 - DNA, 18 bp, Artificial Sequence
  Synthetic
gggtctaggctgccatct

SEQ ID NO: 34821 - DNA, 18 bp, Artificial Sequence
  Synthetic
tcgccctcggaaatcgaa

SEQ ID NO: 34822 - DNA, 18 bp, Artificial Sequence
  Synthetic
taccggactccaggaggc

SEQ ID NO: 34823 - DNA, 16 bp, Artificial Sequence
  Synthetic
atcggcgccttgtccg

SEQ ID NO: 34824 - DNA, 19 bp, Artificial Sequence
  Synthetic
acgactagtggcgtgtagg

SEQ ID NO: 34825 - DNA, 19 bp, Artificial Sequence
  Synthetic
gcacgagagttccacgttt

SEQ ID NO: 34826 - DNA, 15 bp, Artificial Sequence
  Synthetic
tcccgacggttgcgt

SEQ ID NO: 34827 - DNA, 18 bp, Artificial Sequence
  Synthetic
gggcagaggaatgtccgg

SEQ ID NO: 34828 - DNA, 17 bp, Artificial Sequence
  Synthetic
cggttccctgcggtaac

SEQ ID NO: 34829 - DNA, 19 bp, Artificial Sequence
  Synthetic
caaagtctgcacgacctcg

SEQ ID NO: 34830 - DNA, 17 bp, Artificial Sequence
  Synthetic
aggagcagcagcaggat

SEQ ID NO: 34831 - DNA, 19 bp, Artificial Sequence
  Synthetic
gctgccagcatttgtgtct

SEQ ID NO: 34832 - DNA, 16 bp, Artificial Sequence
  Synthetic
actacccgcccaccct

SEQ ID NO: 34833 - DNA, 20 bp, Artificial Sequence
  Synthetic
cacacaacagcaagaaacgg

SEQ ID NO: 34834 - DNA, 19 bp, Artificial Sequence
  Synthetic
caagctccaggacgtagtg

SEQ ID NO: 34835 - DNA, 16 bp, Artificial Sequence
  Synthetic
aacggcctcatcgccc

SEQ ID NO: 34836 - DNA, 18 bp, Artificial Sequence
  Synthetic
ggtgtgtctgggcaggtt

SEQ ID NO: 34837 - DNA, 22 bp, Artificial Sequence
  Synthetic
agttcttttattgcaaatgccc

SEQ ID NO: 34838 - DNA, 19 bp, Artificial Sequence
  Synthetic
ggcctccacatgaaaccac

SEQ ID NO: 34839 - DNA, 18 bp, Artificial Sequence
  Synthetic
aaggtcagcacgctaccc

SEQ ID NO: 34840 - DNA, 21 bp, Artificial Sequence
  Synthetic
atactcaaatgcaagcacact

SEQ ID NO: 34841 - DNA, 18 bp, Artificial Sequence
  Synthetic
tatgagataacagcgccg

SEQ ID NO: 34842 - DNA, 21 bp, Artificial Sequence
  Synthetic
gcattatttatcgggtacagg

SEQ ID NO: 34843 - DNA, 20 bp, Artificial Sequence
  Synthetic
cacatctccagacacgtgtc

SEQ ID NO: 34844 - DNA, 16 bp, Artificial Sequence
  Synthetic
actcgttggcgcctgg

SEQ ID NO: 34845 - DNA, 18 bp, Artificial Sequence
  Synthetic
aagtagtccagggctgtg

SEQ ID NO: 34846 - DNA, 19 bp, Artificial Sequence
  Synthetic
agacatggttgcacgttta

SEQ ID NO: 34847 - DNA, 18 bp, Artificial Sequence
  Synthetic
tgtttggggagcctccac

SEQ ID NO: 34848 - DNA, 19 bp, Artificial Sequence
  Synthetic
gtagtggacccccgtagtg

SEQ ID NO: 34849 - DNA, 23 bp, Artificial Sequence
  Synthetic
agccaccttattattactcttct

SEQ ID NO: 34850 - DNA, 22 bp, Artificial Sequence
  Synthetic
attgaaaaaatgacgagtgaac

SEQ ID NO: 34851 - DNA, 24 bp, Artificial Sequence
  Synthetic
ggactgcaaatatctataggtatc

SEQ ID NO: 34852 - DNA, 24 bp, Artificial Sequence
  Synthetic
taacactttaggatgagagcaatt

SEQ ID NO: 34853 - DNA, 22 bp, Artificial Sequence
  Synthetic
gtggggagatatactaacagat

SEQ ID NO: 34854 - DNA, 23 bp, Artificial Sequence
  Synthetic
ttgtaagttctgtaaatgacact

SEQ ID NO: 34855 - DNA, 25 bp, Artificial Sequence
  Synthetic
ggtaattttacttgcatagcattct

SEQ ID NO: 34856 - DNA, 21 bp, Artificial Sequence
  Synthetic
ctagtgtcctgtaatgtccat

SEQ ID NO: 34857 - DNA, 18 bp, Artificial Sequence
  Synthetic
gagatgctggcagtgtcg

SEQ ID NO: 34858 - DNA, 18 bp, Artificial Sequence
  Synthetic
taacagtacccccagcag

SEQ ID NO: 34859 - DNA, 20 bp, Artificial Sequence
  Synthetic
tcttggtgtagtagtggatg

SEQ ID NO: 34860 - DNA, 18 bp, Artificial Sequence
  Synthetic
gggttcgtattgtccctc

SEQ ID NO: 34861 - DNA, 20 bp, Artificial Sequence
  Synthetic
tctgtttaaactcgggtgta

SEQ ID NO: 34862 - DNA, 21 bp, Artificial Sequence
  Synthetic
tgaaactttaggaactgtgac

SEQ ID NO: 34863 - DNA, 18 bp, Artificial Sequence
  Synthetic
ccagtaggagggacacat

SEQ ID NO: 34864 - DNA, 22 bp, Artificial Sequence
  Synthetic
accataaacatcacttgtcatt

SEQ ID NO: 34865 - DNA, 18 bp, Artificial Sequence
  Synthetic
tttaacccctgagccctg

SEQ ID NO: 34866 - DNA, 20 bp, Artificial Sequence
  Synthetic
tgtaattcgtctgcgcttta

SEQ ID NO: 34867 - DNA, 18 bp, Artificial Sequence
  Synthetic
actatttagggggtggcc

SEQ ID NO: 34868 - DNA, 21 bp, Artificial Sequence
  Synthetic
aggctcaagatctagttcaat

SEQ ID NO: 34869 - DNA, 23 bp, Artificial Sequence
  Synthetic
ggacttttcacatactttcgttt

SEQ ID NO: 34870 - DNA, 20 bp, Artificial Sequence
  Synthetic
tgcacgtctgttattgctaa

SEQ ID NO: 34871 - DNA, 21 bp, Artificial Sequence
  Synthetic
catgcatagtgataggcaatt

SEQ ID NO: 34872 - DNA, 19 bp, Artificial Sequence
  Synthetic
tccctagcttctgcctgaa

SEQ ID NO: 34873 - DNA, 18 bp, Artificial Sequence
  Synthetic
atcttctactgcagcacg

SEQ ID NO: 34874 - DNA, 19 bp, Artificial Sequence
  Synthetic
gtttgtggtgcctctagat

SEQ ID NO: 34875 - DNA, 23 bp, Artificial Sequence
  Synthetic
gtttgtacatctaaaatagcagg

SEQ ID NO: 34876 - DNA, 19 bp, Artificial Sequence
  Synthetic
tgctagttttgggttcact

SEQ ID NO: 34877 - DNA, 19 bp, Artificial Sequence
  Synthetic
cctgtctgcagtttcagaa

SEQ ID NO: 34878 - DNA, 18 bp, Artificial Sequence
  Synthetic
tacccacacagccatctg

SEQ ID NO: 34879 - DNA, 20 bp, Artificial Sequence
  Synthetic
actggttaggatctggaaga

SEQ ID NO: 34880 - DNA, 20 bp, Artificial Sequence
  Synthetic
cagcaggtttacatcctact

SEQ ID NO: 34881 - DNA, 18 bp, Artificial Sequence
  Synthetic
gccccatgcaataccatt

SEQ ID NO: 34882 - DNA, 20 bp, Artificial Sequence
  Synthetic
ccaatcttcagcctttgtct

SEQ ID NO: 34883 - DNA, 19 bp, Artificial Sequence
  Synthetic
cattgttggtgcagttgtt

SEQ ID NO: 34884 - DNA, 18 bp, Artificial Sequence
  Synthetic
agctgcataatgggtcag

SEQ ID NO: 34885 - DNA, 22 bp, Artificial Sequence
  Synthetic
gcataggaatgatatgtgtcag

SEQ ID NO: 34886 - DNA, 21 bp, Artificial Sequence
  Synthetic
tctttttgctgtgtaactgtt

SEQ ID NO: 34887 - DNA, 24 bp, Artificial Sequence
  Synthetic
atactttacatacagttccatccc

SEQ ID NO: 34888 - DNA, 23 bp, Artificial Sequence
  Synthetic
accattcctctattataaagcca

SEQ ID NO: 34889 - DNA, 18 bp, Artificial Sequence
  Synthetic
aacaggtctagccatgtg

SEQ ID NO: 34890 - DNA, 19 bp, Artificial Sequence
  Synthetic
ccttggataagctcctcct

SEQ ID NO: 34891 - DNA, 21 bp, Artificial Sequence
  Synthetic
aaatcactacagtctgcttca

SEQ ID NO: 34892 - DNA, 23 bp, Artificial Sequence
  Synthetic
gagatattgacatagactgcaac

SEQ ID NO: 34893 - DNA, 24 bp, Artificial Sequence
  Synthetic
cctgattattatgtgctaaccaag

SEQ ID NO: 34894 - DNA, 23 bp, Artificial Sequence
  Synthetic
tgtccattaacatctcttgtagt

SEQ ID NO: 34895 - DNA, 21 bp, Artificial Sequence
  Synthetic
agtccacttttcttttccaaa

SEQ ID NO: 34896 - DNA, 19 bp, Artificial Sequence
  Synthetic
caggagcaaacacagtttc

SEQ ID NO: 34897 - DNA, 20 bp, Artificial Sequence
  Synthetic
ggatgagagttcaggtgctc

SEQ ID NO: 34898 - DNA, 16 bp, Artificial Sequence
  Synthetic
aggtgggggtgggtga

SEQ ID NO: 34899 - DNA, 24 bp, Artificial Sequence
  Synthetic
ccaggtggtactataatgttttac

SEQ ID NO: 34900 - DNA, 24 bp, Artificial Sequence
  Synthetic
tcgcctattatatagtgatcttct

SEQ ID NO: 34901 - DNA, 18 bp, Artificial Sequence
  Synthetic
tccctgtggtgtttcaga

SEQ ID NO: 34902 - DNA, 22 bp, Artificial Sequence
  Synthetic
tgggtctacttctattacttga

SEQ ID NO: 34903 - DNA, 19 bp, Artificial Sequence
  Synthetic
agaagtccccagaggtatc

SEQ ID NO: 34904 - DNA, 20 bp, Artificial Sequence
  Synthetic
gtctgctgtatctctcacat

SEQ ID NO: 34905 - DNA, 21 bp, Artificial Sequence
  Synthetic
ctgtttagggtcaaatgaagt

SEQ ID NO: 34906 - DNA, 19 bp, Artificial Sequence
  Synthetic
agataccaaagagccactg

SEQ ID NO: 34907 - DNA, 20 bp, Artificial Sequence
  Synthetic
tttagacactctagaagccc

SEQ ID NO: 34908 - DNA, 20 bp, Artificial Sequence
  Synthetic
tgagatttcgcctacaattg

SEQ ID NO: 34909 - DNA, 18 bp, Artificial Sequence
  Synthetic
gtccatttctgagggcac

SEQ ID NO: 34910 - DNA, 21 bp, Artificial Sequence
  Synthetic
cttcaagagccattaggattt

SEQ ID NO: 34911 - DNA, 20 bp, Artificial Sequence
  Synthetic
gcaaatatactgctccgtca

SEQ ID NO: 34912 - DNA, 18 bp, Artificial Sequence
  Synthetic
cctcctcgaaaagtctcc

SEQ ID NO: 34913 - DNA, 19 bp, Artificial Sequence
  Synthetic
aaccacacctcaacttcaa

SEQ ID NO: 34914 - DNA, 18 bp, Artificial Sequence
  Synthetic
gagggaggtggaaggttc

SEQ ID NO: 34915 - DNA, 25 bp, Artificial Sequence
  Synthetic
ggatcacctatattatatccatcaa

SEQ ID NO: 34916 - DNA, 19 bp, Artificial Sequence
  Synthetic
gctgacaaacgagggctac

SEQ ID NO: 34917 - DNA, 18 bp, Artificial Sequence
  Synthetic
tctacatctagtgcggca

SEQ ID NO: 34918 - DNA, 22 bp, Artificial Sequence
  Synthetic
ctaaaggagcatctgatctact

SEQ ID NO: 34919 - DNA, 22 bp, Artificial Sequence
  Synthetic
gcattggaaaatatgtgctatt

SEQ ID NO: 34920 - DNA, 22 bp, Artificial Sequence
  Synthetic
ttgatccaaatcagaactgaat

SEQ ID NO: 34921 - DNA, 22 bp, Artificial Sequence
  Synthetic
tgcaaaagtttcagtacctttg

SEQ ID NO: 34922 - DNA, 18 bp, Artificial Sequence
  Synthetic
atctgccaaactgcgttc

SEQ ID NO: 34923 - DNA, 19 bp, Artificial Sequence
  Synthetic
cccatacggtacaccaaat

SEQ ID NO: 34924 - DNA, 20 bp, Artificial Sequence
  Synthetic
cactggcattactatcttcg

SEQ ID NO: 34925 - DNA, 19 bp, Artificial Sequence
  Synthetic
ttttcgcatctataccgcc

SEQ ID NO: 34926 - DNA, 22 bp, Artificial Sequence
  Synthetic
acctaatggatcaattggtaca

SEQ ID NO: 34927 - DNA, 21 bp, Artificial Sequence
  Synthetic
attagttttttggatggtggt

SEQ ID NO: 34928 - DNA, 24 bp, Artificial Sequence
  Synthetic
cctattactaatccacttcttgtt

SEQ ID NO: 34929 - DNA, 18 bp, Artificial Sequence
  Synthetic
gtcccaatgttgaccaac

SEQ ID NO: 34930 - DNA, 22 bp, Artificial Sequence
  Synthetic
aaaatgacgagcatataattgc

SEQ ID NO: 34931 - DNA, 25 bp, Artificial Sequence
  Synthetic
ctatatttatcttctaaaccagctg

SEQ ID NO: 34932 - DNA, 18 bp, Artificial Sequence
  Synthetic
gatgtccagatgcttccc

SEQ ID NO: 34933 - DNA, 18 bp, Artificial Sequence
  Synthetic
cgaagattgttgccaaca

SEQ ID NO: 34934 - DNA, 23 bp, Artificial Sequence
  Synthetic
tctaagttaaggtcaatgtctct

SEQ ID NO: 34935 - DNA, 22 bp, Artificial Sequence
  Synthetic
tttccaacattttcagtacctt

SEQ ID NO: 34936 - DNA, 23 bp, Artificial Sequence
  Synthetic
caaaatgtcttttaaactttgcc

SEQ ID NO: 34937 - DNA, 20 bp, Artificial Sequence
  Synthetic
cttttaagaaatgctgctgc

SEQ ID NO: 34938 - DNA, 20 bp, Artificial Sequence
  Synthetic
ctcttcgtcgtctgcgagaa

SEQ ID NO: 34939 - DNA, 19 bp, Artificial Sequence
  Synthetic
agctgtgctcatagaaaca

SEQ ID NO: 34940 - DNA, 20 bp, Artificial Sequence
  Synthetic
gctggatcaatagcatcaat

SEQ ID NO: 34941 - DNA, 18 bp, Artificial Sequence
  Synthetic
tatgtcagcaccttcagg

SEQ ID NO: 34942 - DNA, 18 bp, Artificial Sequence
  Synthetic
cgggaaggcctacttaaa

SEQ ID NO: 34943 - DNA, 21 bp, Artificial Sequence
  Synthetic
gtactaattctattgcagggc

SEQ ID NO: 34944 - DNA, 18 bp, Artificial Sequence
  Synthetic
gtcacccattacacctgc

SEQ ID NO: 34945 - DNA, 18 bp, Artificial Sequence
  Synthetic
cattagttctgcggcgtt

SEQ ID NO: 34946 - DNA, 18 bp, Artificial Sequence
  Synthetic
gcagcaagttttggctac

SEQ ID NO: 34947 - DNA, 23 bp, Artificial Sequence
  Synthetic
aacaataatagttggcaaccatc

SEQ ID NO: 34948 - DNA, 23 bp, Artificial Sequence
  Synthetic
atgatcactgagtttaagttcag

SEQ ID NO: 34949 - DNA, 23 bp, Artificial Sequence
  Synthetic
ttttgaagtagtttgaaagggtc

SEQ ID NO: 34950 - DNA, 18 bp, Artificial Sequence
  Synthetic
agagtgctcgatcccata

SEQ ID NO: 34951 - DNA, 19 bp, Artificial Sequence
  Synthetic
ccggaatgacacttcttct

SEQ ID NO: 34952 - DNA, 18 bp, Artificial Sequence
  Synthetic
acacactgtagctgtagc

SEQ ID NO: 34953 - DNA, 23 bp, Artificial Sequence
  Synthetic
tgttaattaggtaacaaggatgt

SEQ ID NO: 34954 - DNA, 22 bp, Artificial Sequence
  Synthetic
cgtctgtatcaattatccttcg

SEQ ID NO: 34955 - DNA, 22 bp, Artificial Sequence
  Synthetic
ccaattctgaaaatggaattcc

SEQ ID NO: 34956 - DNA, 18 bp, Artificial Sequence
  Synthetic
tggcctgcatattgcttt

SEQ ID NO: 34957 - DNA, 25 bp, Artificial Sequence
  Synthetic
gaaaaaattgtataaggctcatagc

SEQ ID NO: 34958 - DNA, 20 bp, Artificial Sequence
  Synthetic
ataggtgttgtaggtgttgt

SEQ ID NO: 34959 - DNA, 18 bp, Artificial Sequence
  Synthetic
cgatgcaacaacaaacca

SEQ ID NO: 34960 - DNA, 18 bp, Artificial Sequence
  Synthetic
cagatggacatgtgccag

SEQ ID NO: 34961 - DNA, 19 bp, Artificial Sequence
  Synthetic
catgcacagcaaatgtttg

SEQ ID NO: 34962 - DNA, 18 bp, Artificial Sequence
  Synthetic
acttcttgtgcgcattgt

SEQ ID NO: 34963 - DNA, 22 bp, Artificial Sequence
  Synthetic
ttacatatgcatctgttggtac

SEQ ID NO: 34964 - DNA, 20 bp, Artificial Sequence
  Synthetic
attggtatcaggtaacccaa

SEQ ID NO: 34965 - DNA, 25 bp, Artificial Sequence
  Synthetic
tgtaattcatattcctctacatgtc

SEQ ID NO: 34966 - DNA, 21 bp, Artificial Sequence
  Synthetic
cctgtaagttaacatcccaaa

SEQ ID NO: 34967 - DNA, 24 bp, Artificial Sequence
  Synthetic
catacatacagtcatacagaaaca

SEQ ID NO: 34968 - DNA, 19 bp, Artificial Sequence
  Synthetic
ggtaaaatggagggcacaa

SEQ ID NO: 34969 - DNA, 20 bp, Artificial Sequence
  Synthetic
ggttttacacacctgcttta

SEQ ID NO: 34970 - DNA, 19 bp, Artificial Sequence
  Synthetic
gttgtcgttcgcaatacac

SEQ ID NO: 34971 - DNA, 18 bp, Artificial Sequence
  Synthetic
acatctgctgcaatcagt

SEQ ID NO: 34972 - DNA, 22 bp, Artificial Sequence
  Synthetic
atcataattttcatctgctggt

SEQ ID NO: 34973 - DNA, 21 bp, Artificial Sequence
  Synthetic
gctttttaaaaatgcagcagc

SEQ ID NO: 34974 - DNA, 22 bp, Artificial Sequence
  Synthetic
ggtatcatctgctttaggattt

SEQ ID NO: 34975 - DNA, 18 bp, Artificial Sequence
  Synthetic
tgacacgcacttaaacgt

SEQ ID NO: 34976 - DNA, 21 bp, Artificial Sequence
  Synthetic
tgtctgttgtaatgtccattc

SEQ ID NO: 34977 - DNA, 20 bp, Artificial Sequence
  Synthetic
gatggagtagttgtgggtaa

SEQ ID NO: 34978 - DNA, 21 bp, Artificial Sequence
  Synthetic
ggtcagtaaaagttggattgt

SEQ ID NO: 34979 - DNA, 20 bp, Artificial Sequence
  Synthetic
cctaccacctatacgtttgc

SEQ ID NO: 34980 - DNA, 20 bp, Artificial Sequence
  Synthetic
gcgtgtactacctgcataat

SEQ ID NO: 34981 - DNA, 22 bp, Artificial Sequence
  Synthetic
tcaatcatatcaccatcctgta

SEQ ID NO: 34982 - DNA, 19 bp, Artificial Sequence
  Synthetic
agacccactaggagtagga

SEQ ID NO: 34983 - DNA, 22 bp, Artificial Sequence
  Synthetic
tgttaatcctaagtgcttgagt

SEQ ID NO: 34984 - DNA, 19 bp, Artificial Sequence
  Synthetic
gagaggcttcactccattt

SEQ ID NO: 34985 - DNA, 21 bp, Artificial Sequence
  Synthetic
acttttggggatgatctgaat

SEQ ID NO: 34986 - DNA, 19 bp, Artificial Sequence
  Synthetic
ccaatctctggttcagtgt

SEQ ID NO: 34987 - DNA, 18 bp, Artificial Sequence
  Synthetic
ggggtgtatgttgtggaa

SEQ ID NO: 34988 - DNA, 23 bp, Artificial Sequence
  Synthetic
aaactgagtgttcattttgtcaa

SEQ ID NO: 34989 - DNA, 18 bp, Artificial Sequence
  Synthetic
aacaaccattacccagct

SEQ ID NO: 34990 - DNA, 18 bp, Artificial Sequence
  Synthetic
cgatccattggagcacat

SEQ ID NO: 34991 - DNA, 22 bp, Artificial Sequence
  Synthetic
atcactgagtttaagttctgtg

SEQ ID NO: 34992 - DNA, 18 bp, Artificial Sequence
  Synthetic
catgtgagtcagaccagc

SEQ ID NO: 34993 - DNA, 23 bp, Artificial Sequence
  Synthetic
tttgaaatttccctttgagaatg

SEQ ID NO: 34994 - DNA, 19 bp, Artificial Sequence
  Synthetic
tgcttctcagttcaagtgt

SEQ ID NO: 34995 - DNA, 23 bp, Artificial Sequence
  Synthetic
cgtagctagtacatgtaatgcta

SEQ ID NO: 34996 - DNA, 24 bp, Artificial Sequence
  Synthetic
gtaacagaatcttcagtttcattg

SEQ ID NO: 34997 - DNA, 24 bp, Artificial Sequence
  Synthetic
gattagttataatttgccattccc

SEQ ID NO: 34998 - DNA, 19 bp, Artificial Sequence
  Synthetic
tgacactgcatttccatcc

SEQ ID NO: 34999 - DNA, 20 bp, Artificial Sequence
  Synthetic
ttacaaggtcccaatgtact

SEQ ID NO: 35000 - DNA, 21 bp, Artificial Sequence
  Synthetic
agtctatatagtacaggccgt

SEQ ID NO: 35001 - DNA, 21 bp, Artificial Sequence
  Synthetic
actttcaaatagcgccctata

SEQ ID NO: 35002 - DNA, 24 bp, Artificial Sequence
  Synthetic
tcaatagaaaatgtagaagaccct

SEQ ID NO: 35003 - DNA, 18 bp, Artificial Sequence
  Synthetic
atacaagtcagcctcacc

SEQ ID NO: 35004 - DNA, 18 bp, Artificial Sequence
  Synthetic
tagccacaaaccagccat

SEQ ID NO: 35005 - DNA, 20 bp, Artificial Sequence
  Synthetic
ggacaccaactgtaaaggag

SEQ ID NO: 35006 - DNA, 21 bp, Artificial Sequence
  Synthetic
gtgggtattatcaaccaaagt

SEQ ID NO: 35007 - DNA, 18 bp, Artificial Sequence
  Synthetic
gcagaccctgtttgatgt

SEQ ID NO: 35008 - DNA, 22 bp, Artificial Sequence
  Synthetic
aacaacaataagagaaaaaggc

SEQ ID NO: 35009 - DNA, 24 bp, Artificial Sequence
  Synthetic
tgtatgctttctaatccagtcagg

SEQ ID NO: 35010 - DNA, 23 bp, Artificial Sequence
  Synthetic
aagattttgcaaccagaaatggc

SEQ ID NO: 35011 - DNA, 23 bp, Artificial Sequence
  Synthetic
acaagttgccaatgctcaatttg

SEQ ID NO: 35012 - DNA, 21 bp, Artificial Sequence
  Synthetic
tggaggagctgacagaccctt

SEQ ID NO: 35013 - DNA, 22 bp, Artificial Sequence
  Synthetic
ctggctcgtcgttgtctcttgt

SEQ ID NO: 35014 - DNA, 22 bp, Artificial Sequence
  Synthetic
tgttcccctaaagatgtgggat

SEQ ID NO: 35015 - DNA, 22 bp, Artificial Sequence
  Synthetic
acctcttgcaagtcttgttgaa

SEQ ID NO: 35016 - DNA, 20 bp, Artificial Sequence
  Synthetic
gcctggtgtgactaggtctt

SEQ ID NO: 35017 - DNA, 22 bp, Artificial Sequence
  Synthetic
atacaacgtttctggcacatga

SEQ ID NO: 35018 - DNA, 23 bp, Artificial Sequence
  Synthetic
caacgaccacgaactaaatgaca

SEQ ID NO: 35019 - DNA, 22 bp, Artificial Sequence
  Synthetic
cactctacagttgcctgtgcat

SEQ ID NO: 35020 - DNA, 21 bp, Artificial Sequence
  Synthetic
cgtaggaggtggagggcctat

SEQ ID NO: 35021 - DNA, 24 bp, Artificial Sequence
  Synthetic
gttctatgtctcgatcccacttct

SEQ ID NO: 35022 - DNA, 25 bp, Artificial Sequence
  Synthetic
gataatggattataccctgtagccc

SEQ ID NO: 35023 - DNA, 22 bp, Artificial Sequence
  Synthetic
cctctgctacatcctgctcaaa

SEQ ID NO: 35024 - DNA, 21 bp, Artificial Sequence
  Synthetic
cagttaacagtctgccagtgc

SEQ ID NO: 35025 - DNA, 22 bp, Artificial Sequence
  Synthetic
ccacccgggaacttaacgttct

SEQ ID NO: 35026 - DNA, 20 bp, Artificial Sequence
  Synthetic
cggcaaacccgcaggtcatg

SEQ ID NO: 35027 - DNA, 20 bp, Artificial Sequence
  Synthetic
ttaccctcgcgaacgcaagg

SEQ ID NO: 35028 - DNA, 21 bp, Artificial Sequence
  Synthetic
gcatcatgtcccacgccatcc

SEQ ID NO: 35029 - DNA, 22 bp, Artificial Sequence
  Synthetic
tgtgtgtagaagagggccgcta

SEQ ID NO: 35030 - DNA, 20 bp, Artificial Sequence
  Synthetic
ccgcaggtcttcgtgaaccc

SEQ ID NO: 35031 - DNA, 20 bp, Artificial Sequence
  Synthetic
ctccaggtcgcatcgctcac

SEQ ID NO: 35032 - DNA, 20 bp, Artificial Sequence
  Synthetic
ttctccagagcggcttcagc

SEQ ID NO: 35033 - DNA, 20 bp, Artificial Sequence
  Synthetic
ccaggggggcgagatggtta

SEQ ID NO: 35034 - DNA, 20 bp, Artificial Sequence
  Synthetic
taagggaggacacagggcgc

SEQ ID NO: 35035 - DNA, 20 bp, Artificial Sequence
  Synthetic
ggcaccaaacccaagggtgg

SEQ ID NO: 35036 - DNA, 20 bp, Artificial Sequence
  Synthetic
tccaaggaccacacggccaa

SEQ ID NO: 35037 - DNA, 21 bp, Artificial Sequence
  Synthetic
tgaaggccatcagtgaggcca

SEQ ID NO: 35038 - DNA, 20 bp, Artificial Sequence
  Synthetic
gtagagcgcacccagacacc

SEQ ID NO: 35039 - DNA, 21 bp, Artificial Sequence
  Synthetic
cagtgctctctagccctgcag

SEQ ID NO: 35040 - DNA, 22 bp, Artificial Sequence
  Synthetic
gatcttggtcctgacagcccag

SEQ ID NO: 35041 - DNA, 22 bp, Artificial Sequence
  Synthetic
tccatgagaataagggggaaca

SEQ ID NO: 35042 - DNA, 22 bp, Artificial Sequence
  Synthetic
tcctattgccatgtctgctgat

SEQ ID NO: 35043 - DNA, 25 bp, Artificial Sequence
  Synthetic
cctcaagaatcatgttcctctgatc

SEQ ID NO: 35044 - DNA, 23 bp, Artificial Sequence
  Synthetic
tgctgtgaacaggagtatgagat

SEQ ID NO: 35045 - DNA, 20 bp, Artificial Sequence
  Synthetic
aggaccattctggcacactt

SEQ ID NO: 35046 - DNA, 22 bp, Artificial Sequence
  Synthetic
tggcaaccggataatttgatcc

SEQ ID NO: 35047 - DNA, 22 bp, Artificial Sequence
  Synthetic
ggtgcaactagattaccagtgc

SEQ ID NO: 35048 - DNA, 20 bp, Artificial Sequence
  Synthetic
tgttgtgtccatggttgggt

SEQ ID NO: 35049 - DNA, 25 bp, Artificial Sequence
  Synthetic
ggacattattagccctcctaatcac

SEQ ID NO: 35050 - DNA, 24 bp, Artificial Sequence
  Synthetic
tgcctaatactacactggagaagt

SEQ ID NO: 35051 - DNA, 20 bp, Artificial Sequence
  Synthetic
ccgagcagatgtaggtcctg

SEQ ID NO: 35052 - DNA, 25 bp, Artificial Sequence
  Synthetic
ttgtgatggcatttttgaattcagt

SEQ ID NO: 35053 - DNA, 20 bp, Artificial Sequence
  Synthetic
ctgaggctccagatgggttt

SEQ ID NO: 35054 - DNA, 22 bp, Artificial Sequence
  Synthetic
ttttctagtgtcttggtggtgc

SEQ ID NO: 35055 - DNA, 21 bp, Artificial Sequence
  Synthetic
tgtttggtggtttgttttggc

SEQ ID NO: 35056 - DNA, 25 bp, Artificial Sequence
  Synthetic
ttgtttgtggatagtagagcacttt

SEQ ID NO: 35057 - DNA, 22 bp, Artificial Sequence
  Synthetic
ccatcctctgtcggttcttgtt

SEQ ID NO: 35058 - DNA, 20 bp, Artificial Sequence
  Synthetic
tgtgactggtgtgcttctgg

SEQ ID NO: 35059 - DNA, 25 bp, Artificial Sequence
  Synthetic
gagaatattttgtttggagctgtgc

SEQ ID NO: 35060 - DNA, 22 bp, Artificial Sequence
  Synthetic
gccatggctagacgctttctgc

SEQ ID NO: 35061 - DNA, 20 bp, Artificial Sequence
  Synthetic
acttgacgtcctgtgggcga

SEQ ID NO: 35062 - DNA, 19 bp, Artificial Sequence
  Synthetic
ccccatgaggtcggcgaag

SEQ ID NO: 35063 - DNA, 19 bp, Artificial Sequence
  Synthetic
gggacacaccccggagtgt

SEQ ID NO: 35064 - DNA, 20 bp, Artificial Sequence
  Synthetic
gagctaccaccaacgctgcc

SEQ ID NO: 35065 - DNA, 20 bp, Artificial Sequence
  Synthetic
accgaaccaattgcccagcg

SEQ ID NO: 35066 - DNA, 19 bp, Artificial Sequence
  Synthetic
ttcgccccgcgtccagttg

SEQ ID NO: 35067 - DNA, 19 bp, Artificial Sequence
  Synthetic
acggccagatctcgcaggc

SEQ ID NO: 35068 - DNA, 20 bp, Artificial Sequence
  Synthetic
ccccattgatgcacgttgcc

SEQ ID NO: 35069 - DNA, 21 bp, Artificial Sequence
  Synthetic
ggggctgccagtggtaattgt

SEQ ID NO: 35070 - DNA, 19 bp, Artificial Sequence
  Synthetic
gctcccccggtgccacaaa

SEQ ID NO: 35071 - DNA, 22 bp, Artificial Sequence
  Synthetic
catcccttgctcgatgtacggt

SEQ ID NO: 35072 - DNA, 20 bp, Artificial Sequence
  Synthetic
ggggaaacatggttcccccg

SEQ ID NO: 35073 - DNA, 20 bp, Artificial Sequence
  Synthetic
tacctcctcccgcagcaagg

SEQ ID NO: 35074 - DNA, 20 bp, Artificial Sequence
  Synthetic
gagggacttgatggccacgc

SEQ ID NO: 35075 - DNA, 20 bp, Artificial Sequence
  Synthetic
ctctttccagcgccgtcgtg

SEQ ID NO: 35076 - DNA, 23 bp, Artificial Sequence
  Synthetic
gcaagctcgacaatcattggatt

SEQ ID NO: 35077 - DNA, 23 bp, Artificial Sequence
  Synthetic
ggtgttgcagatactattcacca

SEQ ID NO: 35078 - DNA, 23 bp, Artificial Sequence
  Synthetic
tcaatatcttggagctctgccag

SEQ ID NO: 35079 - DNA, 24 bp, Artificial Sequence
  Synthetic
cgtcttcccctatttcatcaagtt

SEQ ID NO: 35080 - DNA, 24 bp, Artificial Sequence
  Synthetic
actcacaaagtttaccacatcggt

SEQ ID NO: 35081 - DNA, 23 bp, Artificial Sequence
  Synthetic
cctcaatcatgctctcaatctgt

SEQ ID NO: 35082 - DNA, 21 bp, Artificial Sequence
  Synthetic
ttgggcattagcatgaaccag

SEQ ID NO: 35083 - DNA, 25 bp, Artificial Sequence
  Synthetic
ccccaaataactgttttctacaacc

SEQ ID NO: 35084 - DNA, 20 bp, Artificial Sequence
  Synthetic
cagtcccctcctcctctgta

SEQ ID NO: 35085 - DNA, 22 bp, Artificial Sequence
  Synthetic
acagggttcgctgtttgcaaca

SEQ ID NO: 35086 - DNA, 21 bp, Artificial Sequence
  Synthetic
tcctcctcgttatcgttgtcg

SEQ ID NO: 35087 - DNA, 23 bp, Artificial Sequence
  Synthetic
gcaatgtctctaatgcaagttgc

SEQ ID NO: 35088 - DNA, 21 bp, Artificial Sequence
  Synthetic
tgtgacctgatgagggcctaa

SEQ ID NO: 35089 - DNA, 19 bp, Artificial Sequence
  Synthetic
tcaaccggcgtggatggcg

SEQ ID NO: 35090 - DNA, 19 bp, Artificial Sequence
  Synthetic
gaatgggctgtcgctggct

SEQ ID NO: 35091 - DNA, 21 bp, Artificial Sequence
  Synthetic
ggccggggtatccttttggga

SEQ ID NO: 35092 - DNA, 20 bp, Artificial Sequence
  Synthetic
ggtacaggacgccttggcat

SEQ ID NO: 35093 - DNA, 20 bp, Artificial Sequence
  Synthetic
tttcctggcccggtgtaggg

SEQ ID NO: 35094 - DNA, 22 bp, Artificial Sequence
  Synthetic
actgaatctcgccaagtagggc

SEQ ID NO: 35095 - DNA, 21 bp, Artificial Sequence
  Synthetic
acaagtggccactgctgcttg

SEQ ID NO: 35096 - DNA, 22 bp, Artificial Sequence
  Synthetic
gatagtaagcggggcaggaggg

SEQ ID NO: 35097 - DNA, 21 bp, Artificial Sequence
  Synthetic
cgccggcagcttcttgaagag

SEQ ID NO: 35098 - DNA, 21 bp, Artificial Sequence
  Synthetic
gcaccctaggtatgggcattt

SEQ ID NO: 35099 - DNA, 22 bp, Artificial Sequence
  Synthetic
acctgctggtggaggaattggt

SEQ ID NO: 35100 - DNA, 22 bp, Artificial Sequence
  Synthetic
cgataacgcgtccatcgatggg

SEQ ID NO: 35101 - DNA, 20 bp, Artificial Sequence
  Synthetic
cagggcccggaaatcatagg

SEQ ID NO: 35102 - DNA, 20 bp, Artificial Sequence
  Synthetic
tggtgctgagctgtcctccg

SEQ ID NO: 35103 - DNA, 19 bp, Artificial Sequence
  Synthetic
agatgcgagccccctcctg

SEQ ID NO: 35104 - DNA, 22 bp, Artificial Sequence
  Synthetic
tttgttagtatctcgcgagtgc

SEQ ID NO: 35105 - DNA, 21 bp, Artificial Sequence
  Synthetic
catgtcactgccaaaggtgat

SEQ ID NO: 35106 - DNA, 22 bp, Artificial Sequence
  Synthetic
cccgtaagcacttcttcctctc

SEQ ID NO: 35107 - DNA, 21 bp, Artificial Sequence
  Synthetic
gcatgggattcaatcgctgat

SEQ ID NO: 35108 - DNA, 21 bp, Artificial Sequence
  Synthetic
acatttcctcgttggtctcga

SEQ ID NO: 35109 - DNA, 22 bp, Artificial Sequence
  Synthetic
caaatccactgtattggcctct

SEQ ID NO: 35110 - DNA, 20 bp, Artificial Sequence
  Synthetic
tgggtatgagcatggaccat

SEQ ID NO: 35111 - DNA, 23 bp, Artificial Sequence
  Synthetic
tccaactgcatttttgacatcct

SEQ ID NO: 35112 - DNA, 23 bp, Artificial Sequence
  Synthetic
ccagtataagggaatgtggtgct

SEQ ID NO: 35113 - DNA, 20 bp, Artificial Sequence
  Synthetic
ttgcgtgaccatcttcttgg

SEQ ID NO: 35114 - DNA, 21 bp, Artificial Sequence
  Synthetic
cttttcattgccccctactgg

SEQ ID NO: 35115 - DNA, 24 bp, Artificial Sequence
  Synthetic
cgaacatgtaccctttccctagtc

SEQ ID NO: 35116 - DNA, 25 bp, Artificial Sequence
  Synthetic
tcactgttactccaatactcatgtc

SEQ ID NO: 35117 - DNA, 19 bp, Artificial Sequence
  Synthetic
ggcccatggttccgaagcg

SEQ ID NO: 35118 - DNA, 22 bp, Artificial Sequence
  Synthetic
tcgttctaactgtacacggcgg

SEQ ID NO: 35119 - DNA, 19 bp, Artificial Sequence
  Synthetic
cgcgatccctgggctggta

SEQ ID NO: 35120 - DNA, 21 bp, Artificial Sequence
  Synthetic
tggggaatttgtgtgggtact

SEQ ID NO: 35121 - DNA, 22 bp, Artificial Sequence
  Synthetic
cccacagcatgctcttggtctt

SEQ ID NO: 35122 - DNA, 19 bp, Artificial Sequence
  Synthetic
tctgcgtccgcgtctcgtg

SEQ ID NO: 35123 - DNA, 18 bp, Artificial Sequence
  Synthetic
tcctcgaaacgccagcgc

SEQ ID NO: 35124 - DNA, 20 bp, Artificial Sequence
  Synthetic
cgatccgaaagccaggtcgc

SEQ ID NO: 35125 - DNA, 20 bp, Artificial Sequence
  Synthetic
cgcgatgctctggctgatga

SEQ ID NO: 35126 - DNA, 19 bp, Artificial Sequence
  Synthetic
cgtcgcgatgggaggtagc

SEQ ID NO: 35127 - DNA, 22 bp, Artificial Sequence
  Synthetic
ctgcgtctatgcaacctcaggt

SEQ ID NO: 35128 - DNA, 19 bp, Artificial Sequence
  Synthetic
tgtacctgcgcctggacgg

SEQ ID NO: 35129 - DNA, 22 bp, Artificial Sequence
  Synthetic
gccttttatcgcaccctctcgg

SEQ ID NO: 35130 - DNA, 19 bp, Artificial Sequence
  Synthetic
aaccgccatggacgagcag

SEQ ID NO: 35131 - DNA, 18 bp, Artificial Sequence
  Synthetic
aaggcgcgcggcatgttg

SEQ ID NO: 35132 - DNA, 18 bp, Artificial Sequence
  Synthetic
atgtcggtgcgcgagacg

SEQ ID NO: 35133 - DNA, 20 bp, Artificial Sequence
  Synthetic
ggccgtgaaaaccagctggt

SEQ ID NO: 35134 - DNA, 20 bp, Artificial Sequence
  Synthetic
gccaaagttgagcagcccca

SEQ ID NO: 35135 - DNA, 18 bp, Artificial Sequence
  Synthetic
cagcacgtcgagctgcgt

SEQ ID NO: 35136 - DNA, 19 bp, Artificial Sequence
  Synthetic
gccctgtgtgacagcccag

SEQ ID NO: 35137 - DNA, 21 bp, Artificial Sequence
  Synthetic
gacgactactggaacgccgtt

SEQ ID NO: 35138 - DNA, 19 bp, Artificial Sequence
  Synthetic
actgcagcccaccgcccta

SEQ ID NO: 35139 - DNA, 19 bp, Artificial Sequence
  Synthetic
tgtccgcttcgagaccggc

SEQ ID NO: 35140 - DNA, 19 bp, Artificial Sequence
  Synthetic
ggcaaggcgacgcagtgtc

SEQ ID NO: 35141 - DNA, 18 bp, Artificial Sequence
  Synthetic
atctgtggggcgtgacgc

SEQ ID NO: 35142 - DNA, 20 bp, Artificial Sequence
  Synthetic
gcgctggaaaaactgcgtcc

SEQ ID NO: 35143 - DNA, 19 bp, Artificial Sequence
  Synthetic
tgtgtcgccaactgcacgg

SEQ ID NO: 35144 - DNA, 22 bp, Artificial Sequence
  Synthetic
ccagatccctctgtgtaccggg

SEQ ID NO: 35145 - DNA, 20 bp, Artificial Sequence
  Synthetic
ccagctcgcgcaactgttct

SEQ ID NO: 35146 - DNA, 17 bp, Artificial Sequence
  Synthetic
tcgcgcctgccgttgat

SEQ ID NO: 35147 - DNA, 20 bp, Artificial Sequence
  Synthetic
catgtagccgtccaggtcgc

SEQ ID NO: 35148 - DNA, 21 bp, Artificial Sequence
  Synthetic
gaccctcgcagtgatacacgg

SEQ ID NO: 35149 - DNA, 20 bp, Artificial Sequence
  Synthetic
cgcgtcggttcagatcgctg

SEQ ID NO: 35150 - DNA, 22 bp, Artificial Sequence
  Synthetic
ctagcgcttccagctgagctag

SEQ ID NO: 35151 - DNA, 21 bp, Artificial Sequence
  Synthetic
ccaagagcagctcgagtgtgg

SEQ ID NO: 35152 - DNA, 22 bp, Artificial Sequence
  Synthetic
cgtgaccagatcagtccacagg

SEQ ID NO: 35153 - DNA, 19 bp, Artificial Sequence
  Synthetic
cggtgatttgcgcaagggc

SEQ ID NO: 35154 - DNA, 19 bp, Artificial Sequence
  Synthetic
ggctgcgcgctggttaaac

SEQ ID NO: 35155 - DNA, 21 bp, Artificial Sequence
  Synthetic
gtacgagaatctgctgcgcga

SEQ ID NO: 35156 - DNA, 19 bp, Artificial Sequence
  Synthetic
agagggcgcggaaaccacc

SEQ ID NO: 35157 - DNA, 18 bp, Artificial Sequence
  Synthetic
ggtggtactgcggcggtt

SEQ ID NO: 35158 - DNA, 20 bp, Artificial Sequence
  Synthetic
cgggttctgtggcggctatg

SEQ ID NO: 35159 - DNA, 19 bp, Artificial Sequence
  Synthetic
ttggtggacgcgcgttccc

SEQ ID NO: 35160 - DNA, 19 bp, Artificial Sequence
  Synthetic
ccgtatcagctaccgccgc

SEQ ID NO: 35161 - DNA, 19 bp, Artificial Sequence
  Synthetic
tcgtggatggctgcgaggc

SEQ ID NO: 35162 - DNA, 19 bp, Artificial Sequence
  Synthetic
gacgaggccctgggtttcg

SEQ ID NO: 35163 - DNA, 20 bp, Artificial Sequence
  Synthetic
tggaggcctacacgcccgag

SEQ ID NO: 35164 - DNA, 20 bp, Artificial Sequence
  Synthetic
ttcggcgtctctgtgcgtac

SEQ ID NO: 35165 - DNA, 21 bp, Artificial Sequence
  Synthetic
ggaccctccccgtggattcac

SEQ ID NO: 35166 - DNA, 22 bp, Artificial Sequence
  Synthetic
gctcatgcacaccgactacctg

SEQ ID NO: 35167 - DNA, 20 bp, Artificial Sequence
  Synthetic
cgacctgctccgtcacgtac

SEQ ID NO: 35168 - DNA, 19 bp, Artificial Sequence
  Synthetic
gcagtgtacgcgcgaaccg

SEQ ID NO: 35169 - DNA, 20 bp, Artificial Sequence
  Synthetic
acgtgaggcaatctccgcag

SEQ ID NO: 35170 - DNA, 19 bp, Artificial Sequence
  Synthetic
aagagaaccccgccgtccc

SEQ ID NO: 35171 - DNA, 20 bp, Artificial Sequence
  Synthetic
ggcaacagcaattcggcctc

SEQ ID NO: 35172 - DNA, 20 bp, Artificial Sequence
  Synthetic
gagaaagcgacggcggtgat

SEQ ID NO: 35173 - DNA, 19 bp, Artificial Sequence
  Synthetic
tcgtaacgccgaccccacc

SEQ ID NO: 35174 - DNA, 19 bp, Artificial Sequence
  Synthetic
tgacggtgctgcttctgcg

SEQ ID NO: 35175 - DNA, 22 bp, Artificial Sequence
  Synthetic
ggacaaagacgtcgaagcggta

SEQ ID NO: 35176 - DNA, 20 bp, Artificial Sequence
  Synthetic
ggaacaccgacagccgctag

SEQ ID NO: 35177 - DNA, 22 bp, Artificial Sequence
  Synthetic
gccaggctcagaaaacaacacg

SEQ ID NO: 35178 - DNA, 19 bp, Artificial Sequence
  Synthetic
gtctcgggactggcctgga

SEQ ID NO: 35179 - DNA, 20 bp, Artificial Sequence
  Synthetic
ccccagccaagagcccatgt

SEQ ID NO: 35180 - DNA, 19 bp, Artificial Sequence
  Synthetic
tcgcgctggaggacctgct

SEQ ID NO: 35181 - DNA, 21 bp, Artificial Sequence
  Synthetic
cgctagaggacagctccatgc

SEQ ID NO: 35182 - DNA, 20 bp, Artificial Sequence
  Synthetic
gaggtaaaggctgccgtgca

SEQ ID NO: 35183 - DNA, 19 bp, Artificial Sequence
  Synthetic
aagagagcacaagcggcgt

SEQ ID NO: 35184 - DNA, 19 bp, Artificial Sequence
  Synthetic
gccccccttcgttacgcac

SEQ ID NO: 35185 - DNA, 22 bp, Artificial Sequence
  Synthetic
tgctcgagtgtcgttttcagca

SEQ ID NO: 35186 - DNA, 22 bp, Artificial Sequence
  Synthetic
cccactgactttctgacgcacg

SEQ ID NO: 35187 - DNA, 18 bp, Artificial Sequence
  Synthetic
acgctcgggttcggtcct

SEQ ID NO: 35188 - DNA, 20 bp, Artificial Sequence
  Synthetic
cgtgtccgttcgccgaaacc

SEQ ID NO: 35189 - DNA, 22 bp, Artificial Sequence
  Synthetic
ttcctcctcctcttctcccgtc

SEQ ID NO: 35190 - DNA, 19 bp, Artificial Sequence
  Synthetic
accacacgcccgaccagaa

SEQ ID NO: 35191 - DNA, 21 bp, Artificial Sequence
  Synthetic
tgcacaagcccaccttcatca

SEQ ID NO: 35192 - DNA, 20 bp, Artificial Sequence
  Synthetic
tgtcgttgacgcactccacc

SEQ ID NO: 35193 - DNA, 19 bp, Artificial Sequence
  Synthetic
cagtgcggcctcctcgatg

SEQ ID NO: 35194 - DNA, 20 bp, Artificial Sequence
  Synthetic
gcaacgaggccttcctgccg

SEQ ID NO: 35195 - DNA, 18 bp, Artificial Sequence
  Synthetic
gccgccatcatgttgcgc

SEQ ID NO: 35196 - DNA, 19 bp, Artificial Sequence
  Synthetic
cgccgaggaagacgacacc

SEQ ID NO: 35197 - DNA, 19 bp, Artificial Sequence
  Synthetic
tccgaagccgcgtcctctt

SEQ ID NO: 35198 - DNA, 19 bp, Artificial Sequence
  Synthetic
cggcatgggtcggaaagca

SEQ ID NO: 35199 - DNA, 20 bp, Artificial Sequence
  Synthetic
cgccggcgtgcttaaagagc

SEQ ID NO: 35200 - DNA, 19 bp, Artificial Sequence
  Synthetic
cgcgttcgacagcgctgtg

SEQ ID NO: 35201 - DNA, 19 bp, Artificial Sequence
  Synthetic
tgtgagtgccgacgcgaaa

SEQ ID NO: 35202 - DNA, 20 bp, Artificial Sequence
  Synthetic
ggcatcgtcaaggccgacaa

SEQ ID NO: 35203 - DNA, 19 bp, Artificial Sequence
  Synthetic
ctgtggctgcacacggagc

SEQ ID NO: 35204 - DNA, 22 bp, Artificial Sequence
  Synthetic
acgaagaggacctggagcagta

SEQ ID NO: 35205 - DNA, 22 bp, Artificial Sequence
  Synthetic
ccagtaggcgagcagatcgttg

SEQ ID NO: 35206 - DNA, 22 bp, Artificial Sequence
  Synthetic
ggccatgttccatccgttgaga

SEQ ID NO: 35207 - DNA, 22 bp, Artificial Sequence
  Synthetic
agtgtacatgtgcaccgtctcc

SEQ ID NO: 35208 - DNA, 20 bp, Artificial Sequence
  Synthetic
gccggcgacacatgcgaaag

SEQ ID NO: 35209 - DNA, 20 bp, Artificial Sequence
  Synthetic
cgactcgacgaagcgcgaga

SEQ ID NO: 35210 - DNA, 19 bp, Artificial Sequence
  Synthetic
aggctggcagacgctgagt

SEQ ID NO: 35211 - DNA, 19 bp, Artificial Sequence
  Synthetic
acagcgagtgcggcgatgg

SEQ ID NO: 35212 - DNA, 21 bp, Artificial Sequence
  Synthetic
gcccattgtttcctcagccgc

SEQ ID NO: 35213 - DNA, 22 bp, Artificial Sequence
  Synthetic
gcgctctacttcgtaccacgag

SEQ ID NO: 35214 - DNA, 22 bp, Artificial Sequence
  Synthetic
cgtagttgcgctcttgggcgac

SEQ ID NO: 35215 - DNA, 22 bp, Artificial Sequence
  Synthetic
tggcggtagggtatgtgtctga

SEQ ID NO: 35216 - DNA, 19 bp, Artificial Sequence
  Synthetic
gcgtcgacccttcaccgag

SEQ ID NO: 35217 - DNA, 22 bp, Artificial Sequence
  Synthetic
aatcggcaaaattttctaccgc

SEQ ID NO: 35218 - DNA, 21 bp, Artificial Sequence
  Synthetic
ccaacatcacaagcaacgaca

SEQ ID NO: 35219 - DNA, 19 bp, Artificial Sequence
  Synthetic
cagatctggtcgccgacgc

SEQ ID NO: 35220 - DNA, 21 bp, Artificial Sequence
  Synthetic
gtcatgacacactcctggccc

SEQ ID NO: 35221 - DNA, 21 bp, Artificial Sequence
  Synthetic
gctggcggggtaacatcatcc

SEQ ID NO: 35222 - DNA, 19 bp, Artificial Sequence
  Synthetic
atccgagactgccgcgcac

SEQ ID NO: 35223 - DNA, 20 bp, Artificial Sequence
  Synthetic
atgagagggaggatggccgt

SEQ ID NO: 35224 - DNA, 20 bp, Artificial Sequence
  Synthetic
gccgacttccaccatcaggc

SEQ ID NO: 35225 - DNA, 19 bp, Artificial Sequence
  Synthetic
acgacgtcgcgatcggcag

SEQ ID NO: 35226 - DNA, 19 bp, Artificial Sequence
  Synthetic
ggacgcgaaacccggactg

SEQ ID NO: 35227 - DNA, 22 bp, Artificial Sequence
  Synthetic
acatcccagagggcttccttga

SEQ ID NO: 35228 - DNA, 22 bp, Artificial Sequence
  Synthetic
gccaaccacagacgttcaagga

SEQ ID NO: 35229 - DNA, 19 bp, Artificial Sequence
  Synthetic
tgctcacaacacggcgctt

SEQ ID NO: 35230 - DNA, 22 bp, Artificial Sequence
  Synthetic
ccgaggacccaatgtgattcgt

SEQ ID NO: 35231 - DNA, 22 bp, Artificial Sequence
  Synthetic
ccttagtgacggcgatcagcag

SEQ ID NO: 35232 - DNA, 22 bp, Artificial Sequence
  Synthetic
tcgatatcgctccttcttcact

SEQ ID NO: 35233 - DNA, 20 bp, Artificial Sequence
  Synthetic
tgtgcgtggcaacttctccg

SEQ ID NO: 35234 - DNA, 22 bp, Artificial Sequence
  Synthetic
ctgctaccctaacactcgcctc

SEQ ID NO: 35235 - DNA, 22 bp, Artificial Sequence
  Synthetic
cagcctcatcctaacgtggacg

SEQ ID NO: 35236 - DNA, 21 bp, Artificial Sequence
  Synthetic
cgacgatccctcgccgctatt

SEQ ID NO: 35237 - DNA, 19 bp, Artificial Sequence
  Synthetic
aagagacccggctggcgac

SEQ ID NO: 35238 - DNA, 19 bp, Artificial Sequence
  Synthetic
cgtccgttccgacagctgg

SEQ ID NO: 35239 - DNA, 19 bp, Artificial Sequence
  Synthetic
tttcccaccgcgacccagc

SEQ ID NO: 35240 - DNA, 19 bp, Artificial Sequence
  Synthetic
ccgggcctgctcaccattt

SEQ ID NO: 35241 - DNA, 20 bp, Artificial Sequence
  Synthetic
cgtcccgctagaatggaccg

SEQ ID NO: 35242 - DNA, 20 bp, Artificial Sequence
  Synthetic
cgttcctcacgctcgctctg

SEQ ID NO: 35243 - DNA, 18 bp, Artificial Sequence
  Synthetic
aaagccatgcacgcccgc

SEQ ID NO: 35244 - DNA, 19 bp, Artificial Sequence
  Synthetic
agtgatgcgcgaacaggcc

SEQ ID NO: 35245 - DNA, 18 bp, Artificial Sequence
  Synthetic
acgcgcggcagtttcgct

SEQ ID NO: 35246 - DNA, 19 bp, Artificial Sequence
  Synthetic
ctgcgttggcgaacaccac

SEQ ID NO: 35247 - DNA, 19 bp, Artificial Sequence
  Synthetic
tggttcctgcaggtgcggc

SEQ ID NO: 35248 - DNA, 20 bp, Artificial Sequence
  Synthetic
gacgcgattcggggtccttc

SEQ ID NO: 35249 - DNA, 19 bp, Artificial Sequence
  Synthetic
tgagcgattccccgccacc

SEQ ID NO: 35250 - DNA, 23 bp, Artificial Sequence
  Synthetic
gcaagctcgacaatcattggatt

SEQ ID NO: 35251 - DNA, 21 bp, Artificial Sequence
  Synthetic
cgactcctgttgtgttgcaga

SEQ ID NO: 35252 - DNA, 22 bp, Artificial Sequence
  Synthetic
gaaaggaatcccatagacccct

SEQ ID NO: 35253 - DNA, 20 bp, Artificial Sequence
  Synthetic
tgccatattctccccgagtg

SEQ ID NO: 35254 - DNA, 21 bp, Artificial Sequence
  Synthetic
agtggatagctgtcctcttgg

SEQ ID NO: 35255 - DNA, 21 bp, Artificial Sequence
  Synthetic
gacaggaccaagggagtcatt

SEQ ID NO: 35256 - DNA, 24 bp, Artificial Sequence
  Synthetic
gctgaggcacaggttttattactc

SEQ ID NO: 35257 - DNA, 22 bp, Artificial Sequence
  Synthetic
gctctgaaaactttgcagcaca

SEQ ID NO: 35258 - DNA, 21 bp, Artificial Sequence
  Synthetic
cctcctcttcagccatgccct

SEQ ID NO: 35259 - DNA, 23 bp, Artificial Sequence
  Synthetic
tctgtagctacaatcaggacgta

SEQ ID NO: 35260 - DNA, 22 bp, Artificial Sequence
  Synthetic
gaatttgcaggtgccacaggtc

SEQ ID NO: 35261 - DNA, 24 bp, Artificial Sequence
  Synthetic
caccgtgttcttaatgatagggaa

SEQ ID NO: 35262 - DNA, 20 bp, Artificial Sequence
  Synthetic
tgctttctgcccagctggtt

SEQ ID NO: 35263 - DNA, 22 bp, Artificial Sequence
  Synthetic
aggaaaaatacgggctaaaggc

SEQ ID NO: 35264 - DNA, 21 bp, Artificial Sequence
  Synthetic
cgcggaataccactgaaggat

SEQ ID NO: 35265 - DNA, 20 bp, Artificial Sequence
  Synthetic
tgcctggcacgcgaatatgt

SEQ ID NO: 35266 - DNA, 21 bp, Artificial Sequence
  Synthetic
gtttcccctggaggagtactg

SEQ ID NO: 35267 - DNA, 21 bp, Artificial Sequence
  Synthetic
tgaaggtcggtcaacagtttc

SEQ ID NO: 35268 - DNA, 22 bp, Artificial Sequence
  Synthetic
ccctctccgttctcgctttcga

SEQ ID NO: 35269 - DNA, 22 bp, Artificial Sequence
  Synthetic
gccgattttaagcaggcgcatt

SEQ ID NO: 35270 - DNA, 25 bp, Artificial Sequence
  Synthetic
ctccaggaggaagaaattgatcaat

SEQ ID NO: 35271 - DNA, 20 bp, Artificial Sequence
  Synthetic
gtagacaggctgcccgttcg

SEQ ID NO: 35272 - DNA, 20 bp, Artificial Sequence
  Synthetic
tgcaaccacccttacccaaa

SEQ ID NO: 35273 - DNA, 22 bp, Artificial Sequence
  Synthetic
ggggttcctcgctatggtaccc

SEQ ID NO: 35274 - DNA, 19 bp, Artificial Sequence
  Synthetic
atgccacgcgactgtcccg

SEQ ID NO: 35275 - DNA, 24 bp, Artificial Sequence
  Synthetic
acactttctcgtgagtagggttag

SEQ ID NO: 35276 - DNA, 22 bp, Artificial Sequence
  Synthetic
cttcactttgaggcacttcagt

SEQ ID NO: 35277 - DNA, 22 bp, Artificial Sequence
  Synthetic
cgcggtgaaggtaatccatcaa

SEQ ID NO: 35278 - DNA, 22 bp, Artificial Sequence
  Synthetic
cctaggagggcgaactggtctt

SEQ ID NO: 35279 - DNA, 23 bp, Artificial Sequence
  Synthetic
accccatctagacctttcatcaa

SEQ ID NO: 35280 - DNA, 23 bp, Artificial Sequence
  Synthetic
acgaaagtttctggtgtcaaact

SEQ ID NO: 35281 - DNA, 20 bp, Artificial Sequence
  Synthetic
ctcctccatacatgcgggcg

SEQ ID NO: 35282 - DNA, 20 bp, Artificial Sequence
  Synthetic
cgcggcgacttcttcctctt

SEQ ID NO: 35283 - DNA, 22 bp, Artificial Sequence
  Synthetic
agttgcattgtaggctgcaatt

SEQ ID NO: 35284 - DNA, 18 bp, Artificial Sequence
  Synthetic
tgtggctcggcgctgaaa

SEQ ID NO: 35285 - DNA, 22 bp, Artificial Sequence
  Synthetic
gccatgtctaacacgcggttgt

SEQ ID NO: 35286 - DNA, 20 bp, Artificial Sequence
  Synthetic
agtaccgtgttctgtctccc

SEQ ID NO: 35287 - DNA, 21 bp, Artificial Sequence
  Synthetic
tcgtctggtaggtataagccc

SEQ ID NO: 35288 - DNA, 22 bp, Artificial Sequence
  Synthetic
gctcctgttcgcttgaacccat

SEQ ID NO: 35289 - DNA, 23 bp, Artificial Sequence
  Synthetic
agaaaacggtccttgtacagttt

SEQ ID NO: 35290 - DNA, 22 bp, Artificial Sequence
  Synthetic
ggcatcagcgtttgcagtacag

SEQ ID NO: 35291 - DNA, 20 bp, Artificial Sequence
  Synthetic
tcacatgcgacatgggcaaa

SEQ ID NO: 35292 - DNA, 21 bp, Artificial Sequence
  Synthetic
gcgaaggggagcttagatgcc

SEQ ID NO: 35293 - DNA, 20 bp, Artificial Sequence
  Synthetic
cagcccctagtttcagcttg

SEQ ID NO: 35294 - DNA, 21 bp, Artificial Sequence
  Synthetic
gcccaagttctgctcaaccgg

SEQ ID NO: 35295 - DNA, 25 bp, Artificial Sequence
  Synthetic
gaaaatatggtatgttgccagtgct

SEQ ID NO: 35296 - DNA, 22 bp, Artificial Sequence
  Synthetic
tcaatgggttgggctcgcttaa

SEQ ID NO: 35297 - DNA, 21 bp, Artificial Sequence
  Synthetic
catcccagtttgccaggtatg

SEQ ID NO: 35298 - DNA, 23 bp, Artificial Sequence
  Synthetic
gcatttcgaaggtaccaatgact

SEQ ID NO: 35299 - DNA, 22 bp, Artificial Sequence
  Synthetic
gcctgcttgcgattcttaccca

SEQ ID NO: 35300 - DNA, 20 bp, Artificial Sequence
  Synthetic
ccgggctcgtaccccattca

SEQ ID NO: 35301 - DNA, 25 bp, Artificial Sequence
  Synthetic
caaccttattggggtaatcagagtt

SEQ ID NO: 35302 - DNA, 23 bp, Artificial Sequence
  Synthetic
aactaaaattaaggcgcgcatac

SEQ ID NO: 35303 - DNA, 22 bp, Artificial Sequence
  Synthetic
tggggtctgcagtagcaacaga

SEQ ID NO: 35304 - DNA, 20 bp, Artificial Sequence
  Synthetic
agaagttctcattcccccgg

SEQ ID NO: 35305 - DNA, 24 bp, Artificial Sequence
  Synthetic
aaacactaaatgcactcctacagt

SEQ ID NO: 35306 - DNA, 25 bp, Artificial Sequence
  Synthetic
ggtaatgtaagaaaaggagcaggat

SEQ ID NO: 35307 - DNA, 20 bp, Artificial Sequence
  Synthetic
tggacctggttttggatggg

SEQ ID NO: 35308 - DNA, 21 bp, Artificial Sequence
  Synthetic
aaatccttgctgaccgtcttg

SEQ ID NO: 35309 - DNA, 20 bp, Artificial Sequence
  Synthetic
atgtcagctgcgagaccaag

SEQ ID NO: 35310 - DNA, 24 bp, Artificial Sequence
  Synthetic
gcttatgtgttattttctcctgcg

SEQ ID NO: 35311 - DNA, 21 bp, Artificial Sequence
  Synthetic
ctcacttttcgcctcgggtga

SEQ ID NO: 35312 - DNA, 22 bp, Artificial Sequence
  Synthetic
catcagccacgggttgagtgaa

SEQ ID NO: 35313 - DNA, 22 bp, Artificial Sequence
  Synthetic
gtggcgttgcattgagtgtgaa

SEQ ID NO: 35314 - DNA, 21 bp, Artificial Sequence
  Synthetic
gctaatccaggggacaacaag

SEQ ID NO: 35315 - DNA, 22 bp, Artificial Sequence
  Synthetic
gaaagttctccactgtagcctc

SEQ ID NO: 35316 - DNA, 20 bp, Artificial Sequence
  Synthetic
ggtggtcgaggaatccaagc

SEQ ID NO: 35317 - DNA, 20 bp, Artificial Sequence
  Synthetic
tttgccaccacaatctcccg

SEQ ID NO: 35318 - DNA, 23 bp, Artificial Sequence
  Synthetic
caacatcatccatgatcaccact

SEQ ID NO: 35319 - DNA, 21 bp, Artificial Sequence
  Synthetic
cagaccctggaatatggcagt

SEQ ID NO: 35320 - DNA, 24 bp, Artificial Sequence
  Synthetic
agaactttggtttcaacaccatca

SEQ ID NO: 35321 - DNA, 21 bp, Artificial Sequence
  Synthetic
ggggtacagcttagagtgctc

SEQ ID NO: 35322 - DNA, 20 bp, Artificial Sequence
  Synthetic
gtgctgggtcaagttcctct

SEQ ID NO: 35323 - DNA, 20 bp, Artificial Sequence
  Synthetic
cctcctcactcagcaggttt

SEQ ID NO: 35324 - DNA, 25 bp, Artificial Sequence
  Synthetic
tcccttctaagtcaaaattgtctgt

SEQ ID NO: 35325 - DNA, 20 bp, Artificial Sequence
  Synthetic
tcaattcagcgactgcctgc

SEQ ID NO: 35326 - DNA, 22 bp, Artificial Sequence
  Synthetic
tgctgtgggtacacttcgtaat

SEQ ID NO: 35327 - DNA, 20 bp, Artificial Sequence
  Synthetic
gaaacgtgcgactagggact

SEQ ID NO: 35328 - DNA, 22 bp, Artificial Sequence
  Synthetic
cgtcgtagtcgtactccctcgg

SEQ ID NO: 35329 - DNA, 23 bp, Artificial Sequence
  Synthetic
gggattatttctgagggtcccaa

SEQ ID NO: 35330 - DNA, 23 bp, Artificial Sequence
  Synthetic
gaggttctataggggacacatct

SEQ ID NO: 35331 - DNA, 20 bp, Artificial Sequence
  Synthetic
cgtgctcttcctattgcacg

SEQ ID NO: 35332 - DNA, 24 bp, Artificial Sequence
  Synthetic
tccaagcctgctaactctaatttg

SEQ ID NO: 35333 - DNA, 20 bp, Artificial Sequence
  Synthetic
gtctgacacagtccggccac

SEQ ID NO: 35334 - DNA, 23 bp, Artificial Sequence
  Synthetic
ggttactcagaacaacaattggc

SEQ ID NO: 35335 - DNA, 21 bp, Artificial Sequence
  Synthetic
tgaggaggacgcgtaacgagt

SEQ ID NO: 35336 - DNA, 20 bp, Artificial Sequence
  Synthetic
agcgatgtgacgtcgttgtt

SEQ ID NO: 35337 - DNA, 21 bp, Artificial Sequence
  Synthetic
tctccatcatctctgcaaggc

SEQ ID NO: 35338 - DNA, 23 bp, Artificial Sequence
  Synthetic
ctcattaccaccaacaggtagac

SEQ ID NO: 35339 - DNA, 20 bp, Artificial Sequence
  Synthetic
gcagtagtgaaagctggcaa

SEQ ID NO: 35340 - DNA, 23 bp, Artificial Sequence
  Synthetic
cttttctcttctgccatcattgc

SEQ ID NO: 35341 - DNA, 24 bp, Artificial Sequence
  Synthetic
gcatttgcactttccataatgcct

SEQ ID NO: 35342 - DNA, 20 bp, Artificial Sequence
  Synthetic
tgtacacccagacccctcat

SEQ ID NO: 35343 - DNA, 21 bp, Artificial Sequence
  Synthetic
gcttccgcctctgtatgttcc

SEQ ID NO: 35344 - DNA, 20 bp, Artificial Sequence
  Synthetic
cccactgcaccatttctgtt

SEQ ID NO: 35345 - DNA, 24 bp, Artificial Sequence
  Synthetic
tgcatttgcatttcaatggcatta

SEQ ID NO: 35346 - DNA, 25 bp, Artificial Sequence
  Synthetic
gcctttgttcctcactatcatatgt

SEQ ID NO: 35347 - DNA, 25 bp, Artificial Sequence
  Synthetic
gcagtgttagtactagcacagatgt

SEQ ID NO: 35348 - DNA, 22 bp, Artificial Sequence
  Synthetic
agtaccaggaacaggggtactg

SEQ ID NO: 35349 - DNA, 24 bp, Artificial Sequence
  Synthetic
acaggtcattaggaagtgacaatg

SEQ ID NO: 35350 - DNA, 21 bp, Artificial Sequence
  Synthetic
acataagcatccgtggcaaca

SEQ ID NO: 35351 - DNA, 20 bp, Artificial Sequence
  Synthetic
tagcaccaaagcctgtgtca

SEQ ID NO: 35352 - DNA, 25 bp, Artificial Sequence
  Synthetic
atggcttattaaacaattgtgcctc

SEQ ID NO: 35353 - DNA, 21 bp, Artificial Sequence
  Synthetic
gtggttggcaggatatgatgc

SEQ ID NO: 35354 - DNA, 20 bp, Artificial Sequence
  Synthetic
gccaacgatctggccaccac

SEQ ID NO: 35355 - DNA, 22 bp, Artificial Sequence
  Synthetic
gcgtgactgattcccctctctc

SEQ ID NO: 35356 - DNA, 18 bp, Artificial Sequence
  Synthetic
ttgcagcacgcgagccgt

SEQ ID NO: 35357 - DNA, 21 bp, Artificial Sequence
  Synthetic
gctccaagccacagacttccc

SEQ ID NO: 35358 - DNA, 18 bp, Artificial Sequence
  Synthetic
agcagcagctgggaaccg

SEQ ID NO: 35359 - DNA, 22 bp, Artificial Sequence
  Synthetic
cgcgcacgttgaaggatggaat

SEQ ID NO: 35360 - DNA, 21 bp, Artificial Sequence
  Synthetic
gcgccccagacgatgactttc

SEQ ID NO: 35361 - DNA, 18 bp, Artificial Sequence
  Synthetic
cgagtacacaccgccgca

SEQ ID NO: 35362 - DNA, 20 bp, Artificial Sequence
  Synthetic
tcgccttgccgtaaaagggt

SEQ ID NO: 35363 - DNA, 21 bp, Artificial Sequence
  Synthetic
cgacaccgtcgcttggtaagc

SEQ ID NO: 35364 - DNA, 20 bp, Artificial Sequence
  Synthetic
atgacagcaggttggcccga

SEQ ID NO: 35365 - DNA, 22 bp, Artificial Sequence
  Synthetic
gcataccacctccaccaccaat

SEQ ID NO: 35366 - DNA, 20 bp, Artificial Sequence
  Synthetic
gagctctggggccggaactt

SEQ ID NO: 35367 - DNA, 21 bp, Artificial Sequence
  Synthetic
cgaaagctgactcgccgagga

SEQ ID NO: 35368 - DNA, 18 bp, Artificial Sequence
  Synthetic
agagcgcaaccgtggacg

SEQ ID NO: 35369 - DNA, 20 bp, Artificial Sequence
  Synthetic
cgacgtcctccgatccgcta

SEQ ID NO: 35370 - DNA, 21 bp, Artificial Sequence
  Synthetic
ccccattgggtcgttcttcga

SEQ ID NO: 35371 - DNA, 20 bp, Artificial Sequence
  Synthetic
ccaaagtagtcggtcccgtc

SEQ ID NO: 35372 - DNA, 21 bp, Artificial Sequence
  Synthetic
gcaccagcctttagaacctgt

SEQ ID NO: 35373 - DNA, 21 bp, Artificial Sequence
  Synthetic
acctgctcattttgcctgttt

SEQ ID NO: 35374 - DNA, 22 bp, Artificial Sequence
  Synthetic
tgcagaccaatatcccagacaa

SEQ ID NO: 35375 - DNA, 20 bp, Artificial Sequence
  Synthetic
tcttttggatttcggggcac

SEQ ID NO: 35376 - DNA, 22 bp, Artificial Sequence
  Synthetic
tcttggaatccatgcttcaacg

SEQ ID NO: 35377 - DNA, 22 bp, Artificial Sequence
  Synthetic
gtgtggtattgtttctgcacca

SEQ ID NO: 35378 - DNA, 24 bp, Artificial Sequence
  Synthetic
actaccttcagctgttaacaatcc

SEQ ID NO: 35379 - DNA, 20 bp, Artificial Sequence
  Synthetic
gctagagtggccgtaacagt

SEQ ID NO: 35380 - DNA, 21 bp, Artificial Sequence
  Synthetic
tgatttaccagaaccgggtgt

SEQ ID NO: 35381 - DNA, 20 bp, Artificial Sequence
  Synthetic
ctgccattgttacagggcca

SEQ ID NO: 35382 - DNA, 25 bp, Artificial Sequence
  Synthetic
tgtaattttgacttagttgccgtgt

SEQ ID NO: 35383 - DNA, 23 bp, Artificial Sequence
  Synthetic
tcattcaaactggaggcttcaat

SEQ ID NO: 35384 - DNA, 21 bp, Artificial Sequence
  Synthetic
cgtctccgtccttgatcgcat

SEQ ID NO: 35385 - DNA, 21 bp, Artificial Sequence
  Synthetic
acattccgccaatggcatccg

SEQ ID NO: 35386 - DNA, 22 bp, Artificial Sequence
  Synthetic
acaaagtggtggatccaaccgg

SEQ ID NO: 35387 - DNA, 25 bp, Artificial Sequence
  Synthetic
tccaaatgaatatgctttctcggta

SEQ ID NO: 35388 - DNA, 21 bp, Artificial Sequence
  Synthetic
tgtctgtgtccccgagggttt

SEQ ID NO: 35389 - DNA, 22 bp, Artificial Sequence
  Synthetic
tggctacttccaacctcttcag

SEQ ID NO: 35390 - DNA, 22 bp, Artificial Sequence
  Synthetic
gaacagtgtcaataaaccggct

SEQ ID NO: 35391 - DNA, 22 bp, Artificial Sequence
  Synthetic
acattttgataggccgttggat

SEQ ID NO: 35392 - DNA, 20 bp, Artificial Sequence
  Synthetic
ctctagaggggcatcagcac

SEQ ID NO: 35393 - DNA, 22 bp, Artificial Sequence
  Synthetic
agcgatcctgcaaatcaatgtc

SEQ ID NO: 35394 - DNA, 22 bp, Artificial Sequence
  Synthetic
tctaacccaccgaaaacggtta

SEQ ID NO: 35395 - DNA, 20 bp, Artificial Sequence
  Synthetic
cacagcattcgcaagggcag

SEQ ID NO: 35396 - DNA, 18 bp, Artificial Sequence
  Synthetic
aacatcacgcccggcagg

SEQ ID NO: 35397 - DNA, 21 bp, Artificial Sequence
  Synthetic
gcgtaaagccgcgtcatacca

SEQ ID NO: 35398 - DNA, 21 bp, Artificial Sequence
  Synthetic
ggctgccgtgagtaagaggac

SEQ ID NO: 35399 - DNA, 20 bp, Artificial Sequence
  Synthetic
gatgaaagccggccgagagc

SEQ ID NO: 35400 - DNA, 19 bp, Artificial Sequence
  Synthetic
aagagcaggcggcgatgcc

SEQ ID NO: 35401 - DNA, 21 bp, Artificial Sequence
  Synthetic
caggagcgacggcgtgaatta

SEQ ID NO: 35402 - DNA, 19 bp, Artificial Sequence
  Synthetic
actctggcggcagtgtgcg

SEQ ID NO: 35403 - DNA, 21 bp, Artificial Sequence
  Synthetic
catagggtatgcgccacggat

SEQ ID NO: 35404 - DNA, 22 bp, Artificial Sequence
  Synthetic
ggcctggtgcgtcaatgatgac

SEQ ID NO: 35405 - DNA, 20 bp, Artificial Sequence
  Synthetic
cctggcccttctcgaccatg

SEQ ID NO: 35406 - DNA, 19 bp, Artificial Sequence
  Synthetic
taccgggggtgaggttgcg

SEQ ID NO: 35407 - DNA, 20 bp, Artificial Sequence
  Synthetic
ctggtcatactcggcagcgg

SEQ ID NO: 35408 - DNA, 20 bp, Artificial Sequence
  Synthetic
atagcaacccgatgcccagc

SEQ ID NO: 35409 - DNA, 21 bp, Artificial Sequence
  Synthetic
tctactgggggtatggatgct

SEQ ID NO: 35410 - DNA, 22 bp, Artificial Sequence
  Synthetic
cgttcctgttgctttttttgga

SEQ ID NO: 35411 - DNA, 21 bp, Artificial Sequence
  Synthetic
cgagatacgagacgcgcttaa

SEQ ID NO: 35412 - DNA, 20 bp, Artificial Sequence
  Synthetic
agttggaatgatccccgctg

SEQ ID NO: 35413 - DNA, 20 bp, Artificial Sequence
  Synthetic
tgaacacatttcgcgcgttt

SEQ ID NO: 35414 - DNA, 23 bp, Artificial Sequence
  Synthetic
cccgtttaaaatgccaactggat

SEQ ID NO: 35415 - DNA, 21 bp, Artificial Sequence
  Synthetic
ggagacggtgttggaggggag

SEQ ID NO: 35416 - DNA, 18 bp, Artificial Sequence
  Synthetic
ttgcaaggacctcgcgcg

SEQ ID NO: 35417 - DNA, 19 bp, Artificial Sequence
  Synthetic
acacctcgcgtccctggac

SEQ ID NO: 35418 - DNA, 20 bp, Artificial Sequence
  Synthetic
tttctttccccctggcctta

SEQ ID NO: 35419 - DNA, 22 bp, Artificial Sequence
  Synthetic
tggatgcactctatcccattct

SEQ ID NO: 35420 - DNA, 20 bp, Artificial Sequence
  Synthetic
tccctgtggaagcacattgt

SEQ ID NO: 35421 - DNA, 20 bp, Artificial Sequence
  Synthetic
ctggcagcactataggctgt

SEQ ID NO: 35422 - DNA, 23 bp, Artificial Sequence
  Synthetic
tctcatgttcatcttgggcctta

SEQ ID NO: 35423 - DNA, 21 bp, Artificial Sequence
  Synthetic
gctgtttcctgccctgtttct

SEQ ID NO: 35424 - DNA, 23 bp, Artificial Sequence
  Synthetic
tgagggctttcatagtgatgtct

SEQ ID NO: 35425 - DNA, 24 bp, Artificial Sequence
  Synthetic
tgtcctgcttgatattcacaccta

SEQ ID NO: 35426 - DNA, 20 bp, Artificial Sequence
  Synthetic
cctgcccaagtatccccata

SEQ ID NO: 35427 - DNA, 24 bp, Artificial Sequence
  Synthetic
gtgtacattgtactgtgctgacat

SEQ ID NO: 35428 - DNA, 21 bp, Artificial Sequence
  Synthetic
gtactccggatgcagctctcg

SEQ ID NO: 35429 - DNA, 19 bp, Artificial Sequence
  Synthetic
tcctccgagtcgctgctgg

SEQ ID NO: 35430 - DNA, 21 bp, Artificial Sequence
  Synthetic
ggtcgccatatgcttcacgcc

SEQ ID NO: 35431 - DNA, 20 bp, Artificial Sequence
  Synthetic
tgtcattttccggggctgcg

SEQ ID NO: 35432 - DNA, 22 bp, Artificial Sequence
  Synthetic
cagcagctggacgtgttctact

SEQ ID NO: 35433 - DNA, 20 bp, Artificial Sequence
  Synthetic
tcgtgaagacccagggggag

SEQ ID NO: 35434 - DNA, 19 bp, Artificial Sequence
  Synthetic
acaggcgctcgaggtcctg

SEQ ID NO: 35435 - DNA, 20 bp, Artificial Sequence
  Synthetic
acatcagcaggcagacgagc

SEQ ID NO: 35436 - DNA, 19 bp, Artificial Sequence
  Synthetic
gcgtcgtggcatggaagcc

SEQ ID NO: 35437 - DNA, 19 bp, Artificial Sequence
  Synthetic
acgtgaccgacggcccctt

SEQ ID NO: 35438 - DNA, 19 bp, Artificial Sequence
  Synthetic
cctaaacgtcgcccccgtc

SEQ ID NO: 35439 - DNA, 22 bp, Artificial Sequence
  Synthetic
cgggtggtcatctacacaacgg

SEQ ID NO: 35440 - DNA, 18 bp, Artificial Sequence
  Synthetic
gctcgggttctcgctgca

SEQ ID NO: 35441 - DNA, 19 bp, Artificial Sequence
  Synthetic
aggcgcggctaaagtcccg

SEQ ID NO: 35442 - DNA, 18 bp, Artificial Sequence
  Synthetic
agcggtgcagggcctgaa

SEQ ID NO: 35443 - DNA, 20 bp, Artificial Sequence
  Synthetic
gggttcaatcgccgcctctg

SEQ ID NO: 35444 - DNA, 19 bp, Artificial Sequence
  Synthetic
tgggcgccatggacctgac

SEQ ID NO: 35445 - DNA, 19 bp, Artificial Sequence
  Synthetic
tccgttctcacgcgctggg

SEQ ID NO: 35446 - DNA, 19 bp, Artificial Sequence
  Synthetic
gtacacgttgccgttcgcg

SEQ ID NO: 35447 - DNA, 21 bp, Artificial Sequence
  Synthetic
gctggaggaccacgagtttgt

SEQ ID NO: 35448 - DNA, 19 bp, Artificial Sequence
  Synthetic
gcttcatcatgggcgcggg

SEQ ID NO: 35449 - DNA, 19 bp, Artificial Sequence
  Synthetic
gccgcgagcatcttcgtgg

SEQ ID NO: 35450 - DNA, 20 bp, Artificial Sequence
  Synthetic
gtaggggttgcagggcacat

SEQ ID NO: 35451 - DNA, 19 bp, Artificial Sequence
  Synthetic
gtggcgaccgtcaagtccc

SEQ ID NO: 35452 - DNA, 19 bp, Artificial Sequence
  Synthetic
atgatgctggcggtgccgg

SEQ ID NO: 35453 - DNA, 18 bp, Artificial Sequence
  Synthetic
ttgtcgttgccgcgggtg

SEQ ID NO: 35454 - DNA, 19 bp, Artificial Sequence
  Synthetic
accgagagcgacgcctgac

SEQ ID NO: 35455 - DNA, 20 bp, Artificial Sequence
  Synthetic
ccagcggttcaggatgctga

SEQ ID NO: 35456 - DNA, 18 bp, Artificial Sequence
  Synthetic
actggctgcccgatccga

SEQ ID NO: 35457 - DNA, 19 bp, Artificial Sequence
  Synthetic
tacactaccgcggtcccgg

SEQ ID NO: 35458 - DNA, 19 bp, Artificial Sequence
  Synthetic
ccccatcggcattccggtt

SEQ ID NO: 35459 - DNA, 21 bp, Artificial Sequence
  Synthetic
taacctccacgggagccgcaa

SEQ ID NO: 35460 - DNA, 19 bp, Artificial Sequence
  Synthetic
tggaggacgcggatctccc

SEQ ID NO: 35461 - DNA, 19 bp, Artificial Sequence
  Synthetic
agaaaggtccgggccgtcg

SEQ ID NO: 35462 - DNA, 21 bp, Artificial Sequence
  Synthetic
agaaaccaaccgacgaccacc

SEQ ID NO: 35463 - DNA, 19 bp, Artificial Sequence
  Synthetic
gacgtgggtgatgtccggg

SEQ ID NO: 35464 - DNA, 19 bp, Artificial Sequence
  Synthetic
gcgaatccccaccatggcg

SEQ ID NO: 35465 - DNA, 21 bp, Artificial Sequence
  Synthetic
tacctttccctagcggccccg

SEQ ID NO: 35466 - DNA, 19 bp, Artificial Sequence
  Synthetic
gcgcaacacgtgtcccctg

SEQ ID NO: 35467 - DNA, 17 bp, Artificial Sequence
  Synthetic
acgcagcgcccgtgttt

SEQ ID NO: 35468 - DNA, 22 bp, Artificial Sequence
  Synthetic
tgctaaggcgtatttggcgcag

SEQ ID NO: 35469 - DNA, 20 bp, Artificial Sequence
  Synthetic
gcaggcacgttccagcactg

SEQ ID NO: 35470 - DNA, 19 bp, Artificial Sequence
  Synthetic
tcgcgctgccgacccatac

SEQ ID NO: 35471 - DNA, 23 bp, Artificial Sequence
  Synthetic
acagtcctaccatacatcgaaca

SEQ ID NO: 35472 - DNA, 20 bp, Artificial Sequence
  Synthetic
aatagtaggcggccacaacc

SEQ ID NO: 35473 - DNA, 24 bp, Artificial Sequence
  Synthetic
tgttttataccccctgtacccata

SEQ ID NO: 35474 - DNA, 24 bp, Artificial Sequence
  Synthetic
ggttttcgggatcattgtcaaaca

SEQ ID NO: 35475 - DNA, 20 bp, Artificial Sequence
  Synthetic
cacagcttttctgcgtgtgc

SEQ ID NO: 35476 - DNA, 19 bp, Artificial Sequence
  Synthetic
actgtgccaccgccaccac

SEQ ID NO: 35477 - DNA, 20 bp, Artificial Sequence
  Synthetic
ctactgaggcgacgcacgtc

SEQ ID NO: 35478 - DNA, 20 bp, Artificial Sequence
  Synthetic
tagtcccctcaccggattgc

SEQ ID NO: 35479 - DNA, 20 bp, Artificial Sequence
  Synthetic
tgcgtctcacgtattcctct

SEQ ID NO: 35480 - DNA, 23 bp, Artificial Sequence
  Synthetic
tgttacaccaatacctaagggct

SEQ ID NO: 35481 - DNA, 20 bp, Artificial Sequence
  Synthetic
atgaagaagcatccccctca

SEQ ID NO: 35482 - DNA, 22 bp, Artificial Sequence
  Synthetic
tgggtcagtggaggtatcatct

SEQ ID NO: 35483 - DNA, 23 bp, Artificial Sequence
  Synthetic
actcagatctgctacagaatgct

SEQ ID NO: 35484 - DNA, 20 bp, Artificial Sequence
  Synthetic
gtgcatcgaaacgctctgtc

SEQ ID NO: 35485 - DNA, 20 bp, Artificial Sequence
  Synthetic
ttcgggcctatttccacacc

SEQ ID NO: 35486 - DNA, 20 bp, Artificial Sequence
  Synthetic
cgctgtaggtctgcttggag

SEQ ID NO: 35487 - DNA, 22 bp, Artificial Sequence
  Synthetic
tcgtttctgcaaacagtgtcat

SEQ ID NO: 35488 - DNA, 22 bp, Artificial Sequence
  Synthetic
aggttgtagaggagtcgtcccg

SEQ ID NO: 35489 - DNA, 22 bp, Artificial Sequence
  Synthetic
tcgtgctccaacttgtgaagca

SEQ ID NO: 35490 - DNA, 23 bp, Artificial Sequence
  Synthetic
tcgaaggagcctaaagaaaaagc

SEQ ID NO: 35491 - DNA, 22 bp, Artificial Sequence
  Synthetic
ggacgaataccagtggtaaccc

SEQ ID NO: 35492 - DNA, 23 bp, Artificial Sequence
  Synthetic
cctgtaccagcattaacatccac

SEQ ID NO: 35493 - DNA, 24 bp, Artificial Sequence
  Synthetic
ggttgttccactatatctggtgtc

SEQ ID NO: 35494 - DNA, 22 bp, Artificial Sequence
  Synthetic
cccaatgtttccaacgcaatga

SEQ ID NO: 35495 - DNA, 20 bp, Artificial Sequence
  Synthetic
caaaggtcctccccttccaa

SEQ ID NO: 35496 - DNA, 23 bp, Artificial Sequence
  Synthetic
tgtcatcatttgagctgccttag

SEQ ID NO: 35497 - DNA, 25 bp, Artificial Sequence
  Synthetic
ttaacttttactccggaaccagaaa

SEQ ID NO: 35498 - DNA, 24 bp, Artificial Sequence
  Synthetic
tgttgcaacaattcttcctgatga

SEQ ID NO: 35499 - DNA, 20 bp, Artificial Sequence
  Synthetic
cggtaaaagcgttcagcctc

SEQ ID NO: 35500 - DNA, 22 bp, Artificial Sequence
  Synthetic
agctgcggacttttgattaact

SEQ ID NO: 35501 - DNA, 25 bp, Artificial Sequence
  Synthetic
ccaacaaacaccagacaattcttct

SEQ ID NO: 35502 - DNA, 20 bp, Artificial Sequence
  Synthetic
cttgcagtgcaacgaaacgt

SEQ ID NO: 35503 - DNA, 20 bp, Artificial Sequence
  Synthetic
ctggaggacagttgccagta

SEQ ID NO: 35504 - DNA, 21 bp, Artificial Sequence
  Synthetic
ggcaagtgcaaaacgttttgg

SEQ ID NO: 35505 - DNA, 24 bp, Artificial Sequence
  Synthetic
ccgggttaaaaagtcaacattgtc

SEQ ID NO: 35506 - DNA, 20 bp, Artificial Sequence
  Synthetic
gtagtgcacacgaggaccta

SEQ ID NO: 35507 - DNA, 23 bp, Artificial Sequence
  Synthetic
ccagtttgttgttgccataatgc

SEQ ID NO: 35508 - DNA, 25 bp, Artificial Sequence
  Synthetic
ggcaaatttatttggatcaggcaat

SEQ ID NO: 35509 - DNA, 20 bp, Artificial Sequence
  Synthetic
ttcgcctgatctccaacaca

SEQ ID NO: 35510 - DNA, 24 bp, Artificial Sequence
  Synthetic
ctctatactctgaggaggaggagg

SEQ ID NO: 35511 - DNA, 21 bp, Artificial Sequence
  Synthetic
gacagctggattacttcgctg

SEQ ID NO: 35512 - DNA, 20 bp, Artificial Sequence
  Synthetic
ctagcacatgcgtcagcttt

SEQ ID NO: 35513 - DNA, 20 bp, Artificial Sequence
  Synthetic
ccacacgaggtgtcaactct

SEQ ID NO: 35514 - DNA, 21 bp, Artificial Sequence
  Synthetic
acccgtttgtgctttcttcaa

SEQ ID NO: 35515 - DNA, 22 bp, Artificial Sequence
  Synthetic
gcctctacctgcaaaagttcat

SEQ ID NO: 35516 - DNA, 20 bp, Artificial Sequence
  Synthetic
aaagccaccagttcccttcc

SEQ ID NO: 35517 - DNA, 23 bp, Artificial Sequence
  Synthetic
cctcctcaattgcaaattcagca

SEQ ID NO: 35518 - DNA, 25 bp, Artificial Sequence
  Synthetic
tctgcagaattgtgaataggaaagt

SEQ ID NO: 35519 - DNA, 20 bp, Artificial Sequence
  Synthetic
tgtgccgctggatattcaac

SEQ ID NO: 35520 - DNA, 25 bp, Artificial Sequence
  Synthetic
aacatttttgtggctacaaatgcca

SEQ ID NO: 35521 - DNA, 20 bp, Artificial Sequence
  Synthetic
attccggccacttgtctagc

SEQ ID NO: 35522 - DNA, 22 bp, Artificial Sequence
  Synthetic
ccgtggggaattcctagcctca

SEQ ID NO: 35523 - DNA, 20 bp, Artificial Sequence
  Synthetic
atcgggcaacttccaacacc

SEQ ID NO: 35524 - DNA, 24 bp, Artificial Sequence
  Synthetic
gcaacttcaacagtgtctagatca

SEQ ID NO: 35525 - DNA, 24 bp, Artificial Sequence
  Synthetic
tctgctcattttgtctatctgcat

SEQ ID NO: 35526 - DNA, 22 bp, Artificial Sequence
  Synthetic
acatgtgttcccaacattgctt

SEQ ID NO: 35527 - DNA, 20 bp, Artificial Sequence
  Synthetic
catgcacacaagctgctctg

SEQ ID NO: 35528 - DNA, 20 bp, Artificial Sequence
  Synthetic
cttagggttaggtgcaccgg

SEQ ID NO: 35529 - DNA, 21 bp, Artificial Sequence
  Synthetic
tgcagtgggggatagtttctg

SEQ ID NO: 35530 - DNA, 21 bp, Artificial Sequence
  Synthetic
caccagctgttaacaatccga

SEQ ID NO: 35531 - DNA, 25 bp, Artificial Sequence
  Synthetic
tgtctagttgctttagtttgctaca

SEQ ID NO: 35532 - DNA, 20 bp, Artificial Sequence
  Synthetic
acctggtgtgccgtgtatta

SEQ ID NO: 35533 - DNA, 22 bp, Artificial Sequence
  Synthetic
caagctcgacaatcatcggatt

SEQ ID NO: 35534 - DNA, 21 bp, Artificial Sequence
  Synthetic
ggagccacatcttctccaatc

SEQ ID NO: 35535 - DNA, 21 bp, Artificial Sequence
  Synthetic
tcacaaagtttaccacgtcgg

SEQ ID NO: 35536 - DNA, 21 bp, Artificial Sequence
  Synthetic
gccatatggtccacagttgtt

SEQ ID NO: 35537 - DNA, 24 bp, Artificial Sequence
  Synthetic
gctccttcttcttttccttggtaa

SEQ ID NO: 35538 - DNA, 20 bp, Artificial Sequence
  Synthetic
gggtctgctgatactgttgc

SEQ ID NO: 35539 - DNA, 20 bp, Artificial Sequence
  Synthetic
gcctcaggagttgatgcatg

SEQ ID NO: 35540 - DNA, 23 bp, Artificial Sequence
  Synthetic
tcactaacctcttcaggagacag

SEQ ID NO: 35541 - DNA, 25 bp, Artificial Sequence
  Synthetic
gctgctgcaaatggtaatagcttta

SEQ ID NO: 35542 - DNA, 24 bp, Artificial Sequence
  Synthetic
acccacttaaacaatggttacacc

SEQ ID NO: 35543 - DNA, 21 bp, Artificial Sequence
  Synthetic
agttggggtcccagacgaaga

SEQ ID NO: 35544 - DNA, 21 bp, Artificial Sequence
  Synthetic
cgtgcaactgatcgatggcta

SEQ ID NO: 35545 - DNA, 25 bp, Artificial Sequence
  Synthetic
aactcagttgtcacatctatggttt

SEQ ID NO: 35546 - DNA, 21 bp, Artificial Sequence
  Synthetic
gccaacagtcaacagtctgtc

SEQ ID NO: 35547 - DNA, 23 bp, Artificial Sequence
  Synthetic
ctgtcaaataacggatgaccagt

SEQ ID NO: 35548 - DNA, 22 bp, Artificial Sequence
  Synthetic
gccatggctagacgctttctgc

SEQ ID NO: 35549 - DNA, 22 bp, Artificial Sequence
  Synthetic
ccgggaacttgacgtccattgg

SEQ ID NO: 35550 - DNA, 20 bp, Artificial Sequence
  Synthetic
aagccgttctgagcaacccg

SEQ ID NO: 35551 - DNA, 21 bp, Artificial Sequence
  Synthetic
aggcaagatagcaagctgcgt

SEQ ID NO: 35552 - DNA, 19 bp, Artificial Sequence
  Synthetic
acgacgagccgctccaatg

SEQ ID NO: 35553 - DNA, 21 bp, Artificial Sequence
  Synthetic
caccgttgatagtggtcgcca

SEQ ID NO: 35554 - DNA, 19 bp, Artificial Sequence
  Synthetic
acacggccgccctgaagag

SEQ ID NO: 35555 - DNA, 22 bp, Artificial Sequence
  Synthetic
gctcctcctgaacatcccccat

SEQ ID NO: 35556 - DNA, 22 bp, Artificial Sequence
  Synthetic
gtctttccccctgcgagacaaa

SEQ ID NO: 35557 - DNA, 22 bp, Artificial Sequence
  Synthetic
gggtcggcttaagtctggtgag

SEQ ID NO: 35558 - DNA, 21 bp, Artificial Sequence
  Synthetic
cagcaatttgagccccgcatg

SEQ ID NO: 35559 - DNA, 21 bp, Artificial Sequence
  Synthetic
ctaagcaggggtttgcagggt

SEQ ID NO: 35560 - DNA, 22 bp, Artificial Sequence
  Synthetic
tgaggtgctagtgtcctccaca

SEQ ID NO: 35561 - DNA, 20 bp, Artificial Sequence
  Synthetic
acaattaaccgcgcgggctt

SEQ ID NO: 35562 - DNA, 22 bp, Artificial Sequence
  Synthetic
agttaaacatcgggccaccaca

SEQ ID NO: 35563 - DNA, 20 bp, Artificial Sequence
  Synthetic
gccatcgtgggctacggaga

SEQ ID NO: 35564 - DNA, 20 bp, Artificial Sequence
  Synthetic
tggctttgcgttgctcatct

SEQ ID NO: 35565 - DNA, 22 bp, Artificial Sequence
  Synthetic
gcctgaaccagctcttttaact

SEQ ID NO: 35566 - DNA, 20 bp, Artificial Sequence
  Synthetic
cgattccagccccttgagtg

SEQ ID NO: 35567 - DNA, 20 bp, Artificial Sequence
  Synthetic
tggggttgtagtctgggtcg

SEQ ID NO: 35568 - DNA, 25 bp, Artificial Sequence
  Synthetic
agtaataaaagtaggtggcagcttt

SEQ ID NO: 35569 - DNA, 21 bp, Artificial Sequence
  Synthetic
gaacaggttgcagtcccaatt

SEQ ID NO: 35570 - DNA, 23 bp, Artificial Sequence
  Synthetic
acatttcagcatcctgagcaaat

SEQ ID NO: 35571 - DNA, 22 bp, Artificial Sequence
  Synthetic
tggatccctagcttcttcttgt

SEQ ID NO: 35572 - DNA, 22 bp, Artificial Sequence
  Synthetic
ctagttttccttcccgcctcta

SEQ ID NO: 35573 - DNA, 25 bp, Artificial Sequence
  Synthetic
actgagctatagggtctacaaaagt

SEQ ID NO: 35574 - DNA, 24 bp, Artificial Sequence
  Synthetic
aaagtaaggatgaccaacggtaag

SEQ ID NO: 35575 - DNA, 22 bp, Artificial Sequence
  Synthetic
gctctgccagcaatgaaatgtt

SEQ ID NO: 35576 - DNA, 24 bp, Artificial Sequence
  Synthetic
aactgctttgtccatgttatttgg

SEQ ID NO: 35577 - DNA, 24 bp, Artificial Sequence
  Synthetic
tccacaatatcaagtgcaagatcc

SEQ ID NO: 35578 - DNA, 24 bp, Artificial Sequence
  Synthetic
ccactacagcctctacataaaacc

SEQ ID NO: 35579 - DNA, 21 bp, Artificial Sequence
  Synthetic
tggcaaagagtctccatcgtt

SEQ ID NO: 35580 - DNA, 25 bp, Artificial Sequence
  Synthetic
tgttggtgcagttaaatacacttca

SEQ ID NO: 35581 - DNA, 21 bp, Artificial Sequence
  Synthetic
gcaagtagacagtggcctcac

SEQ ID NO: 35582 - DNA, 23 bp, Artificial Sequence
  Synthetic
atcacctggatttactgcaacat

SEQ ID NO: 35583 - DNA, 25 bp, Artificial Sequence
  Synthetic
gtctggtacattttcaccaacagta

SEQ ID NO: 35584 - DNA, 20 bp, Artificial Sequence
  Synthetic
tcatcctcctcctctgagct

SEQ ID NO: 35585 - DNA, 20 bp, Artificial Sequence
  Synthetic
attgccttttccgcaagctc

SEQ ID NO: 35586 - DNA, 20 bp, Artificial Sequence
  Synthetic
tgggtttttcggctcctgtg

SEQ ID NO: 35587 - DNA, 20 bp, Artificial Sequence
  Synthetic
gttcgattggggcaacatct

SEQ ID NO: 35588 - DNA, 21 bp, Artificial Sequence
  Synthetic
gttgtccctcactctcctctt

SEQ ID NO: 35589 - DNA, 21 bp, Artificial Sequence
  Synthetic
ggaggccagattgctcaagtt

SEQ ID NO: 35590 - DNA, 25 bp, Artificial Sequence
  Synthetic
ttcgaacatgtacccttttcctaat

SEQ ID NO: 35591 - DNA, 20 bp, Artificial Sequence
  Synthetic
accaacgctcatgtcagctg

SEQ ID NO: 35592 - DNA, 21 bp, Artificial Sequence
  Synthetic
ggaatgtggaggttccggata

SEQ ID NO: 35593 - DNA, 20 bp, Artificial Sequence
  Synthetic
aggaaaaagctggcaacgac

SEQ ID NO: 35594 - DNA, 21 bp, Artificial Sequence
  Synthetic
gcagactaacatgcctagcac

SEQ ID NO: 35595 - DNA, 24 bp, Artificial Sequence
  Synthetic
ttggttcttcttgactcaccaaat

SEQ ID NO: 35596 - DNA, 22 bp, Artificial Sequence
  Synthetic
gtcggtcatcttagtgtcgttg

SEQ ID NO: 35597 - DNA, 25 bp, Artificial Sequence
  Synthetic
tgcggaggactgtttaagtactttc

SEQ ID NO: 35598 - DNA, 20 bp, Artificial Sequence
  Synthetic
tcctatacagtcacgcaccc

SEQ ID NO: 35599 - DNA, 20 bp, Artificial Sequence
  Synthetic
gctttatcctgggaagctgc

SEQ ID NO: 35600 - DNA, 20 bp, Artificial Sequence
  Synthetic
acccacccttaggaaccgtc

SEQ ID NO: 35601 - DNA, 22 bp, Artificial Sequence
  Synthetic
cagcaggactttcttgtggaat

SEQ ID NO: 35602 - DNA, 23 bp, Artificial Sequence
  Synthetic
ggagaaactttaggcacagtcat

SEQ ID NO: 35603 - DNA, 25 bp, Artificial Sequence
  Synthetic
gccaattagaaacatttgggtttgt

SEQ ID NO: 35604 - DNA, 24 bp, Artificial Sequence
  Synthetic
tgactcgaagacaggtaaatgaca

SEQ ID NO: 35605 - DNA, 21 bp, Artificial Sequence
  Synthetic
acaagcaggcaggcaggattt

SEQ ID NO: 35606 - DNA, 22 bp, Artificial Sequence
  Synthetic
tgacaaaaacgtctcctttgga

SEQ ID NO: 35607 - DNA, 24 bp, Artificial Sequence
  Synthetic
tccattatctggacctgaaattcc

SEQ ID NO: 35608 - DNA, 22 bp, Artificial Sequence
  Synthetic
gtctggaactgtgacttttggt

SEQ ID NO: 35609 - DNA, 25 bp, Artificial Sequence
  Synthetic
gctcaagtttctcacagatactcct

SEQ ID NO: 35610 - DNA, 21 bp, Artificial Sequence
  Synthetic
gtgtacctcttctgcccaaga

SEQ ID NO: 35611 - DNA, 21 bp, Artificial Sequence
  Synthetic
cagacactccaaagctgggca

SEQ ID NO: 35612 - DNA, 20 bp, Artificial Sequence
  Synthetic
gcctgtgctgtctctagctc

SEQ ID NO: 35613 - DNA, 21 bp, Artificial Sequence
  Synthetic
tcgtttttgggctcgcctata

SEQ ID NO: 35614 - DNA, 23 bp, Artificial Sequence
  Synthetic
ttcccaacgtattagttgccaat

SEQ ID NO: 35615 - DNA, 22 bp, Artificial Sequence
  Synthetic
acactgtcccatgctacatagg

SEQ ID NO: 35616 - DNA, 22 bp, Artificial Sequence
  Synthetic
tggtcgctatgttttcgcaatc

SEQ ID NO: 35617 - DNA, 20 bp, Artificial Sequence
  Synthetic
cagacagatggcaaaagcgg

SEQ ID NO: 35618 - DNA, 20 bp, Artificial Sequence
  Synthetic
agtgtccacaggctcaaagg

SEQ ID NO: 35619 - DNA, 23 bp, Artificial Sequence
  Synthetic
caaacaagtcattgtcctccgtg

SEQ ID NO: 35620 - DNA, 20 bp, Artificial Sequence
  Synthetic
aaaagctgctcacgccgtaa

SEQ ID NO: 35621 - DNA, 22 bp, Artificial Sequence
  Synthetic
ggtactgggagtggtatctacc

SEQ ID NO: 35622 - DNA, 25 bp, Artificial Sequence
  Synthetic
acaatatatagcccaacaagcaaca

SEQ ID NO: 35623 - DNA, 25 bp, Artificial Sequence
  Synthetic
ccctgattgttcaagtttctcacat

SEQ ID NO: 35624 - DNA, 20 bp, Artificial Sequence
  Synthetic
accaaaactgggaagctcca

SEQ ID NO: 35625 - DNA, 25 bp, Artificial Sequence
  Synthetic
gcacctttggtacatttgttcatct

SEQ ID NO: 35626 - DNA, 22 bp, Artificial Sequence
  Synthetic
ccggaccgatagacgtaccctt

SEQ ID NO: 35627 - DNA, 21 bp, Artificial Sequence
  Synthetic
cccccactggcattgtcaacc

SEQ ID NO: 35628 - DNA, 19 bp, Artificial Sequence
  Synthetic
aagctctccgggctgggag

SEQ ID NO: 35629 - DNA, 21 bp, Artificial Sequence
  Synthetic
gggggcagactctaggcagag

SEQ ID NO: 35630 - DNA, 21 bp, Artificial Sequence
  Synthetic
aaaaggtgccctgaccatgct

SEQ ID NO: 35631 - DNA, 22 bp, Artificial Sequence
  Synthetic
tcccgggaagtcaaaagcgaat

SEQ ID NO: 35632 - DNA, 19 bp, Artificial Sequence
  Synthetic
tggtcgagttcgggcaggg

SEQ ID NO: 35633 - DNA, 22 bp, Artificial Sequence
  Synthetic
cccaaggtaagcgaccacacaa

SEQ ID NO: 35634 - DNA, 22 bp, Artificial Sequence
  Synthetic
gacccattggaccagccattgt

SEQ ID NO: 35635 - DNA, 20 bp, Artificial Sequence
  Synthetic
aactagcatgcccacagcgt

SEQ ID NO: 35636 - DNA, 22 bp, Artificial Sequence
  Synthetic
agtggcagaaaagcaggtgtct

SEQ ID NO: 35637 - DNA, 19 bp, Artificial Sequence
  Synthetic
ctaccacgtccacaccgcc

SEQ ID NO: 35638 - DNA, 22 bp, Artificial Sequence
  Synthetic
cggcccctttcctttgatacca

SEQ ID NO: 35639 - DNA, 21 bp, Artificial Sequence
  Synthetic
ccaccaacgcctcaatccagt

SEQ ID NO: 35640 - DNA, 22 bp, Artificial Sequence
  Synthetic
gcctcttggctagggagatgca

SEQ ID NO: 35641 - DNA, 22 bp, Artificial Sequence
  Synthetic
aggggggtggtaacctggattt

SEQ ID NO: 35642 - DNA, 22 bp, Artificial Sequence
  Synthetic
catgcttgacagggtcacacct

SEQ ID NO: 35643 - DNA, 22 bp, Artificial Sequence
  Synthetic
gatcaacacgtgcggaatcagc

SEQ ID NO: 35644 - DNA, 20 bp, Artificial Sequence
  Synthetic
cagggatgcctaaggcttca

SEQ ID NO: 35645 - DNA, 22 bp, Artificial Sequence
  Synthetic
cttatgaaagggaaggcctctg

SEQ ID NO: 35646 - DNA, 20 bp, Artificial Sequence
  Synthetic
tgaacctccctcgtcatccg

SEQ ID NO: 35647 - DNA, 22 bp, Artificial Sequence
  Synthetic
tgaaatgcccattggaccattg

SEQ ID NO: 35648 - DNA, 25 bp, Artificial Sequence
  Synthetic
cattgcaaatgatgactttccagaa

SEQ ID NO: 35649 - DNA, 20 bp, Artificial Sequence
  Synthetic
gcttgtcctcctggcgaccc

SEQ ID NO: 35650 - DNA, 22 bp, Artificial Sequence
  Synthetic
gaccttcctctggatcgcgatc

SEQ ID NO: 35651 - DNA, 20 bp, Artificial Sequence
  Synthetic
actcctttggggtatcgcac

SEQ ID NO: 35652 - DNA, 20 bp, Artificial Sequence
  Synthetic
ttttgagcttggccatcagc

SEQ ID NO: 35653 - DNA, 22 bp, Artificial Sequence
  Synthetic
cactgcttttgtaccgttaacg

SEQ ID NO: 35654 - DNA, 23 bp, Artificial Sequence
  Synthetic
catagtcgttgctaagatggcaa

SEQ ID NO: 35655 - DNA, 20 bp, Artificial Sequence
  Synthetic
ccgcctgcagaaagcctaat

SEQ ID NO: 35656 - DNA, 20 bp, Artificial Sequence
  Synthetic
atgccttcccatcatggcag

SEQ ID NO: 35657 - DNA, 20 bp, Artificial Sequence
  Synthetic
tccacatgctgagcacttcc

SEQ ID NO: 35658 - DNA, 23 bp, Artificial Sequence
  Synthetic
ttcacccagttttaccaccattt

SEQ ID NO: 35659 - DNA, 22 bp, Artificial Sequence
  Synthetic
tcccaatgaaagcatttccact

SEQ ID NO: 35660 - DNA, 21 bp, Artificial Sequence
  Synthetic
agggtgtaacgttttcggttg

SEQ ID NO: 35661 - DNA, 23 bp, Artificial Sequence
  Synthetic
tcttgatgctacaacacacagtc

SEQ ID NO: 35662 - DNA, 20 bp, Artificial Sequence
  Synthetic
ggctgcagtcaacctcatct

SEQ ID NO: 35663 - DNA, 23 bp, Artificial Sequence
  Synthetic
actcaaatcaaacgagtctgcat

SEQ ID NO: 35664 - DNA, 25 bp, Artificial Sequence
  Synthetic
cccatttttccatccaataatggtt

SEQ ID NO: 35665 - DNA, 22 bp, Artificial Sequence
  Synthetic
cgtccttggaggagctgacaga

SEQ ID NO: 35666 - DNA, 24 bp, Artificial Sequence
  Synthetic
tcatgcactggatttattggttct

SEQ ID NO: 35667 - DNA, 24 bp, Artificial Sequence
  Synthetic
tgattggcagaaacctttggaatt

SEQ ID NO: 35668 - DNA, 24 bp, Artificial Sequence
  Synthetic
ggtacactggctctgtcttgatta

SEQ ID NO: 35669 - DNA, 24 bp, Artificial Sequence
  Synthetic
gcgattgaatattccagagtcact

SEQ ID NO: 35670 - DNA, 24 bp, Artificial Sequence
  Synthetic
acccaatggtgtctgagataattc

SEQ ID NO: 35671 - DNA, 20 bp, Artificial Sequence
  Synthetic
tttgcgctggaacctttagg

SEQ ID NO: 35672 - DNA, 25 bp, Artificial Sequence
  Synthetic
tgtgttgttatctccatttcctctt

SEQ ID NO: 35673 - DNA, 23 bp, Artificial Sequence
  Synthetic
gactgttcaagcttttcgcaaat

SEQ ID NO: 35674 - DNA, 25 bp, Artificial Sequence
  Synthetic
tttcctagtcttgccattttgtttg

SEQ ID NO: 35675 - DNA, 25 bp, Artificial Sequence
  Synthetic
actccaatactcatatcagctgact

SEQ ID NO: 35676 - DNA, 20 bp, Artificial Sequence
  Synthetic
ggtcccccatctgataccaa

SEQ ID NO: 35677 - DNA, 23 bp, Artificial Sequence
  Synthetic
cactaagcaaattcacaggcaaa

SEQ ID NO: 35678 - DNA, 21 bp, Artificial Sequence
  Synthetic
ctcaaatcagaggcgagcttt

SEQ ID NO: 35679 - DNA, 23 bp, Artificial Sequence
  Synthetic
gtccattgtccagatttgccata

SEQ ID NO: 35680 - DNA, 20 bp, Artificial Sequence
  Synthetic
tgattttgggcccaaccact

SEQ ID NO: 35681 - DNA, 20 bp, Artificial Sequence
  Synthetic
gcaaatccaacatcaggggc

SEQ ID NO: 35682 - DNA, 21 bp, Artificial Sequence
  Synthetic
ctacagtgtctcctgcaaagc

SEQ ID NO: 35683 - DNA, 25 bp, Artificial Sequence
  Synthetic
tctttcacatattcatcggtgctta

SEQ ID NO: 35684 - DNA, 23 bp, Artificial Sequence
  Synthetic
tctcccatatcaccatcctgaat

SEQ ID NO: 35685 - DNA, 22 bp, Artificial Sequence
  Synthetic
gaaaggcttacacactgcaact

SEQ ID NO: 35686 - DNA, 20 bp, Artificial Sequence
  Synthetic
atgccgctggggactctctg

SEQ ID NO: 35687 - DNA, 24 bp, Artificial Sequence
  Synthetic
cttttaagcaaataagggggggac

SEQ ID NO: 35688 - DNA, 20 bp, Artificial Sequence
  Synthetic
attgcagctgtatcgtctgc

SEQ ID NO: 35689 - DNA, 25 bp, Artificial Sequence
  Synthetic
gatatgcacgttttcttttacgtct

SEQ ID NO: 35690 - DNA, 25 bp, Artificial Sequence
  Synthetic
gtcaaagaatttgttcttgcagcta

SEQ ID NO: 35691 - DNA, 20 bp, Artificial Sequence
  Synthetic
attggccaaagaccctgtga

SEQ ID NO: 35692 - DNA, 25 bp, Artificial Sequence
  Synthetic
cctttaaagaaaagccaaaggtgtt

SEQ ID NO: 35693 - DNA, 20 bp, Artificial Sequence
  Synthetic
aactcctcctcctcgtcctc

SEQ ID NO: 35694 - DNA, 22 bp, Artificial Sequence
  Synthetic
caaagacactgtttgcagacga

SEQ ID NO: 35695 - DNA, 20 bp, Artificial Sequence
  Synthetic
aaagcagtagccacgcttct

SEQ ID NO: 35696 - DNA, 25 bp, Artificial Sequence
  Synthetic
attcatgtaagacactactttgcct

SEQ ID NO: 35697 - DNA, 21 bp, Artificial Sequence
  Synthetic
cgctctctcagcttctccatc

SEQ ID NO: 35698 - DNA, 22 bp, Artificial Sequence
  Synthetic
tcccattctccagtaactgaca

SEQ ID NO: 35699 - DNA, 25 bp, Artificial Sequence
  Synthetic
ctgctggatcaacagtatctatagg

SEQ ID NO: 35700 - DNA, 22 bp, Artificial Sequence
  Synthetic
acaccttcaaagctactcctgg

SEQ ID NO: 35701 - DNA, 20 bp, Artificial Sequence
  Synthetic
tcgggccacttacaggtaga

SEQ ID NO: 35702 - DNA, 20 bp, Artificial Sequence
  Synthetic
cacagccagtaacgaaagcg

SEQ ID NO: 35703 - DNA, 20 bp, Artificial Sequence
  Synthetic
cgtaaggcgacagggcgacc

SEQ ID NO: 35704 - DNA, 20 bp, Artificial Sequence
  Synthetic
cgactcgtggtttggcgtgt

SEQ ID NO: 35705 - DNA, 19 bp, Artificial Sequence
  Synthetic
ttacgcccggcaacctgcg

SEQ ID NO: 35706 - DNA, 21 bp, Artificial Sequence
  Synthetic
gggaccaacacggcttcatgt

SEQ ID NO: 35707 - DNA, 20 bp, Artificial Sequence
  Synthetic
ctgcgaggtgcacagcaaac

SEQ ID NO: 35708 - DNA, 21 bp, Artificial Sequence
  Synthetic
gagggggagttcgtcgtgttc

SEQ ID NO: 35709 - DNA, 20 bp, Artificial Sequence
  Synthetic
tcgagcaccagaaactgcgg

SEQ ID NO: 35710 - DNA, 21 bp, Artificial Sequence
  Synthetic
gctcaaagtccaggaggtccc

SEQ ID NO: 35711 - DNA, 19 bp, Artificial Sequence
  Synthetic
tggggcgaactgtttggcg

SEQ ID NO: 35712 - DNA, 19 bp, Artificial Sequence
  Synthetic
ccccccactacgaccgcta

SEQ ID NO: 35713 - DNA, 21 bp, Artificial Sequence
  Synthetic
tgttgcttcactcgctcaccc

SEQ ID NO: 35714 - DNA, 18 bp, Artificial Sequence
  Synthetic
gctgcgggaagcgatcca

SEQ ID NO: 35715 - DNA, 19 bp, Artificial Sequence
  Synthetic
ggctgatgcgatgggccag

SEQ ID NO: 35716 - DNA, 19 bp, Artificial Sequence
  Synthetic
tcagcacgccaccgacacc

SEQ ID NO: 35717 - DNA, 22 bp, Artificial Sequence
  Synthetic
agcttaagcctctcctggtgct

SEQ ID NO: 35718 - DNA, 18 bp, Artificial Sequence
  Synthetic
tgcggaccaggaggagca

SEQ ID NO: 35719 - DNA, 21 bp, Artificial Sequence
  Synthetic
ccacttggaattggaggcgcg

SEQ ID NO: 35720 - DNA, 20 bp, Artificial Sequence
  Synthetic
cgcgccctcttctgcgagat

SEQ ID NO: 35721 - DNA, 20 bp, Artificial Sequence
  Synthetic
cttggccaacgaggtccagt

SEQ ID NO: 35722 - DNA, 20 bp, Artificial Sequence
  Synthetic
cctggcccccgatgatctcc

SEQ ID NO: 35723 - DNA, 19 bp, Artificial Sequence
  Synthetic
tcgtcgcctggctgaccca

SEQ ID NO: 35724 - DNA, 19 bp, Artificial Sequence
  Synthetic
gcatccgggacctgaaccc

SEQ ID NO: 35725 - DNA, 19 bp, Artificial Sequence
  Synthetic
tgttctcggagcgcgcgtc

SEQ ID NO: 35726 - DNA, 22 bp, Artificial Sequence
  Synthetic
gctactggaacaacacgcggtg

SEQ ID NO: 35727 - DNA, 18 bp, Artificial Sequence
  Synthetic
ttgtcggtggcgtgcgtg

SEQ ID NO: 35728 - DNA, 20 bp, Artificial Sequence
  Synthetic
gacgtaacacggcccagagg

SEQ ID NO: 35729 - DNA, 19 bp, Artificial Sequence
  Synthetic
gcctcgaccctgacgcgtt

SEQ ID NO: 35730 - DNA, 19 bp, Artificial Sequence
  Synthetic
ttcgtgaacgccgcccacg

SEQ ID NO: 35731 - DNA, 20 bp, Artificial Sequence
  Synthetic
cgagcggcttgacctggcta

SEQ ID NO: 35732 - DNA, 19 bp, Artificial Sequence
  Synthetic
tcttcggccagcgccttgt

SEQ ID NO: 35733 - DNA, 20 bp, Artificial Sequence
  Synthetic
ggggtttggtcttggtggcc

SEQ ID NO: 35734 - DNA, 22 bp, Artificial Sequence
  Synthetic
cgggaatcggcgactatgaagc

SEQ ID NO: 35735 - DNA, 19 bp, Artificial Sequence
  Synthetic
aagtcggcactgcgggtgg

SEQ ID NO: 35736 - DNA, 22 bp, Artificial Sequence
  Synthetic
gatacggtacatggccctggtg

SEQ ID NO: 35737 - DNA, 19 bp, Artificial Sequence
  Synthetic
gccgcagtactacctggcc

SEQ ID NO: 35738 - DNA, 19 bp, Artificial Sequence
  Synthetic
cggcggctccttccgattc

SEQ ID NO: 35739 - DNA, 19 bp, Artificial Sequence
  Synthetic
gtccaaccagccgaacccg

SEQ ID NO: 35740 - DNA, 20 bp, Artificial Sequence
  Synthetic
cggcgcgtgatggacatgtt

SEQ ID NO: 35741 - DNA, 19 bp, Artificial Sequence
  Synthetic
gggcggctggagaccatca

SEQ ID NO: 35742 - DNA, 20 bp, Artificial Sequence
  Synthetic
gtgcaccgcatacccgtgta

SEQ ID NO: 35743 - DNA, 21 bp, Artificial Sequence
  Synthetic
cctgggatacgtgtacgctcg

SEQ ID NO: 35744 - DNA, 18 bp, Artificial Sequence
  Synthetic
acacgtcggtgcgctcca

SEQ ID NO: 35745 - DNA, 22 bp, Artificial Sequence
  Synthetic
tgtacgtcatctttcccggcac

SEQ ID NO: 35746 - DNA, 20 bp, Artificial Sequence
  Synthetic
gctcctgacggccagtcacg

SEQ ID NO: 35747 - DNA, 19 bp, Artificial Sequence
  Synthetic
agccactggacgagctggc

SEQ ID NO: 35748 - DNA, 21 bp, Artificial Sequence
  Synthetic
cccctgtcgtacacgctccta

SEQ ID NO: 35749 - DNA, 19 bp, Artificial Sequence
  Synthetic
agttcgcgcccgacctgga

SEQ ID NO: 35750 - DNA, 19 bp, Artificial Sequence
  Synthetic
tgcgtgtgttggcctgggc

SEQ ID NO: 35751 - DNA, 19 bp, Artificial Sequence
  Synthetic
gggtgacgctgttctcggc

SEQ ID NO: 35752 - DNA, 20 bp, Artificial Sequence
  Synthetic
gggttgtgttggccgactgg

SEQ ID NO: 35753 - DNA, 22 bp, Artificial Sequence
  Synthetic
cgggccagtttcagtgaaaccc

SEQ ID NO: 35754 - DNA, 20 bp, Artificial Sequence
  Synthetic
tgacgttgctggtgatggcc

SEQ ID NO: 35755 - DNA, 22 bp, Artificial Sequence
  Synthetic
ggtgtcgtagatgtagtggcgg

SEQ ID NO: 35756 - DNA, 19 bp, Artificial Sequence
  Synthetic
accgccttcccccatcacc

SEQ ID NO: 35757 - DNA, 22 bp, Artificial Sequence
  Synthetic
cctgctccccaaagatcgtgtt

SEQ ID NO: 35758 - DNA, 22 bp, Artificial Sequence
  Synthetic
ggtcgcgttaaggaccttggtg

SEQ ID NO: 35759 - DNA, 20 bp, Artificial Sequence
  Synthetic
ccatccggggtttgggtgtt

SEQ ID NO: 35760 - DNA, 19 bp, Artificial Sequence
  Synthetic
tacgcgtgcgtcctccgag

SEQ ID NO: 35761 - DNA, 20 bp, Artificial Sequence
  Synthetic
cgatgtcagcctgggggacg

SEQ ID NO: 35762 - DNA, 19 bp, Artificial Sequence
  Synthetic
gctgcccacttccccccat

SEQ ID NO: 35763 - DNA, 20 bp, Artificial Sequence
  Synthetic
tcgaggcccccacgatcgac

SEQ ID NO: 35764 - DNA, 19 bp, Artificial Sequence
  Synthetic
acgaatgtccgcgccgtgg

SEQ ID NO: 35765 - DNA, 22 bp, Artificial Sequence
  Synthetic
cgccgttatcaagacgacggtt

SEQ ID NO: 35766 - DNA, 22 bp, Artificial Sequence
  Synthetic
cgccagatacaggaaccaccct

SEQ ID NO: 35767 - DNA, 20 bp, Artificial Sequence
  Synthetic
ggggggtcctcgtccagatc

SEQ ID NO: 35768 - DNA, 20 bp, Artificial Sequence
  Synthetic
agtaagggggggccacgtgg

SEQ ID NO: 35769 - DNA, 20 bp, Artificial Sequence
  Synthetic
cccgacgaccagcgacgaac

SEQ ID NO: 35770 - DNA, 19 bp, Artificial Sequence
  Synthetic
caccgtactctgctgggcc

SEQ ID NO: 35771 - DNA, 19 bp, Artificial Sequence
  Synthetic
aaggacctagcgcgcggga

SEQ ID NO: 35772 - DNA, 20 bp, Artificial Sequence
  Synthetic
ggcagtttgacgacccaccc

SEQ ID NO: 35773 - DNA, 22 bp, Artificial Sequence
  Synthetic
gctggggtataaaaggggccat

SEQ ID NO: 35774 - DNA, 20 bp, Artificial Sequence
  Synthetic
ccaatctcatcccggctgcg

SEQ ID NO: 35775 - DNA, 22 bp, Artificial Sequence
  Synthetic
gggtaatctggatggctgctgt

SEQ ID NO: 35776 - DNA, 19 bp, Artificial Sequence
  Synthetic
gggggccgagaacaaggac

SEQ ID NO: 35777 - DNA, 20 bp, Artificial Sequence
  Synthetic
ccggtctgggtcatgttggg

SEQ ID NO: 35778 - DNA, 22 bp, Artificial Sequence
  Synthetic
ccccacgaggcttcccaaaagc

SEQ ID NO: 35779 - DNA, 21 bp, Artificial Sequence
  Synthetic
taccagactgaccgtggggcc

SEQ ID NO: 35780 - DNA, 20 bp, Artificial Sequence
  Synthetic
cgcgtaacacgtacaccccg

SEQ ID NO: 35781 - DNA, 22 bp, Artificial Sequence
  Synthetic
cggaccccgtgaataaccagac

SEQ ID NO: 35782 - DNA, 20 bp, Artificial Sequence
  Synthetic
gccgtgggataaagcggcac

SEQ ID NO: 35783 - DNA, 19 bp, Artificial Sequence
  Synthetic
atccgcccgacagaacggc

SEQ ID NO: 35784 - DNA, 25 bp, Artificial Sequence
  Synthetic
gtgataattaggggcattcaattcg

SEQ ID NO: 35785 - DNA, 22 bp, Artificial Sequence
  Synthetic
acaggtgcaatttccgtccgaa

SEQ ID NO: 35786 - DNA, 23 bp, Artificial Sequence
  Synthetic
agagagtaaccccatctctttgt

SEQ ID NO: 35787 - DNA, 20 bp, Artificial Sequence
  Synthetic
aagcgaagtgcacacggtcc

SEQ ID NO: 35788 - DNA, 21 bp, Artificial Sequence
  Synthetic
agtgcagtatggtgaggtgaa

SEQ ID NO: 35789 - DNA, 22 bp, Artificial Sequence
  Synthetic
ccatgttacagccaaaggtgat

SEQ ID NO: 35790 - DNA, 23 bp, Artificial Sequence
  Synthetic
gcctgtaagcacttcttcctctt

SEQ ID NO: 35791 - DNA, 21 bp, Artificial Sequence
  Synthetic
gggttcaaccgttgatttgct

SEQ ID NO: 35792 - DNA, 20 bp, Artificial Sequence
  Synthetic
tacattcccgcgttggtctc

SEQ ID NO: 35793 - DNA, 23 bp, Artificial Sequence
  Synthetic
agagttctgacaaacccactgta

SEQ ID NO: 35794 - DNA, 23 bp, Artificial Sequence
  Synthetic
gtgctttcatctgggtcttcaat

SEQ ID NO: 35795 - DNA, 20 bp, Artificial Sequence
  Synthetic
caacagttgtcgcaacagct

SEQ ID NO: 35796 - DNA, 25 bp, Artificial Sequence
  Synthetic
gattctgtactgtcatcaaacagct

SEQ ID NO: 35797 - DNA, 22 bp, Artificial Sequence
  Synthetic
ttttcagcttcatcctgctcaa

SEQ ID NO: 35798 - DNA, 22 bp, Artificial Sequence
  Synthetic
gcgtagttcttcccggagtgag

SEQ ID NO: 35799 - DNA, 21 bp, Artificial Sequence
  Synthetic
tgagccagcatcaattacagc

SEQ ID NO: 35800 - DNA, 22 bp, Artificial Sequence
  Synthetic
gcacgtcttgatcaaactgcaa

SEQ ID NO: 35801 - DNA, 21 bp, Artificial Sequence
  Synthetic
cgtattcgtccgtgctgagaa

SEQ ID NO: 35802 - DNA, 20 bp, Artificial Sequence
  Synthetic
ctacccctaacggtcctcca

SEQ ID NO: 35803 - DNA, 21 bp, Artificial Sequence
  Synthetic
tcattgttgtcttctgcagca

SEQ ID NO: 35804 - DNA, 20 bp, Artificial Sequence
  Synthetic
aacggttgctggctttaggt

SEQ ID NO: 35805 - DNA, 20 bp, Artificial Sequence
  Synthetic
tatgcactgccgataaccgc

SEQ ID NO: 35806 - DNA, 21 bp, Artificial Sequence
  Synthetic
cgtcttctgggtgtggtgtcg

SEQ ID NO: 35807 - DNA, 20 bp, Artificial Sequence
  Synthetic
tacctggacctgcatctggt

SEQ ID NO: 35808 - DNA, 24 bp, Artificial Sequence
  Synthetic
aagctttgtatggatctgtgtctt

SEQ ID NO: 35809 - DNA, 22 bp, Artificial Sequence
  Synthetic
ccttggttacagccccttctgg

SEQ ID NO: 35810 - DNA, 23 bp, Artificial Sequence
  Synthetic
aattcgtctgcttttttccctct

SEQ ID NO: 35811 - DNA, 22 bp, Artificial Sequence
  Synthetic
ctttctttgttgggctgctgca

SEQ ID NO: 35812 - DNA, 24 bp, Artificial Sequence
  Synthetic
atttctgccaaagatgttgattgg

SEQ ID NO: 35813 - DNA, 23 bp, Artificial Sequence
  Synthetic
gggtgtggaattcctagctgaat

SEQ ID NO: 35814 - DNA, 21 bp, Artificial Sequence
  Synthetic
gctgcaggaccactttgtcat

SEQ ID NO: 35815 - DNA, 21 bp, Artificial Sequence
  Synthetic
gctctgcttctgctagttctg

SEQ ID NO: 35816 - DNA, 22 bp, Artificial Sequence
  Synthetic
atgttaacctgaccagtggtgg

SEQ ID NO: 35817 - DNA, 22 bp, Artificial Sequence
  Synthetic
ctcctatgcctttatgggctgg

SEQ ID NO: 35818 - DNA, 22 bp, Artificial Sequence
  Synthetic
tgctgtctgccttcctgattcc

SEQ ID NO: 35819 - DNA, 20 bp, Artificial Sequence
  Synthetic
agtctttctgctggggtcat

SEQ ID NO: 35820 - DNA, 20 bp, Artificial Sequence
  Synthetic
ctgcatgagaggagagccat

SEQ ID NO: 35821 - DNA, 21 bp, Artificial Sequence
  Synthetic
gcaattagcaagcggggatca

SEQ ID NO: 35822 - DNA, 23 bp, Artificial Sequence
  Synthetic
ggcgaaggagtcttagttttcct

SEQ ID NO: 35823 - DNA, 22 bp, Artificial Sequence
  Synthetic
tgccagacatcttctactgctt

SEQ ID NO: 35824 - DNA, 20 bp, Artificial Sequence
  Synthetic
aatagttgcgccgtgtttgg

SEQ ID NO: 35825 - DNA, 20 bp, Artificial Sequence
  Synthetic
tctgggagatcagtcggcgg

SEQ ID NO: 35826 - DNA, 21 bp, Artificial Sequence
  Synthetic
tctgttgctgggtttctccat

SEQ ID NO: 35827 - DNA, 20 bp, Artificial Sequence
  Synthetic
ttttgcggagggtgtgttcc

SEQ ID NO: 35828 - DNA, 21 bp, Artificial Sequence
  Synthetic
ggataacccaagccattgtgt

SEQ ID NO: 35829 - DNA, 20 bp, Artificial Sequence
  Synthetic
tgccgctttgttttagccct

SEQ ID NO: 35830 - DNA, 20 bp, Artificial Sequence
  Synthetic
ttccattggccagcttcaag

SEQ ID NO: 35831 - DNA, 21 bp, Artificial Sequence
  Synthetic
agctcgagtatttcgtcgtga

SEQ ID NO: 35832 - DNA, 21 bp, Artificial Sequence
  Synthetic
tgtctaggcaagtctggttgc

SEQ ID NO: 35833 - DNA, 24 bp, Artificial Sequence
  Synthetic
cttcttgtatagcttaactgccct

SEQ ID NO: 35834 - DNA, 20 bp, Artificial Sequence
  Synthetic
acttgcggcaacaacaagag

SEQ ID NO: 35835 - DNA, 21 bp, Artificial Sequence
  Synthetic
ctgatagctggtaacgaggct

SEQ ID NO: 35836 - DNA, 20 bp, Artificial Sequence
  Synthetic
ggtcctcagcatccacttca

SEQ ID NO: 35837 - DNA, 20 bp, Artificial Sequence
  Synthetic
atgccacacatcatgctggt

SEQ ID NO: 35838 - DNA, 20 bp, Artificial Sequence
  Synthetic
aaatcctcagctgaagcgcg

SEQ ID NO: 35839 - DNA, 22 bp, Artificial Sequence
  Synthetic
tctaacaggtatggtgtcaggg

SEQ ID NO: 35840 - DNA, 20 bp, Artificial Sequence
  Synthetic
tagggggtggtattggctga

SEQ ID NO: 35841 - DNA, 25 bp, Artificial Sequence
  Synthetic
actctaaattgatgtgctgaaacct

SEQ ID NO: 35842 - DNA, 20 bp, Artificial Sequence
  Synthetic
gatgtgtgcaaggacgtcag

SEQ ID NO: 35843 - DNA, 22 bp, Artificial Sequence
  Synthetic
acgttttctacctaaaacgcca

SEQ ID NO: 35844 - DNA, 23 bp, Artificial Sequence
  Synthetic
gcatggcaaacattttccttcca

SEQ ID NO: 35845 - DNA, 22 bp, Artificial Sequence
  Synthetic
cgtccgatgacagtgactcttc

SEQ ID NO: 35846 - DNA, 20 bp, Artificial Sequence
  Synthetic
tgctgctgctggatctttga

SEQ ID NO: 35847 - DNA, 25 bp, Artificial Sequence
  Synthetic
tgttagtttagcaatccaatcaggt

SEQ ID NO: 35848 - DNA, 22 bp, Artificial Sequence
  Synthetic
tctaaacgttctctcaggtcgt

SEQ ID NO: 35849 - DNA, 20 bp, Artificial Sequence
  Synthetic
tactggcccccctgttgacc

SEQ ID NO: 35850 - DNA, 25 bp, Artificial Sequence
  Synthetic
acaagatctgtaaatgtcttgcaca

SEQ ID NO: 35851 - DNA, 23 bp, Artificial Sequence
  Synthetic
tgaggaccaataacgtctactgt

SEQ ID NO: 35852 - DNA, 25 bp, Artificial Sequence
  Synthetic
gagatggcacgattagataaaggag

SEQ ID NO: 35853 - DNA, 22 bp, Artificial Sequence
  Synthetic
gctattgagggcatttccacat

SEQ ID NO: 35854 - DNA, 25 bp, Artificial Sequence
  Synthetic
gttcccatacacctctttagtcatt

SEQ ID NO: 35855 - DNA, 25 bp, Artificial Sequence
  Synthetic
gggtccattgcattaatatgagcta

SEQ ID NO: 35856 - DNA, 22 bp, Artificial Sequence
  Synthetic
gccatatgatccacagtggttt

SEQ ID NO: 35857 - DNA, 22 bp, Artificial Sequence
  Synthetic
gttacagccagaggtgatacca

SEQ ID NO: 35858 - DNA, 22 bp, Artificial Sequence
  Synthetic
tgatgtcaatatcctggctcca

SEQ ID NO: 35859 - DNA, 22 bp, Artificial Sequence
  Synthetic
cttcaatgtttggaggttgcct

SEQ ID NO: 35860 - DNA, 22 bp, Artificial Sequence
  Synthetic
ggagtacatttcctcgctgatc

SEQ ID NO: 35861 - DNA, 20 bp, Artificial Sequence
  Synthetic
gtcctctgtaagcgcacctg

SEQ ID NO: 35862 - DNA, 21 bp, Artificial Sequence
  Synthetic
tgtccgaggcagattttgtct

SEQ ID NO: 35863 - DNA, 21 bp, Artificial Sequence
  Synthetic
gcttggtttgctctgcagttg

SEQ ID NO: 35864 - DNA, 21 bp, Artificial Sequence
  Synthetic
ccccttcacaattggcatcaa

SEQ ID NO: 35865 - DNA, 23 bp, Artificial Sequence
  Synthetic
gccttcccatccattttcaatga

SEQ ID NO: 35866 - DNA, 24 bp, Artificial Sequence
  Synthetic
tttgttcttccaacagtagtcctg

SEQ ID NO: 35867 - DNA, 22 bp, Artificial Sequence
  Synthetic
aggttggtcatcgtcttcatca

SEQ ID NO: 35868 - DNA, 25 bp, Artificial Sequence
  Synthetic
ttagcattaacaataccattcccca

SEQ ID NO: 35869 - DNA, 23 bp, Artificial Sequence
  Synthetic
cgcatgccacatttcataacttg

SEQ ID NO: 35870 - DNA, 22 bp, Artificial Sequence
  Synthetic
cgtctgggtcgcagttactcct

SEQ ID NO: 35871 - DNA, 25 bp, Artificial Sequence
  Synthetic
cacatcgccattttctaaagtacaa

SEQ ID NO: 35872 - DNA, 20 bp, Artificial Sequence
  Synthetic
attccaaaggtgggcagtcg

SEQ ID NO: 35873 - DNA, 24 bp, Artificial Sequence
  Synthetic
tgattaacctgggtttgtttagcc

SEQ ID NO: 35874 - DNA, 25 bp, Artificial Sequence
  Synthetic
aagtataaccttaccatctgacagc

SEQ ID NO: 35875 - DNA, 22 bp, Artificial Sequence
  Synthetic
ggtgttgaagggggattgggtc

SEQ ID NO: 35876 - DNA, 20 bp, Artificial Sequence
  Synthetic
tcgatggctttgcccaactt

SEQ ID NO: 35877 - DNA, 22 bp, Artificial Sequence
  Synthetic
gcagttgtaacttcaatggggt

SEQ ID NO: 35878 - DNA, 20 bp, Artificial Sequence
  Synthetic
gtcgaaggggctaagccttt

SEQ ID NO: 35879 - DNA, 23 bp, Artificial Sequence
  Synthetic
cctaatggtgtctgatcaagctc

SEQ ID NO: 35880 - DNA, 20 bp, Artificial Sequence
  Synthetic
gctgcaacaacgagaggatc

SEQ ID NO: 35881 - DNA, 23 bp, Artificial Sequence
  Synthetic
taataaggacaccaggaaccctg

SEQ ID NO: 35882 - DNA, 24 bp, Artificial Sequence
  Synthetic
acatgatggatacccaaatgtgtg

SEQ ID NO: 35883 - DNA, 20 bp, Artificial Sequence
  Synthetic
ctgccactcccattgcatag

SEQ ID NO: 35884 - DNA, 22 bp, Artificial Sequence
  Synthetic
catcgctttccatcaactctct

SEQ ID NO: 35885 - DNA, 20 bp, Artificial Sequence
  Synthetic
ctgagctgcttcttctccca

SEQ ID NO: 35886 - DNA, 20 bp, Artificial Sequence
  Synthetic
cccctttgtgtcggtgttga

SEQ ID NO: 35887 - DNA, 22 bp, Artificial Sequence
  Synthetic
ccttgtgtctccataagtgggt

SEQ ID NO: 35888 - DNA, 23 bp, Artificial Sequence
  Synthetic
gaattcgccaggtaaagaaggtt

SEQ ID NO: 35889 - DNA, 23 bp, Artificial Sequence
  Synthetic
tgtattgcttgatctgttggtca

SEQ ID NO: 35890 - DNA, 21 bp, Artificial Sequence
  Synthetic
ccgattccgttgcatgtacaa

SEQ ID NO: 35891 - DNA, 25 bp, Artificial Sequence
  Synthetic
gcctttgtaatatatccctggtcca

SEQ ID NO: 35892 - DNA, 21 bp, Artificial Sequence
  Synthetic
atgaattcgtgtgcatggtca

SEQ ID NO: 35893 - DNA, 23 bp, Artificial Sequence
  Synthetic
gctttcagagcttgaggaagaat

SEQ ID NO: 35894 - DNA, 21 bp, Artificial Sequence
  Synthetic
cttttgtcgcaatgctatggc

SEQ ID NO: 35895 - DNA, 20 bp, Artificial Sequence
  Synthetic
tgtgaggcttccatccaaga

SEQ ID NO: 35896 - DNA, 24 bp, Artificial Sequence
  Synthetic
cggccatagcaaaaatttcgttta

SEQ ID NO: 35897 - DNA, 25 bp, Artificial Sequence
  Synthetic
tgataatttcttcgttctcaccgaa

SEQ ID NO: 35898 - DNA, 21 bp, Artificial Sequence
  Synthetic
aaaggcctctaggatgttgga

SEQ ID NO: 35899 - DNA, 22 bp, Artificial Sequence
  Synthetic
gctgtgacaaacacgtcaaacg

SEQ ID NO: 35900 - DNA, 24 bp, Artificial Sequence
  Synthetic
ttaacttcttcagtggaaccaaca

SEQ ID NO: 35901 - DNA, 25 bp, Artificial Sequence
  Synthetic
attgtctgcaaaaatcatcccattt

SEQ ID NO: 35902 - DNA, 22 bp, Artificial Sequence
  Synthetic
caaaatgccaagccaacgttta

SEQ ID NO: 35903 - DNA, 24 bp, Artificial Sequence
  Synthetic
ccaattgccttttcacaaacatct

SEQ ID NO: 35904 - DNA, 20 bp, Artificial Sequence
  Synthetic
gctcccgattcttcaagcct

SEQ ID NO: 35905 - DNA, 25 bp, Artificial Sequence
  Synthetic
cttccttaggtgttgtatcaactgt

SEQ ID NO: 35906 - DNA, 20 bp, Artificial Sequence
  Synthetic
ccttttcggatggcacaaca

SEQ ID NO: 35907 - DNA, 24 bp, Artificial Sequence
  Synthetic
tgtgttaagatcacttggtactgc

SEQ ID NO: 35908 - DNA, 24 bp, Artificial Sequence
  Synthetic
acaataaccaacttgcacaccatc

SEQ ID NO: 35909 - DNA, 20 bp, Artificial Sequence
  Synthetic
aacaacacccgtcctttgtg

SEQ ID NO: 35910 - DNA, 20 bp, Artificial Sequence
  Synthetic
cacatcttgcagcccaatga

SEQ ID NO: 35911 - DNA, 22 bp, Artificial Sequence
  Synthetic
aacacgcaatacaatctgggtt

SEQ ID NO: 35912 - DNA, 21 bp, Artificial Sequence
  Synthetic
agacaggcctaaagctctctt

SEQ ID NO: 35913 - DNA, 25 bp, Artificial Sequence
  Synthetic
acaagaaagtcaaacccttagcttt

SEQ ID NO: 35914 - DNA, 24 bp, Artificial Sequence
  Synthetic
tccaactacaataggacagctttg

SEQ ID NO: 35915 - DNA, 20 bp, Artificial Sequence
  Synthetic
ttggtggcaatagtacgcac

SEQ ID NO: 35916 - DNA, 21 bp, Artificial Sequence
  Synthetic
cagtcggaggtgtgtacaaga

SEQ ID NO: 35917 - DNA, 21 bp, Artificial Sequence
  Synthetic
cagcccagaacatgacaaaga

SEQ ID NO: 35918 - DNA, 20 bp, Artificial Sequence
  Synthetic
gcaaagcgccaagtatgcaa

SEQ ID NO: 35919 - DNA, 25 bp, Artificial Sequence
  Synthetic
cacttacagaacctgttaatccagt

SEQ ID NO: 35920 - DNA, 23 bp, Artificial Sequence
  Synthetic
gattccctgtcaaactcagcttt

SEQ ID NO: 35921 - DNA, 21 bp, Artificial Sequence
  Synthetic
ccaaacaacaccagcgtagtg

SEQ ID NO: 35922 - DNA, 23 bp, Artificial Sequence
  Synthetic
ggcttcgtagtcacatatgcata

SEQ ID NO: 35923 - DNA, 20 bp, Artificial Sequence
  Synthetic
tgcgccttgtttaacagcat

SEQ ID NO: 35924 - DNA, 23 bp, Artificial Sequence
  Synthetic
tcaaaactttggatagcagtccg

SEQ ID NO: 35925 - DNA, 23 bp, Artificial Sequence
  Synthetic
aagcacaaatccatcatggtgta

SEQ ID NO: 35926 - DNA, 23 bp, Artificial Sequence
  Synthetic
ggaggacacaatacaaagtcacc

SEQ ID NO: 35927 - DNA, 20 bp, Artificial Sequence
  Synthetic
gaggtccaaaagccgtgttt

SEQ ID NO: 35928 - DNA, 21 bp, Artificial Sequence
  Synthetic
tggccaggttttactgtttgg

SEQ ID NO: 35929 - DNA, 20 bp, Artificial Sequence
  Synthetic
gtgcgcgttccttaccagat

SEQ ID NO: 35930 - DNA, 24 bp, Artificial Sequence
  Synthetic
agcacacaacactatcatcagaaa

SEQ ID NO: 35931 - DNA, 20 bp, Artificial Sequence
  Synthetic
ccagctgaacacagtgggaa

SEQ ID NO: 35932 - DNA, 23 bp, Artificial Sequence
  Synthetic
aactcaccaacttgaaacttgga

SEQ ID NO: 35933 - DNA, 25 bp, Artificial Sequence
  Synthetic
tgatatacgctggttaatcacagac

SEQ ID NO: 35934 - DNA, 24 bp, Artificial Sequence
  Synthetic
gagataaacacagccttgctccat

SEQ ID NO: 35935 - DNA, 25 bp, Artificial Sequence
  Synthetic
gacttggtggtaaatcaatagggtt

SEQ ID NO: 35936 - DNA, 21 bp, Artificial Sequence
  Synthetic
gtgcaccttccacatccattc

SEQ ID NO: 35937 - DNA, 20 bp, Artificial Sequence
  Synthetic
tggtcaactctaaaccgcca

SEQ ID NO: 35938 - DNA, 25 bp, Artificial Sequence
  Synthetic
catagggtaggtaattgaccaatcc

SEQ ID NO: 35939 - DNA, 23 bp, Artificial Sequence
  Synthetic
gtagatcgtgtacgtgtgtcaaa

SEQ ID NO: 35940 - DNA, 22 bp, Artificial Sequence
  Synthetic
caaacgtggtaggaacccaaat

SEQ ID NO: 35941 - DNA, 23 bp, Artificial Sequence
  Synthetic
gatcaacaggtttgccatctttg

SEQ ID NO: 35942 - DNA, 25 bp, Artificial Sequence
  Synthetic
acaaaatcatccaacaacaaatcca

SEQ ID NO: 35943 - DNA, 25 bp, Artificial Sequence
  Synthetic
catctataaaaggtccttgtgcgaa

SEQ ID NO: 35944 - DNA, 23 bp, Artificial Sequence
  Synthetic
agcccatttgtagtttgacaacc

SEQ ID NO: 35945 - DNA, 21 bp, Artificial Sequence
  Synthetic
ggtgtcattgctaacgcgaat

SEQ ID NO: 35946 - DNA, 24 bp, Artificial Sequence
  Synthetic
aaacgctttcttgtcaaaagtgag

SEQ ID NO: 35947 - DNA, 21 bp, Artificial Sequence
  Synthetic
cggctgatgttagacctccta

SEQ ID NO: 35948 - DNA, 21 bp, Artificial Sequence
  Synthetic
gtcgcaacacataaccgtttg

SEQ ID NO: 35949 - DNA, 22 bp, Artificial Sequence
  Synthetic
tgttcgacaactaggtctggaa

SEQ ID NO: 35950 - DNA, 23 bp, Artificial Sequence
  Synthetic
tgcttgagaccaatacagcaatg

SEQ ID NO: 35951 - DNA, 20 bp, Artificial Sequence
  Synthetic
gtacgagtggccaaagaagc

SEQ ID NO: 35952 - DNA, 24 bp, Artificial Sequence
  Synthetic
gatgtcatcctgactgttatggtt

SEQ ID NO: 35953 - DNA, 25 bp, Artificial Sequence
  Synthetic
acatcatcattaggctgtcttttcc

SEQ ID NO: 35954 - DNA, 20 bp, Artificial Sequence
  Synthetic
gtcaagccaaagcaagggat

SEQ ID NO: 35955 - DNA, 24 bp, Artificial Sequence
  Synthetic
ccatttttgcacagtccgatacat

SEQ ID NO: 35956 - DNA, 24 bp, Artificial Sequence
  Synthetic
gtacatcatctggacatgtacctg

SEQ ID NO: 35957 - DNA, 20 bp, Artificial Sequence
  Synthetic
caggggggccaatgggatca

SEQ ID NO: 35958 - DNA, 20 bp, Artificial Sequence
  Synthetic
taacttgctgcacccgcctg

SEQ ID NO: 35959 - DNA, 22 bp, Artificial Sequence
  Synthetic
acaattaaacaaggtcccgtcg

SEQ ID NO: 35960 - DNA, 21 bp, Artificial Sequence
  Synthetic
ggcataaacctgttcacgctt

SEQ ID NO: 35961 - DNA, 20 bp, Artificial Sequence
  Synthetic
gcccaggagtcgcaggaatt

SEQ ID NO: 35962 - DNA, 22 bp, Artificial Sequence
  Synthetic
cgagagccagggcaactcgtaa

SEQ ID NO: 35963 - DNA, 20 bp, Artificial Sequence
  Synthetic
cattgccagcctggttccct

SEQ ID NO: 35964 - DNA, 19 bp, Artificial Sequence
  Synthetic
tgctcgcccactcgaccga

SEQ ID NO: 35965 - DNA, 21 bp, Artificial Sequence
  Synthetic
cagcatgacagagctggtggt

SEQ ID NO: 35966 - DNA, 21 bp, Artificial Sequence
  Synthetic
ccaggaaaccctgtcacagaa

SEQ ID NO: 35967 - DNA, 21 bp, Artificial Sequence
  Synthetic
tatggggagccaggcccaagg

SEQ ID NO: 35968 - DNA, 20 bp, Artificial Sequence
  Synthetic
cggtctcccctaggcttgga

SEQ ID NO: 35969 - DNA, 22 bp, Artificial Sequence
  Synthetic
cctctggtaggactgggcgacc

SEQ ID NO: 35970 - DNA, 21 bp, Artificial Sequence
  Synthetic
cttaggagctgtccgagggga

SEQ ID NO: 35971 - DNA, 20 bp, Artificial Sequence
  Synthetic
gtggcctagcaacgcgaacc

SEQ ID NO: 35972 - DNA, 20 bp, Artificial Sequence
  Synthetic
tgagacgggtgggtgtgtgt

SEQ ID NO: 35973 - DNA, 20 bp, Artificial Sequence
  Synthetic
gaagctccccaaggccatgg

SEQ ID NO: 35974 - DNA, 19 bp, Artificial Sequence
  Synthetic
ggctggctcccagtatgcc

SEQ ID NO: 35975 - DNA, 20 bp, Artificial Sequence
  Synthetic
ggcaaggagaccgtcgcaga

SEQ ID NO: 35976 - DNA, 20 bp, Artificial Sequence
  Synthetic
acccggctggttcacggata

SEQ ID NO: 35977 - DNA, 20 bp, Artificial Sequence
  Synthetic
gtgtacggcggacatcaggg

SEQ ID NO: 35978 - DNA, 19 bp, Artificial Sequence
  Synthetic
tgggggttctggcctcgtc

SEQ ID NO: 35979 - DNA, 18 bp, Artificial Sequence
  Synthetic
cgcatcctccccgccaaa

SEQ ID NO: 35980 - DNA, 22 bp, Artificial Sequence
  Synthetic
ggacctccagacgctaaagagc

SEQ ID NO: 35981 - DNA, 21 bp, Artificial Sequence
  Synthetic
cctctcggaggacatctcgcg

SEQ ID NO: 35982 - DNA, 19 bp, Artificial Sequence
  Synthetic
aatctggcccgcccttcgc

SEQ ID NO: 35983 - DNA, 20 bp, Artificial Sequence
  Synthetic
gagccccgtaaagatgcccg

SEQ ID NO: 35984 - DNA, 20 bp, Artificial Sequence
  Synthetic
ggacttgatggagacccgcc

SEQ ID NO: 35985 - DNA, 20 bp, Artificial Sequence
  Synthetic
gcaggtggccacagacttcc

SEQ ID NO: 35986 - DNA, 19 bp, Artificial Sequence
  Synthetic
cacgtcctgagccttggcc

SEQ ID NO: 35987 - DNA, 20 bp, Artificial Sequence
  Synthetic
tacacgtgggaccccgaccc

SEQ ID NO: 35988 - DNA, 21 bp, Artificial Sequence
  Synthetic
cgtggaactgcagcttcacct

SEQ ID NO: 35989 - DNA, 19 bp, Artificial Sequence
  Synthetic
tgtgggactggaagcgccg

SEQ ID NO: 35990 - DNA, 22 bp, Artificial Sequence
  Synthetic
ggccatgccgtgttgttcatgt

SEQ ID NO: 35991 - DNA, 19 bp, Artificial Sequence
  Synthetic
aaggtgcgggcctccaacg

SEQ ID NO: 35992 - DNA, 21 bp, Artificial Sequence
  Synthetic
ccgactgcggtgacagcagtt

SEQ ID NO: 35993 - DNA, 20 bp, Artificial Sequence
  Synthetic
ataaccgagcctctctgctg

SEQ ID NO: 35994 - DNA, 22 bp, Artificial Sequence
  Synthetic
aatctgaaggatgccacgaggg

SEQ ID NO: 35995 - DNA, 20 bp, Artificial Sequence
  Synthetic
cggaggtgactgctgggatg

SEQ ID NO: 35996 - DNA, 22 bp, Artificial Sequence
  Synthetic
ggaccaccaatgtgatcgtggt

SEQ ID NO: 35997 - DNA, 19 bp, Artificial Sequence
  Synthetic
tctacggacgccgccctag

SEQ ID NO: 35998 - DNA, 20 bp, Artificial Sequence
  Synthetic
gcggcggccacagtagtagg

SEQ ID NO: 35999 - DNA, 19 bp, Artificial Sequence
  Synthetic
atgatctcccccggtcgcg

SEQ ID NO: 36000 - DNA, 22 bp, Artificial Sequence
  Synthetic
tctatgcctcctgctacgccaa

SEQ ID NO: 36001 - DNA, 19 bp, Artificial Sequence
  Synthetic
ggcttcgggtccgagatgg

SEQ ID NO: 36002 - DNA, 20 bp, Artificial Sequence
  Synthetic
aatttgcaaagggcgtgacc

SEQ ID NO: 36003 - DNA, 19 bp, Artificial Sequence
  Synthetic
accttgagcaccgcggctg

SEQ ID NO: 36004 - DNA, 20 bp, Artificial Sequence
  Synthetic
tttgcagccccaaaggtggt

SEQ ID NO: 36005 - DNA, 20 bp, Artificial Sequence
  Synthetic
tggctcagcgaggaggtgtc

SEQ ID NO: 36006 - DNA, 22 bp, Artificial Sequence
  Synthetic
agctcttgaccttcctgggtga

SEQ ID NO: 36007 - DNA, 19 bp, Artificial Sequence
  Synthetic
cccgtgaatgaagcgggcc

SEQ ID NO: 36008 - DNA, 22 bp, Artificial Sequence
  Synthetic
aggatggacttggtgggagaca

SEQ ID NO: 36009 - DNA, 19 bp, Artificial Sequence
  Synthetic
gggcggctctctttggagc

SEQ ID NO: 36010 - DNA, 21 bp, Artificial Sequence
  Synthetic
ggccctagagattggggaggt

SEQ ID NO: 36011 - DNA, 22 bp, Artificial Sequence
  Synthetic
tctgtgcttctctcggcctaca

SEQ ID NO: 36012 - DNA, 19 bp, Artificial Sequence
  Synthetic
ggggacacgcgcagtgagt

SEQ ID NO: 36013 - DNA, 19 bp, Artificial Sequence
  Synthetic
ccctaaccgcctggtggtg

SEQ ID NO: 36014 - DNA, 22 bp, Artificial Sequence
  Synthetic
cctcacctggccgtctaccaga

SEQ ID NO: 36015 - DNA, 19 bp, Artificial Sequence
  Synthetic
tcctgctgacgctgggcac

SEQ ID NO: 36016 - DNA, 19 bp, Artificial Sequence
  Synthetic
cccgcatgcgcaaccactt

SEQ ID NO: 36017 - DNA, 19 bp, Artificial Sequence
  Synthetic
tgcccaaccacggcaaccc

SEQ ID NO: 36018 - DNA, 19 bp, Artificial Sequence
  Synthetic
aggtggccacactggggac

SEQ ID NO: 36019 - DNA, 19 bp, Artificial Sequence
  Synthetic
gcctcacctgaacccccct

SEQ ID NO: 36020 - DNA, 20 bp, Artificial Sequence
  Synthetic
tcgttttagggctgcaacag

SEQ ID NO: 36021 - DNA, 21 bp, Artificial Sequence
  Synthetic
acgagttctaggaggattgca

SEQ ID NO: 36022 - DNA, 24 bp, Artificial Sequence
  Synthetic
gtgctaggtctaactgtagtaggt

SEQ ID NO: 36023 - DNA, 23 bp, Artificial Sequence
  Synthetic
ccgtattcagcactttagcaact

SEQ ID NO: 36024 - DNA, 25 bp, Artificial Sequence
  Synthetic
tcaccatcttgaatgtaagtgtgaa

SEQ ID NO: 36025 - DNA, 23 bp, Artificial Sequence
  Synthetic
cttctattccctgaggtggtgga

SEQ ID NO: 36026 - DNA, 24 bp, Artificial Sequence
  Synthetic
tggtgtttctacaatgtaggacca

SEQ ID NO: 36027 - DNA, 20 bp, Artificial Sequence
  Synthetic
tgggtatgagccctccttct

SEQ ID NO: 36028 - DNA, 21 bp, Artificial Sequence
  Synthetic
gacctctggattgaatggacg

SEQ ID NO: 36029 - DNA, 23 bp, Artificial Sequence
  Synthetic
accttttccctgttcaactttga

SEQ ID NO: 36030 - DNA, 20 bp, Artificial Sequence
  Synthetic
gtcgttttgaagccaggacg

SEQ ID NO: 36031 - DNA, 25 bp, Artificial Sequence
  Synthetic
actgctcaaacttatagcatgtagc

SEQ ID NO: 36032 - DNA, 20 bp, Artificial Sequence
  Synthetic
gttcctgttgcgctcgaatt

SEQ ID NO: 36033 - DNA, 22 bp, Artificial Sequence
  Synthetic
ggtacctcttccacctgtgttt

SEQ ID NO: 36034 - DNA, 24 bp, Artificial Sequence
  Synthetic
gcacaatgctgcaataacaattgt

SEQ ID NO: 36035 - DNA, 22 bp, Artificial Sequence
  Synthetic
gcttggaggtctctcccccgtc

SEQ ID NO: 36036 - DNA, 22 bp, Artificial Sequence
  Synthetic
acagcattaatggggggtcttt

SEQ ID NO: 36037 - DNA, 22 bp, Artificial Sequence
  Synthetic
ttagtagcaatgccagcgttag

SEQ ID NO: 36038 - DNA, 21 bp, Artificial Sequence
  Synthetic
acatagccagtggcaccacca

SEQ ID NO: 36039 - DNA, 20 bp, Artificial Sequence
  Synthetic
gcattgtccactggtactgg

SEQ ID NO: 36040 - DNA, 20 bp, Artificial Sequence
  Synthetic
tggaggctcctcaacagtac

SEQ ID NO: 36041 - DNA, 21 bp, Artificial Sequence
  Synthetic
atggtactgtcacctgagtgt

SEQ ID NO: 36042 - DNA, 25 bp, Artificial Sequence
  Synthetic
tgttctttccacatattcatcggtg

SEQ ID NO: 36043 - DNA, 23 bp, Artificial Sequence
  Synthetic
ggttgtcctctgcctatttcaat

SEQ ID NO: 36044 - DNA, 20 bp, Artificial Sequence
  Synthetic
ccatcaggaacagcgtcacc

SEQ ID NO: 36045 - DNA, 23 bp, Artificial Sequence
  Synthetic
tgaaacaagagtccaaggagttg

SEQ ID NO: 36046 - DNA, 23 bp, Artificial Sequence
  Synthetic
gaacttatcaactcgaccctcag

SEQ ID NO: 36047 - DNA, 23 bp, Artificial Sequence
  Synthetic
tctagagatccacaaggagtccc

SEQ ID NO: 36048 - DNA, 20 bp, Artificial Sequence
  Synthetic
atatcagcgctggacgagaa

SEQ ID NO: 36049 - DNA, 20 bp, Artificial Sequence
  Synthetic
ctgcagaagcgcaaaccttt

SEQ ID NO: 36050 - DNA, 22 bp, Artificial Sequence
  Synthetic
gagaatgtatcccctgtctgga

SEQ ID NO: 36051 - DNA, 20 bp, Artificial Sequence
  Synthetic
aaggtttttgcccatcacgg

SEQ ID NO: 36052 - DNA, 21 bp, Artificial Sequence
  Synthetic
agaaaaagctaagcggcacaa

SEQ ID NO: 36053 - DNA, 20 bp, Artificial Sequence
  Synthetic
tcaggcgattgttggaggac

SEQ ID NO: 36054 - DNA, 20 bp, Artificial Sequence
  Synthetic
gcgcatttaggaaccacgac

SEQ ID NO: 36055 - DNA, 22 bp, Artificial Sequence
  Synthetic
gctgtacaaaatgaacgcaacg

SEQ ID NO: 36056 - DNA, 21 bp, Artificial Sequence
  Synthetic
tgcacatgtcccattccttct

SEQ ID NO: 36057 - DNA, 20 bp, Artificial Sequence
  Synthetic
gcactcaaccgctctcgaat

SEQ ID NO: 36058 - DNA, 21 bp, Artificial Sequence
  Synthetic
actgttgtcgccttacctaca

SEQ ID NO: 36059 - DNA, 20 bp, Artificial Sequence
  Synthetic
ggatttgggaaacgttcgct

SEQ ID NO: 36060 - DNA, 22 bp, Artificial Sequence
  Synthetic
cctttggctttgataccgtcat

SEQ ID NO: 36061 - DNA, 22 bp, Artificial Sequence
  Synthetic
aagtgcagcaagaagaaaagga

SEQ ID NO: 36062 - DNA, 20 bp, Artificial Sequence
  Synthetic
cgctgacaggaatgccttgt

SEQ ID NO: 36063 - DNA, 22 bp, Artificial Sequence
  Synthetic
gcatcgttgtgtaggatagcgt

SEQ ID NO: 36064 - DNA, 20 bp, Artificial Sequence
  Synthetic
gtctctgattcccctcgtgc

SEQ ID NO: 36065 - DNA, 21 bp, Artificial Sequence
  Synthetic
actgtcgataccgttgttgct

SEQ ID NO: 36066 - DNA, 21 bp, Artificial Sequence
  Synthetic
gtgtttacggacgtacggttt

SEQ ID NO: 36067 - DNA, 25 bp, Artificial Sequence
  Synthetic
agttagaaattgggattgcttcaga

SEQ ID NO: 36068 - DNA, 20 bp, Artificial Sequence
  Synthetic
agcggactttgttggtagcg

SEQ ID NO: 36069 - DNA, 21 bp, Artificial Sequence
  Synthetic
ctgcctgagggaattgagatg

SEQ ID NO: 36070 - DNA, 23 bp, Artificial Sequence
  Synthetic
agaacgatgtggaaagaggaatg

SEQ ID NO: 36071 - DNA, 21 bp, Artificial Sequence
  Synthetic
gttccatttcttcgggcagag

SEQ ID NO: 36072 - DNA, 24 bp, Artificial Sequence
  Synthetic
tcgttgttatagatcctaggcctc

SEQ ID NO: 36073 - DNA, 20 bp, Artificial Sequence
  Synthetic
gtgtttcttcggaagagcgt

SEQ ID NO: 36074 - DNA, 23 bp, Artificial Sequence
  Synthetic
gttagcctctgtttaggagcttt

SEQ ID NO: 36075 - DNA, 20 bp, Artificial Sequence
  Synthetic
ctgcttggtagtgtcgaacg

SEQ ID NO: 36076 - DNA, 21 bp, Artificial Sequence
  Synthetic
gcagagcagtcagtaaaaccg

SEQ ID NO: 36077 - DNA, 21 bp, Artificial Sequence
  Synthetic
caggtgggatggagtttctgt

SEQ ID NO: 36078 - DNA, 23 bp, Artificial Sequence
  Synthetic
ctctttgggaggagaaagtcatc

SEQ ID NO: 36079 - DNA, 22 bp, Artificial Sequence
  Synthetic
ccctaaggaagagaagcgtaca

SEQ ID NO: 36080 - DNA, 22 bp, Artificial Sequence
  Synthetic
gggatgacttttccagggaagt

SEQ ID NO: 36081 - DNA, 20 bp, Artificial Sequence
  Synthetic
agtctccagcgctatctcca

SEQ ID NO: 36082 - DNA, 21 bp, Artificial Sequence
  Synthetic
aagtttaacgcgcagtcatca

SEQ ID NO: 36083 - DNA, 20 bp, Artificial Sequence
  Synthetic
tgttttgggctgtagcgttc

SEQ ID NO: 36084 - DNA, 23 bp, Artificial Sequence
  Synthetic
gtgtcgctattctacagggaatc

SEQ ID NO: 36085 - DNA, 24 bp, Artificial Sequence
  Synthetic
cgcaagtgattgaaattcacactc

SEQ ID NO: 36086 - DNA, 23 bp, Artificial Sequence
  Synthetic
ttcgtattatggtgcgtgattgt

SEQ ID NO: 36087 - DNA, 21 bp, Artificial Sequence
  Synthetic
gttacgaagcagcagcgttat

SEQ ID NO: 36088 - DNA, 21 bp, Artificial Sequence
  Synthetic
taaagctgtggcgaggactct

SEQ ID NO: 36089 - DNA, 22 bp, Artificial Sequence
  Synthetic
tcttcatacgctcagagcagat

SEQ ID NO: 36090 - DNA, 23 bp, Artificial Sequence
  Synthetic
gtctcgtcgttctatgattaccc

SEQ ID NO: 36091 - DNA, 22 bp, Artificial Sequence
  Synthetic
ggagggattgttttcggtccta

SEQ ID NO: 36092 - DNA, 20 bp, Artificial Sequence
  Synthetic
tgtgtcctagaagctcgggt

SEQ ID NO: 36093 - DNA, 21 bp, Artificial Sequence
  Synthetic
gtagcagcaatcccatccaag

SEQ ID NO: 36094 - DNA, 20 bp, Artificial Sequence
  Synthetic
atgctttggtatgcggggtt

SEQ ID NO: 36095 - DNA, 20 bp, Artificial Sequence
  Synthetic
aaggagggatggggttttcg

SEQ ID NO: 36096 - DNA, 20 bp, Artificial Sequence
  Synthetic
gggaaaacctgacgcgagat

SEQ ID NO: 36097 - DNA, 20 bp, Artificial Sequence
  Synthetic
ttgcgagcgtaactcttgga

SEQ ID NO: 36098 - DNA, 22 bp, Artificial Sequence
  Synthetic
tctggatcgtcccaatcctatg

SEQ ID NO: 36099 - DNA, 21 bp, Artificial Sequence
  Synthetic
gcgttacgaccatatggagga

SEQ ID NO: 36100 - DNA, 22 bp, Artificial Sequence
  Synthetic
agtcaaagatgctgcaaagcaa

SEQ ID NO: 36101 - DNA, 20 bp, Artificial Sequence
  Synthetic
acagtgttgctacctgcgat

SEQ ID NO: 36102 - DNA, 24 bp, Artificial Sequence
  Synthetic
ccggtcatcgaaaacaaagagttt

SEQ ID NO: 36103 - DNA, 22 bp, Artificial Sequence
  Synthetic
gaaattctccaacagacgggaa

SEQ ID NO: 36104 - DNA, 23 bp, Artificial Sequence
  Synthetic
tccttcacttaggtgcataagca

SEQ ID NO: 36105 - DNA, 25 bp, Artificial Sequence
  Synthetic
aacaaagcaaaagagaaaactcctt

SEQ ID NO: 36106 - DNA, 20 bp, Artificial Sequence
  Synthetic
cccatggcctactgcaaaga

SEQ ID NO: 36107 - DNA, 20 bp, Artificial Sequence
  Synthetic
atatcggcccgcattgatgt

SEQ ID NO: 36108 - DNA, 24 bp, Artificial Sequence
  Synthetic
cgtttctgatatgcgttctatcga

SEQ ID NO: 36109 - DNA, 20 bp, Artificial Sequence
  Synthetic
actaggttcttcgggtgcat

SEQ ID NO: 36110 - DNA, 21 bp, Artificial Sequence
  Synthetic
agagcttcctcttccaacagg

SEQ ID NO: 36111 - DNA, 23 bp, Artificial Sequence
  Synthetic
tcaggataattgtggattgcctc

SEQ ID NO: 36112 - DNA, 22 bp, Artificial Sequence
  Synthetic
tgatacaaaaagcggtctcagg

SEQ ID NO: 36113 - DNA, 22 bp, Artificial Sequence
  Synthetic
tccgtctacagcaaataaagcc

SEQ ID NO: 36114 - DNA, 23 bp, Artificial Sequence
  Synthetic
aatcgatcttcgtaattcccacc

SEQ ID NO: 36115 - DNA, 20 bp, Artificial Sequence
  Synthetic
ctcttaggacgccccatcga

SEQ ID NO: 36116 - DNA, 20 bp, Artificial Sequence
  Synthetic
atactggcaaagcgttctcg

SEQ ID NO: 36117 - DNA, 21 bp, Artificial Sequence
  Synthetic
gcctcttaacgttgcctgaat

SEQ ID NO: 36118 - DNA, 20 bp, Artificial Sequence
  Synthetic
agcagtcgtcctctcatcct

SEQ ID NO: 36119 - DNA, 20 bp, Artificial Sequence
  Synthetic
aaatcattatgcgggcagcc

SEQ ID NO: 36120 - DNA, 23 bp, Artificial Sequence
  Synthetic
caaaaacagagactgactcacct

SEQ ID NO: 36121 - DNA, 22 bp, Artificial Sequence
  Synthetic
gcggaaaagcttatgttctccc

SEQ ID NO: 36122 - DNA, 21 bp, Artificial Sequence
  Synthetic
tggaactgcttccctcctaga

SEQ ID NO: 36123 - DNA, 22 bp, Artificial Sequence
  Synthetic
gcgatgatgaaagcactcgaaa

SEQ ID NO: 36124 - DNA, 24 bp, Artificial Sequence
  Synthetic
caaaaagacacatcaatcaccctc

SEQ ID NO: 36125 - DNA, 22 bp, Artificial Sequence
  Synthetic
ccgaatcgcaaaatacctgagg

SEQ ID NO: 36126 - DNA, 20 bp, Artificial Sequence
  Synthetic
gtatacgcggcacacccaat

SEQ ID NO: 36127 - DNA, 23 bp, Artificial Sequence
  Synthetic
tccattttttcctcttcctccag

SEQ ID NO: 36128 - DNA, 20 bp, Artificial Sequence
  Synthetic
gcagtctgctagctgaggat

SEQ ID NO: 36129 - DNA, 24 bp, Artificial Sequence
  Synthetic
gaattccttggagcaatacctgat

SEQ ID NO: 36130 - DNA, 20 bp, Artificial Sequence
  Synthetic
cttttgctaacaagcgcgca

SEQ ID NO: 36131 - DNA, 22 bp, Artificial Sequence
  Synthetic
agcattaacgaaaaaggccagt

SEQ ID NO: 36132 - DNA, 22 bp, Artificial Sequence
  Synthetic
caaaaatcgcaacggtcattgg

SEQ ID NO: 36133 - DNA, 21 bp, Artificial Sequence
  Synthetic
tgattgtccgcgttttcctag

SEQ ID NO: 36134 - DNA, 22 bp, Artificial Sequence
  Synthetic
accatgaggagagtgaatccaa

SEQ ID NO: 36135 - DNA, 22 bp, Artificial Sequence
  Synthetic
agccaaatctcctacaccttca

SEQ ID NO: 36136 - DNA, 20 bp, Artificial Sequence
  Synthetic
acccgtagctagcacggata

SEQ ID NO: 36137 - DNA, 21 bp, Artificial Sequence
  Synthetic
cccgactttgtctcgaaacct

SEQ ID NO: 36138 - DNA, 20 bp, Artificial Sequence
  Synthetic
tctcagttgcattctggcgt

SEQ ID NO: 36139 - DNA, 22 bp, Artificial Sequence
  Synthetic
ttccctcatccactttccatct

SEQ ID NO: 36140 - DNA, 22 bp, Artificial Sequence
  Synthetic
tcccacgtttgatcatcctgat

SEQ ID NO: 36141 - DNA, 25 bp, Artificial Sequence
  Synthetic
ccagaaattccaattgttagccaat

SEQ ID NO: 36142 - DNA, 25 bp, Artificial Sequence
  Synthetic
tgataattaggggcattcatttcga

SEQ ID NO: 36143 - DNA, 21 bp, Artificial Sequence
  Synthetic
tccaaacaccattgccgtatt

SEQ ID NO: 36144 - DNA, 24 bp, Artificial Sequence
  Synthetic
gtggtccaaacatactcaacatca

SEQ ID NO: 36145 - DNA, 22 bp, Artificial Sequence
  Synthetic
ctgcagtcgcttgtaaaggaat

SEQ ID NO: 36146 - DNA, 21 bp, Artificial Sequence
  Synthetic
tggtgggaattagaaggccat

SEQ ID NO: 36147 - DNA, 23 bp, Artificial Sequence
  Synthetic
aagttagatctctgatggcttgc

SEQ ID NO: 36148 - DNA, 22 bp, Artificial Sequence
  Synthetic
cctgttcactcgatccagccat

SEQ ID NO: 36149 - DNA, 23 bp, Artificial Sequence
  Synthetic
gctgtttgtattataacgcaggc

SEQ ID NO: 36150 - DNA, 25 bp, Artificial Sequence
  Synthetic
agtactacagccttctttaggatct

SEQ ID NO: 36151 - DNA, 22 bp, Artificial Sequence
  Synthetic
gaatctggggtggatcagctat

SEQ ID NO: 36152 - DNA, 20 bp, Artificial Sequence
  Synthetic
catcctcaccctcgtcttct

SEQ ID NO: 36153 - DNA, 19 bp, Artificial Sequence
  Synthetic
tgctcctgcccctgctcct

SEQ ID NO: 36154 - DNA, 25 bp, Artificial Sequence
  Synthetic
agcctttatacttttctttagccct

SEQ ID NO: 36155 - DNA, 23 bp, Artificial Sequence
  Synthetic
actgtgggtgtatttccaactct

SEQ ID NO: 36156 - DNA, 21 bp, Artificial Sequence
  Synthetic
ctgcaggtgtttcagcatagg

SEQ ID NO: 36157 - DNA, 22 bp, Artificial Sequence
  Synthetic
tgtggatcaactgagcttctca

SEQ ID NO: 36158 - DNA, 25 bp, Artificial Sequence
  Synthetic
ttgctttggatcaaaagatgtgttt

SEQ ID NO: 36159 - DNA, 25 bp, Artificial Sequence
  Synthetic
gataccaaagacccactaacagtag

SEQ ID NO: 36160 - DNA, 20 bp, Artificial Sequence
  Synthetic
gacccaacccacgaattgac

SEQ ID NO: 36161 - DNA, 25 bp, Artificial Sequence
  Synthetic
atgccacaattacatcaaaaaggag

SEQ ID NO: 36162 - DNA, 25 bp, Artificial Sequence
  Synthetic
gctttgcaaatgagatttgtttcct

SEQ ID NO: 36163 - DNA, 25 bp, Artificial Sequence
  Synthetic
aaagagtccagtacaactttagcaa

SEQ ID NO: 36164 - DNA, 23 bp, Artificial Sequence
  Synthetic
caacattaaaagaaagacgcgct

SEQ ID NO: 36165 - DNA, 24 bp, Artificial Sequence
  Synthetic
accatcaacagttagcaagatgtc

SEQ ID NO: 36166 - DNA, 20 bp, Artificial Sequence
  Synthetic
ccagaccagtacgctgttcc

SEQ ID NO: 36167 - DNA, 24 bp, Artificial Sequence
  Synthetic
ttgggctttaataatacgctgagt

SEQ ID NO: 36168 - DNA, 21 bp, Artificial Sequence
  Synthetic
agcataaaaagctcaggcagc

SEQ ID NO: 36169 - DNA, 25 bp, Artificial Sequence
  Synthetic
aagaatcacaatcaatgcaattcca

SEQ ID NO: 36170 - DNA, 24 bp, Artificial Sequence
  Synthetic
acaggaaacaccagctattttagc

SEQ ID NO: 36171 - DNA, 21 bp, Artificial Sequence
  Synthetic
cttctcgcaacacttctggaa

SEQ ID NO: 36172 - DNA, 23 bp, Artificial Sequence
  Synthetic
cagcaatggaactagcagtcaat

SEQ ID NO: 36173 - DNA, 21 bp, Artificial Sequence
  Synthetic
gctttagccaactgagagcaa

SEQ ID NO: 36174 - DNA, 21 bp, Artificial Sequence
  Synthetic
catgaaaggctccttgtggtt

SEQ ID NO: 36175 - DNA, 25 bp, Artificial Sequence
  Synthetic
aagatgcttatgcttaaccaacaac

SEQ ID NO: 36176 - DNA, 23 bp, Artificial Sequence
  Synthetic
tctgtaaagcctgcaaaacagta

SEQ ID NO: 36177 - DNA, 25 bp, Artificial Sequence
  Synthetic
tcaactacctggtcataaacacttt

SEQ ID NO: 36178 - DNA, 20 bp, Artificial Sequence
  Synthetic
accaacaacccagcctcttg

SEQ ID NO: 36179 - DNA, 20 bp, Artificial Sequence
  Synthetic
tctgggtgttcaactcgtgc

SEQ ID NO: 36180 - DNA, 20 bp, Artificial Sequence
  Synthetic
accaatgccagcaacactag

SEQ ID NO: 36181 - DNA, 21 bp, Artificial Sequence
  Synthetic
ccaccaatttgtccgcaaact

SEQ ID NO: 36182 - DNA, 24 bp, Artificial Sequence
  Synthetic
aaagacaagcgataacgatgtgta

SEQ ID NO: 36183 - DNA, 22 bp, Artificial Sequence
  Synthetic
gacttgtgatgccggtatacac

SEQ ID NO: 36184 - DNA, 21 bp, Artificial Sequence
  Synthetic
actacaggaacaccacgtgta

SEQ ID NO: 36185 - DNA, 25 bp, Artificial Sequence
  Synthetic
ttcaatcttattgccattgcatgac

SEQ ID NO: 36186 - DNA, 25 bp, Artificial Sequence
  Synthetic
ctactataattctcctgcggaacaa

SEQ ID NO: 36187 - DNA, 23 bp, Artificial Sequence
  Synthetic
acttatcatagcactccaccctg

SEQ ID NO: 36188 - DNA, 25 bp, Artificial Sequence
  Synthetic
ggctaataaaaacagctttatgcca

SEQ ID NO: 36189 - DNA, 25 bp, Artificial Sequence
  Synthetic
ctacattgaactttagtttcgacgg

SEQ ID NO: 36190 - DNA, 21 bp, Artificial Sequence
  Synthetic
cggagacaagtgagctcaaag

SEQ ID NO: 36191 - DNA, 20 bp, Artificial Sequence
  Synthetic
cacaggcaatcgcttttggg

SEQ ID NO: 36192 - DNA, 20 bp, Artificial Sequence
  Synthetic
aaggcatttcaccagcctgt

SEQ ID NO: 36193 - DNA, 23 bp, Artificial Sequence
  Synthetic
cttcaagagcaccattatcacga

SEQ ID NO: 36194 - DNA, 25 bp, Artificial Sequence
  Synthetic
ccataaacaatgtgttcaaaggcat

SEQ ID NO: 36195 - DNA, 20 bp, Artificial Sequence
  Synthetic
gccacccagagctaacttgt

SEQ ID NO: 36196 - DNA, 20 bp, Artificial Sequence
  Synthetic
tgttgaccttcgcctgtgta

SEQ ID NO: 36197 - DNA, 25 bp, Artificial Sequence
  Synthetic
cgacttatcattaagccaagcttct

SEQ ID NO: 36198 - DNA, 20 bp, Artificial Sequence
  Synthetic
acacgaccgctatagcaact

SEQ ID NO: 36199 - DNA, 25 bp, Artificial Sequence
  Synthetic
agcttgtttgaataaactccaccat

SEQ ID NO: 36200 - DNA, 21 bp, Artificial Sequence
  Synthetic
tctgagcttccgcttcaagag

SEQ ID NO: 36201 - DNA, 20 bp, Artificial Sequence
  Synthetic
gcaatgcacagaccaggact

SEQ ID NO: 36202 - DNA, 25 bp, Artificial Sequence
  Synthetic
gacttttattgcctcctgtaaccta

SEQ ID NO: 36203 - DNA, 24 bp, Artificial Sequence
  Synthetic
agttgtttgtttctgggttgaaac

SEQ ID NO: 36204 - DNA, 20 bp, Artificial Sequence
  Synthetic
ttctcaacaatgcggtgtcc

SEQ ID NO: 36205 - DNA, 21 bp, Artificial Sequence
  Synthetic
aggtaggggttctattgccag

SEQ ID NO: 36206 - DNA, 22 bp, Artificial Sequence
  Synthetic
ttcataaacatccttctggggc

SEQ ID NO: 36207 - DNA, 23 bp, Artificial Sequence
  Synthetic
gaccccaattgcatttttgacat

SEQ ID NO: 36208 - DNA, 23 bp, Artificial Sequence
  Synthetic
cccaattgcatttttgacatcct

SEQ ID NO: 36209 - DNA, 20 bp, Artificial Sequence
  Synthetic
ccatggctaggcgctttccg

SEQ ID NO: 36210 - DNA, 21 bp, Artificial Sequence
  Synthetic
cgggaacttgacgtcctgtgg

SEQ ID NO: 36211 - DNA, 22 bp, Artificial Sequence
  Synthetic
ccgtcctggacacaaggtacac

SEQ ID NO: 36212 - DNA, 20 bp, Artificial Sequence
  Synthetic
gccccatccctgcctgaaga

SEQ ID NO: 36213 - DNA, 20 bp, Artificial Sequence
  Synthetic
ccccctggtccagttgcaag

SEQ ID NO: 36214 - DNA, 20 bp, Artificial Sequence
  Synthetic
agcggcccagtgttgcattg

SEQ ID NO: 36215 - DNA, 22 bp, Artificial Sequence
  Synthetic
cagaggaacccttgagacaggc

SEQ ID NO: 36216 - DNA, 21 bp, Artificial Sequence
  Synthetic
cccataggcacgcgacatgaa

SEQ ID NO: 36217 - DNA, 20 bp, Artificial Sequence
  Synthetic
ccgcatcttggggagcagtg

SEQ ID NO: 36218 - DNA, 22 bp, Artificial Sequence
  Synthetic
gccctccagctcaatatgaccc

SEQ ID NO: 36219 - DNA, 22 bp, Artificial Sequence
  Synthetic
gaacgccataagagacgccaca

SEQ ID NO: 36220 - DNA, 19 bp, Artificial Sequence
  Synthetic
caccgacgacgagagcacc

SEQ ID NO: 36221 - DNA, 20 bp, Artificial Sequence
  Synthetic
ttctgtggcccccgtgatgt

SEQ ID NO: 36222 - DNA, 20 bp, Artificial Sequence
  Synthetic
gtggccttcaacgacggagc

SEQ ID NO: 36223 - DNA, 21 bp, Artificial Sequence
  Synthetic
cccgtggtggtaaggcacatc

SEQ ID NO: 36224 - DNA, 20 bp, Artificial Sequence
  Synthetic
gagcagcagaccacgctctg

SEQ ID NO: 36225 - DNA, 22 bp, Artificial Sequence
  Synthetic
cgcagacaagaaagtccgggtt

SEQ ID NO: 36226 - DNA, 20 bp, Artificial Sequence
  Synthetic
atgtcacagccagaggtgat

SEQ ID NO: 36227 - DNA, 22 bp, Artificial Sequence
  Synthetic
gatgttagtatcctggctccca

SEQ ID NO: 36228 - DNA, 25 bp, Artificial Sequence
  Synthetic
tctcactatgttcctagcagcaata

SEQ ID NO: 36229 - DNA, 23 bp, Artificial Sequence
  Synthetic
gtaagcacctcttcctctctctt

SEQ ID NO: 36230 - DNA, 23 bp, Artificial Sequence
  Synthetic
cataggattcagtcgctgattcg

SEQ ID NO: 36231 - DNA, 20 bp, Artificial Sequence
  Synthetic
atttcctcgttggtcccgga

SEQ ID NO: 36232 - DNA, 22 bp, Artificial Sequence
  Synthetic
cactccagctgtgccttcatct

SEQ ID NO: 36233 - DNA, 22 bp, Artificial Sequence
  Synthetic
tgtgctgatagaagagccctgc

SEQ ID NO: 36234 - DNA, 20 bp, Artificial Sequence
  Synthetic
accgaaccaattgcccagcg

SEQ ID NO: 36235 - DNA, 20 bp, Artificial Sequence
  Synthetic
ccagatcacagcgttcgccc

SEQ ID NO: 36236 - DNA, 19 bp, Artificial Sequence
  Synthetic
acaagaccgtgcgtcccgg

SEQ ID NO: 36237 - DNA, 21 bp, Artificial Sequence
  Synthetic
aagacgactggttccacagcc

SEQ ID NO: 36238 - DNA, 22 bp, Artificial Sequence
  Synthetic
cccgtggtagacagtccagcat

SEQ ID NO: 36239 - DNA, 20 bp, Artificial Sequence
  Synthetic
aagtccaccgccttagccac

SEQ ID NO: 36240 - DNA, 20 bp, Artificial Sequence
  Synthetic
ctgaacagcgcccagtctgt

SEQ ID NO: 36241 - DNA, 21 bp, Artificial Sequence
  Synthetic
agggccttctgcttgaactgc

SEQ ID NO: 36242 - DNA, 19 bp, Artificial Sequence
  Synthetic
tccaacgctgccgatggcg

SEQ ID NO: 36243 - DNA, 18 bp, Artificial Sequence
  Synthetic
tgcatcgctctccggcac

SEQ ID NO: 36244 - DNA, 20 bp, Artificial Sequence
  Synthetic
acctcccgctcatcctcctc

SEQ ID NO: 36245 - DNA, 22 bp, Artificial Sequence
  Synthetic
cgggctcagaggatgttgtcgt

SEQ ID NO: 36246 - DNA, 20 bp, Artificial Sequence
  Synthetic
gacgccgctgctttgacctc

SEQ ID NO: 36247 - DNA, 21 bp, Artificial Sequence
  Synthetic
cacgatgagacgagctggctt

SEQ ID NO: 36248 - DNA, 21 bp, Artificial Sequence
  Synthetic
ccgcagttttccccccttgaa

SEQ ID NO: 36249 - DNA, 22 bp, Artificial Sequence
  Synthetic
ggggttgtagggtcacgggtaa

SEQ ID NO: 36250 - DNA, 22 bp, Artificial Sequence
  Synthetic
ggaccccaagttttctgaggca

SEQ ID NO: 36251 - DNA, 23 bp, Artificial Sequence
  Synthetic
gtctgctggtccataaaacacta

SEQ ID NO: 36252 - DNA, 19 bp, Artificial Sequence
  Synthetic
tggtgctgtccgtcgaccg

SEQ ID NO: 36253 - DNA, 22 bp, Artificial Sequence
  Synthetic
cacaaaaaaagcccagcaatgt

SEQ ID NO: 36254 - DNA, 20 bp, Artificial Sequence
  Synthetic
aacatctggggggcatgtgc

SEQ ID NO: 36255 - DNA, 20 bp, Artificial Sequence
  Synthetic
ggggctatagggctaaggtc

SEQ ID NO: 36256 - DNA, 20 bp, Artificial Sequence
  Synthetic
aaagtccatggccccatagc

SEQ ID NO: 36257 - DNA, 25 bp, Artificial Sequence
  Synthetic
acaactcgtttcaactctaaatggt

SEQ ID NO: 36258 - DNA, 25 bp, Artificial Sequence
  Synthetic
gcaggattttcatcaaagtaaacct

SEQ ID NO: 36259 - DNA, 20 bp, Artificial Sequence
  Synthetic
tttcggctggctcgtcaaca

SEQ ID NO: 36260 - DNA, 21 bp, Artificial Sequence
  Synthetic
acagactccaaccgggctgaa

SEQ ID NO: 36261 - DNA, 20 bp, Artificial Sequence
  Synthetic
agtgcctttacccgttccaa

SEQ ID NO: 36262 - DNA, 24 bp, Artificial Sequence
  Synthetic
ttgtttcacctacttcttcttgca

SEQ ID NO: 36263 - DNA, 20 bp, Artificial Sequence
  Synthetic
attcaaattgaaccgcgcga

SEQ ID NO: 36264 - DNA, 20 bp, Artificial Sequence
  Synthetic
gggagttggttttgcaggtg

SEQ ID NO: 36265 - DNA, 20 bp, Artificial Sequence
  Synthetic
gaccgcctcttccaatttgc

SEQ ID NO: 36266 - DNA, 22 bp, Artificial Sequence
  Synthetic
ggacaagagcctttatcaggac

SEQ ID NO: 36267 - DNA, 22 bp, Artificial Sequence
  Synthetic
cgccatcaacacctcctctaac

SEQ ID NO: 36268 - DNA, 21 bp, Artificial Sequence
  Synthetic
acaccgttttggcttcattgt

SEQ ID NO: 36269 - DNA, 21 bp, Artificial Sequence
  Synthetic
tgggcccatatgtattccacc

SEQ ID NO: 36270 - DNA, 23 bp, Artificial Sequence
  Synthetic
ttcgccacatcttacatggaatt

SEQ ID NO: 36271 - DNA, 24 bp, Artificial Sequence
  Synthetic
gaaagtatcgttggagttggtaca

SEQ ID NO: 36272 - DNA, 22 bp, Artificial Sequence
  Synthetic
tctcatttgtttgagcactgct

SEQ ID NO: 36273 - DNA, 21 bp, Artificial Sequence
  Synthetic
gccactaacaagaaagcctgc

SEQ ID NO: 36274 - DNA, 21 bp, Artificial Sequence
  Synthetic
ccaacactttccatcgcttga

SEQ ID NO: 36275 - DNA, 24 bp, Artificial Sequence
  Synthetic
tttacgtacacatcccacaaaagt

SEQ ID NO: 36276 - DNA, 25 bp, Artificial Sequence
  Synthetic
acaataaggatgtggtgtaccatca

SEQ ID NO: 36277 - DNA, 25 bp, Artificial Sequence
  Synthetic
ccttaactggcaactgtacaacttg

SEQ ID NO: 36278 - DNA, 24 bp, Artificial Sequence
  Synthetic
agcctcaggtttaatagtaatggc

SEQ ID NO: 36279 - DNA, 25 bp, Artificial Sequence
  Synthetic
aacaccaactaaacctacttcaact

SEQ ID NO: 36280 - DNA, 23 bp, Artificial Sequence
  Synthetic
ggcatagcacgatcacatttagg

SEQ ID NO: 36281 - DNA, 24 bp, Artificial Sequence
  Synthetic
aaatcatcaacaaaacaaccagct

SEQ ID NO: 36282 - DNA, 20 bp, Artificial Sequence
  Synthetic
atgagcgccctcaacatcaa

SEQ ID NO: 36283 - DNA, 22 bp, Artificial Sequence
  Synthetic
catagcatggcagctttaagca

SEQ ID NO: 36284 - DNA, 25 bp, Artificial Sequence
  Synthetic
tctaaaccatctacgtacacacaag

SEQ ID NO: 36285 - DNA, 20 bp, Artificial Sequence
  Synthetic
accactacccatgcgaagag

SEQ ID NO: 36286 - DNA, 22 bp, Artificial Sequence
  Synthetic
tgaacctgagcctctaaagcat

SEQ ID NO: 36287 - DNA, 25 bp, Artificial Sequence
  Synthetic
gatagtcctcaataactggcctaac

SEQ ID NO: 36288 - DNA, 21 bp, Artificial Sequence
  Synthetic
acgatttccagaggagcttct

SEQ ID NO: 36289 - DNA, 23 bp, Artificial Sequence
  Synthetic
ccttggcattttgcttagtgact

SEQ ID NO: 36290 - DNA, 24 bp, Artificial Sequence
  Synthetic
tttacgctgaggtttagaactcaa

SEQ ID NO: 36291 - DNA, 22 bp, Artificial Sequence
  Synthetic
gttcgacaatcatcgggttgaa

SEQ ID NO: 36292 - DNA, 24 bp, Artificial Sequence
  Synthetic
tcctcattttcaatgtcctgcaat

SEQ ID NO: 36293 - DNA, 20 bp, Artificial Sequence
  Synthetic
caattggggctacgtcctct

SEQ ID NO: 36294 - DNA, 23 bp, Artificial Sequence
  Synthetic
cagtgagagaaaactccatgctc

SEQ ID NO: 36295 - DNA, 25 bp, Artificial Sequence
  Synthetic
tgtctttctctttaatcgaggactc

SEQ ID NO: 36296 - DNA, 21 bp, Artificial Sequence
  Synthetic
ccctgatctcagtggcattct

SEQ ID NO: 36297 - DNA, 22 bp, Artificial Sequence
  Synthetic
gcctcgctttatcatccgaatt

SEQ ID NO: 36298 - DNA, 22 bp, Artificial Sequence
  Synthetic
cttgagactctcaggtcctcaa

SEQ ID NO: 36299 - DNA, 20 bp, Artificial Sequence
  Synthetic
tcgggactctctggcggagg

SEQ ID NO: 36300 - DNA, 20 bp, Artificial Sequence
  Synthetic
cgacagaccgtgttttggaa

SEQ ID NO: 36301 - DNA, 24 bp, Artificial Sequence
  Synthetic
tgtaggctgttcgtctatatccat

SEQ ID NO: 36302 - DNA, 25 bp, Artificial Sequence
  Synthetic
tgaacttgtttaggatccatggaaa

SEQ ID NO: 36303 - DNA, 25 bp, Artificial Sequence
  Synthetic
aaaatttcctacctaaagcatgctg

SEQ ID NO: 36304 - DNA, 25 bp, Artificial Sequence
  Synthetic
gcagcaaacttgttagtttcgattt

SEQ ID NO: 36305 - DNA, 25 bp, Artificial Sequence
  Synthetic
gaaatttaggcttctctacccctgt

SEQ ID NO: 36306 - DNA, 24 bp, Artificial Sequence
  Synthetic
acttcaattggcttgttctcttca

SEQ ID NO: 36307 - DNA, 24 bp, Artificial Sequence
  Synthetic
tctttctctttgacagaagactcg

SEQ ID NO: 36308 - DNA, 22 bp, Artificial Sequence
  Synthetic
tccaccgatgaggattccaatt

SEQ ID NO: 36309 - DNA, 20 bp, Artificial Sequence
  Synthetic
tgctccttgctagtgcttcg

SEQ ID NO: 36310 - DNA, 22 bp, Artificial Sequence
  Synthetic
gttttggtgtacctcttctgcc

SEQ ID NO: 36311 - DNA, 20 bp, Artificial Sequence
  Synthetic
gaaactccaaagctgggcag

SEQ ID NO: 36312 - DNA, 23 bp, Artificial Sequence
  Synthetic
cctttggctagtgttgagaatgg

SEQ ID NO: 36313 - DNA, 20 bp, Artificial Sequence
  Synthetic
tccatgcatagcgaccctta

SEQ ID NO: 36314 - DNA, 20 bp, Artificial Sequence
  Synthetic
taagaccatgctcccttgct

SEQ ID NO: 36315 - DNA, 21 bp, Artificial Sequence
  Synthetic
cttgcaggagacacatcaaca

SEQ ID NO: 36316 - DNA, 20 bp, Artificial Sequence
  Synthetic
cccctgtttgaggaacctca

SEQ ID NO: 36317 - DNA, 21 bp, Artificial Sequence
  Synthetic
gatcaggcacaacatcctgtg

SEQ ID NO: 36318 - DNA, 22 bp, Artificial Sequence
  Synthetic
tgacatcctggatttgccatca

SEQ ID NO: 36319 - DNA, 22 bp, Artificial Sequence
  Synthetic
cccgtaacatgagcattcttca

SEQ ID NO: 36320 - DNA, 20 bp, Artificial Sequence
  Synthetic
ccaagtgttagccccatcca

SEQ ID NO: 36321 - DNA, 20 bp, Artificial Sequence
  Synthetic
agtgagtatctcgcgagtgc

SEQ ID NO: 36322 - DNA, 22 bp, Artificial Sequence
  Synthetic
ggccattcctattccaccatgt

SEQ ID NO: 36323 - DNA, 25 bp, Artificial Sequence
  Synthetic
actcttattttcagtgtttggaggt

SEQ ID NO: 36324 - DNA, 21 bp, Artificial Sequence
  Synthetic
ccttgcgtttcactgacttct

SEQ ID NO: 36325 - DNA, 20 bp, Artificial Sequence
  Synthetic
aatgtcccaagcacatcccg

SEQ ID NO: 36326 - DNA, 20 bp, Artificial Sequence
  Synthetic
ctcaggacagcagactccac

SEQ ID NO: 36327 - DNA, 20 bp, Artificial Sequence
  Synthetic
cactgaggctcacagcaatt

SEQ ID NO: 36328 - DNA, 21 bp, Artificial Sequence
  Synthetic
cctcctccggttcatcttctg

SEQ ID NO: 36329 - DNA, 20 bp, Artificial Sequence
  Synthetic
cttccagcctcggactcaaa

SEQ ID NO: 36330 - DNA, 21 bp, Artificial Sequence
  Synthetic
tcttcttcgtcttctggaggg

SEQ ID NO: 36331 - DNA, 20 bp, Artificial Sequence
  Synthetic
aatctgcccccagtacctct

SEQ ID NO: 36332 - DNA, 20 bp, Artificial Sequence
  Synthetic
cttccaccccaactcctgga

SEQ ID NO: 36333 - DNA, 22 bp, Artificial Sequence
  Synthetic
tcaaattcgatgctgacgtcag

SEQ ID NO: 36334 - DNA, 22 bp, Artificial Sequence
  Synthetic
tgctgttgctgtgttactttgt

SEQ ID NO: 36335 - DNA, 24 bp, Artificial Sequence
  Synthetic
agtacctattcctaaaggtccacc

SEQ ID NO: 36336 - DNA, 25 bp, Artificial Sequence
  Synthetic
catgtccaaatcctatatcacccat

SEQ ID NO: 36337 - DNA, 25 bp, Artificial Sequence
  Synthetic
accacatacatacacaatgacttct

SEQ ID NO: 36338 - DNA, 22 bp, Artificial Sequence
  Synthetic
cctgaattagtcaatgcctccg

SEQ ID NO: 36339 - DNA, 20 bp, Artificial Sequence
  Synthetic
ctgcacgtttagcacattgc

SEQ ID NO: 36340 - DNA, 25 bp, Artificial Sequence
  Synthetic
ggaaatgtagcatcgtctataagcc

SEQ ID NO: 36341 - DNA, 21 bp, Artificial Sequence
  Synthetic
cagtacatgctcctgccttac

SEQ ID NO: 36342 - DNA, 22 bp, Artificial Sequence
  Synthetic
tgtccatgtgttttatgccaca

SEQ ID NO: 36343 - DNA, 22 bp, Artificial Sequence
  Synthetic
accagtacccttacctgtgcct

SEQ ID NO: 36344 - DNA, 21 bp, Artificial Sequence
  Synthetic
atggcgtaacatgtctgctac

SEQ ID NO: 36345 - DNA, 21 bp, Artificial Sequence
  Synthetic
aaacatatgcgaacgtttgcg

SEQ ID NO: 36346 - DNA, 25 bp, Artificial Sequence
  Synthetic
cagataactaattcggttgctggaa

SEQ ID NO: 36347 - DNA, 20 bp, Artificial Sequence
  Synthetic
cgggtgacaactcctcatca

SEQ ID NO: 36348 - DNA, 21 bp, Artificial Sequence
  Synthetic
ctgccatgtcgaaaaagggat

SEQ ID NO: 36349 - DNA, 20 bp, Artificial Sequence
  Synthetic
tcagcaaccgttctgtcctg

SEQ ID NO: 36350 - DNA, 21 bp, Artificial Sequence
  Synthetic
acggtcgcgttaaatctccat

SEQ ID NO: 36351 - DNA, 25 bp, Artificial Sequence
  Synthetic
tggaggtatatactgttggttgagt

SEQ ID NO: 36352 - DNA, 22 bp, Artificial Sequence
  Synthetic
tcgtcctaattccctgacatct

SEQ ID NO: 36353 - DNA, 24 bp, Artificial Sequence
  Synthetic
tggatctggaaatagtagtcgcat

SEQ ID NO: 36354 - DNA, 23 bp, Artificial Sequence
  Synthetic
gccaagataattatgaaggcgcg

SEQ ID NO: 36355 - DNA, 19 bp, Artificial Sequence
  Synthetic
tgctcgcccactcgaccga

SEQ ID NO: 36356 - DNA, 21 bp, Artificial Sequence
  Synthetic
accccgtcacagaattgattg

SEQ ID NO: 36357 - DNA, 18 bp, Artificial Sequence
  Synthetic
atggggagccaggcccaa

SEQ ID NO: 36358 - DNA, 20 bp, Artificial Sequence
  Synthetic
cggtctcccctaggcttgga

SEQ ID NO: 36359 - DNA, 22 bp, Artificial Sequence
  Synthetic
ccacagaaactacacggcctca

SEQ ID NO: 36360 - DNA, 22 bp, Artificial Sequence
  Synthetic
ttccgaccacgagtctttgtcc

SEQ ID NO: 36361 - DNA, 19 bp, Artificial Sequence
  Synthetic
actgggcccagcgggagaa

SEQ ID NO: 36362 - DNA, 22 bp, Artificial Sequence
  Synthetic
cacgttcagcagacacgagaga

SEQ ID NO: 36363 - DNA, 22 bp, Artificial Sequence
  Synthetic
ccgattgatggcaaggccctat

SEQ ID NO: 36364 - DNA, 21 bp, Artificial Sequence
  Synthetic
cctacgtctccgcagacaccc

SEQ ID NO: 36365 - DNA, 20 bp, Artificial Sequence
  Synthetic
ggctctggaggccgtcctct

SEQ ID NO: 36366 - DNA, 19 bp, Artificial Sequence
  Synthetic
agagcccgctcccacttcg

SEQ ID NO: 36367 - DNA, 19 bp, Artificial Sequence
  Synthetic
cggtccgtgtagatgccgg

SEQ ID NO: 36368 - DNA, 19 bp, Artificial Sequence
  Synthetic
cgctttgccggcatccagt

SEQ ID NO: 36369 - DNA, 20 bp, Artificial Sequence
  Synthetic
accgacgattccccctcacc

SEQ ID NO: 36370 - DNA, 19 bp, Artificial Sequence
  Synthetic
ggcgcattcaccaggcagc

SEQ ID NO: 36371 - DNA, 19 bp, Artificial Sequence
  Synthetic
tccatgggacgaggcggca

SEQ ID NO: 36372 - DNA, 19 bp, Artificial Sequence
  Synthetic
gagtccgctgctaccgagc

SEQ ID NO: 36373 - DNA, 19 bp, Artificial Sequence
  Synthetic
tggctgggaatggcaggcg

SEQ ID NO: 36374 - DNA, 19 bp, Artificial Sequence
  Synthetic
ctccaccccgaccaactgc

SEQ ID NO: 36375 - DNA, 19 bp, Artificial Sequence
  Synthetic
ttggctcctcggcatgggc

SEQ ID NO: 36376 - DNA, 19 bp, Artificial Sequence
  Synthetic
tgagggggcggtcaccgat

SEQ ID NO: 36377 - DNA, 22 bp, Artificial Sequence
  Synthetic
ctcaaaatccacctggctgcct

SEQ ID NO: 36378 - DNA, 22 bp, Artificial Sequence
  Synthetic
ggacctgttgcttcagagcctt

SEQ ID NO: 36379 - DNA, 21 bp, Artificial Sequence
  Synthetic
cgggacaacggcacagaaagt

SEQ ID NO: 36380 - DNA, 20 bp, Artificial Sequence
  Synthetic
aaactgcctagagaccggag

SEQ ID NO: 36381 - DNA, 21 bp, Artificial Sequence
  Synthetic
accaagggtccacgtcgaatg

SEQ ID NO: 36382 - DNA, 19 bp, Artificial Sequence
  Synthetic
aagtctcccgagcccgacc

SEQ ID NO: 36383 - DNA, 20 bp, Artificial Sequence
  Synthetic
gctcctggtcttccgcctcc

SEQ ID NO: 36384 - DNA, 22 bp, Artificial Sequence
  Synthetic
cgcctttgaggtcctgagagac

SEQ ID NO: 36385 - DNA, 19 bp, Artificial Sequence
  Synthetic
tgtagggagcactcggggc

SEQ ID NO: 36386 - DNA, 21 bp, Artificial Sequence
  Synthetic
gggctttgtggcaccaacctc

SEQ ID NO: 36387 - DNA, 19 bp, Artificial Sequence
  Synthetic
gggatgatgggcgggacca

SEQ ID NO: 36388 - DNA, 19 bp, Artificial Sequence
  Synthetic
ttacgctgcagcacggggc

SEQ ID NO: 36389 - DNA, 19 bp, Artificial Sequence
  Synthetic
cccgatgacccgatgctcg

SEQ ID NO: 36390 - DNA, 20 bp, Artificial Sequence
  Synthetic
cccttggaactgacgggcac

SEQ ID NO: 36391 - DNA, 22 bp, Artificial Sequence
  Synthetic
gccagactctcttcagtgaccg

SEQ ID NO: 36392 - DNA, 21 bp, Artificial Sequence
  Synthetic
gttgatggcatcgtcacgcac

SEQ ID NO: 36393 - DNA, 21 bp, Artificial Sequence
  Synthetic
tggaggcatgaaacggaagca

SEQ ID NO: 36394 - DNA, 22 bp, Artificial Sequence
  Synthetic
aagcggacagagcagactgttt

SEQ ID NO: 36395 - DNA, 19 bp, Artificial Sequence
  Synthetic
gccagtggggggggtgttt

SEQ ID NO: 36396 - DNA, 21 bp, Artificial Sequence
  Synthetic
caccaccgagggaaagttggt

SEQ ID NO: 36397 - DNA, 20 bp, Artificial Sequence
  Synthetic
agagtggggctgtggatggt

SEQ ID NO: 36398 - DNA, 21 bp, Artificial Sequence
  Synthetic
gggcctgtatgaagaaagagc

SEQ ID NO: 36399 - DNA, 22 bp, Artificial Sequence
  Synthetic
ggcccaaccttgccctatacca

SEQ ID NO: 36400 - DNA, 19 bp, Artificial Sequence
  Synthetic
tttagcaggccggtggtgg

SEQ ID NO: 36401 - DNA, 21 bp, Artificial Sequence
  Synthetic
cccggcaagccaaagtaggcc

SEQ ID NO: 36402 - DNA, 21 bp, Artificial Sequence
  Synthetic
acgtctcagggcatgcttcac

SEQ ID NO: 36403 - DNA, 22 bp, Artificial Sequence
  Synthetic
gcaacggaagatgcgtgcacta

SEQ ID NO: 36404 - DNA, 21 bp, Artificial Sequence
  Synthetic
cgtctttgtggagcccaaggg

SEQ ID NO: 36405 - DNA, 19 bp, Artificial Sequence
  Synthetic
ggcttcttgcgggccaaca

SEQ ID NO: 36406 - DNA, 19 bp, Artificial Sequence
  Synthetic
atgtggtggcgccagcgtg

SEQ ID NO: 36407 - DNA, 21 bp, Artificial Sequence
  Synthetic
gcctcaccagaaggcgttcct

SEQ ID NO: 36408 - DNA, 22 bp, Artificial Sequence
  Synthetic
ccggtctcgggactgtttgaga

SEQ ID NO: 36409 - DNA, 22 bp, Artificial Sequence
  Synthetic
ccagcctcaactacgactcgtg

SEQ ID NO: 36410 - DNA, 20 bp, Artificial Sequence
  Synthetic
gtctgcgagcgttagggtcc

SEQ ID NO: 36411 - DNA, 20 bp, Artificial Sequence
  Synthetic
agccgggcttcagcatcaat

SEQ ID NO: 36412 - DNA, 22 bp, Artificial Sequence
  Synthetic
catgccaagatcgctgagacgt

SEQ ID NO: 36413 - DNA, 20 bp, Artificial Sequence
  Synthetic
tacgcggtgttcacccggga

SEQ ID NO: 36414 - DNA, 22 bp, Artificial Sequence
  Synthetic
gctatttccaaacagcaggcac

SEQ ID NO: 36415 - DNA, 22 bp, Artificial Sequence
  Synthetic
acatgcttaatccctttgccac

SEQ ID NO: 36416 - DNA, 20 bp, Artificial Sequence
  Synthetic
tgcttgctaaaaaggctgct

SEQ ID NO: 36417 - DNA, 20 bp, Artificial Sequence
  Synthetic
atttcctggctcgtgtcacg

SEQ ID NO: 36418 - DNA, 21 bp, Artificial Sequence
  Synthetic
acagtggctagaaattgtgcc

SEQ ID NO: 36419 - DNA, 20 bp, Artificial Sequence
  Synthetic
gttaggtaagggacgctgct

SEQ ID NO: 36420 - DNA, 22 bp, Artificial Sequence
  Synthetic
aaatcaatgtcagggccatcaa

SEQ ID NO: 36421 - DNA, 22 bp, Artificial Sequence
  Synthetic
caatggatggccactaacacct

SEQ ID NO: 36422 - DNA, 20 bp, Artificial Sequence
  Synthetic
gaggtaaccatggacccact

SEQ ID NO: 36423 - DNA, 22 bp, Artificial Sequence
  Synthetic
actcacaggggtgcaaccaaat

SEQ ID NO: 36424 - DNA, 24 bp, Artificial Sequence
  Synthetic
gactgttgaaaaatgcaagggaat

SEQ ID NO: 36425 - DNA, 25 bp, Artificial Sequence
  Synthetic
gctttaccattattgcacagtcttt

SEQ ID NO: 36426 - DNA, 24 bp, Artificial Sequence
  Synthetic
cagcactacagtcttgtaatgtcc

SEQ ID NO: 36427 - DNA, 21 bp, Artificial Sequence
  Synthetic
acggtcgcgatactgtcggta

SEQ ID NO: 36428 - DNA, 21 bp, Artificial Sequence
  Synthetic
ccgaccctatacccaaaccac

SEQ ID NO: 36429 - DNA, 24 bp, Artificial Sequence
  Synthetic
agaaatcttaccctttgttcccag

SEQ ID NO: 36430 - DNA, 22 bp, Artificial Sequence
  Synthetic
gtttctgcagcaggataagtgg

SEQ ID NO: 36431 - DNA, 25 bp, Artificial Sequence
  Synthetic
tggatctttactttgcgtttcagat

SEQ ID NO: 36432 - DNA, 22 bp, Artificial Sequence
  Synthetic
tggaaccgtttgccttcactga

SEQ ID NO: 36433 - DNA, 21 bp, Artificial Sequence
  Synthetic
catgtcctgtccgctgtcacc

SEQ ID NO: 36434 - DNA, 24 bp, Artificial Sequence
  Synthetic
aaatgcacatattacccagtccaa

SEQ ID NO: 36435 - DNA, 25 bp, Artificial Sequence
  Synthetic
gcctgctttataccaatatagtgca

SEQ ID NO: 36436 - DNA, 24 bp, Artificial Sequence
  Synthetic
gtgtagcacatagtttttgtgtcc

SEQ ID NO: 36437 - DNA, 20 bp, Artificial Sequence
  Synthetic
tgtgtccaggcagacaagta

SEQ ID NO: 36438 - DNA, 20 bp, Artificial Sequence
  Synthetic
gtgccggaccctgttccaat

SEQ ID NO: 36439 - DNA, 21 bp, Artificial Sequence
  Synthetic
gctgtgataaaaacctggggt

SEQ ID NO: 36440 - DNA, 25 bp, Artificial Sequence
  Synthetic
ttttgatagcaaaataaggatggcc

SEQ ID NO: 36441 - DNA, 20 bp, Artificial Sequence
  Synthetic
catcgccaggcacaacatca

SEQ ID NO: 36442 - DNA, 24 bp, Artificial Sequence
  Synthetic
aaaatcagggtacttgcatgtagt

SEQ ID NO: 36443 - DNA, 24 bp, Artificial Sequence
  Synthetic
agcatacaacagacacacacataa

SEQ ID NO: 36444 - DNA, 20 bp, Artificial Sequence
  Synthetic
taaaggctaggggacggccg

SEQ ID NO: 36445 - DNA, 22 bp, Artificial Sequence
  Synthetic
ccgcccggaaacttaacgtctt

SEQ ID NO: 36446 - DNA, 20 bp, Artificial Sequence
  Synthetic
cccactttctcgcacgggac

SEQ ID NO: 36447 - DNA, 20 bp, Artificial Sequence
  Synthetic
tgacctcggggacacgcatc

SEQ ID NO: 36448 - DNA, 22 bp, Artificial Sequence
  Synthetic
tgggtgtagaacagagacgcga

SEQ ID NO: 36449 - DNA, 22 bp, Artificial Sequence
  Synthetic
cgcaagtcttggtgtagccaga

SEQ ID NO: 36450 - DNA, 20 bp, Artificial Sequence
  Synthetic
gatgatgtcgtaggcgccgc

SEQ ID NO: 36451 - DNA, 22 bp, Artificial Sequence
  Synthetic
cggagacgtccaaccctctgta

SEQ ID NO: 36452 - DNA, 21 bp, Artificial Sequence
  Synthetic
ccaagcggtacaggagaggtg

SEQ ID NO: 36453 - DNA, 22 bp, Artificial Sequence
  Synthetic
gcttgtttggaagcttgctgca

SEQ ID NO: 36454 - DNA, 20 bp, Artificial Sequence
  Synthetic
cgcaccataccctgccagga

SEQ ID NO: 36455 - DNA, 21 bp, Artificial Sequence
  Synthetic
aggaaaggtcccctgccagat

SEQ ID NO: 36456 - DNA, 22 bp, Artificial Sequence
  Synthetic
ggggcatggaagagatggaacc

SEQ ID NO: 36457 - DNA, 22 bp, Artificial Sequence
  Synthetic
gccatcttctcgcagaccctga

SEQ ID NO: 36458 - DNA, 20 bp, Artificial Sequence
  Synthetic
gtatctgcggcggccttgtg

SEQ ID NO: 36459 - DNA, 20 bp, Artificial Sequence
  Synthetic
gccacccgtgtcagttcgtg

SEQ ID NO: 36460 - DNA, 21 bp, Artificial Sequence
  Synthetic
gcacatcgcgcatctacaccg

SEQ ID NO: 36461 - DNA, 22 bp, Artificial Sequence
  Synthetic
ggcgaagtcatcggtttcaagc

SEQ ID NO: 36462 - DNA, 22 bp, Artificial Sequence
  Synthetic
ggattctgccgataccatgccg

SEQ ID NO: 36463 - DNA, 22 bp, Artificial Sequence
  Synthetic
tgaagctgctgaccatcgtcaa

SEQ ID NO: 36464 - DNA, 18 bp, Artificial Sequence
  Synthetic
gccaaagcaaaccccgcg

SEQ ID NO: 36465 - DNA, 21 bp, Artificial Sequence
  Synthetic
gcgccagcatgtcattgaccg

SEQ ID NO: 36466 - DNA, 20 bp, Artificial Sequence
  Synthetic
cgaaatcccgcagagcgtca

SEQ ID NO: 36467 - DNA, 20 bp, Artificial Sequence
  Synthetic
ggcggaacagttgaaggcgg

SEQ ID NO: 36468 - DNA, 20 bp, Artificial Sequence
  Synthetic
gggctggtgctgtcggttac

SEQ ID NO: 36469 - DNA, 20 bp, Artificial Sequence
  Synthetic
aatgaccgaccaaccgtggg

SEQ ID NO: 36470 - DNA, 20 bp, Artificial Sequence
  Synthetic
cagcttttgtttgcgcccga

SEQ ID NO: 36471 - DNA, 18 bp, Artificial Sequence
  Synthetic
gcgcgaagtgtggctggt

SEQ ID NO: 36472 - DNA, 19 bp, Artificial Sequence
  Synthetic
ccgcacgccgcattattgc

SEQ ID NO: 36473 - DNA, 19 bp, Artificial Sequence
  Synthetic
tggctgaaacaggccgccg

SEQ ID NO: 36474 - DNA, 20 bp, Artificial Sequence
  Synthetic
tttcagacggcatcggcagt

SEQ ID NO: 36475 - DNA, 19 bp, Artificial Sequence
  Synthetic
accgcctcgcccttttcgg

SEQ ID NO: 36476 - DNA, 21 bp, Artificial Sequence
  Synthetic
cgttcctgccggtaaacaggg

SEQ ID NO: 36477 - DNA, 18 bp, Artificial Sequence
  Synthetic
cgcgccgaacgacaaacc

SEQ ID NO: 36478 - DNA, 22 bp, Artificial Sequence
  Synthetic
acgcaaaacgaacaggcgattt

SEQ ID NO: 36479 - DNA, 20 bp, Artificial Sequence
  Synthetic
tctccgccaaacacgcgatg

SEQ ID NO: 36480 - DNA, 19 bp, Artificial Sequence
  Synthetic
gcgctgcatggcaggcatt

SEQ ID NO: 36481 - DNA, 20 bp, Artificial Sequence
  Synthetic
cccgtggggcgtgattgttc

SEQ ID NO: 36482 - DNA, 19 bp, Artificial Sequence
  Synthetic
cgaaaaaggcgcgcaaggc

SEQ ID NO: 36483 - DNA, 19 bp, Artificial Sequence
  Synthetic
atgcccgaaacaggcggcg

SEQ ID NO: 36484 - DNA, 20 bp, Artificial Sequence
  Synthetic
ttcagcctggtcttggtcgc

SEQ ID NO: 36485 - DNA, 22 bp, Artificial Sequence
  Synthetic
agcgcggaaggcataaaggaag

SEQ ID NO: 36486 - DNA, 22 bp, Artificial Sequence
  Synthetic
gcatcgccaaaaccactttcgg

SEQ ID NO: 36487 - DNA, 21 bp, Artificial Sequence
  Synthetic
accagtgcaatcggcgtatgc

SEQ ID NO: 36488 - DNA, 21 bp, Artificial Sequence
  Synthetic
ggcgtttgttcaactcggcga

SEQ ID NO: 36489 - DNA, 20 bp, Artificial Sequence
  Synthetic
gttttgtggcgccagcagtg

SEQ ID NO: 36490 - DNA, 19 bp, Artificial Sequence
  Synthetic
accgctgctccgctcgagt

SEQ ID NO: 36491 - DNA, 19 bp, Artificial Sequence
  Synthetic
ttgccatggacaacgccga

SEQ ID NO: 36492 - DNA, 20 bp, Artificial Sequence
  Synthetic
gacaagggcgacgtggaaga

SEQ ID NO: 36493 - DNA, 19 bp, Artificial Sequence
  Synthetic
gcctgcgaccgttacgacc

SEQ ID NO: 36494 - DNA, 19 bp, Artificial Sequence
  Synthetic
accgccctgacgttcttgg

SEQ ID NO: 36495 - DNA, 18 bp, Artificial Sequence
  Synthetic
atggccgagcttcacccg

SEQ ID NO: 36496 - DNA, 19 bp, Artificial Sequence
  Synthetic
tgtggcagccgctcaaacg

SEQ ID NO: 36497 - DNA, 22 bp, Artificial Sequence
  Synthetic
ggcatcggtttgaacgtcgtcc

SEQ ID NO: 36498 - DNA, 20 bp, Artificial Sequence
  Synthetic
tccgtcctgaccgccgttta

SEQ ID NO: 36499 - DNA, 22 bp, Artificial Sequence
  Synthetic
cctcgggctggatcaggcatac

SEQ ID NO: 36500 - DNA, 20 bp, Artificial Sequence
  Synthetic
ggcacggtgttggcagacaa

SEQ ID NO: 36501 - DNA, 22 bp, Artificial Sequence
  Synthetic
ggaaaacgtcgtcgcccacatc

SEQ ID NO: 36502 - DNA, 22 bp, Artificial Sequence
  Synthetic
gcgcccgaaatataggcgaaca

SEQ ID NO: 36503 - DNA, 18 bp, Artificial Sequence
  Synthetic
cgccgcatcatcgacgct

SEQ ID NO: 36504 - DNA, 22 bp, Artificial Sequence
  Synthetic
ccgactatgctgtctgccggta

SEQ ID NO: 36505 - DNA, 18 bp, Artificial Sequence
  Synthetic
gcccttcctgccaaggca

SEQ ID NO: 36506 - DNA, 19 bp, Artificial Sequence
  Synthetic
caccaacgccgaaaacgcc

SEQ ID NO: 36507 - DNA, 18 bp, Artificial Sequence
  Synthetic
ggcaaaggcttcggggct

SEQ ID NO: 36508 - DNA, 19 bp, Artificial Sequence
  Synthetic
acggcacagcagggcatcg

SEQ ID NO: 36509 - DNA, 19 bp, Artificial Sequence
  Synthetic
acggcctgcggcaaattcc

SEQ ID NO: 36510 - DNA, 21 bp, Artificial Sequence
  Synthetic
cgcgcttgttccaaaaggtgt

SEQ ID NO: 36511 - DNA, 19 bp, Artificial Sequence
  Synthetic
gcgcaaacctctgccgcat

SEQ ID NO: 36512 - DNA, 18 bp, Artificial Sequence
  Synthetic
cgtgttcacgccgcacct

SEQ ID NO: 36513 - DNA, 20 bp, Artificial Sequence
  Synthetic
tccgacctgggaacactggt

SEQ ID NO: 36514 - DNA, 19 bp, Artificial Sequence
  Synthetic
cggcctcgccttccaaacg

SEQ ID NO: 36515 - DNA, 22 bp, Artificial Sequence
  Synthetic
ttcgagatgaaaagcggtatcg

SEQ ID NO: 36516 - DNA, 20 bp, Artificial Sequence
  Synthetic
tgcccctgtgctcccaagta

SEQ ID NO: 36517 - DNA, 20 bp, Artificial Sequence
  Synthetic
cttcccctgcctcgaaacgc

SEQ ID NO: 36518 - DNA, 20 bp, Artificial Sequence
  Synthetic
tggcggtcaaagtcgaaccc

SEQ ID NO: 36519 - DNA, 19 bp, Artificial Sequence
  Synthetic
cgtttcaagctggggcgcg

SEQ ID NO: 36520 - DNA, 19 bp, Artificial Sequence
  Synthetic
catggtcgtcggcttggct

SEQ ID NO: 36521 - DNA, 21 bp, Artificial Sequence
  Synthetic
gcgatgctggatttgggcttg

SEQ ID NO: 36522 - DNA, 19 bp, Artificial Sequence
  Synthetic
aacgtccgaccatcgcacc

SEQ ID NO: 36523 - DNA, 19 bp, Artificial Sequence
  Synthetic
ccagcatttcgcacaccgc

SEQ ID NO: 36524 - DNA, 21 bp, Artificial Sequence
  Synthetic
gcggggcagcccatattgatg

SEQ ID NO: 36525 - DNA, 21 bp, Artificial Sequence
  Synthetic
cggcggtttgtttgaggacgg

SEQ ID NO: 36526 - DNA, 21 bp, Artificial Sequence
  Synthetic
tacccttcccgatagccgcac

SEQ ID NO: 36527 - DNA, 20 bp, Artificial Sequence
  Synthetic
ttcgccatatcgtccagcgg

SEQ ID NO: 36528 - DNA, 20 bp, Artificial Sequence
  Synthetic
agttcagatacaccggcgcg

SEQ ID NO: 36529 - DNA, 22 bp, Artificial Sequence
  Synthetic
cgtcggcgtattcctcgtcatg

SEQ ID NO: 36530 - DNA, 20 bp, Artificial Sequence
  Synthetic
gtggttatcgcccgtcgcaa

SEQ ID NO: 36531 - DNA, 22 bp, Artificial Sequence
  Synthetic
ccgattaccactgtgaaccgca

SEQ ID NO: 36532 - DNA, 20 bp, Artificial Sequence
  Synthetic
aaaccctcgaacatgccgcc

SEQ ID NO: 36533 - DNA, 20 bp, Artificial Sequence
  Synthetic
acctccccctaccggcacac

SEQ ID NO: 36534 - DNA, 20 bp, Artificial Sequence
  Synthetic
atctgccacgacatcgcctc

SEQ ID NO: 36535 - DNA, 19 bp, Artificial Sequence
  Synthetic
gcgcccaactgtccgacct

SEQ ID NO: 36536 - DNA, 21 bp, Artificial Sequence
  Synthetic
aaccctgaagaggatcagcgc

SEQ ID NO: 36537 - DNA, 22 bp, Artificial Sequence
  Synthetic
gtcgtcctataccccgccaaac

SEQ ID NO: 36538 - DNA, 21 bp, Artificial Sequence
  Synthetic
ggactggacatacacccggct

SEQ ID NO: 36539 - DNA, 22 bp, Artificial Sequence
  Synthetic
tgattggcagccgatcgaacaa

SEQ ID NO: 36540 - DNA, 17 bp, Artificial Sequence
  Synthetic
aacgttgtcgccggcgt

SEQ ID NO: 36541 - DNA, 19 bp, Artificial Sequence
  Synthetic
cccgaccgcatcctctgca

SEQ ID NO: 36542 - DNA, 20 bp, Artificial Sequence
  Synthetic
cttgcgggccgataaattcg

SEQ ID NO: 36543 - DNA, 22 bp, Artificial Sequence
  Synthetic
gcgaaaaaaccgtcttgtgcga

SEQ ID NO: 36544 - DNA, 18 bp, Artificial Sequence
  Synthetic
gctgcacgcctgcggaaa

SEQ ID NO: 36545 - DNA, 19 bp, Artificial Sequence
  Synthetic
cgaccggtttggatgcggt

SEQ ID NO: 36546 - DNA, 18 bp, Artificial Sequence
  Synthetic
cgccgcctgctcaatgca

SEQ ID NO: 36547 - DNA, 22 bp, Artificial Sequence
  Synthetic
cgatttacgagggcagcatcga

SEQ ID NO: 36548 - DNA, 18 bp, Artificial Sequence
  Synthetic
gcctgcgcaaaccggtca

SEQ ID NO: 36549 - DNA, 18 bp, Artificial Sequence
  Synthetic
acagttcttcgccgccgc

SEQ ID NO: 36550 - DNA, 18 bp, Artificial Sequence
  Synthetic
ttgccgcactcgatgccg

SEQ ID NO: 36551 - DNA, 19 bp, Artificial Sequence
  Synthetic
gtggcactgagcggacgtt

SEQ ID NO: 36552 - DNA, 21 bp, Artificial Sequence
  Synthetic
cctccaaccttgccgttgtcg

SEQ ID NO: 36553 - DNA, 22 bp, Artificial Sequence
  Synthetic
ggaagaagcggcggaaaaagtg

SEQ ID NO: 36554 - DNA, 19 bp, Artificial Sequence
  Synthetic
agctcggggctgtatcggg

SEQ ID NO: 36555 - DNA, 19 bp, Artificial Sequence
  Synthetic
acgcgctggcaaccctctc

SEQ ID NO: 36556 - DNA, 19 bp, Artificial Sequence
  Synthetic
accgcattcgccaccaccg

SEQ ID NO: 36557 - DNA, 19 bp, Artificial Sequence
  Synthetic
tcggcttcaaccacggcac

SEQ ID NO: 36558 - DNA, 19 bp, Artificial Sequence
  Synthetic
agaagccgcgggcagcaag

SEQ ID NO: 36559 - DNA, 19 bp, Artificial Sequence
  Synthetic
tccgcgaactcgaagcgtt

SEQ ID NO: 36560 - DNA, 21 bp, Artificial Sequence
  Synthetic
cgtcgaccagaccatcgccat

SEQ ID NO: 36561 - DNA, 22 bp, Artificial Sequence
  Synthetic
gctgcgatttcgaaccgtttgc

SEQ ID NO: 36562 - DNA, 21 bp, Artificial Sequence
  Synthetic
gcacatccaacagcagggtca

SEQ ID NO: 36563 - DNA, 19 bp, Artificial Sequence
  Synthetic
tcgcccgcatcttccgcac

SEQ ID NO: 36564 - DNA, 20 bp, Artificial Sequence
  Synthetic
gatggtttccagcggcgaga

SEQ ID NO: 36565 - DNA, 19 bp, Artificial Sequence
  Synthetic
cggtgggtttcgcgcttga

SEQ ID NO: 36566 - DNA, 19 bp, Artificial Sequence
  Synthetic
aaggccgtctgaagccgcc

SEQ ID NO: 36567 - DNA, 19 bp, Artificial Sequence
  Synthetic
gcctgtcgttgagcgcgtt

SEQ ID NO: 36568 - DNA, 18 bp, Artificial Sequence
  Synthetic
gcggcgtggaagcgtcta

SEQ ID NO: 36569 - DNA, 21 bp, Artificial Sequence
  Synthetic
ctccgaatccgtcgccttcaa

SEQ ID NO: 36570 - DNA, 20 bp, Artificial Sequence
  Synthetic
aggacttggcaggcgaagac

SEQ ID NO: 36571 - DNA, 18 bp, Artificial Sequence
  Synthetic
aaacgcgggctgctgctg

SEQ ID NO: 36572 - DNA, 18 bp, Artificial Sequence
  Synthetic
tacgccaatcggtgcgcc

SEQ ID NO: 36573 - DNA, 21 bp, Artificial Sequence
  Synthetic
aagcgtaactcaaggcaatgt

SEQ ID NO: 36574 - DNA, 20 bp, Artificial Sequence
  Synthetic
aaacacgccaaagcagaagt

SEQ ID NO: 36575 - DNA, 18 bp, Artificial Sequence
  Synthetic
acaggccgttgagcagcg

SEQ ID NO: 36576 - DNA, 19 bp, Artificial Sequence
  Synthetic
tggtgcgtcctgcccgttc

SEQ ID NO: 36577 - DNA, 19 bp, Artificial Sequence
  Synthetic
tccagccgtccgcgtatcc

SEQ ID NO: 36578 - DNA, 20 bp, Artificial Sequence
  Synthetic
cgtcgaagcgggcaacattg

SEQ ID NO: 36579 - DNA, 20 bp, Artificial Sequence
  Synthetic
tgctctgcccctgtttcagg

SEQ ID NO: 36580 - DNA, 18 bp, Artificial Sequence
  Synthetic
accagcttgccgccgaat

SEQ ID NO: 36581 - DNA, 21 bp, Artificial Sequence
  Synthetic
gacggctacgggctgaatcag

SEQ ID NO: 36582 - DNA, 20 bp, Artificial Sequence
  Synthetic
gccgtaccgctgaccttcct

SEQ ID NO: 36583 - DNA, 20 bp, Artificial Sequence
  Synthetic
tggcaaccttcaacagccgc

SEQ ID NO: 36584 - DNA, 18 bp, Artificial Sequence
  Synthetic
cgtgatgcccacccgcaa

SEQ ID NO: 36585 - DNA, 21 bp, Artificial Sequence
  Synthetic
aaaagccctcttcaatgacgg

SEQ ID NO: 36586 - DNA, 20 bp, Artificial Sequence
  Synthetic
gaaaggactcgatttgcgcc

SEQ ID NO: 36587 - DNA, 21 bp, Artificial Sequence
  Synthetic
tggcaatccaaaactcacgat

SEQ ID NO: 36588 - DNA, 19 bp, Artificial Sequence
  Synthetic
cagccagaagtcgtcggca

SEQ ID NO: 36589 - DNA, 19 bp, Artificial Sequence
  Synthetic
accggcctcacaccgtcca

SEQ ID NO: 36590 - DNA, 20 bp, Artificial Sequence
  Synthetic
atcaggcaacccagtgcctc

SEQ ID NO: 36591 - DNA, 19 bp, Artificial Sequence
  Synthetic
aacctaccccggcggcatg

SEQ ID NO: 36592 - DNA, 20 bp, Artificial Sequence
  Synthetic
tcctgcttcagacggcattt

SEQ ID NO: 36593 - DNA, 24 bp, Artificial Sequence
  Synthetic
aaagcattatgccaaatctgcaaa

SEQ ID NO: 36594 - DNA, 19 bp, Artificial Sequence
  Synthetic
tcaacaccggcagcgcagg

SEQ ID NO: 36595 - DNA, 22 bp, Artificial Sequence
  Synthetic
gcgcagatacgccaatgcttcc

SEQ ID NO: 36596 - DNA, 18 bp, Artificial Sequence
  Synthetic
accggcaggcgcaaaacc

SEQ ID NO: 36597 - DNA, 21 bp, Artificial Sequence
  Synthetic
ccgcttcttgattttccgccg

SEQ ID NO: 36598 - DNA, 21 bp, Artificial Sequence
  Synthetic
gtaatcgcgccggtttaacgc

SEQ ID NO: 36599 - DNA, 20 bp, Artificial Sequence
  Synthetic
ccccaaagtttgcggccgta

SEQ ID NO: 36600 - DNA, 21 bp, Artificial Sequence
  Synthetic
cgaggttgaagacatggccgc

SEQ ID NO: 36601 - DNA, 18 bp, Artificial Sequence
  Synthetic
gcgtttttcggctcgggc

SEQ ID NO: 36602 - DNA, 18 bp, Artificial Sequence
  Synthetic
cgccgtttccgtccgcta

SEQ ID NO: 36603 - DNA, 21 bp, Artificial Sequence
  Synthetic
cgatgctcaaacgcaactggc

SEQ ID NO: 36604 - DNA, 22 bp, Artificial Sequence
  Synthetic
aggcgatgaaacaatccgcgaa

SEQ ID NO: 36605 - DNA, 18 bp, Artificial Sequence
  Synthetic
cgccttcatgctgccggt

SEQ ID NO: 36606 - DNA, 19 bp, Artificial Sequence
  Synthetic
tatcgccctgagtgccgcc

SEQ ID NO: 36607 - DNA, 21 bp, Artificial Sequence
  Synthetic
ggattgtgttccttcggcggt

SEQ ID NO: 36608 - DNA, 19 bp, Artificial Sequence
  Synthetic
tcgacatcctgcggctggg

SEQ ID NO: 36609 - DNA, 22 bp, Artificial Sequence
  Synthetic
gcctgacttcggacgacatcaa

SEQ ID NO: 36610 - DNA, 19 bp, Artificial Sequence
  Synthetic
tcaaactcgccgccggctg

SEQ ID NO: 36611 - DNA, 20 bp, Artificial Sequence
  Synthetic
gcccgagttcgaccgcgata

SEQ ID NO: 36612 - DNA, 22 bp, Artificial Sequence
  Synthetic
cgaaactgaatcccgttgccgg

SEQ ID NO: 36613 - DNA, 21 bp, Artificial Sequence
  Synthetic
atccttcgtgcaggataccgc

SEQ ID NO: 36614 - DNA, 18 bp, Artificial Sequence
  Synthetic
cttcgcgggcttggtcga

SEQ ID NO: 36615 - DNA, 19 bp, Artificial Sequence
  Synthetic
acgaaatggcgcacgtcgg

SEQ ID NO: 36616 - DNA, 22 bp, Artificial Sequence
  Synthetic
gtgtcataatgcggcgttggtc

SEQ ID NO: 36617 - DNA, 20 bp, Artificial Sequence
  Synthetic
cgtaaaccgccgcactggag

SEQ ID NO: 36618 - DNA, 19 bp, Artificial Sequence
  Synthetic
aagccgccgccgaactctc

SEQ ID NO: 36619 - DNA, 22 bp, Artificial Sequence
  Synthetic
ggcgatggtgcatacccaatcg

SEQ ID NO: 36620 - DNA, 22 bp, Artificial Sequence
  Synthetic
ggcgcggatttggtctttgtca

SEQ ID NO: 36621 - DNA, 22 bp, Artificial Sequence
  Synthetic
ccgtttcaaaccttgcgacacg

SEQ ID NO: 36622 - DNA, 19 bp, Artificial Sequence
  Synthetic
aacaatgccgaccacgcct

SEQ ID NO: 36623 - DNA, 19 bp, Artificial Sequence
  Synthetic
aacgtggcaggcgaggttt

SEQ ID NO: 36624 - DNA, 19 bp, Artificial Sequence
  Synthetic
tccggcttttccttcggcg

SEQ ID NO: 36625 - DNA, 20 bp, Artificial Sequence
  Synthetic
tcgtttccgccatccacacg

SEQ ID NO: 36626 - DNA, 22 bp, Artificial Sequence
  Synthetic
cccaacagcgtaaacaccctgt

SEQ ID NO: 36627 - DNA, 22 bp, Artificial Sequence
  Synthetic
cgcaaagaattacgcacctggc

SEQ ID NO: 36628 - DNA, 19 bp, Artificial Sequence
  Synthetic
acgccggcactcttgaccg

SEQ ID NO: 36629 - DNA, 20 bp, Artificial Sequence
  Synthetic
ttgtcgccgaaagccaacat

SEQ ID NO: 36630 - DNA, 21 bp, Artificial Sequence
  Synthetic
acaacgccgtttttgccttcg

SEQ ID NO: 36631 - DNA, 19 bp, Artificial Sequence
  Synthetic
gccgcagataaccccgacg

SEQ ID NO: 36632 - DNA, 20 bp, Artificial Sequence
  Synthetic
gcgcgtgtcgttcagcactt

SEQ ID NO: 36633 - DNA, 21 bp, Artificial Sequence
  Synthetic
ccaattcgtcggccgccttag

SEQ ID NO: 36634 - DNA, 19 bp, Artificial Sequence
  Synthetic
tcacgcgcattcccctgcc

SEQ ID NO: 36635 - DNA, 22 bp, Artificial Sequence
  Synthetic
gctttgggaatcaggcgcacat

SEQ ID NO: 36636 - DNA, 22 bp, Artificial Sequence
  Synthetic
ccgatgccgaacgaaatacgga

SEQ ID NO: 36637 - DNA, 19 bp, Artificial Sequence
  Synthetic
tatgggcagggcgggttgc

SEQ ID NO: 36638 - DNA, 20 bp, Artificial Sequence
  Synthetic
tggagaaacggccatacagc

SEQ ID NO: 36639 - DNA, 19 bp, Artificial Sequence
  Synthetic
atgatgatgcagccgccga

SEQ ID NO: 36640 - DNA, 22 bp, Artificial Sequence
  Synthetic
cgccaaaatccaagccgtttgc

SEQ ID NO: 36641 - DNA, 18 bp, Artificial Sequence
  Synthetic
gcgtgcgttgccgaaagc

SEQ ID NO: 36642 - DNA, 20 bp, Artificial Sequence
  Synthetic
tttcaatcgccgttcccgcc

SEQ ID NO: 36643 - DNA, 19 bp, Artificial Sequence
  Synthetic
gcaggttcggcagcttcgg

SEQ ID NO: 36644 - DNA, 19 bp, Artificial Sequence
  Synthetic
cgccgacacgccgtcaatg

SEQ ID NO: 36645 - DNA, 21 bp, Artificial Sequence
  Synthetic
accatactcatgcgcgatgcc

SEQ ID NO: 36646 - DNA, 19 bp, Artificial Sequence
  Synthetic
cgtccatcacggcggcaaa

SEQ ID NO: 36647 - DNA, 22 bp, Artificial Sequence
  Synthetic
ccgcaaacttaatcacgccctg

SEQ ID NO: 36648 - DNA, 18 bp, Artificial Sequence
  Synthetic
attgccgtccgccgtcga

SEQ ID NO: 36649 - DNA, 19 bp, Artificial Sequence
  Synthetic
ttccacactgctcggcgcg

SEQ ID NO: 36650 - DNA, 18 bp, Artificial Sequence
  Synthetic
cccgagcgaggcgacatt

SEQ ID NO: 36651 - DNA, 19 bp, Artificial Sequence
  Synthetic
cccgacattgcccaggctt

SEQ ID NO: 36652 - DNA, 22 bp, Artificial Sequence
  Synthetic
cctgactgtatgccgggtcttg

SEQ ID NO: 36653 - DNA, 21 bp, Artificial Sequence
  Synthetic
gacatcattgccgccattgcc

SEQ ID NO: 36654 - DNA, 20 bp, Artificial Sequence
  Synthetic
ggttcggtgatgcggggcta

SEQ ID NO: 36655 - DNA, 20 bp, Artificial Sequence
  Synthetic
cggggcttttgctgcctttg

SEQ ID NO: 36656 - DNA, 19 bp, Artificial Sequence
  Synthetic
atcggcctgtgttcggcgg

SEQ ID NO: 36657 - DNA, 20 bp, Artificial Sequence
  Synthetic
acaccaataggcgctttccc

SEQ ID NO: 36658 - DNA, 21 bp, Artificial Sequence
  Synthetic
gtccctttggcttcaatcaca

SEQ ID NO: 36659 - DNA, 19 bp, Artificial Sequence
  Synthetic
atcgggggcaggtcaaacg

SEQ ID NO: 36660 - DNA, 19 bp, Artificial Sequence
  Synthetic
cccccttatgacgctgccg

SEQ ID NO: 36661 - DNA, 19 bp, Artificial Sequence
  Synthetic
aaaccgaccgctggctggc

SEQ ID NO: 36662 - DNA, 18 bp, Artificial Sequence
  Synthetic
ctggtggcgggtgctgtt

SEQ ID NO: 36663 - DNA, 21 bp, Artificial Sequence
  Synthetic
ggccgctacgacatcgtcaat

SEQ ID NO: 36664 - DNA, 21 bp, Artificial Sequence
  Synthetic
cctcgtcaaaatcaggatcgg

SEQ ID NO: 36665 - DNA, 22 bp, Artificial Sequence
  Synthetic
gcgaatccatcggtatggctgc

SEQ ID NO: 36666 - DNA, 20 bp, Artificial Sequence
  Synthetic
gcaacacgaagacggccaca

SEQ ID NO: 36667 - DNA, 20 bp, Artificial Sequence
  Synthetic
agcatcggcgtttcagacgg

SEQ ID NO: 36668 - DNA, 20 bp, Artificial Sequence
  Synthetic
cgagcgtggcgatgatgtcg

SEQ ID NO: 36669 - DNA, 22 bp, Artificial Sequence
  Synthetic
ccttctttgtcggcatcgagga

SEQ ID NO: 36670 - DNA, 19 bp, Artificial Sequence
  Synthetic
aacacaccgcctccgccac

SEQ ID NO: 36671 - DNA, 20 bp, Artificial Sequence
  Synthetic
gcggcaatggaggaagcagc

SEQ ID NO: 36672 - DNA, 19 bp, Artificial Sequence
  Synthetic
ggcgcgctgatgaccgaag

SEQ ID NO: 36673 - DNA, 21 bp, Artificial Sequence
  Synthetic
ggtaacggaaccgaacaggcg

SEQ ID NO: 36674 - DNA, 19 bp, Artificial Sequence
  Synthetic
tcatccggccttgcctggc

SEQ ID NO: 36675 - DNA, 18 bp, Artificial Sequence
  Synthetic
tcagcttcggcgttgccc

SEQ ID NO: 36676 - DNA, 22 bp, Artificial Sequence
  Synthetic
ccgcccagcacaaaatactcca

SEQ ID NO: 36677 - DNA, 22 bp, Artificial Sequence
  Synthetic
catgccgtctgaaacccaaacc

SEQ ID NO: 36678 - DNA, 22 bp, Artificial Sequence
  Synthetic
gcatgagcattgccgacatcaa

SEQ ID NO: 36679 - DNA, 18 bp, Artificial Sequence
  Synthetic
ttgcgcgacttggggcag

SEQ ID NO: 36680 - DNA, 19 bp, Artificial Sequence
  Synthetic
tcctcggcgaagggcagtc

SEQ ID NO: 36681 - DNA, 19 bp, Artificial Sequence
  Synthetic
agcggcgcgtggaacaagg

SEQ ID NO: 36682 - DNA, 19 bp, Artificial Sequence
  Synthetic
atgcagaagctgccgcccg

SEQ ID NO: 36683 - DNA, 21 bp, Artificial Sequence
  Synthetic
caaacactacggctcgctggt

SEQ ID NO: 36684 - DNA, 20 bp, Artificial Sequence
  Synthetic
gccgcagcagcatccgtatg

SEQ ID NO: 36685 - DNA, 22 bp, Artificial Sequence
  Synthetic
cctgctggaagccgattcttcc

SEQ ID NO: 36686 - DNA, 19 bp, Artificial Sequence
  Synthetic
caacatcccgccgcacaac

SEQ ID NO: 36687 - DNA, 19 bp, Artificial Sequence
  Synthetic
ccctgcgcatcaccttcgg

SEQ ID NO: 36688 - DNA, 20 bp, Artificial Sequence
  Synthetic
gccgacaaagcctacaccgc

SEQ ID NO: 36689 - DNA, 20 bp, Artificial Sequence
  Synthetic
ggttggcaacgatttcggcg

SEQ ID NO: 36690 - DNA, 19 bp, Artificial Sequence
  Synthetic
acggggctgtcttggttgc

SEQ ID NO: 36691 - DNA, 21 bp, Artificial Sequence
  Synthetic
agctgaccgcctttgtcgaag

SEQ ID NO: 36692 - DNA, 21 bp, Artificial Sequence
  Synthetic
gcaagtcttcgatgctgccgc

SEQ ID NO: 36693 - DNA, 21 bp, Artificial Sequence
  Synthetic
gcaagaatgcgccccgtatgc

SEQ ID NO: 36694 - DNA, 18 bp, Artificial Sequence
  Synthetic
aagccgaccgcgtgttgg

SEQ ID NO: 36695 - DNA, 22 bp, Artificial Sequence
  Synthetic
acaagacctgccggaaaatcca

SEQ ID NO: 36696 - DNA, 21 bp, Artificial Sequence
  Synthetic
gcgcgatttggtgcccgaatt

SEQ ID NO: 36697 - DNA, 21 bp, Artificial Sequence
  Synthetic
ggacaaattgcacagggttct

SEQ ID NO: 36698 - DNA, 20 bp, Artificial Sequence
  Synthetic
cggtcaaacgcagcggcata

SEQ ID NO: 36699 - DNA, 19 bp, Artificial Sequence
  Synthetic
acacggcatcggcacttcc

SEQ ID NO: 36700 - DNA, 22 bp, Artificial Sequence
  Synthetic
gggcagggattggttttgggta

SEQ ID NO: 36701 - DNA, 20 bp, Artificial Sequence
  Synthetic
cggattggacttcgggcagg

SEQ ID NO: 36702 - DNA, 19 bp, Artificial Sequence
  Synthetic
tgatggcggcggcaatcgg

SEQ ID NO: 36703 - DNA, 22 bp, Artificial Sequence
  Synthetic
ccacagcaacatagaatgcggc

SEQ ID NO: 36704 - DNA, 21 bp, Artificial Sequence
  Synthetic
cggcgagaaattcggtggtca

SEQ ID NO: 36705 - DNA, 20 bp, Artificial Sequence
  Synthetic
gtatgccttgtagcccgcgt

SEQ ID NO: 36706 - DNA, 18 bp, Artificial Sequence
  Synthetic
ccgaaagcggcgtcgtca

SEQ ID NO: 36707 - DNA, 22 bp, Artificial Sequence
  Synthetic
cgaaatcatcaacgacgacggc

SEQ ID NO: 36708 - DNA, 23 bp, Artificial Sequence
  Synthetic
gggtttgatgataggtttcgctt

SEQ ID NO: 36709 - DNA, 19 bp, Artificial Sequence
  Synthetic
tgggctattacggccgcgc

SEQ ID NO: 36710 - DNA, 20 bp, Artificial Sequence
  Synthetic
ttgcacgccgatttcgtggg

SEQ ID NO: 36711 - DNA, 20 bp, Artificial Sequence
  Synthetic
ccgaagtcgttggcggcaaa

SEQ ID NO: 36712 - DNA, 19 bp, Artificial Sequence
  Synthetic
gaaccaacaaggctgcggc

SEQ ID NO: 36713 - DNA, 19 bp, Artificial Sequence
  Synthetic
gcccgcgtccatccacatg

SEQ ID NO: 36714 - DNA, 19 bp, Artificial Sequence
  Synthetic
tgaacgcggcgagttggaa

SEQ ID NO: 36715 - DNA, 22 bp, Artificial Sequence
  Synthetic
agtgcatattgaggcgcggatg

SEQ ID NO: 36716 - DNA, 21 bp, Artificial Sequence
  Synthetic
ctgcgtttttcaagcgaggca

SEQ ID NO: 36717 - DNA, 21 bp, Artificial Sequence
  Synthetic
cgggaatccggaacccaaacg

SEQ ID NO: 36718 - DNA, 20 bp, Artificial Sequence
  Synthetic
tcaaggctggcgcaaggttt

SEQ ID NO: 36719 - DNA, 19 bp, Artificial Sequence
  Synthetic
tcgcccacatcgcccaatc

SEQ ID NO: 36720 - DNA, 19 bp, Artificial Sequence
  Synthetic
gcggcgtgggcaaaaccac

SEQ ID NO: 36721 - DNA, 18 bp, Artificial Sequence
  Synthetic
cgacacacgcgccaacct

SEQ ID NO: 36722 - DNA, 21 bp, Artificial Sequence
  Synthetic
gcaggcataccgcgacgtatt

SEQ ID NO: 36723 - DNA, 18 bp, Artificial Sequence
  Synthetic
aatgctgccactgccggg

SEQ ID NO: 36724 - DNA, 19 bp, Artificial Sequence
  Synthetic
gcggctggcacaaatcgcc

SEQ ID NO: 36725 - DNA, 20 bp, Artificial Sequence
  Synthetic
acgacgaagcggacgcattg

SEQ ID NO: 36726 - DNA, 19 bp, Artificial Sequence
  Synthetic
acgggcaaggcagccgatg

SEQ ID NO: 36727 - DNA, 22 bp, Artificial Sequence
  Synthetic
cgatgcggttttcactttcggc

SEQ ID NO: 36728 - DNA, 20 bp, Artificial Sequence
  Synthetic
gcttcaaccgccctgctctc

SEQ ID NO: 36729 - DNA, 21 bp, Artificial Sequence
  Synthetic
tgtctatccaaccggtgacag

SEQ ID NO: 36730 - DNA, 20 bp, Artificial Sequence
  Synthetic
ccggaatttcaggttgctgc

SEQ ID NO: 36731 - DNA, 20 bp, Artificial Sequence
  Synthetic
gaggatgagccgaaagaagc

SEQ ID NO: 36732 - DNA, 19 bp, Artificial Sequence
  Synthetic
ttcggctccaacaccgccc

SEQ ID NO: 36733 - DNA, 22 bp, Artificial Sequence
  Synthetic
ccgatgacttggatgtgcggat

SEQ ID NO: 36734 - DNA, 20 bp, Artificial Sequence
  Synthetic
gcctttgagggcttcggcaa

SEQ ID NO: 36735 - DNA, 21 bp, Artificial Sequence
  Synthetic
tcggaaaccgtctgccttgtc

SEQ ID NO: 36736 - DNA, 21 bp, Artificial Sequence
  Synthetic
gcttcctcatcggcggtgtac

SEQ ID NO: 36737 - DNA, 18 bp, Artificial Sequence
  Synthetic
ttacgcgcgggtatgggc

SEQ ID NO: 36738 - DNA, 19 bp, Artificial Sequence
  Synthetic
tgaccgatgccgtcaacgc

SEQ ID NO: 36739 - DNA, 19 bp, Artificial Sequence
  Synthetic
cgcgcgcaggactttacca

SEQ ID NO: 36740 - DNA, 18 bp, Artificial Sequence
  Synthetic
acgggctggacaacgcct

SEQ ID NO: 36741 - DNA, 21 bp, Artificial Sequence
  Synthetic
cggcttcgcggtaggtttcac

SEQ ID NO: 36742 - DNA, 22 bp, Artificial Sequence
  Synthetic
ccgttgacgaggacttttccgt

SEQ ID NO: 36743 - DNA, 20 bp, Artificial Sequence
  Synthetic
gccggtcagtgaaacggcag

SEQ ID NO: 36744 - DNA, 21 bp, Artificial Sequence
  Synthetic
aaggggaaaaaaccggcagga

SEQ ID NO: 36745 - DNA, 19 bp, Artificial Sequence
  Synthetic
tgccgctgcggagtacgac

SEQ ID NO: 36746 - DNA, 19 bp, Artificial Sequence
  Synthetic
gacctgcttctgcctccgc

SEQ ID NO: 36747 - DNA, 21 bp, Artificial Sequence
  Synthetic
gccttatgttgccgacagcgt

SEQ ID NO: 36748 - DNA, 20 bp, Artificial Sequence
  Synthetic
agtgcttcgggcagttggtt

SEQ ID NO: 36749 - DNA, 20 bp, Artificial Sequence
  Synthetic
atcgggcgtttagtttccgt

SEQ ID NO: 36750 - DNA, 20 bp, Artificial Sequence
  Synthetic
cgttcgtagctgtcgggctg

SEQ ID NO: 36751 - DNA, 20 bp, Artificial Sequence
  Synthetic
ccgaatgcagtaagtcggca

SEQ ID NO: 36752 - DNA, 20 bp, Artificial Sequence
  Synthetic
aatatttcgggcgcgggggc

SEQ ID NO: 36753 - DNA, 21 bp, Artificial Sequence
  Synthetic
taaggagcgcggtgttttggc

SEQ ID NO: 36754 - DNA, 22 bp, Artificial Sequence
  Synthetic
cgatttgtccgaaaacgccgaa

SEQ ID NO: 36755 - DNA, 18 bp, Artificial Sequence
  Synthetic
tgcatacgaggcacgccg

SEQ ID NO: 36756 - DNA, 20 bp, Artificial Sequence
  Synthetic
ggctcgcaggaactcatgct

SEQ ID NO: 36757 - DNA, 22 bp, Artificial Sequence
  Synthetic
ccgcgttaccctcgacaaacac

SEQ ID NO: 36758 - DNA, 18 bp, Artificial Sequence
  Synthetic
ccacgcgcatcatccgca

SEQ ID NO: 36759 - DNA, 21 bp, Artificial Sequence
  Synthetic
gaaacgtttcggctaccgcac

SEQ ID NO: 36760 - DNA, 21 bp, Artificial Sequence
  Synthetic
acagcatcgtcgtcaacggag

SEQ ID NO: 36761 - DNA, 22 bp, Artificial Sequence
  Synthetic
gacatgtggcaacaggcaggca

SEQ ID NO: 36762 - DNA, 19 bp, Artificial Sequence
  Synthetic
agacgatgcctgccgtgcc

SEQ ID NO: 36763 - DNA, 20 bp, Artificial Sequence
  Synthetic
ggaaagggcgatggcttcga

SEQ ID NO: 36764 - DNA, 21 bp, Artificial Sequence
  Synthetic
gcggctacggtaataacgccg

SEQ ID NO: 36765 - DNA, 20 bp, Artificial Sequence
  Synthetic
attgtaggctgcggtcagat

SEQ ID NO: 36766 - DNA, 20 bp, Artificial Sequence
  Synthetic
gcaggagcatcccgatccgc

SEQ ID NO: 36767 - DNA, 22 bp, Artificial Sequence
  Synthetic
caaacacctgctggttgccaat

SEQ ID NO: 36768 - DNA, 21 bp, Artificial Sequence
  Synthetic
ccgtagagtctggcgatgccg

SEQ ID NO: 36769 - DNA, 19 bp, Artificial Sequence
  Synthetic
agcgcgtccaaaccctgcg

SEQ ID NO: 36770 - DNA, 19 bp, Artificial Sequence
  Synthetic
cgagcagggtgcggatgac

SEQ ID NO: 36771 - DNA, 22 bp, Artificial Sequence
  Synthetic
cggtattcgtgcacccagcttt

SEQ ID NO: 36772 - DNA, 20 bp, Artificial Sequence
  Synthetic
gagagcttggcgacggactg

SEQ ID NO: 36773 - DNA, 20 bp, Artificial Sequence
  Synthetic
ttgcggtttgtcggtttgcg

SEQ ID NO: 36774 - DNA, 21 bp, Artificial Sequence
  Synthetic
gcggcttggtaaaggtaggcg

SEQ ID NO: 36775 - DNA, 19 bp, Artificial Sequence
  Synthetic
gggggccagcagtatcagc

SEQ ID NO: 36776 - DNA, 22 bp, Artificial Sequence
  Synthetic
ccgccgatgtgttgattttggg

SEQ ID NO: 36777 - DNA, 21 bp, Artificial Sequence
  Synthetic
ggtaccggttcgaccatcaat

SEQ ID NO: 36778 - DNA, 18 bp, Artificial Sequence
  Synthetic
tacacgatgccgcccgct

SEQ ID NO: 36779 - DNA, 20 bp, Artificial Sequence
  Synthetic
cgtgcctgttgttgtgtact

SEQ ID NO: 36780 - DNA, 20 bp, Artificial Sequence
  Synthetic
attgtgatgatgcgcgtggt

SEQ ID NO: 36781 - DNA, 22 bp, Artificial Sequence
  Synthetic
tgtccggtattgagcgcggata

SEQ ID NO: 36782 - DNA, 22 bp, Artificial Sequence
  Synthetic
cattgcgtgaaacataatccgc

SEQ ID NO: 36783 - DNA, 20 bp, Artificial Sequence
  Synthetic
cggcaaaggcagcggttgaa

SEQ ID NO: 36784 - DNA, 20 bp, Artificial Sequence
  Synthetic
gggttagggagagggcattg

SEQ ID NO: 36785 - DNA, 20 bp, Artificial Sequence
  Synthetic
tccgcaaatcaaagccgact

SEQ ID NO: 36786 - DNA, 21 bp, Artificial Sequence
  Synthetic
ggcgaccagggttttgccttc

SEQ ID NO: 36787 - DNA, 18 bp, Artificial Sequence
  Synthetic
aggcactgcatgagcggg

SEQ ID NO: 36788 - DNA, 22 bp, Artificial Sequence
  Synthetic
cggatggcgcgcaaaaaaagac

SEQ ID NO: 36789 - DNA, 20 bp, Artificial Sequence
  Synthetic
gcctcattgggcatgcgcta

SEQ ID NO: 36790 - DNA, 19 bp, Artificial Sequence
  Synthetic
acccttgcggacggaagcc

SEQ ID NO: 36791 - DNA, 22 bp, Artificial Sequence
  Synthetic
catagcttccggtttggtttct

SEQ ID NO: 36792 - DNA, 22 bp, Artificial Sequence
  Synthetic
ccggtttattcgcctcctgctt

SEQ ID NO: 36793 - DNA, 20 bp, Artificial Sequence
  Synthetic
acctgctgtcccaactgctg

SEQ ID NO: 36794 - DNA, 20 bp, Artificial Sequence
  Synthetic
caccgatgtcctgagccgtc

SEQ ID NO: 36795 - DNA, 19 bp, Artificial Sequence
  Synthetic
agtccgtgccgcattgccg

SEQ ID NO: 36796 - DNA, 20 bp, Artificial Sequence
  Synthetic
gcagacccgtaccgttgtgg

SEQ ID NO: 36797 - DNA, 22 bp, Artificial Sequence
  Synthetic
cccaatgaggcttcgtgggttt

SEQ ID NO: 36798 - DNA, 20 bp, Artificial Sequence
  Synthetic
atctagattcccgcctgcgc

SEQ ID NO: 36799 - DNA, 19 bp, Artificial Sequence
  Synthetic
tcgagccagaacacggcgg

SEQ ID NO: 36800 - DNA, 22 bp, Artificial Sequence
  Synthetic
ggaattcgcccaatgagtccca

SEQ ID NO: 36801 - DNA, 22 bp, Artificial Sequence
  Synthetic
caatgcgtggacgtaggcgacg

SEQ ID NO: 36802 - DNA, 19 bp, Artificial Sequence
  Synthetic
aaggcgggcgcttcggaac

SEQ ID NO: 36803 - DNA, 20 bp, Artificial Sequence
  Synthetic
tgttggccaagggcttcagc

SEQ ID NO: 36804 - DNA, 22 bp, Artificial Sequence
  Synthetic
gcgaaaaaggcgacgtatgacg

SEQ ID NO: 36805 - DNA, 19 bp, Artificial Sequence
  Synthetic
tggggttatgccggtgcgg

SEQ ID NO: 36806 - DNA, 18 bp, Artificial Sequence
  Synthetic
atccgaagccgcgatgcg

SEQ ID NO: 36807 - DNA, 18 bp, Artificial Sequence
  Synthetic
tccccttggcgcgtttcg

SEQ ID NO: 36808 - DNA, 21 bp, Artificial Sequence
  Synthetic
gttgtcagggaatggggcagg

SEQ ID NO: 36809 - DNA, 19 bp, Artificial Sequence
  Synthetic
tggtttgacggcaggacgg

SEQ ID NO: 36810 - DNA, 21 bp, Artificial Sequence
  Synthetic
cgcctaagaaacggatggcgg

SEQ ID NO: 36811 - DNA, 20 bp, Artificial Sequence
  Synthetic
gcgcaacatccggaatcggc

SEQ ID NO: 36812 - DNA, 19 bp, Artificial Sequence
  Synthetic
tgggtgcgatgagcgaggc

SEQ ID NO: 36813 - DNA, 19 bp, Artificial Sequence
  Synthetic
agactgcctgcgcgacaaa

SEQ ID NO: 36814 - DNA, 19 bp, Artificial Sequence
  Synthetic
gcgggcgtgtgcaatgaca

SEQ ID NO: 36815 - DNA, 20 bp, Artificial Sequence
  Synthetic
gccccgcggttcagaaactg

SEQ ID NO: 36816 - DNA, 19 bp, Artificial Sequence
  Synthetic
tttcaggcggcgggcttcc

SEQ ID NO: 36817 - DNA, 22 bp, Artificial Sequence
  Synthetic
gcctttgtccgcaacaagcatt

SEQ ID NO: 36818 - DNA, 20 bp, Artificial Sequence
  Synthetic
ctcgagaacagcgcgtcgcc

SEQ ID NO: 36819 - DNA, 19 bp, Artificial Sequence
  Synthetic
caaacaacccggaccccga

SEQ ID NO: 36820 - DNA, 22 bp, Artificial Sequence
  Synthetic
gaaacacggcgcggatatttcc

SEQ ID NO: 36821 - DNA, 21 bp, Artificial Sequence
  Synthetic
accggataccgcgaacacaat

SEQ ID NO: 36822 - DNA, 20 bp, Artificial Sequence
  Synthetic
cgtctttggcggcgggattt

SEQ ID NO: 36823 - DNA, 19 bp, Artificial Sequence
  Synthetic
caagtgtaggcgcggcgta

SEQ ID NO: 36824 - DNA, 21 bp, Artificial Sequence
  Synthetic
gacgcggctttttcctgcaat

SEQ ID NO: 36825 - DNA, 20 bp, Artificial Sequence
  Synthetic
ggcagtctatcaggccggca

SEQ ID NO: 36826 - DNA, 19 bp, Artificial Sequence
  Synthetic
cgggattgcctttgcacgc

SEQ ID NO: 36827 - DNA, 22 bp, Artificial Sequence
  Synthetic
ggtgtaccggttgtaacgccag

SEQ ID NO: 36828 - DNA, 19 bp, Artificial Sequence
  Synthetic
taaaggcggacgcggtcgc

SEQ ID NO: 36829 - DNA, 19 bp, Artificial Sequence
  Synthetic
acgggcgaacgttcggacg

SEQ ID NO: 36830 - DNA, 20 bp, Artificial Sequence
  Synthetic
ggtcgatgacttcctgcgcg

SEQ ID NO: 36831 - DNA, 19 bp, Artificial Sequence
  Synthetic
tcacccgcgccgagtacgt

SEQ ID NO: 36832 - DNA, 19 bp, Artificial Sequence
  Synthetic
tgcccgggcttcttcacgc

SEQ ID NO: 36833 - DNA, 19 bp, Artificial Sequence
  Synthetic
gtggtagccggtgccgtag

SEQ ID NO: 36834 - DNA, 18 bp, Artificial Sequence
  Synthetic
gtcgcctgcggttttggc

SEQ ID NO: 36835 - DNA, 19 bp, Artificial Sequence
  Synthetic
gccgataaaggcgcggtcg

SEQ ID NO: 36836 - DNA, 22 bp, Artificial Sequence
  Synthetic
gcaggcgtagtcttaggaggtg

SEQ ID NO: 36837 - DNA, 20 bp, Artificial Sequence
  Synthetic
gaagttgccgactacttcgc

SEQ ID NO: 36838 - DNA, 19 bp, Artificial Sequence
  Synthetic
cgatttggctggcaaggcg

SEQ ID NO: 36839 - DNA, 22 bp, Artificial Sequence
  Synthetic
ccgcctttgacgttgaaggaga

SEQ ID NO: 36840 - DNA, 22 bp, Artificial Sequence
  Synthetic
ggaaaagcggttgtcttcggca

SEQ ID NO: 36841 - DNA, 22 bp, Artificial Sequence
  Synthetic
ccgcgtggaaaaaaatcgtcca

SEQ ID NO: 36842 - DNA, 20 bp, Artificial Sequence
  Synthetic
ggacgcgaccgggaaattgc

SEQ ID NO: 36843 - DNA, 22 bp, Artificial Sequence
  Synthetic
ccctgatgcggtttgattcccg

SEQ ID NO: 36844 - DNA, 18 bp, Artificial Sequence
  Synthetic
aaaaaccgaccgcgccgc

SEQ ID NO: 36845 - DNA, 22 bp, Artificial Sequence
  Synthetic
cgggtttttcagcagctcaacc

SEQ ID NO: 36846 - DNA, 20 bp, Artificial Sequence
  Synthetic
aaacgggtgtggctgtcgcc

SEQ ID NO: 36847 - DNA, 19 bp, Artificial Sequence
  Synthetic
tgcgccgcactgttgtctt

SEQ ID NO: 36848 - DNA, 21 bp, Artificial Sequence
  Synthetic
cctcacatggttgagggtctt

SEQ ID NO: 36849 - DNA, 18 bp, Artificial Sequence
  Synthetic
tttggcgcctgcgtggac

SEQ ID NO: 36850 - DNA, 20 bp, Artificial Sequence
  Synthetic
gcgtatcggccgagcatcag

SEQ ID NO: 36851 - DNA, 19 bp, Artificial Sequence
  Synthetic
gcgggcgtttgacgacgac

SEQ ID NO: 36852 - DNA, 21 bp, Artificial Sequence
  Synthetic
cggcatgtggatggatcgata

SEQ ID NO: 36853 - DNA, 20 bp, Artificial Sequence
  Synthetic
gaagagggaaggggcggaac

SEQ ID NO: 36854 - DNA, 19 bp, Artificial Sequence
  Synthetic
gctttggaagtcgtgccgc

SEQ ID NO: 36855 - DNA, 22 bp, Artificial Sequence
  Synthetic
tggattacggggatgtgggtca

SEQ ID NO: 36856 - DNA, 19 bp, Artificial Sequence
  Synthetic
gcattgacacgcgaaccgc

SEQ ID NO: 36857 - DNA, 19 bp, Artificial Sequence
  Synthetic
cgtctgctccggctgaaca

SEQ ID NO: 36858 - DNA, 20 bp, Artificial Sequence
  Synthetic
gtttggtttccgccgcaacg

SEQ ID NO: 36859 - DNA, 18 bp, Artificial Sequence
  Synthetic
ccgtgggatgccgccaaa

SEQ ID NO: 36860 - DNA, 20 bp, Artificial Sequence
  Synthetic
tggctggataagggcgttgc

SEQ ID NO: 36861 - DNA, 22 bp, Artificial Sequence
  Synthetic
gatggaaaataggcgcaacggc

SEQ ID NO: 36862 - DNA, 18 bp, Artificial Sequence
  Synthetic
accgcttttcctgccgcg

SEQ ID NO: 36863 - DNA, 22 bp, Artificial Sequence
  Synthetic
gctcctagtacgagaggaccgg

SEQ ID NO: 36864 - DNA, 21 bp, Artificial Sequence
  Synthetic
ggcaagcctttcaacaatccg

SEQ ID NO: 36865 - DNA, 21 bp, Artificial Sequence
  Synthetic
aacagacggcatcagaagcgt

SEQ ID NO: 36866 - DNA, 20 bp, Artificial Sequence
  Synthetic
ccatttttcgcgcacggtca

SEQ ID NO: 36867 - DNA, 19 bp, Artificial Sequence
  Synthetic
cgcagggggattcggcact

SEQ ID NO: 36868 - DNA, 20 bp, Artificial Sequence
  Synthetic
gtatcgctgcggatgaggcc

SEQ ID NO: 36869 - DNA, 18 bp, Artificial Sequence
  Synthetic
agcaacgccgcttcgtcg

SEQ ID NO: 36870 - DNA, 19 bp, Artificial Sequence
  Synthetic
aaagacgcgcccgccacag

SEQ ID NO: 36871 - DNA, 19 bp, Artificial Sequence
  Synthetic
tatgccccggtgcgaacgg

SEQ ID NO: 36872 - DNA, 20 bp, Artificial Sequence
  Synthetic
cagggaaggaaaccgtcggc

SEQ ID NO: 36873 - DNA, 20 bp, Artificial Sequence
  Synthetic
gccggttatatctgcggcgg

SEQ ID NO: 36874 - DNA, 19 bp, Artificial Sequence
  Synthetic
cggtcggcgttgacggtaa

SEQ ID NO: 36875 - DNA, 21 bp, Artificial Sequence
  Synthetic
tacagactctgggcggctcgg

SEQ ID NO: 36876 - DNA, 19 bp, Artificial Sequence
  Synthetic
tgcgcggcaaagtgctcaa

SEQ ID NO: 36877 - DNA, 21 bp, Artificial Sequence
  Synthetic
gcctgcctattcgcccgaatc

SEQ ID NO: 36878 - DNA, 21 bp, Artificial Sequence
  Synthetic
cgaagcggacgagctcgaaga

SEQ ID NO: 36879 - DNA, 18 bp, Artificial Sequence
  Synthetic
acggcaatacctccgccg

SEQ ID NO: 36880 - DNA, 22 bp, Artificial Sequence
  Synthetic
gcacaatgtccgcatcccgaat

SEQ ID NO: 36881 - DNA, 20 bp, Artificial Sequence
  Synthetic
gggaagcgttgggcgtgaac

SEQ ID NO: 36882 - DNA, 21 bp, Artificial Sequence
  Synthetic
cgggtaacgcaggtttggtgc

SEQ ID NO: 36883 - DNA, 22 bp, Artificial Sequence
  Synthetic
agctgcaggctgaagatttccg

SEQ ID NO: 36884 - DNA, 18 bp, Artificial Sequence
  Synthetic
cacgcgcgcatttctgcc

SEQ ID NO: 36885 - DNA, 20 bp, Artificial Sequence
  Synthetic
cgatgtcttcgggcgcaagg

SEQ ID NO: 36886 - DNA, 20 bp, Artificial Sequence
  Synthetic
gggattgctttgccggtcgg

SEQ ID NO: 36887 - DNA, 20 bp, Artificial Sequence
  Synthetic
ttttcccgtccatccgcctg

SEQ ID NO: 36888 - DNA, 22 bp, Artificial Sequence
  Synthetic
gtgcggcatcttacgaactcga

SEQ ID NO: 36889 - DNA, 19 bp, Artificial Sequence
  Synthetic
cgcgaagaggcaaaaggcg

SEQ ID NO: 36890 - DNA, 19 bp, Artificial Sequence
  Synthetic
agcgcgctgagttcgtctt

SEQ ID NO: 36891 - DNA, 20 bp, Artificial Sequence
  Synthetic
ttagcgtgcaactgcctgcg

SEQ ID NO: 36892 - DNA, 20 bp, Artificial Sequence
  Synthetic
cgacgacgaccgctacctct

SEQ ID NO: 36893 - DNA, 21 bp, Artificial Sequence
  Synthetic
cgaggcaggctttttacgcgg

SEQ ID NO: 36894 - DNA, 19 bp, Artificial Sequence
  Synthetic
gcgttgccgggatttgccc

SEQ ID NO: 36895 - DNA, 19 bp, Artificial Sequence
  Synthetic
gctggatgctgcccgaagg

SEQ ID NO: 36896 - DNA, 20 bp, Artificial Sequence
  Synthetic
aaatcctcaaaggcggcggc

SEQ ID NO: 36897 - DNA, 20 bp, Artificial Sequence
  Synthetic
cttggagtcagttcccggcc

SEQ ID NO: 36898 - DNA, 21 bp, Artificial Sequence
  Synthetic
cgcatccacctgctgaatccc

SEQ ID NO: 36899 - DNA, 20 bp, Artificial Sequence
  Synthetic
ttgacgttccacgcgtgaaa

SEQ ID NO: 36900 - DNA, 20 bp, Artificial Sequence
  Synthetic
gcggattttgccgatggcct

SEQ ID NO: 36901 - DNA, 21 bp, Artificial Sequence
  Synthetic
gggcgcggatttcgatatcga

SEQ ID NO: 36902 - DNA, 22 bp, Artificial Sequence
  Synthetic
cgtaaccgtcgacgtattcggc

SEQ ID NO: 36903 - DNA, 22 bp, Artificial Sequence
  Synthetic
actccatcgacgcactgatacg

SEQ ID NO: 36904 - DNA, 21 bp, Artificial Sequence
  Synthetic
tgccggtcgcaatacctttga

SEQ ID NO: 36905 - DNA, 21 bp, Artificial Sequence
  Synthetic
aggcattacgctgcaacttgc

SEQ ID NO: 36906 - DNA, 20 bp, Artificial Sequence
  Synthetic
ggacgagggcgagaaagcgc

SEQ ID NO: 36907 - DNA, 21 bp, Artificial Sequence
  Synthetic
ccgatctgcctgccattctgc

SEQ ID NO: 36908 - DNA, 20 bp, Artificial Sequence
  Synthetic
gcggaggggacaaagatgcc

SEQ ID NO: 36909 - DNA, 18 bp, Artificial Sequence
  Synthetic
gcaggcgcacgcaggatt

SEQ ID NO: 36910 - DNA, 21 bp, Artificial Sequence
  Synthetic
gccctgatgaacggcggagaa

SEQ ID NO: 36911 - DNA, 20 bp, Artificial Sequence
  Synthetic
caggcgttggaaatggcgga

SEQ ID NO: 36912 - DNA, 20 bp, Artificial Sequence
  Synthetic
ccgctggacgatgccaacac

SEQ ID NO: 36913 - DNA, 18 bp, Artificial Sequence
  Synthetic
accgaacgcgctgccgat

SEQ ID NO: 36914 - DNA, 19 bp, Artificial Sequence
  Synthetic
tgcaacacacgtccgacgg

SEQ ID NO: 36915 - DNA, 19 bp, Artificial Sequence
  Synthetic
gcctctccggcggcatcaa

SEQ ID NO: 36916 - DNA, 19 bp, Artificial Sequence
  Synthetic
tggcaggcaaccgaccacg

SEQ ID NO: 36917 - DNA, 19 bp, Artificial Sequence
  Synthetic
ctggcgttgaagcagcagc

SEQ ID NO: 36918 - DNA, 21 bp, Artificial Sequence
  Synthetic
ggttggacacggtgttggagc

SEQ ID NO: 36919 - DNA, 19 bp, Artificial Sequence
  Synthetic
gaatgcggtcagcgtgtgc

SEQ ID NO: 36920 - DNA, 22 bp, Artificial Sequence
  Synthetic
gccgttttgttcctgctgaacc

SEQ ID NO: 36921 - DNA, 19 bp, Artificial Sequence
  Synthetic
cggcaagcgcgatatgggc

SEQ ID NO: 36922 - DNA, 20 bp, Artificial Sequence
  Synthetic
cggtttcgacatcacgccca

SEQ ID NO: 36923 - DNA, 21 bp, Artificial Sequence
  Synthetic
catcatccatccggcaggctc

SEQ ID NO: 36924 - DNA, 19 bp, Artificial Sequence
  Synthetic
gcgttcggcggcatcatcg

SEQ ID NO: 36925 - DNA, 22 bp, Artificial Sequence
  Synthetic
gtcgccatcgttaccgataccg

SEQ ID NO: 36926 - DNA, 21 bp, Artificial Sequence
  Synthetic
gctgaccgccattgtgttcgt

SEQ ID NO: 36927 - DNA, 19 bp, Artificial Sequence
  Synthetic
ttccgtcatcgccaccgcc

SEQ ID NO: 36928 - DNA, 22 bp, Artificial Sequence
  Synthetic
ccgccgatgcctgtatcaactt

SEQ ID NO: 36929 - DNA, 23 bp, Artificial Sequence
  Synthetic
caaatcaaacgcataagttcgct

SEQ ID NO: 36930 - DNA, 23 bp, Artificial Sequence
  Synthetic
ctcctaattcatctttgacggca

SEQ ID NO: 36931 - DNA, 20 bp, Artificial Sequence
  Synthetic
aacgtggcggcatcggattg

SEQ ID NO: 36932 - DNA, 20 bp, Artificial Sequence
  Synthetic
tgtgtttttaccgccacacg

SEQ ID NO: 36933 - DNA, 21 bp, Artificial Sequence
  Synthetic
agatgccgccgattatgatga

SEQ ID NO: 36934 - DNA, 21 bp, Artificial Sequence
  Synthetic
gcaataacgcttcggtcggta

SEQ ID NO: 36935 - DNA, 21 bp, Artificial Sequence
  Synthetic
gcttcaaacatttcacgcgaa

SEQ ID NO: 36936 - DNA, 20 bp, Artificial Sequence
  Synthetic
aatggcgcgaaaaggctaaa

SEQ ID NO: 36937 - DNA, 22 bp, Artificial Sequence
  Synthetic
gctatcacgccaatctcggtat

SEQ ID NO: 36938 - DNA, 18 bp, Artificial Sequence
  Synthetic
gcaacctgcgcctgcgtt

SEQ ID NO: 36939 - DNA, 22 bp, Artificial Sequence
  Synthetic
ggggtaaattcgcctccctgtt

SEQ ID NO: 36940 - DNA, 19 bp, Artificial Sequence
  Synthetic
gatgcgatggggctcaggg

SEQ ID NO: 36941 - DNA, 19 bp, Artificial Sequence
  Synthetic
aatacgtccgcccgccgtg

SEQ ID NO: 36942 - DNA, 20 bp, Artificial Sequence
  Synthetic
gaaggcggtttcgaccagga

SEQ ID NO: 36943 - DNA, 18 bp, Artificial Sequence
  Synthetic
tccaagccctgcaacgcg

SEQ ID NO: 36944 - DNA, 19 bp, Artificial Sequence
  Synthetic
ttctacggccccgccctgt

SEQ ID NO: 36945 - DNA, 20 bp, Artificial Sequence
  Synthetic
gcaaaacggcgcgcatttcg

SEQ ID NO: 36946 - DNA, 21 bp, Artificial Sequence
  Synthetic
ggcgttgttcagcggtctgta

SEQ ID NO: 36947 - DNA, 20 bp, Artificial Sequence
  Synthetic
cgcgcatacaatggcgtgtc

SEQ ID NO: 36948 - DNA, 21 bp, Artificial Sequence
  Synthetic
gtgcgtgatgttttccgtcgg

SEQ ID NO: 36949 - DNA, 19 bp, Artificial Sequence
  Synthetic
gccgcatcgttgatgtgcc

SEQ ID NO: 36950 - DNA, 20 bp, Artificial Sequence
  Synthetic
gcatgcccaacgaggcttcg

SEQ ID NO: 36951 - DNA, 20 bp, Artificial Sequence
  Synthetic
tggctgatgatggcggcaac

SEQ ID NO: 36952 - DNA, 22 bp, Artificial Sequence
  Synthetic
tgatggacacctcgttccacca

SEQ ID NO: 36953 - DNA, 18 bp, Artificial Sequence
  Synthetic
acgctgcgtgtcggtgct

SEQ ID NO: 36954 - DNA, 18 bp, Artificial Sequence
  Synthetic
aaacgccgccgacatcga

SEQ ID NO: 36955 - DNA, 20 bp, Artificial Sequence
  Synthetic
cccgacaacatcaccaccga

SEQ ID NO: 36956 - DNA, 19 bp, Artificial Sequence
  Synthetic
tgccgcggttacttcgtgt

SEQ ID NO: 36957 - DNA, 19 bp, Artificial Sequence
  Synthetic
ctgtctatcggcgaccgcg

SEQ ID NO: 36958 - DNA, 19 bp, Artificial Sequence
  Synthetic
tgatgctgggacgcgcgtc

SEQ ID NO: 36959 - DNA, 20 bp, Artificial Sequence
  Synthetic
ccgctttgctggtggacgat

SEQ ID NO: 36960 - DNA, 21 bp, Artificial Sequence
  Synthetic
tgggtttgggtgcgagtttga

SEQ ID NO: 36961 - DNA, 18 bp, Artificial Sequence
  Synthetic
tggacggctgcggcttga

SEQ ID NO: 36962 - DNA, 21 bp, Artificial Sequence
  Synthetic
gcgacatcgaattgctggcgg

SEQ ID NO: 36963 - DNA, 22 bp, Artificial Sequence
  Synthetic
ggtttgcaaggcttcagcaaca

SEQ ID NO: 36964 - DNA, 21 bp, Artificial Sequence
  Synthetic
gcgacaacccgcgtttggaaa

SEQ ID NO: 36965 - DNA, 20 bp, Artificial Sequence
  Synthetic
ccgccgcgatggaagtttcc

SEQ ID NO: 36966 - DNA, 20 bp, Artificial Sequence
  Synthetic
attgacggcaaaggtcagga

SEQ ID NO: 36967 - DNA, 20 bp, Artificial Sequence
  Synthetic
taaggggcggttggctgttc

SEQ ID NO: 36968 - DNA, 20 bp, Artificial Sequence
  Synthetic
gggaagagccggacggacag

SEQ ID NO: 36969 - DNA, 20 bp, Artificial Sequence
  Synthetic
cggcaaacaatacgcacggc

SEQ ID NO: 36970 - DNA, 19 bp, Artificial Sequence
  Synthetic
gccttgtcctgccgcatct

SEQ ID NO: 36971 - DNA, 19 bp, Artificial Sequence
  Synthetic
tgttcagcgttttgcccgc

SEQ ID NO: 36972 - DNA, 19 bp, Artificial Sequence
  Synthetic
tgacggtgttgcctgccgc

SEQ ID NO: 36973 - DNA, 22 bp, Artificial Sequence
  Synthetic
gtcgagcctgtgaaaatcacgc

SEQ ID NO: 36974 - DNA, 19 bp, Artificial Sequence
  Synthetic
acgacggttcggatgccgg

SEQ ID NO: 36975 - DNA, 19 bp, Artificial Sequence
  Synthetic
gcgtccagggtcagcttgg

SEQ ID NO: 36976 - DNA, 19 bp, Artificial Sequence
  Synthetic
acgatgccgcacactgccg

SEQ ID NO: 36977 - DNA, 19 bp, Artificial Sequence
  Synthetic
tcgggcatcaccagcctga

SEQ ID NO: 36978 - DNA, 21 bp, Artificial Sequence
  Synthetic
cgtccgcttccaagccgaaat

SEQ ID NO: 36979 - DNA, 19 bp, Artificial Sequence
  Synthetic
tggcggctgatgtcgagcg

SEQ ID NO: 36980 - DNA, 20 bp, Artificial Sequence
  Synthetic
cgggcgcactctatccgatg

SEQ ID NO: 36981 - DNA, 19 bp, Artificial Sequence
  Synthetic
tgccaagtgcagacggccg

SEQ ID NO: 36982 - DNA, 20 bp, Artificial Sequence
  Synthetic
ttcaggtggacgtggtggct

SEQ ID NO: 36983 - DNA, 19 bp, Artificial Sequence
  Synthetic
agggttgggctggggcttg

SEQ ID NO: 36984 - DNA, 20 bp, Artificial Sequence
  Synthetic
tggtatccggttgttcgcac

SEQ ID NO: 36985 - DNA, 20 bp, Artificial Sequence
  Synthetic
ccagcaatttgcggcgcaac

SEQ ID NO: 36986 - DNA, 22 bp, Artificial Sequence
  Synthetic
ccacgcgtgtttccctgtcatc

SEQ ID NO: 36987 - DNA, 22 bp, Artificial Sequence
  Synthetic
gtggtggcggtagtgtcatagg

SEQ ID NO: 36988 - DNA, 20 bp, Artificial Sequence
  Synthetic
cgcggtcggaatgttcgtcc

SEQ ID NO: 36989 - DNA, 20 bp, Artificial Sequence
  Synthetic
cccgcgtttttcgtccaccc

SEQ ID NO: 36990 - DNA, 19 bp, Artificial Sequence
  Synthetic
ccggctgccaagcgtttgg

SEQ ID NO: 36991 - DNA, 20 bp, Artificial Sequence
  Synthetic
gggcttccagtgcggcaaat

SEQ ID NO: 36992 - DNA, 21 bp, Artificial Sequence
  Synthetic
acgatgccgtctgaaaagccg

SEQ ID NO: 36993 - DNA, 18 bp, Artificial Sequence
  Synthetic
ggcgcggtgtggaaacga

SEQ ID NO: 36994 - DNA, 22 bp, Artificial Sequence
  Synthetic
ccaagtccaaatccaagccgga

SEQ ID NO: 36995 - DNA, 19 bp, Artificial Sequence
  Synthetic
actgcggctgtcccagtcc

SEQ ID NO: 36996 - DNA, 22 bp, Artificial Sequence
  Synthetic
gccggccgatgatgaaaatgct

SEQ ID NO: 36997 - DNA, 22 bp, Artificial Sequence
  Synthetic
cgccgaacctgaaaacaacaca

SEQ ID NO: 36998 - DNA, 22 bp, Artificial Sequence
  Synthetic
cgtttgtctgcctgctttgtgt

SEQ ID NO: 36999 - DNA, 21 bp, Artificial Sequence
  Synthetic
gcttaaccgccgtcgtcaacg

SEQ ID NO: 37000 - DNA, 22 bp, Artificial Sequence
  Synthetic
cgcaaccattgttttgggcgac

SEQ ID NO: 37001 - DNA, 20 bp, Artificial Sequence
  Synthetic
gatgcggcaactgcgatgga

SEQ ID NO: 37002 - DNA, 20 bp, Artificial Sequence
  Synthetic
ccttccaaagacggcagcca

SEQ ID NO: 37003 - DNA, 19 bp, Artificial Sequence
  Synthetic
caactgcttcatcggcgcg

SEQ ID NO: 37004 - DNA, 19 bp, Artificial Sequence
  Synthetic
tggtcgcccgtcggtttgc

SEQ ID NO: 37005 - DNA, 21 bp, Artificial Sequence
  Synthetic
cccatgctgtcatctcaccgg

SEQ ID NO: 37006 - DNA, 23 bp, Artificial Sequence
  Synthetic
gggttatggttaatatccgcaca

SEQ ID NO: 37007 - DNA, 19 bp, Artificial Sequence
  Synthetic
cggggtgcataccgacagc

SEQ ID NO: 37008 - DNA, 20 bp, Artificial Sequence
  Synthetic
catcgattatgccgcaccgc

SEQ ID NO: 37009 - DNA, 22 bp, Artificial Sequence
  Synthetic
cttccgtgcagactgtcccaaa

SEQ ID NO: 37010 - DNA, 19 bp, Artificial Sequence
  Synthetic
cgcataccgctccctgtcc

SEQ ID NO: 37011 - DNA, 24 bp, Artificial Sequence
  Synthetic
caaatgccgtctgaaaattggttt

SEQ ID NO: 37012 - DNA, 21 bp, Artificial Sequence
  Synthetic
gacggcatctgtacggtgtcc

SEQ ID NO: 37013 - DNA, 22 bp, Artificial Sequence
  Synthetic
ggatgacgggggtcagttcaag

SEQ ID NO: 37014 - DNA, 20 bp, Artificial Sequence
  Synthetic
tgtgggcttcggggtctttg

SEQ ID NO: 37015 - DNA, 23 bp, Artificial Sequence
  Synthetic
gtactgcatatctggtctttggc

SEQ ID NO: 37016 - DNA, 21 bp, Artificial Sequence
  Synthetic
gctcgccgagccgattcaaac

SEQ ID NO: 37017 - DNA, 22 bp, Artificial Sequence
  Synthetic
atcatcggcaaactcaccgcta

SEQ ID NO: 37018 - DNA, 21 bp, Artificial Sequence
  Synthetic
cgcacgagcagaaaccgaatc

SEQ ID NO: 37019 - DNA, 19 bp, Artificial Sequence
  Synthetic
cgcctgtccgcacccaatt

SEQ ID NO: 37020 - DNA, 18 bp, Artificial Sequence
  Synthetic
ctacgaccaggcgcgcaa

SEQ ID NO: 37021 - DNA, 22 bp, Artificial Sequence
  Synthetic
caggcagtgatgcaaaacagcc

SEQ ID NO: 37022 - DNA, 18 bp, Artificial Sequence
  Synthetic
agaagccgcacccgcaca

SEQ ID NO: 37023 - DNA, 18 bp, Artificial Sequence
  Synthetic
gctgcaaagcgtcagccg

SEQ ID NO: 37024 - DNA, 22 bp, Artificial Sequence
  Synthetic
ccgtctgaaaaccttggagcga

SEQ ID NO: 37025 - DNA, 19 bp, Artificial Sequence
  Synthetic
atgaagctgcggacgggcg

SEQ ID NO: 37026 - DNA, 19 bp, Artificial Sequence
  Synthetic
ggcgcagttttccgccctt

SEQ ID NO: 37027 - DNA, 21 bp, Artificial Sequence
  Synthetic
acgtcgcctttttgaaacgcg

SEQ ID NO: 37028 - DNA, 19 bp, Artificial Sequence
  Synthetic
ctcgtctgccgtcatcgcc

SEQ ID NO: 37029 - DNA, 21 bp, Artificial Sequence
  Synthetic
ttttcggcaaacagttcggcg

SEQ ID NO: 37030 - DNA, 19 bp, Artificial Sequence
  Synthetic
cgtaggttgtgccgtcggg

SEQ ID NO: 37031 - DNA, 21 bp, Artificial Sequence
  Synthetic
tgaccgcctctcttgcctaca

SEQ ID NO: 37032 - DNA, 18 bp, Artificial Sequence
  Synthetic
ggcagggttcggcgtgtt

SEQ ID NO: 37033 - DNA, 22 bp, Artificial Sequence
  Synthetic
tggctgcctgattcgatggaag

SEQ ID NO: 37034 - DNA, 20 bp, Artificial Sequence
  Synthetic
gcggagtttttgggcgtgac

SEQ ID NO: 37035 - DNA, 19 bp, Artificial Sequence
  Synthetic
aaccgcctcgtccgtgtcg

SEQ ID NO: 37036 - DNA, 22 bp, Artificial Sequence
  Synthetic
ctttgacaccattgtgccgctg

SEQ ID NO: 37037 - DNA, 22 bp, Artificial Sequence
  Synthetic
gggtgctgaaaaaactggcgga

SEQ ID NO: 37038 - DNA, 19 bp, Artificial Sequence
  Synthetic
tgtgtgtggggacttgggc

SEQ ID NO: 37039 - DNA, 20 bp, Artificial Sequence
  Synthetic
cggcaagccaccatgagacg

SEQ ID NO: 37040 - DNA, 18 bp, Artificial Sequence
  Synthetic
agccgaggaatccgccga

SEQ ID NO: 37041 - DNA, 20 bp, Artificial Sequence
  Synthetic
tgaagcccaccctacagccc

SEQ ID NO: 37042 - DNA, 21 bp, Artificial Sequence
  Synthetic
tgacggctttgttcaggtcgg

SEQ ID NO: 37043 - DNA, 19 bp, Artificial Sequence
  Synthetic
atcgcctgccgcagacttt

SEQ ID NO: 37044 - DNA, 22 bp, Artificial Sequence
  Synthetic
gcattcaatgcggtaggcgagt

SEQ ID NO: 37045 - DNA, 18 bp, Artificial Sequence
  Synthetic
gcgcggcggaatccttca

SEQ ID NO: 37046 - DNA, 22 bp, Artificial Sequence
  Synthetic
cacctgcttacccaagtggacg

SEQ ID NO: 37047 - DNA, 20 bp, Artificial Sequence
  Synthetic
ggatttggggcgtcgtgtcc

SEQ ID NO: 37048 - DNA, 20 bp, Artificial Sequence
  Synthetic
gttgtcgaatttgccgcccg

SEQ ID NO: 37049 - DNA, 21 bp, Artificial Sequence
  Synthetic
gcggcgttttcttcgttgacc

SEQ ID NO: 37050 - DNA, 20 bp, Artificial Sequence
  Synthetic
ttgcgttcgatgcaggggat

SEQ ID NO: 37051 - DNA, 19 bp, Artificial Sequence
  Synthetic
tcttgttcgtccgccgccg

SEQ ID NO: 37052 - DNA, 19 bp, Artificial Sequence
  Synthetic
cgatgggcgtgctgctgat

SEQ ID NO: 37053 - DNA, 22 bp, Artificial Sequence
  Synthetic
cccttggaagacgaccgtgaaa

SEQ ID NO: 37054 - DNA, 22 bp, Artificial Sequence
  Synthetic
gcggctcaattccaaaagtccg

SEQ ID NO: 37055 - DNA, 20 bp, Artificial Sequence
  Synthetic
ggcacttgggcgctcacttc

SEQ ID NO: 37056 - DNA, 21 bp, Artificial Sequence
  Synthetic
cggcgttttccggtttgacct

SEQ ID NO: 37057 - DNA, 19 bp, Artificial Sequence
  Synthetic
tgcctgcggtcagcaccac

SEQ ID NO: 37058 - DNA, 22 bp, Artificial Sequence
  Synthetic
gcttcgcggctgagtttttgtc

SEQ ID NO: 37059 - DNA, 18 bp, Artificial Sequence
  Synthetic
cgcgtgctggtggtcgat

SEQ ID NO: 37060 - DNA, 19 bp, Artificial Sequence
  Synthetic
gcatcaggccgctgtcgag

SEQ ID NO: 37061 - DNA, 20 bp, Artificial Sequence
  Synthetic
tgggagattgcagcttggcg

SEQ ID NO: 37062 - DNA, 22 bp, Artificial Sequence
  Synthetic
cctgccattggtagtggaggtg

SEQ ID NO: 37063 - DNA, 21 bp, Artificial Sequence
  Synthetic
gccgccatattgccctcaaac

SEQ ID NO: 37064 - DNA, 20 bp, Artificial Sequence
  Synthetic
cggcaacccagaccaaaccc

SEQ ID NO: 37065 - DNA, 20 bp, Artificial Sequence
  Synthetic
tacggtgctcggctcggtac

SEQ ID NO: 37066 - DNA, 18 bp, Artificial Sequence
  Synthetic
cgccgccgatgatgcagt

SEQ ID NO: 37067 - DNA, 21 bp, Artificial Sequence
  Synthetic
gttacccgtaccgatggtggc

SEQ ID NO: 37068 - DNA, 18 bp, Artificial Sequence
  Synthetic
gctgtcggcggttttggc

SEQ ID NO: 37069 - DNA, 20 bp, Artificial Sequence
  Synthetic
aaaaacagtgcggtcggtga

SEQ ID NO: 37070 - DNA, 18 bp, Artificial Sequence
  Synthetic
gaggatgtgccgccggtt

SEQ ID NO: 37071 - DNA, 20 bp, Artificial Sequence
  Synthetic
gtttggcggccaacgtttcg

SEQ ID NO: 37072 - DNA, 19 bp, Artificial Sequence
  Synthetic
tggcggtacccggttcgat

SEQ ID NO: 37073 - DNA, 21 bp, Artificial Sequence
  Synthetic
tgcgcgaattaagggaggagg

SEQ ID NO: 37074 - DNA, 21 bp, Artificial Sequence
  Synthetic
gcgcaccggggtaatcaaagg

SEQ ID NO: 37075 - DNA, 19 bp, Artificial Sequence
  Synthetic
tgccgctgctgctgaaggg

SEQ ID NO: 37076 - DNA, 19 bp, Artificial Sequence
  Synthetic
cgcatcggtgccgtccaat

SEQ ID NO: 37077 - DNA, 19 bp, Artificial Sequence
  Synthetic
caaaatcagcgggcgcacg

SEQ ID NO: 37078 - DNA, 20 bp, Artificial Sequence
  Synthetic
atccacgccagttggtagcc

SEQ ID NO: 37079 - DNA, 22 bp, Artificial Sequence
  Synthetic
acgtggtcaaagtgaaggtgct

SEQ ID NO: 37080 - DNA, 21 bp, Artificial Sequence
  Synthetic
cagcacgacgtgaaccaaagc

SEQ ID NO: 37081 - DNA, 21 bp, Artificial Sequence
  Synthetic
gcgttttatcggtgcgggaac

SEQ ID NO: 37082 - DNA, 22 bp, Artificial Sequence
  Synthetic
gctcaccgtccccaaagaaacc

SEQ ID NO: 37083 - DNA, 22 bp, Artificial Sequence
  Synthetic
cccaaacacaggttttcagctg

SEQ ID NO: 37084 - DNA, 19 bp, Artificial Sequence
  Synthetic
cgccgcattgtccgggtta

SEQ ID NO: 37085 - DNA, 21 bp, Artificial Sequence
  Synthetic
tcgccgatacagaccacgtct

SEQ ID NO: 37086 - DNA, 20 bp, Artificial Sequence
  Synthetic
atggaggcggcggtaaagac

SEQ ID NO: 37087 - DNA, 19 bp, Artificial Sequence
  Synthetic
gccgtctgaaaggaggcgc

SEQ ID NO: 37088 - DNA, 19 bp, Artificial Sequence
  Synthetic
cggacggattgcctgccag

SEQ ID NO: 37089 - DNA, 20 bp, Artificial Sequence
  Synthetic
gtacacgcggcttttggtgg

SEQ ID NO: 37090 - DNA, 22 bp, Artificial Sequence
  Synthetic
gtagccggttttgagcagggta

SEQ ID NO: 37091 - DNA, 22 bp, Artificial Sequence
  Synthetic
cgcgcagtgtatccaatgccgt

SEQ ID NO: 37092 - DNA, 19 bp, Artificial Sequence
  Synthetic
ggcaacgccgtaccggttt

SEQ ID NO: 37093 - DNA, 19 bp, Artificial Sequence
  Synthetic
acacagcgggcgaatacgg

SEQ ID NO: 37094 - DNA, 19 bp, Artificial Sequence
  Synthetic
ggcttgggcaacggcttcg

SEQ ID NO: 37095 - DNA, 19 bp, Artificial Sequence
  Synthetic
accaccgcttcggcatcgg

SEQ ID NO: 37096 - DNA, 20 bp, Artificial Sequence
  Synthetic
aatgcttgccgtcgcgatga

SEQ ID NO: 37097 - DNA, 22 bp, Artificial Sequence
  Synthetic
cgcctttgaccaagtctgtcca

SEQ ID NO: 37098 - DNA, 20 bp, Artificial Sequence
  Synthetic
ccgaaaccctcaaagccgcc

SEQ ID NO: 37099 - DNA, 19 bp, Artificial Sequence
  Synthetic
gtggagcgcaaagtcgtgc

SEQ ID NO: 37100 - DNA, 20 bp, Artificial Sequence
  Synthetic
ttttcagcctcgtttcccca

SEQ ID NO: 37101 - DNA, 21 bp, Artificial Sequence
  Synthetic
gctttggctaatgtcggaaga

SEQ ID NO: 37102 - DNA, 19 bp, Artificial Sequence
  Synthetic
atcctgtcccgccccaacc

SEQ ID NO: 37103 - DNA, 19 bp, Artificial Sequence
  Synthetic
aagccctttctgcccgccg

SEQ ID NO: 37104 - DNA, 18 bp, Artificial Sequence
  Synthetic
tccgttcccgcgcattcg

SEQ ID NO: 37105 - DNA, 18 bp, Artificial Sequence
  Synthetic
cagccacgccacgatgct

SEQ ID NO: 37106 - DNA, 22 bp, Artificial Sequence
  Synthetic
cggcattttcagcaacaacggg

SEQ ID NO: 37107 - DNA, 20 bp, Artificial Sequence
  Synthetic
acacgcgtattatggcagca

SEQ ID NO: 37108 - DNA, 20 bp, Artificial Sequence
  Synthetic
cctcatccgaacccgcacag

SEQ ID NO: 37109 - DNA, 20 bp, Artificial Sequence
  Synthetic
gccccaaatctccgtcgtcg

SEQ ID NO: 37110 - DNA, 21 bp, Artificial Sequence
  Synthetic
gtggtaggtgaggtcggcaac

SEQ ID NO: 37111 - DNA, 21 bp, Artificial Sequence
  Synthetic
ggcatgcctaacaagccgaca

SEQ ID NO: 37112 - DNA, 19 bp, Artificial Sequence
  Synthetic
atcgggatagagcgtgcgc

SEQ ID NO: 37113 - DNA, 19 bp, Artificial Sequence
  Synthetic
caccgtcggcgaccaactt

SEQ ID NO: 37114 - DNA, 18 bp, Artificial Sequence
  Synthetic
tcatcagcggcatgggcg

SEQ ID NO: 37115 - DNA, 18 bp, Artificial Sequence
  Synthetic
gtggtcggcgtgggcatt

SEQ ID NO: 37116 - DNA, 19 bp, Artificial Sequence
  Synthetic
ggtcaaacgcccagccgaa

SEQ ID NO: 37117 - DNA, 20 bp, Artificial Sequence
  Synthetic
ggctgatttcgccgctgacg

SEQ ID NO: 37118 - DNA, 21 bp, Artificial Sequence
  Synthetic
atcggcaagccggttttgcag

SEQ ID NO: 37119 - DNA, 19 bp, Artificial Sequence
  Synthetic
cacgaagcccccgtccatg

SEQ ID NO: 37120 - DNA, 18 bp, Artificial Sequence
  Synthetic
cgtcaacatggcgcacgc

SEQ ID NO: 37121 - DNA, 22 bp, Artificial Sequence
  Synthetic
gcgcgattttccagaccacgac

SEQ ID NO: 37122 - DNA, 18 bp, Artificial Sequence
  Synthetic
tgtgtggcacgggcagga

SEQ ID NO: 37123 - DNA, 18 bp, Artificial Sequence
  Synthetic
aagcacgccgcccgtttg

SEQ ID NO: 37124 - DNA, 21 bp, Artificial Sequence
  Synthetic
gtcaaaccggccatcacttgc

SEQ ID NO: 37125 - DNA, 20 bp, Artificial Sequence
  Synthetic
gcagtccgacgcgttccaac

SEQ ID NO: 37126 - DNA, 22 bp, Artificial Sequence
  Synthetic
gccatactgctttccaccagcg

SEQ ID NO: 37127 - DNA, 21 bp, Artificial Sequence
  Synthetic
cttggaagggggctggcaata

SEQ ID NO: 37128 - DNA, 18 bp, Artificial Sequence
  Synthetic
acgcggcggatggaaagc

SEQ ID NO: 37129 - DNA, 22 bp, Artificial Sequence
  Synthetic
gtgcggattgtcgggttctttg

SEQ ID NO: 37130 - DNA, 20 bp, Artificial Sequence
  Synthetic
gggaaaggaaaagccgggca

SEQ ID NO: 37131 - DNA, 18 bp, Artificial Sequence
  Synthetic
tgcgctttaccccggtgg

SEQ ID NO: 37132 - DNA, 20 bp, Artificial Sequence
  Synthetic
cttcgaggaagtagccgccg

SEQ ID NO: 37133 - DNA, 21 bp, Artificial Sequence
  Synthetic
gcagctatgttcagacggcat

SEQ ID NO: 37134 - DNA, 19 bp, Artificial Sequence
  Synthetic
ttaccgccgcctccctgac

SEQ ID NO: 37135 - DNA, 20 bp, Artificial Sequence
  Synthetic
cgcacatggaacaaggcggg

SEQ ID NO: 37136 - DNA, 22 bp, Artificial Sequence
  Synthetic
caccaacgccatcgaaaccaag

SEQ ID NO: 37137 - DNA, 21 bp, Artificial Sequence
  Synthetic
cgcgtgcagcttatggaggac

SEQ ID NO: 37138 - DNA, 18 bp, Artificial Sequence
  Synthetic
attccccatcaccgcgcg

SEQ ID NO: 37139 - DNA, 18 bp, Artificial Sequence
  Synthetic
gcgccacggcaagaaacg

SEQ ID NO: 37140 - DNA, 20 bp, Artificial Sequence
  Synthetic
tctcggcttgtcaaccgttt

SEQ ID NO: 37141 - DNA, 18 bp, Artificial Sequence
  Synthetic
ttccggaccgcccaaacg

SEQ ID NO: 37142 - DNA, 20 bp, Artificial Sequence
  Synthetic
acgctttcagacggcatccg

SEQ ID NO: 37143 - DNA, 21 bp, Artificial Sequence
  Synthetic
gctgcgggactttttggaacg

SEQ ID NO: 37144 - DNA, 19 bp, Artificial Sequence
  Synthetic
tgcgccaaacaccaaagcg

SEQ ID NO: 37145 - DNA, 21 bp, Artificial Sequence
  Synthetic
gggtgcttggaaaaatgccgc

SEQ ID NO: 37146 - DNA, 19 bp, Artificial Sequence
  Synthetic
catcagtacgccgcctgca

SEQ ID NO: 37147 - DNA, 20 bp, Artificial Sequence
  Synthetic
gcgccgccgactttaccatt

SEQ ID NO: 37148 - DNA, 21 bp, Artificial Sequence
  Synthetic
cgccaaactgattgtggcgca

SEQ ID NO: 37149 - DNA, 19 bp, Artificial Sequence
  Synthetic
aacggaatcgagccggccg

SEQ ID NO: 37150 - DNA, 20 bp, Artificial Sequence
  Synthetic
ccgtccaccacgcatcgtaa

SEQ ID NO: 37151 - DNA, 21 bp, Artificial Sequence
  Synthetic
cgccttcatccacctcagtcc

SEQ ID NO: 37152 - DNA, 18 bp, Artificial Sequence
  Synthetic
gacaagatgggcgcgggt

SEQ ID NO: 37153 - DNA, 19 bp, Artificial Sequence
  Synthetic
cgcttccggcatcggcaag

SEQ ID NO: 37154 - DNA, 19 bp, Artificial Sequence
  Synthetic
tcccgaactgctcagcggc

SEQ ID NO: 37155 - DNA, 19 bp, Artificial Sequence
  Synthetic
tgcacgtcttcctgccgcc

SEQ ID NO: 37156 - DNA, 20 bp, Artificial Sequence
  Synthetic
cgacggcctcatcaacccaa

SEQ ID NO: 37157 - DNA, 20 bp, Artificial Sequence
  Synthetic
gcgagacggtgagcgtgaat

SEQ ID NO: 37158 - DNA, 22 bp, Artificial Sequence
  Synthetic
ccccacaagccaaagaacaggc

SEQ ID NO: 37159 - DNA, 22 bp, Artificial Sequence
  Synthetic
gcggcatcatctcgattgccga

SEQ ID NO: 37160 - DNA, 21 bp, Artificial Sequence
  Synthetic
cgcccattccgatcatgtcgc

SEQ ID NO: 37161 - DNA, 19 bp, Artificial Sequence
  Synthetic
ggatgcccgccgtcagaag

SEQ ID NO: 37162 - DNA, 20 bp, Artificial Sequence
  Synthetic
ctgccgccgatgatgatggc

SEQ ID NO: 37163 - DNA, 21 bp, Artificial Sequence
  Synthetic
ggcagcctttcagacggcatc

SEQ ID NO: 37164 - DNA, 18 bp, Artificial Sequence
  Synthetic
aaaacctcggcagcgggc

SEQ ID NO: 37165 - DNA, 20 bp, Artificial Sequence
  Synthetic
cagggttcgactggcggttt

SEQ ID NO: 37166 - DNA, 20 bp, Artificial Sequence
  Synthetic
ccgccgaatatcgcgaatgc

SEQ ID NO: 37167 - DNA, 22 bp, Artificial Sequence
  Synthetic
cctgtcgctcaaacccgtttca

SEQ ID NO: 37168 - DNA, 20 bp, Artificial Sequence
  Synthetic
acgggccgtcaaacaaggtg

SEQ ID NO: 37169 - DNA, 21 bp, Artificial Sequence
  Synthetic
actgcaatacgtcgccttcga

SEQ ID NO: 37170 - DNA, 21 bp, Artificial Sequence
  Synthetic
cagcagccacggtttttcgtg

SEQ ID NO: 37171 - DNA, 18 bp, Artificial Sequence
  Synthetic
tggtaaccgcctgcctgc

SEQ ID NO: 37172 - DNA, 21 bp, Artificial Sequence
  Synthetic
acgatatggcggtcaacagcg

SEQ ID NO: 37173 - DNA, 21 bp, Artificial Sequence
  Synthetic
tgacggcggtacacaaggttc

SEQ ID NO: 37174 - DNA, 22 bp, Artificial Sequence
  Synthetic
gctgaaccttgcccatttggac

SEQ ID NO: 37175 - DNA, 19 bp, Artificial Sequence
  Synthetic
aagcgggtcggtatggcgg

SEQ ID NO: 37176 - DNA, 21 bp, Artificial Sequence
  Synthetic
aatgtccgcctcgctcaacat

SEQ ID NO: 37177 - DNA, 19 bp, Artificial Sequence
  Synthetic
accgcccaaaccgccttgg

SEQ ID NO: 37178 - DNA, 19 bp, Artificial Sequence
  Synthetic
acaccccgcccgaacagga

SEQ ID NO: 37179 - DNA, 21 bp, Artificial Sequence
  Synthetic
cctctggttcctcatccgtag

SEQ ID NO: 37180 - DNA, 20 bp, Artificial Sequence
  Synthetic
cgcttccagtctcggactaa

SEQ ID NO: 37181 - DNA, 23 bp, Artificial Sequence
  Synthetic
atgatgtttccgtatgctccttt

SEQ ID NO: 37182 - DNA, 25 bp, Artificial Sequence
  Synthetic
cttttgtttccatctttgtccacat

SEQ ID NO: 37183 - DNA, 20 bp, Artificial Sequence
  Synthetic
agctgggcctctgagcaata

SEQ ID NO: 37184 - DNA, 24 bp, Artificial Sequence
  Synthetic
gctctattgatcagcctttcagat

SEQ ID NO: 37185 - DNA, 24 bp, Artificial Sequence
  Synthetic
acctccactaaaggattctggtaa

SEQ ID NO: 37186 - DNA, 25 bp, Artificial Sequence
  Synthetic
ttatcaccatatgtgtcctttgtca

SEQ ID NO: 37187 - DNA, 24 bp, Artificial Sequence
  Synthetic
gcttctaacggtactttgcaaaga

SEQ ID NO: 37188 - DNA, 25 bp, Artificial Sequence
  Synthetic
cattcacagtttaacatggaatgca

SEQ ID NO: 37189 - DNA, 21 bp, Artificial Sequence
  Synthetic
tttccgcaagttcgacaatca

SEQ ID NO: 37190 - DNA, 20 bp, Artificial Sequence
  Synthetic
gctcctgtggtgttgcaaat

SEQ ID NO: 37191 - DNA, 22 bp, Artificial Sequence
  Synthetic
cctcattctcaatgtcctgcag

SEQ ID NO: 37192 - DNA, 20 bp, Artificial Sequence
  Synthetic
ggagccacgtcttctccaat

SEQ ID NO: 37193 - DNA, 20 bp, Artificial Sequence
  Synthetic
tcaaagtcacccccctcggt

SEQ ID NO: 37194 - DNA, 20 bp, Artificial Sequence
  Synthetic
ccctttactcggaccgggga

SEQ ID NO: 37195 - DNA, 21 bp, Artificial Sequence
  Synthetic
aggagaggcaggatcaccgac

SEQ ID NO: 37196 - DNA, 20 bp, Artificial Sequence
  Synthetic
tgcaggtttactgtgcagca

SEQ ID NO: 37197 - DNA, 21 bp, Artificial Sequence
  Synthetic
tttgcctgtttttgttgtgcc

SEQ ID NO: 37198 - DNA, 22 bp, Artificial Sequence
  Synthetic
gccatgccttttgtttacacac

SEQ ID NO: 37199 - DNA, 20 bp, Artificial Sequence
  Synthetic
cgctttcctgggtatggcgc

SEQ ID NO: 37200 - DNA, 25 bp, Artificial Sequence
  Synthetic
gcaataatgtccaaaaaatcggggt

SEQ ID NO: 37201 - DNA, 20 bp, Artificial Sequence
  Synthetic
gcggcgtatgtatgctagga

SEQ ID NO: 37202 - DNA, 20 bp, Artificial Sequence
  Synthetic
taccccagtgctctcccaag

SEQ ID NO: 37203 - DNA, 23 bp, Artificial Sequence
  Synthetic
acacacacaaacatgcggaatta

SEQ ID NO: 37204 - DNA, 18 bp, Artificial Sequence
  Synthetic
aaatcccccacgccctgc

SEQ ID NO: 37205 - DNA, 21 bp, Artificial Sequence
  Synthetic
tggctaaccccaaccatccca

SEQ ID NO: 37206 - DNA, 22 bp, Artificial Sequence
  Synthetic
gatcacacaaccaggctcgtgt

SEQ ID NO: 37207 - DNA, 22 bp, Artificial Sequence
  Synthetic
actctagagtgataggcctggt

SEQ ID NO: 37208 - DNA, 21 bp, Artificial Sequence
  Synthetic
accagaggccaaggacctaca

SEQ ID NO: 37209 - DNA, 23 bp, Artificial Sequence
  Synthetic
acatagaagagctacgtgacaca

SEQ ID NO: 37210 - DNA, 18 bp, Artificial Sequence
  Synthetic
gccgagacgcgcaacaac

SEQ ID NO: 37211 - DNA, 24 bp, Artificial Sequence
  Synthetic
aaccactagcctaacatttttgga

SEQ ID NO: 37212 - DNA, 21 bp, Artificial Sequence
  Synthetic
gcggtttccaatgtgaaagga

SEQ ID NO: 37213 - DNA, 20 bp, Artificial Sequence
  Synthetic
caagcagtggatgaggcggc

SEQ ID NO: 37214 - DNA, 20 bp, Artificial Sequence
  Synthetic
gcctagcgttgactggaaca

SEQ ID NO: 37215 - DNA, 20 bp, Artificial Sequence
  Synthetic
ccaggtgtagctcatgctgc

SEQ ID NO: 37216 - DNA, 21 bp, Artificial Sequence
  Synthetic
acgaacatcagtgccccgaag

SEQ ID NO: 37217 - DNA, 20 bp, Artificial Sequence
  Synthetic
atgtggctccgactgcatcg

SEQ ID NO: 37218 - DNA, 22 bp, Artificial Sequence
  Synthetic
ccgcaaataaggaagcgagggt

SEQ ID NO: 37219 - DNA, 25 bp, Artificial Sequence
  Synthetic
gtcttatccaaatctggtagaggtc

SEQ ID NO: 37220 - DNA, 19 bp, Artificial Sequence
  Synthetic
actcacatcggcggggtcg

SEQ ID NO: 37221 - DNA, 24 bp, Artificial Sequence
  Synthetic
gcaaatcctgtaatgtcacattgc

SEQ ID NO: 37222 - DNA, 20 bp, Artificial Sequence
  Synthetic
tcgtgacaacttgagctgga

SEQ ID NO: 37223 - DNA, 20 bp, Artificial Sequence
  Synthetic
tgctgagcacttcctgacaa

SEQ ID NO: 37224 - DNA, 21 bp, Artificial Sequence
  Synthetic
ttcactccatgaccaccttct

SEQ ID NO: 37225 - DNA, 20 bp, Artificial Sequence
  Synthetic
gttgctttacaggtaccgca

SEQ ID NO: 37226 - DNA, 25 bp, Artificial Sequence
  Synthetic
gcattagccaaaaatgactttgact

SEQ ID NO: 37227 - DNA, 22 bp, Artificial Sequence
  Synthetic
cggaggtagagggttgggtgaa

SEQ ID NO: 37228 - DNA, 21 bp, Artificial Sequence
  Synthetic
tcctgttcccacttcagaagg

SEQ ID NO: 37229 - DNA, 20 bp, Artificial Sequence
  Synthetic
gaagccccaacaccagaacc

SEQ ID NO: 37230 - DNA, 25 bp, Artificial Sequence
  Synthetic
cctcctgtaaatctctttcaaaggt

SEQ ID NO: 37231 - DNA, 20 bp, Artificial Sequence
  Synthetic
ggctgcaccaaatcctgtgt

SEQ ID NO: 37232 - DNA, 20 bp, Artificial Sequence
  Synthetic
ggcgccaagtttcttaccag

SEQ ID NO: 37233 - DNA, 21 bp, Artificial Sequence
  Synthetic
cattctcttcctcccaacagc

SEQ ID NO: 37234 - DNA, 21 bp, Artificial Sequence
  Synthetic
gtgtattgggcgtcttgaaca

SEQ ID NO: 37235 - DNA, 24 bp, Artificial Sequence
  Synthetic
agcaattagattcccattggatcg

SEQ ID NO: 37236 - DNA, 24 bp, Artificial Sequence
  Synthetic
aacctccttctatgaatccagcta

SEQ ID NO: 37237 - DNA, 19 bp, Artificial Sequence
  Synthetic
tctgaccaccgcccgggaa

SEQ ID NO: 37238 - DNA, 20 bp, Artificial Sequence
  Synthetic
aggtgcagccgaaccagttg

SEQ ID NO: 37239 - DNA, 22 bp, Artificial Sequence
  Synthetic
gctcaactcggccctatctctg

SEQ ID NO: 37240 - DNA, 21 bp, Artificial Sequence
  Synthetic
gcagccgcgtttaggacaatg

SEQ ID NO: 37241 - DNA, 21 bp, Artificial Sequence
  Synthetic
gcacccacacgtggatgatgg

SEQ ID NO: 37242 - DNA, 21 bp, Artificial Sequence
  Synthetic
ggccaccgttaattcgcggag

SEQ ID NO: 37243 - DNA, 19 bp, Artificial Sequence
  Synthetic
gggcacatgatcgggccac

SEQ ID NO: 37244 - DNA, 22 bp, Artificial Sequence
  Synthetic
ccacgccgtatgctcttgacat

SEQ ID NO: 37245 - DNA, 20 bp, Artificial Sequence
  Synthetic
tggcttctggacactgcgtc

SEQ ID NO: 37246 - DNA, 22 bp, Artificial Sequence
  Synthetic
cggtgaaagacatcaacgtggc

SEQ ID NO: 37247 - DNA, 22 bp, Artificial Sequence
  Synthetic
ggcgcatatgacaccaaccact

SEQ ID NO: 37248 - DNA, 21 bp, Artificial Sequence
  Synthetic
aggagttttgcctgcagccag

SEQ ID NO: 37249 - DNA, 20 bp, Artificial Sequence
  Synthetic
agctgactggccgaggagtt

SEQ ID NO: 37250 - DNA, 21 bp, Artificial Sequence
  Synthetic
cccacacctgaggggggtcat

SEQ ID NO: 37251 - DNA, 20 bp, Artificial Sequence
  Synthetic
cacgttgtcctcaccgctga

SEQ ID NO: 37252 - DNA, 20 bp, Artificial Sequence
  Synthetic
gtgcagtcccggagctttgc

SEQ ID NO: 37253 - DNA, 22 bp, Artificial Sequence
  Synthetic
tcggcgcgtacatgatgatgtt

SEQ ID NO: 37254 - DNA, 22 bp, Artificial Sequence
  Synthetic
gatgagcttagcgcgtacagct

SEQ ID NO: 37255 - DNA, 20 bp, Artificial Sequence
  Synthetic
cacagagtccccgaagccac

SEQ ID NO: 37256 - DNA, 22 bp, Artificial Sequence
  Synthetic
aaacacaaactttgggcattcc

SEQ ID NO: 37257 - DNA, 21 bp, Artificial Sequence
  Synthetic
acacacagcctccaaaacatc

SEQ ID NO: 37258 - DNA, 20 bp, Artificial Sequence
  Synthetic
acactgttggtgagcaggtc

SEQ ID NO: 37259 - DNA, 25 bp, Artificial Sequence
  Synthetic
cgatagtgacttgatcaatgcacat

SEQ ID NO: 37260 - DNA, 24 bp, Artificial Sequence
  Synthetic
tcaccataggattagcactttgtg

SEQ ID NO: 37261 - DNA, 20 bp, Artificial Sequence
  Synthetic
tgcctgctgacaacaatggt

SEQ ID NO: 37262 - DNA, 22 bp, Artificial Sequence
  Synthetic
tcttcagcatgagcaagcattt

SEQ ID NO: 37263 - DNA, 23 bp, Artificial Sequence
  Synthetic
cacaccacattaagaactcgctt

SEQ ID NO: 37264 - DNA, 20 bp, Artificial Sequence
  Synthetic
ttgtaaggtgagctccgtca

SEQ ID NO: 37265 - DNA, 23 bp, Artificial Sequence
  Synthetic
tgggaagaatgtgacagatagct

SEQ ID NO: 37266 - DNA, 21 bp, Artificial Sequence
  Synthetic
cggtagttttcacgtcacact

SEQ ID NO: 37267 - DNA, 23 bp, Artificial Sequence
  Synthetic
ttgctgaaaaggtgtcgacataa

SEQ ID NO: 37268 - DNA, 25 bp, Artificial Sequence
  Synthetic
ccagatgagtgaaacattgtgactt

SEQ ID NO: 37269 - DNA, 20 bp, Artificial Sequence
  Synthetic
acgagtgacaccatcctgaa

SEQ ID NO: 37270 - DNA, 25 bp, Artificial Sequence
  Synthetic
gaaccctctagcaaattagtgtcat

SEQ ID NO: 37271 - DNA, 22 bp, Artificial Sequence
  Synthetic
agacacatctaaagcacccaca

SEQ ID NO: 37272 - DNA, 22 bp, Artificial Sequence
  Synthetic
aaaaaggtacacaaagcagcct

SEQ ID NO: 37273 - DNA, 24 bp, Artificial Sequence
  Synthetic
ttgtacttcattgccacaaggtta

SEQ ID NO: 37274 - DNA, 20 bp, Artificial Sequence
  Synthetic
aggcccacatggaaatagct

SEQ ID NO: 37275 - DNA, 25 bp, Artificial Sequence
  Synthetic
gcatcaatactactcttaggaggca

SEQ ID NO: 37276 - DNA, 22 bp, Artificial Sequence
  Synthetic
tcctcagatcttgcctgtttgt

SEQ ID NO: 37277 - DNA, 23 bp, Artificial Sequence
  Synthetic
gtttaacagctgagttggctctt

SEQ ID NO: 37278 - DNA, 21 bp, Artificial Sequence
  Synthetic
tgaagacgtactgtagcagct

SEQ ID NO: 37279 - DNA, 20 bp, Artificial Sequence
  Synthetic
aagtcatggacagcaaccgc

SEQ ID NO: 37280 - DNA, 22 bp, Artificial Sequence
  Synthetic
ggatggtatgtctggtcccaat

SEQ ID NO: 37281 - DNA, 23 bp, Artificial Sequence
  Synthetic
ttagtgcagctactgaaaagcat

SEQ ID NO: 37282 - DNA, 22 bp, Artificial Sequence
  Synthetic
gcgagctctattctttgcacta

SEQ ID NO: 37283 - DNA, 24 bp, Artificial Sequence
  Synthetic
ggagaaatgtttacgcaggtaagc

SEQ ID NO: 37284 - DNA, 23 bp, Artificial Sequence
  Synthetic
gggtaagcatcaatagccagtga

SEQ ID NO: 37285 - DNA, 24 bp, Artificial Sequence
  Synthetic
tgaaatgacatggtcatagcagca

SEQ ID NO: 37286 - DNA, 20 bp, Artificial Sequence
  Synthetic
tctgctgcgaaaagcttgag

SEQ ID NO: 37287 - DNA, 24 bp, Artificial Sequence
  Synthetic
tcatcaaagactacaatgtcagca

SEQ ID NO: 37288 - DNA, 25 bp, Artificial Sequence
  Synthetic
tgtagaacattttgaagcattgagc

SEQ ID NO: 37289 - DNA, 21 bp, Artificial Sequence
  Synthetic
gtgacgaatagcttcttcgcg

SEQ ID NO: 37290 - DNA, 21 bp, Artificial Sequence
  Synthetic
ggacgaacacgactctgtctg

SEQ ID NO: 37291 - DNA, 23 bp, Artificial Sequence
  Synthetic
actctcagtaggtttcttggcaa

SEQ ID NO: 37292 - DNA, 22 bp, Artificial Sequence
  Synthetic
gcgagctcgagaaagtcagttt

SEQ ID NO: 37293 - DNA, 25 bp, Artificial Sequence
  Synthetic
agtcaattgtaaccttgaccacttt

SEQ ID NO: 37294 - DNA, 22 bp, Artificial Sequence
  Synthetic
gaatcgacaagtagtgtgccag

SEQ ID NO: 37295 - DNA, 22 bp, Artificial Sequence
  Synthetic
tgcttccgatgatgatgcattt

SEQ ID NO: 37296 - DNA, 20 bp, Artificial Sequence
  Synthetic
aataggctgcagctgacgtg

SEQ ID NO: 37297 - DNA, 20 bp, Artificial Sequence
  Synthetic
tcaggggagaaaggcacatt

SEQ ID NO: 37298 - DNA, 20 bp, Artificial Sequence
  Synthetic
ttacacccccaaaagcgcaa

SEQ ID NO: 37299 - DNA, 25 bp, Artificial Sequence
  Synthetic
ttgaactatcagcacctaaagacat

SEQ ID NO: 37300 - DNA, 21 bp, Artificial Sequence
  Synthetic
gcatcagcgagtgtcacctta

SEQ ID NO: 37301 - DNA, 23 bp, Artificial Sequence
  Synthetic
aatcgccttgttaaattggttgg

SEQ ID NO: 37302 - DNA, 23 bp, Artificial Sequence
  Synthetic
ggttgcagaggatcataaactgt

SEQ ID NO: 37303 - DNA, 24 bp, Artificial Sequence
  Synthetic
gcaacaactagtcatgcaacaaag

SEQ ID NO: 37304 - DNA, 23 bp, Artificial Sequence
  Synthetic
gccatcttttattgagcgcaatt

SEQ ID NO: 37305 - DNA, 23 bp, Artificial Sequence
  Synthetic
agtctttaacacctgagtgccta

SEQ ID NO: 37306 - DNA, 23 bp, Artificial Sequence
  Synthetic
ccaggctaggaataggaaaccta

SEQ ID NO: 37307 - DNA, 22 bp, Artificial Sequence
  Synthetic
gccattcgcaagtgaccacgaa

SEQ ID NO: 37308 - DNA, 22 bp, Artificial Sequence
  Synthetic
tgcaacccatacgatgccttct

SEQ ID NO: 37309 - DNA, 20 bp, Artificial Sequence
  Synthetic
cgccagtggggaatgtccag

SEQ ID NO: 37310 - DNA, 21 bp, Artificial Sequence
  Synthetic
accatccagatgaggcagatg

SEQ ID NO: 37311 - DNA, 23 bp, Artificial Sequence
  Synthetic
cactagatgtccgtgatggtact

SEQ ID NO: 37312 - DNA, 22 bp, Artificial Sequence
  Synthetic
gcatggcttctctcctggattt

SEQ ID NO: 37313 - DNA, 20 bp, Artificial Sequence
  Synthetic
ttggccttgtggtaaatgcg

SEQ ID NO: 37314 - DNA, 20 bp, Artificial Sequence
  Synthetic
caacgtgaccttcacctcca

SEQ ID NO: 37315 - DNA, 21 bp, Artificial Sequence
  Synthetic
gcctgaacaacctagaagggt

SEQ ID NO: 37316 - DNA, 23 bp, Artificial Sequence
  Synthetic
ttagcattcgagcaagaacagaa

SEQ ID NO: 37317 - DNA, 22 bp, Artificial Sequence
  Synthetic
agtgtgattagtgcttgcaagt

SEQ ID NO: 37318 - DNA, 20 bp, Artificial Sequence
  Synthetic
aagatctcagagcctgggtc

SEQ ID NO: 37319 - DNA, 21 bp, Artificial Sequence
  Synthetic
cagcttttgtcgggtaatggt

SEQ ID NO: 37320 - DNA, 23 bp, Artificial Sequence
  Synthetic
gcttcatcttctgctattccact

SEQ ID NO: 37321 - DNA, 21 bp, Artificial Sequence
  Synthetic
ccaacaacagtatgtggcgtc

SEQ ID NO: 37322 - DNA, 22 bp, Artificial Sequence
  Synthetic
tcaactgaacttcttgctgtgc

SEQ ID NO: 37323 - DNA, 24 bp, Artificial Sequence
  Synthetic
acttaacagtccattcacctgttt

SEQ ID NO: 37324 - DNA, 21 bp, Artificial Sequence
  Synthetic
ccgaaagacagagctacagca

SEQ ID NO: 37325 - DNA, 24 bp, Artificial Sequence
  Synthetic
ggtccaataggctcaataacaaca

SEQ ID NO: 37326 - DNA, 20 bp, Artificial Sequence
  Synthetic
tagctctgttaaaggcccgc

SEQ ID NO: 37327 - DNA, 21 bp, Artificial Sequence
  Synthetic
acctttgttagggtctcccat

SEQ ID NO: 37328 - DNA, 23 bp, Artificial Sequence
  Synthetic
ggactggcgatatactttcgttt

SEQ ID NO: 37329 - DNA, 20 bp, Artificial Sequence
  Synthetic
gtcggtcaagtctgcctgat

SEQ ID NO: 37330 - DNA, 21 bp, Artificial Sequence
  Synthetic
cctccgcttcctcgtcttcgt

SEQ ID NO: 37331 - DNA, 20 bp, Artificial Sequence
  Synthetic
tacttcagcgccaccaagag

SEQ ID NO: 37332 - DNA, 24 bp, Artificial Sequence
  Synthetic
cccttgaaggatatgttccaatgt

SEQ ID NO: 37333 - DNA, 22 bp, Artificial Sequence
  Synthetic
gtgaaagcaggtaggcaattgt

SEQ ID NO: 37334 - DNA, 23 bp, Artificial Sequence
  Synthetic
ggcctttcttctttgttgctgtt

SEQ ID NO: 37335 - DNA, 23 bp, Artificial Sequence
  Synthetic
aaaccatctgcatttctcgtctt

SEQ ID NO: 37336 - DNA, 21 bp, Artificial Sequence
  Synthetic
tctcacccattttccgtctct

SEQ ID NO: 37337 - DNA, 21 bp, Artificial Sequence
  Synthetic
cttcaaatgctgcagaatggc

SEQ ID NO: 37338 - DNA, 25 bp, Artificial Sequence
  Synthetic
agttgcaatatgcttatcgaccttt

SEQ ID NO: 37339 - DNA, 23 bp, Artificial Sequence
  Synthetic
gttccaggagtattagctactgc

SEQ ID NO: 37340 - DNA, 24 bp, Artificial Sequence
  Synthetic
cacttctgaacaagatttggcttg

SEQ ID NO: 37341 - DNA, 25 bp, Artificial Sequence
  Synthetic
tctttatctttttgagttcgtgcca

SEQ ID NO: 37342 - DNA, 24 bp, Artificial Sequence
  Synthetic
cttctttatcctcatcgtcaagct

SEQ ID NO: 37343 - DNA, 25 bp, Artificial Sequence
  Synthetic
ttcatatttagagcctggatttccc

SEQ ID NO: 37344 - DNA, 22 bp, Artificial Sequence
  Synthetic
ccaatgtgggcaatgattgact

SEQ ID NO: 37345 - DNA, 21 bp, Artificial Sequence
  Synthetic
gggacgatatagggagcttca

SEQ ID NO: 37346 - DNA, 23 bp, Artificial Sequence
  Synthetic
ccaaaatttcctatcggggtacg

SEQ ID NO: 37347 - DNA, 23 bp, Artificial Sequence
  Synthetic
ccttgtaaaacgtaaggtgcttg

SEQ ID NO: 37348 - DNA, 20 bp, Artificial Sequence
  Synthetic
aaggtctcgtgaaaccgcta

SEQ ID NO: 37349 - DNA, 24 bp, Artificial Sequence
  Synthetic
ggacaaggttatctggatactcct

SEQ ID NO: 37350 - DNA, 20 bp, Artificial Sequence
  Synthetic
gaagttgtcccagtcgcctc

SEQ ID NO: 37351 - DNA, 23 bp, Artificial Sequence
  Synthetic
actgacaagatcgcaacacttac

SEQ ID NO: 37352 - DNA, 22 bp, Artificial Sequence
  Synthetic
ctggggcatattcttcaccatc

SEQ ID NO: 37353 - DNA, 25 bp, Artificial Sequence
  Synthetic
ccatagatgattttgaggtgaaggc

SEQ ID NO: 37354 - DNA, 21 bp, Artificial Sequence
  Synthetic
taccggcatcttgttgtgcag

SEQ ID NO: 37355 - DNA, 22 bp, Artificial Sequence
  Synthetic
aggtactaacgacaaagcgaca

SEQ ID NO: 37356 - DNA, 22 bp, Artificial Sequence
  Synthetic
agcgtaagaaaggccatttgag

SEQ ID NO: 37357 - DNA, 21 bp, Artificial Sequence
  Synthetic
ggttccatgtgtaggctggtc

SEQ ID NO: 37358 - DNA, 21 bp, Artificial Sequence
  Synthetic
gggaggtgaaatctggcaaac

SEQ ID NO: 37359 - DNA, 24 bp, Artificial Sequence
  Synthetic
cccataaattccaagaaccaccta

SEQ ID NO: 37360 - DNA, 20 bp, Artificial Sequence
  Synthetic
taccatctgcttgtcgctct

SEQ ID NO: 37361 - DNA, 21 bp, Artificial Sequence
  Synthetic
gccgtgtttatctgtcactgt

SEQ ID NO: 37362 - DNA, 21 bp, Artificial Sequence
  Synthetic
gttctgcaaagaggcgttcaa

SEQ ID NO: 37363 - DNA, 21 bp, Artificial Sequence
  Synthetic
ctgataaagtcctgccagacg

SEQ ID NO: 37364 - DNA, 23 bp, Artificial Sequence
  Synthetic
ttcccatatcatcacctctggat

SEQ ID NO: 37365 - DNA, 22 bp, Artificial Sequence
  Synthetic
atgacaaatcaaagccactgct

SEQ ID NO: 37366 - DNA, 25 bp, Artificial Sequence
  Synthetic
cgtcatagtcagttgtaattgcctt

SEQ ID NO: 37367 - DNA, 23 bp, Artificial Sequence
  Synthetic
gcttgactctgatcaatgccata

SEQ ID NO: 37368 - DNA, 25 bp, Artificial Sequence
  Synthetic
ccttcctcgatactacctttttgag

SEQ ID NO: 37369 - DNA, 22 bp, Artificial Sequence
  Synthetic
agtaacagaacgtttgaagcga

SEQ ID NO: 37370 - DNA, 22 bp, Artificial Sequence
  Synthetic
aaagccgctgaaaaagctatgc

SEQ ID NO: 37371 - DNA, 23 bp, Artificial Sequence
  Synthetic
cggacaagtgaaacaatcctgaa

SEQ ID NO: 37372 - DNA, 20 bp, Artificial Sequence
  Synthetic
ccgtccccattgaagcaaca

SEQ ID NO: 37373 - DNA, 22 bp, Artificial Sequence
  Synthetic
gagctgtgatggatggtgattg

SEQ ID NO: 37374 - DNA, 21 bp, Artificial Sequence
  Synthetic
tgaagatcgcgctctgctaaa

SEQ ID NO: 37375 - DNA, 21 bp, Artificial Sequence
  Synthetic
aaagcagccactaattccgtt

SEQ ID NO: 37376 - DNA, 20 bp, Artificial Sequence
  Synthetic
gtacgccttgtcttgatgca

SEQ ID NO: 37377 - DNA, 20 bp, Artificial Sequence
  Synthetic
agcttgcggtgactgtttct

SEQ ID NO: 37378 - DNA, 22 bp, Artificial Sequence
  Synthetic
ccagacggtaaatcttcgacaa

SEQ ID NO: 37379 - DNA, 21 bp, Artificial Sequence
  Synthetic
cgtggcttaatcgtcgtttct

SEQ ID NO: 37380 - DNA, 24 bp, Artificial Sequence
  Synthetic
gaactactcgataacccatgcaaa

SEQ ID NO: 37381 - DNA, 20 bp, Artificial Sequence
  Synthetic
tgcatgttggtagaatgccc

SEQ ID NO: 37382 - DNA, 23 bp, Artificial Sequence
  Synthetic
ggctgaataaatgctcgatttgg

SEQ ID NO: 37383 - DNA, 24 bp, Artificial Sequence
  Synthetic
tcaacgtgatctaatgctttttgc

SEQ ID NO: 37384 - DNA, 20 bp, Artificial Sequence
  Synthetic
gcatcaagatgataggcgca

SEQ ID NO: 37385 - DNA, 20 bp, Artificial Sequence
  Synthetic
gacagccttttccaagggca

SEQ ID NO: 37386 - DNA, 24 bp, Artificial Sequence
  Synthetic
cttttaagaaatcagccgcggtta

SEQ ID NO: 37387 - DNA, 20 bp, Artificial Sequence
  Synthetic
cccccaatgcttccaggaat

SEQ ID NO: 37388 - DNA, 20 bp, Artificial Sequence
  Synthetic
tgacctgcaaagtgtcctgg

SEQ ID NO: 37389 - DNA, 22 bp, Artificial Sequence
  Synthetic
ggcgtgttgtccttaatgcagc

SEQ ID NO: 37390 - DNA, 25 bp, Artificial Sequence
  Synthetic
ccgtttttatgactgaaatctcacc

SEQ ID NO: 37391 - DNA, 25 bp, Artificial Sequence
  Synthetic
gctaaaaaattagcctcaccatcaa

SEQ ID NO: 37392 - DNA, 21 bp, Artificial Sequence
  Synthetic
tggtctaggatttgccaaggt

SEQ ID NO: 37393 - DNA, 25 bp, Artificial Sequence
  Synthetic
ccatctaaaccttaccctatcagga

SEQ ID NO: 37394 - DNA, 23 bp, Artificial Sequence
  Synthetic
ccttagccatgttaaaaccagga

SEQ ID NO: 37395 - DNA, 22 bp, Artificial Sequence
  Synthetic
cgattgggatgacagaaccttt

SEQ ID NO: 37396 - DNA, 20 bp, Artificial Sequence
  Synthetic
ggcagcaacaggttatgtca

SEQ ID NO: 37397 - DNA, 20 bp, Artificial Sequence
  Synthetic
atcaccacggagcagagtac

SEQ ID NO: 37398 - DNA, 25 bp, Artificial Sequence
  Synthetic
ccatttggataaagaagaagccatc

SEQ ID NO: 37399 - DNA, 23 bp, Artificial Sequence
  Synthetic
tccctcgattgattgatgaactg

SEQ ID NO: 37400 - DNA, 25 bp, Artificial Sequence
  Synthetic
gtggacgattgatagttgatggtaa

SEQ ID NO: 37401 - DNA, 21 bp, Artificial Sequence
  Synthetic
tggaagcccatttgaccatct

SEQ ID NO: 37402 - DNA, 24 bp, Artificial Sequence
  Synthetic
cgttgtctatattgaagctgccaa

SEQ ID NO: 37403 - DNA, 20 bp, Artificial Sequence
  Synthetic
ggattgtccacacagcacca

SEQ ID NO: 37404 - DNA, 25 bp, Artificial Sequence
  Synthetic
tcttcctaataaagagccacaatgg

SEQ ID NO: 37405 - DNA, 22 bp, Artificial Sequence
  Synthetic
tctgcgaaaaaacctgaagacg

SEQ ID NO: 37406 - DNA, 23 bp, Artificial Sequence
  Synthetic
cgcttagcttaatgacacactca

SEQ ID NO: 37407 - DNA, 22 bp, Artificial Sequence
  Synthetic
aaggcatcgctgggtagctatg

SEQ ID NO: 37408 - DNA, 21 bp, Artificial Sequence
  Synthetic
agggccatcgctcaacggata

SEQ ID NO: 37409 - DNA, 20 bp, Artificial Sequence
  Synthetic
accgaagctgtggatgacac

SEQ ID NO: 37410 - DNA, 21 bp, Artificial Sequence
  Synthetic
aatgggtgagagcgtgccttt

SEQ ID NO: 37411 - DNA, 20 bp, Artificial Sequence
  Synthetic
tagctcagctgggagagcgc

SEQ ID NO: 37412 - DNA, 20 bp, Artificial Sequence
  Synthetic
tgttcttcaaggtgaacgcc

SEQ ID NO: 37413 - DNA, 20 bp, Artificial Sequence
  Synthetic
tcgacgttcttgcaacagca

SEQ ID NO: 37414 - DNA, 23 bp, Artificial Sequence
  Synthetic
gtgaaattatcgtgggtgatgct

SEQ ID NO: 37415 - DNA, 25 bp, Artificial Sequence
  Synthetic
gttttcgtttttgtccgtaatgaca

SEQ ID NO: 37416 - DNA, 22 bp, Artificial Sequence
  Synthetic
gcaatcttaccatcgcttgaca

SEQ ID NO: 37417 - DNA, 23 bp, Artificial Sequence
  Synthetic
tgacacgtgacttgatagcattt

SEQ ID NO: 37418 - DNA, 21 bp, Artificial Sequence
  Synthetic
gttggaaaaagcgcacacttc

SEQ ID NO: 37419 - DNA, 24 bp, Artificial Sequence
  Synthetic
agcaacttgattggcaatctcata

SEQ ID NO: 37420 - DNA, 24 bp, Artificial Sequence
  Synthetic
ctcgtatcttctgtctcatcgaca

SEQ ID NO: 37421 - DNA, 21 bp, Artificial Sequence
  Synthetic
tccgtttcaccagccttaact

SEQ ID NO: 37422 - DNA, 24 bp, Artificial Sequence
  Synthetic
gcgcatcaaaacctgttaagagac

SEQ ID NO: 37423 - DNA, 23 bp, Artificial Sequence
  Synthetic
ggcgtattgtttgagaaaagctg

SEQ ID NO: 37424 - DNA, 25 bp, Artificial Sequence
  Synthetic
ggattgtcattgagcctttcttgaa

SEQ ID NO: 37425 - DNA, 20 bp, Artificial Sequence
  Synthetic
gcgttacatggcagatgctg

SEQ ID NO: 37426 - DNA, 24 bp, Artificial Sequence
  Synthetic
gatgttgaaaacaataccgcgatc

SEQ ID NO: 37427 - DNA, 20 bp, Artificial Sequence
  Synthetic
ttggctgcttttaacagggc

SEQ ID NO: 37428 - DNA, 23 bp, Artificial Sequence
  Synthetic
tggaaaggtaacagttgcacttg

SEQ ID NO: 37429 - DNA, 24 bp, Artificial Sequence
  Synthetic
tcagttcttgagtacacagctttc

SEQ ID NO: 37430 - DNA, 20 bp, Artificial Sequence
  Synthetic
gcagtcgatcagtcagggtt

SEQ ID NO: 37431 - DNA, 20 bp, Artificial Sequence
  Synthetic
gatggctcaggcatatgctg

SEQ ID NO: 37432 - DNA, 20 bp, Artificial Sequence
  Synthetic
caaaacgtagtcccgcatca

SEQ ID NO: 37433 - DNA, 21 bp, Artificial Sequence
  Synthetic
gcctgggcctctctagcagta

SEQ ID NO: 37434 - DNA, 22 bp, Artificial Sequence
  Synthetic
cgggcagatgcatcacagcaaa

SEQ ID NO: 37435 - DNA, 21 bp, Artificial Sequence
  Synthetic
tcaaccgcagcacaaaatggc

SEQ ID NO: 37436 - DNA, 22 bp, Artificial Sequence
  Synthetic
gtccaaccctcattggcaacga

SEQ ID NO: 37437 - DNA, 22 bp, Artificial Sequence
  Synthetic
gggctcgtaaacctctggttcg

SEQ ID NO: 37438 - DNA, 22 bp, Artificial Sequence
  Synthetic
gtccgggctcattggtgtttga

SEQ ID NO: 37439 - DNA, 20 bp, Artificial Sequence
  Synthetic
gcagctggatcccttcgctg

SEQ ID NO: 37440 - DNA, 19 bp, Artificial Sequence
  Synthetic
cgcagtcttcacgccggac

SEQ ID NO: 37441 - DNA, 22 bp, Artificial Sequence
  Synthetic
tccacgtcatcatgccacaact

SEQ ID NO: 37442 - DNA, 21 bp, Artificial Sequence
  Synthetic
cctccacatccactcaggtgc

SEQ ID NO: 37443 - DNA, 20 bp, Artificial Sequence
  Synthetic
ttgtagaagcgggtggcgag

SEQ ID NO: 37444 - DNA, 22 bp, Artificial Sequence
  Synthetic
gctggttgagacacggttccat

SEQ ID NO: 37445 - DNA, 22 bp, Artificial Sequence
  Synthetic
gtggattggggccagaatgaca

SEQ ID NO: 37446 - DNA, 21 bp, Artificial Sequence
  Synthetic
caacatcaccagaccgccagt

SEQ ID NO: 37447 - DNA, 20 bp, Artificial Sequence
  Synthetic
tatgtgtagccggccttggt

SEQ ID NO: 37448 - DNA, 24 bp, Artificial Sequence
  Synthetic
ctaggactgccataacaaatgaca

SEQ ID NO: 37449 - DNA, 20 bp, Artificial Sequence
  Synthetic
ctgaaaaccttgtgcagcgg

SEQ ID NO: 37450 - DNA, 21 bp, Artificial Sequence
  Synthetic
aggtgcacaatcaacaagacg

SEQ ID NO: 37451 - DNA, 23 bp, Artificial Sequence
  Synthetic
gcgaatgtagcatcacgtctaac

SEQ ID NO: 37452 - DNA, 25 bp, Artificial Sequence
  Synthetic
tgtaagaacttcatgtagaccttcc

SEQ ID NO: 37453 - DNA, 24 bp, Artificial Sequence
  Synthetic
ggcataatccaaaacaaacaacca

SEQ ID NO: 37454 - DNA, 25 bp, Artificial Sequence
  Synthetic
tcatttatcgatggtacaacacaca

SEQ ID NO: 37455 - DNA, 24 bp, Artificial Sequence
  Synthetic
ccttcaaaagagtcaacaccatca

SEQ ID NO: 37456 - DNA, 24 bp, Artificial Sequence
  Synthetic
acaaacacctttatgtgagtcacg

SEQ ID NO: 37457 - DNA, 25 bp, Artificial Sequence
  Synthetic
gcataacaagcacaacgataatcag

SEQ ID NO: 37458 - DNA, 21 bp, Artificial Sequence
  Synthetic
atcagaaccaacatgagcacc

SEQ ID NO: 37459 - DNA, 23 bp, Artificial Sequence
  Synthetic
aattcagcagcactcaccttaaa

SEQ ID NO: 37460 - DNA, 25 bp, Artificial Sequence
  Synthetic
gatccattagcaatagcatcctcat

SEQ ID NO: 37461 - DNA, 22 bp, Artificial Sequence
  Synthetic
accagcttgtagacgaattgtg

SEQ ID NO: 37462 - DNA, 25 bp, Artificial Sequence
  Synthetic
acctaataggatccaaacaaccaat

SEQ ID NO: 37463 - DNA, 21 bp, Artificial Sequence
  Synthetic
catggattgctcgtgttccat

SEQ ID NO: 37464 - DNA, 23 bp, Artificial Sequence
  Synthetic
ttgccaagagatgcataaactct

SEQ ID NO: 37465 - DNA, 23 bp, Artificial Sequence
  Synthetic
attcagctgtgtcatagtaggga

SEQ ID NO: 37466 - DNA, 20 bp, Artificial Sequence
  Synthetic
tagagcccaacaccatggct

SEQ ID NO: 37467 - DNA, 22 bp, Artificial Sequence
  Synthetic
aacaaaactcatgtggtccctt

SEQ ID NO: 37468 - DNA, 20 bp, Artificial Sequence
  Synthetic
tggtgcacgtaaaggttgga

SEQ ID NO: 37469 - DNA, 21 bp, Artificial Sequence
  Synthetic
acatccatacccaaccaacca

SEQ ID NO: 37470 - DNA, 23 bp, Artificial Sequence
  Synthetic
aggttgcttgtcataacagtacc

SEQ ID NO: 37471 - DNA, 25 bp, Artificial Sequence
  Synthetic
tgtaaaaaccaagttgtcaacatcg

SEQ ID NO: 37472 - DNA, 20 bp, Artificial Sequence
  Synthetic
taaggttgagaggacgggcc

SEQ ID NO: 37473 - DNA, 25 bp, Artificial Sequence
  Synthetic
cagaataaaaaccatcctgcaatcc

SEQ ID NO: 37474 - DNA, 20 bp, Artificial Sequence
  Synthetic
cgtcctgctatacggcttga

SEQ ID NO: 37475 - DNA, 24 bp, Artificial Sequence
  Synthetic
caacagaaataatgagccaaaccc

SEQ ID NO: 37476 - DNA, 25 bp, Artificial Sequence
  Synthetic
gacatttagtacttcagctggaaca

SEQ ID NO: 37477 - DNA, 24 bp, Artificial Sequence
  Synthetic
ccgtaaacctggagagagatgatt

SEQ ID NO: 37478 - DNA, 21 bp, Artificial Sequence
  Synthetic
caccttccttagcaacccaaa

SEQ ID NO: 37479 - DNA, 23 bp, Artificial Sequence
  Synthetic
ccaaagtaacagcagcaacaaga

SEQ ID NO: 37480 - DNA, 22 bp, Artificial Sequence
  Synthetic
cgcagcctgattaggaatcaat

SEQ ID NO: 37481 - DNA, 20 bp, Artificial Sequence
  Synthetic
ttcctcacaatctgtcgcct

SEQ ID NO: 37482 - DNA, 21 bp, Artificial Sequence
  Synthetic
cgcgtcaggtctgtaaaactg

SEQ ID NO: 37483 - DNA, 21 bp, Artificial Sequence
  Synthetic
aaataatgcagcagccacact

SEQ ID NO: 37484 - DNA, 20 bp, Artificial Sequence
  Synthetic
ttcttgaaggtgccagctgg

SEQ ID NO: 37485 - DNA, 21 bp, Artificial Sequence
  Synthetic
agggttgggtagtcggagtgt

SEQ ID NO: 37486 - DNA, 21 bp, Artificial Sequence
  Synthetic
attttgaatgtcaggtgggca

SEQ ID NO: 37487 - DNA, 20 bp, Artificial Sequence
  Synthetic
cagcagggcctgtaggatct

SEQ ID NO: 37488 - DNA, 22 bp, Artificial Sequence
  Synthetic
tgtcacctgaaccattgctaac

SEQ ID NO: 37489 - DNA, 23 bp, Artificial Sequence
  Synthetic
cagacttgtcttgctgtaaagca

SEQ ID NO: 37490 - DNA, 23 bp, Artificial Sequence
  Synthetic
agatgaaaccatagagccacttg

SEQ ID NO: 37491 - DNA, 21 bp, Artificial Sequence
  Synthetic
tgctgcacaagtgaatgtcac

SEQ ID NO: 37492 - DNA, 25 bp, Artificial Sequence
  Synthetic
tgatattacattaccccccagtaca

SEQ ID NO: 37493 - DNA, 25 bp, Artificial Sequence
  Synthetic
ccactatgaaattcaacaagaggga

SEQ ID NO: 37494 - DNA, 23 bp, Artificial Sequence
  Synthetic
agcaggattttccacatcatcaa

SEQ ID NO: 37495 - DNA, 25 bp, Artificial Sequence
  Synthetic
atcgcctaaaatccaaatttccaaa

SEQ ID NO: 37496 - DNA, 21 bp, Artificial Sequence
  Synthetic
tcaccaacactctcaaggaca

SEQ ID NO: 37497 - DNA, 22 bp, Artificial Sequence
  Synthetic
tcgaattggctttgaatgtcct

SEQ ID NO: 37498 - DNA, 20 bp, Artificial Sequence
  Synthetic
ggcggtgaggtatcaagtcc

SEQ ID NO: 37499 - DNA, 22 bp, Artificial Sequence
  Synthetic
cttcctcaatgtctgccaaaga

SEQ ID NO: 37500 - DNA, 21 bp, Artificial Sequence
  Synthetic
acaacccttgaacagcaaact

SEQ ID NO: 37501 - DNA, 25 bp, Artificial Sequence
  Synthetic
tgtggatctttaaagtggtaagcac

SEQ ID NO: 37502 - DNA, 24 bp, Artificial Sequence
  Synthetic
cagatttccaatcttcctgatcca

SEQ ID NO: 37503 - DNA, 24 bp, Artificial Sequence
  Synthetic
acctgaatgatatttggtgggaaa

SEQ ID NO: 37504 - DNA, 21 bp, Artificial Sequence
  Synthetic
cttcccaatggcagtgtactc

SEQ ID NO: 37505 - DNA, 25 bp, Artificial Sequence
  Synthetic
tctgatctaggatcatccactgatg

SEQ ID NO: 37506 - DNA, 25 bp, Artificial Sequence
  Synthetic
gccagataatttagagttcgatggt

SEQ ID NO: 37507 - DNA, 20 bp, Artificial Sequence
  Synthetic
gatgaaaccaaggccccacc

SEQ ID NO: 37508 - DNA, 22 bp, Artificial Sequence
  Synthetic
agggcatagctgcaggaaaatt

SEQ ID NO: 37509 - DNA, 25 bp, Artificial Sequence
  Synthetic
aaatctcttttggtcaacttctcct

SEQ ID NO: 37510 - DNA, 25 bp, Artificial Sequence
  Synthetic
gaaaataactaatagctggacccca

SEQ ID NO: 37511 - DNA, 20 bp, Artificial Sequence
  Synthetic
ccgggaagtttttgagcgaa

SEQ ID NO: 37512 - DNA, 21 bp, Artificial Sequence
  Synthetic
ggcatagtcacgttcaatgct

SEQ ID NO: 37513 - DNA, 24 bp, Artificial Sequence
  Synthetic
gcctctagtttgtttctctggtac

SEQ ID NO: 37514 - DNA, 24 bp, Artificial Sequence
  Synthetic
tgtcctcaacatatttctcgaggt

SEQ ID NO: 37515 - DNA, 21 bp, Artificial Sequence
  Synthetic
aacacctttgatctggaaccg

SEQ ID NO: 37516 - DNA, 20 bp, Artificial Sequence
  Synthetic
atgtcctagaaacgcaggcg

SEQ ID NO: 37517 - DNA, 20 bp, Artificial Sequence
  Synthetic
atctgccatttctgcaagca

SEQ ID NO: 37518 - DNA, 20 bp, Artificial Sequence
  Synthetic
ccataaaccccaccccaaag

SEQ ID NO: 37519 - DNA, 20 bp, Artificial Sequence
  Synthetic
gatggttgctcgtttcccaa

SEQ ID NO: 37520 - DNA, 24 bp, Artificial Sequence
  Synthetic
tctcttctggcataaaagaagcaa

SEQ ID NO: 37521 - DNA, 23 bp, Artificial Sequence
  Synthetic
gcaatctgcatgaggaagcatac

SEQ ID NO: 37522 - DNA, 21 bp, Artificial Sequence
  Synthetic
tccatcgtgacaacttgagct

SEQ ID NO: 37523 - DNA, 21 bp, Artificial Sequence
  Synthetic
tgctgagcacttcctgacaat

SEQ ID NO: 37524 - DNA, 19 bp, Artificial Sequence
  Synthetic
cgacacgcgcgtggaacag

SEQ ID NO: 37525 - DNA, 19 bp, Artificial Sequence
  Synthetic
agagctccgagcgcgatcc

SEQ ID NO: 37526 - DNA, 19 bp, Artificial Sequence
  Synthetic
ggaagccatccgccctctc

SEQ ID NO: 37527 - DNA, 20 bp, Artificial Sequence
  Synthetic
cgaagtcccgcctcatgggc

SEQ ID NO: 37528 - DNA, 19 bp, Artificial Sequence
  Synthetic
tcggcagagtcttgccgcc

SEQ ID NO: 37529 - DNA, 21 bp, Artificial Sequence
  Synthetic
gctctgcctcccgtctctctc

SEQ ID NO: 37530 - DNA, 20 bp, Artificial Sequence
  Synthetic
tacccgggaggccggagaag

SEQ ID NO: 37531 - DNA, 19 bp, Artificial Sequence
  Synthetic
tggaaacacggcctgcgtc

SEQ ID NO: 37532 - DNA, 21 bp, Artificial Sequence
  Synthetic
tctctcgcttaccgttcatca

SEQ ID NO: 37533 - DNA, 22 bp, Artificial Sequence
  Synthetic
ctacttacttttttgcgcgtgg

SEQ ID NO: 37534 - DNA, 20 bp, Artificial Sequence
  Synthetic
gggtgcagtggctaagaagg

SEQ ID NO: 37535 - DNA, 20 bp, Artificial Sequence
  Synthetic
gaaatctccggcggggaatt

SEQ ID NO: 37536 - DNA, 20 bp, Artificial Sequence
  Synthetic
cgagagatgccaaactccga

SEQ ID NO: 37537 - DNA, 24 bp, Artificial Sequence
  Synthetic
ccgtcacgctaaatatgaatatgc

SEQ ID NO: 37538 - DNA, 21 bp, Artificial Sequence
  Synthetic
ggccacgagtacattcatgtt

SEQ ID NO: 37539 - DNA, 20 bp, Artificial Sequence
  Synthetic
tacggaacaaggccaaaccg

SEQ ID NO: 37540 - DNA, 23 bp, Artificial Sequence
  Synthetic
cataagcattttttggcgtcact

SEQ ID NO: 37541 - DNA, 21 bp, Artificial Sequence
  Synthetic
atagcctatggagtagcgcaa

SEQ ID NO: 37542 - DNA, 22 bp, Artificial Sequence
  Synthetic
gcccttgtaggatcacgagcca

SEQ ID NO: 37543 - DNA, 21 bp, Artificial Sequence
  Synthetic
gcgcgtctctctgtgcctcat

SEQ ID NO: 37544 - DNA, 20 bp, Artificial Sequence
  Synthetic
gctggtccggcagctctagg

SEQ ID NO: 37545 - DNA, 21 bp, Artificial Sequence
  Synthetic
cggcgttggtacgtttcccac

SEQ ID NO: 37546 - DNA, 20 bp, Artificial Sequence
  Synthetic
tacgcaccccacgcatacac

SEQ ID NO: 37547 - DNA, 21 bp, Artificial Sequence
  Synthetic
gccagataccttggagtctct

SEQ ID NO: 37548 - DNA, 25 bp, Artificial Sequence
  Synthetic
gaacttgccataggtttttcaaact

SEQ ID NO: 37549 - DNA, 22 bp, Artificial Sequence
  Synthetic
tgtaaatgtgaggccctatggg

SEQ ID NO: 37550 - DNA, 23 bp, Artificial Sequence
  Synthetic
tggttttctgtaattcgttgcct

SEQ ID NO: 37551 - DNA, 23 bp, Artificial Sequence
  Synthetic
actttcctgagtccactctagga

SEQ ID NO: 37552 - DNA, 22 bp, Artificial Sequence
  Synthetic
tgtctcccttgaaacaagcttt

SEQ ID NO: 37553 - DNA, 21 bp, Artificial Sequence
  Synthetic
gtagatggatggtgaatgccc

SEQ ID NO: 37554 - DNA, 23 bp, Artificial Sequence
  Synthetic
gcatttctttccattgcgaatgc

SEQ ID NO: 37555 - DNA, 20 bp, Artificial Sequence
  Synthetic
tcaatgaaaccggcaatggc

SEQ ID NO: 37556 - DNA, 20 bp, Artificial Sequence
  Synthetic
tccgatccgtcaggaccagc

SEQ ID NO: 37557 - DNA, 20 bp, Artificial Sequence
  Synthetic
acggggcctccctccgttag

SEQ ID NO: 37558 - DNA, 21 bp, Artificial Sequence
  Synthetic
ccgcttggttttccgtgtcac

SEQ ID NO: 37559 - DNA, 22 bp, Artificial Sequence
  Synthetic
cctcgccttgcaaactccgtta

SEQ ID NO: 37560 - DNA, 19 bp, Artificial Sequence
  Synthetic
acggcgtctgcgtctccct

SEQ ID NO: 37561 - DNA, 22 bp, Artificial Sequence
  Synthetic
cccggtatggatctcacggtca

SEQ ID NO: 37562 - DNA, 25 bp, Artificial Sequence
  Synthetic
tcactgtcataaaaaagacacacca

SEQ ID NO: 37563 - DNA, 22 bp, Artificial Sequence
  Synthetic
gatatgtttctgcctggggaaa

SEQ ID NO: 37564 - DNA, 21 bp, Artificial Sequence
  Synthetic
acgagaaggtttgtctcaggg

SEQ ID NO: 37565 - DNA, 23 bp, Artificial Sequence
  Synthetic
ggctaagaaggctgtcagttctt

SEQ ID NO: 37566 - DNA, 23 bp, Artificial Sequence
  Synthetic
ccaaggtacgcctaaggttaaat

SEQ ID NO: 37567 - DNA, 21 bp, Artificial Sequence
  Synthetic
cgacaacgtttcctgtaagct

SEQ ID NO: 37568 - DNA, 20 bp, Artificial Sequence
  Synthetic
cttttctccgccttcccgat

SEQ ID NO: 37569 - DNA, 20 bp, Artificial Sequence
  Synthetic
taacgccacagcctgttctt

SEQ ID NO: 37570 - DNA, 20 bp, Artificial Sequence
  Synthetic
cactgaagcaaagcaccctg

SEQ ID NO: 37571 - DNA, 22 bp, Artificial Sequence
  Synthetic
tgcgaaaaagagttgggattcc

SEQ ID NO: 37572 - DNA, 20 bp, Artificial Sequence
  Synthetic
ttatcgcgagcgctgaacat

SEQ ID NO: 37573 - DNA, 18 bp, Artificial Sequence
  Synthetic
atctgccgcgtggaagcc

SEQ ID NO: 37574 - DNA, 22 bp, Artificial Sequence
  Synthetic
agctctgttctctcccactcca

SEQ ID NO: 37575 - DNA, 19 bp, Artificial Sequence
  Synthetic
acggcgcgcgcatagactc

SEQ ID NO: 37576 - DNA, 19 bp, Artificial Sequence
  Synthetic
acgttcgacgccagacggc

SEQ ID NO: 37577 - DNA, 24 bp, Artificial Sequence
  Synthetic
actgctttgtccatgttatttgga

SEQ ID NO: 37578 - DNA, 24 bp, Artificial Sequence
  Synthetic
tccacaatatcaagtgcaagatcc

SEQ ID NO: 37579 - DNA, 21 bp, Artificial Sequence
  Synthetic
accagtctcgtgacatttcct

SEQ ID NO: 37580 - DNA, 22 bp, Artificial Sequence
  Synthetic
gactcgaaccgtgttaccattc

SEQ ID NO: 37581 - DNA, 21 bp, Artificial Sequence
  Synthetic
tgtgagctgtctagttggtct

SEQ ID NO: 37582 - DNA, 20 bp, Artificial Sequence
  Synthetic
tgttgtcacgctgtagctgc

SEQ ID NO: 37583 - DNA, 21 bp, Artificial Sequence
  Synthetic
ttcttctagcacttcaaccgc

SEQ ID NO: 37584 - DNA, 23 bp, Artificial Sequence
  Synthetic
cacaatgcaagcaataccatacc

SEQ ID NO: 37585 - DNA, 25 bp, Artificial Sequence
  Synthetic
ccatctgagttaaactaaactgtgc

SEQ ID NO: 37586 - DNA, 20 bp, Artificial Sequence
  Synthetic
tctccatcctcgtcctctgt

SEQ ID NO: 37587 - DNA, 20 bp, Artificial Sequence
  Synthetic
cactacatccgtccactgca

SEQ ID NO: 37588 - DNA, 21 bp, Artificial Sequence
  Synthetic
gcaggaacagaaggaaacact

SEQ ID NO: 37589 - DNA, 20 bp, Artificial Sequence
  Synthetic
ggcaccgatacatcgccatt

SEQ ID NO: 37590 - DNA, 24 bp, Artificial Sequence
  Synthetic
ggaggagtacagcctacaatacat

SEQ ID NO: 37591 - DNA, 20 bp, Artificial Sequence
  Synthetic
tacgtttgggggtgactgac

SEQ ID NO: 37592 - DNA, 24 bp, Artificial Sequence
  Synthetic
caccctaatagtacatattgggcg

SEQ ID NO: 37593 - DNA, 20 bp, Artificial Sequence
  Synthetic
atccatggatgtcctgggtg

SEQ ID NO: 37594 - DNA, 22 bp, Artificial Sequence
  Synthetic
gtggaagtgttggtacgttacc

SEQ ID NO: 37595 - DNA, 21 bp, Artificial Sequence
  Synthetic
tgcatgtgtgttttggcatgt

SEQ ID NO: 37596 - DNA, 22 bp, Artificial Sequence
  Synthetic
ctatgctcccatctctgctaca

SEQ ID NO: 37597 - DNA, 25 bp, Artificial Sequence
  Synthetic
cctcaaagctatgttgtaactgtgt

SEQ ID NO: 37598 - DNA, 21 bp, Artificial Sequence
  Synthetic
accatcatccaccttgctaca

SEQ ID NO: 37599 - DNA, 23 bp, Artificial Sequence
  Synthetic
ccctcatagcttactgcagaaga

SEQ ID NO: 37600 - DNA, 25 bp, Artificial Sequence
  Synthetic
ggtggatgatacagtaacaaacagt

SEQ ID NO: 37601 - DNA, 23 bp, Artificial Sequence
  Synthetic
cacaatggttgcaagtttacagg

SEQ ID NO: 37602 - DNA, 23 bp, Artificial Sequence
  Synthetic
tggtgaaaaggttaacgttgtgt

SEQ ID NO: 37603 - DNA, 24 bp, Artificial Sequence
  Synthetic
gcgacaaacctatattccagtctt

SEQ ID NO: 37604 - DNA, 22 bp, Artificial Sequence
  Synthetic
ggaatgtccagcctcatctgca

SEQ ID NO: 37605 - DNA, 20 bp, Artificial Sequence
  Synthetic
ttgtgccatgcctgtttggt

SEQ ID NO: 37606 - DNA, 22 bp, Artificial Sequence
  Synthetic
gtccctagcattgcatcctttc

SEQ ID NO: 37607 - DNA, 25 bp, Artificial Sequence
  Synthetic
cctttattcttgagatgtggacaca

SEQ ID NO: 37608 - DNA, 21 bp, Artificial Sequence
  Synthetic
ccttcaccacctgctgtgatt

SEQ ID NO: 37609 - DNA, 23 bp, Artificial Sequence
  Synthetic
gtgtcaaggttgctatgatcgtt

SEQ ID NO: 37610 - DNA, 21 bp, Artificial Sequence
  Synthetic
aaaagaccttcaagcgctgaa

SEQ ID NO: 37611 - DNA, 24 bp, Artificial Sequence
  Synthetic
caattcatccacacattctgcttc

SEQ ID NO: 37612 - DNA, 23 bp, Artificial Sequence
  Synthetic
accgtaacccaattatcagagca

SEQ ID NO: 37613 - DNA, 23 bp, Artificial Sequence
  Synthetic
acaatttaaaaaagcagccgcat

SEQ ID NO: 37614 - DNA, 25 bp, Artificial Sequence
  Synthetic
gttttgcatcaacactcatcatgtt

SEQ ID NO: 37615 - DNA, 25 bp, Artificial Sequence
  Synthetic
catcagcattctaattgcttgcata

SEQ ID NO: 37616 - DNA, 22 bp, Artificial Sequence
  Synthetic
tgtcgtctgttttccggttggt

SEQ ID NO: 37617 - DNA, 20 bp, Artificial Sequence
  Synthetic
atcagtcagagggtcgatgg

SEQ ID NO: 37618 - DNA, 24 bp, Artificial Sequence
  Synthetic
aaataaggatgtcctgtgcatgaa

SEQ ID NO: 37619 - DNA, 25 bp, Artificial Sequence
  Synthetic
atagtcagtaccttccattggaatg

SEQ ID NO: 37620 - DNA, 23 bp, Artificial Sequence
  Synthetic
ttttctgcagtaggacatttcgt

SEQ ID NO: 37621 - DNA, 21 bp, Artificial Sequence
  Synthetic
gcctcatctgccaggcctacc

SEQ ID NO: 37622 - DNA, 20 bp, Artificial Sequence
  Synthetic
gaaacacggacacccaaagt

SEQ ID NO: 37623 - DNA, 23 bp, Artificial Sequence
  Synthetic
aagctggatttgtaagtgcttct

SEQ ID NO: 37624 - DNA, 25 bp, Artificial Sequence
  Synthetic
ccatatctttaaggcaatcaggcaa

SEQ ID NO: 37625 - DNA, 24 bp, Artificial Sequence
  Synthetic
cccctgttttacagactgtctagc

SEQ ID NO: 37626 - DNA, 23 bp, Artificial Sequence
  Synthetic
gtccatgggtatcacaactatgg

SEQ ID NO: 37627 - DNA, 20 bp, Artificial Sequence
  Synthetic
tgcaaaaccattcgccacct

SEQ ID NO: 37628 - DNA, 21 bp, Artificial Sequence
  Synthetic
agctgaacccaatccagtgaa

SEQ ID NO: 37629 - DNA, 23 bp, Artificial Sequence
  Synthetic
tccagtagtgtcatctggtttct

SEQ ID NO: 37630 - DNA, 20 bp, Artificial Sequence
  Synthetic
gggtctggaggaagggagta

SEQ ID NO: 37631 - DNA, 20 bp, Artificial Sequence
  Synthetic
tagaagcgcctgtcaatggc

SEQ ID NO: 37632 - DNA, 20 bp, Artificial Sequence
  Synthetic
taggcatgcctgtgtatggt

SEQ ID NO: 37633 - DNA, 20 bp, Artificial Sequence
  Synthetic
gcactgcaccacattgacct

SEQ ID NO: 37634 - DNA, 20 bp, Artificial Sequence
  Synthetic
tccttggggtgtaaagctgc

SEQ ID NO: 37635 - DNA, 20 bp, Artificial Sequence
  Synthetic
tctggattacaccccacagc

SEQ ID NO: 37636 - DNA, 25 bp, Artificial Sequence
  Synthetic
tgattatggccatatgatccacagt

SEQ ID NO: 37637 - DNA, 22 bp, Artificial Sequence
  Synthetic
ccaagttacagctaggggagac

SEQ ID NO: 37638 - DNA, 25 bp, Artificial Sequence
  Synthetic
ctctgatgtcaatattctagctccc

SEQ ID NO: 37639 - DNA, 20 bp, Artificial Sequence
  Synthetic
ggttgcctgtaagcacttcc

SEQ ID NO: 37640 - DNA, 24 bp, Artificial Sequence
  Synthetic
gttcaatctttggtttgctctgtt

SEQ ID NO: 37641 - DNA, 20 bp, Artificial Sequence
  Synthetic
gttcccctgctgatctcgga

SEQ ID NO: 37642 - DNA, 23 bp, Artificial Sequence
  Synthetic
ttggcgaaaaaaacaccgtaatc

SEQ ID NO: 37643 - DNA, 21 bp, Artificial Sequence
  Synthetic
ggatttacagccttgccctgg

SEQ ID NO: 37644 - DNA, 20 bp, Artificial Sequence
  Synthetic
tgtaaacagccgctcgcctc

SEQ ID NO: 37645 - DNA, 21 bp, Artificial Sequence
  Synthetic
tgaactatcctccacaagccg

SEQ ID NO: 37646 - DNA, 20 bp, Artificial Sequence
  Synthetic
ctccacaggtgcatggctgc

SEQ ID NO: 37647 - DNA, 22 bp, Artificial Sequence
  Synthetic
gcatcgttctccaacagcagct

SEQ ID NO: 37648 - DNA, 22 bp, Artificial Sequence
  Synthetic
gtccaccgttgatcccatcaca

SEQ ID NO: 37649 - DNA, 21 bp, Artificial Sequence
  Synthetic
gggatctgggcggtaacatcg

SEQ ID NO: 37650 - DNA, 20 bp, Artificial Sequence
  Synthetic
cgtagagcacgtcaccgagc

SEQ ID NO: 37651 - DNA, 21 bp, Artificial Sequence
  Synthetic
tgcccgctcttgagagggaat

SEQ ID NO: 37652 - DNA, 21 bp, Artificial Sequence
  Synthetic
gagcgcaccactgtttttccc

SEQ ID NO: 37653 - DNA, 22 bp, Artificial Sequence
  Synthetic
tcccacctacatcggcatcctc

SEQ ID NO: 37654 - DNA, 20 bp, Artificial Sequence
  Synthetic
cgtggagaagggctgctgtc

SEQ ID NO: 37655 - DNA, 22 bp, Artificial Sequence
  Synthetic
ggcacaacatcaacggctttga

SEQ ID NO: 37656 - DNA, 21 bp, Artificial Sequence
  Synthetic
gcgatcttgccgtgcgcttac

SEQ ID NO: 37657 - DNA, 22 bp, Artificial Sequence
  Synthetic
acgcgctgtgtatcttgtggat

SEQ ID NO: 37658 - DNA, 19 bp, Artificial Sequence
  Synthetic
agaggcggcagatccagga

SEQ ID NO: 37659 - DNA, 20 bp, Artificial Sequence
  Synthetic
ccttgcgcaggtggtcatgc

SEQ ID NO: 37660 - DNA, 20 bp, Artificial Sequence
  Synthetic
cgtcccctacgccgcaattg

SEQ ID NO: 37661 - DNA, 20 bp, Artificial Sequence
  Synthetic
ccgcatggaagactccgcct

SEQ ID NO: 37662 - DNA, 21 bp, Artificial Sequence
  Synthetic
ggcctaacccgtttgcgttcc

SEQ ID NO: 37663 - DNA, 18 bp, Artificial Sequence
  Synthetic
aaccgggttctgccgcga

SEQ ID NO: 37664 - DNA, 22 bp, Artificial Sequence
  Synthetic
cgcgtaaaacttgcccaggctc

SEQ ID NO: 37665 - DNA, 20 bp, Artificial Sequence
  Synthetic
tcacggaggcgtcagtaccc

SEQ ID NO: 37666 - DNA, 19 bp, Artificial Sequence
  Synthetic
tgtacaccagcccggcctc

SEQ ID NO: 37667 - DNA, 19 bp, Artificial Sequence
  Synthetic
gttcaccgtctgcaggccc

SEQ ID NO: 37668 - DNA, 21 bp, Artificial Sequence
  Synthetic
agcaggaagtttagggtggcc

SEQ ID NO: 37669 - DNA, 20 bp, Artificial Sequence
  Synthetic
ggaggagaggacaccaccgc

SEQ ID NO: 37670 - DNA, 22 bp, Artificial Sequence
  Synthetic
tccaatatcgctctccagcacg

SEQ ID NO: 37671 - DNA, 20 bp, Artificial Sequence
  Synthetic
cactgccttctgtagcgtct

SEQ ID NO: 37672 - DNA, 20 bp, Artificial Sequence
  Synthetic
ggggtcttgcatgaggtccg

SEQ ID NO: 37673 - DNA, 19 bp, Artificial Sequence
  Synthetic
tagggacaggtgcggcgac

SEQ ID NO: 37674 - DNA, 19 bp, Artificial Sequence
  Synthetic
tgctagagatggccgcggc

SEQ ID NO: 37675 - DNA, 19 bp, Artificial Sequence
  Synthetic
ccaatttacgcgccgccgc

SEQ ID NO: 37676 - DNA, 22 bp, Artificial Sequence
  Synthetic
taaaggcggtggaggctgggag

SEQ ID NO: 37677 - DNA, 18 bp, Artificial Sequence
  Synthetic
cgcaggcggcaagtgaga

SEQ ID NO: 37678 - DNA, 19 bp, Artificial Sequence
  Synthetic
cgggttcaggcggctgttt

SEQ ID NO: 37679 - DNA, 19 bp, Artificial Sequence
  Synthetic
agtacgtgtcggtggcgcg

SEQ ID NO: 37680 - DNA, 24 bp, Artificial Sequence
  Synthetic
accgtatgtgtgagtttttgtagt

SEQ ID NO: 37681 - DNA, 21 bp, Artificial Sequence
  Synthetic
ggtaagacagctccgtgtttc

SEQ ID NO: 37682 - DNA, 22 bp, Artificial Sequence
  Synthetic
cgttggccggcgtgtacttaaa

SEQ ID NO: 37683 - DNA, 20 bp, Artificial Sequence
  Synthetic
taagcagccggtcattgccg

SEQ ID NO: 37684 - DNA, 21 bp, Artificial Sequence
  Synthetic
ccggtgaagcccgagttgttg

SEQ ID NO: 37685 - DNA, 20 bp, Artificial Sequence
  Synthetic
taatgcccgtgcactgcgag

SEQ ID NO: 37686 - DNA, 22 bp, Artificial Sequence
  Synthetic
aggaccatgtggtggagatgga

SEQ ID NO: 37687 - DNA, 21 bp, Artificial Sequence
  Synthetic
cctgcgcgatgcttacaagct

SEQ ID NO: 37688 - DNA, 20 bp, Artificial Sequence
  Synthetic
agggtctcggggtcgctaaa

SEQ ID NO: 37689 - DNA, 22 bp, Artificial Sequence
  Synthetic
cctcgatcacgtccgagtggta

SEQ ID NO: 37690 - DNA, 20 bp, Artificial Sequence
  Synthetic
ccgtaagatccgcgtgctgc

SEQ ID NO: 37691 - DNA, 20 bp, Artificial Sequence
  Synthetic
catgcggacttcggccagtg

SEQ ID NO: 37692 - DNA, 23 bp, Artificial Sequence
  Synthetic
ctcaccacaaagagtacagcaaa

SEQ ID NO: 37693 - DNA, 23 bp, Artificial Sequence
  Synthetic
ccatcacaaaactgcattccctt

SEQ ID NO: 37694 - DNA, 23 bp, Artificial Sequence
  Synthetic
ccttactttgtttagccccgttt

SEQ ID NO: 37695 - DNA, 20 bp, Artificial Sequence
  Synthetic
gcaggtgagcagggcaaaga

SEQ ID NO: 37696 - DNA, 21 bp, Artificial Sequence
  Synthetic
gcaggagcagaccatcactat

SEQ ID NO: 37697 - DNA, 20 bp, Artificial Sequence
  Synthetic
gttgacgcccaccatgcagg

SEQ ID NO: 37698 - DNA, 21 bp, Artificial Sequence
  Synthetic
tggaatccattggaggagaca

SEQ ID NO: 37699 - DNA, 20 bp, Artificial Sequence
  Synthetic
tgataagccaccgccttctg

SEQ ID NO: 37700 - DNA, 25 bp, Artificial Sequence
  Synthetic
tgcatattttttagagccagtggta

SEQ ID NO: 37701 - DNA, 25 bp, Artificial Sequence
  Synthetic
gctgcacttactgtgaaaacatgag

SEQ ID NO: 37702 - DNA, 22 bp, Artificial Sequence
  Synthetic
ggcctacagagtcctggctgat

SEQ ID NO: 37703 - DNA, 24 bp, Artificial Sequence
  Synthetic
aaaatgagaattacctggggatgg

SEQ ID NO: 37704 - DNA, 22 bp, Artificial Sequence
  Synthetic
ggcattaccggagacacaaaga

SEQ ID NO: 37705 - DNA, 21 bp, Artificial Sequence
  Synthetic
aagacaggagcttactgtgct

SEQ ID NO: 37706 - DNA, 25 bp, Artificial Sequence
  Synthetic
tcagctaggtcagtaagtagttagt

SEQ ID NO: 37707 - DNA, 22 bp, Artificial Sequence
  Synthetic
cctctagatccgcattctctct

SEQ ID NO: 37708 - DNA, 20 bp, Artificial Sequence
  Synthetic
ttccaggggcaaagtctcca

SEQ ID NO: 37709 - DNA, 24 bp, Artificial Sequence
  Synthetic
cgtttattgtttgcctggcttagt

SEQ ID NO: 37710 - DNA, 21 bp, Artificial Sequence
  Synthetic
gctgctagtttccatgcttct

SEQ ID NO: 37711 - DNA, 21 bp, Artificial Sequence
  Synthetic
gtggaacttttgggctggttt

SEQ ID NO: 37712 - DNA, 21 bp, Artificial Sequence
  Synthetic
ttcgtgtgagaatctggggaa

SEQ ID NO: 37713 - DNA, 24 bp, Artificial Sequence
  Synthetic
tctccagatctaactgttcttcgt

SEQ ID NO: 37714 - DNA, 24 bp, Artificial Sequence
  Synthetic
agagtttttgggaccttagcaatt

SEQ ID NO: 37715 - DNA, 21 bp, Artificial Sequence
  Synthetic
tttccatgcaagttggctcat

SEQ ID NO: 37716 - DNA, 24 bp, Artificial Sequence
  Synthetic
ttgatgttggtagaggactttgtc

SEQ ID NO: 37717 - DNA, 25 bp, Artificial Sequence
  Synthetic
tgattcactggtattctgtttgtcc

SEQ ID NO: 37718 - DNA, 25 bp, Artificial Sequence
  Synthetic
tcttacttgttgtacacctgattgg

SEQ ID NO: 37719 - DNA, 24 bp, Artificial Sequence
  Synthetic
cacttcctacactcggatacattg

SEQ ID NO: 37720 - DNA, 22 bp, Artificial Sequence
  Synthetic
agtgtggttgtagcaacattga

SEQ ID NO: 37721 - DNA, 24 bp, Artificial Sequence
  Synthetic
tgtttaaggattttgcctagcgat

SEQ ID NO: 37722 - DNA, 25 bp, Artificial Sequence
  Synthetic
ccttttgctagtagtgtttctgcta

SEQ ID NO: 37723 - DNA, 21 bp, Artificial Sequence
  Synthetic
ccattgctgacactctgacac

SEQ ID NO: 37724 - DNA, 23 bp, Artificial Sequence
  Synthetic
accacattttttgcctcaatcct

SEQ ID NO: 37725 - DNA, 20 bp, Artificial Sequence
  Synthetic
agtgctgcttccatccatga

SEQ ID NO: 37726 - DNA, 23 bp, Artificial Sequence
  Synthetic
ccagtcctctaagacttctggta

SEQ ID NO: 37727 - DNA, 21 bp, Artificial Sequence
  Synthetic
ttgcgctggaactttcaagaa

SEQ ID NO: 37728 - DNA, 23 bp, Artificial Sequence
  Synthetic
tccatcgtttcaagacacgaatt

SEQ ID NO: 37729 - DNA, 25 bp, Artificial Sequence
  Synthetic
tgtgttgttatttccatctcctctt

SEQ ID NO: 37730 - DNA, 21 bp, Artificial Sequence
  Synthetic
gcccagactgttcaagtttct

SEQ ID NO: 37731 - DNA, 23 bp, Artificial Sequence
  Synthetic
ggtgtatttcttttgcccgagat

SEQ ID NO: 37732 - DNA, 22 bp, Artificial Sequence
  Synthetic
ccattagctcccatttcaagca

SEQ ID NO: 37733 - DNA, 20 bp, Artificial Sequence
  Synthetic
gcacggtcccatagatgagt

SEQ ID NO: 37734 - DNA, 22 bp, Artificial Sequence
  Synthetic
ggtccgtaacaggaatggtccc

SEQ ID NO: 37735 - DNA, 21 bp, Artificial Sequence
  Synthetic
tgctactgtttccctgctctt

SEQ ID NO: 37736 - DNA, 21 bp, Artificial Sequence
  Synthetic
gccagcacactttcatctgtt

SEQ ID NO: 37737 - DNA, 21 bp, Artificial Sequence
  Synthetic
cgcttggtccgtaaaatacca

SEQ ID NO: 37738 - DNA, 20 bp, Artificial Sequence
  Synthetic
cggtcggctagtgactccat

SEQ ID NO: 37739 - DNA, 20 bp, Artificial Sequence
  Synthetic
tccagggttcatgcgcatat

SEQ ID NO: 37740 - DNA, 23 bp, Artificial Sequence
  Synthetic
agaaaaacaccaaaaatgcgctt

SEQ ID NO: 37741 - DNA, 20 bp, Artificial Sequence
  Synthetic
acgacccccagtaccagagc

SEQ ID NO: 37742 - DNA, 22 bp, Artificial Sequence
  Synthetic
cagcatccgatggaatgggact

SEQ ID NO: 37743 - DNA, 20 bp, Artificial Sequence
  Synthetic
gaatgtggatgggtggcagg

SEQ ID NO: 37744 - DNA, 24 bp, Artificial Sequence
  Synthetic
tgcaaactacaatagggatgtcct

SEQ ID NO: 37745 - DNA, 20 bp, Artificial Sequence
  Synthetic
ggtagagggtggtggtacca

SEQ ID NO: 37746 - DNA, 23 bp, Artificial Sequence
  Synthetic
tgttccaaactgtgtgtgttagc

SEQ ID NO: 37747 - DNA, 19 bp, Artificial Sequence
  Synthetic
gccaatggcggctcggaaa

SEQ ID NO: 37748 - DNA, 21 bp, Artificial Sequence
  Synthetic
gcaacgacaaatgagggtgag

SEQ ID NO: 37749 - DNA, 21 bp, Artificial Sequence
  Synthetic
agaaagacgctcctacgccga

SEQ ID NO: 37750 - DNA, 16 bp, Artificial Sequence
  Synthetic
agcaagcggcgcccat

SEQ ID NO: 37751 - DNA, 22 bp, Artificial Sequence
  Synthetic
gcccatcgtacacgagcttcca

SEQ ID NO: 37752 - DNA, 20 bp, Artificial Sequence
  Synthetic
actccaagccagtcgtacgc

SEQ ID NO: 37753 - DNA, 21 bp, Artificial Sequence
  Synthetic
agtgggaaatacctctcctgg

SEQ ID NO: 37754 - DNA, 22 bp, Artificial Sequence
  Synthetic
cgggacgcattcctggatttcg

SEQ ID NO: 37755 - DNA, 22 bp, Artificial Sequence
  Synthetic
tccactctatccacttcgccga

SEQ ID NO: 37756 - DNA, 22 bp, Artificial Sequence
  Synthetic
tctccgctccgaagttagggat

SEQ ID NO: 37757 - DNA, 19 bp, Artificial Sequence
  Synthetic
acggccccttgagcaaccg

SEQ ID NO: 37758 - DNA, 19 bp, Artificial Sequence
  Synthetic
taggcggtcgcgtggtctg

SEQ ID NO: 37759 - DNA, 19 bp, Artificial Sequence
  Synthetic
ctcccccaaagcggccaat

SEQ ID NO: 37760 - DNA, 21 bp, Artificial Sequence
  Synthetic
gaaagtgcatccgccaaccac

SEQ ID NO: 37761 - DNA, 21 bp, Artificial Sequence
  Synthetic
caggtatggggtcctctggga

SEQ ID NO: 37762 - DNA, 19 bp, Artificial Sequence
  Synthetic
tgtcaccagctgcccccca

SEQ ID NO: 37763 - DNA, 19 bp, Artificial Sequence
  Synthetic
acgtcccgtctttccgccg

SEQ ID NO: 37764 - DNA, 21 bp, Artificial Sequence
  Synthetic
ggggatctccagtgcgctttc

SEQ ID NO: 37765 - DNA, 21 bp, Artificial Sequence
  Synthetic
taacgggcagtgcgtggggta

SEQ ID NO: 37766 - DNA, 21 bp, Artificial Sequence
  Synthetic
ggaggtgtctgtggtgggcta

SEQ ID NO: 37767 - DNA, 19 bp, Artificial Sequence
  Synthetic
cgagcgttcaaggggaggg

SEQ ID NO: 37768 - DNA, 19 bp, Artificial Sequence
  Synthetic
tctcgtgcggaaccttggc

SEQ ID NO: 37769 - DNA, 22 bp, Artificial Sequence
  Synthetic
cgtcctctgacaccaccttagc

SEQ ID NO: 37770 - DNA, 22 bp, Artificial Sequence
  Synthetic
gcagcaggatgaacaggagcag

SEQ ID NO: 37771 - DNA, 22 bp, Artificial Sequence
  Synthetic
gtcttcctccccaatccctcca

SEQ ID NO: 37772 - DNA, 18 bp, Artificial Sequence
  Synthetic
actaccgctgcgtggcac

SEQ ID NO: 37773 - DNA, 21 bp, Artificial Sequence
  Synthetic
gcaacgccctggtatacctgg

SEQ ID NO: 37774 - DNA, 21 bp, Artificial Sequence
  Synthetic
cactgtccatctcctcggctg

SEQ ID NO: 37775 - DNA, 19 bp, Artificial Sequence
  Synthetic
agagtgcccgacacggtgg

SEQ ID NO: 37776 - DNA, 20 bp, Artificial Sequence
  Synthetic
ggttcagcggcttgccaagg

SEQ ID NO: 37777 - DNA, 22 bp, Artificial Sequence
  Synthetic
agatgttcctagggcatggatt

SEQ ID NO: 37778 - DNA, 23 bp, Artificial Sequence
  Synthetic
ctaggaacgacacaaactctacc

SEQ ID NO: 37779 - DNA, 22 bp, Artificial Sequence
  Synthetic
gccgactcgtgtcattccacat

SEQ ID NO: 37780 - DNA, 22 bp, Artificial Sequence
  Synthetic
ggtgctagacacagatgcggat

SEQ ID NO: 37781 - DNA, 20 bp, Artificial Sequence
  Synthetic
cgctgttcaacgctggtgta

SEQ ID NO: 37782 - DNA, 25 bp, Artificial Sequence
  Synthetic
aggataagaatcaccaacagacatt

SEQ ID NO: 37783 - DNA, 22 bp, Artificial Sequence
  Synthetic
cacttcgaagccaccagtacca

SEQ ID NO: 37784 - DNA, 20 bp, Artificial Sequence
  Synthetic
aaggcaccgaaccctgtttc

SEQ ID NO: 37785 - DNA, 21 bp, Artificial Sequence
  Synthetic
aagcagttccagggaatttcc

SEQ ID NO: 37786 - DNA, 25 bp, Artificial Sequence
  Synthetic
ctgtgtaaccccaatagaatcttca

SEQ ID NO: 37787 - DNA, 25 bp, Artificial Sequence
  Synthetic
ctgttaaaggctgtaaccaaaagtg

SEQ ID NO: 37788 - DNA, 25 bp, Artificial Sequence
  Synthetic
tgatattcctttctgccttgcataa

SEQ ID NO: 37789 - DNA, 21 bp, Artificial Sequence
  Synthetic
gtgttggagccttccccgatg

SEQ ID NO: 37790 - DNA, 20 bp, Artificial Sequence
  Synthetic
acacctgcttccagttcagg

SEQ ID NO: 37791 - DNA, 22 bp, Artificial Sequence
  Synthetic
gttcaaaggtgagggtgacatc

SEQ ID NO: 37792 - DNA, 23 bp, Artificial Sequence
  Synthetic
cacataatcatctgtgctgagca

SEQ ID NO: 37793 - DNA, 22 bp, Artificial Sequence
  Synthetic
tcctaaaggacctcctctgatg

SEQ ID NO: 37794 - DNA, 23 bp, Artificial Sequence
  Synthetic
gtctgattctcctcattcacctg

SEQ ID NO: 37795 - DNA, 22 bp, Artificial Sequence
  Synthetic
atcttttcaggtgtaggggtct

SEQ ID NO: 37796 - DNA, 25 bp, Artificial Sequence
  Synthetic
tttttccaccaatgttaaaacacgt

SEQ ID NO: 37797 - DNA, 20 bp, Artificial Sequence
  Synthetic
ttctgctatgccactgtcct

SEQ ID NO: 37798 - DNA, 25 bp, Artificial Sequence
  Synthetic
tttagtaacccaatctggtaacgac

SEQ ID NO: 37799 - DNA, 22 bp, Artificial Sequence
  Synthetic
gcggctgattctccttgttccc

SEQ ID NO: 37800 - DNA, 24 bp, Artificial Sequence
  Synthetic
tgtttatcgctgtcaaatgctact

SEQ ID NO: 37801 - DNA, 20 bp, Artificial Sequence
  Synthetic
tgctgctaacccagggaaag

SEQ ID NO: 37802 - DNA, 23 bp, Artificial Sequence
  Synthetic
agatttgcatctacatgggaagc

SEQ ID NO: 37803 - DNA, 21 bp, Artificial Sequence
  Synthetic
tggcaccataatgtctgcatg

SEQ ID NO: 37804 - DNA, 20 bp, Artificial Sequence
  Synthetic
aaggcggtcagtactcgaat

SEQ ID NO: 37805 - DNA, 25 bp, Artificial Sequence
  Synthetic
accagtactacctataccaagagga

SEQ ID NO: 37806 - DNA, 24 bp, Artificial Sequence
  Synthetic
gctgatattgaggaggctttggat

SEQ ID NO: 37807 - DNA, 25 bp, Artificial Sequence
  Synthetic
actcatctgaacatgttttcacagt

SEQ ID NO: 37808 - DNA, 25 bp, Artificial Sequence
  Synthetic
tgtttgtacagttgaaggtagcatt

SEQ ID NO: 37809 - DNA, 21 bp, Artificial Sequence
  Synthetic
gagggctaattaggagtgcct

SEQ ID NO: 37810 - DNA, 20 bp, Artificial Sequence
  Synthetic
ctccaagctgccatgtggaa

SEQ ID NO: 37811 - DNA, 20 bp, Artificial Sequence
  Synthetic
attcgcaaggccctgctatg

SEQ ID NO: 37812 - DNA, 20 bp, Artificial Sequence
  Synthetic
atcgttctggtgttgctgcc

SEQ ID NO: 37813 - DNA, 21 bp, Artificial Sequence
  Synthetic
gcgaatttccctgctccacat

SEQ ID NO: 37814 - DNA, 20 bp, Artificial Sequence
  Synthetic
ccacctcaccttgcaccttt

SEQ ID NO: 37815 - DNA, 19 bp, Artificial Sequence
  Synthetic
aacggggctggcgttggag

SEQ ID NO: 37816 - DNA, 20 bp, Artificial Sequence
  Synthetic
cggctggctttttgggacct

SEQ ID NO: 37817 - DNA, 20 bp, Artificial Sequence
  Synthetic
ccaagtcgtccaagatgtcg

SEQ ID NO: 37818 - DNA, 25 bp, Artificial Sequence
  Synthetic
aaacacaggattatcaaaggcaaag

SEQ ID NO: 37819 - DNA, 21 bp, Artificial Sequence
  Synthetic
agactcctctgcatcgattgt

SEQ ID NO: 37820 - DNA, 20 bp, Artificial Sequence
  Synthetic
tctgggagtagagaagcggg

SEQ ID NO: 37821 - DNA, 21 bp, Artificial Sequence
  Synthetic
acaggtgttgaaggtggtaga

SEQ ID NO: 37822 - DNA, 24 bp, Artificial Sequence
  Synthetic
gaccaatttctaagcctctacagg

SEQ ID NO: 37823 - DNA, 20 bp, Artificial Sequence
  Synthetic
ggttgtttgtcagggcatcg

SEQ ID NO: 37824 - DNA, 24 bp, Artificial Sequence
  Synthetic
ttgcttggtccattctaatgcata

SEQ ID NO: 37825 - DNA, 22 bp, Artificial Sequence
  Synthetic
cccatttctcttgcgcaatttg

SEQ ID NO: 37826 - DNA, 24 bp, Artificial Sequence
  Synthetic
ctctccatttttcttcccaatcca

SEQ ID NO: 37827 - DNA, 21 bp, Artificial Sequence
  Synthetic
actcctcacaaagcaaaggtg

SEQ ID NO: 37828 - DNA, 23 bp, Artificial Sequence
  Synthetic
tttaactcagcaatagccctgtt

SEQ ID NO: 37829 - DNA, 22 bp, Artificial Sequence
  Synthetic
gggcgtcttgtaggagcttgtt

SEQ ID NO: 37830 - DNA, 24 bp, Artificial Sequence
  Synthetic
gttatgccagatggtaaagtaggt

SEQ ID NO: 37831 - DNA, 20 bp, Artificial Sequence
  Synthetic
ttcacatggttcccccacat

SEQ ID NO: 37832 - DNA, 24 bp, Artificial Sequence
  Synthetic
aggtgtcttctatgttttgtggag

SEQ ID NO: 37833 - DNA, 22 bp, Artificial Sequence
  Synthetic
tcatccacttggtcatcatcgt

SEQ ID NO: 37834 - DNA, 21 bp, Artificial Sequence
  Synthetic
catcttcgcctactccactgt

SEQ ID NO: 37835 - DNA, 22 bp, Artificial Sequence
  Synthetic
ccagtacctttaccagacccaa

SEQ ID NO: 37836 - DNA, 20 bp, Artificial Sequence
  Synthetic
gatttggagtggcggtcacc

SEQ ID NO: 37837 - DNA, 22 bp, Artificial Sequence
  Synthetic
gcccaacagctccaatacctaa

SEQ ID NO: 37838 - DNA, 23 bp, Artificial Sequence
  Synthetic
gcaccaaaacctgtatcacacat

SEQ ID NO: 37839 - DNA, 25 bp, Artificial Sequence
  Synthetic
cgacttcaaactcttctgtatgtct

SEQ ID NO: 37840 - DNA, 22 bp, Artificial Sequence
  Synthetic
gtttggcatagcacctggaaat

SEQ ID NO: 37841 - DNA, 20 bp, Artificial Sequence
  Synthetic
gtactcaccttgcctcgacc

SEQ ID NO: 37842 - DNA, 25 bp, Artificial Sequence
  Synthetic
gtgtataatcactcgtatccctgtc

SEQ ID NO: 37843 - DNA, 20 bp, Artificial Sequence
  Synthetic
cctctatgccactgtctcca

SEQ ID NO: 37844 - DNA, 19 bp, Artificial Sequence
  Synthetic
cggtcgtggatgcgctgga

SEQ ID NO: 37845 - DNA, 21 bp, Artificial Sequence
  Synthetic
cgtctaattcgcgagagacct

SEQ ID NO: 37846 - DNA, 20 bp, Artificial Sequence
  Synthetic
caagtgtcccacctgtaccc

SEQ ID NO: 37847 - DNA, 20 bp, Artificial Sequence
  Synthetic
tagtggtgcaccagagcgat

SEQ ID NO: 37848 - DNA, 24 bp, Artificial Sequence
  Synthetic
ttcagtagaaaaacgctcagtcat

SEQ ID NO: 37849 - DNA, 21 bp, Artificial Sequence
  Synthetic
acagtccgtgtaccgataacg

SEQ ID NO: 37850 - DNA, 23 bp, Artificial Sequence
  Synthetic
gatcttcgatctcagcatttcct

SEQ ID NO: 37851 - DNA, 21 bp, Artificial Sequence
  Synthetic
caaatgcagcagaatggcatg

SEQ ID NO: 37852 - DNA, 21 bp, Artificial Sequence
  Synthetic
gttttccctgctacacacact

SEQ ID NO: 37853 - DNA, 21 bp, Artificial Sequence
  Synthetic
tcgacagttcaaattggcagt

SEQ ID NO: 37854 - DNA, 20 bp, Artificial Sequence
  Synthetic
tacaattggcctccagtccc

SEQ ID NO: 37855 - DNA, 24 bp, Artificial Sequence
  Synthetic
ggagggattggtaaaatgggtact

SEQ ID NO: 37856 - DNA, 24 bp, Artificial Sequence
  Synthetic
gaaaaggttaaagttgtgtcagca

SEQ ID NO: 37857 - DNA, 20 bp, Artificial Sequence
  Synthetic
atacctggttgccccaacaa

SEQ ID NO: 37858 - DNA, 23 bp, Artificial Sequence
  Synthetic
tgacaatccaatattccagccct

SEQ ID NO: 37859 - DNA, 20 bp, Artificial Sequence
  Synthetic
gaggtagaggaactgggggc

SEQ ID NO: 37860 - DNA, 22 bp, Artificial Sequence
  Synthetic
cgccacctaaattgctacctaa

SEQ ID NO: 37861 - DNA, 22 bp, Artificial Sequence
  Synthetic
aagcatagttggcagcatacat

SEQ ID NO: 37862 - DNA, 22 bp, Artificial Sequence
  Synthetic
caatctgtccagcagtgtactg

SEQ ID NO: 37863 - DNA, 23 bp, Artificial Sequence
  Synthetic
cggtcgttggtttcagatctaac

SEQ ID NO: 37864 - DNA, 22 bp, Artificial Sequence
  Synthetic
tctgttataggcgtctggaaca

SEQ ID NO: 37865 - DNA, 24 bp, Artificial Sequence
  Synthetic
ctaagctgtgctgtactactgttt

SEQ ID NO: 37866 - DNA, 21 bp, Artificial Sequence
  Synthetic
gccatttttgcatcagccaat

SEQ ID NO: 37867 - DNA, 23 bp, Artificial Sequence
  Synthetic
gcttgttggttaactgattgcag

SEQ ID NO: 37868 - DNA, 25 bp, Artificial Sequence
  Synthetic
ccagcttcaataaaacttgactcct

SEQ ID NO: 37869 - DNA, 22 bp, Artificial Sequence
  Synthetic
tcagagtcaggagcattatgca

SEQ ID NO: 37870 - DNA, 24 bp, Artificial Sequence
  Synthetic
cgtggaatgacatacaagctagga

SEQ ID NO: 37871 - DNA, 25 bp, Artificial Sequence
  Synthetic
tgttccctacgaatataaaaccaca

SEQ ID NO: 37872 - DNA, 22 bp, Artificial Sequence
  Synthetic
gtcgagttgtttgcatggtaac

SEQ ID NO: 37873 - DNA, 25 bp, Artificial Sequence
  Synthetic
cttctccactatgtaagaccattcc

SEQ ID NO: 37874 - DNA, 23 bp, Artificial Sequence
  Synthetic
tctaggaatccgtcttccatctg

SEQ ID NO: 37875 - DNA, 25 bp, Artificial Sequence
  Synthetic
tctgtttagtcttgcttcttctgaa

SEQ ID NO: 37876 - DNA, 20 bp, Artificial Sequence
  Synthetic
taggatccttccccgcactg

SEQ ID NO: 37877 - DNA, 20 bp, Artificial Sequence
  Synthetic
aaatgcggcagaatggcatg

SEQ ID NO: 37878 - DNA, 21 bp, Artificial Sequence
  Synthetic
gcaggtagcactaaagggcta

SEQ ID NO: 37879 - DNA, 25 bp, Artificial Sequence
  Synthetic
cccatgcttggatttataatttgca

SEQ ID NO: 37880 - DNA, 25 bp, Artificial Sequence
  Synthetic
ggcttctgctatttacaaacgatac

SEQ ID NO: 37881 - DNA, 21 bp, Artificial Sequence
  Synthetic
ccactgatgaaggagactgga

SEQ ID NO: 37882 - DNA, 22 bp, Artificial Sequence
  Synthetic
gtgtgcttgttactgaaacacg

SEQ ID NO: 37883 - DNA, 20 bp, Artificial Sequence
  Synthetic
ccagattgctgaccaagtgg

SEQ ID NO: 37884 - DNA, 22 bp, Artificial Sequence
  Synthetic
cagacacatctggaaacacagt

SEQ ID NO: 37885 - DNA, 22 bp, Artificial Sequence
  Synthetic
aaatgtaccagcaaccgatacc

SEQ ID NO: 37886 - DNA, 20 bp, Artificial Sequence
  Synthetic
acaaggtcagccatccgtac

SEQ ID NO: 37887 - DNA, 20 bp, Artificial Sequence
  Synthetic
aacatgcgcaatgctttgga

SEQ ID NO: 37888 - DNA, 22 bp, Artificial Sequence
  Synthetic
agatcccacgaaagcgaagagg

SEQ ID NO: 37889 - DNA, 22 bp, Artificial Sequence
  Synthetic
acatcgaacggttccagcaaca

SEQ ID NO: 37890 - DNA, 24 bp, Artificial Sequence
  Synthetic
attccaagggggatactttatgct

SEQ ID NO: 37891 - DNA, 20 bp, Artificial Sequence
  Synthetic
acacctattgagaggctgca

SEQ ID NO: 37892 - DNA, 24 bp, Artificial Sequence
  Synthetic
agaacattaagcaaaatcctgcac

SEQ ID NO: 37893 - DNA, 20 bp, Artificial Sequence
  Synthetic
accacaagcggttccttagt

SEQ ID NO: 37894 - DNA, 25 bp, Artificial Sequence
  Synthetic
tgaactatctcagtttgcattaggt

SEQ ID NO: 37895 - DNA, 24 bp, Artificial Sequence
  Synthetic
tctgttgactctttaccatcttcg

SEQ ID NO: 37896 - DNA, 22 bp, Artificial Sequence
  Synthetic
cgcaatgggagacgttaaaggt

SEQ ID NO: 37897 - DNA, 21 bp, Artificial Sequence
  Synthetic
ccgatttgagtccacagttgc

SEQ ID NO: 37898 - DNA, 20 bp, Artificial Sequence
  Synthetic
caatggagtcgctgacagac

SEQ ID NO: 37899 - DNA, 23 bp, Artificial Sequence
  Synthetic
ataggcccatctgaggtagttcc

SEQ ID NO: 37900 - DNA, 25 bp, Artificial Sequence
  Synthetic
attagatgtgcaacctatagaaccc

SEQ ID NO: 37901 - DNA, 20 bp, Artificial Sequence
  Synthetic
cagaaccagtaccccacgtg

SEQ ID NO: 37902 - DNA, 25 bp, Artificial Sequence
  Synthetic
cgaagaaggtcgtattcgattcagt

SEQ ID NO: 37903 - DNA, 21 bp, Artificial Sequence
  Synthetic
atctttcaggacaatggctgc

SEQ ID NO: 37904 - DNA, 20 bp, Artificial Sequence
  Synthetic
tccaccaattggggaacact

SEQ ID NO: 37905 - DNA, 25 bp, Artificial Sequence
  Synthetic
tttaacagaccttattggctacagc

SEQ ID NO: 37906 - DNA, 21 bp, Artificial Sequence
  Synthetic
ggaattgccgggaagactggg

SEQ ID NO: 37907 - DNA, 22 bp, Artificial Sequence
  Synthetic
cggcactaggaagagttcggag

SEQ ID NO: 37908 - DNA, 20 bp, Artificial Sequence
  Synthetic
gcggagcgcttactgacgat

SEQ ID NO: 37909 - DNA, 22 bp, Artificial Sequence
  Synthetic
gtgcccggtgtcatcattacca

SEQ ID NO: 37910 - DNA, 22 bp, Artificial Sequence
  Synthetic
gcccgctgtggtacaattcaac

SEQ ID NO: 37911 - DNA, 20 bp, Artificial Sequence
  Synthetic
gggcagggacggtttcatcc

SEQ ID NO: 37912 - DNA, 22 bp, Artificial Sequence
  Synthetic
aagatcatagtttggggggcgg

SEQ ID NO: 37913 - DNA, 20 bp, Artificial Sequence
  Synthetic
ggggaccaatgtgggcggtg

SEQ ID NO: 37914 - DNA, 22 bp, Artificial Sequence
  Synthetic
tcttcagagctgctgtctgcac

SEQ ID NO: 37915 - DNA, 21 bp, Artificial Sequence
  Synthetic
agctcacctcattggggctga

SEQ ID NO: 37916 - DNA, 20 bp, Artificial Sequence
  Synthetic
gtaggggcaggcttggcatc

SEQ ID NO: 37917 - DNA, 20 bp, Artificial Sequence
  Synthetic
ttcgcaagccagttagcgcc

SEQ ID NO: 37918 - DNA, 21 bp, Artificial Sequence
  Synthetic
acgcagtggatgaaccgtctc

SEQ ID NO: 37919 - DNA, 20 bp, Artificial Sequence
  Synthetic
gtgtggggccctgatagcag

SEQ ID NO: 37920 - DNA, 21 bp, Artificial Sequence
  Synthetic
tttgtggacggggtgcggata

SEQ ID NO: 37921 - DNA, 21 bp, Artificial Sequence
  Synthetic
cgggcggttatccaactcaca

SEQ ID NO: 37922 - DNA, 22 bp, Artificial Sequence
  Synthetic
accgaccaccataatggccaag

SEQ ID NO: 37923 - DNA, 22 bp, Artificial Sequence
  Synthetic
aggctcgcaccatcattaacgc

SEQ ID NO: 37924 - DNA, 20 bp, Artificial Sequence
  Synthetic
gatagggcggacctgcaagc

SEQ ID NO: 37925 - DNA, 20 bp, Artificial Sequence
  Synthetic
ctggagaagccaccacaatg

SEQ ID NO: 37926 - DNA, 22 bp, Artificial Sequence
  Synthetic
tgaaaatgagggccttcagaga

SEQ ID NO: 37927 - DNA, 21 bp, Artificial Sequence
  Synthetic
gacctttgattggacggtgtg

SEQ ID NO: 37928 - DNA, 25 bp, Artificial Sequence
  Synthetic
gtggctaaaatgctcagtaattgtc

SEQ ID NO: 37929 - DNA, 20 bp, Artificial Sequence
  Synthetic
aaggacggttactgcatcct

SEQ ID NO: 37930 - DNA, 22 bp, Artificial Sequence
  Synthetic
gtcatacaggaaaccagtaggc

SEQ ID NO: 37931 - DNA, 23 bp, Artificial Sequence
  Synthetic
aactgtgaaaccaaatgccaaac

SEQ ID NO: 37932 - DNA, 22 bp, Artificial Sequence
  Synthetic
gataccatcacagcaatgacca

SEQ ID NO: 37933 - DNA, 22 bp, Artificial Sequence
  Synthetic
catccagcaaatacaccatcca

SEQ ID NO: 37934 - DNA, 24 bp, Artificial Sequence
  Synthetic
atgacagactagaagctatggcaa

SEQ ID NO: 37935 - DNA, 22 bp, Artificial Sequence
  Synthetic
tatacgccaatcagccaatcca

SEQ ID NO: 37936 - DNA, 24 bp, Artificial Sequence
  Synthetic
cacaaatgcccagcaaatttacca

SEQ ID NO: 37937 - DNA, 20 bp, Artificial Sequence
  Synthetic
ggcaatccaagcccttcaca

SEQ ID NO: 37938 - DNA, 25 bp, Artificial Sequence
  Synthetic
ctgttttgcttccagtcaaaacatc

SEQ ID NO: 37939 - DNA, 24 bp, Artificial Sequence
  Synthetic
tgaactcaacagtgatgacatcaa

SEQ ID NO: 37940 - DNA, 23 bp, Artificial Sequence
  Synthetic
accaggaatgttcagacaagttc

SEQ ID NO: 37941 - DNA, 21 bp, Artificial Sequence
  Synthetic
ttccctgcatcaataccagct

SEQ ID NO: 37942 - DNA, 21 bp, Artificial Sequence
  Synthetic
gtctgcggaaccggtgagtac

SEQ ID NO: 37943 - DNA, 19 bp, Artificial Sequence
  Synthetic
cgcgcgacgaggaagactt

SEQ ID NO: 37944 - DNA, 22 bp, Artificial Sequence
  Synthetic
ggaagacggcgtgaactatgca

SEQ ID NO: 37945 - DNA, 20 bp, Artificial Sequence
  Synthetic
cctcgacgaacgcccctact

SEQ ID NO: 37946 - DNA, 20 bp, Artificial Sequence
  Synthetic
ggtgggcaacaacaccttgc

SEQ ID NO: 37947 - DNA, 21 bp, Artificial Sequence
  Synthetic
ccacacagtggcaggtccttc

SEQ ID NO: 37948 - DNA, 22 bp, Artificial Sequence
  Synthetic
atctgaagggtaggtgggtgcc

SEQ ID NO: 37949 - DNA, 21 bp, Artificial Sequence
  Synthetic
caaggccttctccggatctgc

SEQ ID NO: 37950 - DNA, 22 bp, Artificial Sequence
  Synthetic
cccaagggtcctgtcatccaga

SEQ ID NO: 37951 - DNA, 22 bp, Artificial Sequence
  Synthetic
aaccatgagatccccggtgttc

SEQ ID NO: 37952 - DNA, 21 bp, Artificial Sequence
  Synthetic
caatgccgtggcctactaccg

SEQ ID NO: 37953 - DNA, 22 bp, Artificial Sequence
  Synthetic
atgacatgcatgtcggccgacc

SEQ ID NO: 37954 - DNA, 20 bp, Artificial Sequence
  Synthetic
cacccctgctgtccagacca

SEQ ID NO: 37955 - DNA, 19 bp, Artificial Sequence
  Synthetic
cgccatcggcagcgttgga

SEQ ID NO: 37956 - DNA, 22 bp, Artificial Sequence
  Synthetic
ctcagcagcctcactgtaaccc

SEQ ID NO: 37957 - DNA, 22 bp, Artificial Sequence
  Synthetic
ccccattaacgcctacaccacg

SEQ ID NO: 37958 - DNA, 20 bp, Artificial Sequence
  Synthetic
accggacgtagccgtgttga

SEQ ID NO: 37959 - DNA, 21 bp, Artificial Sequence
  Synthetic
ggaggtctccgtacctgcaga

SEQ ID NO: 37960 - DNA, 20 bp, Artificial Sequence
  Synthetic
ccccccgactccgacgttga

SEQ ID NO: 37961 - DNA, 22 bp, Artificial Sequence
  Synthetic
taccaggacgtgctcaaggagg

SEQ ID NO: 37962 - DNA, 22 bp, Artificial Sequence
  Synthetic
tacgacgtggttagcaagctcc

SEQ ID NO: 37963 - DNA, 22 bp, Artificial Sequence
  Synthetic
ccagtcaattcctggctaggca

SEQ ID NO: 37964 - DNA, 20 bp, Artificial Sequence
  Synthetic
gcccttgcgagcttggagac

SEQ ID NO: 37965 - DNA, 22 bp, Artificial Sequence
  Synthetic
attgaagtgggcacttggtgag

SEQ ID NO: 37966 - DNA, 20 bp, Artificial Sequence
  Synthetic
gaatcacccaagggagtgga

SEQ ID NO: 37967 - DNA, 21 bp, Artificial Sequence
  Synthetic
cctccactcactccaaaacag

SEQ ID NO: 37968 - DNA, 22 bp, Artificial Sequence
  Synthetic
tgatgcagaagatgagacagca

SEQ ID NO: 37969 - DNA, 21 bp, Artificial Sequence
  Synthetic
ggtcagccaaagccaaacgac

SEQ ID NO: 37970 - DNA, 24 bp, Artificial Sequence
  Synthetic
tatggtgcaaacaaaatgtcctcc

SEQ ID NO: 37971 - DNA, 20 bp, Artificial Sequence
  Synthetic
tggaatgcaccaccaactgg

SEQ ID NO: 37972 - DNA, 20 bp, Artificial Sequence
  Synthetic
atatggacagtgggaggtgc

SEQ ID NO: 37973 - DNA, 22 bp, Artificial Sequence
  Synthetic
gcccacaatacataatgcacct

SEQ ID NO: 37974 - DNA, 21 bp, Artificial Sequence
  Synthetic
agaggcatatggggacagttt

SEQ ID NO: 37975 - DNA, 20 bp, Artificial Sequence
  Synthetic
tgttggggcaatcaggtgtt

SEQ ID NO: 37976 - DNA, 25 bp, Artificial Sequence
  Synthetic
ggacacatataggtttgtacagtca

SEQ ID NO: 37977 - DNA, 22 bp, Artificial Sequence
  Synthetic
tagagctcaggtcgagaccggg

SEQ ID NO: 37978 - DNA, 20 bp, Artificial Sequence
  Synthetic
cgaccccccggattctgacc

SEQ ID NO: 37979 - DNA, 22 bp, Artificial Sequence
  Synthetic
gtacctttgctcctccctcgtg

SEQ ID NO: 37980 - DNA, 21 bp, Artificial Sequence
  Synthetic
aaggcctggaggagccttacc

SEQ ID NO: 37981 - DNA, 20 bp, Artificial Sequence
  Synthetic
ccactggagtcgggactgca

SEQ ID NO: 37982 - DNA, 21 bp, Artificial Sequence
  Synthetic
ggctagaacacctcccaaggc

SEQ ID NO: 37983 - DNA, 22 bp, Artificial Sequence
  Synthetic
tctctcatcatcttcccccggg

SEQ ID NO: 37984 - DNA, 20 bp, Artificial Sequence
  Synthetic
cggcaagccttcccccaatg

SEQ ID NO: 37985 - DNA, 21 bp, Artificial Sequence
  Synthetic
caacgctctcacagatgccct

SEQ ID NO: 37986 - DNA, 21 bp, Artificial Sequence
  Synthetic
ccctacaatccaaccagctcc

SEQ ID NO: 37987 - DNA, 20 bp, Artificial Sequence
  Synthetic
tggaggctcctcaagcgagc

SEQ ID NO: 37988 - DNA, 21 bp, Artificial Sequence
  Synthetic
tggccctttcagcagatcagg

SEQ ID NO: 37989 - DNA, 19 bp, Artificial Sequence
  Synthetic
ctggcttgtctccgccctg

SEQ ID NO: 37990 - DNA, 21 bp, Artificial Sequence
  Synthetic
ctcctccgttcagcctccaag

SEQ ID NO: 37991 - DNA, 18 bp, Artificial Sequence
  Synthetic
cgtcgctgccgatcacga

SEQ ID NO: 37992 - DNA, 23 bp, Artificial Sequence
  Synthetic
cctcatttctactctcacacggc

SEQ ID NO: 37993 - DNA, 24 bp, Artificial Sequence
  Synthetic
gaaaagaacccgtcacttaggatg

SEQ ID NO: 37994 - DNA, 25 bp, Artificial Sequence
  Synthetic
cttgtccgaaaaacgagatttctcc

SEQ ID NO: 37995 - DNA, 20 bp, Artificial Sequence
  Synthetic
cacagattggcgggacaagg

SEQ ID NO: 37996 - DNA, 22 bp, Artificial Sequence
  Synthetic
agaaaagcaaccaggagattgg

SEQ ID NO: 37997 - DNA, 25 bp, Artificial Sequence
  Synthetic
taataaagcttcttccctttgcagc

SEQ ID NO: 37998 - DNA, 20 bp, Artificial Sequence
  Synthetic
aggattcctcattctgggca

SEQ ID NO: 37999 - DNA, 23 bp, Artificial Sequence
  Synthetic
acacagtaaacagaacacaccaa

SEQ ID NO: 38000 - DNA, 25 bp, Artificial Sequence
  Synthetic
ttggacattaaacagaaatcaaccg

SEQ ID NO: 38001 - DNA, 21 bp, Artificial Sequence
  Synthetic
ccaaagatgcagagagaggca

SEQ ID NO: 38002 - DNA, 21 bp, Artificial Sequence
  Synthetic
tgagggaatacaagcaggagt

SEQ ID NO: 38003 - DNA, 22 bp, Artificial Sequence
  Synthetic
ccccatctccacatctccacgc

SEQ ID NO: 38004 - DNA, 20 bp, Artificial Sequence
  Synthetic
cgaaacgacccgcacatggc

SEQ ID NO: 38005 - DNA, 21 bp, Artificial Sequence
  Synthetic
acatacacgcgtgcatgctgc

SEQ ID NO: 38006 - DNA, 22 bp, Artificial Sequence
  Synthetic
tcggttatgacacggcgaaacg

SEQ ID NO: 38007 - DNA, 20 bp, Artificial Sequence
  Synthetic
cacctacacctgcgtgctgg

SEQ ID NO: 38008 - DNA, 19 bp, Artificial Sequence
  Synthetic
gcggcgctatcatctgcgg

SEQ ID NO: 38009 - DNA, 19 bp, Artificial Sequence
  Synthetic
gaagcctctgcggtagcgg

SEQ ID NO: 38010 - DNA, 21 bp, Artificial Sequence
  Synthetic
cggatgatgaatcgcgccatg

SEQ ID NO: 38011 - DNA, 20 bp, Artificial Sequence
  Synthetic
agtagacggcggtgtcctcg

SEQ ID NO: 38012 - DNA, 21 bp, Artificial Sequence
  Synthetic
cgcagcctcgcctttaaacag

SEQ ID NO: 38013 - DNA, 21 bp, Artificial Sequence
  Synthetic
atcatgccccggagatcgtgc

SEQ ID NO: 38014 - DNA, 21 bp, Artificial Sequence
  Synthetic
gctccaaagcgtacgcagtct

SEQ ID NO: 38015 - DNA, 18 bp, Artificial Sequence
  Synthetic
tcaccgttcggcctcgca

SEQ ID NO: 38016 - DNA, 22 bp, Artificial Sequence
  Synthetic
tgcacacacaactggtcatggt

SEQ ID NO: 38017 - DNA, 19 bp, Artificial Sequence
  Synthetic
gcccgaggataacaggccg

SEQ ID NO: 38018 - DNA, 18 bp, Artificial Sequence
  Synthetic
tcgtggcgcacgtccgta

SEQ ID NO: 38019 - DNA, 18 bp, Artificial Sequence
  Synthetic
acgcgcgcgacgagttga

SEQ ID NO: 38020 - DNA, 22 bp, Artificial Sequence
  Synthetic
ccagtttgacgcagtgcatcag

SEQ ID NO: 38021 - DNA, 20 bp, Artificial Sequence
  Synthetic
cgcagtgacgaaagccatgc

SEQ ID NO: 38022 - DNA, 20 bp, Artificial Sequence
  Synthetic
gcgcttccagcacctgcttt

SEQ ID NO: 38023 - DNA, 21 bp, Artificial Sequence
  Synthetic
aggataccggagtcgtaggcg

SEQ ID NO: 38024 - DNA, 20 bp, Artificial Sequence
  Synthetic
actcacgcggataggggaca

SEQ ID NO: 38025 - DNA, 22 bp, Artificial Sequence
  Synthetic
gtcatgaggaccatgtcgcctt

SEQ ID NO: 38026 - DNA, 19 bp, Artificial Sequence
  Synthetic
cctgcacgaagccgcggaa

SEQ ID NO: 38027 - DNA, 18 bp, Artificial Sequence
  Synthetic
actcgagcatgtcggcgc

SEQ ID NO: 38028 - DNA, 19 bp, Artificial Sequence
  Synthetic
ccgcctcggtcaccaactc

SEQ ID NO: 38029 - DNA, 21 bp, Artificial Sequence
  Synthetic
ccaattccacaaaacgcgccg

SEQ ID NO: 38030 - DNA, 19 bp, Artificial Sequence
  Synthetic
gcgaactttccgcgtgcaa

SEQ ID NO: 38031 - DNA, 21 bp, Artificial Sequence
  Synthetic
ccagaagctgttgcagaccct

SEQ ID NO: 38032 - DNA, 19 bp, Artificial Sequence
  Synthetic
gctgagtgttcgcgtgcgc

SEQ ID NO: 38033 - DNA, 22 bp, Artificial Sequence
  Synthetic
ggccgcgagcgacctattaaac

SEQ ID NO: 38034 - DNA, 22 bp, Artificial Sequence
  Synthetic
cgtcccacctacgtactcgtca

SEQ ID NO: 38035 - DNA, 22 bp, Artificial Sequence
  Synthetic
cgcccgctttctactatgaggc

SEQ ID NO: 38036 - DNA, 20 bp, Artificial Sequence
  Synthetic
aggaactctttcgcctgggc

SEQ ID NO: 38037 - DNA, 19 bp, Artificial Sequence
  Synthetic
gcaactcgcgctaagccgc

SEQ ID NO: 38038 - DNA, 20 bp, Artificial Sequence
  Synthetic
ggcgctgatggaaaagccgc

SEQ ID NO: 38039 - DNA, 22 bp, Artificial Sequence
  Synthetic
aacctgcaacagcaagctgtcg

SEQ ID NO: 38040 - DNA, 16 bp, Artificial Sequence
  Synthetic
tctgacagcgcgcgca

SEQ ID NO: 38041 - DNA, 20 bp, Artificial Sequence
  Synthetic
ccagcagaagagccagcacc

SEQ ID NO: 38042 - DNA, 21 bp, Artificial Sequence
  Synthetic
ccgaattggatttgcgcacca

SEQ ID NO: 38043 - DNA, 21 bp, Artificial Sequence
  Synthetic
catcgtccagaaacggcaccc

SEQ ID NO: 38044 - DNA, 21 bp, Artificial Sequence
  Synthetic
tcatcaccgtccccagtcacc

SEQ ID NO: 38045 - DNA, 19 bp, Artificial Sequence
  Synthetic
cgtcagcgtcgtcgtccgt

SEQ ID NO: 38046 - DNA, 18 bp, Artificial Sequence
  Synthetic
ttttcgctgccgtcgccg

SEQ ID NO: 38047 - DNA, 20 bp, Artificial Sequence
  Synthetic
cggtctgaaaagcggccacg

SEQ ID NO: 38048 - DNA, 21 bp, Artificial Sequence
  Synthetic
tgcgcgctaaaggtatcctcg

SEQ ID NO: 38049 - DNA, 20 bp, Artificial Sequence
  Synthetic
acccgcccgcgaaaatagcg

SEQ ID NO: 38050 - DNA, 19 bp, Artificial Sequence
  Synthetic
tgggctgcttgtggggaac

SEQ ID NO: 38051 - DNA, 20 bp, Artificial Sequence
  Synthetic
gtcggggtgcgtgtagccaa

SEQ ID NO: 38052 - DNA, 20 bp, Artificial Sequence
  Synthetic
cgtgctggtcattgggcagg

SEQ ID NO: 38053 - DNA, 22 bp, Artificial Sequence
  Synthetic
cgacgaggaggatgaagtgacc

SEQ ID NO: 38054 - DNA, 20 bp, Artificial Sequence
  Synthetic
tgctgcgggtctttccctcg

SEQ ID NO: 38055 - DNA, 19 bp, Artificial Sequence
  Synthetic
tctggccgacgacgtgagt

SEQ ID NO: 38056 - DNA, 20 bp, Artificial Sequence
  Synthetic
aaacgcggcgttcttcagca

SEQ ID NO: 38057 - DNA, 19 bp, Artificial Sequence
  Synthetic
cgccaccatcaccggccta

SEQ ID NO: 38058 - DNA, 19 bp, Artificial Sequence
  Synthetic
cgtcgtcgtcgtcctcgga

SEQ ID NO: 38059 - DNA, 19 bp, Artificial Sequence
  Synthetic
tcggtcctgttcgcccacc

SEQ ID NO: 38060 - DNA, 18 bp, Artificial Sequence
  Synthetic
agccgccttccacgttgg

SEQ ID NO: 38061 - DNA, 20 bp, Artificial Sequence
  Synthetic
taacagcgtcggctacgggc

SEQ ID NO: 38062 - DNA, 19 bp, Artificial Sequence
  Synthetic
ccacctcgctgcccgtaaa

SEQ ID NO: 38063 - DNA, 19 bp, Artificial Sequence
  Synthetic
ggacgtggaccgcgagtgt

SEQ ID NO: 38064 - DNA, 19 bp, Artificial Sequence
  Synthetic
agtaaggcagtggcgcgtc

SEQ ID NO: 38065 - DNA, 20 bp, Artificial Sequence
  Synthetic
cagtgtgggcgtcagatccg

SEQ ID NO: 38066 - DNA, 21 bp, Artificial Sequence
  Synthetic
tggttgatttccagcgccagt

SEQ ID NO: 38067 - DNA, 20 bp, Artificial Sequence
  Synthetic
acgccggtcggtaaaagagg

SEQ ID NO: 38068 - DNA, 22 bp, Artificial Sequence
  Synthetic
ttgaccgttgttaagtcccggc

SEQ ID NO: 38069 - DNA, 21 bp, Artificial Sequence
  Synthetic
gaaggtctgtagacagggcgc

SEQ ID NO: 38070 - DNA, 21 bp, Artificial Sequence
  Synthetic
tttgcgacggtgaagtggagg

SEQ ID NO: 38071 - DNA, 21 bp, Artificial Sequence
  Synthetic
gctctcgctgacggaatggaa

SEQ ID NO: 38072 - DNA, 20 bp, Artificial Sequence
  Synthetic
tgactttacggggcagcagc

SEQ ID NO: 38073 - DNA, 20 bp, Artificial Sequence
  Synthetic
tcggatgaggcaggcgatgc

SEQ ID NO: 38074 - DNA, 20 bp, Artificial Sequence
  Synthetic
agctgtgcaggtgctcttcg

SEQ ID NO: 38075 - DNA, 20 bp, Artificial Sequence
  Synthetic
tgtcgtccctgcccttctcc

SEQ ID NO: 38076 - DNA, 20 bp, Artificial Sequence
  Synthetic
ctacctcatgacgcacgccg

SEQ ID NO: 38077 - DNA, 18 bp, Artificial Sequence
  Synthetic
gcgccgccacattggtga

SEQ ID NO: 38078 - DNA, 21 bp, Artificial Sequence
  Synthetic
tctccctcaactgccgtcagg

SEQ ID NO: 38079 - DNA, 20 bp, Artificial Sequence
  Synthetic
cggcctacggcgttattgca

SEQ ID NO: 38080 - DNA, 19 bp, Artificial Sequence
  Synthetic
tccgacgcctgtctgctca

SEQ ID NO: 38081 - DNA, 22 bp, Artificial Sequence
  Synthetic
aggggaaaggcgacagagaagg

SEQ ID NO: 38082 - DNA, 22 bp, Artificial Sequence
  Synthetic
taacgaggagcggcaacagaag

SEQ ID NO: 38083 - DNA, 18 bp, Artificial Sequence
  Synthetic
acgagccgcgtgtggtca

SEQ ID NO: 38084 - DNA, 18 bp, Artificial Sequence
  Synthetic
tgaggtgcgcgaggtgtg

SEQ ID NO: 38085 - DNA, 19 bp, Artificial Sequence
  Synthetic
cgacgagcggttggtgggt

SEQ ID NO: 38086 - DNA, 20 bp, Artificial Sequence
  Synthetic
gcgtcttcggtctcgagcaa

SEQ ID NO: 38087 - DNA, 19 bp, Artificial Sequence
  Synthetic
ctcctcgtgcaggtgtgcc

SEQ ID NO: 38088 - DNA, 20 bp, Artificial Sequence
  Synthetic
gcgtgccctgcatcatctgc

SEQ ID NO: 38089 - DNA, 19 bp, Artificial Sequence
  Synthetic
gactcggacgccatcacgg

SEQ ID NO: 38090 - DNA, 19 bp, Artificial Sequence
  Synthetic
agtctgcccagtgaccgcc

SEQ ID NO: 38091 - DNA, 19 bp, Artificial Sequence
  Synthetic
ctacggcctcacttcgcgc

SEQ ID NO: 38092 - DNA, 21 bp, Artificial Sequence
  Synthetic
gtattgagcagcagcacgccg

SEQ ID NO: 38093 - DNA, 19 bp, Artificial Sequence
  Synthetic
cgtcagcagggcccgcaat

SEQ ID NO: 38094 - DNA, 20 bp, Artificial Sequence
  Synthetic
acggtggtcgcgttggtttc

SEQ ID NO: 38095 - DNA, 19 bp, Artificial Sequence
  Synthetic
ccccgcccgtacatcccat

SEQ ID NO: 38096 - DNA, 21 bp, Artificial Sequence
  Synthetic
ctgtgcctaagtctggcctcc

SEQ ID NO: 38097 - DNA, 22 bp, Artificial Sequence
  Synthetic
cgaacatgcacatagtcgcggc

SEQ ID NO: 38098 - DNA, 19 bp, Artificial Sequence
  Synthetic
ccggctgagcgtctccagt

SEQ ID NO: 38099 - DNA, 20 bp, Artificial Sequence
  Synthetic
tcccgcgggccacttacttg

SEQ ID NO: 38100 - DNA, 21 bp, Artificial Sequence
  Synthetic
tccttccccgtgcttacagcc

SEQ ID NO: 38101 - DNA, 19 bp, Artificial Sequence
  Synthetic
cgcggtgcctaacgcggta

SEQ ID NO: 38102 - DNA, 19 bp, Artificial Sequence
  Synthetic
ggtggcgcaacagcgagtc

SEQ ID NO: 38103 - DNA, 21 bp, Artificial Sequence
  Synthetic
cagatggcggtgtccacttgt

SEQ ID NO: 38104 - DNA, 19 bp, Artificial Sequence
  Synthetic
gtcgagtgcgtcgtcggct

SEQ ID NO: 38105 - DNA, 20 bp, Artificial Sequence
  Synthetic
gtccgcgaccggctacgtag

SEQ ID NO: 38106 - DNA, 19 bp, Artificial Sequence
  Synthetic
gcaccgagtccgcgagtct

SEQ ID NO: 38107 - DNA, 18 bp, Artificial Sequence
  Synthetic
tttcgccaccgctgacgt

SEQ ID NO: 38108 - DNA, 19 bp, Artificial Sequence
  Synthetic
tcgtgtcgcgacatggacg

SEQ ID NO: 38109 - DNA, 20 bp, Artificial Sequence
  Synthetic
actggagacacggtagccgg

SEQ ID NO: 38110 - DNA, 21 bp, Artificial Sequence
  Synthetic
gcagcagaatgtacagcgcct

SEQ ID NO: 38111 - DNA, 22 bp, Artificial Sequence
  Synthetic
aagcgccacatacagtgcaaac

SEQ ID NO: 38112 - DNA, 22 bp, Artificial Sequence
  Synthetic
ggaaatacacgaagagcgcgga

SEQ ID NO: 38113 - DNA, 22 bp, Artificial Sequence
  Synthetic
tctaagacgcgagatccgtggg

SEQ ID NO: 38114 - DNA, 21 bp, Artificial Sequence
  Synthetic
agcagggccaaacagatggtg

SEQ ID NO: 38115 - DNA, 22 bp, Artificial Sequence
  Synthetic
taggacttccccgtcgtactgg

SEQ ID NO: 38116 - DNA, 21 bp, Artificial Sequence
  Synthetic
cggtcacggccacctagaaac

SEQ ID NO: 38117 - DNA, 19 bp, Artificial Sequence
  Synthetic
tccgacgggtagggagcct

SEQ ID NO: 38118 - DNA, 18 bp, Artificial Sequence
  Synthetic
tggtggcgctgcacgtag

SEQ ID NO: 38119 - DNA, 20 bp, Artificial Sequence
  Synthetic
cctcgcccatgtgtacgcag

SEQ ID NO: 38120 - DNA, 19 bp, Artificial Sequence
  Synthetic
accacgtcgtgcggtaccc

SEQ ID NO: 38121 - DNA, 20 bp, Artificial Sequence
  Synthetic
ccggatccatcattgcgcga

SEQ ID NO: 38122 - DNA, 20 bp, Artificial Sequence
  Synthetic
ggcctcgcagtgcaacagtc

SEQ ID NO: 38123 - DNA, 21 bp, Artificial Sequence
  Synthetic
ctggcggttttgcaatcgacg

SEQ ID NO: 38124 - DNA, 18 bp, Artificial Sequence
  Synthetic
tcgttcggcgttcaggcc

SEQ ID NO: 38125 - DNA, 19 bp, Artificial Sequence
  Synthetic
ccgacgacgcactcgactg

SEQ ID NO: 38126 - DNA, 18 bp, Artificial Sequence
  Synthetic
tgcgtgtgtggacggcga

SEQ ID NO: 38127 - DNA, 20 bp, Artificial Sequence
  Synthetic
tgtgacacggagggaagttc

SEQ ID NO: 38128 - DNA, 25 bp, Artificial Sequence
  Synthetic
tgaagggggtttacataaatacagc

SEQ ID NO: 38129 - DNA, 20 bp, Artificial Sequence
  Synthetic
ctggagccacacaaatggga

SEQ ID NO: 38130 - DNA, 23 bp, Artificial Sequence
  Synthetic
aattggagagtcacctaagggag

SEQ ID NO: 38131 - DNA, 25 bp, Artificial Sequence
  Synthetic
acagatgtgtacagaactcaaactc

SEQ ID NO: 38132 - DNA, 20 bp, Artificial Sequence
  Synthetic
aggatgcaactgctggtctt

SEQ ID NO: 38133 - DNA, 23 bp, Artificial Sequence
  Synthetic
gaatgtgcaacatcctcaaaggg

SEQ ID NO: 38134 - DNA, 24 bp, Artificial Sequence
  Synthetic
attataggcgcggaatatttaccg

SEQ ID NO: 38135 - DNA, 22 bp, Artificial Sequence
  Synthetic
aatggcgcatgtttctgcatcc

SEQ ID NO: 38136 - DNA, 23 bp, Artificial Sequence
  Synthetic
cctgttgatctgtcagtgaaacg

SEQ ID NO: 38137 - DNA, 22 bp, Artificial Sequence
  Synthetic
atatggtttgtggggtgtctga

SEQ ID NO: 38138 - DNA, 21 bp, Artificial Sequence
  Synthetic
cgacagtgtgagtgtggtagc

SEQ ID NO: 38139 - DNA, 22 bp, Artificial Sequence
  Synthetic
gaaggtaggaccattgaagggc

SEQ ID NO: 38140 - DNA, 23 bp, Artificial Sequence
  Synthetic
acttgggaaatttgtcatggagt

SEQ ID NO: 38141 - DNA, 21 bp, Artificial Sequence
  Synthetic
gtaaggaacgaggcggtgagc

SEQ ID NO: 38142 - DNA, 21 bp, Artificial Sequence
  Synthetic
agcaagtacaaaggaagccac

SEQ ID NO: 38143 - DNA, 23 bp, Artificial Sequence
  Synthetic
ggatttgatgtttaatcgccccg

SEQ ID NO: 38144 - DNA, 20 bp, Artificial Sequence
  Synthetic
gccacccgcgattatgcagt

SEQ ID NO: 38145 - DNA, 20 bp, Artificial Sequence
  Synthetic
cgaatgctggcgcgaacgta

SEQ ID NO: 38146 - DNA, 25 bp, Artificial Sequence
  Synthetic
tacggacaacatcctttttctacag

SEQ ID NO: 38147 - DNA, 25 bp, Artificial Sequence
  Synthetic
ggcaagaacaatttcatcaaatcca

SEQ ID NO: 38148 - DNA, 22 bp, Artificial Sequence
  Synthetic
ttgaatgaggtgtacctggcgg

SEQ ID NO: 38149 - DNA, 22 bp, Artificial Sequence
  Synthetic
gcctggagctgtccatggtatc

SEQ ID NO: 38150 - DNA, 20 bp, Artificial Sequence
  Synthetic
gcgggggaagcggtatgtcg

SEQ ID NO: 38151 - DNA, 23 bp, Artificial Sequence
  Synthetic
cgaatggttttaagaagcaccac

SEQ ID NO: 38152 - DNA, 24 bp, Artificial Sequence
  Synthetic
ctgcagtttgtcattactgaccaa

SEQ ID NO: 38153 - DNA, 22 bp, Artificial Sequence
  Synthetic
cggttccaaatattgcgcaggg

SEQ ID NO: 38154 - DNA, 20 bp, Artificial Sequence
  Synthetic
cgttgaacccggccaaggac

SEQ ID NO: 38155 - DNA, 22 bp, Artificial Sequence
  Synthetic
tgaggaaatgcgagactgcagg

SEQ ID NO: 38156 - DNA, 23 bp, Artificial Sequence
  Synthetic
ctaactgcccagctgttcttaat

SEQ ID NO: 38157 - DNA, 22 bp, Artificial Sequence
  Synthetic
accagtacgaggactgatcggc

SEQ ID NO: 38158 - DNA, 22 bp, Artificial Sequence
  Synthetic
ggtgaatttgatttgccggaag

SEQ ID NO: 38159 - DNA, 25 bp, Artificial Sequence
  Synthetic
tcatccagatatagtactgcttcca

SEQ ID NO: 38160 - DNA, 22 bp, Artificial Sequence
  Synthetic
tacaactacggagacccagaaa

SEQ ID NO: 38161 - DNA, 20 bp, Artificial Sequence
  Synthetic
gcatacccgaggacgcactg

SEQ ID NO: 38162 - DNA, 21 bp, Artificial Sequence
  Synthetic
ttgcaaacctagctgctccgc

SEQ ID NO: 38163 - DNA, 22 bp, Artificial Sequence
  Synthetic
gaagggacggcaagtaaaacgc

SEQ ID NO: 38164 - DNA, 20 bp, Artificial Sequence
  Synthetic
ggatcctagcgtacagccag

SEQ ID NO: 38165 - DNA, 20 bp, Artificial Sequence
  Synthetic
aagccactttagccccagcg

SEQ ID NO: 38166 - DNA, 20 bp, Artificial Sequence
  Synthetic
acggccggatgcagaggaaa

SEQ ID NO: 38167 - DNA, 22 bp, Artificial Sequence
  Synthetic
tggtcttacatgcacatcgccg

SEQ ID NO: 38168 - DNA, 23 bp, Artificial Sequence
  Synthetic
aagacgtaaaccttgaaatgcca

SEQ ID NO: 38169 - DNA, 20 bp, Artificial Sequence
  Synthetic
ccagcgttcgctttgacaac

SEQ ID NO: 38170 - DNA, 21 bp, Artificial Sequence
  Synthetic
gtgagttggcctggaaatgac

SEQ ID NO: 38171 - DNA, 20 bp, Artificial Sequence
  Synthetic
cttaccccgccaactatccc

SEQ ID NO: 38172 - DNA, 20 bp, Artificial Sequence
  Synthetic
gcagggcgcccataacatca

SEQ ID NO: 38173 - DNA, 22 bp, Artificial Sequence
  Synthetic
ctgttggacaccggcataagct

SEQ ID NO: 38174 - DNA, 20 bp, Artificial Sequence
  Synthetic
cggaagccttcaaaacgtgt

SEQ ID NO: 38175 - DNA, 21 bp, Artificial Sequence
  Synthetic
gcttccatacctgggattgtg

SEQ ID NO: 38176 - DNA, 25 bp, Artificial Sequence
  Synthetic
agacagagcactaaaatccctatgg

SEQ ID NO: 38177 - DNA, 20 bp, Artificial Sequence
  Synthetic
cctgggctttggacttctgc

SEQ ID NO: 38178 - DNA, 22 bp, Artificial Sequence
  Synthetic
cagcaacggcaggaaatctggg

SEQ ID NO: 38179 - DNA, 22 bp, Artificial Sequence
  Synthetic
aaagcgaagatcagttgcaacg

SEQ ID NO: 38180 - DNA, 25 bp, Artificial Sequence
  Synthetic
gctgaatttaatcatctgtagtggc

SEQ ID NO: 38181 - DNA, 20 bp, Artificial Sequence
  Synthetic
ctccgacaacagctgctgtc

SEQ ID NO: 38182 - DNA, 22 bp, Artificial Sequence
  Synthetic
ccactaaaagtcgtggtggaag

SEQ ID NO: 38183 - DNA, 25 bp, Artificial Sequence
  Synthetic
cattttttcttcttcgacttttgcc

SEQ ID NO: 38184 - DNA, 24 bp, Artificial Sequence
  Synthetic
aatattgtatttccagagcccccg

SEQ ID NO: 38185 - DNA, 20 bp, Artificial Sequence
  Synthetic
ccactcagcgacaaaccttt

SEQ ID NO: 38186 - DNA, 22 bp, Artificial Sequence
  Synthetic
caatccctacccaccatcttca

SEQ ID NO: 38187 - DNA, 20 bp, Artificial Sequence
  Synthetic
cccccctagcagtaaaggct

SEQ ID NO: 38188 - DNA, 20 bp, Artificial Sequence
  Synthetic
ggacgctggcaatgacaatg

SEQ ID NO: 38189 - DNA, 22 bp, Artificial Sequence
  Synthetic
ggtacttgttgtatggtgccaa

SEQ ID NO: 38190 - DNA, 23 bp, Artificial Sequence
  Synthetic
aactctacttaaaagcaagcgcg

SEQ ID NO: 38191 - DNA, 25 bp, Artificial Sequence
  Synthetic
agttcatgacaacagaagatgaaca

SEQ ID NO: 38192 - DNA, 23 bp, Artificial Sequence
  Synthetic
gtggtatcagacagcatttgtgt

SEQ ID NO: 38193 - DNA, 23 bp, Artificial Sequence
  Synthetic
aaagggaaaatattgcccacact

SEQ ID NO: 38194 - DNA, 21 bp, Artificial Sequence
  Synthetic
caaacccaggaatcctcactg

SEQ ID NO: 38195 - DNA, 25 bp, Artificial Sequence
  Synthetic
ccttttttgatttgcgccttacttg

SEQ ID NO: 38196 - DNA, 25 bp, Artificial Sequence
  Synthetic
cctgttgctatagatgtgaagttgc

SEQ ID NO: 38197 - DNA, 24 bp, Artificial Sequence
  Synthetic
atttcctcccctattgttagctct

SEQ ID NO: 38198 - DNA, 25 bp, Artificial Sequence
  Synthetic
gattgctcacataatcatagtcgca

SEQ ID NO: 38199 - DNA, 22 bp, Artificial Sequence
  Synthetic
ttgggtattggtactgggagag

SEQ ID NO: 38200 - DNA, 21 bp, Artificial Sequence
  Synthetic
tgtcatatctggcacaaccga

SEQ ID NO: 38201 - DNA, 21 bp, Artificial Sequence
  Synthetic
ttcccgcgcaatagtatttgg

SEQ ID NO: 38202 - DNA, 25 bp, Artificial Sequence
  Synthetic
actgaggggaatagaaataggaaga

SEQ ID NO: 38203 - DNA, 22 bp, Artificial Sequence
  Synthetic
atttctttgtcagagcaggcac

SEQ ID NO: 38204 - DNA, 23 bp, Artificial Sequence
  Synthetic
acccctgcaactgaaaaagaaga

SEQ ID NO: 38205 - DNA, 23 bp, Artificial Sequence
  Synthetic
atacacagatcagtaggagaggc

SEQ ID NO: 38206 - DNA, 20 bp, Artificial Sequence
  Synthetic
cggcacgcttcacactgacg

SEQ ID NO: 38207 - DNA, 23 bp, Artificial Sequence
  Synthetic
tatggaacctactgaagagccaa

SEQ ID NO: 38208 - DNA, 19 bp, Artificial Sequence
  Synthetic
ctgtgccgcctagccagca

SEQ ID NO: 38209 - DNA, 22 bp, Artificial Sequence
  Synthetic
acataaatcctccaattggggc

SEQ ID NO: 38210 - DNA, 20 bp, Artificial Sequence
  Synthetic
tcggtgctacctgtgtcaca

SEQ ID NO: 38211 - DNA, 22 bp, Artificial Sequence
  Synthetic
gacggacaagattcacaacctt

SEQ ID NO: 38212 - DNA, 20 bp, Artificial Sequence
  Synthetic
cgatgaggatgaggaggtgg

SEQ ID NO: 38213 - DNA, 24 bp, Artificial Sequence
  Synthetic
aacttacaagacagccaaaaaagg

SEQ ID NO: 38214 - DNA, 20 bp, Artificial Sequence
  Synthetic
tagatgcgtgccaggaacag

SEQ ID NO: 38215 - DNA, 22 bp, Artificial Sequence
  Synthetic
aacagtaacagttcagctacgc

SEQ ID NO: 38216 - DNA, 22 bp, Artificial Sequence
  Synthetic
ctgcatttctttccactcctca

SEQ ID NO: 38217 - DNA, 20 bp, Artificial Sequence
  Synthetic
gaaatttgggcgtgcccccg

SEQ ID NO: 38218 - DNA, 21 bp, Artificial Sequence
  Synthetic
cgactcggaagacttcggagc

SEQ ID NO: 38219 - DNA, 20 bp, Artificial Sequence
  Synthetic
ggaatctccccggttgctcc

SEQ ID NO: 38220 - DNA, 21 bp, Artificial Sequence
  Synthetic
cgcaccgcttgagtccttacg

SEQ ID NO: 38221 - DNA, 21 bp, Artificial Sequence
  Synthetic
tcagcatgcaggccaattggg

SEQ ID NO: 38222 - DNA, 21 bp, Artificial Sequence
  Synthetic
tcagcggctcgtctgatgaca

SEQ ID NO: 38223 - DNA, 22 bp, Artificial Sequence
  Synthetic
cctccatgcgaggttaacacca

SEQ ID NO: 38224 - DNA, 22 bp, Artificial Sequence
  Synthetic
atgcatacgaccaggaagtggc

SEQ ID NO: 38225 - DNA, 22 bp, Artificial Sequence
  Synthetic
atgagatcttgctcggaccagc

SEQ ID NO: 38226 - DNA, 20 bp, Artificial Sequence
  Synthetic
gcgggtgccaagaccatcag

SEQ ID NO: 38227 - DNA, 20 bp, Artificial Sequence
  Synthetic
gcagtgccccagacctacca

SEQ ID NO: 38228 - DNA, 22 bp, Artificial Sequence
  Synthetic
gttcctggctgatggaggttgc

SEQ ID NO: 38229 - DNA, 22 bp, Artificial Sequence
  Synthetic
tatgtcaccccgggagagagac

SEQ ID NO: 38230 - DNA, 22 bp, Artificial Sequence
  Synthetic
tgcctaattcgccttaagccca

SEQ ID NO: 38231 - DNA, 21 bp, Artificial Sequence
  Synthetic
cgggttacaactggctgagca

SEQ ID NO: 38232 - DNA, 20 bp, Artificial Sequence
  Synthetic
gcattcgtcgtgagcggctt

SEQ ID NO: 38233 - DNA, 22 bp, Artificial Sequence
  Synthetic
ggagatggcgtgatgcatacga

SEQ ID NO: 38234 - DNA, 22 bp, Artificial Sequence
  Synthetic
aaggacttgctggacgacaaca

SEQ ID NO: 38235 - DNA, 22 bp, Artificial Sequence
  Synthetic
atcagtgttgtgacctggagcc

SEQ ID NO: 38236 - DNA, 19 bp, Artificial Sequence
  Synthetic
ccgagccttcacggaggct

SEQ ID NO: 38237 - DNA, 22 bp, Artificial Sequence
  Synthetic
ggcgggggagacatttatcaca

SEQ ID NO: 38238 - DNA, 25 bp, Artificial Sequence
  Synthetic
ttcaacaataacaacacaagaagca

SEQ ID NO: 38239 - DNA, 21 bp, Artificial Sequence
  Synthetic
ggcctcaatctcatctggtcc

SEQ ID NO: 38240 - DNA, 22 bp, Artificial Sequence
  Synthetic
caggggctgagtgattacatca

SEQ ID NO: 38241 - DNA, 24 bp, Artificial Sequence
  Synthetic
gccttacattgaaagacaagcaaa

SEQ ID NO: 38242 - DNA, 24 bp, Artificial Sequence
  Synthetic
aatcctgaagctttagtcaggaga

SEQ ID NO: 38243 - DNA, 25 bp, Artificial Sequence
  Synthetic
atcccagactggaagttaaattgac

SEQ ID NO: 38244 - DNA, 23 bp, Artificial Sequence
  Synthetic
aatttccctttttggttcaccca

SEQ ID NO: 38245 - DNA, 22 bp, Artificial Sequence
  Synthetic
tgatgggggcattcatctccac

SEQ ID NO: 38246 - DNA, 22 bp, Artificial Sequence
  Synthetic
ttgggagcttgttcgagagctg

SEQ ID NO: 38247 - DNA, 20 bp, Artificial Sequence
  Synthetic
agtcagggctggaagacgcc

SEQ ID NO: 38248 - DNA, 22 bp, Artificial Sequence
  Synthetic
ttccacacaccgtctcctagga

SEQ ID NO: 38249 - DNA, 23 bp, Artificial Sequence
  Synthetic
agcgtatttgctatgcttgttgt

SEQ ID NO: 38250 - DNA, 24 bp, Artificial Sequence
  Synthetic
gctgacgctattcaatttttggag

SEQ ID NO: 38251 - DNA, 25 bp, Artificial Sequence
  Synthetic
gtacaggtagactctttgtcatacg

SEQ ID NO: 38252 - DNA, 23 bp, Artificial Sequence
  Synthetic
cccttgctggacgtttattgatg

SEQ ID NO: 38253 - DNA, 22 bp, Artificial Sequence
  Synthetic
acggttgatattgttggccccg

SEQ ID NO: 38254 - DNA, 20 bp, Artificial Sequence
  Synthetic
atctgaccgcgtcatctcca

SEQ ID NO: 38255 - DNA, 25 bp, Artificial Sequence
  Synthetic
acttttagaaacagctgacagaact

SEQ ID NO: 38256 - DNA, 25 bp, Artificial Sequence
  Synthetic
gagctcagggtaataataatggtgt

SEQ ID NO: 38257 - DNA, 20 bp, Artificial Sequence
  Synthetic
ttgttttccgccccgaggtt

SEQ ID NO: 38258 - DNA, 21 bp, Artificial Sequence
  Synthetic
ccgcgtcgtacttgctgatcc

SEQ ID NO: 38259 - DNA, 21 bp, Artificial Sequence
  Synthetic
tgtccgatcgatcttcggccc

SEQ ID NO: 38260 - DNA, 20 bp, Artificial Sequence
  Synthetic
tctaaggggatgcgccgtct

SEQ ID NO: 38261 - DNA, 19 bp, Artificial Sequence
  Synthetic
aagcccttgacctccccgc

SEQ ID NO: 38262 - DNA, 18 bp, Artificial Sequence
  Synthetic
tgtcgctgccgggcttga

SEQ ID NO: 38263 - DNA, 22 bp, Artificial Sequence
  Synthetic
gagtcgacatgtacctggctcg

SEQ ID NO: 38264 - DNA, 20 bp, Artificial Sequence
  Synthetic
ccgctgcatacccactcctc

SEQ ID NO: 38265 - DNA, 19 bp, Artificial Sequence
  Synthetic
cctgtgccggctgtcgagt

SEQ ID NO: 38266 - DNA, 20 bp, Artificial Sequence
  Synthetic
ccctcacttgctgctgctcc

SEQ ID NO: 38267 - DNA, 21 bp, Artificial Sequence
  Synthetic
ccagcgcccatctgttatccc

SEQ ID NO: 38268 - DNA, 22 bp, Artificial Sequence
  Synthetic
ttctccgcaagctcacgaatgt

SEQ ID NO: 38269 - DNA, 20 bp, Artificial Sequence
  Synthetic
gacctaccacagctggggcc

SEQ ID NO: 38270 - DNA, 19 bp, Artificial Sequence
  Synthetic
gccttcgtcgcggtgcaga

SEQ ID NO: 38271 - DNA, 21 bp, Artificial Sequence
  Synthetic
ggttgctgttttagcccccca

SEQ ID NO: 38272 - DNA, 20 bp, Artificial Sequence
  Synthetic
atgacgggtttatgcagcgt

SEQ ID NO: 38273 - DNA, 21 bp, Artificial Sequence
  Synthetic
cggtgcggatctataaggtga

SEQ ID NO: 38274 - DNA, 20 bp, Artificial Sequence
  Synthetic
tctaaaggaggccaacgcag

SEQ ID NO: 38275 - DNA, 20 bp, Artificial Sequence
  Synthetic
cttttgggggccagaatctc

SEQ ID NO: 38276 - DNA, 20 bp, Artificial Sequence
  Synthetic
aaccccctaacaccgcctta

SEQ ID NO: 38277 - DNA, 21 bp, Artificial Sequence
  Synthetic
aatacaaacacaatcggggcg

SEQ ID NO: 38278 - DNA, 19 bp, Artificial Sequence
  Synthetic
gcattccgagcctcgtccg

SEQ ID NO: 38279 - DNA, 19 bp, Artificial Sequence
  Synthetic
ccgtcgggcatcatgagcg

SEQ ID NO: 38280 - DNA, 19 bp, Artificial Sequence
  Synthetic
aggtccgcctttgccccct

SEQ ID NO: 38281 - DNA, 23 bp, Artificial Sequence
  Synthetic
taccctatagtgcagaacatcca

SEQ ID NO: 38282 - DNA, 21 bp, Artificial Sequence
  Synthetic
gacagcatgtcagggagtagg

SEQ ID NO: 38283 - DNA, 20 bp, Artificial Sequence
  Synthetic
tgggaaacatggtggacaga

SEQ ID NO: 38284 - DNA, 23 bp, Artificial Sequence
  Synthetic
ttgcctagtgttacgaaactgac

SEQ ID NO: 38285 - DNA, 22 bp, Artificial Sequence
  Synthetic
aattgggtgtcgacatagcaga

SEQ ID NO: 38286 - DNA, 20 bp, Artificial Sequence
  Synthetic
cacatgcctgtgtacccaca

SEQ ID NO: 38287 - DNA, 22 bp, Artificial Sequence
  Synthetic
gagatcttcagacctggaggag

SEQ ID NO: 38288 - DNA, 22 bp, Artificial Sequence
  Synthetic
atcaagcagctccaggcaagaa

SEQ ID NO: 38289 - DNA, 22 bp, Artificial Sequence
  Synthetic
gcctggctagaagcacaagagg

SEQ ID NO: 38290 - DNA, 22 bp, Artificial Sequence
  Synthetic
aaacaccatctttcggaggcgc

SEQ ID NO: 38291 - DNA, 19 bp, Artificial Sequence
  Synthetic
gcgtccaccccggaaggtt

SEQ ID NO: 38292 - DNA, 22 bp, Artificial Sequence
  Synthetic
ctctttccggatccggcgttgc

SEQ ID NO: 38293 - DNA, 19 bp, Artificial Sequence
  Synthetic
cgccaccgcaacaaccagg

SEQ ID NO: 38294 - DNA, 20 bp, Artificial Sequence
  Synthetic
caaggtgtcggcgtggttgg

SEQ ID NO: 38295 - DNA, 19 bp, Artificial Sequence
  Synthetic
tgctggccaacaatccgcc

SEQ ID NO: 38296 - DNA, 22 bp, Artificial Sequence
  Synthetic
tagggtgctaaagttcaccgcc

SEQ ID NO: 38297 - DNA, 19 bp, Artificial Sequence
  Synthetic
gggttcagcagctccagca

SEQ ID NO: 38298 - DNA, 20 bp, Artificial Sequence
  Synthetic
gcgactggtacacggacacc

SEQ ID NO: 38299 - DNA, 18 bp, Artificial Sequence
  Synthetic
gcagcacgcggtccgtaa

SEQ ID NO: 38300 - DNA, 20 bp, Artificial Sequence
  Synthetic
ggcgagcgtatcgtcgaagg

SEQ ID NO: 38301 - DNA, 20 bp, Artificial Sequence
  Synthetic
gttaaactcggcccgctcgt

SEQ ID NO: 38302 - DNA, 19 bp, Artificial Sequence
  Synthetic
agcagggtcgcgacgagct

SEQ ID NO: 38303 - DNA, 22 bp, Artificial Sequence
  Synthetic
tcttgtgtactcacgccctccc

SEQ ID NO: 38304 - DNA, 22 bp, Artificial Sequence
  Synthetic
gttgaaaacctcgttccgggcc

SEQ ID NO: 38305 - DNA, 21 bp, Artificial Sequence
  Synthetic
cgtaagtacgccttcctcccg

SEQ ID NO: 38306 - DNA, 19 bp, Artificial Sequence
  Synthetic
cccgcgacagaaccggagt

SEQ ID NO: 38307 - DNA, 19 bp, Artificial Sequence
  Synthetic
ccctgtgtggggcagtgga

SEQ ID NO: 38308 - DNA, 20 bp, Artificial Sequence
  Synthetic
agggcctccaggaagaccag

SEQ ID NO: 38309 - DNA, 19 bp, Artificial Sequence
  Synthetic
cgggccgccaaaaccccaa

SEQ ID NO: 38310 - DNA, 19 bp, Artificial Sequence
  Synthetic
cgtagctggcgttgtgggt

SEQ ID NO: 38311 - DNA, 21 bp, Artificial Sequence
  Synthetic
tggacgtttgggaacacaggc

SEQ ID NO: 38312 - DNA, 22 bp, Artificial Sequence
  Synthetic
atctgctgtaccgaaccaccca

SEQ ID NO: 38313 - DNA, 22 bp, Artificial Sequence
  Synthetic
ctgtagtacagcgcggtgttgg

SEQ ID NO: 38314 - DNA, 19 bp, Artificial Sequence
  Synthetic
cgggttcggctggttcgac

SEQ ID NO: 38315 - DNA, 19 bp, Artificial Sequence
  Synthetic
cggaacgcagccaaaggcc

SEQ ID NO: 38316 - DNA, 19 bp, Artificial Sequence
  Synthetic
ggacaacctggccgtcgag

SEQ ID NO: 38317 - DNA, 19 bp, Artificial Sequence
  Synthetic
ggtgcagctcgcgtttcgg

SEQ ID NO: 38318 - DNA, 19 bp, Artificial Sequence
  Synthetic
gttcctgtcggccggtgct

SEQ ID NO: 38319 - DNA, 20 bp, Artificial Sequence
  Synthetic
ggttcaaacccctggtgcgg

SEQ ID NO: 38320 - DNA, 18 bp, Artificial Sequence
  Synthetic
aacagagcacgcgcccca

SEQ ID NO: 38321 - DNA, 20 bp, Artificial Sequence
  Synthetic
tgggcctggatctggagtcg

SEQ ID NO: 38322 - DNA, 20 bp, Artificial Sequence
  Synthetic
gcgagctcggcttctaccgc

SEQ ID NO: 38323 - DNA, 19 bp, Artificial Sequence
  Synthetic
ccgtgacgtaccaggccag

SEQ ID NO: 38324 - DNA, 22 bp, Artificial Sequence
  Synthetic
tgaacatggtcaacaaacgcgc

SEQ ID NO: 38325 - DNA, 21 bp, Artificial Sequence
  Synthetic
ccctcctcacaaactgcctgc

SEQ ID NO: 38326 - DNA, 20 bp, Artificial Sequence
  Synthetic
ggggtggcgagggtgatcca

SEQ ID NO: 38327 - DNA, 21 bp, Artificial Sequence
  Synthetic
caacgccctggagcactttgg

SEQ ID NO: 38328 - DNA, 18 bp, Artificial Sequence
  Synthetic
tcgtgagtcccgcgcaca

SEQ ID NO: 38329 - DNA, 20 bp, Artificial Sequence
  Synthetic
ccttcttgtaccaccgcccg

SEQ ID NO: 38330 - DNA, 21 bp, Artificial Sequence
  Synthetic
ctgcacacgaccaaaacggac

SEQ ID NO: 38331 - DNA, 18 bp, Artificial Sequence
  Synthetic
tcccccacccaccacaca

SEQ ID NO: 38332 - DNA, 22 bp, Artificial Sequence
  Synthetic
gtcgtgtcgtgttgtgtcgtgg

SEQ ID NO: 38333 - DNA, 20 bp, Artificial Sequence
  Synthetic
gggaaaactctggcagcgca

SEQ ID NO: 38334 - DNA, 19 bp, Artificial Sequence
  Synthetic
ggagccacgagggaccgta

SEQ ID NO: 38335 - DNA, 19 bp, Artificial Sequence
  Synthetic
gggattacgggccgcacgt

SEQ ID NO: 38336 - DNA, 21 bp, Artificial Sequence
  Synthetic
ttttggaccagctgaccgacc

SEQ ID NO: 38337 - DNA, 20 bp, Artificial Sequence
  Synthetic
tctagcacacccacgggtct

SEQ ID NO: 38338 - DNA, 22 bp, Artificial Sequence
  Synthetic
gccgtctgccgcactttatagg

SEQ ID NO: 38339 - DNA, 21 bp, Artificial Sequence
  Synthetic
accttgacctcgcttgtcacg

SEQ ID NO: 38340 - DNA, 25 bp, Artificial Sequence
  Synthetic
tgaattatcacgtatggtacagtgg

SEQ ID NO: 38341 - DNA, 20 bp, Artificial Sequence
  Synthetic
gaaaacagctggcggggaat

SEQ ID NO: 38342 - DNA, 20 bp, Artificial Sequence
  Synthetic
atgcgaccctcacgttttgg

SEQ ID NO: 38343 - DNA, 21 bp, Artificial Sequence
  Synthetic
cgagacgacgcagaaacgagg

SEQ ID NO: 38344 - DNA, 25 bp, Artificial Sequence
  Synthetic
aacaactgtataagacatgcaaagc

SEQ ID NO: 38345 - DNA, 21 bp, Artificial Sequence
  Synthetic
ttgaatcaggggggccttcac

SEQ ID NO: 38346 - DNA, 21 bp, Artificial Sequence
  Synthetic
tgtgaccagcactcctgaacg

SEQ ID NO: 38347 - DNA, 22 bp, Artificial Sequence
  Synthetic
aggttgagcattgcatttgacc

SEQ ID NO: 38348 - DNA, 25 bp, Artificial Sequence
  Synthetic
ttctacactgcagagaaacaaatcc

SEQ ID NO: 38349 - DNA, 22 bp, Artificial Sequence
  Synthetic
ttgttattggaacgcctccggt

SEQ ID NO: 38350 - DNA, 25 bp, Artificial Sequence
  Synthetic
attagattttgtgtagtctgcagcc

SEQ ID NO: 38351 - DNA, 20 bp, Artificial Sequence
  Synthetic
tggtagaggaactggaggca

SEQ ID NO: 38352 - DNA, 23 bp, Artificial Sequence
  Synthetic
aatatttgagcgtgatgtggagg

SEQ ID NO: 38353 - DNA, 22 bp, Artificial Sequence
  Synthetic
tacaggcagatgatgatttgcg

SEQ ID NO: 38354 - DNA, 24 bp, Artificial Sequence
  Synthetic
taatttgtgttttgcttgctgtcg

SEQ ID NO: 38355 - DNA, 23 bp, Artificial Sequence
  Synthetic
aaattgtacagcttgctccaaac

SEQ ID NO: 38356 - DNA, 21 bp, Artificial Sequence
  Synthetic
ggaaattccctggcactgttc

SEQ ID NO: 38357 - DNA, 21 bp, Artificial Sequence
  Synthetic
ctaatggcgccgatacaactg

SEQ ID NO: 38358 - DNA, 20 bp, Artificial Sequence
  Synthetic
cagatgatgcagctgtggca

SEQ ID NO: 38359 - DNA, 20 bp, Artificial Sequence
  Synthetic
agaatggaggagacgcaaga

SEQ ID NO: 38360 - DNA, 21 bp, Artificial Sequence
  Synthetic
acatcctgcagtaaccagtgg

SEQ ID NO: 38361 - DNA, 23 bp, Artificial Sequence
  Synthetic
atcacagtctggtcaggttactc

SEQ ID NO: 38362 - DNA, 25 bp, Artificial Sequence
  Synthetic
ctgatattatcaggttgggtaggcc

SEQ ID NO: 38363 - DNA, 20 bp, Artificial Sequence
  Synthetic
gttgcagcaagacatgtcca

SEQ ID NO: 38364 - DNA, 21 bp, Artificial Sequence
  Synthetic
gtcgttatgtatcgcctccac

SEQ ID NO: 38365 - DNA, 22 bp, Artificial Sequence
  Synthetic
gaccgaatgcgttccttcattg

SEQ ID NO: 38366 - DNA, 20 bp, Artificial Sequence
  Synthetic
accccagagcaccaatggta

SEQ ID NO: 38367 - DNA, 20 bp, Artificial Sequence
  Synthetic
ggaggaggagcgagaacctt

SEQ ID NO: 38368 - DNA, 22 bp, Artificial Sequence
  Synthetic
actctcggagaatctgtcccgt

SEQ ID NO: 38369 - DNA, 20 bp, Artificial Sequence
  Synthetic
tatacctggggggtctgggt

SEQ ID NO: 38370 - DNA, 21 bp, Artificial Sequence
  Synthetic
gagatgccataccagagggaa

SEQ ID NO: 38371 - DNA, 25 bp, Artificial Sequence
  Synthetic
ccgttttgtgtataaaaggtccagc

SEQ ID NO: 38372 - DNA, 24 bp, Artificial Sequence
  Synthetic
cagaccaaatgtccctattgatcc

SEQ ID NO: 38373 - DNA, 24 bp, Artificial Sequence
  Synthetic
aaacgtttacgaactgtagatgct

SEQ ID NO: 38374 - DNA, 25 bp, Artificial Sequence
  Synthetic
acattttcaaagtaaagacgacagc

SEQ ID NO: 38375 - DNA, 22 bp, Artificial Sequence
  Synthetic
gggaagcaacgatgtatcatca

SEQ ID NO: 38376 - DNA, 24 bp, Artificial Sequence
  Synthetic
agtgatagggttcaacaaatcacc

SEQ ID NO: 38377 - DNA, 20 bp, Artificial Sequence
  Synthetic
acccttccaggatctggtca

SEQ ID NO: 38378 - DNA, 23 bp, Artificial Sequence
  Synthetic
ccttgccatacgtgtctattgga

SEQ ID NO: 38379 - DNA, 22 bp, Artificial Sequence
  Synthetic
tgagagacccactaacatctgg

SEQ ID NO: 38380 - DNA, 25 bp, Artificial Sequence
  Synthetic
ttagacggtttggatttgatttgga

SEQ ID NO: 38381 - DNA, 23 bp, Artificial Sequence
  Synthetic
cctcgtgaatggacagaaaatcc

SEQ ID NO: 38382 - DNA, 25 bp, Artificial Sequence
  Synthetic
cgctatgactacccaacaaaaacag

SEQ ID NO: 38383 - DNA, 20 bp, Artificial Sequence
  Synthetic
gaagcaaacaacccgctgtg

SEQ ID NO: 38384 - DNA, 20 bp, Artificial Sequence
  Synthetic
ttcctgctgatggatgcctt

SEQ ID NO: 38385 - DNA, 20 bp, Artificial Sequence
  Synthetic
ctcactgcagagccacagaa

SEQ ID NO: 38386 - DNA, 22 bp, Artificial Sequence
  Synthetic
gaacaaatcagaaacatggccc

SEQ ID NO: 38387 - DNA, 20 bp, Artificial Sequence
  Synthetic
ccaggttaaaatacgccgca

SEQ ID NO: 38388 - DNA, 23 bp, Artificial Sequence
  Synthetic
tcgcaaaacaagattcctaccag

SEQ ID NO: 38389 - DNA, 22 bp, Artificial Sequence
  Synthetic
ggaaagcaaccagaagactgat

SEQ ID NO: 38390 - DNA, 20 bp, Artificial Sequence
  Synthetic
gaaactccctggcgttgttc

SEQ ID NO: 38391 - DNA, 20 bp, Artificial Sequence
  Synthetic
caaatgaaaatggcggcgac

SEQ ID NO: 38392 - DNA, 19 bp, Artificial Sequence
  Synthetic
ggaggccgacggacgaaga

SEQ ID NO: 38393 - DNA, 21 bp, Artificial Sequence
  Synthetic
caaggcctagcatatccaggg

SEQ ID NO: 38394 - DNA, 25 bp, Artificial Sequence
  Synthetic
ttacttttagatggctacttggacc

SEQ ID NO: 38395 - DNA, 20 bp, Artificial Sequence
  Synthetic
agtctgcggaaccggtgagt

SEQ ID NO: 38396 - DNA, 20 bp, Artificial Sequence
  Synthetic
gacatccgagcgatcccagc

SEQ ID NO: 38397 - DNA, 20 bp, Artificial Sequence
  Synthetic
tcacccaccctggctgtacc

SEQ ID NO: 38398 - DNA, 20 bp, Artificial Sequence
  Synthetic
gccatcgcctacttcggcat

SEQ ID NO: 38399 - DNA, 20 bp, Artificial Sequence
  Synthetic
ccaacatcacagggccgtct

SEQ ID NO: 38400 - DNA, 21 bp, Artificial Sequence
  Synthetic
cccgccttgccagttaatccc

SEQ ID NO: 38401 - DNA, 19 bp, Artificial Sequence
  Synthetic
gtgtggcacgtgaaggggc

SEQ ID NO: 38402 - DNA, 21 bp, Artificial Sequence
  Synthetic
ccctgtgtccgcgagactagg

SEQ ID NO: 38403 - DNA, 22 bp, Artificial Sequence
  Synthetic
tggacacaaccatgcgatctcc

SEQ ID NO: 38404 - DNA, 22 bp, Artificial Sequence
  Synthetic
catcggcactgtcctagaccag

SEQ ID NO: 38405 - DNA, 21 bp, Artificial Sequence
  Synthetic
gctacacgggcgactttgact

SEQ ID NO: 38406 - DNA, 20 bp, Artificial Sequence
  Synthetic
atccattccacgtggcccag

SEQ ID NO: 38407 - DNA, 19 bp, Artificial Sequence
  Synthetic
ccacggtggccagcatagg

SEQ ID NO: 38408 - DNA, 21 bp, Artificial Sequence
  Synthetic
cgaggatacgtccacgccttg

SEQ ID NO: 38409 - DNA, 22 bp, Artificial Sequence
  Synthetic
gaacgtttccgatcaacgccac

SEQ ID NO: 38410 - DNA, 20 bp, Artificial Sequence
  Synthetic
ttgtgagccagagcctgacg

SEQ ID NO: 38411 - DNA, 22 bp, Artificial Sequence
  Synthetic
gggccagacctgactacaatcc

SEQ ID NO: 38412 - DNA, 22 bp, Artificial Sequence
  Synthetic
ggagacatcgagccagagctgt

SEQ ID NO: 38413 - DNA, 21 bp, Artificial Sequence
  Synthetic
acaatgccttggtgtatgtgg

SEQ ID NO: 38414 - DNA, 25 bp, Artificial Sequence
  Synthetic
tgaaaataggaaacttcagagtcgg

SEQ ID NO: 38415 - DNA, 23 bp, Artificial Sequence
  Synthetic
ttgctgctgtaaatgtgttaggc

SEQ ID NO: 38416 - DNA, 22 bp, Artificial Sequence
  Synthetic
aatttctttttgctgccctggg

SEQ ID NO: 38417 - DNA, 25 bp, Artificial Sequence
  Synthetic
gcgaaaaacaatatgtcagttttgc

SEQ ID NO: 38418 - DNA, 25 bp, Artificial Sequence
  Synthetic
ctatgatcaatcaccaaattgctgg

SEQ ID NO: 38419 - DNA, 20 bp, Artificial Sequence
  Synthetic
ggtccagcggaactgattcc

SEQ ID NO: 38420 - DNA, 20 bp, Artificial Sequence
  Synthetic
tggattttctgggtcaggcg

SEQ ID NO: 38421 - DNA, 20 bp, Artificial Sequence
  Synthetic
tgctggtaccactggagaca

SEQ ID NO: 38422 - DNA, 24 bp, Artificial Sequence
  Synthetic
gatgattggcaattggcatttgtg

SEQ ID NO: 38423 - DNA, 22 bp, Artificial Sequence
  Synthetic
tctcagttattctgctggtgca

SEQ ID NO: 38424 - DNA, 24 bp, Artificial Sequence
  Synthetic
gagactgaaacaccatgtagtcag

SEQ ID NO: 38425 - DNA, 21 bp, Artificial Sequence
  Synthetic
tctgtattgcagcctccaaca

SEQ ID NO: 38426 - DNA, 20 bp, Artificial Sequence
  Synthetic
cagccattaggtgtgggcat

SEQ ID NO: 38427 - DNA, 25 bp, Artificial Sequence
  Synthetic
tacctctgatgcccaaatattcaat

SEQ ID NO: 38428 - DNA, 24 bp, Artificial Sequence
  Synthetic
aggattgaaggccaaaccaaaatt

SEQ ID NO: 38429 - DNA, 20 bp, Artificial Sequence
  Synthetic
ttcctgacctgcactgcttg

SEQ ID NO: 38430 - DNA, 20 bp, Artificial Sequence
  Synthetic
cagttactgcgacgtgaggt

SEQ ID NO: 38431 - DNA, 21 bp, Artificial Sequence
  Synthetic
accggtcgatgtatgtcttgt

SEQ ID NO: 38432 - DNA, 22 bp, Artificial Sequence
  Synthetic
aaccttttgttgcaagtgtgac

SEQ ID NO: 38433 - DNA, 25 bp, Artificial Sequence
  Synthetic
atgtactctgatttccacttcatcg

SEQ ID NO: 38434 - DNA, 20 bp, Artificial Sequence
  Synthetic
ctcggtgagaacatggcacc

SEQ ID NO: 38435 - DNA, 24 bp, Artificial Sequence
  Synthetic
attgtgttcttgaaataggggaca

SEQ ID NO: 38436 - DNA, 22 bp, Artificial Sequence
  Synthetic
gagtcacctaaaggagtggagg

SEQ ID NO: 38437 - DNA, 20 bp, Artificial Sequence
  Synthetic
tgcaccgaatcatgagggaa

SEQ ID NO: 38438 - DNA, 23 bp, Artificial Sequence
  Synthetic
aattgtgcttccttgtggtttgt

SEQ ID NO: 38439 - DNA, 20 bp, Artificial Sequence
  Synthetic
ggaggatttggaggacacct

SEQ ID NO: 38440 - DNA, 22 bp, Artificial Sequence
  Synthetic
agtgatggaaagcctcaacaac

SEQ ID NO: 38441 - DNA, 21 bp, Artificial Sequence
  Synthetic
ggccctacggacgaagaaggt

SEQ ID NO: 38442 - DNA, 25 bp, Artificial Sequence
  Synthetic
agttactgcacctgaatttatcaca

SEQ ID NO: 38443 - DNA, 20 bp, Artificial Sequence
  Synthetic
cttctggcgagactgtggtg

SEQ ID NO: 38444 - DNA, 24 bp, Artificial Sequence
  Synthetic
tgcccagaataagttttaccttcc

SEQ ID NO: 38445 - DNA, 20 bp, Artificial Sequence
  Synthetic
actactgtggccaaacggag

SEQ ID NO: 38446 - DNA, 23 bp, Artificial Sequence
  Synthetic
gatactggtatcctttttggcgc

SEQ ID NO: 38447 - DNA, 24 bp, Artificial Sequence
  Synthetic
ggagattctacatccaaatgtgca

SEQ ID NO: 38448 - DNA, 23 bp, Artificial Sequence
  Synthetic
gggttgcttatgaaagaatgtgc

SEQ ID NO: 38449 - DNA, 21 bp, Artificial Sequence
  Synthetic
catggactccaataccctgga

SEQ ID NO: 38450 - DNA, 21 bp, Artificial Sequence
  Synthetic
gacccaaggtgccttactgaa

SEQ ID NO: 38451 - DNA, 20 bp, Artificial Sequence
  Synthetic
ggccatgggtgtctttcgat

SEQ ID NO: 38452 - DNA, 25 bp, Artificial Sequence
  Synthetic
ttcagcaaacaagagtggataagct

SEQ ID NO: 38453 - DNA, 22 bp, Artificial Sequence
  Synthetic
tacggacacaaataccagcaga

SEQ ID NO: 38454 - DNA, 22 bp, Artificial Sequence
  Synthetic
acagctcagatggctcttcagc

SEQ ID NO: 38455 - DNA, 20 bp, Artificial Sequence
  Synthetic
ctacctgatctgtgcacgga

SEQ ID NO: 38456 - DNA, 25 bp, Artificial Sequence
  Synthetic
acaatttattaataaggtgcctgcg

SEQ ID NO: 38457 - DNA, 21 bp, Artificial Sequence
  Synthetic
acgagcaattaagcgactcag

SEQ ID NO: 38458 - DNA, 23 bp, Artificial Sequence
  Synthetic
gcacagaaaacagtccattaggg

SEQ ID NO: 38459 - DNA, 20 bp, Artificial Sequence
  Synthetic
cacagagggcaacaacagca

SEQ ID NO: 38460 - DNA, 21 bp, Artificial Sequence
  Synthetic
gcaattcctgcgataccaaca

SEQ ID NO: 38461 - DNA, 20 bp, Artificial Sequence
  Synthetic
ccagacgtcggctgctacac

SEQ ID NO: 38462 - DNA, 20 bp, Artificial Sequence
  Synthetic
aggcactgcttgtaaatcgc

SEQ ID NO: 38463 - DNA, 21 bp, Artificial Sequence
  Synthetic
ggacaggaacaggatacacca

SEQ ID NO: 38464 - DNA, 22 bp, Artificial Sequence
  Synthetic
caaacacgagtagacaagctga

SEQ ID NO: 38465 - DNA, 22 bp, Artificial Sequence
  Synthetic
tctgattgtgaatgcacccaat

SEQ ID NO: 38466 - DNA, 22 bp, Artificial Sequence
  Synthetic
agtatggtggaggctatggttt

SEQ ID NO: 38467 - DNA, 22 bp, Artificial Sequence
  Synthetic
cgctatagggcaggcttatccc

SEQ ID NO: 38468 - DNA, 20 bp, Artificial Sequence
  Synthetic
acacagcaggggtcttgggc

SEQ ID NO: 38469 - DNA, 21 bp, Artificial Sequence
  Synthetic
ccattgtgcttactggggcgg

SEQ ID NO: 38470 - DNA, 19 bp, Artificial Sequence
  Synthetic
gggtgtggaggtttggcga

SEQ ID NO: 38471 - DNA, 22 bp, Artificial Sequence
  Synthetic
ttcgcccacttggttgttgagt

SEQ ID NO: 38472 - DNA, 19 bp, Artificial Sequence
  Synthetic
ctcggggtcggtggtgctt

SEQ ID NO: 38473 - DNA, 19 bp, Artificial Sequence
  Synthetic
caagaggtgcgctgcccct

SEQ ID NO: 38474 - DNA, 20 bp, Artificial Sequence
  Synthetic
tggtggcggcttggttttgg

SEQ ID NO: 38475 - DNA, 18 bp, Artificial Sequence
  Synthetic
tgccgcacgagtgttggg

SEQ ID NO: 38476 - DNA, 22 bp, Artificial Sequence
  Synthetic
ggaaccttgcaaatgctcaccg

SEQ ID NO: 38477 - DNA, 22 bp, Artificial Sequence
  Synthetic
gaatgtcgggttcgcttgttgc

SEQ ID NO: 38478 - DNA, 22 bp, Artificial Sequence
  Synthetic
actacaggggcagggaaacaga

SEQ ID NO: 38479 - DNA, 20 bp, Artificial Sequence
  Synthetic
ggagctctctgggcagctgt

SEQ ID NO: 38480 - DNA, 20 bp, Artificial Sequence
  Synthetic
tgggtggatgacctgcaggc

SEQ ID NO: 38481 - DNA, 22 bp, Artificial Sequence
  Synthetic
atcctggagactgagtgtggct

SEQ ID NO: 38482 - DNA, 19 bp, Artificial Sequence
  Synthetic
cggcagggcggtgcatgtt

SEQ ID NO: 38483 - DNA, 21 bp, Artificial Sequence
  Synthetic
agtgtcaagaagggggtcggt

SEQ ID NO: 38484 - DNA, 20 bp, Artificial Sequence
  Synthetic
gaccctgggaagggaacgga

SEQ ID NO: 38485 - DNA, 19 bp, Artificial Sequence
  Synthetic
cgaggtgaggcgggctgtt

SEQ ID NO: 38486 - DNA, 22 bp, Artificial Sequence
  Synthetic
tactcatacgtctggtcggggc

SEQ ID NO: 38487 - DNA, 20 bp, Artificial Sequence
  Synthetic
gaagctgcaatcttcgcggc

SEQ ID NO: 38488 - DNA, 21 bp, Artificial Sequence
  Synthetic
gggaaaaagcgctggtggttg

SEQ ID NO: 38489 - DNA, 20 bp, Artificial Sequence
  Synthetic
tcaacaggagtgtgagcaga

SEQ ID NO: 38490 - DNA, 24 bp, Artificial Sequence
  Synthetic
atacctattgtgttttaaggcggg

SEQ ID NO: 38491 - DNA, 20 bp, Artificial Sequence
  Synthetic
gcgaatgcagtagcttggct

SEQ ID NO: 38492 - DNA, 20 bp, Artificial Sequence
  Synthetic
atcaagaagaggagggcgag

SEQ ID NO: 38493 - DNA, 21 bp, Artificial Sequence
  Synthetic
ccgttgactccacgtccagac

SEQ ID NO: 38494 - DNA, 21 bp, Artificial Sequence
  Synthetic
gcgatcaaggtcaccctccac

SEQ ID NO: 38495 - DNA, 20 bp, Artificial Sequence
  Synthetic
gggcggctaacacactgaaa

SEQ ID NO: 38496 - DNA, 22 bp, Artificial Sequence
  Synthetic
tttagaggttgccccagagcct

SEQ ID NO: 38497 - DNA, 20 bp, Artificial Sequence
  Synthetic
agggaattgggacgtccaca

SEQ ID NO: 38498 - DNA, 24 bp, Artificial Sequence
  Synthetic
acaggggacttttatttacatccc

SEQ ID NO: 38499 - DNA, 21 bp, Artificial Sequence
  Synthetic
ccttgcataggagagcattgg

SEQ ID NO: 38500 - DNA, 21 bp, Artificial Sequence
  Synthetic
taccaatttgcacttgggcag

SEQ ID NO: 38501 - DNA, 23 bp, Artificial Sequence
  Synthetic
ggatgcttaccgacagtattggt

SEQ ID NO: 38502 - DNA, 21 bp, Artificial Sequence
  Synthetic
ttggtggttggactacggcta

SEQ ID NO: 38503 - DNA, 21 bp, Artificial Sequence
  Synthetic
ggcaaccagaccaatcatcaa

SEQ ID NO: 38504 - DNA, 20 bp, Artificial Sequence
  Synthetic
ccgcacctagagcaggagat

SEQ ID NO: 38505 - DNA, 24 bp, Artificial Sequence
  Synthetic
gcaagcagaatttgatccaaatgc

SEQ ID NO: 38506 - DNA, 20 bp, Artificial Sequence
  Synthetic
aagccgtttcgatgtactgc

SEQ ID NO: 38507 - DNA, 25 bp, Artificial Sequence
  Synthetic
ttaaatgttacacctgcagatcctc

SEQ ID NO: 38508 - DNA, 22 bp, Artificial Sequence
  Synthetic
gattgctgtacctaccacctca

SEQ ID NO: 38509 - DNA, 25 bp, Artificial Sequence
  Synthetic
aaacaggttcaaatgtgtattgtgg

SEQ ID NO: 38510 - DNA, 22 bp, Artificial Sequence
  Synthetic
ggaacaggaacaggatacacca

SEQ ID NO: 38511 - DNA, 22 bp, Artificial Sequence
  Synthetic
agtcgttcaacaaacaagggtg

SEQ ID NO: 38512 - DNA, 25 bp, Artificial Sequence
  Synthetic
catagtgaatgcaccaaatcatgag

SEQ ID NO: 38513 - DNA, 24 bp, Artificial Sequence
  Synthetic
attggaatttctagcatggtggag

SEQ ID NO: 38514 - DNA, 21 bp, Artificial Sequence
  Synthetic
tggtggactattgcaagcaac

SEQ ID NO: 38515 - DNA, 23 bp, Artificial Sequence
  Synthetic
acgtgtaagcattgtcattgtcg

SEQ ID NO: 38516 - DNA, 24 bp, Artificial Sequence
  Synthetic
acttttggctatagaccttttggg

SEQ ID NO: 38517 - DNA, 24 bp, Artificial Sequence
  Synthetic
atgtagtttatttaggcaggccaa

SEQ ID NO: 38518 - DNA, 25 bp, Artificial Sequence
  Synthetic
acttaggtccacaagaaaaagatga

SEQ ID NO: 38519 - DNA, 21 bp, Artificial Sequence
  Synthetic
ctggagccagcttttagtcct

SEQ ID NO: 38520 - DNA, 22 bp, Artificial Sequence
  Synthetic
acgacgagaaagagaaccagcc

SEQ ID NO: 38521 - DNA, 24 bp, Artificial Sequence
  Synthetic
taaacccaagcagtagttctgttg

SEQ ID NO: 38522 - DNA, 25 bp, Artificial Sequence
  Synthetic
tatgacccagaatttgaacttcctc

SEQ ID NO: 38523 - DNA, 24 bp, Artificial Sequence
  Synthetic
cagaagcatcttaaatgttcccac

SEQ ID NO: 38524 - DNA, 20 bp, Artificial Sequence
  Synthetic
accatcacgtcctgttgctc

SEQ ID NO: 38525 - DNA, 25 bp, Artificial Sequence
  Synthetic
ccaggttgcattaggatcattaaac

SEQ ID NO: 38526 - DNA, 25 bp, Artificial Sequence
  Synthetic
agttcagtttgaattcacaaatccc

SEQ ID NO: 38527 - DNA, 25 bp, Artificial Sequence
  Synthetic
aaggggtattgaaattcaaaggggt

SEQ ID NO: 38528 - DNA, 25 bp, Artificial Sequence
  Synthetic
caggtttttatcttctttggctacc

SEQ ID NO: 38529 - DNA, 22 bp, Artificial Sequence
  Synthetic
gtttcctttacaaaaccacgcc

SEQ ID NO: 38530 - DNA, 19 bp, Artificial Sequence
  Synthetic
gggaacatcggggcgtacg

SEQ ID NO: 38531 - DNA, 21 bp, Artificial Sequence
  Synthetic
ccctctccaaggttccgttcg

SEQ ID NO: 38532 - DNA, 21 bp, Artificial Sequence
  Synthetic
tgtggcctcacctgaccaacc

SEQ ID NO: 38533 - DNA, 22 bp, Artificial Sequence
  Synthetic
atggtcatggcaagcttggagc

SEQ ID NO: 38534 - DNA, 22 bp, Artificial Sequence
  Synthetic
ctttgtgggaggagaacagccg

SEQ ID NO: 38535 - DNA, 19 bp, Artificial Sequence
  Synthetic
cgccaccccgtcgaccttt

SEQ ID NO: 38536 - DNA, 20 bp, Artificial Sequence
  Synthetic
tacatggcccggtacctgct

SEQ ID NO: 38537 - DNA, 19 bp, Artificial Sequence
  Synthetic
gccgccgagtcccaatgca

SEQ ID NO: 38538 - DNA, 19 bp, Artificial Sequence
  Synthetic
ccgcgaaggagaccgtcga

SEQ ID NO: 38539 - DNA, 22 bp, Artificial Sequence
  Synthetic
ttttgcggcccatttttgcacc

SEQ ID NO: 38540 - DNA, 19 bp, Artificial Sequence
  Synthetic
ggctgcttcgctggatggc

SEQ ID NO: 38541 - DNA, 20 bp, Artificial Sequence
  Synthetic
aacgtcaccagatgcgggtg

SEQ ID NO: 38542 - DNA, 19 bp, Artificial Sequence
  Synthetic
gctgacgtcgtctggggtg

SEQ ID NO: 38543 - DNA, 17 bp, Artificial Sequence
  Synthetic
agcttgcggatgcgcgt

SEQ ID NO: 38544 - DNA, 22 bp, Artificial Sequence
  Synthetic
tgcggttagaaagtcacgacgc

SEQ ID NO: 38545 - DNA, 19 bp, Artificial Sequence
  Synthetic
ggaggtggacgatcgcgca

SEQ ID NO: 38546 - DNA, 21 bp, Artificial Sequence
  Synthetic
ttctgttgtaccgcccctcga

SEQ ID NO: 38547 - DNA, 19 bp, Artificial Sequence
  Synthetic
atctacctcgcggcccagg

SEQ ID NO: 38548 - DNA, 19 bp, Artificial Sequence
  Synthetic
ccggggcttcggggtgaat

SEQ ID NO: 38549 - DNA, 20 bp, Artificial Sequence
  Synthetic
gggaaaccgcaacgtgaggt

SEQ ID NO: 38550 - DNA, 20 bp, Artificial Sequence
  Synthetic
ggcgatgtcggccgacgtaa

SEQ ID NO: 38551 - DNA, 21 bp, Artificial Sequence
  Synthetic
aacccaaacccgggatggagg

SEQ ID NO: 38552 - DNA, 19 bp, Artificial Sequence
  Synthetic
gcctggacgttgcgagcga

SEQ ID NO: 38553 - DNA, 19 bp, Artificial Sequence
  Synthetic
cagcagggcgtcgaactcg

SEQ ID NO: 38554 - DNA, 19 bp, Artificial Sequence
  Synthetic
cagggccgtgcctcccaaa

SEQ ID NO: 38555 - DNA, 21 bp, Artificial Sequence
  Synthetic
ccccaacacgatgtttgtgcc

SEQ ID NO: 38556 - DNA, 21 bp, Artificial Sequence
  Synthetic
cgtctttaacctcccccggga

SEQ ID NO: 38557 - DNA, 19 bp, Artificial Sequence
  Synthetic
tgcggccggctgtatgtgg

SEQ ID NO: 38558 - DNA, 22 bp, Artificial Sequence
  Synthetic
cgcgtactcctcgaagtacacg

SEQ ID NO: 38559 - DNA, 20 bp, Artificial Sequence
  Synthetic
tccacagggtcagctcgtga

SEQ ID NO: 38560 - DNA, 19 bp, Artificial Sequence
  Synthetic
catggtgcagaccgacggg

SEQ ID NO: 38561 - DNA, 20 bp, Artificial Sequence
  Synthetic
ttcagcagaaagcccagcgg

SEQ ID NO: 38562 - DNA, 19 bp, Artificial Sequence
  Synthetic
cgcgtgctgtcgtacctgt

SEQ ID NO: 38563 - DNA, 19 bp, Artificial Sequence
  Synthetic
aggaggccgtgctcctgga

SEQ ID NO: 38564 - DNA, 21 bp, Artificial Sequence
  Synthetic
ttctgccccccatcaaactcg

SEQ ID NO: 38565 - DNA, 20 bp, Artificial Sequence
  Synthetic
cacatacgcgcgctcgaacg

SEQ ID NO: 38566 - DNA, 18 bp, Artificial Sequence
  Synthetic
gcgtgcagctcgcgtttc

SEQ ID NO: 38567 - DNA, 19 bp, Artificial Sequence
  Synthetic
gcggggaagagcaggctgt

SEQ ID NO: 38568 - DNA, 20 bp, Artificial Sequence
  Synthetic
ggcctccaagcgatccagtg

SEQ ID NO: 38569 - DNA, 21 bp, Artificial Sequence
  Synthetic
ggtcacgatagatcgcgccag

SEQ ID NO: 38570 - DNA, 20 bp, Artificial Sequence
  Synthetic
ctatcgagggcgcttggtcg

SEQ ID NO: 38571 - DNA, 20 bp, Artificial Sequence
  Synthetic
caggtgtttaacccgggcca

SEQ ID NO: 38572 - DNA, 18 bp, Artificial Sequence
  Synthetic
aacgcggccagtgtcacg

SEQ ID NO: 38573 - DNA, 20 bp, Artificial Sequence
  Synthetic
gcaggtttttgccctcgcag

SEQ ID NO: 38574 - DNA, 20 bp, Artificial Sequence
  Synthetic
gggtccgcaaaacccactgg

SEQ ID NO: 38575 - DNA, 19 bp, Artificial Sequence
  Synthetic
acgggtcatccagcaggcg

SEQ ID NO: 38576 - DNA, 18 bp, Artificial Sequence
  Synthetic
cagcagtgctttgccgcc

SEQ ID NO: 38577 - DNA, 22 bp, Artificial Sequence
  Synthetic
gctgcaccgatgtatttacgcg

SEQ ID NO: 38578 - DNA, 19 bp, Artificial Sequence
  Synthetic
gcccacaagatggtggccc

SEQ ID NO: 38579 - DNA, 20 bp, Artificial Sequence
  Synthetic
tcgtcggacgaggacatgga

SEQ ID NO: 38580 - DNA, 20 bp, Artificial Sequence
  Synthetic
aaacggactccgcttgcgtg

SEQ ID NO: 38581 - DNA, 20 bp, Artificial Sequence
  Synthetic
gcataggttggggggtggtc

SEQ ID NO: 38582 - DNA, 20 bp, Artificial Sequence
  Synthetic
gctacgccttcgggaatggg

SEQ ID NO: 38583 - DNA, 19 bp, Artificial Sequence
  Synthetic
cgccgcgtttccaggtagg

SEQ ID NO: 38584 - DNA, 19 bp, Artificial Sequence
  Synthetic
cggaaacggatgcgtcggt

SEQ ID NO: 38585 - DNA, 19 bp, Artificial Sequence
  Synthetic
ggcgatgtgggttgctcgt

SEQ ID NO: 38586 - DNA, 18 bp, Artificial Sequence
  Synthetic
tggtggtgtttggggggc

SEQ ID NO: 38587 - DNA, 19 bp, Artificial Sequence
  Synthetic
cgggcttgcgtcgacggaa

SEQ ID NO: 38588 - DNA, 18 bp, Artificial Sequence
  Synthetic
cactcacggtgcggcgaa

SEQ ID NO: 38589 - DNA, 19 bp, Artificial Sequence
  Synthetic
tcccacaccacaccaccca

SEQ ID NO: 38590 - DNA, 19 bp, Artificial Sequence
  Synthetic
ggcagctcctaagcgccgt

SEQ ID NO: 38591 - DNA, 19 bp, Artificial Sequence
  Synthetic
caggcccaggtccacgttg

SEQ ID NO: 38592 - DNA, 19 bp, Artificial Sequence
  Synthetic
ccacacaccccccatgcca

SEQ ID NO: 38593 - DNA, 18 bp, Artificial Sequence
  Synthetic
acccgaaacggccaacgg

SEQ ID NO: 38594 - DNA, 19 bp, Artificial Sequence
  Synthetic
acggaccccttaacgcacg

SEQ ID NO: 38595 - DNA, 22 bp, Artificial Sequence
  Synthetic
ccccggcccccaataaagatcg

SEQ ID NO: 38596 - DNA, 22 bp, Artificial Sequence
  Synthetic
gacctgcttattctcggggagc

SEQ ID NO: 38597 - DNA, 20 bp, Artificial Sequence
  Synthetic
gccatagccgccgaagggac

SEQ ID NO: 38598 - DNA, 19 bp, Artificial Sequence
  Synthetic
taaaggacccggctcgcca

SEQ ID NO: 38599 - DNA, 19 bp, Artificial Sequence
  Synthetic
acacgcgcgtccttcttgt

SEQ ID NO: 38600 - DNA, 23 bp, Artificial Sequence
  Synthetic
caagctgaaccatgcaatcaaag

SEQ ID NO: 38601 - DNA, 25 bp, Artificial Sequence
  Synthetic
atacaacggcataataacagacact

SEQ ID NO: 38602 - DNA, 21 bp, Artificial Sequence
  Synthetic
gtgcagggataattggcatgg

SEQ ID NO: 38603 - DNA, 22 bp, Artificial Sequence
  Synthetic
atccaaatgggtggactggaac

SEQ ID NO: 38604 - DNA, 20 bp, Artificial Sequence
  Synthetic
gcccgtttctcctggctcag

SEQ ID NO: 38605 - DNA, 25 bp, Artificial Sequence
  Synthetic
agttatgtcaacactaatatgggcc

SEQ ID NO: 38606 - DNA, 22 bp, Artificial Sequence
  Synthetic
ccagccttcagagcaaacaccg

SEQ ID NO: 38607 - DNA, 20 bp, Artificial Sequence
  Synthetic
agtacacatcggggagacag

SEQ ID NO: 38608 - DNA, 20 bp, Artificial Sequence
  Synthetic
cacaaattggcgggacaagg

SEQ ID NO: 38609 - DNA, 20 bp, Artificial Sequence
  Synthetic
ttaacggtcctgagtcggtt

SEQ ID NO: 38610 - DNA, 25 bp, Artificial Sequence
  Synthetic
taataaagcttctcccttttgcagc

SEQ ID NO: 38611 - DNA, 22 bp, Artificial Sequence
  Synthetic
aaaaggtgtttgctatgctgca

SEQ ID NO: 38612 - DNA, 20 bp, Artificial Sequence
  Synthetic
gagggcattggaaaggtgtc

SEQ ID NO: 38613 - DNA, 24 bp, Artificial Sequence
  Synthetic
ataccctggctctgtttaatgaac

SEQ ID NO: 38614 - DNA, 25 bp, Artificial Sequence
  Synthetic
tctgaatataaagcaaaggaagcca

SEQ ID NO: 38615 - DNA, 22 bp, Artificial Sequence
  Synthetic
caggctatagaccaattggagc

SEQ ID NO: 38616 - DNA, 25 bp, Artificial Sequence
  Synthetic
cagagagcacatttgtagatatccc

SEQ ID NO: 38617 - DNA, 23 bp, Artificial Sequence
  Synthetic
ggatagatcaggagtgcctttgg

SEQ ID NO: 38618 - DNA, 25 bp, Artificial Sequence
  Synthetic
aatctggttgcaattttactgactc

SEQ ID NO: 38619 - DNA, 21 bp, Artificial Sequence
  Synthetic
gcagaggaggagttttgtccg

SEQ ID NO: 38620 - DNA, 20 bp, Artificial Sequence
  Synthetic
aggaagtggaagaccagcca

SEQ ID NO: 38621 - DNA, 23 bp, Artificial Sequence
  Synthetic
aagtacacctgttaaacctggga

SEQ ID NO: 38622 - DNA, 25 bp, Artificial Sequence
  Synthetic
tgacattgcttatttaagtaggccg

SEQ ID NO: 38623 - DNA, 20 bp, Artificial Sequence
  Synthetic
ctgaggagcagcagacgatt

SEQ ID NO: 38624 - DNA, 23 bp, Artificial Sequence
  Synthetic
taaggtacccaatgtacttcggg

SEQ ID NO: 38625 - DNA, 21 bp, Artificial Sequence
  Synthetic
ctggcagatcgagccctgaga

SEQ ID NO: 38626 - DNA, 21 bp, Artificial Sequence
  Synthetic
actcggctgagtgaaggcagt

SEQ ID NO: 38627 - DNA, 22 bp, Artificial Sequence
  Synthetic
tgagcccccgaactctaaatgc

SEQ ID NO: 38628 - DNA, 24 bp, Artificial Sequence
  Synthetic
gcaaaagtgtgtcagaaagtacaa

SEQ ID NO: 38629 - DNA, 20 bp, Artificial Sequence
  Synthetic
ggctgctggaagtgtggcaa

SEQ ID NO: 38630 - DNA, 25 bp, Artificial Sequence
  Synthetic
accactacatgaagattttaggcag

SEQ ID NO: 38631 - DNA, 21 bp, Artificial Sequence
  Synthetic
agagatcagctgtggaaagga

SEQ ID NO: 38632 - DNA, 23 bp, Artificial Sequence
  Synthetic
catgatgaacaagggatgtcagc

SEQ ID NO: 38633 - DNA, 20 bp, Artificial Sequence
  Synthetic
aaaccctacaacgagccctc

SEQ ID NO: 38634 - DNA, 23 bp, Artificial Sequence
  Synthetic
tagcagggttcaagggaatacca

SEQ ID NO: 38635 - DNA, 25 bp, Artificial Sequence
  Synthetic
atgctatgaggtttagatactgtgc

SEQ ID NO: 38636 - DNA, 20 bp, Artificial Sequence
  Synthetic
cggtttggaggcagatggag

SEQ ID NO: 38637 - DNA, 22 bp, Artificial Sequence
  Synthetic
ggcctgtgaatcaacagtaacc

SEQ ID NO: 38638 - DNA, 21 bp, Artificial Sequence
  Synthetic
atatgacatggcaggagtggg

SEQ ID NO: 38639 - DNA, 21 bp, Artificial Sequence
  Synthetic
atgggtgcgagtggatccaag

SEQ ID NO: 38640 - DNA, 22 bp, Artificial Sequence
  Synthetic
ccagagaaagaatggaaggcaa

SEQ ID NO: 38641 - DNA, 20 bp, Artificial Sequence
  Synthetic
ggctccacgcttgcttgctt

SEQ ID NO: 38642 - DNA, 22 bp, Artificial Sequence
  Synthetic
tggttaaaactgccactcaagg

SEQ ID NO: 38643 - DNA, 23 bp, Artificial Sequence
  Synthetic
tattgcctcaaaaagtgtggtgc

SEQ ID NO: 38644 - DNA, 22 bp, Artificial Sequence
  Synthetic
ctggtttcttggaaggaggatg

SEQ ID NO: 38645 - DNA, 21 bp, Artificial Sequence
  Synthetic
gtcaggctaggcagatggtgc

SEQ ID NO: 38646 - DNA, 21 bp, Artificial Sequence
  Synthetic
cacgtatcactgacagaccgt

SEQ ID NO: 38647 - DNA, 25 bp, Artificial Sequence
  Synthetic
tccatattttttgggtcctgtttcc

SEQ ID NO: 38648 - DNA, 20 bp, Artificial Sequence
  Synthetic
tggattacagttgggtcgcc

SEQ ID NO: 38649 - DNA, 25 bp, Artificial Sequence
  Synthetic
agagacaacggaaaattttatctgc

SEQ ID NO: 38650 - DNA, 22 bp, Artificial Sequence
  Synthetic
gatgtcacagagagttgtccag

SEQ ID NO: 38651 - DNA, 25 bp, Artificial Sequence
  Synthetic
atatgccagacacatgtttacaagg

SEQ ID NO: 38652 - DNA, 22 bp, Artificial Sequence
  Synthetic
taatagacacacctggaggagg

SEQ ID NO: 38653 - DNA, 20 bp, Artificial Sequence
  Synthetic
gttggtcttcccgcccaaat

SEQ ID NO: 38654 - DNA, 24 bp, Artificial Sequence
  Synthetic
cgtcttcagggcattcaaattgac

SEQ ID NO: 38655 - DNA, 23 bp, Artificial Sequence
  Synthetic
gagtagttggcgacagtattcct

SEQ ID NO: 38656 - DNA, 22 bp, Artificial Sequence
  Synthetic
tagctcgagtgaaccattttgc

SEQ ID NO: 38657 - DNA, 21 bp, Artificial Sequence
  Synthetic
cattggcttcactcctggaaa

SEQ ID NO: 38658 - DNA, 22 bp, Artificial Sequence
  Synthetic
aaagcaaccagaaggatgatcc

SEQ ID NO: 38659 - DNA, 22 bp, Artificial Sequence
  Synthetic
aaggtgctgtttcaaaactggg

SEQ ID NO: 38660 - DNA, 22 bp, Artificial Sequence
  Synthetic
aactactaccatttgcagcagc

SEQ ID NO: 38661 - DNA, 23 bp, Artificial Sequence
  Synthetic
ttctaatcctcggcaaagaagac

SEQ ID NO: 38662 - DNA, 22 bp, Artificial Sequence
  Synthetic
cggaattgacaaggaagcaatg

SEQ ID NO: 38663 - DNA, 24 bp, Artificial Sequence
  Synthetic
ggaactgctgcagattacaaaagc

SEQ ID NO: 38664 - DNA, 22 bp, Artificial Sequence
  Synthetic
agctgagagagaatgctgaaga

SEQ ID NO: 38665 - DNA, 25 bp, Artificial Sequence
  Synthetic
ataccaattgtgcaaagattttggg

SEQ ID NO: 38666 - DNA, 24 bp, Artificial Sequence
  Synthetic
cggtcagttaaacttgttgtcagt

SEQ ID NO: 38667 - DNA, 25 bp, Artificial Sequence
  Synthetic
agaacttgcaagcaacattgttagg

SEQ ID NO: 38668 - DNA, 25 bp, Artificial Sequence
  Synthetic
aaagcaactgtcaggcaaaatatgt

SEQ ID NO: 38669 - DNA, 21 bp, Artificial Sequence
  Synthetic
gtttacgcatagaagcagcct

SEQ ID NO: 38670 - DNA, 21 bp, Artificial Sequence
  Synthetic
cgacagtctttgcagccacca

SEQ ID NO: 38671 - DNA, 23 bp, Artificial Sequence
  Synthetic
taatagaccccccatatcccttg

SEQ ID NO: 38672 - DNA, 24 bp, Artificial Sequence
  Synthetic
ataagggttgcatctactacgtcc

SEQ ID NO: 38673 - DNA, 23 bp, Artificial Sequence
  Synthetic
cctcctccacagctgtatctact

SEQ ID NO: 38674 - DNA, 22 bp, Artificial Sequence
  Synthetic
gcacagatgaatatgtgcaacg

SEQ ID NO: 38675 - DNA, 22 bp, Artificial Sequence
  Synthetic
cgccctctggtactttagaaga

SEQ ID NO: 38676 - DNA, 25 bp, Artificial Sequence
  Synthetic
tttacatacataacatacacgccct

SEQ ID NO: 38677 - DNA, 20 bp, Artificial Sequence
  Synthetic
gggatccgccattagtcctt

SEQ ID NO: 38678 - DNA, 23 bp, Artificial Sequence
  Synthetic
aatcagcaacacaaatgaggttg

SEQ ID NO: 38679 - DNA, 21 bp, Artificial Sequence
  Synthetic
cgcagagaacaagtgtatgct

SEQ ID NO: 38680 - DNA, 23 bp, Artificial Sequence
  Synthetic
tcttagatgactgggagttagca

SEQ ID NO: 38681 - DNA, 23 bp, Artificial Sequence
  Synthetic
catttttgaaaccccacagtgac

SEQ ID NO: 38682 - DNA, 23 bp, Artificial Sequence
  Synthetic
gttatcggtcgtttttatggctg

SEQ ID NO: 38683 - DNA, 22 bp, Artificial Sequence
  Synthetic
cagcagaagccatggaagtcgc

SEQ ID NO: 38684 - DNA, 25 bp, Artificial Sequence
  Synthetic
ttaaatacggtttgaaaagagggcc

SEQ ID NO: 38685 - DNA, 20 bp, Artificial Sequence
  Synthetic
cacgtgatgctgaagctcag

SEQ ID NO: 38686 - DNA, 25 bp, Artificial Sequence
  Synthetic
cattagagttgccaaaatcggaaat

SEQ ID NO: 38687 - DNA, 24 bp, Artificial Sequence
  Synthetic
aatgtcttccactagataggagca

SEQ ID NO: 38688 - DNA, 22 bp, Artificial Sequence
  Synthetic
catatcatgacgaaaggggcat

SEQ ID NO: 38689 - DNA, 21 bp, Artificial Sequence
  Synthetic
atgctggtaatgagctggaga

SEQ ID NO: 38690 - DNA, 20 bp, Artificial Sequence
  Synthetic
gccgggattattagccatgc

SEQ ID NO: 38691 - DNA, 20 bp, Artificial Sequence
  Synthetic
tgagtgtcccgggaaaacac

SEQ ID NO: 38692 - DNA, 20 bp, Artificial Sequence
  Synthetic
gtaaacgagctggccatcag

SEQ ID NO: 38693 - DNA, 25 bp, Artificial Sequence
  Synthetic
ggctatgtcaagatgttttgtaagg

SEQ ID NO: 38694 - DNA, 20 bp, Artificial Sequence
  Synthetic
gcaagtgctgtgtgtcctag

SEQ ID NO: 38695 - DNA, 20 bp, Artificial Sequence
  Synthetic
caggattgcatcgttggcat

SEQ ID NO: 38696 - DNA, 25 bp, Artificial Sequence
  Synthetic
aatagtgttactgatgagtgtcgtc

SEQ ID NO: 38697 - DNA, 20 bp, Artificial Sequence
  Synthetic
ttggacatcactgatgctgc

SEQ ID NO: 38698 - DNA, 21 bp, Artificial Sequence
  Synthetic
gctgtggtggtattttggcag

SEQ ID NO: 38699 - DNA, 21 bp, Artificial Sequence
  Synthetic
gttgccaagatgattgaacgc

SEQ ID NO: 38700 - DNA, 21 bp, Artificial Sequence
  Synthetic
acccaagccttacagggtaga

SEQ ID NO: 38701 - DNA, 20 bp, Artificial Sequence
  Synthetic
ttgaaccgtgtgctcagtct

SEQ ID NO: 38702 - DNA, 22 bp, Artificial Sequence
  Synthetic
gtgttttggctttgacaagtgg

SEQ ID NO: 38703 - DNA, 25 bp, Artificial Sequence
  Synthetic
tgcttggtactttcttgctatgttg

SEQ ID NO: 38704 - DNA, 23 bp, Artificial Sequence
  Synthetic
catctggctttgtggagaaatgt

SEQ ID NO: 38705 - DNA, 22 bp, Artificial Sequence
  Synthetic
atgctatgatggttgtgctcaa

SEQ ID NO: 38706 - DNA, 22 bp, Artificial Sequence
  Synthetic
acatggtggcttaaaggtgaaa

SEQ ID NO: 38707 - DNA, 22 bp, Artificial Sequence
  Synthetic
actgctcaagagttattgctgg

SEQ ID NO: 38708 - DNA, 22 bp, Artificial Sequence
  Synthetic
acaggaaggtgttttacgcatt

SEQ ID NO: 38709 - DNA, 25 bp, Artificial Sequence
  Synthetic
aagtgtacacgtattattcctgcac

SEQ ID NO: 38710 - DNA, 25 bp, Artificial Sequence
  Synthetic
aataaaggttcatttgttggtgctg

SEQ ID NO: 38711 - DNA, 25 bp, Artificial Sequence
  Synthetic
agaggatgtttgtacttgttacgat

SEQ ID NO: 38712 - DNA, 24 bp, Artificial Sequence
  Synthetic
aggaactgctgttcttaaaaggtg

SEQ ID NO: 38713 - DNA, 23 bp, Artificial Sequence
  Synthetic
cctaagacagttcgtgagtttgt

SEQ ID NO: 38714 - DNA, 20 bp, Artificial Sequence
  Synthetic
ttcaaacctcagagtggcgg

SEQ ID NO: 38715 - DNA, 25 bp, Artificial Sequence
  Synthetic
tttgtctataccttccaattggacc

SEQ ID NO: 38716 - DNA, 22 bp, Artificial Sequence
  Synthetic
cacaagtggtagtagagtggct

SEQ ID NO: 38717 - DNA, 25 bp, Artificial Sequence
  Synthetic
ttgactaagtacactgaagttcgtg

SEQ ID NO: 38718 - DNA, 21 bp, Artificial Sequence
  Synthetic
acgtattcctaccatggcaga

SEQ ID NO: 38719 - DNA, 21 bp, Artificial Sequence
  Synthetic
acattgcaacttgtgtctgct

SEQ ID NO: 38720 - DNA, 21 bp, Artificial Sequence
  Synthetic
ctggctctacaagacatggga

SEQ ID NO: 38721 - DNA, 25 bp, Artificial Sequence
  Synthetic
tgtaatagaacagtttatggcccca

SEQ ID NO: 38722 - DNA, 20 bp, Artificial Sequence
  Synthetic
gcagtgagctctcccatgag

SEQ ID NO: 38723 - DNA, 20 bp, Artificial Sequence
  Synthetic
ttgtcacccaagctgcattt

SEQ ID NO: 38724 - DNA, 20 bp, Artificial Sequence
  Synthetic
ttggaagtgcaggtgttgtg

SEQ ID NO: 38725 - DNA, 21 bp, Artificial Sequence
  Synthetic
accagtgcgtgatgaagtttc

SEQ ID NO: 38726 - DNA, 20 bp, Artificial Sequence
  Synthetic
ttcggacgtgcatagaccac

SEQ ID NO: 38727 - DNA, 22 bp, Artificial Sequence
  Synthetic
aataggcagcagctagaagagg

SEQ ID NO: 38728 - DNA, 22 bp, Artificial Sequence
  Synthetic
tgtgagtgcaacgcaaaatggg

SEQ ID NO: 38729 - DNA, 20 bp, Artificial Sequence
  Synthetic
gcaggaggcagacacctttg

SEQ ID NO: 38730 - DNA, 24 bp, Artificial Sequence
  Synthetic
aaagccatgccatatacaaagtgg

SEQ ID NO: 38731 - DNA, 21 bp, Artificial Sequence
  Synthetic
ggttacaagctgaggctaggg

SEQ ID NO: 38732 - DNA, 21 bp, Artificial Sequence
  Synthetic
ctttgggggcttgggtatagg

SEQ ID NO: 38733 - DNA, 20 bp, Artificial Sequence
  Synthetic
ctgccaccgatggtacagtt

SEQ ID NO: 38734 - DNA, 20 bp, Artificial Sequence
  Synthetic
agcattacctcctggtgctg

SEQ ID NO: 38735 - DNA, 20 bp, Artificial Sequence
  Synthetic
tttggaggcttcgagggttg

SEQ ID NO: 38736 - DNA, 25 bp, Artificial Sequence
  Synthetic
ggtttattgattctttggctacccg

SEQ ID NO: 38737 - DNA, 20 bp, Artificial Sequence
  Synthetic
tagaagccggccctccttcc

SEQ ID NO: 38738 - DNA, 18 bp, Artificial Sequence
  Synthetic
tttgcagagcaccccggc

SEQ ID NO: 38739 - DNA, 20 bp, Artificial Sequence
  Synthetic
gagacccgagtggcccggat

SEQ ID NO: 38740 - DNA, 21 bp, Artificial Sequence
  Synthetic
tccgtagaagggtcctcgtcc

SEQ ID NO: 38741 - DNA, 21 bp, Artificial Sequence
  Synthetic
cagagggggccaagaacccag

SEQ ID NO: 38742 - DNA, 22 bp, Artificial Sequence
  Synthetic
actctccactcccagtccatgt

SEQ ID NO: 38743 - DNA, 22 bp, Artificial Sequence
  Synthetic
aaagactcgtggtcggaatccg

SEQ ID NO: 38744 - DNA, 19 bp, Artificial Sequence
  Synthetic
tggcccgtccctcttgtcc

SEQ ID NO: 38745 - DNA, 19 bp, Artificial Sequence
  Synthetic
ttctcccgctgggcccagt

SEQ ID NO: 38746 - DNA, 22 bp, Artificial Sequence
  Synthetic
cccgaaatagggccttgccatc

SEQ ID NO: 38747 - DNA, 21 bp, Artificial Sequence
  Synthetic
tatccaaccggcagtggagga

SEQ ID NO: 38748 - DNA, 21 bp, Artificial Sequence
  Synthetic
gcagggatcgcagtctctccc

SEQ ID NO: 38749 - DNA, 20 bp, Artificial Sequence
  Synthetic
gacaaaggggggcactgagg

SEQ ID NO: 38750 - DNA, 20 bp, Artificial Sequence
  Synthetic
gtgcgggcccctgtagatgg

SEQ ID NO: 38751 - DNA, 22 bp, Artificial Sequence
  Synthetic
tatctccgttccagccctgtca

SEQ ID NO: 38752 - DNA, 19 bp, Artificial Sequence
  Synthetic
ggcacgaggtggtgggtct

SEQ ID NO: 38753 - DNA, 19 bp, Artificial Sequence
  Synthetic
accaccgcctcctcctcct

SEQ ID NO: 38754 - DNA, 21 bp, Artificial Sequence
  Synthetic
ccgccgtcgtgctgtatctca

SEQ ID NO: 38755 - DNA, 21 bp, Artificial Sequence
  Synthetic
acctgtttgaccccaaggacg

SEQ ID NO: 38756 - DNA, 21 bp, Artificial Sequence
  Synthetic
tttgaaggaggcctgcaacgc

SEQ ID NO: 38757 - DNA, 20 bp, Artificial Sequence
  Synthetic
agcaacaccgcactggagag

SEQ ID NO: 38758 - DNA, 20 bp, Artificial Sequence
  Synthetic
gacccaggcgacgagatcca

SEQ ID NO: 38759 - DNA, 22 bp, Artificial Sequence
  Synthetic
tgctcagccaggtaagtctccc

SEQ ID NO: 38760 - DNA, 20 bp, Artificial Sequence
  Synthetic
atggacgcagcgtggagttg

SEQ ID NO: 38761 - DNA, 21 bp, Artificial Sequence
  Synthetic
gttgtggtcttcatcgggcgc

SEQ ID NO: 38762 - DNA, 21 bp, Artificial Sequence
  Synthetic
gcaatctcggctgtttgtact

SEQ ID NO: 38763 - DNA, 21 bp, Artificial Sequence
  Synthetic
gtgaccgtctggctcgtttgc

SEQ ID NO: 38764 - DNA, 22 bp, Artificial Sequence
  Synthetic
tttgtcaatccatggcaggccc

SEQ ID NO: 38765 - DNA, 22 bp, Artificial Sequence
  Synthetic
acgctaggatgtgatgagggca

SEQ ID NO: 38766 - DNA, 19 bp, Artificial Sequence
  Synthetic
gccaccggaaacagctgcc

SEQ ID NO: 38767 - DNA, 21 bp, Artificial Sequence
  Synthetic
cctcaggggccaagcaaaacc

SEQ ID NO: 38768 - DNA, 22 bp, Artificial Sequence
  Synthetic
gccagagactcccgagtagagc

SEQ ID NO: 38769 - DNA, 22 bp, Artificial Sequence
  Synthetic
aaaggcgctatagacggttggg

SEQ ID NO: 38770 - DNA, 20 bp, Artificial Sequence
  Synthetic
acggtgaccttcgacagccc

SEQ ID NO: 38771 - DNA, 21 bp, Artificial Sequence
  Synthetic
tgcaaaaagtaagcctgcgcg

SEQ ID NO: 38772 - DNA, 22 bp, Artificial Sequence
  Synthetic
tacgtcctcgtgagtctgctgg

SEQ ID NO: 38773 - DNA, 21 bp, Artificial Sequence
  Synthetic
gctttggcagaccacctgtgc

SEQ ID NO: 38774 - DNA, 19 bp, Artificial Sequence
  Synthetic
accgccacgggaatctcca

SEQ ID NO: 38775 - DNA, 19 bp, Artificial Sequence
  Synthetic
cgcagtgacgctcttcgca

SEQ ID NO: 38776 - DNA, 19 bp, Artificial Sequence
  Synthetic
ggagctctgccgggttgac

SEQ ID NO: 38777 - DNA, 20 bp, Artificial Sequence
  Synthetic
ctgggaccgtttggacaccc

SEQ ID NO: 38778 - DNA, 19 bp, Artificial Sequence
  Synthetic
ccactcttgcctcggcgct

SEQ ID NO: 38779 - DNA, 19 bp, Artificial Sequence
  Synthetic
cgatgccaccccctatgcc

SEQ ID NO: 38780 - DNA, 20 bp, Artificial Sequence
  Synthetic
ttccatgacagtcccgttgg

SEQ ID NO: 38781 - DNA, 19 bp, Artificial Sequence
  Synthetic
ggggccatgctcagcagct

SEQ ID NO: 38782 - DNA, 21 bp, Artificial Sequence
  Synthetic
ccctgggtagtcacgttcagc

SEQ ID NO: 38783 - DNA, 21 bp, Artificial Sequence
  Synthetic
ggctaacctcagcgcgtactc

SEQ ID NO: 38784 - DNA, 21 bp, Artificial Sequence
  Synthetic
tactaaactcgcgcccatggg

SEQ ID NO: 38785 - DNA, 19 bp, Artificial Sequence
  Synthetic
ggtgggacaggtgtgccca

SEQ ID NO: 38786 - DNA, 21 bp, Artificial Sequence
  Synthetic
tcaagagccagctccctctga

SEQ ID NO: 38787 - DNA, 21 bp, Artificial Sequence
  Synthetic
gggtcactggcttatgcgtgg

SEQ ID NO: 38788 - DNA, 20 bp, Artificial Sequence
  Synthetic
actcgtcctggctggtgacg

SEQ ID NO: 38789 - DNA, 20 bp, Artificial Sequence
  Synthetic
gaatcttcgccagccccccg

SEQ ID NO: 38790 - DNA, 22 bp, Artificial Sequence
  Synthetic
gttgaaaagcagagctccccca

SEQ ID NO: 38791 - DNA, 19 bp, Artificial Sequence
  Synthetic
caaacaggctccgggtggt

SEQ ID NO: 38792 - DNA, 19 bp, Artificial Sequence
  Synthetic
gtcctttggcgcggatcct

SEQ ID NO: 38793 - DNA, 19 bp, Artificial Sequence
  Synthetic
gatgaggccggtgatgcgg

SEQ ID NO: 38794 - DNA, 21 bp, Artificial Sequence
  Synthetic
cagggtctcgctctgttgcgc

SEQ ID NO: 38795 - DNA, 19 bp, Artificial Sequence
  Synthetic
tgtagaggcgcgggtctgg

SEQ ID NO: 38796 - DNA, 19 bp, Artificial Sequence
  Synthetic
cgagacagccgctccagca

SEQ ID NO: 38797 - DNA, 18 bp, Artificial Sequence
  Synthetic
gtcggcaaacaggggcca

SEQ ID NO: 38798 - DNA, 19 bp, Artificial Sequence
  Synthetic
ggctggcaaaggcaggtct

SEQ ID NO: 38799 - DNA, 19 bp, Artificial Sequence
  Synthetic
gctaagggtcggcgggtga

SEQ ID NO: 38800 - DNA, 25 bp, Artificial Sequence
  Synthetic
tttgcaatgtgtattttgtaagcgt

SEQ ID NO: 38801 - DNA, 23 bp, Artificial Sequence
  Synthetic
gatagtgaggctgaagaagagga

SEQ ID NO: 38802 - DNA, 21 bp, Artificial Sequence
  Synthetic
aggatgaatcaggccgatctg

SEQ ID NO: 38803 - DNA, 20 bp, Artificial Sequence
  Synthetic
tcgctctccaccatctcttc

SEQ ID NO: 38804 - DNA, 22 bp, Artificial Sequence
  Synthetic
tactaactagagcccgccattt

SEQ ID NO: 38805 - DNA, 21 bp, Artificial Sequence
  Synthetic
gtcagtacaacgatcgccttt

SEQ ID NO: 38806 - DNA, 22 bp, Artificial Sequence
  Synthetic
agtgctcgagaagaatgtgaca

SEQ ID NO: 38807 - DNA, 20 bp, Artificial Sequence
  Synthetic
gtccggcatcatcacctcaa

SEQ ID NO: 38808 - DNA, 21 bp, Artificial Sequence
  Synthetic
cagttcactggtgcttttggt

SEQ ID NO: 38809 - DNA, 25 bp, Artificial Sequence
  Synthetic
cgtctgcacagttagaatttacaca

SEQ ID NO: 38810 - DNA, 22 bp, Artificial Sequence
  Synthetic
ccagcaagagagtgaggaaagc

SEQ ID NO: 38811 - DNA, 22 bp, Artificial Sequence
  Synthetic
atatgcaaagctggctgaaaca

SEQ ID NO: 38812 - DNA, 23 bp, Artificial Sequence
  Synthetic
tctgagtgatcaagaagacgagg

SEQ ID NO: 38813 - DNA, 23 bp, Artificial Sequence
  Synthetic
gctaccagtgaacagaaagctaa

SEQ ID NO: 38814 - DNA, 19 bp, Artificial Sequence
  Synthetic
cccacgaccaggtcccagt

SEQ ID NO: 38815 - DNA, 20 bp, Artificial Sequence
  Synthetic
ctgacccaagccctcctatg

SEQ ID NO: 38816 - DNA, 21 bp, Artificial Sequence
  Synthetic
tcgggttagtagactaggccg

SEQ ID NO: 38817 - DNA, 22 bp, Artificial Sequence
  Synthetic
actcggtggactcgttatttgg

SEQ ID NO: 38818 - DNA, 22 bp, Artificial Sequence
  Synthetic
ggaacaaaaccaaaatcacggc

SEQ ID NO: 38819 - DNA, 20 bp, Artificial Sequence
  Synthetic
tttgagcaagtttggggcct

SEQ ID NO: 38820 - DNA, 20 bp, Artificial Sequence
  Synthetic
aagggttgattcgtgctgtc

SEQ ID NO: 38821 - DNA, 20 bp, Artificial Sequence
  Synthetic
gctcatgataagcggcagtc

SEQ ID NO: 38822 - DNA, 21 bp, Artificial Sequence
  Synthetic
gagcgtctctcttatctggga

SEQ ID NO: 38823 - DNA, 20 bp, Artificial Sequence
  Synthetic
atttctttggtatgcggggc

SEQ ID NO: 38824 - DNA, 24 bp, Artificial Sequence
  Synthetic
ttatcaacgtaggagttgggaagc

SEQ ID NO: 38825 - DNA, 22 bp, Artificial Sequence
  Synthetic
aacgcttccaagacaagagatc

SEQ ID NO: 38826 - DNA, 22 bp, Artificial Sequence
  Synthetic
gccattgcctcatcgatactgt

SEQ ID NO: 38827 - DNA, 21 bp, Artificial Sequence
  Synthetic
catttgcacacctacccagag

SEQ ID NO: 38828 - DNA, 20 bp, Artificial Sequence
  Synthetic
ctagctgccctcttggatgc

SEQ ID NO: 38829 - DNA, 22 bp, Artificial Sequence
  Synthetic
cattcggaaaaatcactcccca

SEQ ID NO: 38830 - DNA, 22 bp, Artificial Sequence
  Synthetic
acactttgattctgcctgttcc

SEQ ID NO: 38831 - DNA, 20 bp, Artificial Sequence
  Synthetic
cgactacggtgactacagct

SEQ ID NO: 38832 - DNA, 22 bp, Artificial Sequence
  Synthetic
agcccacaaccaaatacacatt

SEQ ID NO: 38833 - DNA, 22 bp, Artificial Sequence
  Synthetic
ttttacgcacaatgaacccaga

SEQ ID NO: 38834 - DNA, 20 bp, Artificial Sequence
  Synthetic
tttccctctgccctgatgtt

SEQ ID NO: 38835 - DNA, 25 bp, Artificial Sequence
  Synthetic
aatctcagaaatgctagaaagcctt

SEQ ID NO: 38836 - DNA, 20 bp, Artificial Sequence
  Synthetic
tttctgagcctccacgcatt

SEQ ID NO: 38837 - DNA, 25 bp, Artificial Sequence
  Synthetic
aactcttctatttcagaatcagcca

SEQ ID NO: 38838 - DNA, 22 bp, Artificial Sequence
  Synthetic
aaagataaaggcccctcacaac

SEQ ID NO: 38839 - DNA, 22 bp, Artificial Sequence
  Synthetic
gcctgagtcaataagacaccca

SEQ ID NO: 38840 - DNA, 22 bp, Artificial Sequence
  Synthetic
ggaactccaggagctagtatcg

SEQ ID NO: 38841 - DNA, 22 bp, Artificial Sequence
  Synthetic
cgcatcaatgccatcaaaagca

SEQ ID NO: 38842 - DNA, 23 bp, Artificial Sequence
  Synthetic
actgagctgcaactaataaacga

SEQ ID NO: 38843 - DNA, 24 bp, Artificial Sequence
  Synthetic
tccttttccatgacttgtttcaca

SEQ ID NO: 38844 - DNA, 21 bp, Artificial Sequence
  Synthetic
cacagtctatcgagtggacgt

SEQ ID NO: 38845 - DNA, 20 bp, Artificial Sequence
  Synthetic
tcatgcagtgcttgggctag

SEQ ID NO: 38846 - DNA, 21 bp, Artificial Sequence
  Synthetic
cttagatcacaacgcgatggt

SEQ ID NO: 38847 - DNA, 20 bp, Artificial Sequence
  Synthetic
agcccgtttatgctgttcag

SEQ ID NO: 38848 - DNA, 22 bp, Artificial Sequence
  Synthetic
tggctcaatttccaagcaaacg

SEQ ID NO: 38849 - DNA, 21 bp, Artificial Sequence
  Synthetic
aaccggagcaacctctttacg

SEQ ID NO: 38850 - DNA, 20 bp, Artificial Sequence
  Synthetic
ctcccacagaagggtagggt

SEQ ID NO: 38851 - DNA, 22 bp, Artificial Sequence
  Synthetic
tccatcattgcttggatgttgc

SEQ ID NO: 38852 - DNA, 23 bp, Artificial Sequence
  Synthetic
aagtaggaagatttgaactcgcc

SEQ ID NO: 38853 - DNA, 25 bp, Artificial Sequence
  Synthetic
atccgtgtcaataaatttgcgattg

SEQ ID NO: 38854 - DNA, 21 bp, Artificial Sequence
  Synthetic
atcctctttccagagtctgca

SEQ ID NO: 38855 - DNA, 22 bp, Artificial Sequence
  Synthetic
gccttcatctgagaaaagctga

SEQ ID NO: 38856 - DNA, 24 bp, Artificial Sequence
  Synthetic
actttcagggattaactctggaac

SEQ ID NO: 38857 - DNA, 22 bp, Artificial Sequence
  Synthetic
gcaaacgtcctagttgctatgc

SEQ ID NO: 38858 - DNA, 25 bp, Artificial Sequence
  Synthetic
acatatcatcgaacaaatcattcgc

SEQ ID NO: 38859 - DNA, 20 bp, Artificial Sequence
  Synthetic
ttgccaatgccgttctcatc

SEQ ID NO: 38860 - DNA, 22 bp, Artificial Sequence
  Synthetic
ctatgggattcggatacaacgc

SEQ ID NO: 38861 - DNA, 21 bp, Artificial Sequence
  Synthetic
ccgcaagacaaccattcaact

SEQ ID NO: 38862 - DNA, 23 bp, Artificial Sequence
  Synthetic
agctcatgacgatccataacagt

SEQ ID NO: 38863 - DNA, 21 bp, Artificial Sequence
  Synthetic
gtgcaatctgaccaacaagcc

SEQ ID NO: 38864 - DNA, 21 bp, Artificial Sequence
  Synthetic
acgtaaacctattgcacgcac

SEQ ID NO: 38865 - DNA, 22 bp, Artificial Sequence
  Synthetic
aatagccccatcgtcataacca

SEQ ID NO: 38866 - DNA, 21 bp, Artificial Sequence
  Synthetic
gcgataggctttcctgaaggg

SEQ ID NO: 38867 - DNA, 20 bp, Artificial Sequence
  Synthetic
ccacgttcatcaactcgtgc

SEQ ID NO: 38868 - DNA, 25 bp, Artificial Sequence
  Synthetic
agatttctatgccttttctggtcat

SEQ ID NO: 38869 - DNA, 21 bp, Artificial Sequence
  Synthetic
tctcgaggaggatttcaaggg

SEQ ID NO: 38870 - DNA, 21 bp, Artificial Sequence
  Synthetic
ggggagagcagcaggttttac

SEQ ID NO: 38871 - DNA, 20 bp, Artificial Sequence
  Synthetic
gaggttccgaggtgaagtct

SEQ ID NO: 38872 - DNA, 21 bp, Artificial Sequence
  Synthetic
tttttggcatcagcaggagtt

SEQ ID NO: 38873 - DNA, 22 bp, Artificial Sequence
  Synthetic
tttttgctccacccaatccttg

SEQ ID NO: 38874 - DNA, 22 bp, Artificial Sequence
  Synthetic
tcatcaaggtggccattcttac

SEQ ID NO: 38875 - DNA, 22 bp, Artificial Sequence
  Synthetic
tgatctcttgaatggcagacgt

SEQ ID NO: 38876 - DNA, 21 bp, Artificial Sequence
  Synthetic
ggtggagcaagccttcttaaa

SEQ ID NO: 38877 - DNA, 20 bp, Artificial Sequence
  Synthetic
agggaaacggcagcaaatcc

SEQ ID NO: 38878 - DNA, 20 bp, Artificial Sequence
  Synthetic
ttgcgccgataataaacggg

SEQ ID NO: 38879 - DNA, 21 bp, Artificial Sequence
  Synthetic
ttttcttgattcctgggcctg

SEQ ID NO: 38880 - DNA, 24 bp, Artificial Sequence
  Synthetic
agaaacacgatgattgtagcaact

SEQ ID NO: 38881 - DNA, 21 bp, Artificial Sequence
  Synthetic
aatcagaggctgcaagtacca

SEQ ID NO: 38882 - DNA, 23 bp, Artificial Sequence
  Synthetic
acagaacgatatgaaaacgcgtt

SEQ ID NO: 38883 - DNA, 24 bp, Artificial Sequence
  Synthetic
ttacggatctaactttgttggagg

SEQ ID NO: 38884 - DNA, 20 bp, Artificial Sequence
  Synthetic
cagcagaaaaagcagggctg

SEQ ID NO: 38885 - DNA, 24 bp, Artificial Sequence
  Synthetic
tttgcctgaagatctggaaagttc

SEQ ID NO: 38886 - DNA, 21 bp, Artificial Sequence
  Synthetic
catcgcgatcatttcaaacgc

SEQ ID NO: 38887 - DNA, 20 bp, Artificial Sequence
  Synthetic
tagatcaggctggttcgctc

SEQ ID NO: 38888 - DNA, 20 bp, Artificial Sequence
  Synthetic
agaattgtttggggggctcc

SEQ ID NO: 38889 - DNA, 20 bp, Artificial Sequence
  Synthetic
gcgaagatcccccagcttta

SEQ ID NO: 38890 - DNA, 21 bp, Artificial Sequence
  Synthetic
ccaggatcttcgatcatgcct

SEQ ID NO: 38891 - DNA, 20 bp, Artificial Sequence
  Synthetic
taaacagtccgtcttcgcca

SEQ ID NO: 38892 - DNA, 25 bp, Artificial Sequence
  Synthetic
aaacacaggctattgttatccttga

SEQ ID NO: 38893 - DNA, 23 bp, Artificial Sequence
  Synthetic
actcccatttctatccaagggat

SEQ ID NO: 38894 - DNA, 20 bp, Artificial Sequence
  Synthetic
gggttgacgcgaatacaagg

SEQ ID NO: 38895 - DNA, 22 bp, Artificial Sequence
  Synthetic
aaaaagctctcggttgctaact

SEQ ID NO: 38896 - DNA, 20 bp, Artificial Sequence
  Synthetic
ggcgctcttattgtcgagga

SEQ ID NO: 38897 - DNA, 21 bp, Artificial Sequence
  Synthetic
tcttcttctatgcctggtgct

SEQ ID NO: 38898 - DNA, 20 bp, Artificial Sequence
  Synthetic
taccagcatggagagcgtgt

SEQ ID NO: 38899 - DNA, 20 bp, Artificial Sequence
  Synthetic
agctgggctgactcacatga

SEQ ID NO: 38900 - DNA, 22 bp, Artificial Sequence
  Synthetic
cactaatcaacagagggcctct

SEQ ID NO: 38901 - DNA, 23 bp, Artificial Sequence
  Synthetic
cattcatatcatgctcccccttg

SEQ ID NO: 38902 - DNA, 25 bp, Artificial Sequence
  Synthetic
atgagggaagaatatcgaaaggaac

SEQ ID NO: 38903 - DNA, 25 bp, Artificial Sequence
  Synthetic
ccacggaagaaaaaagaatgtttga

SEQ ID NO: 38904 - DNA, 21 bp, Artificial Sequence
  Synthetic
agacaccccaacaatgcaatg

SEQ ID NO: 38905 - DNA, 21 bp, Artificial Sequence
  Synthetic
tatcacaatcagggtgggtga

SEQ ID NO: 38906 - DNA, 20 bp, Artificial Sequence
  Synthetic
agcagcttgggcttagcaat

SEQ ID NO: 38907 - DNA, 22 bp, Artificial Sequence
  Synthetic
tacaacaggatgggaacagtga

SEQ ID NO: 38908 - DNA, 23 bp, Artificial Sequence
  Synthetic
gtcagaaaatcaggaggaggagc

SEQ ID NO: 38909 - DNA, 20 bp, Artificial Sequence
  Synthetic
ggacagcggacttgagcttt

SEQ ID NO: 38910 - DNA, 25 bp, Artificial Sequence
  Synthetic
taacaacgaaattttgtttgctcct

SEQ ID NO: 38911 - DNA, 21 bp, Artificial Sequence
  Synthetic
aggagatcacgatcgcggtca

SEQ ID NO: 38912 - DNA, 25 bp, Artificial Sequence
  Synthetic
taaggtatacttacccccttcaaca

SEQ ID NO: 38913 - DNA, 23 bp, Artificial Sequence
  Synthetic
cttaccatgtgctgaaaagcaac

SEQ ID NO: 38914 - DNA, 20 bp, Artificial Sequence
  Synthetic
atatgtttgtgcgcggtggt

SEQ ID NO: 38915 - DNA, 21 bp, Artificial Sequence
  Synthetic
acgtgttgtatcctaggcagt

SEQ ID NO: 38916 - DNA, 23 bp, Artificial Sequence
  Synthetic
ggtgctacttcaagatgctttgc

SEQ ID NO: 38917 - DNA, 20 bp, Artificial Sequence
  Synthetic
tgcaccacttgtggtcatgt

SEQ ID NO: 38918 - DNA, 24 bp, Artificial Sequence
  Synthetic
cagatgtgtggcataaacaattgc

SEQ ID NO: 38919 - DNA, 23 bp, Artificial Sequence
  Synthetic
tgatgatcatgttggactcttgg

SEQ ID NO: 38920 - DNA, 21 bp, Artificial Sequence
  Synthetic
gccttgtgttgctagtgaaca

SEQ ID NO: 38921 - DNA, 23 bp, Artificial Sequence
  Synthetic
ggtggttatgttgctgattttgc

SEQ ID NO: 38922 - DNA, 20 bp, Artificial Sequence
  Synthetic
ctgatgcgagaacacagggt

SEQ ID NO: 38923 - DNA, 24 bp, Artificial Sequence
  Synthetic
taatgtcacgaagcataagtgtga

SEQ ID NO: 38924 - DNA, 22 bp, Artificial Sequence
  Synthetic
atggcttgaatttcgttctggc

SEQ ID NO: 38925 - DNA, 25 bp, Artificial Sequence
  Synthetic
tgccaaagaaaccaaagaaatcaac

SEQ ID NO: 38926 - DNA, 22 bp, Artificial Sequence
  Synthetic
ctttctgctgatggagtgcagt

SEQ ID NO: 38927 - DNA, 23 bp, Artificial Sequence
  Synthetic
gtgtctttggaaacactgttggc

SEQ ID NO: 38928 - DNA, 25 bp, Artificial Sequence
  Synthetic
tgctgtgaatgtcttgtatttcaca

SEQ ID NO: 38929 - DNA, 23 bp, Artificial Sequence
  Synthetic
cgtcttgcttaattgcttgcaac

SEQ ID NO: 38930 - DNA, 25 bp, Artificial Sequence
  Synthetic
cgttttagtggttctgctaatcaac

SEQ ID NO: 38931 - DNA, 22 bp, Artificial Sequence
  Synthetic
ccaggatgtggtgttgctatag

SEQ ID NO: 38932 - DNA, 25 bp, Artificial Sequence
  Synthetic
accttccatatcctaatcctagtcg

SEQ ID NO: 38933 - DNA, 21 bp, Artificial Sequence
  Synthetic
cgtggtctgctcttctcaaac

SEQ ID NO: 38934 - DNA, 20 bp, Artificial Sequence
  Synthetic
gcaaaaggcaaccgaggaag

SEQ ID NO: 38935 - DNA, 25 bp, Artificial Sequence
  Synthetic
gagatggttacagctttaaaaaggc

SEQ ID NO: 38936 - DNA, 24 bp, Artificial Sequence
  Synthetic
agaactggttactatggttgttgg

SEQ ID NO: 38937 - DNA, 25 bp, Artificial Sequence
  Synthetic
ttatgtacctttgaaatctgccacg

SEQ ID NO: 38938 - DNA, 22 bp, Artificial Sequence
  Synthetic
gttgaattatttgccaagcgca

SEQ ID NO: 38939 - DNA, 21 bp, Artificial Sequence
  Synthetic
accgcgtgctgaattaaatgg

SEQ ID NO: 38940 - DNA, 25 bp, Artificial Sequence
  Synthetic
gaattatgggaagccagttactttg

SEQ ID NO: 38941 - DNA, 25 bp, Artificial Sequence
  Synthetic
aaaagtgttgatgtcgctattcaag

SEQ ID NO: 38942 - DNA, 22 bp, Artificial Sequence
  Synthetic
tcggtgctgaaaagaaagatgg

SEQ ID NO: 38943 - DNA, 20 bp, Artificial Sequence
  Synthetic
ttgttgattcgcggtggaac

SEQ ID NO: 38944 - DNA, 25 bp, Artificial Sequence
  Synthetic
ttgccagtataatatgtgcgagtac

SEQ ID NO: 38945 - DNA, 25 bp, Artificial Sequence
  Synthetic
tttactcgctttcaatcaagatggt

SEQ ID NO: 38946 - DNA, 25 bp, Artificial Sequence
  Synthetic
gatgtagtttatgcacaacactgtt

SEQ ID NO: 38947 - DNA, 20 bp, Artificial Sequence
  Synthetic
tgtacttgccgaccacaagc

SEQ ID NO: 38948 - DNA, 24 bp, Artificial Sequence
  Synthetic
ctgctctcagaaaatcagatcagt

SEQ ID NO: 38949 - DNA, 24 bp, Artificial Sequence
  Synthetic
gccgtaatcaaggtagattttgtg

SEQ ID NO: 38950 - DNA, 21 bp, Artificial Sequence
  Synthetic
tcacaataatacgcggccatc

SEQ ID NO: 38951 - DNA, 22 bp, Artificial Sequence
  Synthetic
tggaaatcgttctggtaatggc

SEQ ID NO: 38952 - DNA, 22 bp, Artificial Sequence
  Synthetic
gctgacattgtcgatcgggacc

SEQ ID NO: 38953 - DNA, 25 bp, Artificial Sequence
  Synthetic
tctctatcagaatggatgtcttgct

SEQ ID NO: 38954 - DNA, 20 bp, Artificial Sequence
  Synthetic
atggaccaggcaatcatgga

SEQ ID NO: 38955 - DNA, 22 bp, Artificial Sequence
  Synthetic
ccctaagaggaagaggcagcac

SEQ ID NO: 38956 - DNA, 21 bp, Artificial Sequence
  Synthetic
gcattagaatggaccaggcag

SEQ ID NO: 38957 - DNA, 21 bp, Artificial Sequence
  Synthetic
gtctgcggaaccggtgagtac

SEQ ID NO: 38958 - DNA, 19 bp, Artificial Sequence
  Synthetic
gaggcgtcgcaagagccct

SEQ ID NO: 38959 - DNA, 21 bp, Artificial Sequence
  Synthetic
gttcgacataatggccggggc

SEQ ID NO: 38960 - DNA, 22 bp, Artificial Sequence
  Synthetic
agaccttgtgacattgtcccgg

SEQ ID NO: 38961 - DNA, 21 bp, Artificial Sequence
  Synthetic
ggtgctcgtggatgaactcca

SEQ ID NO: 38962 - DNA, 22 bp, Artificial Sequence
  Synthetic
tatcggctggtacctggtagct

SEQ ID NO: 38963 - DNA, 20 bp, Artificial Sequence
  Synthetic
gatacagcggcttgcggaga

SEQ ID NO: 38964 - DNA, 20 bp, Artificial Sequence
  Synthetic
ccaaacatcccgcgctccaa

SEQ ID NO: 38965 - DNA, 22 bp, Artificial Sequence
  Synthetic
gctgtgtgcaccagaggtgtag

SEQ ID NO: 38966 - DNA, 22 bp, Artificial Sequence
  Synthetic
agatgtggaagtgtctcgtgcg

SEQ ID NO: 38967 - DNA, 19 bp, Artificial Sequence
  Synthetic
cccatttggcagggcccca

SEQ ID NO: 38968 - DNA, 22 bp, Artificial Sequence
  Synthetic
agtggatgaacaggctcatcgc

SEQ ID NO: 38969 - DNA, 20 bp, Artificial Sequence
  Synthetic
ggggggacggtgtgatgtca

SEQ ID NO: 38970 - DNA, 22 bp, Artificial Sequence
  Synthetic
ggatggagtgagacttcaccgc

SEQ ID NO: 38971 - DNA, 22 bp, Artificial Sequence
  Synthetic
gaacgaggtgttttgcgtggac

SEQ ID NO: 38972 - DNA, 21 bp, Artificial Sequence
  Synthetic
ctgcggaggccctatgttcaa

SEQ ID NO: 38973 - DNA, 22 bp, Artificial Sequence
  Synthetic
gaccaggtattctgctccaccc

SEQ ID NO: 38974 - DNA, 22 bp, Artificial Sequence
  Synthetic
ggagaagaacccagcacttagg

SEQ ID NO: 38975 - DNA, 21 bp, Artificial Sequence
  Synthetic
cagcacacagattggtggaat

SEQ ID NO: 38976 - DNA, 22 bp, Artificial Sequence
  Synthetic
gaagagcaacagccatactcag

SEQ ID NO: 38977 - DNA, 25 bp, Artificial Sequence
  Synthetic
aacttactcatcgtcaatgatgtgg

SEQ ID NO: 38978 - DNA, 25 bp, Artificial Sequence
  Synthetic
taataaaacttcttcccttcgcagc

SEQ ID NO: 38979 - DNA, 21 bp, Artificial Sequence
  Synthetic
acacagtggcaggtccttccg

SEQ ID NO: 38980 - DNA, 21 bp, Artificial Sequence
  Synthetic
caaggccttctccggatctgc

SEQ ID NO: 38981 - DNA, 20 bp, Artificial Sequence
  Synthetic
gctcctcaaggttcccgctc

SEQ ID NO: 38982 - DNA, 20 bp, Artificial Sequence
  Synthetic
agcagtgccccagagcttcc

SEQ ID NO: 38983 - DNA, 22 bp, Artificial Sequence
  Synthetic
ggatgccacatccatcttgggc

SEQ ID NO: 38984 - DNA, 20 bp, Artificial Sequence
  Synthetic
cgaccagcggcgatgttgtc

SEQ ID NO: 38985 - DNA, 21 bp, Artificial Sequence
  Synthetic
tgcttggtatgagctcacgcc

SEQ ID NO: 38986 - DNA, 20 bp, Artificial Sequence
  Synthetic
ctccacggaggacctggtca

SEQ ID NO: 38987 - DNA, 19 bp, Artificial Sequence
  Synthetic
agctcctgaggcgactgca

SEQ ID NO: 38988 - DNA, 20 bp, Artificial Sequence
  Synthetic
tacaccacgggcccctgtac

SEQ ID NO: 38989 - DNA, 20 bp, Artificial Sequence
  Synthetic
gccgtgttgacgtccatgct

SEQ ID NO: 38990 - DNA, 19 bp, Artificial Sequence
  Synthetic
ggagcctggggatccggat

SEQ ID NO: 38991 - DNA, 22 bp, Artificial Sequence
  Synthetic
atccaagtttggctatggggca

SEQ ID NO: 38992 - DNA, 19 bp, Artificial Sequence
  Synthetic
cctggccgtgatgggaagc

SEQ ID NO: 38993 - DNA, 25 bp, Artificial Sequence
  Synthetic
agaaattgtggaatacctttggagg

SEQ ID NO: 38994 - DNA, 23 bp, Artificial Sequence
  Synthetic
agggaagaaaaagacagacatcg

SEQ ID NO: 38995 - DNA, 25 bp, Artificial Sequence
  Synthetic
tgtacaaagtgtagtttaccactgc

SEQ ID NO: 38996 - DNA, 20 bp, Artificial Sequence
  Synthetic
tcggctgtttgagctaccgg

SEQ ID NO: 38997 - DNA, 20 bp, Artificial Sequence
  Synthetic
gtacggtacaaacgtgccaa

SEQ ID NO: 38998 - DNA, 21 bp, Artificial Sequence
  Synthetic
gatcctgaagacgaggaggag

SEQ ID NO: 38999 - DNA, 22 bp, Artificial Sequence
  Synthetic
tgtgtatatggggaaacaggca

SEQ ID NO: 39000 - DNA, 20 bp, Artificial Sequence
  Synthetic
gaacgagcgggtggacaagt

SEQ ID NO: 39001 - DNA, 20 bp, Artificial Sequence
  Synthetic
acacctgccagtgagaatgt

SEQ ID NO: 39002 - DNA, 25 bp, Artificial Sequence
  Synthetic
tttactattatgcaggcacttcacg

SEQ ID NO: 39003 - DNA, 20 bp, Artificial Sequence
  Synthetic
taactttgccaccgtccact

SEQ ID NO: 39004 - DNA, 21 bp, Artificial Sequence
  Synthetic
cgatttcggtacaagatggcc

SEQ ID NO: 39005 - DNA, 22 bp, Artificial Sequence
  Synthetic
ctggcactgtacaacaaacagg

SEQ ID NO: 39006 - DNA, 22 bp, Artificial Sequence
  Synthetic
gatcccagagatcccagaccga

SEQ ID NO: 39007 - DNA, 25 bp, Artificial Sequence
  Synthetic
tagaacctgctaacgcaatagaagt

SEQ ID NO: 39008 - DNA, 21 bp, Artificial Sequence
  Synthetic
tggtgtatcgtttcctgtgca

SEQ ID NO: 39009 - DNA, 21 bp, Artificial Sequence
  Synthetic
cacttggggccgaataacctt

SEQ ID NO: 39010 - DNA, 23 bp, Artificial Sequence
  Synthetic
tgcttgagagagaactagttgcc

SEQ ID NO: 39011 - DNA, 25 bp, Artificial Sequence
  Synthetic
ctgaacctttaaaatcatgtctggc

SEQ ID NO: 39012 - DNA, 24 bp, Artificial Sequence
  Synthetic
accaaagaactggtacaaaacact

SEQ ID NO: 39013 - DNA, 20 bp, Artificial Sequence
  Synthetic
ccagtgacgtgttggttgtc

SEQ ID NO: 39014 - DNA, 24 bp, Artificial Sequence
  Synthetic
tggtgttattcctgaaaatcctgt

SEQ ID NO: 39015 - DNA, 23 bp, Artificial Sequence
  Synthetic
tgctgattttgcttgcaagtttg

SEQ ID NO: 39016 - DNA, 25 bp, Artificial Sequence
  Synthetic
gttttccatgtgcaggtagaaaagt

SEQ ID NO: 39017 - DNA, 20 bp, Artificial Sequence
  Synthetic
catggtggtggagttgcaaa

SEQ ID NO: 39018 - DNA, 20 bp, Artificial Sequence
  Synthetic
tgaatttcgtgctggcagac

SEQ ID NO: 39019 - DNA, 24 bp, Artificial Sequence
  Synthetic
tgatgttgttgcagctaacatgtt

SEQ ID NO: 39020 - DNA, 22 bp, Artificial Sequence
  Synthetic
cctgtagctactggtgatgttg

SEQ ID NO: 39021 - DNA, 24 bp, Artificial Sequence
  Synthetic
actattgttggtggtgtaattcgt

SEQ ID NO: 39022 - DNA, 25 bp, Artificial Sequence
  Synthetic
tactgttttagctgcgtataatggc

SEQ ID NO: 39023 - DNA, 23 bp, Artificial Sequence
  Synthetic
agtaaagttgtttccgctttgca

SEQ ID NO: 39024 - DNA, 21 bp, Artificial Sequence
  Synthetic
acgtgtagagcatccagatgt

SEQ ID NO: 39025 - DNA, 20 bp, Artificial Sequence
  Synthetic
cagggtttggtgtggcagtt

SEQ ID NO: 39026 - DNA, 21 bp, Artificial Sequence
  Synthetic
catctgctagtgctctgcttg

SEQ ID NO: 39027 - DNA, 20 bp, Artificial Sequence
  Synthetic
cgcactgtagcaggtgtttc

SEQ ID NO: 39028 - DNA, 23 bp, Artificial Sequence
  Synthetic
ggcaactgaagaggcttttaaac

SEQ ID NO: 39029 - DNA, 25 bp, Artificial Sequence
  Synthetic
aatgaaacgttattgcactgttcaa

SEQ ID NO: 39030 - DNA, 24 bp, Artificial Sequence
  Synthetic
actggtgtggattttgtagttgaa

SEQ ID NO: 39031 - DNA, 25 bp, Artificial Sequence
  Synthetic
tatgagaaaagatggtgacgatgtt

SEQ ID NO: 39032 - DNA, 24 bp, Artificial Sequence
  Synthetic
taaagaagtagctccaggttctgc

SEQ ID NO: 39033 - DNA, 20 bp, Artificial Sequence
  Synthetic
actcgaccacactgactggt

SEQ ID NO: 39034 - DNA, 25 bp, Artificial Sequence
  Synthetic
atttgaaatctcaggaactatgcgt

SEQ ID NO: 39035 - DNA, 21 bp, Artificial Sequence
  Synthetic
cggtccaaattcctcctgatg

SEQ ID NO: 39036 - DNA, 25 bp, Artificial Sequence
  Synthetic
cattgtagagccactgagtacataa

SEQ ID NO: 39037 - DNA, 21 bp, Artificial Sequence
  Synthetic
tgcactgaactcaaactcagc

SEQ ID NO: 39038 - DNA, 22 bp, Artificial Sequence
  Synthetic
taagtcctgcttgcctgcttgt

SEQ ID NO: 39039 - DNA, 21 bp, Artificial Sequence
  Synthetic
actctgcatttgacctgtccc

SEQ ID NO: 39040 - DNA, 19 bp, Artificial Sequence
  Synthetic
aggactcccaccccgagtc

SEQ ID NO: 39041 - DNA, 24 bp, Artificial Sequence
  Synthetic
cacaaggtgctgactgtatacctg

SEQ ID NO: 39042 - DNA, 22 bp, Artificial Sequence
  Synthetic
agagacgctacctgtagatgtt

SEQ ID NO: 39043 - DNA, 23 bp, Artificial Sequence
  Synthetic
cacctcaggtgctatatgatcca

SEQ ID NO: 39044 - DNA, 25 bp, Artificial Sequence
  Synthetic
ggtgaaactaacactataacaacgc

SEQ ID NO: 39045 - DNA, 25 bp, Artificial Sequence
  Synthetic
aatgtgaagaaggacaaaaaggaga

SEQ ID NO: 39046 - DNA, 23 bp, Artificial Sequence
  Synthetic
acaatttgctaggcatttgtggg

SEQ ID NO: 39047 - DNA, 25 bp, Artificial Sequence
  Synthetic
tagaggatgcttacagatatttgcg

SEQ ID NO: 39048 - DNA, 24 bp, Artificial Sequence
  Synthetic
aagtggaacgaaaactgtgaaacg

SEQ ID NO: 39049 - DNA, 22 bp, Artificial Sequence
  Synthetic
gggcatatgaacaccgttttcg

SEQ ID NO: 39050 - DNA, 25 bp, Artificial Sequence
  Synthetic
atttgagattacaggaactatgcgc

SEQ ID NO: 39051 - DNA, 25 bp, Artificial Sequence
  Synthetic
ggagaccttaaacagtatgacagtg

SEQ ID NO: 39052 - DNA, 23 bp, Artificial Sequence
  Synthetic
agtgtacataaatacggccttgc

SEQ ID NO: 39053 - DNA, 20 bp, Artificial Sequence
  Synthetic
tcttgaggactgcgataggc

SEQ ID NO: 39054 - DNA, 20 bp, Artificial Sequence
  Synthetic
ttgggaaagtgtgcaggacc

SEQ ID NO: 39055 - DNA, 21 bp, Artificial Sequence
  Synthetic
ggctccgaagagaccaaaagg

SEQ ID NO: 39056 - DNA, 25 bp, Artificial Sequence
  Synthetic
tgaaaatggaccaagccataatgga

SEQ ID NO: 39057 - DNA, 21 bp, Artificial Sequence
  Synthetic
tccatgatgagaatgggggac

SEQ ID NO: 39058 - DNA, 23 bp, Artificial Sequence
  Synthetic
ggtcacacaaagaacaataggga

SEQ ID NO: 39059 - DNA, 21 bp, Artificial Sequence
  Synthetic
aggccagttggaatttccagc

SEQ ID NO: 39060 - DNA, 22 bp, Artificial Sequence
  Synthetic
actaccagacctatgcaacaca

SEQ ID NO: 39061 - DNA, 21 bp, Artificial Sequence
  Synthetic
gcacacagcacagaaaacagt

SEQ ID NO: 39062 - DNA, 25 bp, Artificial Sequence
  Synthetic
aatgatacagtgggcgtttgataat

SEQ ID NO: 39063 - DNA, 23 bp, Artificial Sequence
  Synthetic
accaggaagaggaggatacagaa

SEQ ID NO: 39064 - DNA, 20 bp, Artificial Sequence
  Synthetic
caccgtataccgaagccacc

SEQ ID NO: 39065 - DNA, 21 bp, Artificial Sequence
  Synthetic
tgcacacatttgcaacacagg

SEQ ID NO: 39066 - DNA, 20 bp, Artificial Sequence
  Synthetic
cctgtgttggcatggaggta

SEQ ID NO: 39067 - DNA, 22 bp, Artificial Sequence
  Synthetic
ggaacattgggctaagggtact

SEQ ID NO: 39068 - DNA, 20 bp, Artificial Sequence
  Synthetic
acgccatttttggaacaggg

SEQ ID NO: 39069 - DNA, 23 bp, Artificial Sequence
  Synthetic
cagatgaatgcaggttctatgct

SEQ ID NO: 39070 - DNA, 20 bp, Artificial Sequence
  Synthetic
gagaagaaccccgcactcag

SEQ ID NO: 39071 - DNA, 23 bp, Artificial Sequence
  Synthetic
aaaacaaggtttctcccagtagc

SEQ ID NO: 39072 - DNA, 23 bp, Artificial Sequence
  Synthetic
gcacacagattggaggagtaagg

SEQ ID NO: 39073 - DNA, 21 bp, Artificial Sequence
  Synthetic
ggcaaccaggagattgatcca

SEQ ID NO: 39074 - DNA, 25 bp, Artificial Sequence
  Synthetic
gtgctagtcaacacttatcaatgga

SEQ ID NO: 39075 - DNA, 24 bp, Artificial Sequence
  Synthetic
ggatgcaattttcctcattgactg

SEQ ID NO: 39076 - DNA, 24 bp, Artificial Sequence
  Synthetic
tcttacacgagttggaagattgca

SEQ ID NO: 39077 - DNA, 20 bp, Artificial Sequence
  Synthetic
tcttaagcgagcgaccgaat

SEQ ID NO: 39078 - DNA, 20 bp, Artificial Sequence
  Synthetic
caaagcaacgccagcgaaat

SEQ ID NO: 39079 - DNA, 24 bp, Artificial Sequence
  Synthetic
aagccaaaactgctattatgatgc

SEQ ID NO: 39080 - DNA, 22 bp, Artificial Sequence
  Synthetic
cgggtccacaattaggaaatgc

SEQ ID NO: 39081 - DNA, 22 bp, Artificial Sequence
  Synthetic
agggtactgtagtacgtccggg

SEQ ID NO: 39082 - DNA, 20 bp, Artificial Sequence
  Synthetic
tgcagcctttaggtcagcat

SEQ ID NO: 39083 - DNA, 20 bp, Artificial Sequence
  Synthetic
atgtgcagatgctaggcagg

SEQ ID NO: 39084 - DNA, 25 bp, Artificial Sequence
  Synthetic
acatgtagaggaatttgagattgct

SEQ ID NO: 39085 - DNA, 20 bp, Artificial Sequence
  Synthetic
tcgtgtagagacccctaccc

SEQ ID NO: 39086 - DNA, 22 bp, Artificial Sequence
  Synthetic
actaccacctattccgtttgct

SEQ ID NO: 39087 - DNA, 22 bp, Artificial Sequence
  Synthetic
agctcctcaaaacaatcctccg

SEQ ID NO: 39088 - DNA, 22 bp, Artificial Sequence
  Synthetic
ccaaaagacgcagagtacccga

SEQ ID NO: 39089 - DNA, 20 bp, Artificial Sequence
  Synthetic
caacacgggcaagggaatta

SEQ ID NO: 39090 - DNA, 25 bp, Artificial Sequence
  Synthetic
aacaaaaggaacaatgaaaacacga

SEQ ID NO: 39091 - DNA, 21 bp, Artificial Sequence
  Synthetic
acaattcctccaggtgtagct

SEQ ID NO: 39092 - DNA, 20 bp, Artificial Sequence
  Synthetic
tgcagacagctggacaattg

SEQ ID NO: 39093 - DNA, 25 bp, Artificial Sequence
  Synthetic
ggatattgctaaaccttgtgatcct

SEQ ID NO: 39094 - DNA, 22 bp, Artificial Sequence
  Synthetic
gacacttaccaaccgtaactgg

SEQ ID NO: 39095 - DNA, 20 bp, Artificial Sequence
  Synthetic
tagaagccggccctccttcc

SEQ ID NO: 39096 - DNA, 19 bp, Artificial Sequence
  Synthetic
cgtcgctgactccgccatc

SEQ ID NO: 39097 - DNA, 22 bp, Artificial Sequence
  Synthetic
actttgagccactaagcccccg

SEQ ID NO: 39098 - DNA, 20 bp, Artificial Sequence
  Synthetic
gctcatccccacattccagg

SEQ ID NO: 39099 - DNA, 22 bp, Artificial Sequence
  Synthetic
gtgcattcacggcatctggggt

SEQ ID NO: 39100 - DNA, 19 bp, Artificial Sequence
  Synthetic
aggcaccggacacgcgaga

SEQ ID NO: 39101 - DNA, 22 bp, Artificial Sequence
  Synthetic
gagttacaccagcgactgcacc

SEQ ID NO: 39102 - DNA, 19 bp, Artificial Sequence
  Synthetic
accggtgtctggcccggat

SEQ ID NO: 39103 - DNA, 20 bp, Artificial Sequence
  Synthetic
ccgggcttgtagggggctga

SEQ ID NO: 39104 - DNA, 19 bp, Artificial Sequence
  Synthetic
ccaggaaggcggcagcgta

SEQ ID NO: 39105 - DNA, 19 bp, Artificial Sequence
  Synthetic
cgccatcagggtctggctc

SEQ ID NO: 39106 - DNA, 18 bp, Artificial Sequence
  Synthetic
tgcggccaggtgctcatg

SEQ ID NO: 39107 - DNA, 19 bp, Artificial Sequence
  Synthetic
ctcccggtctctgcgtcgt

SEQ ID NO: 39108 - DNA, 18 bp, Artificial Sequence
  Synthetic
acgtgacccaggccctct

SEQ ID NO: 39109 - DNA, 19 bp, Artificial Sequence
  Synthetic
agggcgaggccatgaacgc

SEQ ID NO: 39110 - DNA, 21 bp, Artificial Sequence
  Synthetic
gagggaccaggtgggtggtgt

SEQ ID NO: 39111 - DNA, 20 bp, Artificial Sequence
  Synthetic
cacgatcttgggacgcagcc

SEQ ID NO: 39112 - DNA, 20 bp, Artificial Sequence
  Synthetic
gcatcgaggatggcctccgc

SEQ ID NO: 39113 - DNA, 19 bp, Artificial Sequence
  Synthetic
ctccgcctgagccgcttac

SEQ ID NO: 39114 - DNA, 19 bp, Artificial Sequence
  Synthetic
cggctggtgttgggctggt

SEQ ID NO: 39115 - DNA, 20 bp, Artificial Sequence
  Synthetic
gacagtgcgtcacagatgtc

SEQ ID NO: 39116 - DNA, 21 bp, Artificial Sequence
  Synthetic
gagaggcacccccatcattcc

SEQ ID NO: 39117 - DNA, 19 bp, Artificial Sequence
  Synthetic
cctccatgacggccacgca

SEQ ID NO: 39118 - DNA, 22 bp, Artificial Sequence
  Synthetic
aacgtccaagttgcattggctg

SEQ ID NO: 39119 - DNA, 21 bp, Artificial Sequence
  Synthetic
tgaaagagccagggggagagg

SEQ ID NO: 39120 - DNA, 21 bp, Artificial Sequence
  Synthetic
attagcctgggcatgcgtgaa

SEQ ID NO: 39121 - DNA, 20 bp, Artificial Sequence
  Synthetic
gaactcggcggcaatgtcgg

SEQ ID NO: 39122 - DNA, 21 bp, Artificial Sequence
  Synthetic
tctgggagaggttctgtgcgg

SEQ ID NO: 39123 - DNA, 22 bp, Artificial Sequence
  Synthetic
taaccgccataacgccatctgc

SEQ ID NO: 39124 - DNA, 21 bp, Artificial Sequence
  Synthetic
cgtgtaggagaacccgggtga

SEQ ID NO: 39125 - DNA, 21 bp, Artificial Sequence
  Synthetic
agatgaggccctgctcatcct

SEQ ID NO: 39126 - DNA, 20 bp, Artificial Sequence
  Synthetic
agagggcccacatccaaggg

SEQ ID NO: 39127 - DNA, 19 bp, Artificial Sequence
  Synthetic
cggccgtctgaccgagaac

SEQ ID NO: 39128 - DNA, 22 bp, Artificial Sequence
  Synthetic
aagctctgccataaccgtgtcg

SEQ ID NO: 39129 - DNA, 22 bp, Artificial Sequence
  Synthetic
tcatgggtctcaatcagggtgc

SEQ ID NO: 39130 - DNA, 20 bp, Artificial Sequence
  Synthetic
ggacgcctagcctcctccct

SEQ ID NO: 39131 - DNA, 20 bp, Artificial Sequence
  Synthetic
cgtcgtggccctcgtctcct

SEQ ID NO: 39132 - DNA, 22 bp, Artificial Sequence
  Synthetic
actgccaccatatctcgagtgc

SEQ ID NO: 39133 - DNA, 19 bp, Artificial Sequence
  Synthetic
ttccgtgcctcgggcctca

SEQ ID NO: 39134 - DNA, 22 bp, Artificial Sequence
  Synthetic
cgcaccatccgggatattctgg

SEQ ID NO: 39135 - DNA, 20 bp, Artificial Sequence
  Synthetic
gatagaccccgcccgactgc

SEQ ID NO: 39136 - DNA, 19 bp, Artificial Sequence
  Synthetic
tcccacttgcgggcagact

SEQ ID NO: 39137 - DNA, 22 bp, Artificial Sequence
  Synthetic
gctcagtctaaggagcccacca

SEQ ID NO: 39138 - DNA, 19 bp, Artificial Sequence
  Synthetic
ggggccatggtggagagca

SEQ ID NO: 39139 - DNA, 21 bp, Artificial Sequence
  Synthetic
tggtagaagcacagggggggc

SEQ ID NO: 39140 - DNA, 19 bp, Artificial Sequence
  Synthetic
aagagcccgctctcctccg

SEQ ID NO: 39141 - DNA, 22 bp, Artificial Sequence
  Synthetic
gacgaaggcccgtctgtagagg

SEQ ID NO: 39142 - DNA, 20 bp, Artificial Sequence
  Synthetic
cccctctgccgtggaagggt

SEQ ID NO: 39143 - DNA, 19 bp, Artificial Sequence
  Synthetic
caggccgcgctgtccacaa

SEQ ID NO: 39144 - DNA, 21 bp, Artificial Sequence
  Synthetic
ttccgctgtagagtcgctcct

SEQ ID NO: 39145 - DNA, 19 bp, Artificial Sequence
  Synthetic
ccgatgtcggctgtcctgc

SEQ ID NO: 39146 - DNA, 21 bp, Artificial Sequence
  Synthetic
aaccctgacaaaggcccccca

SEQ ID NO: 39147 - DNA, 21 bp, Artificial Sequence
  Synthetic
cacagaaccagcacagcaggc

SEQ ID NO: 39148 - DNA, 23 bp, Artificial Sequence
  Synthetic
tatgtgcgtttggtgtgtattgc

SEQ ID NO: 39149 - DNA, 20 bp, Artificial Sequence
  Synthetic
ctatgccaattccagcagcc

SEQ ID NO: 39150 - DNA, 22 bp, Artificial Sequence
  Synthetic
agcaggaattactcatcttgcc

SEQ ID NO: 39151 - DNA, 20 bp, Artificial Sequence
  Synthetic
caacaggcctccaccaccac

SEQ ID NO: 39152 - DNA, 20 bp, Artificial Sequence
  Synthetic
tccattgcacctcccagttc

SEQ ID NO: 39153 - DNA, 25 bp, Artificial Sequence
  Synthetic
taccaatatagagtgtttcgtgtgc

SEQ ID NO: 39154 - DNA, 20 bp, Artificial Sequence
  Synthetic
gagccattggtgatcgcatg

SEQ ID NO: 39155 - DNA, 24 bp, Artificial Sequence
  Synthetic
ggccataacctgtcagaaaaacag

SEQ ID NO: 39156 - DNA, 24 bp, Artificial Sequence
  Synthetic
gctgactatgttcgcctaagtacg

SEQ ID NO: 39157 - DNA, 20 bp, Artificial Sequence
  Synthetic
tttgcctttgtaccgggagt

SEQ ID NO: 39158 - DNA, 22 bp, Artificial Sequence
  Synthetic
aacctttttgggttgacacctg

SEQ ID NO: 39159 - DNA, 22 bp, Artificial Sequence
  Synthetic
gagactcagaagtgttgctgtt

SEQ ID NO: 39160 - DNA, 22 bp, Artificial Sequence
  Synthetic
ttggcatttgaaaatccacgtg

SEQ ID NO: 39161 - DNA, 20 bp, Artificial Sequence
  Synthetic
ggctgcagcaatctggaact

SEQ ID NO: 39162 - DNA, 21 bp, Artificial Sequence
  Synthetic
ggaggaggttgtatcgtttgc

SEQ ID NO: 39163 - DNA, 21 bp, Artificial Sequence
  Synthetic
catgcatggccaacgaccaac

SEQ ID NO: 39164 - DNA, 21 bp, Artificial Sequence
  Synthetic
tatagtgtgtccgctctgcgc

SEQ ID NO: 39165 - DNA, 21 bp, Artificial Sequence
  Synthetic
atgacgaggcctttgtgcagg

SEQ ID NO: 39166 - DNA, 20 bp, Artificial Sequence
  Synthetic
cggaggaggaggagcgacaa

SEQ ID NO: 39167 - DNA, 20 bp, Artificial Sequence
  Synthetic
caaacagttgtggggcacag

SEQ ID NO: 39168 - DNA, 25 bp, Artificial Sequence
  Synthetic
agaagtgcaaagatatcagaggagg

SEQ ID NO: 39169 - DNA, 24 bp, Artificial Sequence
  Synthetic
gcttatagatgatgttacccccca

SEQ ID NO: 39170 - DNA, 20 bp, Artificial Sequence
  Synthetic
caaaggttgtgggctcggtt

SEQ ID NO: 39171 - DNA, 20 bp, Artificial Sequence
  Synthetic
ccatgtggaccatgcaggac

SEQ ID NO: 39172 - DNA, 20 bp, Artificial Sequence
  Synthetic
tggcacgtgacaacacaggg

SEQ ID NO: 39173 - DNA, 23 bp, Artificial Sequence
  Synthetic
ccaccaatgaaaaatcagccttt

SEQ ID NO: 39174 - DNA, 21 bp, Artificial Sequence
  Synthetic
cagatgtgcaggtgttatccc

SEQ ID NO: 39175 - DNA, 22 bp, Artificial Sequence
  Synthetic
ctgttgtggatgttggccctcc

SEQ ID NO: 39176 - DNA, 20 bp, Artificial Sequence
  Synthetic
cctcctttaggcgagcactg

SEQ ID NO: 39177 - DNA, 23 bp, Artificial Sequence
  Synthetic
aggcacttttataacagagcagg

SEQ ID NO: 39178 - DNA, 20 bp, Artificial Sequence
  Synthetic
ttgtgccacacaaacaccct

SEQ ID NO: 39179 - DNA, 22 bp, Artificial Sequence
  Synthetic
catggcgttttgttggcactgt

SEQ ID NO: 39180 - DNA, 20 bp, Artificial Sequence
  Synthetic
tcccgggagagccatagtgg

SEQ ID NO: 39181 - DNA, 20 bp, Artificial Sequence
  Synthetic
ggcgtgagagtcctggagga

SEQ ID NO: 39182 - DNA, 22 bp, Artificial Sequence
  Synthetic
cttctctatgcagggagcgtgg

SEQ ID NO: 39183 - DNA, 20 bp, Artificial Sequence
  Synthetic
ctgttgtgccccacggactg

SEQ ID NO: 39184 - DNA, 20 bp, Artificial Sequence
  Synthetic
ccgccttgtcgactggtctt

SEQ ID NO: 39185 - DNA, 21 bp, Artificial Sequence
  Synthetic
actgctcctagcattgcccca

SEQ ID NO: 39186 - DNA, 20 bp, Artificial Sequence
  Synthetic
tgccgtacttcgtcagggct

SEQ ID NO: 39187 - DNA, 22 bp, Artificial Sequence
  Synthetic
tccaaggggtggagtcttctcg

SEQ ID NO: 39188 - DNA, 22 bp, Artificial Sequence
  Synthetic
tgagggggacttagtagggtgg

SEQ ID NO: 39189 - DNA, 21 bp, Artificial Sequence
  Synthetic
ccgactggcagtggaaagagc

SEQ ID NO: 39190 - DNA, 20 bp, Artificial Sequence
  Synthetic
ccggtttgcctgtgtgccaa

SEQ ID NO: 39191 - DNA, 21 bp, Artificial Sequence
  Synthetic
attctgtctccgggtgccttg

SEQ ID NO: 39192 - DNA, 20 bp, Artificial Sequence
  Synthetic
aaggtcgccatctggagggt

SEQ ID NO: 39193 - DNA, 19 bp, Artificial Sequence
  Synthetic
cccccatccgaggcaagct

SEQ ID NO: 39194 - DNA, 21 bp, Artificial Sequence
  Synthetic
caccgcttgtggaatcgtgga

SEQ ID NO: 39195 - DNA, 21 bp, Artificial Sequence
  Synthetic
aggaggcttgccagttaaccc

SEQ ID NO: 39196 - DNA, 22 bp, Artificial Sequence
  Synthetic
tatgcggcgatgacttggttgt

SEQ ID NO: 39197 - DNA, 20 bp, Artificial Sequence
  Synthetic
gcgcgccgaagtgattttgc

SEQ ID NO: 39198 - DNA, 19 bp, Artificial Sequence
  Synthetic
ccgtcttcgcggcggatga

SEQ ID NO: 39199 - DNA, 19 bp, Artificial Sequence
  Synthetic
cgacgtgggcgtggaggat

SEQ ID NO: 39200 - DNA, 19 bp, Artificial Sequence
  Synthetic
aaggcttggcggcatctgc

SEQ ID NO: 39201 - DNA, 19 bp, Artificial Sequence
  Synthetic
ccttgggtgtggcagtgcc

SEQ ID NO: 39202 - DNA, 19 bp, Artificial Sequence
  Synthetic
gcgcgactggggcatttcg

SEQ ID NO: 39203 - DNA, 22 bp, Artificial Sequence
  Synthetic
aacacgcgattttgcacctcct

SEQ ID NO: 39204 - DNA, 19 bp, Artificial Sequence
  Synthetic
gacgcctccaaagccgacc

SEQ ID NO: 39205 - DNA, 18 bp, Artificial Sequence
  Synthetic
cggcagtgctgtggtcga

SEQ ID NO: 39206 - DNA, 21 bp, Artificial Sequence
  Synthetic
cggtgtagccgtcgttggaac

SEQ ID NO: 39207 - DNA, 22 bp, Artificial Sequence
  Synthetic
ggcaggcatgacgatgatttgc

SEQ ID NO: 39208 - DNA, 19 bp, Artificial Sequence
  Synthetic
ctgccggcgaaatctggct

SEQ ID NO: 39209 - DNA, 20 bp, Artificial Sequence
  Synthetic
gtttgggcgaactcatgccg

SEQ ID NO: 39210 - DNA, 21 bp, Artificial Sequence
  Synthetic
caaaccgccacgctttcagac

SEQ ID NO: 39211 - DNA, 22 bp, Artificial Sequence
  Synthetic
actcggatagctttggttcgcg

SEQ ID NO: 39212 - DNA, 22 bp, Artificial Sequence
  Synthetic
acccacacgctgttttcatcgc

SEQ ID NO: 39213 - DNA, 22 bp, Artificial Sequence
  Synthetic
tcttccgatgccgtctgaaagc

SEQ ID NO: 39214 - DNA, 20 bp, Artificial Sequence
  Synthetic
ggacgagtcggatgcccagt

SEQ ID NO: 39215 - DNA, 20 bp, Artificial Sequence
  Synthetic
tgcccgtaaaccgcatcctc

SEQ ID NO: 39216 - DNA, 19 bp, Artificial Sequence
  Synthetic
gccagttgcgggatagccg

SEQ ID NO: 39217 - DNA, 18 bp, Artificial Sequence
  Synthetic
gctcaaacggcggcggtt

SEQ ID NO: 39218 - DNA, 21 bp, Artificial Sequence
  Synthetic
cggactgttcgacctgttcgg

SEQ ID NO: 39219 - DNA, 19 bp, Artificial Sequence
  Synthetic
gcaggctgcctttgtcggc

SEQ ID NO: 39220 - DNA, 21 bp, Artificial Sequence
  Synthetic
tcgaaatagaggcggtcgctg

SEQ ID NO: 39221 - DNA, 19 bp, Artificial Sequence
  Synthetic
agccgaaatgcagggcgat

SEQ ID NO: 39222 - DNA, 22 bp, Artificial Sequence
  Synthetic
tgaagtaggcgagccaagatgc

SEQ ID NO: 39223 - DNA, 21 bp, Artificial Sequence
  Synthetic
cgaacgcagcttgaattccgc

SEQ ID NO: 39224 - DNA, 20 bp, Artificial Sequence
  Synthetic
atcaccgccggtatcgacct

SEQ ID NO: 39225 - DNA, 22 bp, Artificial Sequence
  Synthetic
ctggaattgctggaagggacgg

SEQ ID NO: 39226 - DNA, 20 bp, Artificial Sequence
  Synthetic
ccggcagcgacggtaaaacc

SEQ ID NO: 39227 - DNA, 18 bp, Artificial Sequence
  Synthetic
gcgcgccgacaaaaccgt

SEQ ID NO: 39228 - DNA, 21 bp, Artificial Sequence
  Synthetic
caaatggcggcagagttggac

SEQ ID NO: 39229 - DNA, 20 bp, Artificial Sequence
  Synthetic
ttttgccgcgtttgcccatc

SEQ ID NO: 39230 - DNA, 19 bp, Artificial Sequence
  Synthetic
gccgcgtatcagggcttcg

SEQ ID NO: 39231 - DNA, 22 bp, Artificial Sequence
  Synthetic
cagacgatttactgggcggaca

SEQ ID NO: 39232 - DNA, 20 bp, Artificial Sequence
  Synthetic
cgtcggtcaacacgttgccg

SEQ ID NO: 39233 - DNA, 22 bp, Artificial Sequence
  Synthetic
gtctcgtcggcggtcatgatgc

SEQ ID NO: 39234 - DNA, 19 bp, Artificial Sequence
  Synthetic
gtaaaccggacggcggcgt

SEQ ID NO: 39235 - DNA, 20 bp, Artificial Sequence
  Synthetic
gcagaatggcgagtttgggc

SEQ ID NO: 39236 - DNA, 18 bp, Artificial Sequence
  Synthetic
cgatgcgcccgatgtcgt

SEQ ID NO: 39237 - DNA, 22 bp, Artificial Sequence
  Synthetic
tttcttgtccggaccgatgacg

SEQ ID NO: 39238 - DNA, 22 bp, Artificial Sequence
  Synthetic
actcggcttgtcgtcatggaac

SEQ ID NO: 39239 - DNA, 21 bp, Artificial Sequence
  Synthetic
ggcgtgtccgaaggtgtgtcc

SEQ ID NO: 39240 - DNA, 21 bp, Artificial Sequence
  Synthetic
accgtgtttgcatgggtgtct

SEQ ID NO: 39241 - DNA, 21 bp, Artificial Sequence
  Synthetic
gcgaaactgtcggaacttgcg

SEQ ID NO: 39242 - DNA, 20 bp, Artificial Sequence
  Synthetic
ctgatgtagcgtccgcccaa

SEQ ID NO: 39243 - DNA, 19 bp, Artificial Sequence
  Synthetic
gactgccgacttcgcccca

SEQ ID NO: 39244 - DNA, 20 bp, Artificial Sequence
  Synthetic
gccccaggctggtaaaaccg

SEQ ID NO: 39245 - DNA, 19 bp, Artificial Sequence
  Synthetic
caggctgctgcgttcggca

SEQ ID NO: 39246 - DNA, 19 bp, Artificial Sequence
  Synthetic
gcgaaacgcacgtcggagg

SEQ ID NO: 39247 - DNA, 18 bp, Artificial Sequence
  Synthetic
ccgccgccgagtttcact

SEQ ID NO: 39248 - DNA, 18 bp, Artificial Sequence
  Synthetic
acgccgccctgatggtga

SEQ ID NO: 39249 - DNA, 19 bp, Artificial Sequence
  Synthetic
ccatgaacgggctgtcgcg

SEQ ID NO: 39250 - DNA, 18 bp, Artificial Sequence
  Synthetic
tttcgggcaggtggcggt

SEQ ID NO: 39251 - DNA, 21 bp, Artificial Sequence
  Synthetic
ccctgttccaaaaggcgtggc

SEQ ID NO: 39252 - DNA, 18 bp, Artificial Sequence
  Synthetic
gcttcgctgcggctggtt

SEQ ID NO: 39253 - DNA, 18 bp, Artificial Sequence
  Synthetic
gggtcgtttgccggagca

SEQ ID NO: 39254 - DNA, 21 bp, Artificial Sequence
  Synthetic
gctggggcggacattgtttca

SEQ ID NO: 39255 - DNA, 20 bp, Artificial Sequence
  Synthetic
ccttcgcggctcatagtgcg

SEQ ID NO: 39256 - DNA, 19 bp, Artificial Sequence
  Synthetic
cgccggtggacgacaggat

SEQ ID NO: 39257 - DNA, 19 bp, Artificial Sequence
  Synthetic
ggcgagtttggcgcgggaa

SEQ ID NO: 39258 - DNA, 21 bp, Artificial Sequence
  Synthetic
ttaagttgaacagcgggccgc

SEQ ID NO: 39259 - DNA, 21 bp, Artificial Sequence
  Synthetic
ccgatgaaggcggcatcgttg

SEQ ID NO: 39260 - DNA, 18 bp, Artificial Sequence
  Synthetic
ccgctggttgccgccatt

SEQ ID NO: 39261 - DNA, 22 bp, Artificial Sequence
  Synthetic
aatacacggccttgcaggtcaa

SEQ ID NO: 39262 - DNA, 19 bp, Artificial Sequence
  Synthetic
cagcgacgctttcacgtgc

SEQ ID NO: 39263 - DNA, 22 bp, Artificial Sequence
  Synthetic
tgggtcatgaagcgtgtgtacc

SEQ ID NO: 39264 - DNA, 18 bp, Artificial Sequence
  Synthetic
gcgtggtaaacggcggga

SEQ ID NO: 39265 - DNA, 22 bp, Artificial Sequence
  Synthetic
tttggggttgcggtgttttcag

SEQ ID NO: 39266 - DNA, 19 bp, Artificial Sequence
  Synthetic
cgaggcagtgcagtacggc

SEQ ID NO: 39267 - DNA, 21 bp, Artificial Sequence
  Synthetic
gccaatcggcggatgtgatgg

SEQ ID NO: 39268 - DNA, 20 bp, Artificial Sequence
  Synthetic
ctgtgttgtgctcggcggag

SEQ ID NO: 39269 - DNA, 19 bp, Artificial Sequence
  Synthetic
gccggtttgcctgtcgtcc

SEQ ID NO: 39270 - DNA, 22 bp, Artificial Sequence
  Synthetic
atcggagaggctgtgccattgt

SEQ ID NO: 39271 - DNA, 20 bp, Artificial Sequence
  Synthetic
gcagtcatggcttgtgcggt

SEQ ID NO: 39272 - DNA, 19 bp, Artificial Sequence
  Synthetic
ccaggcggtctgggcgttt

SEQ ID NO: 39273 - DNA, 24 bp, Artificial Sequence
  Synthetic
atcggcatcattatttacctgtcg

SEQ ID NO: 39274 - DNA, 19 bp, Artificial Sequence
  Synthetic
cggctttggcatcgacggc

SEQ ID NO: 39275 - DNA, 18 bp, Artificial Sequence
  Synthetic
acacagggcgcggatgtc

SEQ ID NO: 39276 - DNA, 19 bp, Artificial Sequence
  Synthetic
cgagcagggtttcggcggt

SEQ ID NO: 39277 - DNA, 18 bp, Artificial Sequence
  Synthetic
ttgccgttgccgagaccg

SEQ ID NO: 39278 - DNA, 22 bp, Artificial Sequence
  Synthetic
tcagcttgaggaagacgagtgc

SEQ ID NO: 39279 - DNA, 19 bp, Artificial Sequence
  Synthetic
cgttgatggtggaggcggg

SEQ ID NO: 39280 - DNA, 21 bp, Artificial Sequence
  Synthetic
cgttcgaaatcgcgtccgagc

SEQ ID NO: 39281 - DNA, 22 bp, Artificial Sequence
  Synthetic
ccagccagttgagcatatgccg

SEQ ID NO: 39282 - DNA, 21 bp, Artificial Sequence
  Synthetic
ggacggtgtttcggcaaacag

SEQ ID NO: 39283 - DNA, 19 bp, Artificial Sequence
  Synthetic
aaggtcggtgtgcagcgtc

SEQ ID NO: 39284 - DNA, 22 bp, Artificial Sequence
  Synthetic
catggtgcagccgacaatctgg

SEQ ID NO: 39285 - DNA, 20 bp, Artificial Sequence
  Synthetic
aacggcggcagcgaaatgtt

SEQ ID NO: 39286 - DNA, 19 bp, Artificial Sequence
  Synthetic
cggttcgagcaggagcagg

SEQ ID NO: 39287 - DNA, 19 bp, Artificial Sequence
  Synthetic
catcgccgtcgaaaccgcc

SEQ ID NO: 39288 - DNA, 22 bp, Artificial Sequence
  Synthetic
ttgtccgtttgtctgtgtggcg

SEQ ID NO: 39289 - DNA, 22 bp, Artificial Sequence
  Synthetic
agccgctgatgacgctttacct

SEQ ID NO: 39290 - DNA, 19 bp, Artificial Sequence
  Synthetic
gaagcgggcgacaacgttg

SEQ ID NO: 39291 - DNA, 20 bp, Artificial Sequence
  Synthetic
gatgcgccttaccgatgccg

SEQ ID NO: 39292 - DNA, 19 bp, Artificial Sequence
  Synthetic
cgccgacgttttcaggggt

SEQ ID NO: 39293 - DNA, 18 bp, Artificial Sequence
  Synthetic
ggcaggggtttgtgccgt

SEQ ID NO: 39294 - DNA, 19 bp, Artificial Sequence
  Synthetic
atacggtcaacgcgcaggc

SEQ ID NO: 39295 - DNA, 21 bp, Artificial Sequence
  Synthetic
acgcactctgtttccgcaggc

SEQ ID NO: 39296 - DNA, 20 bp, Artificial Sequence
  Synthetic
ttgttgacatctgcaacgct

SEQ ID NO: 39297 - DNA, 21 bp, Artificial Sequence
  Synthetic
cgtatgcaggctgttggacgg

SEQ ID NO: 39298 - DNA, 19 bp, Artificial Sequence
  Synthetic
ggcggctcctgtcgtccaa

SEQ ID NO: 39299 - DNA, 22 bp, Artificial Sequence
  Synthetic
acaggatgagttgtttggcggc

SEQ ID NO: 39300 - DNA, 22 bp, Artificial Sequence
  Synthetic
gttgtcgatcgccaaaaccagc

SEQ ID NO: 39301 - DNA, 21 bp, Artificial Sequence
  Synthetic
agaactgtgccgtgtatgcgg

SEQ ID NO: 39302 - DNA, 18 bp, Artificial Sequence
  Synthetic
ttgccgccatcacgagcg

SEQ ID NO: 39303 - DNA, 19 bp, Artificial Sequence
  Synthetic
cgtgcctacgcccatcagg

SEQ ID NO: 39304 - DNA, 21 bp, Artificial Sequence
  Synthetic
tgatgacctgccggtaaagga

SEQ ID NO: 39305 - DNA, 22 bp, Artificial Sequence
  Synthetic
ttttcaatgccgacggtagcga

SEQ ID NO: 39306 - DNA, 21 bp, Artificial Sequence
  Synthetic
gtgcggaattcggctacaacg

SEQ ID NO: 39307 - DNA, 18 bp, Artificial Sequence
  Synthetic
ccgcgttgaccttgccga

SEQ ID NO: 39308 - DNA, 18 bp, Artificial Sequence
  Synthetic
cgcgccgctgtttcagga

SEQ ID NO: 39309 - DNA, 20 bp, Artificial Sequence
  Synthetic
gtagggaagctaaccgcacg

SEQ ID NO: 39310 - DNA, 20 bp, Artificial Sequence
  Synthetic
acggcgggcgggattttctg

SEQ ID NO: 39311 - DNA, 19 bp, Artificial Sequence
  Synthetic
gctgccgcatcggatgtga

SEQ ID NO: 39312 - DNA, 20 bp, Artificial Sequence
  Synthetic
gcgcgtttggtgttggcaaa

SEQ ID NO: 39313 - DNA, 21 bp, Artificial Sequence
  Synthetic
tagtcgacaccgtgcacgagc

SEQ ID NO: 39314 - DNA, 20 bp, Artificial Sequence
  Synthetic
tcgcccaaacagtttcacaa

SEQ ID NO: 39315 - DNA, 19 bp, Artificial Sequence
  Synthetic
tctccgccgttaccgctgc

SEQ ID NO: 39316 - DNA, 22 bp, Artificial Sequence
  Synthetic
aaggtaatagtgctggtgcgcg

SEQ ID NO: 39317 - DNA, 19 bp, Artificial Sequence
  Synthetic
tgcggcaagccttcgatca

SEQ ID NO: 39318 - DNA, 20 bp, Artificial Sequence
  Synthetic
ggcgcaaaccgtgttcttcg

SEQ ID NO: 39319 - DNA, 21 bp, Artificial Sequence
  Synthetic
ttgagtacgccgataccgctg

SEQ ID NO: 39320 - DNA, 18 bp, Artificial Sequence
  Synthetic
atatccacgcggcggctg

SEQ ID NO: 39321 - DNA, 19 bp, Artificial Sequence
  Synthetic
gggacagtaccgcgatgcc

SEQ ID NO: 39322 - DNA, 19 bp, Artificial Sequence
  Synthetic
atttgtcgggcggactcgg

SEQ ID NO: 39323 - DNA, 19 bp, Artificial Sequence
  Synthetic
ctgcaacagggtggcggct

SEQ ID NO: 39324 - DNA, 19 bp, Artificial Sequence
  Synthetic
gcccgccgtgttggtcgat

SEQ ID NO: 39325 - DNA, 22 bp, Artificial Sequence
  Synthetic
ctgttgggcgaaatcgacgagt

SEQ ID NO: 39326 - DNA, 19 bp, Artificial Sequence
  Synthetic
agacaaagtggcacgccgc

SEQ ID NO: 39327 - DNA, 18 bp, Artificial Sequence
  Synthetic
aaaccggtgctgacggcg

SEQ ID NO: 39328 - DNA, 19 bp, Artificial Sequence
  Synthetic
cgttacccgagccgccgat

SEQ ID NO: 39329 - DNA, 21 bp, Artificial Sequence
  Synthetic
gtttcaagccgcgcaggattt

SEQ ID NO: 39330 - DNA, 22 bp, Artificial Sequence
  Synthetic
aaaaggtggtcgggaatcaggg

SEQ ID NO: 39331 - DNA, 21 bp, Artificial Sequence
  Synthetic
ctggtgatgatgggcgggaaa

SEQ ID NO: 39332 - DNA, 19 bp, Artificial Sequence
  Synthetic
gcggacaacggcgaagtgc

SEQ ID NO: 39333 - DNA, 19 bp, Artificial Sequence
  Synthetic
agtcgatgacggcgaggca

SEQ ID NO: 39334 - DNA, 21 bp, Artificial Sequence
  Synthetic
gtctgtccagcgtgcaaacga

SEQ ID NO: 39335 - DNA, 19 bp, Artificial Sequence
  Synthetic
ccccgcaatccgtgtttgc

SEQ ID NO: 39336 - DNA, 19 bp, Artificial Sequence
  Synthetic
ggcggctgccgaattggac

SEQ ID NO: 39337 - DNA, 21 bp, Artificial Sequence
  Synthetic
ggcggatttttcttgctttcg

SEQ ID NO: 39338 - DNA, 18 bp, Artificial Sequence
  Synthetic
ccaaagtcgccgccgctt

SEQ ID NO: 39339 - DNA, 21 bp, Artificial Sequence
  Synthetic
ggaaaccaaagccaatccgcc

SEQ ID NO: 39340 - DNA, 20 bp, Artificial Sequence
  Synthetic
acgtttttgaccgtcccggc

SEQ ID NO: 39341 - DNA, 21 bp, Artificial Sequence
  Synthetic
gcattcaggtgccgctcttcc

SEQ ID NO: 39342 - DNA, 22 bp, Artificial Sequence
  Synthetic
tgcccgctatgaatttgccagc

SEQ ID NO: 39343 - DNA, 18 bp, Artificial Sequence
  Synthetic
gcgccaaacggcaaggtg

SEQ ID NO: 39344 - DNA, 19 bp, Artificial Sequence
  Synthetic
caacagggcggtcaggagc

SEQ ID NO: 39345 - DNA, 19 bp, Artificial Sequence
  Synthetic
gctggacgcgcttcaaggc

SEQ ID NO: 39346 - DNA, 19 bp, Artificial Sequence
  Synthetic
gcgaggggcccctgcattt

SEQ ID NO: 39347 - DNA, 18 bp, Artificial Sequence
  Synthetic
cgcgcgggccatccaaat

SEQ ID NO: 39348 - DNA, 22 bp, Artificial Sequence
  Synthetic
ggcaacctgataggctgggaag

SEQ ID NO: 39349 - DNA, 21 bp, Artificial Sequence
  Synthetic
atcgttgaccctgttgccgtg

SEQ ID NO: 39350 - DNA, 20 bp, Artificial Sequence
  Synthetic
cgcggttgcctatgcttggt

SEQ ID NO: 39351 - DNA, 19 bp, Artificial Sequence
  Synthetic
gtcaggcaggcgttcggca

SEQ ID NO: 39352 - DNA, 22 bp, Artificial Sequence
  Synthetic
accgtgtgttttttgatgccgg

SEQ ID NO: 39353 - DNA, 20 bp, Artificial Sequence
  Synthetic
cgacggctgcaaggtcaacc

SEQ ID NO: 39354 - DNA, 19 bp, Artificial Sequence
  Synthetic
ggcggcaacacgttcgaac

SEQ ID NO: 39355 - DNA, 21 bp, Artificial Sequence
  Synthetic
cggcgaatttctggcatacgc

SEQ ID NO: 39356 - DNA, 18 bp, Artificial Sequence
  Synthetic
cgtgggcatcaacggcga

SEQ ID NO: 39357 - DNA, 21 bp, Artificial Sequence
  Synthetic
atcgggcaggcgtaaaccaag

SEQ ID NO: 39358 - DNA, 19 bp, Artificial Sequence
  Synthetic
cgcggtcgaacacgccgaa

SEQ ID NO: 39359 - DNA, 18 bp, Artificial Sequence
  Synthetic
tgacaggccggctgaacg

SEQ ID NO: 39360 - DNA, 18 bp, Artificial Sequence
  Synthetic
ggcggcaaagggggcaaa

SEQ ID NO: 39361 - DNA, 19 bp, Artificial Sequence
  Synthetic
cacgaacggacgcaggcga

SEQ ID NO: 39362 - DNA, 19 bp, Artificial Sequence
  Synthetic
cgaccacaaccacgacgcg

SEQ ID NO: 39363 - DNA, 22 bp, Artificial Sequence
  Synthetic
ttcttcatcgacggctttggct

SEQ ID NO: 39364 - DNA, 22 bp, Artificial Sequence
  Synthetic
tttgccgaacaggtaagacgcg

SEQ ID NO: 39365 - DNA, 19 bp, Artificial Sequence
  Synthetic
cggaatccccgccaccatc

SEQ ID NO: 39366 - DNA, 20 bp, Artificial Sequence
  Synthetic
atgccgaaaagctgtttgcc

SEQ ID NO: 39367 - DNA, 22 bp, Artificial Sequence
  Synthetic
aagtgtacgccgccgatgatgt

SEQ ID NO: 39368 - DNA, 18 bp, Artificial Sequence
  Synthetic
ccatcgaagccggcgaca

SEQ ID NO: 39369 - DNA, 21 bp, Artificial Sequence
  Synthetic
attggtgtacccaacgcggcc

SEQ ID NO: 39370 - DNA, 20 bp, Artificial Sequence
  Synthetic
gggacgaaggggatttccgc

SEQ ID NO: 39371 - DNA, 21 bp, Artificial Sequence
  Synthetic
tattgaccgaagttcccgccc

SEQ ID NO: 39372 - DNA, 21 bp, Artificial Sequence
  Synthetic
cgtcgcagcccatttcgatgg

SEQ ID NO: 39373 - DNA, 18 bp, Artificial Sequence
  Synthetic
agccgcgcgcgtgcatat

SEQ ID NO: 39374 - DNA, 19 bp, Artificial Sequence
  Synthetic
aggaatccggccgctggga

SEQ ID NO: 39375 - DNA, 21 bp, Artificial Sequence
  Synthetic
gcgcgacgacgtgattatcgt

SEQ ID NO: 39376 - DNA, 18 bp, Artificial Sequence
  Synthetic
gcgcaacgtgaacggcgt

SEQ ID NO: 39377 - DNA, 18 bp, Artificial Sequence
  Synthetic
gcgcgtcgttgatgccgt

SEQ ID NO: 39378 - DNA, 20 bp, Artificial Sequence
  Synthetic
taaggtggctttcgtccgcc

SEQ ID NO: 39379 - DNA, 20 bp, Artificial Sequence
  Synthetic
gacggaaagtgaaccgccgc

SEQ ID NO: 39380 - DNA, 19 bp, Artificial Sequence
  Synthetic
ctgttggtcagccgcgcca

SEQ ID NO: 39381 - DNA, 20 bp, Artificial Sequence
  Synthetic
gcccgaacatggtggaaggc

SEQ ID NO: 39382 - DNA, 20 bp, Artificial Sequence
  Synthetic
atacgtgtcggcgcagtgtt

SEQ ID NO: 39383 - DNA, 20 bp, Artificial Sequence
  Synthetic
gatgaaatccctgggcgctt

SEQ ID NO: 39384 - DNA, 22 bp, Artificial Sequence
  Synthetic
actacttcagcggtaatcacct

SEQ ID NO: 39385 - DNA, 19 bp, Artificial Sequence
  Synthetic
tgcggacaaggggatcggg

SEQ ID NO: 39386 - DNA, 22 bp, Artificial Sequence
  Synthetic
tcccatgaaaacaggctgtcgg

SEQ ID NO: 39387 - DNA, 19 bp, Artificial Sequence
  Synthetic
aaacctgcgccgagttcgt

SEQ ID NO: 39388 - DNA, 19 bp, Artificial Sequence
  Synthetic
ccgcccatcaccgccacaa

SEQ ID NO: 39389 - DNA, 19 bp, Artificial Sequence
  Synthetic
atctgccacaacgccgaca

SEQ ID NO: 39390 - DNA, 22 bp, Artificial Sequence
  Synthetic
tacgcagcaagggattgaaggg

SEQ ID NO: 39391 - DNA, 22 bp, Artificial Sequence
  Synthetic
gatgagggagttcatcagggcg

SEQ ID NO: 39392 - DNA, 22 bp, Artificial Sequence
  Synthetic
gacagacagcatttcgatggcg

SEQ ID NO: 39393 - DNA, 20 bp, Artificial Sequence
  Synthetic
agtgtggggaaacgggtcgg

SEQ ID NO: 39394 - DNA, 19 bp, Artificial Sequence
  Synthetic
tgggttcgagcgaggcgga

SEQ ID NO: 39395 - DNA, 22 bp, Artificial Sequence
  Synthetic
aagtccggttgccaaaggatcg

SEQ ID NO: 39396 - DNA, 20 bp, Artificial Sequence
  Synthetic
taggcggctaaatgttcggg

SEQ ID NO: 39397 - DNA, 21 bp, Artificial Sequence
  Synthetic
cgcgttgatgatgtcgaaggc

SEQ ID NO: 39398 - DNA, 19 bp, Artificial Sequence
  Synthetic
gcgcgcaccagcagggatt

SEQ ID NO: 39399 - DNA, 22 bp, Artificial Sequence
  Synthetic
aacaccatcagggtcggaatgc

SEQ ID NO: 39400 - DNA, 18 bp, Artificial Sequence
  Synthetic
tcgtttatccggccgccg

SEQ ID NO: 39401 - DNA, 18 bp, Artificial Sequence
  Synthetic
attcccgtcgtcagcggc

SEQ ID NO: 39402 - DNA, 22 bp, Artificial Sequence
  Synthetic
ctatcaggtcggcgcgattcac

SEQ ID NO: 39403 - DNA, 20 bp, Artificial Sequence
  Synthetic
cctacggcgtggtgatggtc

SEQ ID NO: 39404 - DNA, 21 bp, Artificial Sequence
  Synthetic
ggcagcaacgcctttatcgtg

SEQ ID NO: 39405 - DNA, 18 bp, Artificial Sequence
  Synthetic
aaatcctgcctgccgcgt

SEQ ID NO: 39406 - DNA, 18 bp, Artificial Sequence
  Synthetic
cggcaagggcttcgtcca

SEQ ID NO: 39407 - DNA, 20 bp, Artificial Sequence
  Synthetic
gggtggtcagggtttgctcg

SEQ ID NO: 39408 - DNA, 21 bp, Artificial Sequence
  Synthetic
ccgtagtcgtccaatgcccaa

SEQ ID NO: 39409 - DNA, 20 bp, Artificial Sequence
  Synthetic
aaccatttcgggcgacgtgc

SEQ ID NO: 39410 - DNA, 19 bp, Artificial Sequence
  Synthetic
ggaggctgatgagcgcgga

SEQ ID NO: 39411 - DNA, 18 bp, Artificial Sequence
  Synthetic
cggcgatgcgctgcacta

SEQ ID NO: 39412 - DNA, 23 bp, Artificial Sequence
  Synthetic
aatagcgaccaatcaacaactga

SEQ ID NO: 39413 - DNA, 19 bp, Artificial Sequence
  Synthetic
ggcagcctgaatgcggagg

SEQ ID NO: 39414 - DNA, 19 bp, Artificial Sequence
  Synthetic
ggagtggcaacgccgggaa

SEQ ID NO: 39415 - DNA, 19 bp, Artificial Sequence
  Synthetic
ttgaagccgcggtcttgca

SEQ ID NO: 39416 - DNA, 19 bp, Artificial Sequence
  Synthetic
atgatgcggcagccttcgc

SEQ ID NO: 39417 - DNA, 19 bp, Artificial Sequence
  Synthetic
atcgggttcgcaatgccgt

SEQ ID NO: 39418 - DNA, 22 bp, Artificial Sequence
  Synthetic
caaagtccacccggaaaccacg

SEQ ID NO: 39419 - DNA, 20 bp, Artificial Sequence
  Synthetic
aggtttcgcaggattggcgg

SEQ ID NO: 39420 - DNA, 19 bp, Artificial Sequence
  Synthetic
aacacggcttcgcccaagg

SEQ ID NO: 39421 - DNA, 21 bp, Artificial Sequence
  Synthetic
ttttccgttgtaccgccggag

SEQ ID NO: 39422 - DNA, 21 bp, Artificial Sequence
  Synthetic
gatatgggggacagccacgtc

SEQ ID NO: 39423 - DNA, 20 bp, Artificial Sequence
  Synthetic
gggtcagcggaagaagtcgc

SEQ ID NO: 39424 - DNA, 22 bp, Artificial Sequence
  Synthetic
ccaaggcattttgcagggcttt

SEQ ID NO: 39425 - DNA, 20 bp, Artificial Sequence
  Synthetic
tccatcgcgccttcttcgtc

SEQ ID NO: 39426 - DNA, 18 bp, Artificial Sequence
  Synthetic
ggcggcgattttgcccga

SEQ ID NO: 39427 - DNA, 20 bp, Artificial Sequence
  Synthetic
aatccgggacaagcgtaagg

SEQ ID NO: 39428 - DNA, 20 bp, Artificial Sequence
  Synthetic
gactgtcgaagccgcagcat

SEQ ID NO: 39429 - DNA, 22 bp, Artificial Sequence
  Synthetic
ttggcttttgcttttttgcgcg

SEQ ID NO: 39430 - DNA, 20 bp, Artificial Sequence
  Synthetic
gccgcttcgtaaatcccttg

SEQ ID NO: 39431 - DNA, 21 bp, Artificial Sequence
  Synthetic
cggcatgtgtactgtaagcag

SEQ ID NO: 39432 - DNA, 23 bp, Artificial Sequence
  Synthetic
aatgcaaaaatcaaggctgatcc

SEQ ID NO: 39433 - DNA, 21 bp, Artificial Sequence
  Synthetic
cttcacggtctgcatcagtag

SEQ ID NO: 39434 - DNA, 20 bp, Artificial Sequence
  Synthetic
gcttgctacaggacgcagat

SEQ ID NO: 39435 - DNA, 23 bp, Artificial Sequence
  Synthetic
tcaacagcagatttcaacttcga

SEQ ID NO: 39436 - DNA, 20 bp, Artificial Sequence
  Synthetic
ggcgaccatgccgtacaagg

SEQ ID NO: 39437 - DNA, 19 bp, Artificial Sequence
  Synthetic
catcgccaaagccctcgcc

SEQ ID NO: 39438 - DNA, 22 bp, Artificial Sequence
  Synthetic
aagacaaaaccgacagcaccga

SEQ ID NO: 39439 - DNA, 19 bp, Artificial Sequence
  Synthetic
aaccgtccgcatcgaaccg

SEQ ID NO: 39440 - DNA, 22 bp, Artificial Sequence
  Synthetic
tttttgggacgcatccaaagcc

SEQ ID NO: 39441 - DNA, 22 bp, Artificial Sequence
  Synthetic
cgccgtttggacttgattgacg

SEQ ID NO: 39442 - DNA, 21 bp, Artificial Sequence
  Synthetic
cggttcgtatttggcgaccca

SEQ ID NO: 39443 - DNA, 19 bp, Artificial Sequence
  Synthetic
gcgcgcgcgtgtttgaaag

SEQ ID NO: 39444 - DNA, 22 bp, Artificial Sequence
  Synthetic
tgaatcgtggtttcgatggcgg

SEQ ID NO: 39445 - DNA, 20 bp, Artificial Sequence
  Synthetic
ggacgcggtggtcgttttgc

SEQ ID NO: 39446 - DNA, 20 bp, Artificial Sequence
  Synthetic
gccctgtctttcacggcagg

SEQ ID NO: 39447 - DNA, 19 bp, Artificial Sequence
  Synthetic
tacctacccttgccgccgc

SEQ ID NO: 39448 - DNA, 21 bp, Artificial Sequence
  Synthetic
ggcggtatcgtgttcggtacg

SEQ ID NO: 39449 - DNA, 18 bp, Artificial Sequence
  Synthetic
cggcgttgcccatgctgt

SEQ ID NO: 39450 - DNA, 19 bp, Artificial Sequence
  Synthetic
ttcaaaccggccagacgcg

SEQ ID NO: 39451 - DNA, 20 bp, Artificial Sequence
  Synthetic
ggtagatgtctgccagcgcg

SEQ ID NO: 39452 - DNA, 20 bp, Artificial Sequence
  Synthetic
cattcgcgccgacaatggct

SEQ ID NO: 39453 - DNA, 18 bp, Artificial Sequence
  Synthetic
ctcgaaatcgcccgggct

SEQ ID NO: 39454 - DNA, 20 bp, Artificial Sequence
  Synthetic
aacgccccttcatccgcttc

SEQ ID NO: 39455 - DNA, 22 bp, Artificial Sequence
  Synthetic
tccatcggtgcaatattcggca

SEQ ID NO: 39456 - DNA, 22 bp, Artificial Sequence
  Synthetic
cagcctgaccttatccctgctg

SEQ ID NO: 39457 - DNA, 19 bp, Artificial Sequence
  Synthetic
caaggcatcgccctgctcc

SEQ ID NO: 39458 - DNA, 22 bp, Artificial Sequence
  Synthetic
tgtcgaacttggttgccgatgt

SEQ ID NO: 39459 - DNA, 20 bp, Artificial Sequence
  Synthetic
caaagctgcgccatcccact

SEQ ID NO: 39460 - DNA, 20 bp, Artificial Sequence
  Synthetic
gcggtttgcaaggccgaaga

SEQ ID NO: 39461 - DNA, 20 bp, Artificial Sequence
  Synthetic
cgccgcctcactctacctgc

SEQ ID NO: 39462 - DNA, 22 bp, Artificial Sequence
  Synthetic
cgccttcggcttctataccgac

SEQ ID NO: 39463 - DNA, 20 bp, Artificial Sequence
  Synthetic
gccacgcttttgagctgctg

SEQ ID NO: 39464 - DNA, 22 bp, Artificial Sequence
  Synthetic
ttggatgcgaaccatatccccg

SEQ ID NO: 39465 - DNA, 21 bp, Artificial Sequence
  Synthetic
ctgtttgggtttcggttggcg

SEQ ID NO: 39466 - DNA, 22 bp, Artificial Sequence
  Synthetic
tctgcgattttggggctttcga

SEQ ID NO: 39467 - DNA, 20 bp, Artificial Sequence
  Synthetic
atacttcgccgacgacgctg

SEQ ID NO: 39468 - DNA, 19 bp, Artificial Sequence
  Synthetic
ccgagtgcgcgccatttgc

SEQ ID NO: 39469 - DNA, 21 bp, Artificial Sequence
  Synthetic
catcctcgccattttgcccga

SEQ ID NO: 39470 - DNA, 20 bp, Artificial Sequence
  Synthetic
gaacaggaatttcacgccgc

SEQ ID NO: 39471 - DNA, 18 bp, Artificial Sequence
  Synthetic
gcttctgcggcggcaatc

SEQ ID NO: 39472 - DNA, 22 bp, Artificial Sequence
  Synthetic
cattcgggggcgtttttttcgg

SEQ ID NO: 39473 - DNA, 22 bp, Artificial Sequence
  Synthetic
tgcccttcgaactctacaccgc

SEQ ID NO: 39474 - DNA, 18 bp, Artificial Sequence
  Synthetic
tgcctatgccggcggcta

SEQ ID NO: 39475 - DNA, 19 bp, Artificial Sequence
  Synthetic
gtatgcgccgcctgacacg

SEQ ID NO: 39476 - DNA, 19 bp, Artificial Sequence
  Synthetic
ggcgacattgcccttgcac

SEQ ID NO: 39477 - DNA, 18 bp, Artificial Sequence
  Synthetic
acctcgttgccttgcgcg

SEQ ID NO: 39478 - DNA, 22 bp, Artificial Sequence
  Synthetic
ggcgcgatgtgttctaatacgc

SEQ ID NO: 39479 - DNA, 18 bp, Artificial Sequence
  Synthetic
tcacccccatcggcacca

SEQ ID NO: 39480 - DNA, 21 bp, Artificial Sequence
  Synthetic
cctacctgcgccaagtgttcg

SEQ ID NO: 39481 - DNA, 20 bp, Artificial Sequence
  Synthetic
ggccatctgcgttccagcat

SEQ ID NO: 39482 - DNA, 18 bp, Artificial Sequence
  Synthetic
aagccgcaacagccgcct

SEQ ID NO: 39483 - DNA, 21 bp, Artificial Sequence
  Synthetic
tttggactaccttcccgccgc

SEQ ID NO: 39484 - DNA, 22 bp, Artificial Sequence
  Synthetic
ttcatcttccatcgtcagcggc

SEQ ID NO: 39485 - DNA, 18 bp, Artificial Sequence
  Synthetic
tgcggacagtttcggcgc

SEQ ID NO: 39486 - DNA, 25 bp, Artificial Sequence
  Synthetic
ggaaggtcgtgatttttaacgattc

SEQ ID NO: 39487 - DNA, 22 bp, Artificial Sequence
  Synthetic
acaaacaaactggcgaaccacg

SEQ ID NO: 39488 - DNA, 21 bp, Artificial Sequence
  Synthetic
tggacaaggcgaacaagaaga

SEQ ID NO: 39489 - DNA, 21 bp, Artificial Sequence
  Synthetic
aaaccacctactctgctgaca

SEQ ID NO: 39490 - DNA, 22 bp, Artificial Sequence
  Synthetic
gcaaaaccagcttttgagcgcg

SEQ ID NO: 39491 - DNA, 19 bp, Artificial Sequence
  Synthetic
ttgaagcgcgcgctgaaac

SEQ ID NO: 39492 - DNA, 22 bp, Artificial Sequence
  Synthetic
taccgtcaacgactacctcgcc

SEQ ID NO: 39493 - DNA, 20 bp, Artificial Sequence
  Synthetic
aaagcacattgacgcgggca

SEQ ID NO: 39494 - DNA, 24 bp, Artificial Sequence
  Synthetic
ctttgtttttattggcttccacgc

SEQ ID NO: 39495 - DNA, 22 bp, Artificial Sequence
  Synthetic
tggcgatttcatgcagacaggc

SEQ ID NO: 39496 - DNA, 19 bp, Artificial Sequence
  Synthetic
ataccgcaagctggaggcg

SEQ ID NO: 39497 - DNA, 22 bp, Artificial Sequence
  Synthetic
acactacccggaaggtgtgacc

SEQ ID NO: 39498 - DNA, 19 bp, Artificial Sequence
  Synthetic
tagcggtagccggcgtcca

SEQ ID NO: 39499 - DNA, 20 bp, Artificial Sequence
  Synthetic
gcaggagcggcattgtacgg

SEQ ID NO: 39500 - DNA, 22 bp, Artificial Sequence
  Synthetic
gcattggtttgaccttgacggc

SEQ ID NO: 39501 - DNA, 19 bp, Artificial Sequence
  Synthetic
aggccatgaacggacccgc

SEQ ID NO: 39502 - DNA, 19 bp, Artificial Sequence
  Synthetic
ccgtagaacagggcggcag

SEQ ID NO: 39503 - DNA, 21 bp, Artificial Sequence
  Synthetic
gtaggtctcggtgtcatcgcc

SEQ ID NO: 39504 - DNA, 21 bp, Artificial Sequence
  Synthetic
caacgccaaagcccaagtcct

SEQ ID NO: 39505 - DNA, 21 bp, Artificial Sequence
  Synthetic
ccaaagccgagccgaaactgc

SEQ ID NO: 39506 - DNA, 19 bp, Artificial Sequence
  Synthetic
gacggcggcaaacacatcg

SEQ ID NO: 39507 - DNA, 21 bp, Artificial Sequence
  Synthetic
gttttcgccacaccgcgtatc

SEQ ID NO: 39508 - DNA, 20 bp, Artificial Sequence
  Synthetic
ccgacaggctcatccccacg

SEQ ID NO: 39509 - DNA, 18 bp, Artificial Sequence
  Synthetic
aacgccgcttccgcatcc

SEQ ID NO: 39510 - DNA, 19 bp, Artificial Sequence
  Synthetic
cggtaggccgcgacaaacg

SEQ ID NO: 39511 - DNA, 19 bp, Artificial Sequence
  Synthetic
gcagaagcgggcgacatcc

SEQ ID NO: 39512 - DNA, 22 bp, Artificial Sequence
  Synthetic
gaaatcagccttcagcgcatcg

SEQ ID NO: 39513 - DNA, 18 bp, Artificial Sequence
  Synthetic
gcgcaccgtttccgcatc

SEQ ID NO: 39514 - DNA, 22 bp, Artificial Sequence
  Synthetic
tccgacaaacgcccgtattcct

SEQ ID NO: 39515 - DNA, 19 bp, Artificial Sequence
  Synthetic
gtttcggacacggcggcga

SEQ ID NO: 39516 - DNA, 20 bp, Artificial Sequence
  Synthetic
caccgtatcggggcgtttgc

SEQ ID NO: 39517 - DNA, 21 bp, Artificial Sequence
  Synthetic
taatgtccgcgcatatccgcc

SEQ ID NO: 39518 - DNA, 21 bp, Artificial Sequence
  Synthetic
cccgtacccaaatactcgccc

SEQ ID NO: 39519 - DNA, 22 bp, Artificial Sequence
  Synthetic
cagccgtatgttttgcaggtcg

SEQ ID NO: 39520 - DNA, 21 bp, Artificial Sequence
  Synthetic
atcgcgctagacatcccaacc

SEQ ID NO: 39521 - DNA, 19 bp, Artificial Sequence
  Synthetic
gcagccttgccgccgtcat

SEQ ID NO: 39522 - DNA, 18 bp, Artificial Sequence
  Synthetic
attgcgacaacggcgccg

SEQ ID NO: 39523 - DNA, 23 bp, Artificial Sequence
  Synthetic
atcaactatcctgctatcgtccc

SEQ ID NO: 39524 - DNA, 18 bp, Artificial Sequence
  Synthetic
ccgatgccgtgcgccaat

SEQ ID NO: 39525 - DNA, 21 bp, Artificial Sequence
  Synthetic
ggccggcaaacgccaaaacac

SEQ ID NO: 39526 - DNA, 22 bp, Artificial Sequence
  Synthetic
tttgaaaaggtcaacgcgctgg

SEQ ID NO: 39527 - DNA, 22 bp, Artificial Sequence
  Synthetic
ggatggtcatcatacaggcgcg

SEQ ID NO: 39528 - DNA, 20 bp, Artificial Sequence
  Synthetic
cgaaaacatcggggcggtca

SEQ ID NO: 39529 - DNA, 20 bp, Artificial Sequence
  Synthetic
tgaggttttcgagggccccg

SEQ ID NO: 39530 - DNA, 22 bp, Artificial Sequence
  Synthetic
aagaacttttcggcggcgaagc

SEQ ID NO: 39531 - DNA, 20 bp, Artificial Sequence
  Synthetic
cttcacgccttccttgcagt

SEQ ID NO: 39532 - DNA, 21 bp, Artificial Sequence
  Synthetic
ccgtcaaacttccaacgccca

SEQ ID NO: 39533 - DNA, 18 bp, Artificial Sequence
  Synthetic
catcggcagccaaggcca

SEQ ID NO: 39534 - DNA, 19 bp, Artificial Sequence
  Synthetic
cgattttgcccgaacgcgc

SEQ ID NO: 39535 - DNA, 19 bp, Artificial Sequence
  Synthetic
ccgaaagcgggcttgaccg

SEQ ID NO: 39536 - DNA, 19 bp, Artificial Sequence
  Synthetic
gggcggcttgtccaacgct

SEQ ID NO: 39537 - DNA, 18 bp, Artificial Sequence
  Synthetic
agccgactgcgccgttac

SEQ ID NO: 39538 - DNA, 19 bp, Artificial Sequence
  Synthetic
cgcgccggattcgatgcct

SEQ ID NO: 39539 - DNA, 19 bp, Artificial Sequence
  Synthetic
ttcgccgccttctttgccg

SEQ ID NO: 39540 - DNA, 21 bp, Artificial Sequence
  Synthetic
ttaccaaccccatcgccatcg

SEQ ID NO: 39541 - DNA, 17 bp, Artificial Sequence
  Synthetic
acggcttcgcacgcgat

SEQ ID NO: 39542 - DNA, 21 bp, Artificial Sequence
  Synthetic
cgaccaaccgtttctgtgccg

SEQ ID NO: 39543 - DNA, 19 bp, Artificial Sequence
  Synthetic
gcctgcccgccgtcaaaga

SEQ ID NO: 39544 - DNA, 20 bp, Artificial Sequence
  Synthetic
ccgcgcctccccatctacct

SEQ ID NO: 39545 - DNA, 22 bp, Artificial Sequence
  Synthetic
cataggccgtctgaaaggcagc

SEQ ID NO: 39546 - DNA, 22 bp, Artificial Sequence
  Synthetic
gcagcttcctctctgatacgcc

SEQ ID NO: 39547 - DNA, 18 bp, Artificial Sequence
  Synthetic
cctgcaccagcgcgacaa

SEQ ID NO: 39548 - DNA, 20 bp, Artificial Sequence
  Synthetic
aatgcacttcctccccgacg

SEQ ID NO: 39549 - DNA, 20 bp, Artificial Sequence
  Synthetic
aatcggcggattcgtcacgg

SEQ ID NO: 39550 - DNA, 21 bp, Artificial Sequence
  Synthetic
tgttgtcgatgccttggtcgt

SEQ ID NO: 39551 - DNA, 22 bp, Artificial Sequence
  Synthetic
gttgaccgcattcatcagcacg

SEQ ID NO: 39552 - DNA, 19 bp, Artificial Sequence
  Synthetic
gtgttccgcccggtgtgga

SEQ ID NO: 39553 - DNA, 21 bp, Artificial Sequence
  Synthetic
ggtcactacggcgtactcggc

SEQ ID NO: 39554 - DNA, 22 bp, Artificial Sequence
  Synthetic
ggtggcgatggatttgttcagc

SEQ ID NO: 39555 - DNA, 21 bp, Artificial Sequence
  Synthetic
ccatccttttgaggggcacga

SEQ ID NO: 39556 - DNA, 19 bp, Artificial Sequence
  Synthetic
accgccctgccctgacctt

SEQ ID NO: 39557 - DNA, 22 bp, Artificial Sequence
  Synthetic
cgccgttacggacattcctacg

SEQ ID NO: 39558 - DNA, 22 bp, Artificial Sequence
  Synthetic
gacaaaactgcccccatctccg

SEQ ID NO: 39559 - DNA, 19 bp, Artificial Sequence
  Synthetic
cgtcggtttgggcgacgct

SEQ ID NO: 39560 - DNA, 20 bp, Artificial Sequence
  Synthetic
cgcacaaatcgaagccgacg

SEQ ID NO: 39561 - DNA, 22 bp, Artificial Sequence
  Synthetic
gctgcctgaagtttcagacggc

SEQ ID NO: 39562 - DNA, 21 bp, Artificial Sequence
  Synthetic
ataccgagtttcagcgccgtg

SEQ ID NO: 39563 - DNA, 20 bp, Artificial Sequence
  Synthetic
ctaccgccgtatcaggggct

SEQ ID NO: 39564 - DNA, 21 bp, Artificial Sequence
  Synthetic
atacaccggcaaaagcacccg

SEQ ID NO: 39565 - DNA, 25 bp, Artificial Sequence
  Synthetic
tcaacttcaaacaaactgtctttcc

SEQ ID NO: 39566 - DNA, 21 bp, Artificial Sequence
  Synthetic
ccggcataggttacgaatgtc

SEQ ID NO: 39567 - DNA, 19 bp, Artificial Sequence
  Synthetic
cttgcgcgtccctgccgaa

SEQ ID NO: 39568 - DNA, 21 bp, Artificial Sequence
  Synthetic
cgtcaaagttcggacggcaac

SEQ ID NO: 39569 - DNA, 21 bp, Artificial Sequence
  Synthetic
ttcggtttcaagtagcgcgca

SEQ ID NO: 39570 - DNA, 21 bp, Artificial Sequence
  Synthetic
gaagtacaggtggtgcagcgt

SEQ ID NO: 39571 - DNA, 19 bp, Artificial Sequence
  Synthetic
catacgccgcacaacccgc

SEQ ID NO: 39572 - DNA, 19 bp, Artificial Sequence
  Synthetic
cgcccgagcctgcccaatt

SEQ ID NO: 39573 - DNA, 18 bp, Artificial Sequence
  Synthetic
gcccgtgccaaggcagaa

SEQ ID NO: 39574 - DNA, 21 bp, Artificial Sequence
  Synthetic
ggacgtggagcagatcgaggg

SEQ ID NO: 39575 - DNA, 19 bp, Artificial Sequence
  Synthetic
cgctgtcgcgcaacagggt

SEQ ID NO: 39576 - DNA, 20 bp, Artificial Sequence
  Synthetic
cagcatgagcgcccatttcg

SEQ ID NO: 39577 - DNA, 20 bp, Artificial Sequence
  Synthetic
gcatttccccgttcggaggc

SEQ ID NO: 39578 - DNA, 21 bp, Artificial Sequence
  Synthetic
ccgatgtctgcaatgccaacg

SEQ ID NO: 39579 - DNA, 19 bp, Artificial Sequence
  Synthetic
ggaaacgggcgatggacgg

SEQ ID NO: 39580 - DNA, 22 bp, Artificial Sequence
  Synthetic
ggacaatgccgagcctgaaacg

SEQ ID NO: 39581 - DNA, 21 bp, Artificial Sequence
  Synthetic
tttgattaacaggcaacccgt

SEQ ID NO: 39582 - DNA, 20 bp, Artificial Sequence
  Synthetic
ccagcgcaccgttttcaagc

SEQ ID NO: 39583 - DNA, 19 bp, Artificial Sequence
  Synthetic
gctgccgtacagacgtgcc

SEQ ID NO: 39584 - DNA, 20 bp, Artificial Sequence
  Synthetic
aaccggtttgggtacgctgc

SEQ ID NO: 39585 - DNA, 21 bp, Artificial Sequence
  Synthetic
cacgcacctttgttcctgcct

SEQ ID NO: 39586 - DNA, 18 bp, Artificial Sequence
  Synthetic
gcaccgcgtgggcaaagt

SEQ ID NO: 39587 - DNA, 16 bp, Artificial Sequence
  Synthetic
ttgccgccgcagcctt

SEQ ID NO: 39588 - DNA, 19 bp, Artificial Sequence
  Synthetic
cgcttcatcgccgccctga

SEQ ID NO: 39589 - DNA, 18 bp, Artificial Sequence
  Synthetic
ccctcgtgcgcgaacaca

SEQ ID NO: 39590 - DNA, 21 bp, Artificial Sequence
  Synthetic
gagctgcactatcggcaggag

SEQ ID NO: 39591 - DNA, 22 bp, Artificial Sequence
  Synthetic
gccgaacaacaaatgctgcacc

SEQ ID NO: 39592 - DNA, 18 bp, Artificial Sequence
  Synthetic
acgggtcagggaaacgcg

SEQ ID NO: 39593 - DNA, 20 bp, Artificial Sequence
  Synthetic
gtcggtgcgggtgtacatgc

SEQ ID NO: 39594 - DNA, 20 bp, Artificial Sequence
  Synthetic
cggcaagttcttggacggca

SEQ ID NO: 39595 - DNA, 18 bp, Artificial Sequence
  Synthetic
gcacgatttgcgctccgc

SEQ ID NO: 39596 - DNA, 21 bp, Artificial Sequence
  Synthetic
gcccgattttcccgactgacg

SEQ ID NO: 39597 - DNA, 22 bp, Artificial Sequence
  Synthetic
gcagccgcgcaagtttttcaat

SEQ ID NO: 39598 - DNA, 21 bp, Artificial Sequence
  Synthetic
cattcccgactgccgttcagc

SEQ ID NO: 39599 - DNA, 20 bp, Artificial Sequence
  Synthetic
cgccttactcaaacggcggc

SEQ ID NO: 39600 - DNA, 19 bp, Artificial Sequence
  Synthetic
gaccgccgacatcgaagca

SEQ ID NO: 39601 - DNA, 17 bp, Artificial Sequence
  Synthetic
aaagccgcgccgttgca

SEQ ID NO: 39602 - DNA, 21 bp, Artificial Sequence
  Synthetic
ccgacctgcccgccattaacc

SEQ ID NO: 39603 - DNA, 22 bp, Artificial Sequence
  Synthetic
cctcctaaaccgacactaccgc

SEQ ID NO: 39604 - DNA, 22 bp, Artificial Sequence
  Synthetic
aaccattttttgaaccgccgcc

SEQ ID NO: 39605 - DNA, 21 bp, Artificial Sequence
  Synthetic
gcgcataaacaggaacacgcc

SEQ ID NO: 39606 - DNA, 19 bp, Artificial Sequence
  Synthetic
ggctcgaagggttcggcag

SEQ ID NO: 39607 - DNA, 18 bp, Artificial Sequence
  Synthetic
tgtgcggcggcaactgtc

SEQ ID NO: 39608 - DNA, 21 bp, Artificial Sequence
  Synthetic
cgcgcatttctccgtccaaac

SEQ ID NO: 39609 - DNA, 21 bp, Artificial Sequence
  Synthetic
ccgtgtccaactcgacaagca

SEQ ID NO: 39610 - DNA, 22 bp, Artificial Sequence
  Synthetic
caacgttaccgccgtacaaacc

SEQ ID NO: 39611 - DNA, 20 bp, Artificial Sequence
  Synthetic
gacgtaaagggcggctttgc

SEQ ID NO: 39612 - DNA, 19 bp, Artificial Sequence
  Synthetic
cccggcatggagctttggg

SEQ ID NO: 39613 - DNA, 20 bp, Artificial Sequence
  Synthetic
gtccgacaaacttgccggca

SEQ ID NO: 39614 - DNA, 19 bp, Artificial Sequence
  Synthetic
caactcctgtgcacgcgcc

SEQ ID NO: 39615 - DNA, 22 bp, Artificial Sequence
  Synthetic
ggcagctcgacaaacacgatgt

SEQ ID NO: 39616 - DNA, 22 bp, Artificial Sequence
  Synthetic
cgcttcggcaatattcgaacgc

SEQ ID NO: 39617 - DNA, 19 bp, Artificial Sequence
  Synthetic
ggcggcgacattctgccga

SEQ ID NO: 39618 - DNA, 18 bp, Artificial Sequence
  Synthetic
actcggcaatccgcgcct

SEQ ID NO: 39619 - DNA, 20 bp, Artificial Sequence
  Synthetic
cgtccatcacggttgtcggc

SEQ ID NO: 39620 - DNA, 19 bp, Artificial Sequence
  Synthetic
gcaaaacctgcccgcctcc

SEQ ID NO: 39621 - DNA, 19 bp, Artificial Sequence
  Synthetic
caccgaaccgggagacgct

SEQ ID NO: 39622 - DNA, 20 bp, Artificial Sequence
  Synthetic
catggttacgccgaccagct

SEQ ID NO: 39623 - DNA, 19 bp, Artificial Sequence
  Synthetic
agggcgaacacgaggctca

SEQ ID NO: 39624 - DNA, 19 bp, Artificial Sequence
  Synthetic
ggtttgggtggcggcctga

SEQ ID NO: 39625 - DNA, 22 bp, Artificial Sequence
  Synthetic
gatgtgttcgcggcggatttgc

SEQ ID NO: 39626 - DNA, 18 bp, Artificial Sequence
  Synthetic
ctgctgctgcgcctgcaa

SEQ ID NO: 39627 - DNA, 19 bp, Artificial Sequence
  Synthetic
agcgttgagcgtggcttgg

SEQ ID NO: 39628 - DNA, 21 bp, Artificial Sequence
  Synthetic
ttggaaattcggcggcaaacc

SEQ ID NO: 39629 - DNA, 21 bp, Artificial Sequence
  Synthetic
tgattctggcgttgcagtccg

SEQ ID NO: 39630 - DNA, 20 bp, Artificial Sequence
  Synthetic
gcaaacctgcccgaaaacgc

SEQ ID NO: 39631 - DNA, 20 bp, Artificial Sequence
  Synthetic
cgatttgccgcaaacccctg

SEQ ID NO: 39632 - DNA, 19 bp, Artificial Sequence
  Synthetic
ccgctaccacgccgaagtc

SEQ ID NO: 39633 - DNA, 21 bp, Artificial Sequence
  Synthetic
ttcttgatgggcgtcttgcgt

SEQ ID NO: 39634 - DNA, 19 bp, Artificial Sequence
  Synthetic
gaaggcatcggaagcggca

SEQ ID NO: 39635 - DNA, 20 bp, Artificial Sequence
  Synthetic
cacgtttttcttggcggcgg

SEQ ID NO: 39636 - DNA, 20 bp, Artificial Sequence
  Synthetic
aaggtatcggctgcaacggc

SEQ ID NO: 39637 - DNA, 18 bp, Artificial Sequence
  Synthetic
acgactgccgcgctttca

SEQ ID NO: 39638 - DNA, 22 bp, Artificial Sequence
  Synthetic
tgcccgcttctttgagtatcgg

SEQ ID NO: 39639 - DNA, 24 bp, Artificial Sequence
  Synthetic
tggttttgttttggtaatggcaac

SEQ ID NO: 39640 - DNA, 22 bp, Artificial Sequence
  Synthetic
tgattaaccaaatcaacgccgc

SEQ ID NO: 39641 - DNA, 24 bp, Artificial Sequence
  Synthetic
cgatgtagaagagcctgaattacc

SEQ ID NO: 39642 - DNA, 22 bp, Artificial Sequence
  Synthetic
ttcatgaaacagaaatccgcca

SEQ ID NO: 39643 - DNA, 20 bp, Artificial Sequence
  Synthetic
tttttggaaagcctgccgaa

SEQ ID NO: 39644 - DNA, 19 bp, Artificial Sequence
  Synthetic
ctgaggcttgaccccgtcg

SEQ ID NO: 39645 - DNA, 20 bp, Artificial Sequence
  Synthetic
gatcgcctggcaatcctgtc

SEQ ID NO: 39646 - DNA, 21 bp, Artificial Sequence
  Synthetic
gcagaaaatgcctgctgaccg

SEQ ID NO: 39647 - DNA, 19 bp, Artificial Sequence
  Synthetic
cggatatggccgtcgcaca

SEQ ID NO: 39648 - DNA, 20 bp, Artificial Sequence
  Synthetic
gcagtgcgcccaatccattg

SEQ ID NO: 39649 - DNA, 21 bp, Artificial Sequence
  Synthetic
atatccggcatagggcttgcc

SEQ ID NO: 39650 - DNA, 19 bp, Artificial Sequence
  Synthetic
gaaggaaaccgcgcctcgt

SEQ ID NO: 39651 - DNA, 19 bp, Artificial Sequence
  Synthetic
gccggtgtgcagctcgaca

SEQ ID NO: 39652 - DNA, 22 bp, Artificial Sequence
  Synthetic
agttcctgactgccgtaccacg

SEQ ID NO: 39653 - DNA, 20 bp, Artificial Sequence
  Synthetic
ggccccagataggcgatggt

SEQ ID NO: 39654 - DNA, 19 bp, Artificial Sequence
  Synthetic
gcgagttgggacgggttgg

SEQ ID NO: 39655 - DNA, 20 bp, Artificial Sequence
  Synthetic
cgcatagcggcacaaaagcc

SEQ ID NO: 39656 - DNA, 19 bp, Artificial Sequence
  Synthetic
cgtaggcctcggcgtcatc

SEQ ID NO: 39657 - DNA, 19 bp, Artificial Sequence
  Synthetic
ggttgctacggcccgctga

SEQ ID NO: 39658 - DNA, 21 bp, Artificial Sequence
  Synthetic
aagggtcggtcaatggttcgc

SEQ ID NO: 39659 - DNA, 18 bp, Artificial Sequence
  Synthetic
cgctgatgttggcggggt

SEQ ID NO: 39660 - DNA, 19 bp, Artificial Sequence
  Synthetic
tgcggcaaggttgaccagc

SEQ ID NO: 39661 - DNA, 21 bp, Artificial Sequence
  Synthetic
gccttcccaatagggcggacg

SEQ ID NO: 39662 - DNA, 18 bp, Artificial Sequence
  Synthetic
agccctttcgccgccaaa

SEQ ID NO: 39663 - DNA, 18 bp, Artificial Sequence
  Synthetic
ccagcgcatcaacgtgcg

SEQ ID NO: 39664 - DNA, 19 bp, Artificial Sequence
  Synthetic
tgaccgacgcaatccacgg

SEQ ID NO: 39665 - DNA, 20 bp, Artificial Sequence
  Synthetic
cgacgccttcaaagccgagc

SEQ ID NO: 39666 - DNA, 19 bp, Artificial Sequence
  Synthetic
ccctgcgggtctttccacg

SEQ ID NO: 39667 - DNA, 22 bp, Artificial Sequence
  Synthetic
gccttatctttcaacgcgtcgc

SEQ ID NO: 39668 - DNA, 19 bp, Artificial Sequence
  Synthetic
gcgcggtcagcctgcgtat

SEQ ID NO: 39669 - DNA, 19 bp, Artificial Sequence
  Synthetic
cgtaggcgggcgtattggc

SEQ ID NO: 39670 - DNA, 18 bp, Artificial Sequence
  Synthetic
aacgggctgcttgtcggc

SEQ ID NO: 39671 - DNA, 25 bp, Artificial Sequence
  Synthetic
tctaacaatatcgccatatttgggc

SEQ ID NO: 39672 - DNA, 22 bp, Artificial Sequence
  Synthetic
cttcctgctgcatcagttcggc

SEQ ID NO: 39673 - DNA, 19 bp, Artificial Sequence
  Synthetic
gctactcgcgcgcccaaca

SEQ ID NO: 39674 - DNA, 22 bp, Artificial Sequence
  Synthetic
actacgcaaacgaagccgaaca

SEQ ID NO: 39675 - DNA, 22 bp, Artificial Sequence
  Synthetic
gtttccctcatgcacgaagccg

SEQ ID NO: 39676 - DNA, 22 bp, Artificial Sequence
  Synthetic
gcgacaatcccgtcctgattgc

SEQ ID NO: 39677 - DNA, 22 bp, Artificial Sequence
  Synthetic
aaacccacgaagcctcattggg

SEQ ID NO: 39678 - DNA, 18 bp, Artificial Sequence
  Synthetic
gcttgcctgcggcgcaat

SEQ ID NO: 39679 - DNA, 18 bp, Artificial Sequence
  Synthetic
acgccctgaacactgccg

SEQ ID NO: 39680 - DNA, 21 bp, Artificial Sequence
  Synthetic
cgataacaccgtcttcgcggc

SEQ ID NO: 39681 - DNA, 21 bp, Artificial Sequence
  Synthetic
gggcaaaccggcaatcgaatg

SEQ ID NO: 39682 - DNA, 19 bp, Artificial Sequence
  Synthetic
ctgcctgtcccaatgcggc

SEQ ID NO: 39683 - DNA, 19 bp, Artificial Sequence
  Synthetic
gttgcggcggtattgcagc

SEQ ID NO: 39684 - DNA, 22 bp, Artificial Sequence
  Synthetic
aacgatctcgacgtggaaaccc

SEQ ID NO: 39685 - DNA, 21 bp, Artificial Sequence
  Synthetic
aaacaatcccaccgtggtcgc

SEQ ID NO: 39686 - DNA, 21 bp, Artificial Sequence
  Synthetic
gtcgcaagaactcagccgcct

SEQ ID NO: 39687 - DNA, 19 bp, Artificial Sequence
  Synthetic
cacccgccttcggcttcga

SEQ ID NO: 39688 - DNA, 22 bp, Artificial Sequence
  Synthetic
agaaggattatctcgcgctcgc

SEQ ID NO: 39689 - DNA, 19 bp, Artificial Sequence
  Synthetic
gggcaggtggcgcaattcc

SEQ ID NO: 39690 - DNA, 19 bp, Artificial Sequence
  Synthetic
ccggacttgcccatacccg

SEQ ID NO: 39691 - DNA, 22 bp, Artificial Sequence
  Synthetic
cgctcgaaaccctcgtttcaga

SEQ ID NO: 39692 - DNA, 20 bp, Artificial Sequence
  Synthetic
gacagtgcgctggatgcaac

SEQ ID NO: 39693 - DNA, 22 bp, Artificial Sequence
  Synthetic
aaaacccagcctatcccgacac

SEQ ID NO: 39694 - DNA, 21 bp, Artificial Sequence
  Synthetic
ccgtgcagacggttactgggc

SEQ ID NO: 39695 - DNA, 18 bp, Artificial Sequence
  Synthetic
acctgccgctgctgacca

SEQ ID NO: 39696 - DNA, 22 bp, Artificial Sequence
  Synthetic
tttcgccaaatcggacggatcg

SEQ ID NO: 39697 - DNA, 20 bp, Artificial Sequence
  Synthetic
tgccgtacatcgccgaaagc

SEQ ID NO: 39698 - DNA, 20 bp, Artificial Sequence
  Synthetic
aaacgggcgattgcaaaccg

SEQ ID NO: 39699 - DNA, 19 bp, Artificial Sequence
  Synthetic
aaaccgtccgccgtatcgc

SEQ ID NO: 39700 - DNA, 18 bp, Artificial Sequence
  Synthetic
ttgcgcgtccctgccgaa

SEQ ID NO: 39701 - DNA, 19 bp, Artificial Sequence
  Synthetic
gacgcgcggtcatcaggga

SEQ ID NO: 39702 - DNA, 18 bp, Artificial Sequence
  Synthetic
tgaagggaacacgggcgc

SEQ ID NO: 39703 - DNA, 21 bp, Artificial Sequence
  Synthetic
aagaatttccgcaacatcgcc

SEQ ID NO: 39704 - DNA, 21 bp, Artificial Sequence
  Synthetic
cgtcttggtgttccgcatcgg

SEQ ID NO: 39705 - DNA, 21 bp, Artificial Sequence
  Synthetic
gcgttgcccaagtcgtatcgt

SEQ ID NO: 39706 - DNA, 20 bp, Artificial Sequence
  Synthetic
gagctgccgtccgataaccg

SEQ ID NO: 39707 - DNA, 18 bp, Artificial Sequence
  Synthetic
gttccgccgcaatgccga

SEQ ID NO: 39708 - DNA, 18 bp, Artificial Sequence
  Synthetic
ttcgcacccgtccgcaaa

SEQ ID NO: 39709 - DNA, 20 bp, Artificial Sequence
  Synthetic
cgaacggcgaagaaatgcgc

SEQ ID NO: 39710 - DNA, 19 bp, Artificial Sequence
  Synthetic
cacccgaaccgccgagcat

SEQ ID NO: 39711 - DNA, 22 bp, Artificial Sequence
  Synthetic
gtccgcaccggcaaaatcaaac

SEQ ID NO: 39712 - DNA, 20 bp, Artificial Sequence
  Synthetic
caggttgccttccacccttc

SEQ ID NO: 39713 - DNA, 19 bp, Artificial Sequence
  Synthetic
cctgctcactcagggcgac

SEQ ID NO: 39714 - DNA, 21 bp, Artificial Sequence
  Synthetic
tgcatcggttatcagccgctt

SEQ ID NO: 39715 - DNA, 22 bp, Artificial Sequence
  Synthetic
gcgaaggcgagatatggtttgc

SEQ ID NO: 39716 - DNA, 22 bp, Artificial Sequence
  Synthetic
acttgattttgcgccaaaccgg

SEQ ID NO: 39717 - DNA, 20 bp, Artificial Sequence
  Synthetic
cgaagccatcggcacactcg

SEQ ID NO: 39718 - DNA, 21 bp, Artificial Sequence
  Synthetic
agccggcatcaaactcatcca

SEQ ID NO: 39719 - DNA, 20 bp, Artificial Sequence
  Synthetic
gcttgttcagaccgcgcagg

SEQ ID NO: 39720 - DNA, 19 bp, Artificial Sequence
  Synthetic
gcatcagggcgtgggacag

SEQ ID NO: 39721 - DNA, 18 bp, Artificial Sequence
  Synthetic
cgcccttgtttgccgcct

SEQ ID NO: 39722 - DNA, 21 bp, Artificial Sequence
  Synthetic
gggaaccattacgccgtcggc

SEQ ID NO: 39723 - DNA, 19 bp, Artificial Sequence
  Synthetic
ttgccttttgcggtgcggc

SEQ ID NO: 39724 - DNA, 19 bp, Artificial Sequence
  Synthetic
ttcgccggtctgctgatcg

SEQ ID NO: 39725 - DNA, 19 bp, Artificial Sequence
  Synthetic
ccttctgcgacacgcccgt

SEQ ID NO: 39726 - DNA, 20 bp, Artificial Sequence
  Synthetic
cacgcccgaaaccgaaaccg

SEQ ID NO: 39727 - DNA, 20 bp, Artificial Sequence
  Synthetic
cgagagcatcgtcgggttgt

SEQ ID NO: 39728 - DNA, 21 bp, Artificial Sequence
  Synthetic
catgtgcgcgtaaccaacacc

SEQ ID NO: 39729 - DNA, 19 bp, Artificial Sequence
  Synthetic
gcgtttgccgcgtccaacg

SEQ ID NO: 39730 - DNA, 22 bp, Artificial Sequence
  Synthetic
tcgtgcagcttcatcgtcaaca

SEQ ID NO: 39731 - DNA, 22 bp, Artificial Sequence
  Synthetic
ccgaacaccccttttcagacgg

SEQ ID NO: 39732 - DNA, 19 bp, Artificial Sequence
  Synthetic
accgcgcccgccataaacg

SEQ ID NO: 39733 - DNA, 19 bp, Artificial Sequence
  Synthetic
cacaagtccgccggcaaca

SEQ ID NO: 39734 - DNA, 22 bp, Artificial Sequence
  Synthetic
tcttcggcagattcgacttgcg

SEQ ID NO: 39735 - DNA, 19 bp, Artificial Sequence
  Synthetic
ccagtttggacggcaggct

SEQ ID NO: 39736 - DNA, 22 bp, Artificial Sequence
  Synthetic
ggcagatttgttcgagccttgc

SEQ ID NO: 39737 - DNA, 21 bp, Artificial Sequence
  Synthetic
cggacaaagcctcggagaagc

SEQ ID NO: 39738 - DNA, 20 bp, Artificial Sequence
  Synthetic
tggtacgccgatgccgtact

SEQ ID NO: 39739 - DNA, 19 bp, Artificial Sequence
  Synthetic
acttctggacgctgctgcc

SEQ ID NO: 39740 - DNA, 19 bp, Artificial Sequence
  Synthetic
ggaagccgttccttccgct

SEQ ID NO: 39741 - DNA, 22 bp, Artificial Sequence
  Synthetic
cgtcgtcgctttcttcaaaggc

SEQ ID NO: 39742 - DNA, 22 bp, Artificial Sequence
  Synthetic
cttaaacgcgcttctttgccgc

SEQ ID NO: 39743 - DNA, 18 bp, Artificial Sequence
  Synthetic
cccagccggtgtgcgttt

SEQ ID NO: 39744 - DNA, 19 bp, Artificial Sequence
  Synthetic
caacgcgctgtccgactgg

SEQ ID NO: 39745 - DNA, 22 bp, Artificial Sequence
  Synthetic
ggtgcatacgccgaagtcatcg

SEQ ID NO: 39746 - DNA, 19 bp, Artificial Sequence
  Synthetic
atcgccgtggacgacatcg

SEQ ID NO: 39747 - DNA, 18 bp, Artificial Sequence
  Synthetic
ccatgcttgccgaacgcg

SEQ ID NO: 39748 - DNA, 21 bp, Artificial Sequence
  Synthetic
cgatagctgccgttacgcagc

SEQ ID NO: 39749 - DNA, 22 bp, Artificial Sequence
  Synthetic
cgcatcgagataaagctgcggc

SEQ ID NO: 39750 - DNA, 21 bp, Artificial Sequence
  Synthetic
catttccttctccgccacgcg

SEQ ID NO: 39751 - DNA, 18 bp, Artificial Sequence
  Synthetic
gccgccgttgccgaaaca

SEQ ID NO: 39752 - DNA, 22 bp, Artificial Sequence
  Synthetic
ggcatcttccgccgtttcaaac

SEQ ID NO: 39753 - DNA, 22 bp, Artificial Sequence
  Synthetic
ctcgtcctgatcgaaaccgacc

SEQ ID NO: 39754 - DNA, 20 bp, Artificial Sequence
  Synthetic
taaagggcagccccagcgtg

SEQ ID NO: 39755 - DNA, 18 bp, Artificial Sequence
  Synthetic
gcgacccagccgccaaat

SEQ ID NO: 39756 - DNA, 20 bp, Artificial Sequence
  Synthetic
cgctgatgacgctcgaaggc

SEQ ID NO: 39757 - DNA, 19 bp, Artificial Sequence
  Synthetic
gccgactgcacgtccgcat

SEQ ID NO: 39758 - DNA, 21 bp, Artificial Sequence
  Synthetic
ctgctgccgctgaaatccaca

SEQ ID NO: 39759 - DNA, 18 bp, Artificial Sequence
  Synthetic
ccgccacatcgggcgaaa

SEQ ID NO: 39760 - DNA, 20 bp, Artificial Sequence
  Synthetic
actgctccaaaccgacctgc

SEQ ID NO: 39761 - DNA, 18 bp, Artificial Sequence
  Synthetic
tcctgctgcaacgcaccc

SEQ ID NO: 39762 - DNA, 21 bp, Artificial Sequence
  Synthetic
agctgtcggcgatttgatccg

SEQ ID NO: 39763 - DNA, 22 bp, Artificial Sequence
  Synthetic
cggcagtgccatcatcaaaagc

SEQ ID NO: 39764 - DNA, 19 bp, Artificial Sequence
  Synthetic
ggcacgtccgtcacccaca

SEQ ID NO: 39765 - DNA, 19 bp, Artificial Sequence
  Synthetic
accgtggccgaagtgttcg

SEQ ID NO: 39766 - DNA, 20 bp, Artificial Sequence
  Synthetic
tcagacggcattcgggcaaa

SEQ ID NO: 39767 - DNA, 21 bp, Artificial Sequence
  Synthetic
accaattacgatgtgtgcgtt

SEQ ID NO: 39768 - DNA, 20 bp, Artificial Sequence
  Synthetic
acgtttggctgcgatatcag

SEQ ID NO: 39769 - DNA, 21 bp, Artificial Sequence
  Synthetic
tttggttgcatttgccaagac

SEQ ID NO: 39770 - DNA, 22 bp, Artificial Sequence
  Synthetic
gtatccgccaaacccttacgcg

SEQ ID NO: 39771 - DNA, 18 bp, Artificial Sequence
  Synthetic
acgcccaacgaggcttcg

SEQ ID NO: 39772 - DNA, 20 bp, Artificial Sequence
  Synthetic
gcgaaccggattccaaggcg

SEQ ID NO: 39773 - DNA, 22 bp, Artificial Sequence
  Synthetic
tcgtcaatcaccatcaccacgc

SEQ ID NO: 39774 - DNA, 20 bp, Artificial Sequence
  Synthetic
accagccccaacatccggaa

SEQ ID NO: 39775 - DNA, 22 bp, Artificial Sequence
  Synthetic
caaaacccaaggataggcctcc

SEQ ID NO: 39776 - DNA, 22 bp, Artificial Sequence
  Synthetic
attagacagggcggagatgtgc

SEQ ID NO: 39777 - DNA, 19 bp, Artificial Sequence
  Synthetic
cctgcgggcgatggacact

SEQ ID NO: 39778 - DNA, 20 bp, Artificial Sequence
  Synthetic
tttgtcggtttcgcggctgg

SEQ ID NO: 39779 - DNA, 21 bp, Artificial Sequence
  Synthetic
taacgcgcgataaaggggacg

SEQ ID NO: 39780 - DNA, 22 bp, Artificial Sequence
  Synthetic
aaggttgcggaatgtgtgagga

SEQ ID NO: 39781 - DNA, 22 bp, Artificial Sequence
  Synthetic
gctgcgacagaaagcaccaatg

SEQ ID NO: 39782 - DNA, 22 bp, Artificial Sequence
  Synthetic
aatggtgcgttccatgctgtcc

SEQ ID NO: 39783 - DNA, 19 bp, Artificial Sequence
  Synthetic
caaaccggccacctgtgca

SEQ ID NO: 39784 - DNA, 20 bp, Artificial Sequence
  Synthetic
gccccgtccaagaaagcgtc

SEQ ID NO: 39785 - DNA, 19 bp, Artificial Sequence
  Synthetic
ggcagcgtcgaccagcagt

SEQ ID NO: 39786 - DNA, 19 bp, Artificial Sequence
  Synthetic
cctgtccctcgtcgttgcc

SEQ ID NO: 39787 - DNA, 21 bp, Artificial Sequence
  Synthetic
tcgtcccctacttcaccccct

SEQ ID NO: 39788 - DNA, 20 bp, Artificial Sequence
  Synthetic
acgaagaatgcagccccgac

SEQ ID NO: 39789 - DNA, 22 bp, Artificial Sequence
  Synthetic
cacatcctcctccaacagctcc

SEQ ID NO: 39790 - DNA, 22 bp, Artificial Sequence
  Synthetic
tgggcaaagccttgaaacagcc

SEQ ID NO: 39791 - DNA, 20 bp, Artificial Sequence
  Synthetic
ccggttgcggacaagtcgat

SEQ ID NO: 39792 - DNA, 22 bp, Artificial Sequence
  Synthetic
ccacgcttttgcccaacttgac

SEQ ID NO: 39793 - DNA, 24 bp, Artificial Sequence
  Synthetic
gttcagacggcattgtttatctgt

SEQ ID NO: 39794 - DNA, 20 bp, Artificial Sequence
  Synthetic
aaatgtgggcaatatcgggc

SEQ ID NO: 39795 - DNA, 21 bp, Artificial Sequence
  Synthetic
tttgaaagcggatgggggacg

SEQ ID NO: 39796 - DNA, 21 bp, Artificial Sequence
  Synthetic
ttttccatgctgaccgtgccg

SEQ ID NO: 39797 - DNA, 22 bp, Artificial Sequence
  Synthetic
atttgccatattgccgccgaag

SEQ ID NO: 39798 - DNA, 22 bp, Artificial Sequence
  Synthetic
tgccggctgatattgaggtagc

SEQ ID NO: 39799 - DNA, 19 bp, Artificial Sequence
  Synthetic
cgggcgagcctttgagggt

SEQ ID NO: 39800 - DNA, 20 bp, Artificial Sequence
  Synthetic
ctgcttccgtaccggcgatc

SEQ ID NO: 39801 - DNA, 21 bp, Artificial Sequence
  Synthetic
cggtggaggacaggaatgtgc

SEQ ID NO: 39802 - DNA, 20 bp, Artificial Sequence
  Synthetic
cccccagcctggcatcgatg

SEQ ID NO: 39803 - DNA, 18 bp, Artificial Sequence
  Synthetic
ggtgcgccgcaaaccgat

SEQ ID NO: 39804 - DNA, 19 bp, Artificial Sequence
  Synthetic
ggtaacgtccgcgccccat

SEQ ID NO: 39805 - DNA, 19 bp, Artificial Sequence
  Synthetic
cgtcgcgccaggtttgacg

SEQ ID NO: 39806 - DNA, 21 bp, Artificial Sequence
  Synthetic
ccgtttggcagccagaattcg

SEQ ID NO: 39807 - DNA, 22 bp, Artificial Sequence
  Synthetic
tcgatacgcaacgccataacgt

SEQ ID NO: 39808 - DNA, 22 bp, Artificial Sequence
  Synthetic
agaacgtcggtgtctttgagca

SEQ ID NO: 39809 - DNA, 18 bp, Artificial Sequence
  Synthetic
gcacgccccaaaatcgcc

SEQ ID NO: 39810 - DNA, 22 bp, Artificial Sequence
  Synthetic
acacgttgtcgatttggcaccc

SEQ ID NO: 39811 - DNA, 19 bp, Artificial Sequence
  Synthetic
tccgacagggacggacagc

SEQ ID NO: 39812 - DNA, 19 bp, Artificial Sequence
  Synthetic
ggtcatgctggtcgcccat

SEQ ID NO: 39813 - DNA, 20 bp, Artificial Sequence
  Synthetic
actgtggcagaccgttaccg

SEQ ID NO: 39814 - DNA, 18 bp, Artificial Sequence
  Synthetic
cgggctgttgcgccaaca

SEQ ID NO: 39815 - DNA, 18 bp, Artificial Sequence
  Synthetic
ggcgcgctttggggtgtt

SEQ ID NO: 39816 - DNA, 22 bp, Artificial Sequence
  Synthetic
acgttttttgctgttggacggc

SEQ ID NO: 39817 - DNA, 20 bp, Artificial Sequence
  Synthetic
cagggttgccattcgggggt

SEQ ID NO: 39818 - DNA, 19 bp, Artificial Sequence
  Synthetic
ttccatcacttgcgccgcc

SEQ ID NO: 39819 - DNA, 19 bp, Artificial Sequence
  Synthetic
cggcgacggagtgcgtact

SEQ ID NO: 39820 - DNA, 20 bp, Artificial Sequence
  Synthetic
cccggcagtcgattacccag

SEQ ID NO: 39821 - DNA, 18 bp, Artificial Sequence
  Synthetic
catcggatgccgcgccaa

SEQ ID NO: 39822 - DNA, 21 bp, Artificial Sequence
  Synthetic
cgactgccgttccgaaggtca

SEQ ID NO: 39823 - DNA, 19 bp, Artificial Sequence
  Synthetic
cgccgaaccaaaccagccc

SEQ ID NO: 39824 - DNA, 19 bp, Artificial Sequence
  Synthetic
gcccgatggtgcgcctgaa

SEQ ID NO: 39825 - DNA, 18 bp, Artificial Sequence
  Synthetic
gcgcatcgccattgtccg

SEQ ID NO: 39826 - DNA, 21 bp, Artificial Sequence
  Synthetic
gcaaaccgcgtcgaatacgtc

SEQ ID NO: 39827 - DNA, 19 bp, Artificial Sequence
  Synthetic
cccgacgatggggctgaac

SEQ ID NO: 39828 - DNA, 21 bp, Artificial Sequence
  Synthetic
ggattttcagagcctccgccg

SEQ ID NO: 39829 - DNA, 20 bp, Artificial Sequence
  Synthetic
cgaagaaatcgcccgcaccg

SEQ ID NO: 39830 - DNA, 21 bp, Artificial Sequence
  Synthetic
aagccagcatcctgccggata

SEQ ID NO: 39831 - DNA, 22 bp, Artificial Sequence
  Synthetic
tgacctgtaccggtgcactttc

SEQ ID NO: 39832 - DNA, 22 bp, Artificial Sequence
  Synthetic
tacggatctggtgggaaagggc

SEQ ID NO: 39833 - DNA, 22 bp, Artificial Sequence
  Synthetic
ccgtgccacggttcgaaattcg

SEQ ID NO: 39834 - DNA, 18 bp, Artificial Sequence
  Synthetic
gcggcgggcaaaggcatt

SEQ ID NO: 39835 - DNA, 20 bp, Artificial Sequence
  Synthetic
cgcgtttcgaattccgctgg

SEQ ID NO: 39836 - DNA, 19 bp, Artificial Sequence
  Synthetic
gtaaccggccgtccgcaga

SEQ ID NO: 39837 - DNA, 22 bp, Artificial Sequence
  Synthetic
gtgaaggcgttgatgagttcgc

SEQ ID NO: 39838 - DNA, 21 bp, Artificial Sequence
  Synthetic
tgtgccgctgttttttcccgt

SEQ ID NO: 39839 - DNA, 19 bp, Artificial Sequence
  Synthetic
caaaatcctgcgccgccca

SEQ ID NO: 39840 - DNA, 22 bp, Artificial Sequence
  Synthetic
tggagcgaggcgtattacaccg

SEQ ID NO: 39841 - DNA, 22 bp, Artificial Sequence
  Synthetic
ggtgcttggtgtcgattttgcc

SEQ ID NO: 39842 - DNA, 21 bp, Artificial Sequence
  Synthetic
atccaccctgcccgcctttta

SEQ ID NO: 39843 - DNA, 21 bp, Artificial Sequence
  Synthetic
atccgctgttttgcttcgggc

SEQ ID NO: 39844 - DNA, 20 bp, Artificial Sequence
  Synthetic
cagcgcgccttgaatttcgc

SEQ ID NO: 39845 - DNA, 20 bp, Artificial Sequence
  Synthetic
atggcgatgcgcggtttgtg

SEQ ID NO: 39846 - DNA, 20 bp, Artificial Sequence
  Synthetic
ttttcatcgggcggggaagc

SEQ ID NO: 39847 - DNA, 20 bp, Artificial Sequence
  Synthetic
gcaggttcggtttttgcgcc

SEQ ID NO: 39848 - DNA, 18 bp, Artificial Sequence
  Synthetic
gctgccgatgcctttggc

SEQ ID NO: 39849 - DNA, 22 bp, Artificial Sequence
  Synthetic
caggttacgatggtgtggtccg

SEQ ID NO: 39850 - DNA, 22 bp, Artificial Sequence
  Synthetic
ttgaccgaggtgtttctgcagg

SEQ ID NO: 39851 - DNA, 19 bp, Artificial Sequence
  Synthetic
acggaacagacgggggcga

SEQ ID NO: 39852 - DNA, 19 bp, Artificial Sequence
  Synthetic
tgtttcatgcgccgtgcgg

SEQ ID NO: 39853 - DNA, 19 bp, Artificial Sequence
  Synthetic
cttgaaaccggcgttgcgg

SEQ ID NO: 39854 - DNA, 22 bp, Artificial Sequence
  Synthetic
aatcaaacccgaaaaacgcggc

SEQ ID NO: 39855 - DNA, 24 bp, Artificial Sequence
  Synthetic
tttccaagtcaagcctacattcat

SEQ ID NO: 39856 - DNA, 21 bp, Artificial Sequence
  Synthetic
aaccgcccgtaatccaaagca

SEQ ID NO: 39857 - DNA, 19 bp, Artificial Sequence
  Synthetic
ggccggcgtagttgtggct

SEQ ID NO: 39858 - DNA, 19 bp, Artificial Sequence
  Synthetic
gcgcttttcggcagggtgc

SEQ ID NO: 39859 - DNA, 19 bp, Artificial Sequence
  Synthetic
aagacgtacaccgccgcac

SEQ ID NO: 39860 - DNA, 19 bp, Artificial Sequence
  Synthetic
cccgaaaacggcaccgtgg

SEQ ID NO: 39861 - DNA, 19 bp, Artificial Sequence
  Synthetic
gggaatctgcccccggatg

SEQ ID NO: 39862 - DNA, 18 bp, Artificial Sequence
  Synthetic
gcccaaaatcggcgcggt

SEQ ID NO: 39863 - DNA, 20 bp, Artificial Sequence
  Synthetic
gtcgggcaagccagctttcg

SEQ ID NO: 39864 - DNA, 18 bp, Artificial Sequence
  Synthetic
atttccggcgcgcctgct

SEQ ID NO: 39865 - DNA, 22 bp, Artificial Sequence
  Synthetic
acgatttgtggaatcctgccga

SEQ ID NO: 39866 - DNA, 19 bp, Artificial Sequence
  Synthetic
tcgtcaaagccgcgtgtgg

SEQ ID NO: 39867 - DNA, 21 bp, Artificial Sequence
  Synthetic
ctcctcgtgctgctggtcatc

SEQ ID NO: 39868 - DNA, 20 bp, Artificial Sequence
  Synthetic
caaaaccacatccgccgcac

SEQ ID NO: 39869 - DNA, 18 bp, Artificial Sequence
  Synthetic
tgccgccgatgaagccct

SEQ ID NO: 39870 - DNA, 20 bp, Artificial Sequence
  Synthetic
caaagacccctacgccctgc

SEQ ID NO: 39871 - DNA, 20 bp, Artificial Sequence
  Synthetic
gagttgggcgcggttaacga

SEQ ID NO: 39872 - DNA, 19 bp, Artificial Sequence
  Synthetic
ggcaaagccgtggcacagg

SEQ ID NO: 39873 - DNA, 19 bp, Artificial Sequence
  Synthetic
gcggtgggcggcaggattt

SEQ ID NO: 39874 - DNA, 20 bp, Artificial Sequence
  Synthetic
cgataaagcccggggcgacg

SEQ ID NO: 39875 - DNA, 22 bp, Artificial Sequence
  Synthetic
ccgctgtccgccggataagttg

SEQ ID NO: 39876 - DNA, 22 bp, Artificial Sequence
  Synthetic
agggatgctgatgttggcaagg

SEQ ID NO: 39877 - DNA, 19 bp, Artificial Sequence
  Synthetic
tagctttcggtggcggcaa

SEQ ID NO: 39878 - DNA, 18 bp, Artificial Sequence
  Synthetic
ggcggcgttgcctgcaat

SEQ ID NO: 39879 - DNA, 21 bp, Artificial Sequence
  Synthetic
cttgcctgttttgcggtagcc

SEQ ID NO: 39880 - DNA, 23 bp, Artificial Sequence
  Synthetic
cgcatgttgtgagaaatgcttaa

SEQ ID NO: 39881 - DNA, 20 bp, Artificial Sequence
  Synthetic
aaacagcagcacaaccagaa

SEQ ID NO: 39882 - DNA, 21 bp, Artificial Sequence
  Synthetic
gcagaaaactggactttgcgt

SEQ ID NO: 39883 - DNA, 20 bp, Artificial Sequence
  Synthetic
cgggcccaggattaccttct

SEQ ID NO: 39884 - DNA, 21 bp, Artificial Sequence
  Synthetic
cccctagggtgttttacgagt

SEQ ID NO: 39885 - DNA, 20 bp, Artificial Sequence
  Synthetic
ggtcctttgggcattggaac

SEQ ID NO: 39886 - DNA, 25 bp, Artificial Sequence
  Synthetic
aaaattaagcattgaggacccaagt

SEQ ID NO: 39887 - DNA, 20 bp, Artificial Sequence
  Synthetic
ccgagacttgagccacacaa

SEQ ID NO: 39888 - DNA, 20 bp, Artificial Sequence
  Synthetic
gagtcccccaaaggagtgga

SEQ ID NO: 39889 - DNA, 20 bp, Artificial Sequence
  Synthetic
gggagaccgaagcgaggagg

SEQ ID NO: 39890 - DNA, 19 bp, Artificial Sequence
  Synthetic
cccaagctccttcccccca

SEQ ID NO: 39891 - DNA, 20 bp, Artificial Sequence
  Synthetic
gcgaggaggtggagatgcca

SEQ ID NO: 39892 - DNA, 22 bp, Artificial Sequence
  Synthetic
acttccatctggtccgttcggg

SEQ ID NO: 39893 - DNA, 25 bp, Artificial Sequence
  Synthetic
tgtgaaagcttgaatactactttgc

SEQ ID NO: 39894 - DNA, 22 bp, Artificial Sequence
  Synthetic
gaattgtggatgaaaagcgacg

SEQ ID NO: 39895 - DNA, 25 bp, Artificial Sequence
  Synthetic
tgaggatgaaacagataatatgcgt

SEQ ID NO: 39896 - DNA, 25 bp, Artificial Sequence
  Synthetic
agctatagtggaaaaacatacaggg

SEQ ID NO: 39897 - DNA, 25 bp, Artificial Sequence
  Synthetic
ttgcaagacataacaaatcaacaca

SEQ ID NO: 39898 - DNA, 20 bp, Artificial Sequence
  Synthetic
atggagaacctttgccagcg

SEQ ID NO: 39899 - DNA, 22 bp, Artificial Sequence
  Synthetic
atatgggacaggtgtgcaatgg

SEQ ID NO: 39900 - DNA, 20 bp, Artificial Sequence
  Synthetic
acacagcccggacagtcagt

SEQ ID NO: 39901 - DNA, 23 bp, Artificial Sequence
  Synthetic
gctttgaacttaccacatcctct

SEQ ID NO: 39902 - DNA, 20 bp, Artificial Sequence
  Synthetic
taggttgggtcaaaaggcca

SEQ ID NO: 39903 - DNA, 25 bp, Artificial Sequence
  Synthetic
ctagtgacagcaaggtatatcttcc

SEQ ID NO: 39904 - DNA, 21 bp, Artificial Sequence
  Synthetic
taatcctgacacagaacgcct

SEQ ID NO: 39905 - DNA, 22 bp, Artificial Sequence
  Synthetic
taaaggtgctgaatcaggcagg

SEQ ID NO: 39906 - DNA, 20 bp, Artificial Sequence
  Synthetic
ggactcatgacgctcgcgtg

SEQ ID NO: 39907 - DNA, 22 bp, Artificial Sequence
  Synthetic
ctcgtagaccgtagcacatgcc

SEQ ID NO: 39908 - DNA, 22 bp, Artificial Sequence
  Synthetic
tcggtgtccacctttttgtggt

SEQ ID NO: 39909 - DNA, 22 bp, Artificial Sequence
  Synthetic
acggactccttcttggctgacc

SEQ ID NO: 39910 - DNA, 22 bp, Artificial Sequence
  Synthetic
aaataacacatggggttgctgc

SEQ ID NO: 39911 - DNA, 21 bp, Artificial Sequence
  Synthetic
ggttcttggttacaggttccg

SEQ ID NO: 39912 - DNA, 20 bp, Artificial Sequence
  Synthetic
gcgtctcggaaagtgtcatg

SEQ ID NO: 39913 - DNA, 21 bp, Artificial Sequence
  Synthetic
taccgcaccttttacgctgca

SEQ ID NO: 39914 - DNA, 22 bp, Artificial Sequence
  Synthetic
gggagaccaaggggtatctggt

SEQ ID NO: 39915 - DNA, 22 bp, Artificial Sequence
  Synthetic
tcttggtcctaaatcccagtgt

SEQ ID NO: 39916 - DNA, 23 bp, Artificial Sequence
  Synthetic
ttaaccgatgaaggcactatccc

SEQ ID NO: 39917 - DNA, 21 bp, Artificial Sequence
  Synthetic
aggagcaaatttggacgagtg

SEQ ID NO: 39918 - DNA, 20 bp, Artificial Sequence
  Synthetic
gcaggagttgtgggcgtctt

SEQ ID NO: 39919 - DNA, 20 bp, Artificial Sequence
  Synthetic
ggagcgggtgagtgtaaccc

SEQ ID NO: 39920 - DNA, 25 bp, Artificial Sequence
  Synthetic
gtttcctcaaacaaagatcattggt

SEQ ID NO: 39921 - DNA, 22 bp, Artificial Sequence
  Synthetic
attgaggctttctcggtggtgc

SEQ ID NO: 39922 - DNA, 22 bp, Artificial Sequence
  Synthetic
aaccaagtgatgctgtgtgaac

SEQ ID NO: 39923 - DNA, 22 bp, Artificial Sequence
  Synthetic
gagaaccttatgtgtcatgcga

SEQ ID NO: 39924 - DNA, 20 bp, Artificial Sequence
  Synthetic
gcagagacaactggaaaggc

SEQ ID NO: 39925 - DNA, 20 bp, Artificial Sequence
  Synthetic
gcgagaagttacgctcagga

SEQ ID NO: 39926 - DNA, 21 bp, Artificial Sequence
  Synthetic
gtgcagagagtgtacaccaag

SEQ ID NO: 39927 - DNA, 22 bp, Artificial Sequence
  Synthetic
ttctgtgttccaaaggacgtcg

SEQ ID NO: 39928 - DNA, 20 bp, Artificial Sequence
  Synthetic
acagtaaggttacggccgat

SEQ ID NO: 39929 - DNA, 21 bp, Artificial Sequence
  Synthetic
gcaggagctgatgaaacagtt

SEQ ID NO: 39930 - DNA, 22 bp, Artificial Sequence
  Synthetic
acaaaggcaaaatgtcagcatg

SEQ ID NO: 39931 - DNA, 20 bp, Artificial Sequence
  Synthetic
tgggctccaatgctatggaa

SEQ ID NO: 39932 - DNA, 19 bp, Artificial Sequence
  Synthetic
agatttgggcgtgcccccg

SEQ ID NO: 39933 - DNA, 19 bp, Artificial Sequence
  Synthetic
gtgcgcgcgactcggaaga

SEQ ID NO: 39934 - DNA, 22 bp, Artificial Sequence
  Synthetic
gcccttcttcggagagccgttg

SEQ ID NO: 39935 - DNA, 22 bp, Artificial Sequence
  Synthetic
accagtttctttaaccccgggc

SEQ ID NO: 39936 - DNA, 20 bp, Artificial Sequence
  Synthetic
actatcccccacgaccgtgc

SEQ ID NO: 39937 - DNA, 20 bp, Artificial Sequence
  Synthetic
gcttccgcaagcacccagac

SEQ ID NO: 39938 - DNA, 19 bp, Artificial Sequence
  Synthetic
aggttggtccctggggcca

SEQ ID NO: 39939 - DNA, 20 bp, Artificial Sequence
  Synthetic
catgcctcttccaccctgcc

SEQ ID NO: 39940 - DNA, 20 bp, Artificial Sequence
  Synthetic
ccaaaggcccggtagtgcag

SEQ ID NO: 39941 - DNA, 19 bp, Artificial Sequence
  Synthetic
cgaaggcgctcgagttcgt

SEQ ID NO: 39942 - DNA, 20 bp, Artificial Sequence
  Synthetic
catacccgcgacaggagacg

SEQ ID NO: 39943 - DNA, 21 bp, Artificial Sequence
  Synthetic
gagaccgtccggcattttcga

SEQ ID NO: 39944 - DNA, 22 bp, Artificial Sequence
  Synthetic
tcacactgacacaccccatcac

SEQ ID NO: 39945 - DNA, 19 bp, Artificial Sequence
  Synthetic
tcacagatcgcgccaccca

SEQ ID NO: 39946 - DNA, 20 bp, Artificial Sequence
  Synthetic
cgcggggatggagtgaactc

SEQ ID NO: 39947 - DNA, 22 bp, Artificial Sequence
  Synthetic
accctgtaaccccctcctaagg

SEQ ID NO: 39948 - DNA, 22 bp, Artificial Sequence
  Synthetic
aagcacatagagggtgtgtggc

SEQ ID NO: 39949 - DNA, 21 bp, Artificial Sequence
  Synthetic
gatgaagcgagcctgagagcc

SEQ ID NO: 39950 - DNA, 21 bp, Artificial Sequence
  Synthetic
cagactgcttacggtttcgtc

SEQ ID NO: 39951 - DNA, 22 bp, Artificial Sequence
  Synthetic
atgtggagaccttgaatgagga

SEQ ID NO: 39952 - DNA, 20 bp, Artificial Sequence
  Synthetic
caggctgctggtgttatcag

SEQ ID NO: 39953 - DNA, 24 bp, Artificial Sequence
  Synthetic
ggactttaccgtcagtgtatacgt

SEQ ID NO: 39954 - DNA, 21 bp, Artificial Sequence
  Synthetic
cttaaaagggggtgcaccaat

SEQ ID NO: 39955 - DNA, 25 bp, Artificial Sequence
  Synthetic
ggtacagaggatgattatcaaggtc

SEQ ID NO: 39956 - DNA, 20 bp, Artificial Sequence
  Synthetic
aggtgcactcaacaaggcaa

SEQ ID NO: 39957 - DNA, 24 bp, Artificial Sequence
  Synthetic
tattgcagtcaatgacaaagctct

SEQ ID NO: 39958 - DNA, 22 bp, Artificial Sequence
  Synthetic
aataccctccaaaaaggctggt

SEQ ID NO: 39959 - DNA, 22 bp, Artificial Sequence
  Synthetic
agaaacagtttctttggctggc

SEQ ID NO: 39960 - DNA, 23 bp, Artificial Sequence
  Synthetic
acatgtctgctttaaaccacaca

SEQ ID NO: 39961 - DNA, 23 bp, Artificial Sequence
  Synthetic
tcaagcctgtgtcgtataaactc

SEQ ID NO: 39962 - DNA, 23 bp, Artificial Sequence
  Synthetic
actcccttgattcttatccagct

SEQ ID NO: 39963 - DNA, 20 bp, Artificial Sequence
  Synthetic
atggttgcacctcttcgact

SEQ ID NO: 39964 - DNA, 22 bp, Artificial Sequence
  Synthetic
cgcttcacctctactttgacaa

SEQ ID NO: 39965 - DNA, 20 bp, Artificial Sequence
  Synthetic
ggcaaagttgaagggtgcat

SEQ ID NO: 39966 - DNA, 24 bp, Artificial Sequence
  Synthetic
gttctagcatgctacaatggttca

SEQ ID NO: 39967 - DNA, 21 bp, Artificial Sequence
  Synthetic
tcaaacaggaattgccgtctt

SEQ ID NO: 39968 - DNA, 25 bp, Artificial Sequence
  Synthetic
tactcttggtattatggcaattgct

SEQ ID NO: 39969 - DNA, 22 bp, Artificial Sequence
  Synthetic
gtgctactcttcaggctattgc

SEQ ID NO: 39970 - DNA, 22 bp, Artificial Sequence
  Synthetic
cggaatgtggaaaggttatggc

SEQ ID NO: 39971 - DNA, 22 bp, Artificial Sequence
  Synthetic
acgatttcggtgatttcgtaca

SEQ ID NO: 39972 - DNA, 20 bp, Artificial Sequence
  Synthetic
catgtgtggcggctcactat

SEQ ID NO: 39973 - DNA, 24 bp, Artificial Sequence
  Synthetic
catgcaaaagtactctacactcca

SEQ ID NO: 39974 - DNA, 23 bp, Artificial Sequence
  Synthetic
tattggcgatcctgctcaattac

SEQ ID NO: 39975 - DNA, 24 bp, Artificial Sequence
  Synthetic
agaatttcttacacgcaatcctgc

SEQ ID NO: 39976 - DNA, 25 bp, Artificial Sequence
  Synthetic
tgtaactggactttttaaggactgt

SEQ ID NO: 39977 - DNA, 22 bp, Artificial Sequence
  Synthetic
agagatgctgtgggtactaacc

SEQ ID NO: 39978 - DNA, 22 bp, Artificial Sequence
  Synthetic
tgaaagaacgtgttgtctgtgt

SEQ ID NO: 39979 - DNA, 24 bp, Artificial Sequence
  Synthetic
tggaaatccaaaggctatcaagtg

SEQ ID NO: 39980 - DNA, 23 bp, Artificial Sequence
  Synthetic
ctccagctttcgataaaagtgca

SEQ ID NO: 39981 - DNA, 20 bp, Artificial Sequence
  Synthetic
cgaagcacctgtttccatca

SEQ ID NO: 39982 - DNA, 24 bp, Artificial Sequence
  Synthetic
ctacccaaaactacaagcaagtca

SEQ ID NO: 39983 - DNA, 24 bp, Artificial Sequence
  Synthetic
ccttttcgcttgatgtttcagaaa

SEQ ID NO: 39984 - DNA, 24 bp, Artificial Sequence
  Synthetic
agatgatgtaagacaaatagcgcc

SEQ ID NO: 39985 - DNA, 22 bp, Artificial Sequence
  Synthetic
ttggctaccaaccttacagagt

SEQ ID NO: 39986 - DNA, 24 bp, Artificial Sequence
  Synthetic
caattcatgcagatcaactcacac

SEQ ID NO: 39987 - DNA, 25 bp, Artificial Sequence
  Synthetic
cagaagttcaatggacttacagtgt

SEQ ID NO: 39988 - DNA, 21 bp, Artificial Sequence
  Synthetic
caggagaggaacttcaccaca

SEQ ID NO: 39989 - DNA, 20 bp, Artificial Sequence
  Synthetic
gcaggtatggaggcgcaatt

SEQ ID NO: 39990 - DNA, 20 bp, Artificial Sequence
  Synthetic
cgcttcgattgtgtgcgtac

SEQ ID NO: 39991 - DNA, 20 bp, Artificial Sequence
  Synthetic
ttgtggccagtaacacttgc

SEQ ID NO: 39992 - DNA, 22 bp, Artificial Sequence
  Synthetic
acaaattaggagcgtcgcagcg

SEQ ID NO: 39993 - DNA, 24 bp, Artificial Sequence
  Synthetic
actactaaaagaaccttgcccatc

SEQ ID NO: 39994 - DNA, 25 bp, Artificial Sequence
  Synthetic
ctaggggtaatacttatagcactgc

SEQ ID NO: 39995 - DNA, 21 bp, Artificial Sequence
  Synthetic
actgcgtcttggttcacagct

SEQ ID NO: 39996 - DNA, 20 bp, Artificial Sequence
  Synthetic
cgccaaaaacgtactgccac

SEQ ID NO: 39997 - DNA, 21 bp, Artificial Sequence
  Synthetic
attcccaccaacagagcctaa

SEQ ID NO: 39998 - DNA, 24 bp, Artificial Sequence
  Synthetic
gaaagagccaccacattttcatcg

SEQ ID NO: 39999 - DNA, 22 bp, Artificial Sequence
  Synthetic
ctgtcaaaggtcaagcacttct

SEQ ID NO: 40000 - DNA, 22 bp, Artificial Sequence
  Synthetic
gtgtgctcagtgtgcttcctcc

SEQ ID NO: 40001 - DNA, 23 bp, Artificial Sequence
  Synthetic
attcagtgagcaatggatctagc

SEQ ID NO: 40002 - DNA, 24 bp, Artificial Sequence
  Synthetic
aggagattccactataacatccca

SEQ ID NO: 40003 - DNA, 24 bp, Artificial Sequence
  Synthetic
tgggcaattcttaacaactgatga

SEQ ID NO: 40004 - DNA, 23 bp, Artificial Sequence
  Synthetic
ttgcaagctattacacacactgg

SEQ ID NO: 40005 - DNA, 24 bp, Artificial Sequence
  Synthetic
atatccaacctagcacatctgtgt

SEQ ID NO: 40006 - DNA, 21 bp, Artificial Sequence
  Synthetic
agaaggacaaccataccccag

SEQ ID NO: 40007 - DNA, 25 bp, Artificial Sequence
  Synthetic
ttactgccaccacaaagataggtat

SEQ ID NO: 40008 - DNA, 25 bp, Artificial Sequence
  Synthetic
gctccagagagaagagtagttactc

SEQ ID NO: 40009 - DNA, 23 bp, Artificial Sequence
  Synthetic
accctgaagtattctggtcaact

SEQ ID NO: 40010 - DNA, 21 bp, Artificial Sequence
  Synthetic
ctacctttcctgtggctgaga

SEQ ID NO: 40011 - DNA, 21 bp, Artificial Sequence
  Synthetic
tcagttgctgctgtctgatct

SEQ ID NO: 40012 - DNA, 20 bp, Artificial Sequence
  Synthetic
cacctcacagaccaccgaac

SEQ ID NO: 40013 - DNA, 23 bp, Artificial Sequence
  Synthetic
cgccttgttcagtttgaatctga

SEQ ID NO: 40014 - DNA, 25 bp, Artificial Sequence
  Synthetic
ggtgttgatacagcttcaaatacca

SEQ ID NO: 40015 - DNA, 20 bp, Artificial Sequence
  Synthetic
gaggttggaagaggaggtcc

SEQ ID NO: 40016 - DNA, 24 bp, Artificial Sequence
  Synthetic
acctattccagatgtagaaggtgt

SEQ ID NO: 40017 - DNA, 22 bp, Artificial Sequence
  Synthetic
accttctgacattggagatgct

SEQ ID NO: 40018 - DNA, 24 bp, Artificial Sequence
  Synthetic
tgaatgagacacaacaagttcagt

SEQ ID NO: 40019 - DNA, 21 bp, Artificial Sequence
  Synthetic
attgtcgcctgatgatgaacc

SEQ ID NO: 40020 - DNA, 21 bp, Artificial Sequence
  Synthetic
aaggcgactctcaaagatccc

SEQ ID NO: 40021 - DNA, 24 bp, Artificial Sequence
  Synthetic
cccgcctagtaacttttgaatttg

SEQ ID NO: 40022 - DNA, 23 bp, Artificial Sequence
  Synthetic
actgagatcagagcatctgttgg

SEQ ID NO: 40023 - DNA, 21 bp, Artificial Sequence
  Synthetic
gcgaacaatggagaagatgca

SEQ ID NO: 40024 - DNA, 22 bp, Artificial Sequence
  Synthetic
caagtcctgcttgcctgcttgt

SEQ ID NO: 40025 - DNA, 23 bp, Artificial Sequence
  Synthetic
attcaagcgcaagttggaaaatt

SEQ ID NO: 40026 - DNA, 25 bp, Artificial Sequence
  Synthetic
tgatgagtcgttatgattttgagcg

SEQ ID NO: 40027 - DNA, 20 bp, Artificial Sequence
  Synthetic
ggttccagatgagcgtctgc

SEQ ID NO: 40028 - DNA, 20 bp, Artificial Sequence
  Synthetic
catgtcatcttggggcttgg

SEQ ID NO: 40029 - DNA, 23 bp, Artificial Sequence
  Synthetic
cattttggatgttcggtcagttg

SEQ ID NO: 40030 - DNA, 25 bp, Artificial Sequence
  Synthetic
tgtcgatatcagcaatagtagcatc

SEQ ID NO: 40031 - DNA, 25 bp, Artificial Sequence
  Synthetic
ttagcattttcaaaaaagcgttcgc

SEQ ID NO: 40032 - DNA, 24 bp, Artificial Sequence
  Synthetic
gctggtaatgcttcaggaatcaat

SEQ ID NO: 40033 - DNA, 25 bp, Artificial Sequence
  Synthetic
atctgtaatgatgctggttttgttg

SEQ ID NO: 40034 - DNA, 25 bp, Artificial Sequence
  Synthetic
ttgtaatatccatgacatcttcggc

SEQ ID NO: 40035 - DNA, 20 bp, Artificial Sequence
  Synthetic
aaaagaccatccacgccttc

SEQ ID NO: 40036 - DNA, 25 bp, Artificial Sequence
  Synthetic
ttccgcctattttttcagctaaagc

SEQ ID NO: 40037 - DNA, 23 bp, Artificial Sequence
  Synthetic
cagttaccgaatactcttcaccg

SEQ ID NO: 40038 - DNA, 20 bp, Artificial Sequence
  Synthetic
gagcgtcattccaagcacaa

SEQ ID NO: 40039 - DNA, 20 bp, Artificial Sequence
  Synthetic
gcagcaactgttcaggaagc

SEQ ID NO: 40040 - DNA, 22 bp, Artificial Sequence
  Synthetic
gtggcgattttagcagatttgg

SEQ ID NO: 40041 - DNA, 21 bp, Artificial Sequence
  Synthetic
gttcctatggcaccacctgcg

SEQ ID NO: 40042 - DNA, 24 bp, Artificial Sequence
  Synthetic
cttcaaagaagaagtggcttctgc

SEQ ID NO: 40043 - DNA, 24 bp, Artificial Sequence
  Synthetic
tattgttggtactggtttagctgg

SEQ ID NO: 40044 - DNA, 20 bp, Artificial Sequence
  Synthetic
gtgtggatgatgacggccag

SEQ ID NO: 40045 - DNA, 21 bp, Artificial Sequence
  Synthetic
ctgctgaaagctggtttgtgt

SEQ ID NO: 40046 - DNA, 25 bp, Artificial Sequence
  Synthetic
gaaatcacagaagaatggttgtacc

SEQ ID NO: 40047 - DNA, 22 bp, Artificial Sequence
  Synthetic
ctggtccagctgtttttctagc

SEQ ID NO: 40048 - DNA, 22 bp, Artificial Sequence
  Synthetic
tattgcaagaactctaggcggt

SEQ ID NO: 40049 - DNA, 21 bp, Artificial Sequence
  Synthetic
tggcgttgggcaaaaaaactc

SEQ ID NO: 40050 - DNA, 24 bp, Artificial Sequence
  Synthetic
ttgatcttgagctttcaccaatga

SEQ ID NO: 40051 - DNA, 25 bp, Artificial Sequence
  Synthetic
aatgaactaaaagcaggacaagtct

SEQ ID NO: 40052 - DNA, 22 bp, Artificial Sequence
  Synthetic
gagaagtggtcaaactttcccg

SEQ ID NO: 40053 - DNA, 21 bp, Artificial Sequence
  Synthetic
aagcaccctaatcacgctttg

SEQ ID NO: 40054 - DNA, 21 bp, Artificial Sequence
  Synthetic
ttatcagatgaccgagggcat

SEQ ID NO: 40055 - DNA, 21 bp, Artificial Sequence
  Synthetic
atttcgggctacatttcccca

SEQ ID NO: 40056 - DNA, 20 bp, Artificial Sequence
  Synthetic
agaaaagccctttgtacgcc

SEQ ID NO: 40057 - DNA, 22 bp, Artificial Sequence
  Synthetic
ctttttagggcgtgattgtcgc

SEQ ID NO: 40058 - DNA, 23 bp, Artificial Sequence
  Synthetic
aaaatggtcgcccagatttacca

SEQ ID NO: 40059 - DNA, 20 bp, Artificial Sequence
  Synthetic
gggtttacgtgaccaccgtg

SEQ ID NO: 40060 - DNA, 23 bp, Artificial Sequence
  Synthetic
tacttgctacatgacatggcaaa

SEQ ID NO: 40061 - DNA, 22 bp, Artificial Sequence
  Synthetic
gagatgtttttgggactgggaa

SEQ ID NO: 40062 - DNA, 25 bp, Artificial Sequence
  Synthetic
aaagccaggtagtaaaaccattacc

SEQ ID NO: 40063 - DNA, 20 bp, Artificial Sequence
  Synthetic
caacacgtccaggttgccaa

SEQ ID NO: 40064 - DNA, 24 bp, Artificial Sequence
  Synthetic
aaaatcgtattagaaggttgccgt

SEQ ID NO: 40065 - DNA, 20 bp, Artificial Sequence
  Synthetic
ttgaagccatcaaagtggcc

SEQ ID NO: 40066 - DNA, 22 bp, Artificial Sequence
  Synthetic
tcgttgcttatgccaacaaaga

SEQ ID NO: 40067 - DNA, 23 bp, Artificial Sequence
  Synthetic
tggtagggaagacagaatctcaa

SEQ ID NO: 40068 - DNA, 24 bp, Artificial Sequence
  Synthetic
aagcacattattttggaccgttcc

SEQ ID NO: 40069 - DNA, 22 bp, Artificial Sequence
  Synthetic
aatcattggcagagcaccaaga

SEQ ID NO: 40070 - DNA, 25 bp, Artificial Sequence
  Synthetic
aacaatcgatttaaccatcccattg

SEQ ID NO: 40071 - DNA, 23 bp, Artificial Sequence
  Synthetic
tcctgattgaacttgagacaacc

SEQ ID NO: 40072 - DNA, 20 bp, Artificial Sequence
  Synthetic
atagcatcagggtccttgcg

SEQ ID NO: 40073 - DNA, 20 bp, Artificial Sequence
  Synthetic
aatgacctcggcgaacaaca

SEQ ID NO: 40074 - DNA, 23 bp, Artificial Sequence
  Synthetic
tatcgtattcgtcaacccaatcc

SEQ ID NO: 40075 - DNA, 20 bp, Artificial Sequence
  Synthetic
aggttctaccatccatgcgt

SEQ ID NO: 40076 - DNA, 21 bp, Artificial Sequence
  Synthetic
cttcatcaataggctgcggag

SEQ ID NO: 40077 - DNA, 23 bp, Artificial Sequence
  Synthetic
tgctatttctccatgctgttcaa

SEQ ID NO: 40078 - DNA, 25 bp, Artificial Sequence
  Synthetic
aatagccataaagtcataacgctca

SEQ ID NO: 40079 - DNA, 21 bp, Artificial Sequence
  Synthetic
tcaagaacaaagccttgcgat

SEQ ID NO: 40080 - DNA, 25 bp, Artificial Sequence
  Synthetic
cctctggtaataggtctttagcttc

SEQ ID NO: 40081 - DNA, 20 bp, Artificial Sequence
  Synthetic
tggttttttcgtccgccagt

SEQ ID NO: 40082 - DNA, 20 bp, Artificial Sequence
  Synthetic
tgccaaggccgattctgaag

SEQ ID NO: 40083 - DNA, 20 bp, Artificial Sequence
  Synthetic
tgttcgattggaaggccgtg

SEQ ID NO: 40084 - DNA, 23 bp, Artificial Sequence
  Synthetic
ataacgaaaaaagcctcgtctca

SEQ ID NO: 40085 - DNA, 22 bp, Artificial Sequence
  Synthetic
agagtcaagttggtaagcctct

SEQ ID NO: 40086 - DNA, 25 bp, Artificial Sequence
  Synthetic
attatagataatgggcacgagtgga

SEQ ID NO: 40087 - DNA, 23 bp, Artificial Sequence
  Synthetic
ggtgtatctcctaggctatcgtc

SEQ ID NO: 40088 - DNA, 22 bp, Artificial Sequence
  Synthetic
acggatagggaccgaactgtct

SEQ ID NO: 40089 - DNA, 22 bp, Artificial Sequence
  Synthetic
agttacggggtcattttgccga

SEQ ID NO: 40090 - DNA, 20 bp, Artificial Sequence
  Synthetic
ctactgcgtccctccatcac

SEQ ID NO: 40091 - DNA, 20 bp, Artificial Sequence
  Synthetic
tcagcgtctttcatcatgcg

SEQ ID NO: 40092 - DNA, 24 bp, Artificial Sequence
  Synthetic
ggagttttcgtacgttctacaagg

SEQ ID NO: 40093 - DNA, 25 bp, Artificial Sequence
  Synthetic
atatcccttttgaaagacttctgca

SEQ ID NO: 40094 - DNA, 20 bp, Artificial Sequence
  Synthetic
tcttcactagagcgacgctg

SEQ ID NO: 40095 - DNA, 20 bp, Artificial Sequence
  Synthetic
agtccaaacccacggtaagg

SEQ ID NO: 40096 - DNA, 24 bp, Artificial Sequence
  Synthetic
tatcagattcatgcaatcgaagcc

SEQ ID NO: 40097 - DNA, 23 bp, Artificial Sequence
  Synthetic
gaagccattcatgataaagcggt

SEQ ID NO: 40098 - DNA, 25 bp, Artificial Sequence
  Synthetic
agatgacaaaatctaaacagcctca

SEQ ID NO: 40099 - DNA, 24 bp, Artificial Sequence
  Synthetic
tgatcaattgattcagttgcagga

SEQ ID NO: 40100 - DNA, 21 bp, Artificial Sequence
  Synthetic
aggacaagcgtacattgaggt

SEQ ID NO: 40101 - DNA, 20 bp, Artificial Sequence
  Synthetic
ccccttgagatgtccatggt

SEQ ID NO: 40102 - DNA, 23 bp, Artificial Sequence
  Synthetic
atcaggctctcctttttaacgtg

SEQ ID NO: 40103 - DNA, 20 bp, Artificial Sequence
  Synthetic
tggtttctgtcgtccctgtt

SEQ ID NO: 40104 - DNA, 25 bp, Artificial Sequence
  Synthetic
ttaggatctaaagcaacactagctg

SEQ ID NO: 40105 - DNA, 22 bp, Artificial Sequence
  Synthetic
tctttccttttgcacgcgtggg

SEQ ID NO: 40106 - DNA, 20 bp, Artificial Sequence
  Synthetic
gcccatgcctcccctttgag

SEQ ID NO: 40107 - DNA, 22 bp, Artificial Sequence
  Synthetic
ccctacacctgttacgtaccgc

SEQ ID NO: 40108 - DNA, 20 bp, Artificial Sequence
  Synthetic
gcgtgtgcggcgcgttttac

SEQ ID NO: 40109 - DNA, 21 bp, Artificial Sequence
  Synthetic
atgttgggctacagcactccc

SEQ ID NO: 40110 - DNA, 22 bp, Artificial Sequence
  Synthetic
atttgttggcggccgattaccc

SEQ ID NO: 40111 - DNA, 19 bp, Artificial Sequence
  Synthetic
cgccctgccctgctttgga

SEQ ID NO: 40112 - DNA, 20 bp, Artificial Sequence
  Synthetic
agcttgcggggtcgatggaa

SEQ ID NO: 40113 - DNA, 22 bp, Artificial Sequence
  Synthetic
gggtcacccctgatgttgtcag

SEQ ID NO: 40114 - DNA, 20 bp, Artificial Sequence
  Synthetic
gatcgctgagggccgtatgg

SEQ ID NO: 40115 - DNA, 20 bp, Artificial Sequence
  Synthetic
ccgtgttaaccggttccgca

SEQ ID NO: 40116 - DNA, 20 bp, Artificial Sequence
  Synthetic
gttcccacccggcatactgg

SEQ ID NO: 40117 - DNA, 24 bp, Artificial Sequence
  Synthetic
gcatgggatggttacttatcttct

SEQ ID NO: 40118 - DNA, 25 bp, Artificial Sequence
  Synthetic
ggtatgtttggtctttacgatgaca

SEQ ID NO: 40119 - DNA, 25 bp, Artificial Sequence
  Synthetic
tcgttttatggttgatcctacaact

SEQ ID NO: 40120 - DNA, 20 bp, Artificial Sequence
  Synthetic
cactgctggtgtttgcatca

SEQ ID NO: 40121 - DNA, 24 bp, Artificial Sequence
  Synthetic
aatgaaaatctcttgcatggaggc

SEQ ID NO: 40122 - DNA, 22 bp, Artificial Sequence
  Synthetic
ggttttgaaaaggcagcacttt

SEQ ID NO: 40123 - DNA, 23 bp, Artificial Sequence
  Synthetic
agacataaattgcgttcacgtgt

SEQ ID NO: 40124 - DNA, 23 bp, Artificial Sequence
  Synthetic
agcgtattaatgttgttcctggt

SEQ ID NO: 40125 - DNA, 21 bp, Artificial Sequence
  Synthetic
gtcggtgttacaatgcatggt

SEQ ID NO: 40126 - DNA, 25 bp, Artificial Sequence
  Synthetic
attgtgaacgtgttgttaaacttca

SEQ ID NO: 40127 - DNA, 25 bp, Artificial Sequence
  Synthetic
cccttccttgataatagcttcttcc

SEQ ID NO: 40128 - DNA, 20 bp, Artificial Sequence
  Synthetic
aggatcttgtcagctggtgt

SEQ ID NO: 40129 - DNA, 22 bp, Artificial Sequence
  Synthetic
ttgtggtgattgtctgcgtaag

SEQ ID NO: 40130 - DNA, 25 bp, Artificial Sequence
  Synthetic
tctgtaacattcatagaaacgagca

SEQ ID NO: 40131 - DNA, 21 bp, Artificial Sequence
  Synthetic
cagttgcagtctgctgaatgg

SEQ ID NO: 40132 - DNA, 20 bp, Artificial Sequence
  Synthetic
ggctaccacccgatgcaata

SEQ ID NO: 40133 - DNA, 25 bp, Artificial Sequence
  Synthetic
ttggttttgtgctaatcagagtaca

SEQ ID NO: 40134 - DNA, 20 bp, Artificial Sequence
  Synthetic
gccaccgttactgtgaatgt

SEQ ID NO: 40135 - DNA, 23 bp, Artificial Sequence
  Synthetic
tatggcctgtacctggtcttaaa

SEQ ID NO: 40136 - DNA, 22 bp, Artificial Sequence
  Synthetic
cactgtgcgtgaaattgttgtt

SEQ ID NO: 40137 - DNA, 25 bp, Artificial Sequence
  Synthetic
atgaccgctgttaatgagtctagat

SEQ ID NO: 40138 - DNA, 25 bp, Artificial Sequence
  Synthetic
agttgacagattaattactggacgg

SEQ ID NO: 40139 - DNA, 21 bp, Artificial Sequence
  Synthetic
agggtcatgtttcaacctcgc

SEQ ID NO: 40140 - DNA, 24 bp, Artificial Sequence
  Synthetic
tttggttagttctgataaggcacc

SEQ ID NO: 40141 - DNA, 21 bp, Artificial Sequence
  Synthetic
aactccgttgtgttacatgca

SEQ ID NO: 40142 - DNA, 22 bp, Artificial Sequence
  Synthetic
gtttggggtgtccgtgaaaatt

SEQ ID NO: 40143 - DNA, 21 bp, Artificial Sequence
  Synthetic
aggcagttccatctttagcgt

SEQ ID NO: 40144 - DNA, 22 bp, Artificial Sequence
  Synthetic
tcagtgtctgtgtttttgggac

SEQ ID NO: 40145 - DNA, 22 bp, Artificial Sequence
  Synthetic
agtttttttgggaggtttgggc

SEQ ID NO: 40146 - DNA, 25 bp, Artificial Sequence
  Synthetic
tttctgacataccaaacattgttgc

SEQ ID NO: 40147 - DNA, 25 bp, Artificial Sequence
  Synthetic
catcttctgttgtacaagaaacagc

SEQ ID NO: 40148 - DNA, 21 bp, Artificial Sequence
  Synthetic
aaccagggggacggttaaggg

SEQ ID NO: 40149 - DNA, 21 bp, Artificial Sequence
  Synthetic
tgagacagcagaggatgactt

SEQ ID NO: 40150 - DNA, 24 bp, Artificial Sequence
  Synthetic
cggacatcctttgtttgagatctc

SEQ ID NO: 40151 - DNA, 20 bp, Artificial Sequence
  Synthetic
acaaatgttcctcgtcggct

SEQ ID NO: 40152 - DNA, 25 bp, Artificial Sequence
  Synthetic
tgctggttttattaataattgcgct

SEQ ID NO: 40153 - DNA, 23 bp, Artificial Sequence
  Synthetic
atttgctgccaaacttatctggt

SEQ ID NO: 40154 - DNA, 22 bp, Artificial Sequence
  Synthetic
cttggagagtgaacaacagctt

SEQ ID NO: 40155 - DNA, 24 bp, Artificial Sequence
  Synthetic
caggtagaaactgaatgcaactcg

SEQ ID NO: 40156 - DNA, 25 bp, Artificial Sequence
  Synthetic
acagtttgatttgtcagaaatggtg

SEQ ID NO: 40157 - DNA, 24 bp, Artificial Sequence
  Synthetic
gttaggagacttggtatgcaaaca

SEQ ID NO: 40158 - DNA, 22 bp, Artificial Sequence
  Synthetic
attcctgtaggagaaggtggtg

SEQ ID NO: 40159 - DNA, 22 bp, Artificial Sequence
  Synthetic
actgcggctgtattacatgttg

SEQ ID NO: 40160 - DNA, 22 bp, Artificial Sequence
  Synthetic
caagtacacctgtttctaggcc

SEQ ID NO: 40161 - DNA, 22 bp, Artificial Sequence
  Synthetic
tgctcaaattttcaacaggccg

SEQ ID NO: 40162 - DNA, 21 bp, Artificial Sequence
  Synthetic
cctttttggcagcatcgtttg

SEQ ID NO: 40163 - DNA, 24 bp, Artificial Sequence
  Synthetic
tgaaaggttttcatggcaaagagc

SEQ ID NO: 40164 - DNA, 25 bp, Artificial Sequence
  Synthetic
caaatgtccaaattacgattggacc

SEQ ID NO: 40165 - DNA, 23 bp, Artificial Sequence
  Synthetic
ttatcaccagaagagggagacaa

SEQ ID NO: 40166 - DNA, 20 bp, Artificial Sequence
  Synthetic
ggctacgggtgaaacctctt

SEQ ID NO: 40167 - DNA, 22 bp, Artificial Sequence
  Synthetic
ttccaacaggggggattgatct

SEQ ID NO: 40168 - DNA, 25 bp, Artificial Sequence
  Synthetic
cctgagacatttcctgaattgaaac

SEQ ID NO: 40169 - DNA, 25 bp, Artificial Sequence
  Synthetic
ttacaggagcaactgatgtagatgg

SEQ ID NO: 40170 - DNA, 21 bp, Artificial Sequence
  Synthetic
cttgaaatggatgctggggtt

SEQ ID NO: 40171 - DNA, 25 bp, Artificial Sequence
  Synthetic
gatgtccaatgagattaaacatggc

SEQ ID NO: 40172 - DNA, 20 bp, Artificial Sequence
  Synthetic
gctcgttggaggatggtttg

SEQ ID NO: 40173 - DNA, 22 bp, Artificial Sequence
  Synthetic
ggttatgaatgccttgggagtg

SEQ ID NO: 40174 - DNA, 20 bp, Artificial Sequence
  Synthetic
atgtgccggattatgcctcc

SEQ ID NO: 40175 - DNA, 25 bp, Artificial Sequence
  Synthetic
caaatgcaattctgaatgcatcact

SEQ ID NO: 40176 - DNA, 21 bp, Artificial Sequence
  Synthetic
ttggtacggtttcaggcatca

SEQ ID NO: 40177 - DNA, 24 bp, Artificial Sequence
  Synthetic
tttttgctttgtgttgctttgttg

SEQ ID NO: 40178 - DNA, 25 bp, Artificial Sequence
  Synthetic
ttgttgtattgttgttagatgccag

SEQ ID NO: 40179 - DNA, 22 bp, Artificial Sequence
  Synthetic
agagcagtcagaaaacctgtca

SEQ ID NO: 40180 - DNA, 23 bp, Artificial Sequence
  Synthetic
gccgcaacacaaatgtaaaaagc

SEQ ID NO: 40181 - DNA, 20 bp, Artificial Sequence
  Synthetic
ctcgcatgctgcttagcttt

SEQ ID NO: 40182 - DNA, 20 bp, Artificial Sequence
  Synthetic
gctgcgttttttggtgggtt

SEQ ID NO: 40183 - DNA, 21 bp, Artificial Sequence
  Synthetic
acctgatttgttgccaggaga

SEQ ID NO: 40184 - DNA, 23 bp, Artificial Sequence
  Synthetic
ccattgaattgcaactgttaggg

SEQ ID NO: 40185 - DNA, 22 bp, Artificial Sequence
  Synthetic
taccaccatcaacaccagttgc

SEQ ID NO: 40186 - DNA, 25 bp, Artificial Sequence
  Synthetic
atgtcagtggtaaatcctgataggg

SEQ ID NO: 40187 - DNA, 23 bp, Artificial Sequence
  Synthetic
gagcgtgtccacctctagaatta

SEQ ID NO: 40188 - DNA, 22 bp, Artificial Sequence
  Synthetic
agagaaccttatgtgtcatgcg

SEQ ID NO: 40189 - DNA, 25 bp, Artificial Sequence
  Synthetic
atgaaactttcaaagtcattggtgg

SEQ ID NO: 40190 - DNA, 22 bp, Artificial Sequence
  Synthetic
tctcagctggctgacaggatcg

SEQ ID NO: 40191 - DNA, 18 bp, Artificial Sequence
  Synthetic
ctggagacgcgggcgaaa

SEQ ID NO: 40192 - DNA, 19 bp, Artificial Sequence
  Synthetic
ccgtcctggcggttgacgt

SEQ ID NO: 40193 - DNA, 19 bp, Artificial Sequence
  Synthetic
cgcaccccctcgttgcgaa

SEQ ID NO: 40194 - DNA, 21 bp, Artificial Sequence
  Synthetic
cgacgccgtgacgtatgaaga

SEQ ID NO: 40195 - DNA, 22 bp, Artificial Sequence
  Synthetic
aaatccgttccatcgaccattt

SEQ ID NO: 40196 - DNA, 20 bp, Artificial Sequence
  Synthetic
agcatcgacttttcggccaa

SEQ ID NO: 40197 - DNA, 23 bp, Artificial Sequence
  Synthetic
acaacgacatatggaagagcaaa

SEQ ID NO: 40198 - DNA, 22 bp, Artificial Sequence
  Synthetic
cctatatcgcaacatcaccgtc

SEQ ID NO: 40199 - DNA, 20 bp, Artificial Sequence
  Synthetic
gtgtctgtgtcgatgcttgg

SEQ ID NO: 40200 - DNA, 22 bp, Artificial Sequence
  Synthetic
tttctacaatggctcgagttcg

SEQ ID NO: 40201 - DNA, 20 bp, Artificial Sequence
  Synthetic
gttcatccgcccgtaactga

SEQ ID NO: 40202 - DNA, 20 bp, Artificial Sequence
  Synthetic
gtgattggaaaccgtcgctt

SEQ ID NO: 40203 - DNA, 20 bp, Artificial Sequence
  Synthetic
ggattacgttcgctgcaacg

SEQ ID NO: 40204 - DNA, 24 bp, Artificial Sequence
  Synthetic
gtccatgagattttcaatccggag

SEQ ID NO: 40205 - DNA, 21 bp, Artificial Sequence
  Synthetic
gatgaaactgtcgaatgccca

SEQ ID NO: 40206 - DNA, 20 bp, Artificial Sequence
  Synthetic
aaccagtatcttgcggcatg

SEQ ID NO: 40207 - DNA, 21 bp, Artificial Sequence
  Synthetic
aggaactcatgttgcctctgg

SEQ ID NO: 40208 - DNA, 20 bp, Artificial Sequence
  Synthetic
gtttgctttcctgcacgaga

SEQ ID NO: 40209 - DNA, 19 bp, Artificial Sequence
  Synthetic
cggccgccgacgaacacaa

SEQ ID NO: 40210 - DNA, 22 bp, Artificial Sequence
  Synthetic
ggacctctgttagcgttctggc

SEQ ID NO: 40211 - DNA, 23 bp, Artificial Sequence
  Synthetic
tatgcaaactaagaggggtagcc

SEQ ID NO: 40212 - DNA, 22 bp, Artificial Sequence
  Synthetic
gcaattgagctcagtgtcatca

SEQ ID NO: 40213 - DNA, 24 bp, Artificial Sequence
  Synthetic
ggtcatcaagatacagcaagaagt

SEQ ID NO: 40214 - DNA, 20 bp, Artificial Sequence
  Synthetic
caggatatgcagccgacctg

SEQ ID NO: 40215 - DNA, 21 bp, Artificial Sequence
  Synthetic
ctctgttctgccacgacgtgt

SEQ ID NO: 40216 - DNA, 18 bp, Artificial Sequence
  Synthetic
tcctcgagtgacgccgga

SEQ ID NO: 40217 - DNA, 19 bp, Artificial Sequence
  Synthetic
gcggacgacttggagctgc

SEQ ID NO: 40218 - DNA, 19 bp, Artificial Sequence
  Synthetic
ggtccacacgccagtctgc

SEQ ID NO: 40219 - DNA, 19 bp, Artificial Sequence
  Synthetic
cccccactcgaatcgcgca

SEQ ID NO: 40220 - DNA, 21 bp, Artificial Sequence
  Synthetic
actcaaagaaagctccgcgcg

SEQ ID NO: 40221 - DNA, 19 bp, Artificial Sequence
  Synthetic
gcgagacggtacagcgcgt

SEQ ID NO: 40222 - DNA, 19 bp, Artificial Sequence
  Synthetic
cgagcatgtcggaggtggc

SEQ ID NO: 40223 - DNA, 20 bp, Artificial Sequence
  Synthetic
ctccgcgcatgtgatgatgt

SEQ ID NO: 40224 - DNA, 22 bp, Artificial Sequence
  Synthetic
ccatcagaatcgtcagtggatg

SEQ ID NO: 40225 - DNA, 21 bp, Artificial Sequence
  Synthetic
cgatcccatattgtccagcac

SEQ ID NO: 40226 - DNA, 21 bp, Artificial Sequence
  Synthetic
ttccgccaacaaatacagtgt

SEQ ID NO: 40227 - DNA, 22 bp, Artificial Sequence
  Synthetic
agcaaacctgtatctctcttgc

SEQ ID NO: 40228 - DNA, 22 bp, Artificial Sequence
  Synthetic
atagctgcatgaaggttccatg

SEQ ID NO: 40229 - DNA, 22 bp, Artificial Sequence
  Synthetic
atcgcgacaagttgctaagaat

SEQ ID NO: 40230 - DNA, 20 bp, Artificial Sequence
  Synthetic
cggtgccatgtttctgtgaa

SEQ ID NO: 40231 - DNA, 20 bp, Artificial Sequence
  Synthetic
agagcgttttcggaactgtc

SEQ ID NO: 40232 - DNA, 25 bp, Artificial Sequence
  Synthetic
ggtatagtccggataatttcatggc

SEQ ID NO: 40233 - DNA, 21 bp, Artificial Sequence
  Synthetic
gggtctctgttctgccacgac

SEQ ID NO: 40234 - DNA, 19 bp, Artificial Sequence
  Synthetic
tccctgggcacggtccaca

SEQ ID NO: 40235 - DNA, 19 bp, Artificial Sequence
  Synthetic
gcgctgtcggttccgcaca

SEQ ID NO: 40236 - DNA, 21 bp, Artificial Sequence
  Synthetic
ggaagacctagagctgccgga

SEQ ID NO: 40237 - DNA, 24 bp, Artificial Sequence
  Synthetic
aatctcactcagttattctgctgg

SEQ ID NO: 40238 - DNA, 22 bp, Artificial Sequence
  Synthetic
aaggaagaggcaacacccttgg

SEQ ID NO: 40239 - DNA, 25 bp, Artificial Sequence
  Synthetic
actgaaagcgaacttcagtgtaatc

SEQ ID NO: 40240 - DNA, 20 bp, Artificial Sequence
  Synthetic
cggctccacagctagaactt

SEQ ID NO: 40241 - DNA, 21 bp, Artificial Sequence
  Synthetic
atgccacaaaccattgtctcc

SEQ ID NO: 40242 - DNA, 23 bp, Artificial Sequence
  Synthetic
ggatggtttttagttgaggctgt

SEQ ID NO: 40243 - DNA, 25 bp, Artificial Sequence
  Synthetic
ggatttaaatgctaaactgtgtggt

SEQ ID NO: 40244 - DNA, 24 bp, Artificial Sequence
  Synthetic
aatgcagcagcgtttttaaaaagt

SEQ ID NO: 40245 - DNA, 23 bp, Artificial Sequence
  Synthetic
gcttgcagaaccaaagaaatgtt

SEQ ID NO: 40246 - DNA, 24 bp, Artificial Sequence
  Synthetic
agcaacaacaaaatcaggaacagt

SEQ ID NO: 40247 - DNA, 20 bp, Artificial Sequence
  Synthetic
ttgtgcagcctattccacct

SEQ ID NO: 40248 - DNA, 23 bp, Artificial Sequence
  Synthetic
tgtgaataaaccattgctggagc

SEQ ID NO: 40249 - DNA, 23 bp, Artificial Sequence
  Synthetic
gttgacaccagaggaaaaacagt

SEQ ID NO: 40250 - DNA, 20 bp, Artificial Sequence
  Synthetic
agtagaccatctgcaggagc

SEQ ID NO: 40251 - DNA, 21 bp, Artificial Sequence
  Synthetic
ggaagctgtaaaacgaaggct

SEQ ID NO: 40252 - DNA, 21 bp, Artificial Sequence
  Synthetic
aaaacgatggagacgctatgc

SEQ ID NO: 40253 - DNA, 23 bp, Artificial Sequence
  Synthetic
ccaaatatgggtgtaaaggcaca

SEQ ID NO: 40254 - DNA, 22 bp, Artificial Sequence
  Synthetic
accacagccagagagtcctacg

SEQ ID NO: 40255 - DNA, 22 bp, Artificial Sequence
  Synthetic
tttgtctgctttaatgtgccgc

SEQ ID NO: 40256 - DNA, 25 bp, Artificial Sequence
  Synthetic
ggaaatacctatgcaaacatttgct

SEQ ID NO: 40257 - DNA, 22 bp, Artificial Sequence
  Synthetic
tgcctttacaacacgtagaggt

SEQ ID NO: 40258 - DNA, 22 bp, Artificial Sequence
  Synthetic
cctattttcttgcagatggcgg

SEQ ID NO: 40259 - DNA, 23 bp, Artificial Sequence
  Synthetic
ataacctgtcaaaaggatcagcc

SEQ ID NO: 40260 - DNA, 24 bp, Artificial Sequence
  Synthetic
tgcaaacatctgcactttagtgtt

SEQ ID NO: 40261 - DNA, 22 bp, Artificial Sequence
  Synthetic
aaggtcaagcacttctgtttcc

SEQ ID NO: 40262 - DNA, 22 bp, Artificial Sequence
  Synthetic
tgaagccaaagatcggacaggg

SEQ ID NO: 40263 - DNA, 25 bp, Artificial Sequence
  Synthetic
taaccagaggagattcaacaatcac

SEQ ID NO: 40264 - DNA, 25 bp, Artificial Sequence
  Synthetic
tgactactgatgatatgcaatcacc

SEQ ID NO: 40265 - DNA, 25 bp, Artificial Sequence
  Synthetic
taccatttcttagcattgcatcagc

SEQ ID NO: 40266 - DNA, 20 bp, Artificial Sequence
  Synthetic
acacatgttgggagaggctt

SEQ ID NO: 40267 - DNA, 25 bp, Artificial Sequence
  Synthetic
ttccaaggaccaatttctttagacg

SEQ ID NO: 40268 - DNA, 22 bp, Artificial Sequence
  Synthetic
cacaaccgtttttgtttctggc

SEQ ID NO: 40269 - DNA, 20 bp, Artificial Sequence
  Synthetic
ctggtgactgtcctcctgat

SEQ ID NO: 40270 - DNA, 20 bp, Artificial Sequence
  Synthetic
gcaaccaattccacccccaa

SEQ ID NO: 40271 - DNA, 21 bp, Artificial Sequence
  Synthetic
ggactgatacgagtcagcaga

SEQ ID NO: 40272 - DNA, 22 bp, Artificial Sequence
  Synthetic
cgtaaacgtaaacgctcagaca

SEQ ID NO: 40273 - DNA, 23 bp, Artificial Sequence
  Synthetic
aattccactgaaggtcaactgtt

SEQ ID NO: 40274 - DNA, 22 bp, Artificial Sequence
  Synthetic
cacaggtcagcaagcaaaatgt

SEQ ID NO: 40275 - DNA, 25 bp, Artificial Sequence
  Synthetic
aaacttgaggacaaacaattccagc

SEQ ID NO: 40276 - DNA, 20 bp, Artificial Sequence
  Synthetic
gtgctttgggcgctatggaa

SEQ ID NO: 40277 - DNA, 22 bp, Artificial Sequence
  Synthetic
ccaacaacacaggtttggtaca

SEQ ID NO: 40278 - DNA, 25 bp, Artificial Sequence
  Synthetic
ctttgtccatacagccactatgatt

SEQ ID NO: 40279 - DNA, 21 bp, Artificial Sequence
  Synthetic
attacccacagcacatccagt

SEQ ID NO: 40280 - DNA, 21 bp, Artificial Sequence
  Synthetic
aattgacagatgtgagtgccc

SEQ ID NO: 40281 - DNA, 25 bp, Artificial Sequence
  Synthetic
ctggttgaagaaattcactgaatgc

SEQ ID NO: 40282 - DNA, 20 bp, Artificial Sequence
  Synthetic
caaagcacttcagccctgtg

SEQ ID NO: 40283 - DNA, 21 bp, Artificial Sequence
  Synthetic
caagaccagggctacatctca

SEQ ID NO: 40284 - DNA, 22 bp, Artificial Sequence
  Synthetic
gccccagagaaaattaaggctg

SEQ ID NO: 40285 - DNA, 23 bp, Artificial Sequence
  Synthetic
ttacaccaattatgatggcagct

SEQ ID NO: 40286 - DNA, 20 bp, Artificial Sequence
  Synthetic
tccaaagaacacgcaggacc

SEQ ID NO: 40287 - DNA, 24 bp, Artificial Sequence
  Synthetic
tgtttcagaactggggaattgaac

SEQ ID NO: 40288 - DNA, 21 bp, Artificial Sequence
  Synthetic
gccacgcccggatatgaggta

SEQ ID NO: 40289 - DNA, 25 bp, Artificial Sequence
  Synthetic
agggtatttaaaccagttaagtccg

SEQ ID NO: 40290 - DNA, 23 bp, Artificial Sequence
  Synthetic
cgaagctgtacctacttcagttt

SEQ ID NO: 40291 - DNA, 20 bp, Artificial Sequence
  Synthetic
gaacggggcagaggtggaca

SEQ ID NO: 40292 - DNA, 21 bp, Artificial Sequence
  Synthetic
tgcttttgcctggtgaagggc

SEQ ID NO: 40293 - DNA, 22 bp, Artificial Sequence
  Synthetic
gacgagctcgtcgcttgacagc

SEQ ID NO: 40294 - DNA, 20 bp, Artificial Sequence
  Synthetic
gcatggcctcgtgttctggg

SEQ ID NO: 40295 - DNA, 22 bp, Artificial Sequence
  Synthetic
cgtgcacttggggaacttgtca

SEQ ID NO: 40296 - DNA, 21 bp, Artificial Sequence
  Synthetic
tgacgggttgcaggtggtagt

SEQ ID NO: 40297 - DNA, 18 bp, Artificial Sequence
  Synthetic
actcgggggcaaaggcgt

SEQ ID NO: 40298 - DNA, 19 bp, Artificial Sequence
  Synthetic
acgtgcgaggggtagcggt

SEQ ID NO: 40299 - DNA, 19 bp, Artificial Sequence
  Synthetic
tgaccaggtccacgctggt

SEQ ID NO: 40300 - DNA, 22 bp, Artificial Sequence
  Synthetic
aagaaggcggggccaagattgg

SEQ ID NO: 40301 - DNA, 21 bp, Artificial Sequence
  Synthetic
cgaaggaccccatccaggtgt

SEQ ID NO: 40302 - DNA, 22 bp, Artificial Sequence
  Synthetic
tgttcgcctgcgtaggacttac

SEQ ID NO: 40303 - DNA, 21 bp, Artificial Sequence
  Synthetic
ttaagggtggtggcgatgtgc

SEQ ID NO: 40304 - DNA, 20 bp, Artificial Sequence
  Synthetic
gctcgatcatttccccgcgg

SEQ ID NO: 40305 - DNA, 19 bp, Artificial Sequence
  Synthetic
gcctgttgcacgcgggtga

SEQ ID NO: 40306 - DNA, 19 bp, Artificial Sequence
  Synthetic
atccaggtaatgccggcgg

SEQ ID NO: 40307 - DNA, 21 bp, Artificial Sequence
  Synthetic
ggtattggcactcccgtctcg

SEQ ID NO: 40308 - DNA, 19 bp, Artificial Sequence
  Synthetic
ccctgggcctgatgcacct

SEQ ID NO: 40309 - DNA, 19 bp, Artificial Sequence
  Synthetic
tgagcgacgacctgggcgt

SEQ ID NO: 40310 - DNA, 19 bp, Artificial Sequence
  Synthetic
ccagccgtccggtctagca

SEQ ID NO: 40311 - DNA, 18 bp, Artificial Sequence
  Synthetic
ttgacgcccaactcgcgg

SEQ ID NO: 40312 - DNA, 22 bp, Artificial Sequence
  Synthetic
atatgtgcagcagagcgtaggg

SEQ ID NO: 40313 - DNA, 20 bp, Artificial Sequence
  Synthetic
cgagtacgacatgcccgacc

SEQ ID NO: 40314 - DNA, 19 bp, Artificial Sequence
  Synthetic
ggactcggccgacgatagc

SEQ ID NO: 40315 - DNA, 18 bp, Artificial Sequence
  Synthetic
cgccgagctcatgccctt

SEQ ID NO: 40316 - DNA, 19 bp, Artificial Sequence
  Synthetic
ccgtggacgcggtcattga

SEQ ID NO: 40317 - DNA, 22 bp, Artificial Sequence
  Synthetic
ttaaggtgcgccccattaagca

SEQ ID NO: 40318 - DNA, 20 bp, Artificial Sequence
  Synthetic
gccaaccggctgatgcccaa

SEQ ID NO: 40319 - DNA, 21 bp, Artificial Sequence
  Synthetic
cagtgtctggagcgggcttaa

SEQ ID NO: 40320 - DNA, 20 bp, Artificial Sequence
  Synthetic
ccctgcaggtagacgagccg

SEQ ID NO: 40321 - DNA, 22 bp, Artificial Sequence
  Synthetic
gggcctgggagtgaaaagtctg

SEQ ID NO: 40322 - DNA, 22 bp, Artificial Sequence
  Synthetic
cagtgtgaacctctacgccacc

SEQ ID NO: 40323 - DNA, 22 bp, Artificial Sequence
  Synthetic
tcccctacccgcttattggaga

SEQ ID NO: 40324 - DNA, 19 bp, Artificial Sequence
  Synthetic
atgagcggctccagcgaac

SEQ ID NO: 40325 - DNA, 20 bp, Artificial Sequence
  Synthetic
cagcgccctggccttatcgc

SEQ ID NO: 40326 - DNA, 20 bp, Artificial Sequence
  Synthetic
gctctaccgcttccttgcgc

SEQ ID NO: 40327 - DNA, 19 bp, Artificial Sequence
  Synthetic
ctcatctgcagggcgccca

SEQ ID NO: 40328 - DNA, 19 bp, Artificial Sequence
  Synthetic
cgtggtcccacagggcact

SEQ ID NO: 40329 - DNA, 19 bp, Artificial Sequence
  Synthetic
ctttcggcgcttggtgggc

SEQ ID NO: 40330 - DNA, 21 bp, Artificial Sequence
  Synthetic
ctggagcatggctacctggga

SEQ ID NO: 40331 - DNA, 20 bp, Artificial Sequence
  Synthetic
ccgttaacctcccgcccaag

SEQ ID NO: 40332 - DNA, 21 bp, Artificial Sequence
  Synthetic
tcctgcctggggatcctacac

SEQ ID NO: 40333 - DNA, 22 bp, Artificial Sequence
  Synthetic
gtttttcccgaacgcctaaggc

SEQ ID NO: 40334 - DNA, 19 bp, Artificial Sequence
  Synthetic
taagcaccagcggcagggc

SEQ ID NO: 40335 - DNA, 21 bp, Artificial Sequence
  Synthetic
tcacccgcagttgcttgtacc

SEQ ID NO: 40336 - DNA, 22 bp, Artificial Sequence
  Synthetic
ttcgacgcagttagagaagcgg

SEQ ID NO: 40337 - DNA, 24 bp, Artificial Sequence
  Synthetic
gaacagccacgatgtaacattacc

SEQ ID NO: 40338 - DNA, 22 bp, Artificial Sequence
  Synthetic
tggtttttaaagtgcaagccca

SEQ ID NO: 40339 - DNA, 25 bp, Artificial Sequence
  Synthetic
gaatcaaaaattccctcagctactg

SEQ ID NO: 40340 - DNA, 21 bp, Artificial Sequence
  Synthetic
taggagacccatctacaggcc

SEQ ID NO: 40341 - DNA, 25 bp, Artificial Sequence
  Synthetic
catacacactacaaaacagttcacc

SEQ ID NO: 40342 - DNA, 21 bp, Artificial Sequence
  Synthetic
aggtgggctaactttgcaaga

SEQ ID NO: 40343 - DNA, 22 bp, Artificial Sequence
  Synthetic
aatccacacagtttcctggcga

SEQ ID NO: 40344 - DNA, 21 bp, Artificial Sequence
  Synthetic
cgtgaccatcgtaccaaatgc

SEQ ID NO: 40345 - DNA, 22 bp, Artificial Sequence
  Synthetic
taaaaccagcagcacatggtaa

SEQ ID NO: 40346 - DNA, 22 bp, Artificial Sequence
  Synthetic
ttccaaacggtctcgaaggacg

SEQ ID NO: 40347 - DNA, 21 bp, Artificial Sequence
  Synthetic
cgccccctccactttcataat

SEQ ID NO: 40348 - DNA, 22 bp, Artificial Sequence
  Synthetic
ccacaatgtggtagcttacacc

SEQ ID NO: 40349 - DNA, 22 bp, Artificial Sequence
  Synthetic
cgccaaaaaaaaacacacacgc

SEQ ID NO: 40350 - DNA, 22 bp, Artificial Sequence
  Synthetic
cctggtcaaagaagtaccgttt

SEQ ID NO: 40351 - DNA, 24 bp, Artificial Sequence
  Synthetic
taaagccataacaagtagtgctgg

SEQ ID NO: 40352 - DNA, 21 bp, Artificial Sequence
  Synthetic
atcactcgatcagcaaccaca

SEQ ID NO: 40353 - DNA, 25 bp, Artificial Sequence
  Synthetic
catcgacaacccaaaagaaaacaag

SEQ ID NO: 40354 - DNA, 21 bp, Artificial Sequence
  Synthetic
gcgaggaactagtccaaaccc

SEQ ID NO: 40355 - DNA, 24 bp, Artificial Sequence
  Synthetic
ttctacaaaggaacaaaagacggc

SEQ ID NO: 40356 - DNA, 25 bp, Artificial Sequence
  Synthetic
aacaagatacacaacaaacaatgca

SEQ ID NO: 40357 - DNA, 22 bp, Artificial Sequence
  Synthetic
atggaagctctaggaggtcaag

SEQ ID NO: 40358 - DNA, 20 bp, Artificial Sequence
  Synthetic
tagggcaggagtatcaacgg

SEQ ID NO: 40359 - DNA, 22 bp, Artificial Sequence
  Synthetic
ccacagctgctcaaataactgc

SEQ ID NO: 40360 - DNA, 25 bp, Artificial Sequence
  Synthetic
tggaaaaatacatggttaccctctt

SEQ ID NO: 40361 - DNA, 25 bp, Artificial Sequence
  Synthetic
ctttctggatccaccacaatttcag

SEQ ID NO: 40362 - DNA, 21 bp, Artificial Sequence
  Synthetic
ttgcccactgtgaatgagact

SEQ ID NO: 40363 - DNA, 25 bp, Artificial Sequence
  Synthetic
atcaacaaccccatgaccattaaat

SEQ ID NO: 40364 - DNA, 23 bp, Artificial Sequence
  Synthetic
atttcccaatcttggtgaggatg

SEQ ID NO: 40365 - DNA, 20 bp, Artificial Sequence
  Synthetic
agttgcagctctagcagact

SEQ ID NO: 40366 - DNA, 25 bp, Artificial Sequence
  Synthetic
aagtactgtccaatgcattatcaca

SEQ ID NO: 40367 - DNA, 23 bp, Artificial Sequence
  Synthetic
gcaatgctgtcttgttatgatgc

SEQ ID NO: 40368 - DNA, 22 bp, Artificial Sequence
  Synthetic
attgaacagaaatcagccggct

SEQ ID NO: 40369 - DNA, 23 bp, Artificial Sequence
  Synthetic
ataccagcagaaatgctagcaag

SEQ ID NO: 40370 - DNA, 24 bp, Artificial Sequence
  Synthetic
atgataaataatgaccttgggcca

SEQ ID NO: 40371 - DNA, 21 bp, Artificial Sequence
  Synthetic
aatttccagcatggtggaggc

SEQ ID NO: 40372 - DNA, 25 bp, Artificial Sequence
  Synthetic
ttaaggctgacatgtgtattttgca

SEQ ID NO: 40373 - DNA, 22 bp, Artificial Sequence
  Synthetic
cagggtggttactacctgtggc

SEQ ID NO: 40374 - DNA, 22 bp, Artificial Sequence
  Synthetic
gggtaatatgtgcgtttggtgt

SEQ ID NO: 40375 - DNA, 25 bp, Artificial Sequence
  Synthetic
gtgcgcactatattggtatagaaca

SEQ ID NO: 40376 - DNA, 20 bp, Artificial Sequence
  Synthetic
tccagtacccctaccgctgg

SEQ ID NO: 40377 - DNA, 22 bp, Artificial Sequence
  Synthetic
tttttcagatggctttgtggcg

SEQ ID NO: 40378 - DNA, 21 bp, Artificial Sequence
  Synthetic
gctcgccactttttcaatcgc

SEQ ID NO: 40379 - DNA, 23 bp, Artificial Sequence
  Synthetic
cacccgcagtactaatttaacca

SEQ ID NO: 40380 - DNA, 20 bp, Artificial Sequence
  Synthetic
ccttgtgcatgtgctgtttg

SEQ ID NO: 40381 - DNA, 22 bp, Artificial Sequence
  Synthetic
tttgtgttgccgaccgttttcg

SEQ ID NO: 40382 - DNA, 20 bp, Artificial Sequence
  Synthetic
ttgctggtttggcattgctt

SEQ ID NO: 40383 - DNA, 20 bp, Artificial Sequence
  Synthetic
ggtctgaaccaacggcaaca

SEQ ID NO: 40384 - DNA, 21 bp, Artificial Sequence
  Synthetic
cacccatacagcagctacttg

SEQ ID NO: 40385 - DNA, 19 bp, Artificial Sequence
  Synthetic
gacagcgggaaccccacgt

SEQ ID NO: 40386 - DNA, 19 bp, Artificial Sequence
  Synthetic
acgccccagccgtcaatca

SEQ ID NO: 40387 - DNA, 22 bp, Artificial Sequence
  Synthetic
cggatggaaaacatatcgcacg

SEQ ID NO: 40388 - DNA, 22 bp, Artificial Sequence
  Synthetic
gggttgcagacaaaagtgattg

SEQ ID NO: 40389 - DNA, 21 bp, Artificial Sequence
  Synthetic
gttgttggatgctctgcgtgc

SEQ ID NO: 40390 - DNA, 21 bp, Artificial Sequence
  Synthetic
tccgtgctccttcattgtcgg

SEQ ID NO: 40391 - DNA, 21 bp, Artificial Sequence
  Synthetic
taccgggacagcctctggatg

SEQ ID NO: 40392 - DNA, 21 bp, Artificial Sequence
  Synthetic
ttaacctcggcctcggttgga

SEQ ID NO: 40393 - DNA, 22 bp, Artificial Sequence
  Synthetic
gcagggactcaagaggacccca

SEQ ID NO: 40394 - DNA, 22 bp, Artificial Sequence
  Synthetic
ctgaagggccatgccacctatg

SEQ ID NO: 40395 - DNA, 22 bp, Artificial Sequence
  Synthetic
ggcataccacgtgtgtgatggg

SEQ ID NO: 40396 - DNA, 19 bp, Artificial Sequence
  Synthetic
gcaaggcgggccagaggtt

SEQ ID NO: 40397 - DNA, 21 bp, Artificial Sequence
  Synthetic
attgcgcaacatggtaaggcg

SEQ ID NO: 40398 - DNA, 19 bp, Artificial Sequence
  Synthetic
cgcggtcgggggttctgat

SEQ ID NO: 40399 - DNA, 19 bp, Artificial Sequence
  Synthetic
ccggaggggagttgcctgt

SEQ ID NO: 40400 - DNA, 20 bp, Artificial Sequence
  Synthetic
gcggtcatgacggagaccaa

SEQ ID NO: 40401 - DNA, 21 bp, Artificial Sequence
  Synthetic
gggatacacccgctcactcgc

SEQ ID NO: 40402 - DNA, 21 bp, Artificial Sequence
  Synthetic
ccaactggtgtgagaggggga

SEQ ID NO: 40403 - DNA, 19 bp, Artificial Sequence
  Synthetic
ccagcccccacacatcacc

SEQ ID NO: 40404 - DNA, 19 bp, Artificial Sequence
  Synthetic
tcaggatcccgccggagat

SEQ ID NO: 40405 - DNA, 19 bp, Artificial Sequence
  Synthetic
cgccggacagctcctcgat

SEQ ID NO: 40406 - DNA, 20 bp, Artificial Sequence
  Synthetic
ggagcgggtgaaggaatggg

SEQ ID NO: 40407 - DNA, 19 bp, Artificial Sequence
  Synthetic
agtgccccaggggtctctg

SEQ ID NO: 40408 - DNA, 21 bp, Artificial Sequence
  Synthetic
ccagctggtaaacaccaccga

SEQ ID NO: 40409 - DNA, 21 bp, Artificial Sequence
  Synthetic
ctcctgtaggaggccggcttg

SEQ ID NO: 40410 - DNA, 22 bp, Artificial Sequence
  Synthetic
tgaaaccggtatgtccaggggt

SEQ ID NO: 40411 - DNA, 22 bp, Artificial Sequence
  Synthetic
agaggttagggtaggtgtccgg

SEQ ID NO: 40412 - DNA, 20 bp, Artificial Sequence
  Synthetic
ctgtgtatggtgcaaacggc

SEQ ID NO: 40413 - DNA, 22 bp, Artificial Sequence
  Synthetic
actgcgcctagcgttatggagg

SEQ ID NO: 40414 - DNA, 20 bp, Artificial Sequence
  Synthetic
cgtcaagggggagacggaga

SEQ ID NO: 40415 - DNA, 22 bp, Artificial Sequence
  Synthetic
ggacatagcatggaagacgaac

SEQ ID NO: 40416 - DNA, 21 bp, Artificial Sequence
  Synthetic
cagcaggctgacagtgtttac

SEQ ID NO: 40417 - DNA, 22 bp, Artificial Sequence
  Synthetic
tcgcagcctcagcagaatcaac

SEQ ID NO: 40418 - DNA, 22 bp, Artificial Sequence
  Synthetic
caggtaccagtgtgcaggtcag

SEQ ID NO: 40419 - DNA, 21 bp, Artificial Sequence
  Synthetic
cctcgcggttcactctctctg

SEQ ID NO: 40420 - DNA, 22 bp, Artificial Sequence
  Synthetic
tgtgtattaccatggtggcagt

SEQ ID NO: 40421 - DNA, 25 bp, Artificial Sequence
  Synthetic
agagccttatggtgattctatgttc

SEQ ID NO: 40422 - DNA, 20 bp, Artificial Sequence
  Synthetic
ggaacttcggtgtaccccct

SEQ ID NO: 40423 - DNA, 20 bp, Artificial Sequence
  Synthetic
gttttcggttgcgtgcagtt

SEQ ID NO: 40424 - DNA, 25 bp, Artificial Sequence
  Synthetic
gttgcaaagtaaaaatagacgtgct

SEQ ID NO: 40425 - DNA, 22 bp, Artificial Sequence
  Synthetic
tcctcatcaacacccagaggga

SEQ ID NO: 40426 - DNA, 20 bp, Artificial Sequence
  Synthetic
ggattggtgggagtacaggc

SEQ ID NO: 40427 - DNA, 21 bp, Artificial Sequence
  Synthetic
aatgcaggcagacctagcata

SEQ ID NO: 40428 - DNA, 23 bp, Artificial Sequence
  Synthetic
gtgccacttgaaattacagcatc

SEQ ID NO: 40429 - DNA, 23 bp, Artificial Sequence
  Synthetic
ctttggatgttagccattcaggt

SEQ ID NO: 40430 - DNA, 25 bp, Artificial Sequence
  Synthetic
gatttccctggctttgtataacagt

SEQ ID NO: 40431 - DNA, 24 bp, Artificial Sequence
  Synthetic
taatggcgcgagttttgaaaatgg

SEQ ID NO: 40432 - DNA, 23 bp, Artificial Sequence
  Synthetic
gtaaaggtactggtggttctacg

SEQ ID NO: 40433 - DNA, 20 bp, Artificial Sequence
  Synthetic
gataacaacccccgcagttt

SEQ ID NO: 40434 - DNA, 21 bp, Artificial Sequence
  Synthetic
accttttgttgcttgtggacc

SEQ ID NO: 40435 - DNA, 21 bp, Artificial Sequence
  Synthetic
ggttcgccagcaataaaacca

SEQ ID NO: 40436 - DNA, 25 bp, Artificial Sequence
  Synthetic
tcaaagaatggcatctaagattgga

SEQ ID NO: 40437 - DNA, 22 bp, Artificial Sequence
  Synthetic
ctcaggacaattgctatgggac

SEQ ID NO: 40438 - DNA, 20 bp, Artificial Sequence
  Synthetic
tctaacagctgaagcgccag

SEQ ID NO: 40439 - DNA, 22 bp, Artificial Sequence
  Synthetic
gcggacgataaaggtactgatc

SEQ ID NO: 40440 - DNA, 23 bp, Artificial Sequence
  Synthetic
ctcacagatgaagctgacattgc

SEQ ID NO: 40441 - DNA, 20 bp, Artificial Sequence
  Synthetic
agacgaggcagacaatggag

SEQ ID NO: 40442 - DNA, 23 bp, Artificial Sequence
  Synthetic
caaacaagctattggcatgatgc

SEQ ID NO: 40443 - DNA, 20 bp, Artificial Sequence
  Synthetic
ccaccaccttcagcaccacc

SEQ ID NO: 40444 - DNA, 21 bp, Artificial Sequence
  Synthetic
acgctctagtaccccactacg

SEQ ID NO: 40445 - DNA, 21 bp, Artificial Sequence
  Synthetic
gcccaaaatactcttggcagc

SEQ ID NO: 40446 - DNA, 20 bp, Artificial Sequence
  Synthetic
gattgcagcgcagatcgttt

SEQ ID NO: 40447 - DNA, 24 bp, Artificial Sequence
  Synthetic
gttactagctcttccaggaagtct

SEQ ID NO: 40448 - DNA, 21 bp, Artificial Sequence
  Synthetic
tctagggcatcacacacagat

SEQ ID NO: 40449 - DNA, 24 bp, Artificial Sequence
  Synthetic
cgctttatagtacatccagacaca

SEQ ID NO: 40450 - DNA, 20 bp, Artificial Sequence
  Synthetic
actgtccattgtgtgccctc

SEQ ID NO: 40451 - DNA, 20 bp, Artificial Sequence
  Synthetic
ggcgccgctattaatgacat

SEQ ID NO: 40452 - DNA, 25 bp, Artificial Sequence
  Synthetic
ttgataatgaatggactgaggaagc

SEQ ID NO: 40453 - DNA, 20 bp, Artificial Sequence
  Synthetic
cgacttggaaggcttgaagc

SEQ ID NO: 40454 - DNA, 20 bp, Artificial Sequence
  Synthetic
acagatgaaggcacaactgc

SEQ ID NO: 40455 - DNA, 21 bp, Artificial Sequence
  Synthetic
gtcgcgtgcagtacagtagac

SEQ ID NO: 40456 - DNA, 21 bp, Artificial Sequence
  Synthetic
actgtagaaggtgcatgcaga

SEQ ID NO: 40457 - DNA, 20 bp, Artificial Sequence
  Synthetic
ggtgtgccagatcagctgtg

SEQ ID NO: 40458 - DNA, 24 bp, Artificial Sequence
  Synthetic
cattacggaagagcaggaaattgc

SEQ ID NO: 40459 - DNA, 20 bp, Artificial Sequence
  Synthetic
ggaggacttcaaaccgcgga

SEQ ID NO: 40460 - DNA, 22 bp, Artificial Sequence
  Synthetic
ccaaaacgaatagtggtggagg

SEQ ID NO: 40461 - DNA, 21 bp, Artificial Sequence
  Synthetic
aggaacttttacggtcgacgg

SEQ ID NO: 40462 - DNA, 21 bp, Artificial Sequence
  Synthetic
atgttgctcctgaatgtgacg

SEQ ID NO: 40463 - DNA, 23 bp, Artificial Sequence
  Synthetic
actagaaaacgtcccagaactga

SEQ ID NO: 40464 - DNA, 20 bp, Artificial Sequence
  Synthetic
gctttggaccatctgcggta

SEQ ID NO: 40465 - DNA, 22 bp, Artificial Sequence
  Synthetic
agattgtgtatctggtgtgcca

SEQ ID NO: 40466 - DNA, 20 bp, Artificial Sequence
  Synthetic
attagggcatccgtcgggaa

SEQ ID NO: 40467 - DNA, 20 bp, Artificial Sequence
  Synthetic
ctgtgcgtatggacctgcag

SEQ ID NO: 40468 - DNA, 25 bp, Artificial Sequence
  Synthetic
acatgagggcagaaatcataagaat

SEQ ID NO: 40469 - DNA, 20 bp, Artificial Sequence
  Synthetic
ccacgtactgtgcaccatct

SEQ ID NO: 40470 - DNA, 24 bp, Artificial Sequence
  Synthetic
agaggatgaggatgaagtagacaa

SEQ ID NO: 40471 - DNA, 25 bp, Artificial Sequence
  Synthetic
ttgggagacattagtaatcagcaat

SEQ ID NO: 40472 - DNA, 22 bp, Artificial Sequence
  Synthetic
taccctcagatccaacgtatcc

SEQ ID NO: 40473 - DNA, 21 bp, Artificial Sequence
  Synthetic
cctatatgtgccgcttttgct

SEQ ID NO: 40474 - DNA, 20 bp, Artificial Sequence
  Synthetic
cagacgaaaacgggcctctg

SEQ ID NO: 40475 - DNA, 23 bp, Artificial Sequence
  Synthetic
cggccatatattggttagcactc

SEQ ID NO: 40476 - DNA, 21 bp, Artificial Sequence
  Synthetic
ctttacaacacgtaggggtgg

SEQ ID NO: 40477 - DNA, 20 bp, Artificial Sequence
  Synthetic
ggcggcctagtgaaaccaag

SEQ ID NO: 40478 - DNA, 21 bp, Artificial Sequence
  Synthetic
tatagggtctttagggtccgc

SEQ ID NO: 40479 - DNA, 23 bp, Artificial Sequence
  Synthetic
gccttatgtgaagaggtcaacat

SEQ ID NO: 40480 - DNA, 22 bp, Artificial Sequence
  Synthetic
ttaacagaggacgacgacaagg

SEQ ID NO: 40481 - DNA, 20 bp, Artificial Sequence
  Synthetic
gggtttgggtattggtagcg

SEQ ID NO: 40482 - DNA, 20 bp, Artificial Sequence
  Synthetic
aatgctggggaatgtcctcc

SEQ ID NO: 40483 - DNA, 25 bp, Artificial Sequence
  Synthetic
tgacttaatgattaagggtacaggc

SEQ ID NO: 40484 - DNA, 25 bp, Artificial Sequence
  Synthetic
agcacaaaggtttaatgtgttttgg

SEQ ID NO: 40485 - DNA, 22 bp, Artificial Sequence
  Synthetic
gctctatcaaaacccaaccact

SEQ ID NO: 40486 - DNA, 22 bp, Artificial Sequence
  Synthetic
acaccaagtgtcaaactccaat

SEQ ID NO: 40487 - DNA, 20 bp, Artificial Sequence
  Synthetic
gtggatacgctgcagacaaa

SEQ ID NO: 40488 - DNA, 20 bp, Artificial Sequence
  Synthetic
agttccctagcactggcaat

SEQ ID NO: 40489 - DNA, 20 bp, Artificial Sequence
  Synthetic
gaaatcagagcatccgtcgg

SEQ ID NO: 40490 - DNA, 24 bp, Artificial Sequence
  Synthetic
gatcaatgatcggaacttctggag

SEQ ID NO: 40491 - DNA, 21 bp, Artificial Sequence
  Synthetic
ggatccagtaaaagacggctg

SEQ ID NO: 40492 - DNA, 24 bp, Artificial Sequence
  Synthetic
caggctactggggatttatgaagc

SEQ ID NO: 40493 - DNA, 20 bp, Artificial Sequence
  Synthetic
aagacgcacaggacaattgg

SEQ ID NO: 40494 - DNA, 23 bp, Artificial Sequence
  Synthetic
taaagggcctgcaaatactacca

SEQ ID NO: 40495 - DNA, 20 bp, Artificial Sequence
  Synthetic
tgttggtgagggacgggtta

SEQ ID NO: 40496 - DNA, 20 bp, Artificial Sequence
  Synthetic
tgggatgttgctcctgcatg

SEQ ID NO: 40497 - DNA, 25 bp, Artificial Sequence
  Synthetic
agttatttagtaggccctactggat

SEQ ID NO: 40498 - DNA, 22 bp, Artificial Sequence
  Synthetic
gaatgtcctctgaattaggggc

SEQ ID NO: 40499 - DNA, 24 bp, Artificial Sequence
  Synthetic
tttaggtactggctacattccaca

SEQ ID NO: 40500 - DNA, 20 bp, Human papillomavirus type 175
tagagttgacacctgttgta

SEQ ID NO: 40501 - DNA, 20 bp, Human papillomavirus type 175
acacctgttgtagtacttgt

SEQ ID NO: 40502 - DNA, 20 bp, Human papillomavirus type 175
tagtacttgtggaacaggtg

SEQ ID NO: 40503 - DNA, 20 bp, Human papillomavirus type 175
tggaacaggtgtccgtctct

SEQ ID NO: 40504 - DNA, 20 bp, Human papillomavirus type 175
tggccacaaggtcagccatc

SEQ ID NO: 40505 - DNA, 20 bp, Human papillomavirus type 175
tcctgactggattagaaagc

SEQ ID NO: 40506 - DNA, 20 bp, Human papillomavirus type 175
cctgactggattagaaagca

SEQ ID NO: 40507 - DNA, 20 bp, Human papillomavirus type 175
ctgactggattagaaagcat

SEQ ID NO: 40508 - DNA, 20 bp, Human papillomavirus type 175
gaaagcatacacaattaaat

SEQ ID NO: 40509 - DNA, 20 bp, Human papillomavirus type 175
aatcatgaaacagctgcagc

SEQ ID NO: 40510 - DNA, 20 bp, Human papillomavirus type 175
ctggttgcaaaatcttatta

SEQ ID NO: 40511 - DNA, 20 bp, Human papillomavirus type 175
tggttgcaaaatcttattaa

SEQ ID NO: 40512 - DNA, 20 bp, Human papillomavirus type 175
caaaatcttattaatacaaa

SEQ ID NO: 40513 - DNA, 20 bp, Human papillomavirus type 175
ttaatacaaaaataggtttt

SEQ ID NO: 40514 - DNA, 20 bp, Human papillomavirus type 175
atacaaaaataggttttcta

SEQ ID NO: 40515 - DNA, 20 bp, Human papillomavirus type 175
agcattggcaacttgttaga

SEQ ID NO: 40516 - DNA, 20 bp, Human papillomavirus type 175
gcaacttgttagaaaaatta

SEQ ID NO: 40517 - DNA, 20 bp, Human papillomavirus type 175
ttagaaaaattaatgtgcta

SEQ ID NO: 40518 - DNA, 20 bp, Human papillomavirus type 175
gaaaaattaatgtgctatat

SEQ ID NO: 40519 - DNA, 20 bp, Human papillomavirus type 175
atgtgctatattattatgct

SEQ ID NO: 40520 - DNA, 20 bp, Human papillomavirus type 175
ccccaccgcagagcctccca

SEQ ID NO: 40521 - DNA, 20 bp, Human papillomavirus type 175
cccaccgcagagcctcccac

SEQ ID NO: 40522 - DNA, 20 bp, Human papillomavirus type 175
cctcttcgctttcgtgggat

SEQ ID NO: 40523 - DNA, 20 bp, Human papillomavirus type 175
gctttcgtgggatcttgtat

SEQ ID NO: 40524 - DNA, 20 bp, Human papillomavirus type 175
cgtgggatcttgtatgccgc

SEQ ID NO: 40525 - DNA, 20 bp, Human papillomavirus type 175
cagcaacaggtcttacagga

SEQ ID NO: 40526 - DNA, 20 bp, Human papillomavirus type 175
caagtcctgtaagacctgtt

SEQ ID NO: 40527 - DNA, 20 bp, Human papillomavirus type 175
ctggaaccgttcgatgtccg

SEQ ID NO: 40528 - DNA, 20 bp, Human papillomavirus type 175
gatgtccgcttcccacttct

SEQ ID NO: 40529 - DNA, 20 bp, Human papillomavirus type 175
ccacttctccagcagatacc

SEQ ID NO: 40530 - DNA, 20 bp, Human papillomavirus type 175
gttatgcatcacatagaatg

SEQ ID NO: 40531 - DNA, 20 bp, Human papillomavirus type 175
tgcatcacatagaatgcttg

SEQ ID NO: 40532 - DNA, 20 bp, Human papillomavirus type 175
tagcatttcaaaatcaggct

SEQ ID NO: 40533 - DNA, 20 bp, Human papillomavirus type 175
caaaatcaggctcagagaaa

SEQ ID NO: 40534 - DNA, 20 bp, Human papillomavirus type 175
aaaatcaggctcagagaaag

SEQ ID NO: 40535 - DNA, 20 bp, Human papillomavirus type 175
aggggaacatataggcctgg

SEQ ID NO: 40536 - DNA, 20 bp, Human papillomavirus type 175
ggggaacatataggcctgga

SEQ ID NO: 40537 - DNA, 20 bp, Human papillomavirus type 175
gagactttgggaggtcctga

SEQ ID NO: 40538 - DNA, 20 bp, Human papillomavirus type 175
gggaggtcctgaaacatttg

SEQ ID NO: 40539 - DNA, 20 bp, Human papillomavirus type 175
ggaggtcctgaaacatttga

SEQ ID NO: 40540 - DNA, 20 bp, Human papillomavirus type 175
agaatttcaacaagacttgc

SEQ ID NO: 40541 - DNA, 20 bp, Human papillomavirus type 175
gaatttcaacaagacttgca

SEQ ID NO: 40542 - DNA, 20 bp, Human papillomavirus type 175
caacaagacttgcaagaggt

SEQ ID NO: 40543 - DNA, 20 bp, Human papillomavirus type 175
aacaagacttgcaagaggta

SEQ ID NO: 40544 - DNA, 20 bp, Human papillomavirus type 175
caagaggtagctgctgctcc

SEQ ID NO: 40545 - DNA, 20 bp, Human papillomavirus type 175
ttaacccacaggcagaaagt

SEQ ID NO: 40546 - DNA, 20 bp, Human papillomavirus type 175
acccacaggcagaaagtagt

SEQ ID NO: 40547 - DNA, 20 bp, Human papillomavirus type 175
tatagatgcattagctgagt

SEQ ID NO: 40548 - DNA, 20 bp, Human papillomavirus type 175
atagatgcattagctgagtc

SEQ ID NO: 40549 - DNA, 20 bp, Human papillomavirus type 175
tagatgcattagctgagtct

SEQ ID NO: 40550 - DNA, 20 bp, Human papillomavirus type 175
aggcattggattaacaggaa

SEQ ID NO: 40551 - DNA, 20 bp, Human papillomavirus type 175
ggcattggattaacaggaaa

SEQ ID NO: 40552 - DNA, 20 bp, Human papillomavirus type 175
gattaacaggaaatcctttg

SEQ ID NO: 40553 - DNA, 20 bp, Human papillomavirus type 175
acaggaaatcctttgttcaa

SEQ ID NO: 40554 - DNA, 20 bp, Human papillomavirus type 175
gttcaataaatatgctgacg

SEQ ID NO: 40555 - DNA, 20 bp, Human papillomavirus type 175
tatcactcaccagtaaataa

SEQ ID NO: 40556 - DNA, 20 bp, Human papillomavirus type 175
ctccctacacgtattttcca

SEQ ID NO: 40557 - DNA, 20 bp, Human papillomavirus type 175
tccaaccacaagcggttcct

SEQ ID NO: 40558 - DNA, 20 bp, Human papillomavirus type 175
ccaaccacaagcggttcctt

SEQ ID NO: 40559 - DNA, 20 bp, Human papillomavirus type 175
caaccacaagcggttcctta

SEQ ID NO: 40560 - DNA, 20 bp, Human papillomavirus type 175
tggactatggatctgtctga

SEQ ID NO: 40561 - DNA, 20 bp, Human papillomavirus type 175
gcattaggtaaaaagttttt

SEQ ID NO: 40562 - DNA, 20 bp, Human papillomavirus type 175
cattaggtaaaaagttttta

SEQ ID NO: 40563 - DNA, 20 bp, Human papillomavirus type 175
ggtaaaaagtttttatatca

SEQ ID NO: 40564 - DNA, 20 bp, Human papillomavirus type 175
atataaaaactttttaccta

SEQ ID NO: 40565 - DNA, 20 bp, Human papillomavirus type 175
aattgcatccttaggactta

SEQ ID NO: 40566 - DNA, 20 bp, Human papillomavirus type 175
attgcatccttaggacttag

SEQ ID NO: 40567 - DNA, 20 bp, Human papillomavirus type 175
catccttaggacttagttac

SEQ ID NO: 40568 - DNA, 20 bp, Human papillomavirus type 175
ggacttagttacagactgct

SEQ ID NO: 40569 - DNA, 20 bp, Human papillomavirus type 175
gttacagactgctgtggaca

SEQ ID NO: 40570 - DNA, 20 bp, Human papillomavirus type 163
agttcgtggtcgttggcgtg

SEQ ID NO: 40571 - DNA, 20 bp, Human papillomavirus type 175
gttcgtggtcgttggcgtgc

SEQ ID NO: 40572 - DNA, 20 bp, Human papillomavirus type 163
gtggtcgttggcgtgcttat

SEQ ID NO: 40573 - DNA, 20 bp, Human papillomavirus type 163
gcgtgcttattgcaggcatt

SEQ ID NO: 40574 - DNA, 20 bp, Human papillomavirus type 163
ttgcaggcattgtactgaaa

SEQ ID NO: 40575 - DNA, 20 bp, Human papillomavirus type 163
gaacaacttattctcgacga

SEQ ID NO: 40576 - DNA, 20 bp, Human papillomavirus type 163
ttctcgacgaaggactttct

SEQ ID NO: 40577 - DNA, 20 bp, Human papillomavirus type 163
tcgacgaaggactttctctt

SEQ ID NO: 40578 - DNA, 20 bp, Human papillomavirus type 163
ctctttgttgtccatcctgt

SEQ ID NO: 40579 - DNA, 20 bp, Human papillomavirus type 163
tctttgttgtccatcctgtg

SEQ ID NO: 40580 - DNA, 20 bp, Human papillomavirus type 163
tacaatgcacaggcaactgt

SEQ ID NO: 40581 - DNA, 20 bp, Human papillomavirus type 163
taaaagtccagaagttgcag

SEQ ID NO: 40582 - DNA, 20 bp, Human papillomavirus type 163
cagttgccgatttgagtcca

SEQ ID NO: 40583 - DNA, 20 bp, Human papillomavirus type 163
ccgatttgagtccacagttg

SEQ ID NO: 40584 - DNA, 20 bp, Human papillomavirus type 163
tggacttttagaatactttc

SEQ ID NO: 40585 - DNA, 20 bp, Human papillomavirus type 163
tataaatttactgatggtgc

SEQ ID NO: 40586 - DNA, 20 bp, Human papillomavirus type 163
actgatggtgcatggaaatc

SEQ ID NO: 40587 - DNA, 20 bp, Human papillomavirus type 163
ctgatggtgcatggaaatct

SEQ ID NO: 40588 - DNA, 20 bp, Human papillomavirus type 163
ctttagaaagcttggcgccc

SEQ ID NO: 40589 - DNA, 20 bp, Human papillomavirus type 163
tttagaaagcttggcgccca

SEQ ID NO: 40590 - DNA, 20 bp, Human papillomavirus type 163
gggagattctcccgattttt

SEQ ID NO: 40591 - DNA, 20 bp, Human papillomavirus type 163
ggagattctcccgatttttg

SEQ ID NO: 40592 - DNA, 20 bp, Human papillomavirus type 163
tcccgatttttggagtcgtc

SEQ ID NO: 40593 - DNA, 20 bp, Human papillomavirus type 163
ttggagtcgtctcctagcag

SEQ ID NO: 40594 - DNA, 20 bp, Human papillomavirus type 163
tggagtcgtctcctagcagg

SEQ ID NO: 40595 - DNA, 20 bp, Human papillomavirus type 163
gacaattacaagcggacgct

SEQ ID NO: 40596 - DNA, 20 bp, Human papillomavirus type 163
caagcggacgcttgggatcc

SEQ ID NO: 40597 - DNA, 20 bp, Human papillomavirus type 163
ggatccgccaataattcttg

SEQ ID NO: 40598 - DNA, 20 bp, Human papillomavirus type 163
ttgtaaggggtctacccaac

SEQ ID NO: 40599 - DNA, 20 bp, Human papillomavirus type 163
taaggggtctacccaacacg

SEQ ID NO: 40600 - DNA, 20 bp, Human papillomavirus type 163
tcaactcctagtagagtaaa

SEQ ID NO: 40601 - DNA, 20 bp, Human papillomavirus type 163
ctgttgacactataggccca

SEQ ID NO: 40602 - DNA, 20 bp, Human papillomavirus type 163
acactataggcccatctgag

SEQ ID NO: 40603 - DNA, 20 bp, Human papillomavirus type 163
caatagatgttattgatcct

SEQ ID NO: 40604 - DNA, 20 bp, Human papillomavirus type 163
gaactacctcagatgggcct

SEQ ID NO: 40605 - DNA, 20 bp, Human papillomavirus type 163
ttgcagctagtggacatcca

SEQ ID NO: 40606 - DNA, 20 bp, Human papillomavirus type 163
cagctagtggacatccaacc

SEQ ID NO: 40607 - DNA, 20 bp, Human papillomavirus type 163
ttagcaatgcagaagaaggt

SEQ ID NO: 40608 - DNA, 20 bp, Human papillomavirus type 163
gcaatgcagaagaaggtgta

SEQ ID NO: 40609 - DNA, 20 bp, Human papillomavirus type 163
gatgtgcaacctatagaacc

SEQ ID NO: 40610 - DNA, 20 bp, Human papillomavirus type 163
tgaaatgatacctttggaga

SEQ ID NO: 40611 - DNA, 20 bp, Human papillomavirus type 163
ggagacattacacaccagag

SEQ ID NO: 40612 - DNA, 20 bp, Human papillomavirus type 163
gagacattacacaccagagc

SEQ ID NO: 40613 - DNA, 20 bp, Human papillomavirus type 163
cacaccagagctgaatttga

SEQ ID NO: 40614 - DNA, 20 bp, Human papillomavirus type 163
gaaattgaagcccctcccag

SEQ ID NO: 40615 - DNA, 20 bp, Human papillomavirus type 163
gagcaggatgtagcagaggc

SEQ ID NO: 40616 - DNA, 20 bp, Human papillomavirus type 163
agcaggatgtagcagaggcg

SEQ ID NO: 40617 - DNA, 20 bp, Human papillomavirus type 163
cagcgcccgatctggatttt

SEQ ID NO: 40618 - DNA, 20 bp, Human papillomavirus type 163
tgctgacattagagtattag

SEQ ID NO: 40619 - DNA, 20 bp, Human papillomavirus type 163
gctgacattagagtattagg

SEQ ID NO: 40620 - DNA, 20 bp, Human papillomavirus type 163
attatatgattttgaaagcc

SEQ ID NO: 40621 - DNA, 20 bp, Human papillomavirus type 163
ttatatgattttgaaagcca

SEQ ID NO: 40622 - DNA, 20 bp, Human papillomavirus type 163
tatgattttgaaagccatga

SEQ ID NO: 40623 - DNA, 20 bp, Human papillomavirus type 163
tgaaagccatgattttatac

SEQ ID NO: 40624 - DNA, 20 bp, Human papillomavirus type 163
gaaagccatgattttatact

SEQ ID NO: 40625 - DNA, 20 bp, Human papillomavirus type 163
actgtaggtcacccatactt

SEQ ID NO: 40626 - DNA, 20 bp, Human papillomavirus type 163
cctattcgggatgttcaaga

SEQ ID NO: 40627 - DNA, 20 bp, Human papillomavirus type 163
ctattcgggatgttcaagat

SEQ ID NO: 40628 - DNA, 20 bp, Human papillomavirus type 163
gggatgttcaagataaaaca

SEQ ID NO: 40629 - DNA, 20 bp, Human papillomavirus type 163
aagataaaacaaaaatatta

SEQ ID NO: 40630 - DNA, 20 bp, Human papillomavirus type 163
aacagagcgatgataatcgc

SEQ ID NO: 40631 - DNA, 20 bp, Human papillomavirus type 163
agaccctaagcaaacccaac

SEQ ID NO: 40632 - DNA, 20 bp, Human papillomavirus type 163
gaccctaagcaaacccaact

SEQ ID NO: 40633 - DNA, 20 bp, Human papillomavirus type 163
attgtaggctgtgctccacc

SEQ ID NO: 40634 - DNA, 20 bp, Human papillomavirus type 163
ttgtaggctgtgctccacca

SEQ ID NO: 40635 - DNA, 20 bp, Human papillomavirus type 163
ggaacacctagtggttctct

SEQ ID NO: 40636 - DNA, 20 bp, Human papillomavirus type 163
gaacacctagtggttctcta

SEQ ID NO: 40637 - DNA, 20 bp, Human papillomavirus type 163
tctagtttccagtgaatccc

SEQ ID NO: 40638 - DNA, 20 bp, Human papillomavirus type 163
ccagtgaatcccaagtattt

SEQ ID NO: 40639 - DNA, 20 bp, Human papillomavirus type 163
cagtgaatcccaagtattta

SEQ ID NO: 40640 - DNA, 20 bp, Hepatitis C virus
gtatgagtgtcgtacagcct

SEQ ID NO: 40641 - DNA, 20 bp, Hepatitis C virus
ccgggaagactgggtccttt

SEQ ID NO: 40642 - DNA, 20 bp, Hepatitis C virus
ccggcaattccggtgtactc

SEQ ID NO: 40643 - DNA, 20 bp, Hepatitis C virus
cggtgtactcaccggttccg

SEQ ID NO: 40644 - DNA, 20 bp, Hepatitis C virus
cgcagaccactatggctctc

SEQ ID NO: 40645 - DNA, 20 bp, Hepatitis C virus
agttcccgggtggcgggcag

SEQ ID NO: 40646 - DNA, 20 bp, Hepatitis C virus
ccgggtggcgggcagatcgt

SEQ ID NO: 40647 - DNA, 20 bp, Hepatitis C virus
gcggagtctacttgttgccg

SEQ ID NO: 40648 - DNA, 20 bp, Hepatitis C virus
ttgccgcgcaggggccctag

SEQ ID NO: 40649 - DNA, 20 bp, Hepatitis C virus
ccgcgcaggggccctagatt

SEQ ID NO: 40650 - DNA, 20 bp, Hepatitis C virus
gccgacctcatggggtacat

SEQ ID NO: 40651 - DNA, 20 bp, Hepatitis C virus
ccgacctcatggggtacatc

SEQ ID NO: 40652 - DNA, 20 bp, Hepatitis C virus
ccagggctctggcacatggt

SEQ ID NO: 40653 - DNA, 20 bp, Hepatitis C virus
gagttctggaggacggggtc

SEQ ID NO: 40654 - DNA, 20 bp, Hepatitis C virus
cgttcgcgagggtaatacta

SEQ ID NO: 40655 - DNA, 20 bp, Hepatitis C virus
gcgagggtaatactagcagg

SEQ ID NO: 40656 - DNA, 20 bp, Hepatitis C virus
ggaaccagtggcccccactt

SEQ ID NO: 40657 - DNA, 20 bp, Hepatitis C virus
ggcggtccgctatcgcggag

SEQ ID NO: 40658 - DNA, 20 bp, Hepatitis C virus
gcggtccgctatcgcggagc

SEQ ID NO: 40659 - DNA, 20 bp, Hepatitis C virus
tcaatggttgccgcttacgc

SEQ ID NO: 40660 - DNA, 20 bp, Hepatitis C virus
ccgcttacgctgtgagagtg

SEQ ID NO: 40661 - DNA, 20 bp, Hepatitis C virus
cgctgtgagagtgcccggtg

SEQ ID NO: 40662 - DNA, 20 bp, Hepatitis C virus
acaaggccggcgcccagttc

SEQ ID NO: 40663 - DNA, 20 bp, Hepatitis C virus
tgcatcatgtcccacgccat

SEQ ID NO: 40664 - DNA, 20 bp, Hepatitis C virus
atagcggccctcttctacac

SEQ ID NO: 40665 - DNA, 20 bp, Hepatitis C virus
tacacacataggttcaattc

SEQ ID NO: 40666 - DNA, 20 bp, Hepatitis C virus
aattctagtggctgtcccga

SEQ ID NO: 40667 - DNA, 20 bp, Hepatitis C virus
tagtggctgtcccgagagga

SEQ ID NO: 40668 - DNA, 20 bp, Hepatitis C virus
ttgtaaacctctcagtgact

SEQ ID NO: 40669 - DNA, 20 bp, Hepatitis C virus
acgaagacctgcggaggtcc

SEQ ID NO: 40670 - DNA, 20 bp, Hepatitis C virus
ctctgggcaccctggggacg

SEQ ID NO: 40671 - DNA, 20 bp, Hepatitis C virus
cacggaggacctccgcaggt

SEQ ID NO: 40672 - DNA, 20 bp, Hepatitis C virus
cactacggagctcgcaatac

SEQ ID NO: 40673 - DNA, 20 bp, Hepatitis C virus
cgagctccgtagtggaatgg

SEQ ID NO: 40674 - DNA, 20 bp, Hepatitis C virus
atccacctcaacgcggccag

SEQ ID NO: 40675 - DNA, 20 bp, Hepatitis C virus
cgggaacccatggtatctgg

SEQ ID NO: 40676 - DNA, 20 bp, Hepatitis C virus
ccgcaaggctggccgcgttg

SEQ ID NO: 40677 - DNA, 20 bp, Hepatitis C virus
aggtggatcaagttctccag

SEQ ID NO: 40678 - DNA, 20 bp, Hepatitis C virus
tccagagcggcttcagcctg

SEQ ID NO: 40679 - DNA, 20 bp, Hepatitis C virus
ccttacaaggtgtgaagcag

SEQ ID NO: 40680 - DNA, 20 bp, Hepatitis C virus
cttacaaggtgtgaagcagc

SEQ ID NO: 40681 - DNA, 20 bp, Hepatitis C virus
caaggtgtgaagcagcactc

SEQ ID NO: 40682 - DNA, 20 bp, Hepatitis C virus
agaggagggacccacgtttg

SEQ ID NO: 40683 - DNA, 20 bp, Hepatitis C virus
ggagtgctgcttcacacctt

SEQ ID NO: 40684 - DNA, 20 bp, Hepatitis C virus
tatttataaccatctcgccc

SEQ ID NO: 40685 - DNA, 20 bp, Hepatitis C virus
ataaccatctcgcccccctg

SEQ ID NO: 40686 - DNA, 20 bp, Hepatitis C virus
taaccatctcgcccccctgg

SEQ ID NO: 40687 - DNA, 20 bp, Hepatitis C virus
ggccgttgcagtcgagcccg

SEQ ID NO: 40688 - DNA, 20 bp, Hepatitis C virus
gccgttgcagtcgagcccgt

SEQ ID NO: 40689 - DNA, 20 bp, Hepatitis C virus
tccacctcaacgcagacctt

SEQ ID NO: 40690 - DNA, 20 bp, Hepatitis C virus
ctggggaccaatgtgggcgg

SEQ ID NO: 40691 - DNA, 20 bp, Hepatitis C virus
gtccccaggaaggtctgcgt

SEQ ID NO: 40692 - DNA, 20 bp, Hepatitis C virus
aggtggacaacacctgcacc

SEQ ID NO: 40693 - DNA, 20 bp, Hepatitis C virus
aaggctcctcgggagggcct

SEQ ID NO: 40694 - DNA, 20 bp, Hepatitis C virus
tgcccccaaagtcattgcgt

SEQ ID NO: 40695 - DNA, 20 bp, Hepatitis C virus
cgttggcatcttcagagctg

SEQ ID NO: 40696 - DNA, 20 bp, Hepatitis C virus
gcatcttcagagctgctgtc

SEQ ID NO: 40697 - DNA, 20 bp, Hepatitis C virus
agagctgctgtctgcacccg

SEQ ID NO: 40698 - DNA, 20 bp, Hepatitis C virus
ggtttggtgcctacatgtcc

SEQ ID NO: 40699 - DNA, 20 bp, Hepatitis C virus
ggtgcctacatgtccaaggc

SEQ ID NO: 40700 - DNA, 20 bp, Hepatitis C virus
gtgcctacatgtccaaggct

SEQ ID NO: 40701 - DNA, 20 bp, Hepatitis C virus
tggaattgatccaagtgtgc

SEQ ID NO: 40702 - DNA, 20 bp, Hepatitis C virus
atccaagtgtgcgcaccggc

SEQ ID NO: 40703 - DNA, 20 bp, Hepatitis C virus
ccttctatgggaaagccatc

SEQ ID NO: 40704 - DNA, 20 bp, Hepatitis C virus
tatgggaaagccatccccct

SEQ ID NO: 40705 - DNA, 20 bp, Hepatitis C virus
tctgtcattccaaaaagaaa

SEQ ID NO: 40706 - DNA, 20 bp, Hepatitis C virus
ctgtcattccaaaaagaaat

SEQ ID NO: 40707 - DNA, 20 bp, Hepatitis C virus
tgtcattccaaaaagaaatg

SEQ ID NO: 40708 - DNA, 20 bp, Hepatitis C virus
actattgagaccaccacagt

SEQ ID NO: 40709 - DNA, 20 bp, Hepatitis C virus
agaccaccacagtcccgcaa

SEQ ID NO: 40710 - DNA, 20 bp, Hepatitis C virus
tgtctcgcgctctcagagac

SEQ ID NO: 40711 - DNA, 20 bp, Hepatitis C virus
cgggactgtggtggtctcaa

SEQ ID NO: 40712 - DNA, 20 bp, Hepatitis C virus
gccgtgtggtccttggatcc

SEQ ID NO: 40713 - DNA, 20 bp, Hepatitis C virus
gatccaacgtggtgacggcc

SEQ ID NO: 40714 - DNA, 20 bp, Hepatitis C virus
tataccagcactttgatgag

SEQ ID NO: 40715 - DNA, 20 bp, Hepatitis C virus
ataccagcactttgatgaga

SEQ ID NO: 40716 - DNA, 20 bp, Hepatitis C virus
taccagcactttgatgagat

SEQ ID NO: 40717 - DNA, 20 bp, Hepatitis C virus
accgcctcagttactagccc

SEQ ID NO: 40718 - DNA, 20 bp, Hepatitis C virus
ctagcccccttgctacatcg

SEQ ID NO: 40719 - DNA, 20 bp, Hepatitis C virus
ctacatcgaccacactacta

SEQ ID NO: 40720 - DNA, 20 bp, Hepatitis C virus
gcaagccagttagcgccgcc

SEQ ID NO: 40721 - DNA, 20 bp, Hepatitis C virus
gcgccgccgtctgctgccac

SEQ ID NO: 40722 - DNA, 20 bp, Hepatitis C virus
agttgtgggagttgtttgtg

SEQ ID NO: 40723 - DNA, 20 bp, Hepatitis C virus
gttgtgggagttgtttgtgc

SEQ ID NO: 40724 - DNA, 20 bp, Hepatitis C virus
tgggagttgtttgtgccgcg

SEQ ID NO: 40725 - DNA, 20 bp, Hepatitis C virus
tttgtgccgcgatcatcaaa

SEQ ID NO: 40726 - DNA, 20 bp, Hepatitis C virus
gtgccgcgatcatcaaacgg

SEQ ID NO: 40727 - DNA, 20 bp, Hepatitis C virus
gcatcttggttgaaggccaa

SEQ ID NO: 40728 - DNA, 20 bp, Hepatitis C virus
catcttggttgaaggccaag

SEQ ID NO: 40729 - DNA, 20 bp, Hepatitis C virus
gttgaaggccaaggtacttc

SEQ ID NO: 40730 - DNA, 20 bp, Hepatitis C virus
aaggccaaggtacttcccag

SEQ ID NO: 40731 - DNA, 20 bp, Hepatitis C virus
ccagccttccagggatccca

SEQ ID NO: 40732 - DNA, 20 bp, Hepatitis C virus
ygtggtgggagtgacggcgg

SEQ ID NO: 40733 - DNA, 20 bp, Hepatitis C virus
cttcccccgaattcttcagc

SEQ ID NO: 40734 - DNA, 20 bp, Hepatitis C virus
ccccgaattcttcagctttg

SEQ ID NO: 40735 - DNA, 20 bp, Hepatitis C virus
ttcagctttgtggacggggt

SEQ ID NO: 40736 - DNA, 20 bp, Hepatitis C virus
agctttgtggacggggtgcg

SEQ ID NO: 40737 - DNA, 20 bp, Hepatitis C virus
caccacccaggcggaagcgg

SEQ ID NO: 40738 - DNA, 20 bp, Hepatitis C virus
tccaactcacagagtccgcg

SEQ ID NO: 40739 - DNA, 20 bp, Hepatitis C virus
gataaccgcccgcttccgcc

SEQ ID NO: 40740 - DNA, 20 bp, Hepatitis C virus
cgcctgggtggtggaacagg

SEQ ID NO: 40741 - DNA, 20 bp, Hepatitis C virus
gggtacggggcaaaggaagt

SEQ ID NO: 40742 - DNA, 20 bp, Hepatitis C virus
ggtacggggcaaaggaagtc

SEQ ID NO: 40743 - DNA, 20 bp, Hepatitis C virus
cgcccaaggcaatgtctcac

SEQ ID NO: 40744 - DNA, 20 bp, Hepatitis C virus
ctacaggacatgaccacccc

SEQ ID NO: 40745 - DNA, 20 bp, Hepatitis C virus
attcttggccattatggtgg

SEQ ID NO: 40746 - DNA, 20 bp, Hepatitis C virus
gattccactgtcacagaaca

SEQ ID NO: 40747 - DNA, 20 bp, Hepatitis C virus
attccactgtcacagaacaa

SEQ ID NO: 40748 - DNA, 20 bp, Hepatitis C virus
cactgtcacagaacaagaca

SEQ ID NO: 40749 - DNA, 20 bp, Hepatitis C virus
atgatggtgcgagcctcggg

SEQ ID NO: 40750 - DNA, 20 bp, Hepatitis C virus
cagcactgatagatctcgct

SEQ ID NO: 40751 - DNA, 20 bp, Hepatitis C virus
cctggtctgcggcgatgact

SEQ ID NO: 40752 - DNA, 20 bp, Hepatitis C virus
ctggtctgcggcgatgactt

SEQ ID NO: 40753 - DNA, 20 bp, Hepatitis C virus
gtggtcatttgcgagagcaa

SEQ ID NO: 40754 - DNA, 20 bp, Hepatitis C virus
gcgagagcaagggagtcgaa

SEQ ID NO: 40755 - DNA, 20 bp, Hepatitis C virus
cgagagcaagggagtcgaac

SEQ ID NO: 40756 - DNA, 20 bp, Hepatitis C virus
caggcgctggccggctcgat

SEQ ID NO: 40757 - DNA, 20 bp, Hepatitis C virus
cgagctggttcagcgtttgc

SEQ ID NO: 40758 - DNA, 20 bp, Hepatitis C virus
gagctggttcagcgtttgcg

SEQ ID NO: 40759 - DNA, 20 bp, Hepatitis C virus
gatcttggtcctgacagccc

SEQ ID NO: 40760 - DNA, 20 bp, Hepatitis C virus
atcttggtcctgacagccca

SEQ ID NO: 40761 - DNA, 20 bp, Influenza C virus
cagcaataacaggaggaaaa

SEQ ID NO: 40762 - DNA, 20 bp, Influenza C virus
agcaataacaggaggaaaat

SEQ ID NO: 40763 - DNA, 20 bp, Influenza C virus
agaatgaacatcttccccta

SEQ ID NO: 40764 - DNA, 20 bp, Influenza C virus
ccctaatgtctggagaagcc

SEQ ID NO: 40765 - DNA, 20 bp, Influenza C virus
tggtggcttctccagacatt

SEQ ID NO: 40766 - DNA, 20 bp, Influenza C virus
ttgggagtggagtcaatgat

SEQ ID NO: 40767 - DNA, 20 bp, Influenza C virus
ggagtggagtcaatgatgaa

SEQ ID NO: 40768 - DNA, 20 bp, Influenza C virus
tttggtcatctctgaaggcc

SEQ ID NO: 40769 - DNA, 20 bp, Influenza C virus
ggtcatctctgaaggccctc

SEQ ID NO: 40770 - DNA, 20 bp, Influenza C virus
gtcatctctgaaggccctca

SEQ ID NO: 40771 - DNA, 20 bp, Influenza B virus
ccccttattctcatggaacg

SEQ ID NO: 40772 - DNA, 20 bp, Influenza B virus
ttctcatggaacgggaacag

SEQ ID NO: 40773 - DNA, 20 bp, Influenza B virus
tcatggaacgggaacaggct

SEQ ID NO: 40774 - DNA, 20 bp, Influenza B virus
gaacacacgagtactcaaac

SEQ ID NO: 40775 - DNA, 20 bp, Influenza B virus
ttttcccttgtttgagtact

SEQ ID NO: 40776 - DNA, 20 bp, Influenza B virus
caagcagggtcacagaatgc

SEQ ID NO: 40777 - DNA, 20 bp, Influenza B virus
aagcagggtcacagaatgcc

SEQ ID NO: 40778 - DNA, 20 bp, Influenza B virus
actcaggggagacagacctt

SEQ ID NO: 40779 - DNA, 20 bp, Influenza B virus
gattggacggtgtgtagaaa

SEQ ID NO: 40780 - DNA, 20 bp, Influenza B virus
attggacggtgtgtagaaac

SEQ ID NO: 40781 - DNA, 20 bp, Influenza B virus
acccgtaggtggaaacgaaa

SEQ ID NO: 40782 - DNA, 20 bp, Influenza B virus
cccgtaggtggaaacgaaaa

SEQ ID NO: 40783 - DNA, 20 bp, Influenza B virus
ctgagcattttagccactgc

SEQ ID NO: 40784 - DNA, 20 bp, Influenza B virus
tagccactgcatttgatagt

SEQ ID NO: 40785 - DNA, 20 bp, Influenza B virus
agccactgcatttgatagtt

SEQ ID NO: 40786 - DNA, 20 bp, Influenza B virus
ttcatagctgactatagata

SEQ ID NO: 40787 - DNA, 20 bp, Influenza B virus
atagctgactatagatacac

SEQ ID NO: 40788 - DNA, 20 bp, Influenza B virus
gtaggtgtatctatagtcag

SEQ ID NO: 40789 - DNA, 20 bp, Influenza B virus
taggtgtatctatagtcagc

SEQ ID NO: 40790 - DNA, 20 bp, Influenza B virus
tatggctgtttgtgccgttg

SEQ ID NO: 40791 - DNA, 20 bp, Influenza B virus
acaatttgagaaacctgcat

SEQ ID NO: 40792 - DNA, 20 bp, Influenza B virus
caatttgagaaacctgcata

SEQ ID NO: 40793 - DNA, 20 bp, Influenza B virus
gagaaacctgcatattccag

SEQ ID NO: 40794 - DNA, 20 bp, Influenza B virus
agaaacctgcatattccaga

SEQ ID NO: 40795 - DNA, 20 bp, Influenza B virus
cagaaataatattaaaatac

SEQ ID NO: 40796 - DNA, 20 bp, Influenza B virus
ttgaggaacaatgctacgct

SEQ ID NO: 40797 - DNA, 20 bp, Influenza B virus
aggaacaatgctacgctaag

SEQ ID NO: 40798 - DNA, 20 bp, Influenza B virus
caacctttttgaggcttgct

SEQ ID NO: 40799 - DNA, 20 bp, Influenza B virus
ttgaggcttgctttaacagt

SEQ ID NO: 40800 - DNA, 20 bp, Influenza B virus
tgaggcttgctttaacagtg

SEQ ID NO: 40801 - DNA, 20 bp, Influenza A virus
atctcatactcctgttcaca

SEQ ID NO: 40802 - DNA, 20 bp, Influenza A virus
tctcatactcctgttcacag

SEQ ID NO: 40803 - DNA, 20 bp, Influenza A virus
acagcagtgaggggggacca

SEQ ID NO: 40804 - DNA, 20 bp, Influenza A virus
gataccatgccaataattcc

SEQ ID NO: 40805 - DNA, 20 bp, Influenza A virus
cacagaaaaggtcgacacaa

SEQ ID NO: 40806 - DNA, 20 bp, Influenza A virus
taagtgtgccagaatggtcc

SEQ ID NO: 40807 - DNA, 20 bp, Influenza A virus
gtgttacccaggcagcttca

SEQ ID NO: 40808 - DNA, 20 bp, Influenza A virus
tgttacccaggcagcttcaa

SEQ ID NO: 40809 - DNA, 20 bp, Influenza A virus
cccaggcagcttcaatgact

SEQ ID NO: 40810 - DNA, 20 bp, Influenza A virus
aatgactatgaagaattgaa

SEQ ID NO: 40811 - DNA, 20 bp, Influenza A virus
tccggttgccaaaggatcgt

SEQ ID NO: 40812 - DNA, 20 bp, Influenza A virus
ccaaaggatcgtacaacaat

SEQ ID NO: 40813 - DNA, 20 bp, Influenza A virus
ggggagtgcaccatcctaat

SEQ ID NO: 40814 - DNA, 20 bp, Influenza A virus
gggagtgcaccatcctaatg

SEQ ID NO: 40815 - DNA, 20 bp, Influenza A virus
ttctgcctcatcattaggat

SEQ ID NO: 40816 - DNA, 20 bp, Influenza A virus
caccagagtatgggttcaaa

SEQ ID NO: 40817 - DNA, 20 bp, Influenza A virus
aaaatatcgaaaagaggtag

SEQ ID NO: 40818 - DNA, 20 bp, Influenza A virus
agggatcatgaagacagaag

SEQ ID NO: 40819 - DNA, 20 bp, Influenza A virus
agaactgtgaaaccaaatgc

SEQ ID NO: 40820 - DNA, 20 bp, Influenza A virus
ggcatttggtttcacagttc

SEQ ID NO: 40821 - DNA, 20 bp, Influenza A virus
tttggggcaatagctggttt

SEQ ID NO: 40822 - DNA, 20 bp, Influenza A virus
ggggcaatagctggttttat

SEQ ID NO: 40823 - DNA, 20 bp, Influenza A virus
gggcaatagctggttttata

SEQ ID NO: 40824 - DNA, 20 bp, Influenza A virus
tatagaaggaggatggcaag

SEQ ID NO: 40825 - DNA, 20 bp, Influenza A virus
atagaaggaggatggcaagg

SEQ ID NO: 40826 - DNA, 20 bp, Respiratory syncytial virus
tcacttgagactataataat

SEQ ID NO: 40827 - DNA, 20 bp, Respiratory syncytial virus
agactataataatatcacta

SEQ ID NO: 40828 - DNA, 20 bp, Respiratory syncytial virus
gtgatattattatagtctca

SEQ ID NO: 40829 - DNA, 20 bp, Respiratory syncytial virus
ttatagtctcaagtgacaat

SEQ ID NO: 40830 - DNA, 20 bp, Respiratory syncytial virus
tagtctcaagtgacaatggt

SEQ ID NO: 40831 - DNA, 20 bp, Respiratory syncytial virus
gcaaagtcaagttgaatgat

SEQ ID NO: 40832 - DNA, 20 bp, Respiratory syncytial virus
aatgatacactcaacaaaga

SEQ ID NO: 40833 - DNA, 20 bp, Respiratory syncytial virus
tgtcatccagcaaatacacc

SEQ ID NO: 40834 - DNA, 20 bp, Respiratory syncytial virus
gatggtgtatttgctggatg

SEQ ID NO: 40835 - DNA, 20 bp, Respiratory syncytial virus
gctggatgacagaagttgat

SEQ ID NO: 40836 - DNA, 20 bp, Respiratory syncytial virus
ggagggctaataatgtccta

SEQ ID NO: 40837 - DNA, 20 bp, Respiratory syncytial virus
taaaggcttactacccaagg

SEQ ID NO: 40838 - DNA, 20 bp, Respiratory syncytial virus
ctacccaaggatatagccaa

SEQ ID NO: 40839 - DNA, 20 bp, Respiratory syncytial virus
tatgaagtgtttgaaaaata

SEQ ID NO: 40840 - DNA, 20 bp, Respiratory syncytial virus
gaaaaatatcctcactttat

SEQ ID NO: 40841 - DNA, 20 bp, Respiratory syncytial virus
cctcacttctccagtgtagt

SEQ ID NO: 40842 - DNA, 20 bp, Respiratory syncytial virus
ctcacttctccagtgtagta

SEQ ID NO: 40843 - DNA, 20 bp, Respiratory syncytial virus
tccagtgtagtattaggcaa

SEQ ID NO: 40844 - DNA, 20 bp, Respiratory syncytial virus
ggcaatgctgctggcctagg

SEQ ID NO: 40845 - DNA, 20 bp, Respiratory syncytial virus
tgcagcatcatatagatctt

SEQ ID NO: 40846 - DNA, 20 bp, Respiratory syncytial virus
gtttaagagaagacatgata

SEQ ID NO: 40847 - DNA, 20 bp, Respiratory syncytial virus
aagagaagacatgatagaaa

SEQ ID NO: 40848 - DNA, 20 bp, Respiratory syncytial virus
agagaagacatgatagaaaa

SEQ ID NO: 40849 - DNA, 20 bp, Respiratory syncytial virus
atgaccaatgacagactaga

SEQ ID NO: 40850 - DNA, 20 bp, Respiratory syncytial virus
ccatagcttctagtctgtca

SEQ ID NO: 40851 - DNA, 20 bp, Respiratory syncytial virus
tggattggctgattggcgta

SEQ ID NO: 40852 - DNA, 20 bp, Respiratory syncytial virus
ggattggctgattggcgtat

SEQ ID NO: 40853 - DNA, 20 bp, Respiratory syncytial virus
gattggctgattggcgtata

SEQ ID NO: 40854 - DNA, 20 bp, Respiratory syncytial virus
gctgattggcgtatagatgt

SEQ ID NO: 40855 - DNA, 20 bp, Respiratory syncytial virus
gcgtatagatgtttggttgg

SEQ ID NO: 40856 - DNA, 20 bp, Respiratory syncytial virus
attaagagtcatgataaact

SEQ ID NO: 40857 - DNA, 20 bp, Respiratory syncytial virus
agagtcatgataaactcaag

SEQ ID NO: 40858 - DNA, 20 bp, Respiratory syncytial virus
gctgggcatttgtgctagca

SEQ ID NO: 40859 - DNA, 20 bp, Respiratory syncytial virus
ctgggcatttgtgctagcac

SEQ ID NO: 40860 - DNA, 20 bp, Respiratory syncytial virus
gtgctagcactgcacttctt

SEQ ID NO: 40861 - DNA, 20 bp, Respiratory syncytial virus
aaaaatgccatcacaaatgc

SEQ ID NO: 40862 - DNA, 20 bp, Respiratory syncytial virus
ctcaggattactgttagtca

SEQ ID NO: 40863 - DNA, 20 bp, Respiratory syncytial virus
ctgttagtcatcacagtgac

SEQ ID NO: 40864 - DNA, 20 bp, Respiratory syncytial virus
gtcatcacagtgactgacaa

SEQ ID NO: 40865 - DNA, 20 bp, Respiratory syncytial virus
atgtatttgaatgctccttt

SEQ ID NO: 40866 - DNA, 20 bp, Respiratory syncytial virus
ttcatcagatctagtactca

SEQ ID NO: 40867 - DNA, 20 bp, Respiratory syncytial virus
atcagatctagtactcaaat

SEQ ID NO: 40868 - DNA, 20 bp, Respiratory syncytial virus
ataaaaatatccacatgggg

SEQ ID NO: 40869 - DNA, 20 bp, Respiratory syncytial virus
gaggaaatccaactaatcac

SEQ ID NO: 40870 - DNA, 20 bp, Respiratory syncytial virus
gttggatttcctccaatgat

SEQ ID NO: 40871 - DNA, 20 bp, Respiratory syncytial virus
ttcatatcatcgtgcttata

SEQ ID NO: 40872 - DNA, 20 bp, Respiratory syncytial virus
atatcatcgtgcttatacaa

SEQ ID NO: 40873 - DNA, 20 bp, Respiratory syncytial virus
tacaagttaaatcttaaatc

SEQ ID NO: 40874 - DNA, 20 bp, Respiratory syncytial virus
aatcttaaatctatagcaca

SEQ ID NO: 40875 - DNA, 20 bp, Respiratory syncytial virus
aatctatagcacaaatcaca

SEQ ID NO: 40876 - DNA, 20 bp, Respiratory syncytial virus
tcactttgaagtgttcaact

SEQ ID NO: 40877 - DNA, 20 bp, Respiratory syncytial virus
cactttgaagtgttcaactt

SEQ ID NO: 40878 - DNA, 20 bp, Respiratory syncytial virus
actttgaagtgttcaacttt

SEQ ID NO: 40879 - DNA, 20 bp, Respiratory syncytial virus
gaagtgttcaactttgtacc

SEQ ID NO: 40880 - DNA, 20 bp, Respiratory syncytial virus
aagtgttcaactttgtacct

SEQ ID NO: 40881 - DNA, 20 bp, Respiratory syncytial virus
tatagacttgtgaagggctt

SEQ ID NO: 40882 - DNA, 20 bp, Respiratory syncytial virus
tgaagggcttggattgccat

SEQ ID NO: 40883 - DNA, 20 bp, Respiratory syncytial virus
gattgccatcggaggaggtt

SEQ ID NO: 40884 - DNA, 20 bp, Respiratory syncytial virus
ccatcggaggaggttgagtg

SEQ ID NO: 40885 - DNA, 20 bp, Respiratory syncytial virus
agtggagggttcccttttga

SEQ ID NO: 40886 - DNA, 20 bp, Respiratory syncytial virus
ccaatcctcaaaacaaatgc

SEQ ID NO: 40887 - DNA, 20 bp, Respiratory syncytial virus
ccgcaatccttgctgcagtc

SEQ ID NO: 40888 - DNA, 20 bp, Respiratory syncytial virus
ctgcagtcacactctgtttt

SEQ ID NO: 40889 - DNA, 20 bp, Respiratory syncytial virus
tgcttccagtcaaaacatca

SEQ ID NO: 40890 - DNA, 20 bp, Respiratory syncytial virus
gcttccagtcaaaacatcac

SEQ ID NO: 40891 - DNA, 20 bp, Respiratory syncytial virus
tcaaatggagttagtgtctt

SEQ ID NO: 40892 - DNA, 20 bp, Respiratory syncytial virus
gtgtcttaaccagcaaagtg

SEQ ID NO: 40893 - DNA, 20 bp, Respiratory syncytial virus
accagcaaagtgttagacct

SEQ ID NO: 40894 - DNA, 20 bp, Respiratory syncytial virus
gacctcaaaaactatataga

SEQ ID NO: 40895 - DNA, 20 bp, Respiratory syncytial virus
atctatatagtttttgaggt

SEQ ID NO: 40896 - DNA, 20 bp, Respiratory syncytial virus
aacaagaaccgacagaggat

SEQ ID NO: 40897 - DNA, 20 bp, Respiratory syncytial virus
acaagaaccgacagaggatg

SEQ ID NO: 40898 - DNA, 20 bp, Respiratory syncytial virus
cttcccactagctgaaacat

SEQ ID NO: 40899 - DNA, 20 bp, Respiratory syncytial virus
ttcccactagctgaaacatg

SEQ ID NO: 40900 - DNA, 20 bp, Respiratory syncytial virus
ccactagctgaaacatgtaa

SEQ ID NO: 40901 - DNA, 20 bp, Respiratory syncytial virus
catttagtaactaaataaaa

SEQ ID NO: 40902 - DNA, 20 bp, Respiratory syncytial virus
agtaactaaataaaaatagc

SEQ ID NO: 40903 - DNA, 20 bp, Respiratory syncytial virus
gtaactaaataaaaatagca

SEQ ID NO: 40904 - DNA, 20 bp, Respiratory syncytial virus
ttacaatggtttcatatctg

SEQ ID NO: 40905 - DNA, 20 bp, Respiratory syncytial virus
caatggtttcatatctgctc

SEQ ID NO: 40906 - DNA, 20 bp, Respiratory syncytial virus
gacagaacagaagagtatgc

SEQ ID NO: 40907 - DNA, 20 bp, Respiratory syncytial virus
gagtgctagagagttatata

SEQ ID NO: 40908 - DNA, 20 bp, Respiratory syncytial virus
tataggatctataaataata

SEQ ID NO: 40909 - DNA, 20 bp, Respiratory syncytial virus
ccatgagcaaactcctcact

SEQ ID NO: 40910 - DNA, 20 bp, Respiratory syncytial virus
tttgatgtcatcactgttga

SEQ ID NO: 40911 - DNA, 20 bp, Respiratory syncytial virus
gacaggcaaagaaagagaac

SEQ ID NO: 40912 - DNA, 20 bp, Respiratory syncytial virus
acaggcaaagaaagagaact

SEQ ID NO: 40913 - DNA, 20 bp, Respiratory syncytial virus
gcaatgcaaccaggaatgtt

SEQ ID NO: 40914 - DNA, 20 bp, Respiratory syncytial virus
caatgcaaccaggaatgttc

SEQ ID NO: 40915 - DNA, 20 bp, Respiratory syncytial virus
gaacttgtctgaacattcct

SEQ ID NO: 40916 - DNA, 20 bp, Respiratory syncytial virus
tgagcacagctccaaacaaa

SEQ ID NO: 40917 - DNA, 20 bp, Respiratory syncytial virus
gagcacagctccaaacaaaa

SEQ ID NO: 40918 - DNA, 20 bp, Respiratory syncytial virus
agcacagctccaaacaaaat

SEQ ID NO: 40919 - DNA, 20 bp, Respiratory syncytial virus
tccaaaagtgcacaacacta

SEQ ID NO: 40920 - DNA, 20 bp, Respiratory syncytial virus
tgcaaaatatagaacctaca

SEQ ID NO: 40921 - DNA, 20 bp, Respiratory syncytial virus
acatatgagaaagccaaaaa

SEQ ID NO: 40922 - DNA, 20 bp, Respiratory syncytial virus
tttccacaatatttaagtgt

SEQ ID NO: 40923 - DNA, 20 bp, Respiratory syncytial virus
ccacaatatttaagtgttaa

SEQ ID NO: 40924 - DNA, 20 bp, Respiratory syncytial virus
cacaatatttaagtgttaac

SEQ ID NO: 40925 - DNA, 20 bp, Respiratory syncytial virus
aagtgttaactatttgcatc

SEQ ID NO: 40926 - DNA, 20 bp, Hepatitis C virus
acgcagaaagcgtctagcca

SEQ ID NO: 40927 - DNA, 20 bp, Hepatitis C virus
gtatgagtgtcgtgcagcct

SEQ ID NO: 40928 - DNA, 20 bp, Hepatitis C virus
cgcagaccactatggctctc

SEQ ID NO: 40929 - DNA, 20 bp, Hepatitis C virus
ctgcgtgaagacagtagttc

SEQ ID NO: 40930 - DNA, 20 bp, Hepatitis C virus
ccgggtggcggtcagatcgt

SEQ ID NO: 40931 - DNA, 20 bp, Hepatitis C virus
gtggagtttacttgttgccg

SEQ ID NO: 40932 - DNA, 20 bp, Hepatitis C virus
acttgttgccgcgcaggggc

SEQ ID NO: 40933 - DNA, 20 bp, Hepatitis C virus
cttgttgccgcgcaggggcc

SEQ ID NO: 40934 - DNA, 20 bp, Hepatitis C virus
ttgccgcgcaggggccctag

SEQ ID NO: 40935 - DNA, 20 bp, Hepatitis C virus
gccgacctcatggggtacat

SEQ ID NO: 40936 - DNA, 20 bp, Hepatitis C virus
gaggcgctgccagggccctg

SEQ ID NO: 40937 - DNA, 20 bp, Hepatitis C virus
tggaagacggcgtgaactat

SEQ ID NO: 40938 - DNA, 20 bp, Hepatitis C virus
cctgttgcatagttcacgcc

SEQ ID NO: 40939 - DNA, 20 bp, Hepatitis C virus
catagttcacgccgtcttcc

SEQ ID NO: 40940 - DNA, 20 bp, Hepatitis C virus
cgttcgcgagggtaacgcct

SEQ ID NO: 40941 - DNA, 20 bp, Hepatitis C virus
gcgagggtaacgcctcgagg

SEQ ID NO: 40942 - DNA, 20 bp, Hepatitis C virus
ggtggcggtgacccccacgg

SEQ ID NO: 40943 - DNA, 20 bp, Hepatitis C virus
gccgtccctggtggccaccg

SEQ ID NO: 40944 - DNA, 20 bp, Hepatitis C virus
ccgtccctggtggccaccgt

SEQ ID NO: 40945 - DNA, 20 bp, Hepatitis C virus
gtggtagctcagctgctccg

SEQ ID NO: 40946 - DNA, 20 bp, Hepatitis C virus
tgggatccggagcagctgag

SEQ ID NO: 40947 - DNA, 20 bp, Hepatitis C virus
gccagctgccgacgccttac

SEQ ID NO: 40948 - DNA, 20 bp, Hepatitis C virus
ccgattttgcccagggctgg

SEQ ID NO: 40949 - DNA, 20 bp, Hepatitis C virus
tgcccagggctggggtccta

SEQ ID NO: 40950 - DNA, 20 bp, Hepatitis C virus
gcccagggctggggtcctat

SEQ ID NO: 40951 - DNA, 20 bp, Hepatitis C virus
cccagggctggggtcctatc

SEQ ID NO: 40952 - DNA, 20 bp, Hepatitis C virus
gttcggttgtacctggatga

SEQ ID NO: 40953 - DNA, 20 bp, Hepatitis C virus
ggttgtacctggatgaactc

SEQ ID NO: 40954 - DNA, 20 bp, Hepatitis C virus
tacctggatgaactcaactg

SEQ ID NO: 40955 - DNA, 20 bp, Hepatitis C virus
accaaagtgtgcggagcgcc

SEQ ID NO: 40956 - DNA, 20 bp, Hepatitis C virus
tgtcatcggaggggtgggca

SEQ ID NO: 40957 - DNA, 20 bp, Hepatitis C virus
ctgctgtccaccacacagtg

SEQ ID NO: 40958 - DNA, 20 bp, Hepatitis C virus
cagatcacagcgttcgcccc

SEQ ID NO: 40959 - DNA, 20 bp, Hepatitis C virus
gccccgcgtccagttgcagg

SEQ ID NO: 40960 - DNA, 20 bp, Hepatitis C virus
tgtccttcctcgtgttcttc

SEQ ID NO: 40961 - DNA, 20 bp, Hepatitis C virus
ctcgtgttcttctgctttgc

SEQ ID NO: 40962 - DNA, 20 bp, Hepatitis C virus
ttctgctttgcgtggtatct

SEQ ID NO: 40963 - DNA, 20 bp, Hepatitis C virus
tgctttgcgtggtatctgaa

SEQ ID NO: 40964 - DNA, 20 bp, Hepatitis C virus
gcgtggtatctgaagggtag

SEQ ID NO: 40965 - DNA, 20 bp, Hepatitis C virus
gacatcaccaaactactcct

SEQ ID NO: 40966 - DNA, 20 bp, Hepatitis C virus
acatcaccaaactactcctg

SEQ ID NO: 40967 - DNA, 20 bp, Hepatitis C virus
ggacccctttggattcttca

SEQ ID NO: 40968 - DNA, 20 bp, Hepatitis C virus
ggattcttcaagccagtttg

SEQ ID NO: 40969 - DNA, 20 bp, Hepatitis C virus
gattcttcaagccagtttgc

SEQ ID NO: 40970 - DNA, 20 bp, Hepatitis C virus
tcccgaatggagaccaagct

SEQ ID NO: 40971 - DNA, 20 bp, Hepatitis C virus
gtctccattcgggagaagac

SEQ ID NO: 40972 - DNA, 20 bp, Hepatitis C virus
gggagaagacgactggttcc

SEQ ID NO: 40973 - DNA, 20 bp, Hepatitis C virus
cacagccacggccagatctc

SEQ ID NO: 40974 - DNA, 20 bp, Hepatitis C virus
ctggcaacgtgcatcaatgg

SEQ ID NO: 40975 - DNA, 20 bp, Hepatitis C virus
gtatacatctggatgacagg

SEQ ID NO: 40976 - DNA, 20 bp, Hepatitis C virus
ggtgatgcgatggtcctcgt

SEQ ID NO: 40977 - DNA, 20 bp, Hepatitis C virus
cggccccgtggtagacagtc

SEQ ID NO: 40978 - DNA, 20 bp, Hepatitis C virus
agggccgcggtgtgcacccg

SEQ ID NO: 40979 - DNA, 20 bp, Hepatitis C virus
atccctgtggagaacctagg

SEQ ID NO: 40980 - DNA, 20 bp, Hepatitis C virus
tccctgtggagaacctaggg

SEQ ID NO: 40981 - DNA, 20 bp, Hepatitis C virus
tccctaggttctccacaggg

SEQ ID NO: 40982 - DNA, 20 bp, Hepatitis C virus
tccacagggataaagtccac

SEQ ID NO: 40983 - DNA, 20 bp, Hepatitis C virus
ccactggcagccccatcacg

SEQ ID NO: 40984 - DNA, 20 bp, Hepatitis C virus
cttgccgacggcgggtgctc

SEQ ID NO: 40985 - DNA, 20 bp, Hepatitis C virus
ccgacggcgggtgctcagga

SEQ ID NO: 40986 - DNA, 20 bp, Hepatitis C virus
tgacataataatttgtgacg

SEQ ID NO: 40987 - DNA, 20 bp, Hepatitis C virus
ttatgtcataagcacctcct

SEQ ID NO: 40988 - DNA, 20 bp, Hepatitis C virus
tgccactcaaagaagaagtg

SEQ ID NO: 40989 - DNA, 20 bp, Hepatitis C virus
ggcatcaatgccgtggccta

SEQ ID NO: 40990 - DNA, 20 bp, Hepatitis C virus
atgcccaatgcgaccagctt

SEQ ID NO: 40991 - DNA, 20 bp, Hepatitis C virus
gcggcgagctcgtcgcactt

SEQ ID NO: 40992 - DNA, 20 bp, Hepatitis C virus
ttctttgagtggcagaagat

SEQ ID NO: 40993 - DNA, 20 bp, Hepatitis C virus
gtggcaccgggggagcgccc

SEQ ID NO: 40994 - DNA, 20 bp, Hepatitis C virus
tggcaccgggggagcgcccc

SEQ ID NO: 40995 - DNA, 20 bp, Hepatitis C virus
gactcgtccgtcctctgtga

SEQ ID NO: 40996 - DNA, 20 bp, Hepatitis C virus
gatccgccttaaacccaccc

SEQ ID NO: 40997 - DNA, 20 bp, Hepatitis C virus
atccgccttaaacccaccct

SEQ ID NO: 40998 - DNA, 20 bp, Hepatitis C virus
aacccaccctccatgggcca

SEQ ID NO: 40999 - DNA, 20 bp, Hepatitis C virus
agaatgaagtcaccctgacg

SEQ ID NO: 41000 - DNA, 20 bp, Hepatitis C virus
ggtgattgggtgcgtcaggg

SEQ ID NO: 41001 - DNA, 20 bp, Hepatitis C virus
ccgtacatcgagcaagggat

SEQ ID NO: 41002 - DNA, 20 bp, Hepatitis C virus
aagcagaaggccctcggcct

SEQ ID NO: 41003 - DNA, 20 bp, Hepatitis C virus
tcacccctgctgtccagacc

SEQ ID NO: 41004 - DNA, 20 bp, Hepatitis C virus
gtctggacagcaggggtgat

SEQ ID NO: 41005 - DNA, 20 bp, Hepatitis C virus
tgcttgaactgctcagcgag

SEQ ID NO: 41006 - DNA, 20 bp, Hepatitis C virus
gtgggtgctggcctagctgg

SEQ ID NO: 41007 - DNA, 20 bp, Hepatitis C virus
tgggtgctggcctagctggc

SEQ ID NO: 41008 - DNA, 20 bp, Hepatitis C virus
cccccacgcactacgtgccg

SEQ ID NO: 41009 - DNA, 20 bp, Hepatitis C virus
ccccacgcactacgtgccgg

SEQ ID NO: 41010 - DNA, 20 bp, Hepatitis C virus
cagtgaggctgctgagtatg

SEQ ID NO: 41011 - DNA, 20 bp, Hepatitis C virus
cccattaacgcctacaccac

SEQ ID NO: 41012 - DNA, 20 bp, Hepatitis C virus
acgcctacaccacgggcccc

SEQ ID NO: 41013 - DNA, 20 bp, Hepatitis C virus
atggggaacgtcccactcca

SEQ ID NO: 41014 - DNA, 20 bp, Hepatitis C virus
ctgcaggtcctaggaccgac

SEQ ID NO: 41015 - DNA, 20 bp, Hepatitis C virus
ttgacatgtccagtgatctc

SEQ ID NO: 41016 - DNA, 20 bp, Hepatitis C virus
cgcccccttgcaagcccttg

SEQ ID NO: 41017 - DNA, 20 bp, Hepatitis C virus
caagcccttgctgcgggagg

SEQ ID NO: 41018 - DNA, 20 bp, Hepatitis C virus
ctgcgggaggaggtatcatt

SEQ ID NO: 41019 - DNA, 20 bp, Hepatitis C virus
agagtaggactccacgagta

SEQ ID NO: 41020 - DNA, 20 bp, Hepatitis C virus
ccttgcgagcccgaaccgga

SEQ ID NO: 41021 - DNA, 20 bp, Hepatitis C virus
agtcagagaacaaagtggtg

SEQ ID NO: 41022 - DNA, 20 bp, Hepatitis C virus
tggactccttcgatccgctt

SEQ ID NO: 41023 - DNA, 20 bp, Hepatitis C virus
gatccgcttgtggcagagga

SEQ ID NO: 41024 - DNA, 20 bp, Hepatitis C virus
tggcagaggaggatgagcgg

SEQ ID NO: 41025 - DNA, 20 bp, Hepatitis C virus
cgcagaatttctgcaggtac

SEQ ID NO: 41026 - DNA, 20 bp, Hepatitis C virus
ccaccaaaagttttggcagc

SEQ ID NO: 41027 - DNA, 20 bp, Hepatitis C virus
tggcagctcctcaacttccg

SEQ ID NO: 41028 - DNA, 20 bp, Hepatitis C virus
ggcagctcctcaacttccgg

SEQ ID NO: 41029 - DNA, 20 bp, Hepatitis C virus
gcagctcctcaacttccggc

SEQ ID NO: 41030 - DNA, 20 bp, Hepatitis C virus
cggcattacgggcgacaata

SEQ ID NO: 41031 - DNA, 20 bp, Hepatitis C virus
caccacttcacgcagtgctt

SEQ ID NO: 41032 - DNA, 20 bp, Hepatitis C virus
acgcagtgcttgccaaaggc

SEQ ID NO: 41033 - DNA, 20 bp, Hepatitis C virus
ccaaaggcagaagaaagtca

SEQ ID NO: 41034 - DNA, 20 bp, Hepatitis C virus
gacagactgcaagttctgga

SEQ ID NO: 41035 - DNA, 20 bp, Hepatitis C virus
acagactgcaagttctggac

SEQ ID NO: 41036 - DNA, 20 bp, Hepatitis C virus
agcctgagaaggggggtcgt

SEQ ID NO: 41037 - DNA, 20 bp, Hepatitis C virus
cccgacctgggcgtgcgcgt

SEQ ID NO: 41038 - DNA, 20 bp, Hepatitis C virus
ctaaccacgtcgtacagggc

SEQ ID NO: 41039 - DNA, 20 bp, Hepatitis C virus
tcgcacacgcgcacgcccag

SEQ ID NO: 41040 - DNA, 20 bp, Hepatitis C virus
cgaccccccttctcaggctg

SEQ ID NO: 41041 - DNA, 20 bp, Hepatitis C virus
atgttgggggccctcttacc

SEQ ID NO: 41042 - DNA, 20 bp, Hepatitis C virus
tgttgggggccctcttacca

SEQ ID NO: 41043 - DNA, 20 bp, Hepatitis C virus
ggggccctcttaccaattca

SEQ ID NO: 41044 - DNA, 20 bp, Hepatitis C virus
ccaattcaaggggggaaaac

SEQ ID NO: 41045 - DNA, 20 bp, Hepatitis C virus
aaggggggaaaactgcggct

SEQ ID NO: 41046 - DNA, 20 bp, Hepatitis C virus
cccgtgaccctacaaccccc

SEQ ID NO: 41047 - DNA, 20 bp, Hepatitis C virus
tgttgcctagccaggaattg

SEQ ID NO: 41048 - DNA, 20 bp, Hepatitis C virus
cctagccaggaattgactgg

SEQ ID NO: 41049 - DNA, 20 bp, Hepatitis C virus
actggagtgtgtcttgctgt

SEQ ID NO: 41050 - DNA, 20 bp, Hepatitis C virus
ctgtctcccacgcggctctc

SEQ ID NO: 41051 - DNA, 20 bp, Hepatitis C virus
tcactccacagttactctcc

SEQ ID NO: 41052 - DNA, 20 bp, Hepatitis C virus
cactccacagttactctcca

SEQ ID NO: 41053 - DNA, 20 bp, Hepatitis C virus
actccacagttactctccag

SEQ ID NO: 41054 - DNA, 20 bp, Hepatitis C virus
ctctccaggtgaaatcaata

SEQ ID NO: 41055 - DNA, 20 bp, Hepatitis C virus
gggtcccgcccttgcgagct

SEQ ID NO: 41056 - DNA, 20 bp, Influenza A virus
aatccaatgattgtcgagct

SEQ ID NO: 41057 - DNA, 20 bp, Influenza A virus
tcgagcttgcggaaaaggca

SEQ ID NO: 41058 - DNA, 20 bp, Influenza A virus
cggaaaaggcaatgaaagaa

SEQ ID NO: 41059 - DNA, 20 bp, Influenza A virus
cggcaaatttgttcgtttcg

SEQ ID NO: 41060 - DNA, 20 bp, Influenza A virus
gttcgtttcgattttcggat

SEQ ID NO: 41061 - DNA, 20 bp, Influenza A virus
agaagcctaaatttctccca

SEQ ID NO: 41062 - DNA, 20 bp, Influenza A virus
ctcccagatttgtatgacta

SEQ ID NO: 41063 - DNA, 20 bp, Influenza A virus
tcccagatttgtatgactac

SEQ ID NO: 41064 - DNA, 20 bp, Influenza A virus
gtatgactacaaggagaacc

SEQ ID NO: 41065 - DNA, 20 bp, Influenza A virus
tatgactacaaggagaaccg

SEQ ID NO: 41066 - DNA, 20 bp, Influenza A virus
aaaacgaggagaaaattcca

SEQ ID NO: 41067 - DNA, 20 bp, Influenza A virus
caaagacaaagaacatgagg

SEQ ID NO: 41068 - DNA, 20 bp, Influenza A virus
aagtgggcacttggtgagaa

SEQ ID NO: 41069 - DNA, 20 bp, Influenza A virus
tcaccaagtgcccacttcaa

SEQ ID NO: 41070 - DNA, 20 bp, Influenza A virus
aattggcttgttttcctcat

SEQ ID NO: 41071 - DNA, 20 bp, Influenza A virus
aacttgatgaaataggggaa

SEQ ID NO: 41072 - DNA, 20 bp, Influenza A virus
atgaaataggggaagacgtt

SEQ ID NO: 41073 - DNA, 20 bp, Influenza A virus
ctccaattgagcacattgca

SEQ ID NO: 41074 - DNA, 20 bp, Influenza A virus
agcacattgcaagtatgaga

SEQ ID NO: 41075 - DNA, 20 bp, Influenza A virus
caagtatgagaaggaactat

SEQ ID NO: 41076 - DNA, 20 bp, Influenza A virus
gtgagtatggaattctctct

SEQ ID NO: 41077 - DNA, 20 bp, Influenza A virus
tgagtatggaattctctctt

SEQ ID NO: 41078 - DNA, 20 bp, Influenza A virus
tctcttactgatccgaggct

SEQ ID NO: 41079 - DNA, 20 bp, Influenza A virus
ctgatccgaggctggagcca

SEQ ID NO: 41080 - DNA, 20 bp, Influenza A virus
tcccatctgtgtggctccag

SEQ ID NO: 41081 - DNA, 20 bp, Influenza A virus
aacagattgagagcatgatt

SEQ ID NO: 41082 - DNA, 20 bp, Influenza A virus
agagcatgattgaggccgag

SEQ ID NO: 41083 - DNA, 20 bp, Influenza A virus
aggccgagtcttctgtcaaa

SEQ ID NO: 41084 - DNA, 20 bp, Influenza A virus
tgtcaaagaaaaagacatga

SEQ ID NO: 41085 - DNA, 20 bp, Influenza A virus
tttgaaaacaaatcagaaac

SEQ ID NO: 41086 - DNA, 20 bp, Influenza A virus
atgctaatgcccaagcagaa

SEQ ID NO: 41087 - DNA, 20 bp, Influenza A virus
gcatcagaatagaccaggca

SEQ ID NO: 41088 - DNA, 20 bp, Influenza A virus
catcagaatagaccaggcaa

SEQ ID NO: 41089 - DNA, 20 bp, Influenza A virus
caacatgatgttcttatcca

SEQ ID NO: 41090 - DNA, 20 bp, Influenza A virus
aacatgatgttcttatccat

SEQ ID NO: 41091 - DNA, 20 bp, Influenza A virus
gagtctctaaaactctacag

SEQ ID NO: 41092 - DNA, 20 bp, Influenza A virus
gcttggagaagcagtaatga

SEQ ID NO: 41093 - DNA, 20 bp, Influenza A virus
gagaagcagtaatgagaatg

SEQ ID NO: 41094 - DNA, 20 bp, Influenza A virus
ctgttttggagtgagtggag

SEQ ID NO: 41095 - DNA, 20 bp, Influenza A virus
tgttttggagtgagtggagg

SEQ ID NO: 41096 - DNA, 20 bp, Human papillomavirus 54
tagaaaacagttatttgggg

SEQ ID NO: 41097 - DNA, 20 bp, Human papillomavirus 54
tttgggggcaatgtctgcta

SEQ ID NO: 41098 - DNA, 20 bp, Human papillomavirus 54
gggggcaatgtctgctactg

SEQ ID NO: 41099 - DNA, 20 bp, Human papillomavirus 54
ggggcaatgtctgctactga

SEQ ID NO: 41100 - DNA, 20 bp, Human papillomavirus 54
gtgcaaggtatgcaatattc

SEQ ID NO: 41101 - DNA, 20 bp, Human papillomavirus 54
aggatatagtccttgattta

SEQ ID NO: 41102 - DNA, 20 bp, Human papillomavirus 54
atttaaaaccagaaccgttt

SEQ ID NO: 41103 - DNA, 20 bp, Human papillomavirus 54
aaaaccagaaccgtttgacc

SEQ ID NO: 41104 - DNA, 20 bp, Human papillomavirus 54
aaaccagaaccgtttgacct

SEQ ID NO: 41105 - DNA, 20 bp, Human papillomavirus 54
gacctgtactgcagggagca

SEQ ID NO: 41106 - DNA, 20 bp, Human papillomavirus 54
tttgtggaagcaattgtaga

SEQ ID NO: 41107 - DNA, 20 bp, Human papillomavirus 54
ttgtggaagcaattgtagaa

SEQ ID NO: 41108 - DNA, 20 bp, Human papillomavirus 54
tgtggaagcaattgtagaac

SEQ ID NO: 41109 - DNA, 20 bp, Human papillomavirus 54
gtggaagcaattgtagaacg

SEQ ID NO: 41110 - DNA, 20 bp, Human papillomavirus 54
tggaagcaattgtagaacgt

SEQ ID NO: 41111 - DNA, 20 bp, Human papillomavirus 54
caaacagcgaaccctgtgta

SEQ ID NO: 41112 - DNA, 20 bp, Human papillomavirus 54
ggctttggctgaccgccgtc

SEQ ID NO: 41113 - DNA, 20 bp, Human papillomavirus 54
gctttggctgaccgccgtcc

SEQ ID NO: 41114 - DNA, 20 bp, Human papillomavirus 54
ggctgaccgccgtcctaggg

SEQ ID NO: 41115 - DNA, 20 bp, Human papillomavirus 54
gctgaccgccgtcctaggga

SEQ ID NO: 41116 - DNA, 20 bp, Human papillomavirus 54
atatgcgcaatgcattagat

SEQ ID NO: 41117 - DNA, 20 bp, Human papillomavirus 54
tatgcgcaatgcattagatg

SEQ ID NO: 41118 - DNA, 20 bp, Human papillomavirus 54
gatggcaatcctatgtgctt

SEQ ID NO: 41119 - DNA, 20 bp, Human papillomavirus 54
gatagaaaacatcgagctat

SEQ ID NO: 41120 - DNA, 20 bp, Human papillomavirus 54
atagaaaacatcgagctatg

SEQ ID NO: 41121 - DNA, 20 bp, Human papillomavirus 54
agatgtgtgccaggaaaggc

SEQ ID NO: 41122 - DNA, 20 bp, Human papillomavirus 54
gatgtgtgccaggaaaggct

SEQ ID NO: 41123 - DNA, 20 bp, Human papillomavirus 54
tagacctatatgaaaaagat

SEQ ID NO: 41124 - DNA, 20 bp, Human papillomavirus 54
attactatctttttcatata

SEQ ID NO: 41125 - DNA, 20 bp, Human papillomavirus 54
ttactatctttttcatatag

SEQ ID NO: 41126 - DNA, 20 bp, Human papillomavirus 54
cattagagacattgcaaaag

SEQ ID NO: 41127 - DNA, 20 bp, Human papillomavirus 54
gagacattgcaaaagacagt

SEQ ID NO: 41128 - DNA, 20 bp, Human papillomavirus 54
caaaagacagtatacagcac

SEQ ID NO: 41129 - DNA, 20 bp, Human papillomavirus 54
caggacacatgcctggaacg

SEQ ID NO: 41130 - DNA, 20 bp, Human papillomavirus 54
ttaagcaaccagttggtggt

SEQ ID NO: 41131 - DNA, 20 bp, Human papillomavirus 54
attatatggatgcagaacac

SEQ ID NO: 41132 - DNA, 20 bp, Human papillomavirus 54
ttatatggatgcagaacaca

SEQ ID NO: 41133 - DNA, 20 bp, Human papillomavirus 54
tatggatgcagaacacaaag

SEQ ID NO: 41134 - DNA, 20 bp, Human papillomavirus 54
tgtggattttaaaaaggaag

SEQ ID NO: 41135 - DNA, 20 bp, Human papillomavirus 54
taaaaaggaagcatctaagt

SEQ ID NO: 41136 - DNA, 20 bp, Human papillomavirus 54
caacagccttccagtcttat

SEQ ID NO: 41137 - DNA, 20 bp, Human papillomavirus 54
cagtcttataacatatgaca

SEQ ID NO: 41138 - DNA, 20 bp, Human papillomavirus 54
taacatatgacaatcctgta

SEQ ID NO: 41139 - DNA, 20 bp, Human papillomavirus 54
ccctacactttgagcagccc

SEQ ID NO: 41140 - DNA, 20 bp, Human papillomavirus 54
gagcagcccacaatacataa

SEQ ID NO: 41141 - DNA, 20 bp, Human papillomavirus 54
aggccctcatcaggtcacac

SEQ ID NO: 41142 - DNA, 20 bp, Human papillomavirus 54
ggccctcatcaggtcacacc

SEQ ID NO: 41143 - DNA, 20 bp, Human papillomavirus 54
gttcccgcacgtcctatatt

SEQ ID NO: 41144 - DNA, 20 bp, Human papillomavirus 54
ttcccgcacgtcctatattt

SEQ ID NO: 41145 - DNA, 20 bp, Human papillomavirus 54
ccgcacgtcctatatttcca

SEQ ID NO: 41146 - DNA, 20 bp, Human papillomavirus 54
atgtagctacctcaatttgt

SEQ ID NO: 41147 - DNA, 20 bp, Human papillomavirus 54
gtaaatatcctgattacctt

SEQ ID NO: 41148 - DNA, 20 bp, Human papillomavirus 54
taaatatcctgattacctta

SEQ ID NO: 41149 - DNA, 20 bp, Human papillomavirus 54
ccttaaaatggctgcagagg

SEQ ID NO: 41150 - DNA, 20 bp, Human papillomavirus 54
aaatggctgcagaggcatat

SEQ ID NO: 41151 - DNA, 20 bp, Human papillomavirus 54
aataagccatactggttaca

SEQ ID NO: 41152 - DNA, 20 bp, Human papillomavirus 54
ataagccatactggttacaa

SEQ ID NO: 41153 - DNA, 20 bp, Human papillomavirus 54
caacgggcccagggtcaaaa

SEQ ID NO: 41154 - DNA, 20 bp, Human papillomavirus 54
gttggggcaatcaggtgttt

SEQ ID NO: 41155 - DNA, 20 bp, Human papillomavirus 54
ttggggcaatcaggtgtttt

SEQ ID NO: 41156 - DNA, 20 bp, Human papillomavirus 54
tagaggactggaactttggt

SEQ ID NO: 41157 - DNA, 20 bp, Human papillomavirus 54
ggtataacccccccagctac

SEQ ID NO: 41158 - DNA, 20 bp, Human papillomavirus 54
gtataacccccccagctaca

SEQ ID NO: 41159 - DNA, 20 bp, Human papillomavirus 54
ggaggacacatataggtttg

SEQ ID NO: 41160 - DNA, 20 bp, Human papillomavirus 54
gaggacacatataggtttgt

SEQ ID NO: 41161 - DNA, 20 bp, Human T-lymphotropic virus 1
agtcgcgttctgccgcctcc

SEQ ID NO: 41162 - DNA, 20 bp, Human T-lymphotropic virus 1
tgccgcctcccgcctgtggt

SEQ ID NO: 41163 - DNA, 20 bp, Human T-lymphotropic virus 1
agagctcaggtcgagaccgg

SEQ ID NO: 41164 - DNA, 20 bp, Human T-lymphotropic virus 1
gagctcaggtcgagaccggg

SEQ ID NO: 41165 - DNA, 20 bp, Human T-lymphotropic virus 1
cctagacggcggacgtagtt

SEQ ID NO: 41166 - DNA, 20 bp, Human T-lymphotropic virus 1
tatagcactctccaggagag

SEQ ID NO: 41167 - DNA, 20 bp, Human T-lymphotropic virus 1
agtacacagttgggggctcg

SEQ ID NO: 41168 - DNA, 20 bp, Human T-lymphotropic virus 1
gtacacagttgggggctcgt

SEQ ID NO: 41169 - DNA, 20 bp, Human T-lymphotropic virus 1
ggggctcgtccgggattcga

SEQ ID NO: 41170 - DNA, 20 bp, Human T-lymphotropic virus 1
gagcgcccctttattcccta

SEQ ID NO: 41171 - DNA, 20 bp, Human T-lymphotropic virus 1
tacacatactcatccaaacc

SEQ ID NO: 41172 - DNA, 20 bp, Human T-lymphotropic virus 1
acacatactcatccaaaccc

SEQ ID NO: 41173 - DNA, 20 bp, Human T-lymphotropic virus 1
cacatactcatccaaaccca

SEQ ID NO: 41174 - DNA, 20 bp, Human T-lymphotropic virus 1
gtgggtcagaatccgggggg

SEQ ID NO: 41175 - DNA, 20 bp, Human T-lymphotropic virus 1
tgggtcagaatccggggggt

SEQ ID NO: 41176 - DNA, 20 bp, Human T-lymphotropic virus 1
cggtgcagcagtttgacccc

SEQ ID NO: 41177 - DNA, 20 bp, Human T-lymphotropic virus 1
gaccccactgccaaagacct

SEQ ID NO: 41178 - DNA, 20 bp, Human T-lymphotropic virus 1
accccactgccaaagacctc

SEQ ID NO: 41179 - DNA, 20 bp, Human T-lymphotropic virus 1
gaggtctttggcagtggggt

SEQ ID NO: 41180 - DNA, 20 bp, Human T-lymphotropic virus 1
ggcagtggggtcaaactgct

SEQ ID NO: 41181 - DNA, 20 bp, Human T-lymphotropic virus 1
gccgccctgccagggagtgc

SEQ ID NO: 41182 - DNA, 20 bp, Human T-lymphotropic virus 1
ctgggcctctatcctccaag

SEQ ID NO: 41183 - DNA, 20 bp, Human T-lymphotropic virus 1
gaggatagaggcccaggaag

SEQ ID NO: 41184 - DNA, 20 bp, Human T-lymphotropic virus 1
ggcactccctggcagggcgg

SEQ ID NO: 41185 - DNA, 20 bp, Human T-lymphotropic virus 1
gcactccctggcagggcggc

SEQ ID NO: 41186 - DNA, 20 bp, Human T-lymphotropic virus 1
gttgtccagcctaaaaaacc

SEQ ID NO: 41187 - DNA, 20 bp, Human T-lymphotropic virus 1
tccagcctaaaaaacccccc

SEQ ID NO: 41188 - DNA, 20 bp, Human T-lymphotropic virus 1
cggtgcgggaaagcaggcca

SEQ ID NO: 41189 - DNA, 20 bp, Human T-lymphotropic virus 1
cccgcaccggaagcacggct

SEQ ID NO: 41190 - DNA, 20 bp, Human T-lymphotropic virus 1
ccgcaccggaagcacggctg

SEQ ID NO: 41191 - DNA, 20 bp, Human T-lymphotropic virus 1
ccaatacaggcgccagctgt

SEQ ID NO: 41192 - DNA, 20 bp, Human T-lymphotropic virus 1
ggctagaacacctcccaagg

SEQ ID NO: 41193 - DNA, 20 bp, Human T-lymphotropic virus 1
ggaggtgttctagcccaagg

SEQ ID NO: 41194 - DNA, 20 bp, Human T-lymphotropic virus 1
tagcccaaggacagctggcg

SEQ ID NO: 41195 - DNA, 20 bp, Human T-lymphotropic virus 1
gcaagattacaggcggcctt

SEQ ID NO: 41196 - DNA, 20 bp, Human T-lymphotropic virus 1
ccagttaaaaaagccaatgg

SEQ ID NO: 41197 - DNA, 20 bp, Human T-lymphotropic virus 1
aaaaagccaatggaacctgg

SEQ ID NO: 41198 - DNA, 20 bp, Human T-lymphotropic virus 1
atccacgacctgcgggccac

SEQ ID NO: 41199 - DNA, 20 bp, Human T-lymphotropic virus 1
gagagttagtggcccgcagg

SEQ ID NO: 41200 - DNA, 20 bp, Human T-lymphotropic virus 1
gtggcccgcaggtcgtggat

SEQ ID NO: 41201 - DNA, 20 bp, Human T-lymphotropic virus 1
aaaaatagtcccaccctgtt

SEQ ID NO: 41202 - DNA, 20 bp, Human T-lymphotropic virus 1
aaaatagtcccaccctgttc

SEQ ID NO: 41203 - DNA, 20 bp, Human T-lymphotropic virus 1
gaaatgcagctggcccatat

SEQ ID NO: 41204 - DNA, 20 bp, Human T-lymphotropic virus 1
ggcaagccttcccccaatgc

SEQ ID NO: 41205 - DNA, 20 bp, Human T-lymphotropic virus 1
ccccaatgcactattcttca

SEQ ID NO: 41206 - DNA, 20 bp, Human T-lymphotropic virus 1
aagccctacttggcgagatt

SEQ ID NO: 41207 - DNA, 20 bp, Human T-lymphotropic virus 1
gcgagattcagtgggtctcc

SEQ ID NO: 41208 - DNA, 20 bp, Human T-lymphotropic virus 1
agtgggtctccaaaggaact

SEQ ID NO: 41209 - DNA, 20 bp, Human T-lymphotropic virus 1
cgccagccccttcacagtct

SEQ ID NO: 41210 - DNA, 20 bp, Human T-lymphotropic virus 1
acagtctctactgtgcctta

SEQ ID NO: 41211 - DNA, 20 bp, Human T-lymphotropic virus 1
tctggctacatgccccccta

SEQ ID NO: 41212 - DNA, 20 bp, Human T-lymphotropic virus 1
cctcagctgtgttattactc

SEQ ID NO: 41213 - DNA, 20 bp, Human T-lymphotropic virus 1
ttactcgacaaatacacctt

SEQ ID NO: 41214 - DNA, 20 bp, Human T-lymphotropic virus 1
ctcgacaaatacaccttgca

SEQ ID NO: 41215 - DNA, 20 bp, Human T-lymphotropic virus 1
caaggtgtatttgtcgagta

SEQ ID NO: 41216 - DNA, 20 bp, Human T-lymphotropic virus 1
caggccctcctgccccgctt

SEQ ID NO: 41217 - DNA, 20 bp, Human T-lymphotropic virus 1
aggccctcctgccccgctta

SEQ ID NO: 41218 - DNA, 20 bp, Human T-lymphotropic virus 1
ctatcgcgtaaggtcgtcta

SEQ ID NO: 41219 - DNA, 20 bp, Human T-lymphotropic virus 1
gcaccacgttcgcagccata

SEQ ID NO: 41220 - DNA, 20 bp, Human T-lymphotropic virus 1
caccacgttcgcagccatac

SEQ ID NO: 41221 - DNA, 20 bp, Human T-lymphotropic virus 1
cccaagacttcctcaatatg

SEQ ID NO: 41222 - DNA, 20 bp, Human T-lymphotropic virus 1
ccaagacttcctcaatatgt

SEQ ID NO: 41223 - DNA, 20 bp, Human T-lymphotropic virus 1
ctcaatatgtgtacctccct

SEQ ID NO: 41224 - DNA, 20 bp, Human T-lymphotropic virus 1
ctattcgccatactacccat

SEQ ID NO: 41225 - DNA, 20 bp, Human T-lymphotropic virus 1
gccatactacccatgtcccc

SEQ ID NO: 41226 - DNA, 20 bp, Human T-lymphotropic virus 1
aagaagctgccggcgctgct

SEQ ID NO: 41227 - DNA, 20 bp, Human T-lymphotropic virus 1
tgcccagtggatcccgtgga

SEQ ID NO: 41228 - DNA, 20 bp, Human T-lymphotropic virus 1
aggagcctccacgggatcca

SEQ ID NO: 41229 - DNA, 20 bp, Human T-lymphotropic virus 1
ccgggatgagagcagcgccg

SEQ ID NO: 41230 - DNA, 20 bp, Human T-lymphotropic virus 1
gagtctcctcataccactct

SEQ ID NO: 41231 - DNA, 20 bp, Human T-lymphotropic virus 1
gttcatggaccctcgacctg

SEQ ID NO: 41232 - DNA, 20 bp, Human T-lymphotropic virus 1
ttcatggaccctcgacctgc

SEQ ID NO: 41233 - DNA, 20 bp, Human T-lymphotropic virus 1
atggaccctcgacctgctgg

SEQ ID NO: 41234 - DNA, 20 bp, Human T-lymphotropic virus 1
cagcagatcaggccctacag

SEQ ID NO: 41235 - DNA, 20 bp, Human T-lymphotropic virus 1
cttaaaatgcccatacctag

SEQ ID NO: 41236 - DNA, 20 bp, Human T-lymphotropic virus 1
aaatgcccatacctagggtg

SEQ ID NO: 41237 - DNA, 20 bp, Human T-lymphotropic virus 1
cagcaagatgtcaattttac

SEQ ID NO: 41238 - DNA, 20 bp, Human T-lymphotropic virus 1
agcaagatgtcaattttact

SEQ ID NO: 41239 - DNA, 20 bp, Human T-lymphotropic virus 1
agtaaaattgacatcttgct

SEQ ID NO: 41240 - DNA, 20 bp, Human T-lymphotropic virus 1
tccttgtcacctgttcccac

SEQ ID NO: 41241 - DNA, 20 bp, Human T-lymphotropic virus 1
ccttgtcacctgttcccacg

SEQ ID NO: 41242 - DNA, 20 bp, Human T-lymphotropic virus 1
cttgtcacctgttcccacgc

SEQ ID NO: 41243 - DNA, 20 bp, Human T-lymphotropic virus 1
tcacctgttcccacgctagg

SEQ ID NO: 41244 - DNA, 20 bp, Human T-lymphotropic virus 1
ccacgctaggatcccgctcc

SEQ ID NO: 41245 - DNA, 20 bp, Human T-lymphotropic virus 1
ttgcaaccacatcgcctcca

SEQ ID NO: 41246 - DNA, 20 bp, Human T-lymphotropic virus 1
caaccacatcgcctccagcc

SEQ ID NO: 41247 - DNA, 20 bp, Human T-lymphotropic virus 1
acctctcccatcaaatcctc

SEQ ID NO: 41248 - DNA, 20 bp, Human T-lymphotropic virus 1
tcctgcagcaacctcctccg

SEQ ID NO: 41249 - DNA, 20 bp, Human T-lymphotropic virus 1
gaggctgaacggaggaggtt

SEQ ID NO: 41250 - DNA, 20 bp, Human T-lymphotropic virus 1
tcctcttccttccttttcaa

SEQ ID NO: 41251 - DNA, 20 bp, Human T-lymphotropic virus 1
cttccttttcaaatactcag

SEQ ID NO: 41252 - DNA, 20 bp, Human T-lymphotropic virus 1
cttttcaaatactcagcaat

SEQ ID NO: 41253 - DNA, 20 bp, Human T-lymphotropic virus 1
tcaaatactcagcaatctgc

SEQ ID NO: 41254 - DNA, 20 bp, Human T-lymphotropic virus 1
caaatactcagcaatctgct

SEQ ID NO: 41255 - DNA, 20 bp, Human T-lymphotropic virus 1
ctccaccagcaggtcctccg

SEQ ID NO: 41256 - DNA, 20 bp, Human T-lymphotropic virus 1
accatgcttattatcagccc

SEQ ID NO: 41257 - DNA, 20 bp, Human T-lymphotropic virus 1
ttatcagcccacttcccagg

SEQ ID NO: 41258 - DNA, 20 bp, Human T-lymphotropic virus 1
tcagcccacttcccagggtt

SEQ ID NO: 41259 - DNA, 20 bp, Human T-lymphotropic virus 1
ccagggtttggacagagtct

SEQ ID NO: 41260 - DNA, 20 bp, Human T-lymphotropic virus 1
tcggctcagctctacagttc

SEQ ID NO: 41261 - DNA, 20 bp, Human T-lymphotropic virus 1
cttatccctcgactcccctc

SEQ ID NO: 41262 - DNA, 20 bp, Human T-lymphotropic virus 1
tccctcgactcccctccttc

SEQ ID NO: 41263 - DNA, 20 bp, Human T-lymphotropic virus 1
cccacccagagaacctctaa

SEQ ID NO: 41264 - DNA, 20 bp, Human T-lymphotropic virus 1
aggtccttaccccgccaatc

SEQ ID NO: 41265 - DNA, 20 bp, Human T-lymphotropic virus 1
ccgggccctgccctaaagat

SEQ ID NO: 41266 - DNA, 20 bp, Human T-lymphotropic virus 1
cgggccctgccctaaagatg

SEQ ID NO: 41267 - DNA, 20 bp, Human T-lymphotropic virus 1
agtactacagtcctcctcct

SEQ ID NO: 41268 - DNA, 20 bp, Human T-lymphotropic virus 1
gtactacagtcctcctcctt

SEQ ID NO: 41269 - DNA, 20 bp, Human T-lymphotropic virus 1
atatttcacaaatttcaaac

SEQ ID NO: 41270 - DNA, 20 bp, Human T-lymphotropic virus 1
ccggtggcttcccggaggtc

SEQ ID NO: 41271 - DNA, 20 bp, Human T-lymphotropic virus 1
ccggaggtctgagcttatga

SEQ ID NO: 41272 - DNA, 20 bp, Human T-lymphotropic virus 1
tgatttgtctttagggggac

SEQ ID NO: 41273 - DNA, 20 bp, Human T-lymphotropic virus 1
gtctttagggggacacgtca

SEQ ID NO: 41274 - DNA, 20 bp, Human T-lymphotropic virus 1
tctttagggggacacgtcag

SEQ ID NO: 41275 - DNA, 20 bp, Human T-lymphotropic virus 1
aggagggggctcgcatctct

SEQ ID NO: 41276 - DNA, 20 bp, Human T-lymphotropic virus 1
acgcgcccgccgccttacct

SEQ ID NO: 41277 - DNA, 20 bp, Human T-lymphotropic virus 1
cctgaggccgccatccacgc

SEQ ID NO: 41278 - DNA, 20 bp, Human T-lymphotropic virus 1
agtcgcgttctgccgcctcc

SEQ ID NO: 41279 - DNA, 20 bp, Human T-lymphotropic virus 1
tgccgcctcccgcctgtggt

SEQ ID NO: 41280 - DNA, 20 bp, Influenza A virus
agaagtacacatcagggaga

SEQ ID NO: 41281 - DNA, 20 bp, Influenza A virus
catcctaagtgacgggttct

SEQ ID NO: 41282 - DNA, 20 bp, Influenza A virus
atcctaagtgacgggttctt

SEQ ID NO: 41283 - DNA, 20 bp, Influenza A virus
ttttcctgtctccctgatgt

SEQ ID NO: 41284 - DNA, 20 bp, Influenza A virus
tcctgtctccctgatgtgta

SEQ ID NO: 41285 - DNA, 20 bp, Influenza A virus
ggcagtgacatggtggaata

SEQ ID NO: 41286 - DNA, 20 bp, Influenza A virus
gcagtgacatggtggaatag

SEQ ID NO: 41287 - DNA, 20 bp, Influenza A virus
attatccaaaaatctacaag

SEQ ID NO: 41288 - DNA, 20 bp, Influenza A virus
tccaaaaatctacaagactt

SEQ ID NO: 41289 - DNA, 20 bp, Influenza A virus
ttttgagaaagtcgaaaggt

SEQ ID NO: 41290 - DNA, 20 bp, Influenza A virus
acaataaccaaagagaaaaa

SEQ ID NO: 41291 - DNA, 20 bp, Influenza A virus
caaaatttctcctttgatgg

SEQ ID NO: 41292 - DNA, 20 bp, Influenza A virus
ctcctttgatggttgcatac

SEQ ID NO: 41293 - DNA, 20 bp, Influenza A virus
tcctttgatggttgcataca

SEQ ID NO: 41294 - DNA, 20 bp, Influenza A virus
gatggttgcatacatgttag

SEQ ID NO: 41295 - DNA, 20 bp, Influenza A virus
attggagatgtgccacagca

SEQ ID NO: 41296 - DNA, 20 bp, Influenza A virus
ttggagatgtgccacagcac

SEQ ID NO: 41297 - DNA, 20 bp, Influenza A virus
gagatgtgccacagcacaca

SEQ ID NO: 41298 - DNA, 20 bp, Influenza A virus
tcccgccaatctgtgtgctg

SEQ ID NO: 41299 - DNA, 20 bp, Influenza A virus
cgggcaatctccaaacattg

SEQ ID NO: 41300 - DNA, 20 bp, Influenza A virus
aaaataagggtgcatgaggg

SEQ ID NO: 41301 - DNA, 20 bp, Influenza A virus
acaatggtggggaaaagggc

SEQ ID NO: 41302 - DNA, 20 bp, Influenza A virus
gttcagctgatagtgagtgg

SEQ ID NO: 41303 - DNA, 20 bp, Influenza A virus
cactcactatcagctgaacc

SEQ ID NO: 41304 - DNA, 20 bp, Influenza A virus
aatcccatgcatcaactttt

SEQ ID NO: 41305 - DNA, 20 bp, Influenza A virus
taagacattttcagaaagat

SEQ ID NO: 41306 - DNA, 20 bp, Influenza A virus
aagacattttcagaaagatg

SEQ ID NO: 41307 - DNA, 20 bp, Influenza A virus
agacattttcagaaagatgc

SEQ ID NO: 41308 - DNA, 20 bp, Influenza A virus
tcagaaagatgcaaaagtgc

SEQ ID NO: 41309 - DNA, 20 bp, Influenza A virus
gagaccaacgaggaaatgta

SEQ ID NO: 41310 - DNA, 20 bp, Influenza A virus
ctcatcgtcaatgatgtggg

SEQ ID NO: 41311 - DNA, 20 bp, Influenza A virus
acgatgagtaagttattgtc

SEQ ID NO: 41312 - DNA, 20 bp, Influenza A virus
ttgtcagtttctctgtcccc

SEQ ID NO: 41313 - DNA, 20 bp, Influenza A virus
tcagtttctctgtcccctgt

SEQ ID NO: 41314 - DNA, 20 bp, Influenza A virus
gaggccaatacagtggattt

SEQ ID NO: 41315 - DNA, 20 bp, Influenza A virus
gttaggactctattccaaca

SEQ ID NO: 41316 - DNA, 20 bp, Influenza A virus
ttaggactctattccaacaa

SEQ ID NO: 41317 - DNA, 20 bp, Influenza A virus
ggactctattccaacaaatg

SEQ ID NO: 41318 - DNA, 20 bp, Influenza A virus
caacaaatgagggatgtact

SEQ ID NO: 41319 - DNA, 20 bp, Influenza A virus
aactgaagacccagatgaag

SEQ ID NO: 41320 - DNA, 20 bp, Influenza A virus
actgaagacccagatgaagg

SEQ ID NO: 41321 - DNA, 20 bp, Influenza A virus
tgagaggattcctcattctg

SEQ ID NO: 41322 - DNA, 20 bp, Influenza A virus
ctcattctgggcaaggaaga

SEQ ID NO: 41323 - DNA, 20 bp, Influenza A virus
tgggcaaggaagatagaaga

SEQ ID NO: 41324 - DNA, 20 bp, Influenza A virus
gtatcagaatggaccaggcg

SEQ ID NO: 41325 - DNA, 20 bp, Influenza A virus
tatcagaatggaccaggcga

SEQ ID NO: 41326 - DNA, 20 bp, Influenza A virus
cagtatgatgtttttatcca

SEQ ID NO: 41327 - DNA, 20 bp, Influenza A virus
agtatgatgtttttatccat

SEQ ID NO: 41328 - DNA, 20 bp, Influenza A virus
ttatccatgatcgcctggtc

SEQ ID NO: 41329 - DNA, 20 bp, Influenza A virus
gagtcctcatcggaggactt

SEQ ID NO: 41330 - DNA, 20 bp, Influenza A virus
aatggaatgataacacagtt

SEQ ID NO: 41331 - DNA, 20 bp, Influenza A virus
gagtctctgaaactctacag

SEQ ID NO: 41332 - DNA, 20 bp, Influenza A virus
tccaagcgaatctctgtaga

SEQ ID NO: 41333 - DNA, 20 bp, Influenza A virus
cagagactcgaactgtgtta

SEQ ID NO: 41334 - DNA, 20 bp, Influenza A virus
ccttatactggagatcctcc

SEQ ID NO: 41335 - DNA, 20 bp, Influenza A virus
tactggagatcctccataca

SEQ ID NO: 41336 - DNA, 20 bp, Influenza A virus
gtgtgttctgtttactgtgt

SEQ ID NO: 41337 - DNA, 20 bp, Influenza A virus
tgtttactgtgtccatggtg

SEQ ID NO: 41338 - DNA, 20 bp, Influenza A virus
actgtgtccatggtgtatcc

SEQ ID NO: 41339 - DNA, 20 bp, Influenza A virus
gagaattcatgccttgaaac

SEQ ID NO: 41340 - DNA, 20 bp, Influenza A virus
agaattcatgccttgaaaca

SEQ ID NO: 41341 - DNA, 20 bp, Influenza A virus
atgccttgaaacaatggaag

SEQ ID NO: 41342 - DNA, 20 bp, Influenza A virus
aaacaatggaagttgttcaa

SEQ ID NO: 41343 - DNA, 20 bp, Influenza A virus
ttcaacaaacaagggtagat

SEQ ID NO: 41344 - DNA, 20 bp, Influenza A virus
aatacgatgaccaaagatgc

SEQ ID NO: 41345 - DNA, 20 bp, Influenza A virus
cctctctctgcatctttggt

SEQ ID NO: 41346 - DNA, 20 bp, Influenza A virus
ggtcatcgtatttaatgtca

SEQ ID NO: 41347 - DNA, 20 bp, Influenza A virus
gtcatcgtatttaatgtcag

SEQ ID NO: 41348 - DNA, 20 bp, Influenza A virus
aatgtcagtgctcttattag

SEQ ID NO: 41349 - DNA, 20 bp, Influenza A virus
tgagaaagatgatgactaat

SEQ ID NO: 41350 - DNA, 20 bp, Influenza A virus
acaagacacagagatttctt

SEQ ID NO: 41351 - DNA, 20 bp, Influenza A virus
ctttcacaatcactggggac

SEQ ID NO: 41352 - DNA, 20 bp, Influenza A virus
tttcacaatcactggggaca

SEQ ID NO: 41353 - DNA, 20 bp, Influenza A virus
cacaatcactggggacaaca

SEQ ID NO: 41354 - DNA, 20 bp, Influenza A virus
gagagtaaaagaatgaagat

SEQ ID NO: 41355 - DNA, 20 bp, Influenza A virus
gaacacaaataccagcagaa

SEQ ID NO: 41356 - DNA, 20 bp, Influenza A virus
acctgaagtacttcaatgaa

SEQ ID NO: 41357 - DNA, 20 bp, Influenza A virus
aatgaatcaacaaagaagaa

SEQ ID NO: 41358 - DNA, 20 bp, Influenza A virus
tcttctttgttgattcattg

SEQ ID NO: 41359 - DNA, 20 bp, Influenza A virus
tgctctcatagtgaatgcac

SEQ ID NO: 41360 - DNA, 20 bp, Influenza A virus
gctctcatagtgaatgcacc

SEQ ID NO: 41361 - DNA, 20 bp, Influenza A virus
ctctcatagtgaatgcacca

SEQ ID NO: 41362 - DNA, 20 bp, Influenza A virus
tattccctcatggtttggtg

SEQ ID NO: 41363 - DNA, 20 bp, Influenza A virus
cctcatggtttggtgcattc

SEQ ID NO: 41364 - DNA, 20 bp, Influenza A virus
gagtaacagtgataaagaac

SEQ ID NO: 41365 - DNA, 20 bp, Influenza A virus
gacctgcaacggcccagatg

SEQ ID NO: 41366 - DNA, 20 bp, Influenza A virus
aattgttcatcaaagactac

SEQ ID NO: 41367 - DNA, 20 bp, Influenza A virus
ttcatcaaagactacagata

SEQ ID NO: 41368 - DNA, 20 bp, Influenza A virus
atcaaagactacagatacac

SEQ ID NO: 41369 - DNA, 20 bp, Human herpesvirus 5
ggaaccatgggccgccaacc

SEQ ID NO: 41370 - DNA, 20 bp, Human herpesvirus 5
ctgttggcgcgccaacgcga

SEQ ID NO: 41371 - DNA, 20 bp, Human herpesvirus 5
gcgcgccaacgcgacggcct

SEQ ID NO: 41372 - DNA, 20 bp, Human herpesvirus 5
cgcggcagcgtacgacgttc

SEQ ID NO: 41373 - DNA, 20 bp, Human herpesvirus 5
cagtcagcgaggccgtcgcg

SEQ ID NO: 41374 - DNA, 20 bp, Human herpesvirus 5
gaacgaccatccgcgggaga

SEQ ID NO: 41375 - DNA, 20 bp, Human herpesvirus 5
ccacgcatccggatcacccc

SEQ ID NO: 41376 - DNA, 20 bp, Human herpesvirus 5
tgggcgtggagatgtggaga

SEQ ID NO: 41377 - DNA, 20 bp, Human herpesvirus 5
gggcgtggagatgtggagat

SEQ ID NO: 41378 - DNA, 20 bp, Human herpesvirus 5
ggcgtggagatgtggagatg

SEQ ID NO: 41379 - DNA, 20 bp, Human herpesvirus 5
tacaccctcagccacggttc

SEQ ID NO: 41380 - DNA, 20 bp, Human herpesvirus 5
acaatccccgaaactacgcc

SEQ ID NO: 41381 - DNA, 20 bp, Human herpesvirus 5
acgccgaaacgacccgcaca

SEQ ID NO: 41382 - DNA, 20 bp, Human herpesvirus 5
cggcgtgaagttggacggcg

SEQ ID NO: 41383 - DNA, 20 bp, Human herpesvirus 5
ggcgtgaagttggacggcgt

SEQ ID NO: 41384 - DNA, 20 bp, Human herpesvirus 5
cgccgccacgctgcttcacc

SEQ ID NO: 41385 - DNA, 20 bp, Human herpesvirus 5
gccgccacgctgcttcaccg

SEQ ID NO: 41386 - DNA, 20 bp, Human herpesvirus 5
accgatatccaataaaccca

SEQ ID NO: 41387 - DNA, 20 bp, Human herpesvirus 5
attggatatcggtgaagcag

SEQ ID NO: 41388 - DNA, 20 bp, Human herpesvirus 5
ttggatatcggtgaagcagc

SEQ ID NO: 41389 - DNA, 20 bp, Human herpesvirus 5
cccaatactctccaacaacg

SEQ ID NO: 41390 - DNA, 20 bp, Human herpesvirus 5
tacaccacatcgttggataa

SEQ ID NO: 41391 - DNA, 20 bp, Human herpesvirus 5
gataatacgactacagacat

SEQ ID NO: 41392 - DNA, 20 bp, Human herpesvirus 5
cgctggacgttatgtctgta

SEQ ID NO: 41393 - DNA, 20 bp, Human herpesvirus 5
gctggacgttatgtctgtag

SEQ ID NO: 41394 - DNA, 20 bp, Human herpesvirus 5
ttgcgttatcatctgctccc

SEQ ID NO: 41395 - DNA, 20 bp, Human herpesvirus 5
cgttatcatctgctcccgct

SEQ ID NO: 41396 - DNA, 20 bp, Human herpesvirus 5
tcatctgctcccgctgctac

SEQ ID NO: 41397 - DNA, 20 bp, Human herpesvirus 5
caagtcagagcggcgtcggt

SEQ ID NO: 41398 - DNA, 20 bp, Human herpesvirus 5
tgacacggcgaaacgccgtt

SEQ ID NO: 41399 - DNA, 20 bp, Human herpesvirus 5
cgccgtgtcataaccgacgc

SEQ ID NO: 41400 - DNA, 20 bp, Human herpesvirus 5
gccgtgtcataaccgacgcc

SEQ ID NO: 41401 - DNA, 20 bp, Human herpesvirus 5
gaatccggcgtgctgcatag

SEQ ID NO: 41402 - DNA, 20 bp, Human herpesvirus 5
gtgccgtcgccgcactgcgt

SEQ ID NO: 41403 - DNA, 20 bp, Human herpesvirus 5
tcactcgcgtcgtggctgac

SEQ ID NO: 41404 - DNA, 20 bp, Human herpesvirus 5
ctgcagtgtgtggtgattcg

SEQ ID NO: 41405 - DNA, 20 bp, Human herpesvirus 5
tgcagtgtgtggtgattcgg

SEQ ID NO: 41406 - DNA, 20 bp, Human herpesvirus 5
ggcacgttctgcgtccgcgt

SEQ ID NO: 41407 - DNA, 20 bp, Human herpesvirus 5
cgaggacggcggcgcggcgc

SEQ ID NO: 41408 - DNA, 20 bp, Human herpesvirus 5
gaggacggcggcgcggcgca

SEQ ID NO: 41409 - DNA, 20 bp, Human herpesvirus 5
cgtctcatcaccgagaccgc

SEQ ID NO: 41410 - DNA, 20 bp, Human herpesvirus 5
gtctcatcaccgagaccgcg

SEQ ID NO: 41411 - DNA, 20 bp, Human herpesvirus 5
cccagcacgcaggtgtaggt

SEQ ID NO: 41412 - DNA, 20 bp, Human herpesvirus 5
cggatcgcgctcacagacgc

SEQ ID NO: 41413 - DNA, 20 bp, Human herpesvirus 5
ggatcgcgctcacagacgcg

SEQ ID NO: 41414 - DNA, 20 bp, Human herpesvirus 5
cgcagtataaactgcggttg

SEQ ID NO: 41415 - DNA, 20 bp, Human herpesvirus 5
atactgcgcaacctggaggg

SEQ ID NO: 41416 - DNA, 20 bp, Human herpesvirus 5
tactgcgcaacctggaggga

SEQ ID NO: 41417 - DNA, 20 bp, Human herpesvirus 5
atcagccagagcatcgcgga

SEQ ID NO: 41418 - DNA, 20 bp, Human herpesvirus 5
ttgtccgcgatgctctggct

SEQ ID NO: 41419 - DNA, 20 bp, Human herpesvirus 5
tccgcgatgctctggctgat

SEQ ID NO: 41420 - DNA, 20 bp, Human herpesvirus 5
cgaatcgtaccggcgtctga

SEQ ID NO: 41421 - DNA, 20 bp, Human herpesvirus 5
tcccgcggcagtttcctccg

SEQ ID NO: 41422 - DNA, 20 bp, Human herpesvirus 5
cctccgccgcctcgttttcc

SEQ ID NO: 41423 - DNA, 20 bp, Human herpesvirus 5
ctccgccgcctcgttttcct

SEQ ID NO: 41424 - DNA, 20 bp, Human herpesvirus 5
tcctcttcggtgttcagacg

SEQ ID NO: 41425 - DNA, 20 bp, Human herpesvirus 5
acggtatttagccatgcagc

SEQ ID NO: 41426 - DNA, 20 bp, Human herpesvirus 5
agccatgcagcgtgcggcgc

SEQ ID NO: 41427 - DNA, 20 bp, Human herpesvirus 5
gccatgcagcgtgcggcgcc

SEQ ID NO: 41428 - DNA, 20 bp, Human herpesvirus 5
catagacgcagttccgttcc

SEQ ID NO: 41429 - DNA, 20 bp, Human herpesvirus 5
cgttcccggcgggtacgtca

SEQ ID NO: 41430 - DNA, 20 bp, Human herpesvirus 5
ccggcgggtacgtcaacggc

SEQ ID NO: 41431 - DNA, 20 bp, Human herpesvirus 5
atcatccgccaccacgggca

SEQ ID NO: 41432 - DNA, 20 bp, Human herpesvirus 5
atgccgttgacgtacccgcc

SEQ ID NO: 41433 - DNA, 20 bp, Human herpesvirus 5
cgggccaggtagtagacggc

SEQ ID NO: 41434 - DNA, 20 bp, Human herpesvirus 5
tttgctatgtacgcgaggac

SEQ ID NO: 41435 - DNA, 20 bp, Human herpesvirus 5
ttgctatgtacgcgaggaca

SEQ ID NO: 41436 - DNA, 20 bp, Human herpesvirus 5
tgctatgtacgcgaggacac

SEQ ID NO: 41437 - DNA, 20 bp, Human herpesvirus 5
gctatgtacgcgaggacacc

SEQ ID NO: 41438 - DNA, 20 bp, Human herpesvirus 5
gcgaaaccgcgacagttctc

SEQ ID NO: 41439 - DNA, 20 bp, Human herpesvirus 5
cgaaaccgcgacagttctcg

SEQ ID NO: 41440 - DNA, 20 bp, Human herpesvirus 5
tcgacgttgcacggggttct

SEQ ID NO: 41441 - DNA, 20 bp, Human herpesvirus 5
cacggggttctgagcgagtc

SEQ ID NO: 41442 - DNA, 20 bp, Human herpesvirus 5
tgagcgagtcccttgcgcag

SEQ ID NO: 41443 - DNA, 20 bp, Human herpesvirus 5
ctcgattacaagacctttgg

SEQ ID NO: 41444 - DNA, 20 bp, Human herpesvirus 5
caagacctttgggacgcgca

SEQ ID NO: 41445 - DNA, 20 bp, Human herpesvirus 5
gggacgcgcacccattactt

SEQ ID NO: 41446 - DNA, 20 bp, Human herpesvirus 5
ggacgcgcacccattacttg

SEQ ID NO: 41447 - DNA, 20 bp, Human herpesvirus 5
cttgcggcagctatgctcga

SEQ ID NO: 41448 - DNA, 20 bp, Human herpesvirus 5
acggcgcgagagcccgtcgt

SEQ ID NO: 41449 - DNA, 20 bp, Human herpesvirus 5
gtgcacgatctccggggcat

SEQ ID NO: 41450 - DNA, 20 bp, Human herpesvirus 5
tgcacgatctccggggcatg

SEQ ID NO: 41451 - DNA, 20 bp, Human herpesvirus 5
tgccgcgcgggtcgcgtgtt

SEQ ID NO: 41452 - DNA, 20 bp, Human herpesvirus 5
gccgcgcgggtcgcgtgttg

SEQ ID NO: 41453 - DNA, 20 bp, Human herpesvirus 5
atcagactgcgtacgctttg

SEQ ID NO: 41454 - DNA, 20 bp, Human herpesvirus 5
ggagcgtcagacccagggcg

SEQ ID NO: 41455 - DNA, 20 bp, Human herpesvirus 5
gagcgtcagacccagggcgc

SEQ ID NO: 41456 - DNA, 20 bp, Human herpesvirus 5
gaggactttgccgcctttta

SEQ ID NO: 41457 - DNA, 20 bp, Human herpesvirus 5
gccgccttttatcgcaccct

SEQ ID NO: 41458 - DNA, 20 bp, Human herpesvirus 5
accgttcggcctcgcacctg

SEQ ID NO: 41459 - DNA, 20 bp, Human herpesvirus 5
gcgtggcgcacgcagcggcc

SEQ ID NO: 41460 - DNA, 20 bp, Human herpesvirus 5
tcgcggtccgcgtcgcgtag

SEQ ID NO: 41461 - DNA, 20 bp, Human herpesvirus 5
acgacgaggaaaccatgcgg

SEQ ID NO: 41462 - DNA, 20 bp, Human herpesvirus 5
cgacgaggaaaccatgcggc

SEQ ID NO: 41463 - DNA, 20 bp, Human herpesvirus 5
tctgcacacacaactggtca

SEQ ID NO: 41464 - DNA, 20 bp, Human herpesvirus 5
ctgcacacacaactggtcat

SEQ ID NO: 41465 - DNA, 20 bp, Human herpesvirus 5
tgcacacacaactggtcatg

SEQ ID NO: 41466 - DNA, 20 bp, Human herpesvirus 5
tccttctacctgctgacgag

SEQ ID NO: 41467 - DNA, 20 bp, Human herpesvirus 5
ccttctacctgctgacgagc

SEQ ID NO: 41468 - DNA, 20 bp, Human herpesvirus 5
cttctacctgctgacgagcg

SEQ ID NO: 41469 - DNA, 20 bp, Human herpesvirus 5
tacctgctgacgagcgcgca

SEQ ID NO: 41470 - DNA, 20 bp, Human herpesvirus 5
agccgcaacccgtcactctt

SEQ ID NO: 41471 - DNA, 20 bp, Human herpesvirus 5
ttgctgcgggatgttcaagg

SEQ ID NO: 41472 - DNA, 20 bp, Human herpesvirus 5
ctgcgggatgttcaagggac

SEQ ID NO: 41473 - DNA, 20 bp, Human herpesvirus 5
aagggaccgctggtcggttt

SEQ ID NO: 41474 - DNA, 20 bp, Human herpesvirus 5
ctgactgcccgaggataaca

SEQ ID NO: 41475 - DNA, 20 bp, Human herpesvirus 5
tgactgcccgaggataacag

SEQ ID NO: 41476 - DNA, 20 bp, Human herpesvirus 5
gccagaatgaccgcgcttac

SEQ ID NO: 41477 - DNA, 20 bp, Human herpesvirus 5
cgagcgcgcgctccacgatc

SEQ ID NO: 41478 - DNA, 20 bp, Human herpesvirus 5
gatacggacgtgcgccacga

SEQ ID NO: 41479 - DNA, 20 bp, Human herpesvirus 5
tggccaagatgtcggtgcgc

SEQ ID NO: 41480 - DNA, 20 bp, Human herpesvirus 5
aaccagctggttttcacggc

SEQ ID NO: 41481 - DNA, 20 bp, Human herpesvirus 5
tcacggcccagctgcgccac

SEQ ID NO: 41482 - DNA, 20 bp, Human herpesvirus 5
cacggcccagctgcgccact

SEQ ID NO: 41483 - DNA, 20 bp, Human herpesvirus 5
acggcccagctgcgccacta

SEQ ID NO: 41484 - DNA, 20 bp, Human herpesvirus 5
ggtcaactcgtcgcgcgcgt

SEQ ID NO: 41485 - DNA, 20 bp, Human herpesvirus 5
gtggggctgctcaactttgg

SEQ ID NO: 41486 - DNA, 20 bp, Human herpesvirus 5
tggggctgctcaactttggc

SEQ ID NO: 41487 - DNA, 20 bp, Human herpesvirus 5
ggcgtgcccagccccgtata

SEQ ID NO: 41488 - DNA, 20 bp, Human herpesvirus 5
gcgtgcccagccccgtatac

SEQ ID NO: 41489 - DNA, 20 bp, Human herpesvirus 5
gtggacttccaggtgcgcaa

SEQ ID NO: 41490 - DNA, 20 bp, Human herpesvirus 5
agacgcggctgcttagaggg

SEQ ID NO: 41491 - DNA, 20 bp, Human herpesvirus 5
gagggctcatccgactctgc

SEQ ID NO: 41492 - DNA, 20 bp, Human herpesvirus 5
acgccggtttgcgcagcgcg

SEQ ID NO: 41493 - DNA, 20 bp, Human herpesvirus 5
gcgcagcgcggcagagtcgg

SEQ ID NO: 41494 - DNA, 20 bp, Human herpesvirus 5
cgcagcgcggcagagtcgga

SEQ ID NO: 41495 - DNA, 20 bp, Human herpesvirus 5
aggccctgtgtgacagccca

SEQ ID NO: 41496 - DNA, 20 bp, Human herpesvirus 5
cagtagtcgtcatactgcac

SEQ ID NO: 41497 - DNA, 20 bp, Human herpesvirus 5
tctgcggcatggctttcgtc

SEQ ID NO: 41498 - DNA, 20 bp, Human herpesvirus 5
ctgcggcatggctttcgtca

SEQ ID NO: 41499 - DNA, 20 bp, Human herpesvirus 5
tgcggcatggctttcgtcac

SEQ ID NO: 41500 - DNA, 20 bp, Human herpesvirus 5
cgtcactgcgaccacttcca

SEQ ID NO: 41501 - DNA, 20 bp, Human herpesvirus 5
accgacttggcaaaagtgcg

SEQ ID NO: 41502 - DNA, 20 bp, Human herpesvirus 5
gcaaaagtgcgcggcccctc

SEQ ID NO: 41503 - DNA, 20 bp, Human herpesvirus 5
ttgtcgcgacgcgcttccag

SEQ ID NO: 41504 - DNA, 20 bp, Human herpesvirus 5
tcgcgacgcgcttccagcac

SEQ ID NO: 41505 - DNA, 20 bp, Human herpesvirus 5
tgccaagtcggtgaacagct

SEQ ID NO: 41506 - DNA, 20 bp, Human herpesvirus 5
caatactccagcactatggc

SEQ ID NO: 41507 - DNA, 20 bp, Human herpesvirus 5
gcctacgactccggtatcct

SEQ ID NO: 41508 - DNA, 20 bp, Human herpesvirus 5
ttcctggcgcccagcatggc

SEQ ID NO: 41509 - DNA, 20 bp, Human herpesvirus 5
tcctggcgcccagcatggcg

SEQ ID NO: 41510 - DNA, 20 bp, Human herpesvirus 5
cctggcgcccagcatggcgc

SEQ ID NO: 41511 - DNA, 20 bp, Human herpesvirus 5
acgcacagtttccgagtacg

SEQ ID NO: 41512 - DNA, 20 bp, Human herpesvirus 5
ccgagtacgcgcgtctcgga

SEQ ID NO: 41513 - DNA, 20 bp, Human herpesvirus 5
cgagtacgcgcgtctcggag

SEQ ID NO: 41514 - DNA, 20 bp, Human herpesvirus 5
tcccctatccgcgtgagttg

SEQ ID NO: 41515 - DNA, 20 bp, Human herpesvirus 5
ggtggttcaccgtcaggtgc

SEQ ID NO: 41516 - DNA, 20 bp, Human herpesvirus 5
ctggaggtctggcggcagca

SEQ ID NO: 41517 - DNA, 20 bp, Human herpesvirus 5
ccacgccaccgccgccacca

SEQ ID NO: 41518 - DNA, 20 bp, Human herpesvirus 5
cacgccaccgccgccaccac

SEQ ID NO: 41519 - DNA, 20 bp, Human herpesvirus 5
ttcgcgcagcggcgcgtagt

SEQ ID NO: 41520 - DNA, 20 bp, Human herpesvirus 5
gcgcagcggcgcgtagttgc

SEQ ID NO: 41521 - DNA, 20 bp, Human herpesvirus 5
cgcaggccctcctgcacgaa

SEQ ID NO: 41522 - DNA, 20 bp, Human herpesvirus 5
ccgcggcttcgtgcaggagg

SEQ ID NO: 41523 - DNA, 20 bp, Human herpesvirus 5
cgcggcttcgtgcaggaggg

SEQ ID NO: 41524 - DNA, 20 bp, Human herpesvirus 5
ccctcctcctggtgctgctc

SEQ ID NO: 41525 - DNA, 20 bp, Human herpesvirus 5
accacgggcacgcgcagcgg

SEQ ID NO: 41526 - DNA, 20 bp, Human herpesvirus 5
cgcgtggttggagcagcacc

SEQ ID NO: 41527 - DNA, 20 bp, Human herpesvirus 5
gagcagcaccaggaggaggg

SEQ ID NO: 41528 - DNA, 20 bp, Human herpesvirus 5
cgcaatccgaactcgagcat

SEQ ID NO: 41529 - DNA, 20 bp, Human herpesvirus 5
ggattgcgcaactgtcagtt

SEQ ID NO: 41530 - DNA, 20 bp, Human herpesvirus 5
cgcaactgtcagtttctggc

SEQ ID NO: 41531 - DNA, 20 bp, Human herpesvirus 5
ctggcggtgggtcccgacga

SEQ ID NO: 41532 - DNA, 20 bp, Human herpesvirus 5
tggcggtgggtcccgacgac

SEQ ID NO: 41533 - DNA, 20 bp, Human herpesvirus 5
ttccagcgcgctctctaccc

SEQ ID NO: 41534 - DNA, 20 bp, Human herpesvirus 5
tccagcgcgctctctaccca

SEQ ID NO: 41535 - DNA, 20 bp, Human herpesvirus 5
ccagcgcgctctctacccac

SEQ ID NO: 41536 - DNA, 20 bp, Human herpesvirus 5
cagcgcgctctctacccacc

SEQ ID NO: 41537 - DNA, 20 bp, Human herpesvirus 5
ggacgccgacattagcgcgt

SEQ ID NO: 41538 - DNA, 20 bp, Human herpesvirus 5
gcgacacaccttatccaaac

SEQ ID NO: 41539 - DNA, 20 bp, Human herpesvirus 5
tccaaacacaaaatggccgc

SEQ ID NO: 41540 - DNA, 20 bp, Human herpesvirus 5
cacaaaacgcgccgtctcct

SEQ ID NO: 41541 - DNA, 20 bp, Human herpesvirus 5
tgtggaattggccggttgct

SEQ ID NO: 41542 - DNA, 20 bp, Human herpesvirus 5
gtggaattggccggttgctg

SEQ ID NO: 41543 - DNA, 20 bp, Human herpesvirus 5
acaaagctacagcgctcgcg

SEQ ID NO: 41544 - DNA, 20 bp, Human herpesvirus 5
cacgcggaaagttcgcccgc

SEQ ID NO: 41545 - DNA, 20 bp, Human herpesvirus 5
gcccgcgagcgctgtagctt

SEQ ID NO: 41546 - DNA, 20 bp, Human herpesvirus 5
gtcaaccgtcgcatcacgcg

SEQ ID NO: 41547 - DNA, 20 bp, Human herpesvirus 5
tcaaccgtcgcatcacgcgc

SEQ ID NO: 41548 - DNA, 20 bp, Human herpesvirus 5
ccgttctaccacaacggggc

SEQ ID NO: 41549 - DNA, 20 bp, Human herpesvirus 5
taccacaacggggccacgct

SEQ ID NO: 41550 - DNA, 20 bp, Human herpesvirus 5
ccagaagctgttgcagaccc

SEQ ID NO: 41551 - DNA, 20 bp, Human herpesvirus 5
cagaagctgttgcagaccct

SEQ ID NO: 41552 - DNA, 20 bp, Human herpesvirus 5
tggaaagccgtcagcgtggc

SEQ ID NO: 41553 - DNA, 20 bp, Human herpesvirus 5
gtagaacagttgcgcgagct

SEQ ID NO: 41554 - DNA, 20 bp, Human herpesvirus 5
cgcgagctggttcgccgcga

SEQ ID NO: 41555 - DNA, 20 bp, Human herpesvirus 5
gccgcgatcggctgttggcc

SEQ ID NO: 41556 - DNA, 20 bp, Human herpesvirus 5
gccgagaatctgcgcggctt

SEQ ID NO: 41557 - DNA, 20 bp, Human herpesvirus 5
aacgagcgcctgctgagtgt

SEQ ID NO: 41558 - DNA, 20 bp, Human herpesvirus 5
aataggtcgctcgcggccag

SEQ ID NO: 41559 - DNA, 20 bp, Human herpesvirus 5
ataggtcgctcgcggccagg

SEQ ID NO: 41560 - DNA, 20 bp, Human herpesvirus 5
gtagcgcgcacccaggacct

SEQ ID NO: 41561 - DNA, 20 bp, Human herpesvirus 5
gactttctgcggtacgcgca

SEQ ID NO: 41562 - DNA, 20 bp, Human herpesvirus 5
ctgcggtacgcgcacgccaa

SEQ ID NO: 41563 - DNA, 20 bp, Human herpesvirus 5
tgcggtacgcgcacgccaaa

SEQ ID NO: 41564 - DNA, 20 bp, Human herpesvirus 5
ggcgtgcgcgtaccgcagaa

SEQ ID NO: 41565 - DNA, 20 bp, Human herpesvirus 5
gcgtgcgcgtaccgcagaaa

SEQ ID NO: 41566 - DNA, 20 bp, Human herpesvirus 5
ggcgtgcagctgtcgcccgc

SEQ ID NO: 41567 - DNA, 20 bp, Human herpesvirus 5
ctactatgaggccctttttc

SEQ ID NO: 41568 - DNA, 20 bp, Human herpesvirus 5
tactatgaggccctttttct

SEQ ID NO: 41569 - DNA, 20 bp, Human herpesvirus 5
tgaaagcgctgcagccgttg

SEQ ID NO: 41570 - DNA, 20 bp, Human herpesvirus 5
gacgacaacgccaagcagga

SEQ ID NO: 41571 - DNA, 20 bp, Human herpesvirus 5
cccaggcgaaagagttcctg

SEQ ID NO: 41572 - DNA, 20 bp, Human herpesvirus 5
ctgcttggcgttgtcgtcca

SEQ ID NO: 41573 - DNA, 20 bp, Human herpesvirus 5
gcgttgtcgtccaacggctg

SEQ ID NO: 41574 - DNA, 20 bp, Human herpesvirus 5
gtagaggcggcttagcgcga

SEQ ID NO: 41575 - DNA, 20 bp, Human herpesvirus 5
gcgcgagttgcgcgttctgt

SEQ ID NO: 41576 - DNA, 20 bp, Human herpesvirus 5
cgcgttctgtaggcgctgct

SEQ ID NO: 41577 - DNA, 20 bp, Human herpesvirus 5
tgtaggcgctgctgcacttc

SEQ ID NO: 41578 - DNA, 20 bp, Human herpesvirus 5
gggtagctgcaggccgccta

SEQ ID NO: 41579 - DNA, 20 bp, Human herpesvirus 5
ggcctagatcaacgcgccca

SEQ ID NO: 41580 - DNA, 20 bp, Human herpesvirus 5
aaccaggacttgctgtcggc

SEQ ID NO: 41581 - DNA, 20 bp, Human herpesvirus 5
ctgtcggcgctgcagcagct

SEQ ID NO: 41582 - DNA, 20 bp, Human herpesvirus 5
tttgctcagctgctgcagcg

SEQ ID NO: 41583 - DNA, 20 bp, Human herpesvirus 5
ttgctcagctgctgcagcgc

SEQ ID NO: 41584 - DNA, 20 bp, Human herpesvirus 5
tccatcagcgccttggcgtc

SEQ ID NO: 41585 - DNA, 20 bp, Human herpesvirus 5
ccatcagcgccttggcgtcg

SEQ ID NO: 41586 - DNA, 20 bp, Human herpesvirus 5
catcagcgccttggcgtcgg

SEQ ID NO: 41587 - DNA, 20 bp, Human herpesvirus 5
gcgtcgggggtggtcacgtc

SEQ ID NO: 41588 - DNA, 20 bp, Human herpesvirus 5
tgtggcgcgtgaccagatca

SEQ ID NO: 41589 - DNA, 20 bp, Human herpesvirus 5
cgcaaatcaccgcggaccct

SEQ ID NO: 41590 - DNA, 20 bp, Human herpesvirus 5
ctgttgcaggttccggtagt

SEQ ID NO: 41591 - DNA, 20 bp, Human herpesvirus 5
caggttccggtagtgggtcc

SEQ ID NO: 41592 - DNA, 20 bp, Human herpesvirus 5
cggtagtgggtcctgcttcc

SEQ ID NO: 41593 - DNA, 20 bp, Human herpesvirus 5
cgtgatgcgggtgcgtaggg

SEQ ID NO: 41594 - DNA, 20 bp, Human herpesvirus 5
aaccagcgcgcagcctcgac

SEQ ID NO: 41595 - DNA, 20 bp, Human herpesvirus 5
accagcgcgcagcctcgaca

SEQ ID NO: 41596 - DNA, 20 bp, Human herpesvirus 5
gctttccaaacagctgtcgc

SEQ ID NO: 41597 - DNA, 20 bp, Human herpesvirus 5
ccaaacagctgtcgcggtac

SEQ ID NO: 41598 - DNA, 20 bp, Human herpesvirus 5
caaacagctgtcgcggtact

SEQ ID NO: 41599 - DNA, 20 bp, Human herpesvirus 5
gccatgaccgcgccacagca

SEQ ID NO: 41600 - DNA, 20 bp, Human herpesvirus 5
tgctggtgctggctctgctg

SEQ ID NO: 41601 - DNA, 20 bp, Human herpesvirus 5
tcgtactcgccctcgttttc

SEQ ID NO: 41602 - DNA, 20 bp, Human herpesvirus 5
tcgggtccgaaggcgatgag

SEQ ID NO: 41603 - DNA, 20 bp, Human herpesvirus 5
cgggtccgaaggcgatgagc

SEQ ID NO: 41604 - DNA, 20 bp, Human herpesvirus 5
gggtccgaaggcgatgagct

SEQ ID NO: 41605 - DNA, 20 bp, Human herpesvirus 5
aacaccgacgccgaattgga

SEQ ID NO: 41606 - DNA, 20 bp, Human herpesvirus 5
tcctcctctccgtcgtcatc

SEQ ID NO: 41607 - DNA, 20 bp, Human herpesvirus 5
cctcctctccgtcgtcatcg

SEQ ID NO: 41608 - DNA, 20 bp, Human herpesvirus 5
ctcctctccgtcgtcatcgt

SEQ ID NO: 41609 - DNA, 20 bp, Human herpesvirus 5
ctggacgatgacgacggaga

SEQ ID NO: 41610 - DNA, 20 bp, Human herpesvirus 5
tggacgatgacgacggagag

SEQ ID NO: 41611 - DNA, 20 bp, Human herpesvirus 5
ccgcgccctcttctttgccg

SEQ ID NO: 41612 - DNA, 20 bp, Human herpesvirus 5
cgcgccctcttctttgccgg

SEQ ID NO: 41613 - DNA, 20 bp, Human herpesvirus 5
tttgccggctctcctcctct

SEQ ID NO: 41614 - DNA, 20 bp, Human herpesvirus 5
gccggctctcctcctctcct

SEQ ID NO: 41615 - DNA, 20 bp, Human herpesvirus 5
ccggctctcctcctctcctg

SEQ ID NO: 41616 - DNA, 20 bp, Human herpesvirus 5
tcgttggaaacgccgacgcc

SEQ ID NO: 41617 - DNA, 20 bp, Human herpesvirus 5
gaaacgccgacgccgccact

SEQ ID NO: 41618 - DNA, 20 bp, Human herpesvirus 5
tcagcgtcggctccggcagt

SEQ ID NO: 41619 - DNA, 20 bp, Human herpesvirus 5
cagcgtcggctccggcagta

SEQ ID NO: 41620 - DNA, 20 bp, Human herpesvirus 5
agcgtcggctccggcagtag

SEQ ID NO: 41621 - DNA, 20 bp, Human herpesvirus 5
ggtgacacggcaacactatt

SEQ ID NO: 41622 - DNA, 20 bp, Human herpesvirus 5
ccgtgtcacctaacgccgct

SEQ ID NO: 41623 - DNA, 20 bp, Human herpesvirus 5
tgtggcggctatgtttcaga

SEQ ID NO: 41624 - DNA, 20 bp, Human herpesvirus 5
gtgttcgtcgcagttgcgca

SEQ ID NO: 41625 - DNA, 20 bp, Human herpesvirus 5
gtcgcagttgcgcacccgta

SEQ ID NO: 41626 - DNA, 20 bp, Human herpesvirus 5
cgcacccgtaagccgttttc

SEQ ID NO: 41627 - DNA, 20 bp, Human herpesvirus 5
tcgctgccgtcgccgtcctg

SEQ ID NO: 41628 - DNA, 20 bp, Human herpesvirus 5
cgctgccgtcgccgtcctgc

SEQ ID NO: 41629 - DNA, 20 bp, Human herpesvirus 5
cggcggtagctgatacggtg

SEQ ID NO: 41630 - DNA, 20 bp, Human herpesvirus 5
ctgctgttgttgcggtctga

SEQ ID NO: 41631 - DNA, 20 bp, Human herpesvirus 5
ttgcggtctgaaaagcggcc

SEQ ID NO: 41632 - DNA, 20 bp, Human herpesvirus 5
cggtctgaaaagcggccacg

SEQ ID NO: 41633 - DNA, 20 bp, Human herpesvirus 5
tcagaccgcaacaacagcag

SEQ ID NO: 41634 - DNA, 20 bp, Human herpesvirus 5
tgagcgtgcgtgaggagatc

SEQ ID NO: 41635 - DNA, 20 bp, Human herpesvirus 5
gagcgtgcgtgaggagatcc

SEQ ID NO: 41636 - DNA, 20 bp, Human herpesvirus 5
agcgtgcgtgaggagatccc

SEQ ID NO: 41637 - DNA, 20 bp, Human herpesvirus 5
ttcgtggatggctgcgaggc

SEQ ID NO: 41638 - DNA, 20 bp, Human herpesvirus 5
gtggatggctgcgaggcgct

SEQ ID NO: 41639 - DNA, 20 bp, Human herpesvirus 5
ttgagcgccgaaaagacggc

SEQ ID NO: 41640 - DNA, 20 bp, Human herpesvirus 5
agcgccgaaaagacggccac

SEQ ID NO: 41641 - DNA, 20 bp, Human herpesvirus 5
tgccgtgcgcgctaaaggta

SEQ ID NO: 41642 - DNA, 20 bp, Human herpesvirus 5
gccgtgcgcgctaaaggtat

SEQ ID NO: 41643 - DNA, 20 bp, Human herpesvirus 5
ccgtgcgcgctaaaggtatc

SEQ ID NO: 41644 - DNA, 20 bp, Human herpesvirus 5
tggcgggcgtcctcgcacag

SEQ ID NO: 41645 - DNA, 20 bp, Human herpesvirus 5
taccgaggatcacggagacg

SEQ ID NO: 41646 - DNA, 20 bp, Human herpesvirus 5
accgaggatcacggagacgt

SEQ ID NO: 41647 - DNA, 20 bp, Human herpesvirus 5
ccgaggatcacggagacgtg

SEQ ID NO: 41648 - DNA, 20 bp, Human herpesvirus 5
gaggcctacacgcccgaggc

SEQ ID NO: 41649 - DNA, 20 bp, Human herpesvirus 5
ctcgagcgtggtgatcgctc

SEQ ID NO: 41650 - DNA, 20 bp, Human herpesvirus 5
gcggggctcacggtggaggc

SEQ ID NO: 41651 - DNA, 20 bp, Human herpesvirus 5
cggcgtctctgtgcgtacgc

SEQ ID NO: 41652 - DNA, 20 bp, Human herpesvirus 5
ggcgtctctgtgcgtacgcc

SEQ ID NO: 41653 - DNA, 20 bp, Human herpesvirus 5
gtaagaaaagctaaccgcta

SEQ ID NO: 41654 - DNA, 20 bp, Human herpesvirus 5
tcgcgggcgggtgcgtcggc

SEQ ID NO: 41655 - DNA, 20 bp, Human herpesvirus 5
cgcgggcgggtgcgtcggct

SEQ ID NO: 41656 - DNA, 20 bp, Human herpesvirus 5
gcgggcgggtgcgtcggcta

SEQ ID NO: 41657 - DNA, 20 bp, Human herpesvirus 5
gcttttcttacgaattgctg

SEQ ID NO: 41658 - DNA, 20 bp, Human herpesvirus 5
ccttcccgggtctcggacga

SEQ ID NO: 41659 - DNA, 20 bp, Human herpesvirus 5
ccgggtctcggacgagtcga

SEQ ID NO: 41660 - DNA, 20 bp, Human herpesvirus 5
ggttgccgtcgtactgtgat

SEQ ID NO: 41661 - DNA, 20 bp, Human herpesvirus 5
ccgtcgtactgtgattaccg

SEQ ID NO: 41662 - DNA, 20 bp, Human herpesvirus 5
ccgttggcggactgcaccgg

SEQ ID NO: 41663 - DNA, 20 bp, Human herpesvirus 5
gcggactgcaccgggatgat

SEQ ID NO: 41664 - DNA, 20 bp, Human herpesvirus 5
tggggaacctggggtggact

SEQ ID NO: 41665 - DNA, 20 bp, Human herpesvirus 5
cgggaaggcggtggggacct

SEQ ID NO: 41666 - DNA, 20 bp, Human herpesvirus 5
ccgcaagatcatcagccgcg

SEQ ID NO: 41667 - DNA, 20 bp, Human herpesvirus 5
ggtgggcacgcgcttttgaa

SEQ ID NO: 41668 - DNA, 20 bp, Human herpesvirus 5
tgaagaaatagaccgggtgc

SEQ ID NO: 41669 - DNA, 20 bp, Human herpesvirus 5
gaagaaatagaccgggtgcc

SEQ ID NO: 41670 - DNA, 20 bp, Human herpesvirus 5
aagaaatagaccgggtgccg

SEQ ID NO: 41671 - DNA, 20 bp, Human herpesvirus 5
ggctacacgcaccccgaccg

SEQ ID NO: 41672 - DNA, 20 bp, Human herpesvirus 5
cggaggccacggcgcagaag

SEQ ID NO: 41673 - DNA, 20 bp, Human herpesvirus 5
ggaggccacggcgcagaaga

SEQ ID NO: 41674 - DNA, 20 bp, Human herpesvirus 5
tgcgccgtggcctccgaaac

SEQ ID NO: 41675 - DNA, 20 bp, Human herpesvirus 5
ccgcgcgacctgctccgtca

SEQ ID NO: 41676 - DNA, 20 bp, Human herpesvirus 5
cgcgcgacctgctccgtcac

SEQ ID NO: 41677 - DNA, 20 bp, Human herpesvirus 5
gcgcgtacactgcgcttcgg

SEQ ID NO: 41678 - DNA, 20 bp, Human herpesvirus 5
gggcgccgcgtcagcgtcgt

SEQ ID NO: 41679 - DNA, 20 bp, Human herpesvirus 5
ctcgagtaccggcgcgtggt

SEQ ID NO: 41680 - DNA, 20 bp, Human herpesvirus 5
cgacgctgacgcggcgcccg

SEQ ID NO: 41681 - DNA, 20 bp, Human herpesvirus 5
ggctcacattaacaccgtct

SEQ ID NO: 41682 - DNA, 20 bp, Human herpesvirus 5
gctcacattaacaccgtctc

SEQ ID NO: 41683 - DNA, 20 bp, Human herpesvirus 5
acaccgtctcctgtcccacc

SEQ ID NO: 41684 - DNA, 20 bp, Human herpesvirus 5
tgaggttcgaccagcggctg

SEQ ID NO: 41685 - DNA, 20 bp, Human herpesvirus 5
gaccagcggctgctggaaga

SEQ ID NO: 41686 - DNA, 20 bp, Human herpesvirus 5
cctcacgtgcgtaagcggat

SEQ ID NO: 41687 - DNA, 20 bp, Human herpesvirus 5
cgcttaccgatccgcttacg

SEQ ID NO: 41688 - DNA, 20 bp, Human herpesvirus 5
ccgatccgcttacgcacgtg

SEQ ID NO: 41689 - DNA, 20 bp, Human herpesvirus 5
cgcacgtgaggcaatctccg

SEQ ID NO: 41690 - DNA, 20 bp, Human herpesvirus 5
agtgagctgcctcagctgtt

SEQ ID NO: 41691 - DNA, 20 bp, Human herpesvirus 5
ccgcgtctggccgacgacgt

SEQ ID NO: 41692 - DNA, 20 bp, Human herpesvirus 5
tgatcgtcacgtgctggtgc

SEQ ID NO: 41693 - DNA, 20 bp, Human herpesvirus 5
gatcgtcacgtgctggtgcg

SEQ ID NO: 41694 - DNA, 20 bp, Human herpesvirus 5
atcgtcacgtgctggtgcgg

SEQ ID NO: 41695 - DNA, 20 bp, Human herpesvirus 5
tccacaaacgcggcgttctt

SEQ ID NO: 41696 - DNA, 20 bp, Human herpesvirus 5
ccacaaacgcggcgttcttc

SEQ ID NO: 41697 - DNA, 20 bp, Human herpesvirus 5
tcttcgtcgcgggccatcat

SEQ ID NO: 41698 - DNA, 20 bp, Human herpesvirus 5
gtcgcgggccatcatcgttc

SEQ ID NO: 41699 - DNA, 20 bp, Human herpesvirus 5
gctcggtgagcgggtagcga

SEQ ID NO: 41700 - DNA, 20 bp, Human herpesvirus 5
tcgtcaccgtcgctacccgc

SEQ ID NO: 41701 - DNA, 20 bp, Human herpesvirus 5
ctgttgccgcgggacgtagt

SEQ ID NO: 41702 - DNA, 20 bp, Human herpesvirus 5
ccgcgggacgtagtggagca

SEQ ID NO: 41703 - DNA, 20 bp, Human herpesvirus 5
cacgcgcagggccagggaca

SEQ ID NO: 41704 - DNA, 20 bp, Human herpesvirus 5
gttgtcggtcgcgctcccgc

SEQ ID NO: 41705 - DNA, 20 bp, Human herpesvirus 5
tcggtcgcgctcccgctcaa

SEQ ID NO: 41706 - DNA, 20 bp, Human herpesvirus 5
ctccctcggagccggcagag

SEQ ID NO: 41707 - DNA, 20 bp, Human herpesvirus 5
tccctcggagccggcagagg

SEQ ID NO: 41708 - DNA, 20 bp, Human herpesvirus 5
ccgccgctacggctcctcca

SEQ ID NO: 41709 - DNA, 20 bp, Human herpesvirus 5
cgagcccgcgccgtctttgc

SEQ ID NO: 41710 - DNA, 20 bp, Human herpesvirus 5
gcatccgtcttatcccgtgc

SEQ ID NO: 41711 - DNA, 20 bp, Human herpesvirus 5
catccgtcttatcccgtgcc

SEQ ID NO: 41712 - DNA, 20 bp, Human herpesvirus 5
tcccgtgccgccgccaccat

SEQ ID NO: 41713 - DNA, 20 bp, Human herpesvirus 5
gtccgaggacgacgacgacg

SEQ ID NO: 41714 - DNA, 20 bp, Human herpesvirus 5
ccttacggcgtttgttgtgt

SEQ ID NO: 41715 - DNA, 20 bp, Human herpesvirus 5
cttacggcgtttgttgtgtc

SEQ ID NO: 41716 - DNA, 20 bp, Human herpesvirus 5
cggcgtttgttgtgtccgcc

SEQ ID NO: 41717 - DNA, 20 bp, Human herpesvirus 5
gttgtgtccgccgctgcccc

SEQ ID NO: 41718 - DNA, 20 bp, Human herpesvirus 5
ttaccgcttcgacgtctttg

SEQ ID NO: 41719 - DNA, 20 bp, Human herpesvirus 5
ccgcttcgacgtctttgtcc

SEQ ID NO: 41720 - DNA, 20 bp, Human herpesvirus 5
gacgtctttgtccggtcagg

SEQ ID NO: 41721 - DNA, 20 bp, Human herpesvirus 5
gtccggtcaggatcagtgcc

SEQ ID NO: 41722 - DNA, 20 bp, Human herpesvirus 5
tccggtcaggatcagtgccc

SEQ ID NO: 41723 - DNA, 20 bp, Human herpesvirus 5
caaatgaacggcctgatcgc

SEQ ID NO: 41724 - DNA, 20 bp, Human herpesvirus 5
gcacacgatcgggtagcggg

SEQ ID NO: 41725 - DNA, 20 bp, Human herpesvirus 5
atttggaacaccgacagccg

SEQ ID NO: 41726 - DNA, 20 bp, Human herpesvirus 5
ggaacaccgacagccgctag

SEQ ID NO: 41727 - DNA, 20 bp, Human herpesvirus 5
gaacaccgacagccgctagg

SEQ ID NO: 41728 - DNA, 20 bp, Human herpesvirus 5
ttttctgagcctggcgtcag

SEQ ID NO: 41729 - DNA, 20 bp, Human herpesvirus 5
tctgagcctggcgtcaggcg

SEQ ID NO: 41730 - DNA, 20 bp, Human herpesvirus 5
ctgagcctggcgtcaggcgt

SEQ ID NO: 41731 - DNA, 20 bp, Human herpesvirus 5
tgagcctggcgtcaggcgtc

SEQ ID NO: 41732 - DNA, 20 bp, Human herpesvirus 5
ttgaggtccaccagcagtcg

SEQ ID NO: 41733 - DNA, 20 bp, Human herpesvirus 5
gtacgcaggtccaggagtcg

SEQ ID NO: 41734 - DNA, 20 bp, Human herpesvirus 5
cagcgagccgccttccacgt

SEQ ID NO: 41735 - DNA, 20 bp, Human herpesvirus 5
cccgacgcgtgaataacagc

SEQ ID NO: 41736 - DNA, 20 bp, Human herpesvirus 5
ttcacgcgtcgggcaagcag

SEQ ID NO: 41737 - DNA, 20 bp, Human herpesvirus 5
acgcgtcgggcaagcagatg

SEQ ID NO: 41738 - DNA, 20 bp, Human herpesvirus 5
gctggggcagatgcttcggc

SEQ ID NO: 41739 - DNA, 20 bp, Human herpesvirus 5
ggcccgtggggttgtgcacg

SEQ ID NO: 41740 - DNA, 20 bp, Human herpesvirus 5
tgcacgttgaccgacacgtt

SEQ ID NO: 41741 - DNA, 20 bp, Human herpesvirus 5
accgacacgttctccacctc

SEQ ID NO: 41742 - DNA, 20 bp, Human herpesvirus 5
tccacctcgctgcccgtaaa

SEQ ID NO: 41743 - DNA, 20 bp, Human herpesvirus 5
cgacggcgaatgggacgtgg

SEQ ID NO: 41744 - DNA, 20 bp, Human herpesvirus 5
gccgtcgcaacagcagctct

SEQ ID NO: 41745 - DNA, 20 bp, Human herpesvirus 5
catcgcgctggaggacctgc

SEQ ID NO: 41746 - DNA, 20 bp, Human herpesvirus 5
ttcagcgtcaattcgtaagg

SEQ ID NO: 41747 - DNA, 20 bp, Human herpesvirus 5
tcagcgtcaattcgtaaggg

SEQ ID NO: 41748 - DNA, 20 bp, Human herpesvirus 5
cagcgtcaattcgtaaggga

SEQ ID NO: 41749 - DNA, 20 bp, Human herpesvirus 5
agcgtcaattcgtaagggac

SEQ ID NO: 41750 - DNA, 20 bp, Human herpesvirus 5
gtaagggacgcgcacctcca

SEQ ID NO: 41751 - DNA, 20 bp, Human herpesvirus 5
cactcgatgccagcacagcg

SEQ ID NO: 41752 - DNA, 20 bp, Human herpesvirus 5
cgcacgtaggtcatggtcag

SEQ ID NO: 41753 - DNA, 20 bp, Human herpesvirus 5
gccaccatggacatggagag

SEQ ID NO: 41754 - DNA, 20 bp, Human herpesvirus 5
gcgctagaggacagctccat

SEQ ID NO: 41755 - DNA, 20 bp, Human herpesvirus 5
acctcctcgtacgaacggtc

SEQ ID NO: 41756 - DNA, 20 bp, Human herpesvirus 5
cctcctcgtacgaacggtcg

SEQ ID NO: 41757 - DNA, 20 bp, Human herpesvirus 5
atttccagcgccagtggcat

SEQ ID NO: 41758 - DNA, 20 bp, Human herpesvirus 5
tcgctcgaccgttcgtacga

SEQ ID NO: 41759 - DNA, 20 bp, Human herpesvirus 5
gtacgaggaggtaaaggctg

SEQ ID NO: 41760 - DNA, 20 bp, Human herpesvirus 5
tgctctctttcgacgtcgta

SEQ ID NO: 41761 - DNA, 20 bp, Human herpesvirus 5
cgacgtcgtacctgacgtgg

SEQ ID NO: 41762 - DNA, 20 bp, Human herpesvirus 5
gacgtcgtacctgacgtgga

SEQ ID NO: 41763 - DNA, 20 bp, Human herpesvirus 5
taccgaccggcgtttctcct

SEQ ID NO: 41764 - DNA, 20 bp, Human herpesvirus 5
accgaccggcgtttctcctg

SEQ ID NO: 41765 - DNA, 20 bp, Human herpesvirus 5
acgtaagccgatagcggttc

SEQ ID NO: 41766 - DNA, 20 bp, Human herpesvirus 5
ctcagccagttgaccgttgt

SEQ ID NO: 41767 - DNA, 20 bp, Human herpesvirus 5
accgttgttaagtcccggca

SEQ ID NO: 41768 - DNA, 20 bp, Human herpesvirus 5
acaacggtcaactggctgag

SEQ ID NO: 41769 - DNA, 20 bp, Human herpesvirus 5
cgtgaacgcgctgcacgacc

SEQ ID NO: 41770 - DNA, 20 bp, Human herpesvirus 5
ctgctgaaaacgacactcga

SEQ ID NO: 41771 - DNA, 20 bp, Human herpesvirus 5
catggcgggttccgagggtg

SEQ ID NO: 41772 - DNA, 20 bp, Human herpesvirus 5
cgagggtggtccgcgttccg

SEQ ID NO: 41773 - DNA, 20 bp, Human herpesvirus 5
cgtgaaggtctgtagacagg

SEQ ID NO: 41774 - DNA, 20 bp, Human herpesvirus 5
acggaacgcggaccaccctc

SEQ ID NO: 41775 - DNA, 20 bp, Human herpesvirus 5
acgtgcgtcagaaagtcagt

SEQ ID NO: 41776 - DNA, 20 bp, Human herpesvirus 5
aggcaggagctcgagcgccg

SEQ ID NO: 41777 - DNA, 20 bp, Human herpesvirus 5
ggcaggagctcgagcgccga

SEQ ID NO: 41778 - DNA, 20 bp, Human herpesvirus 5
tccatcgcggcggcggcgtg

SEQ ID NO: 41779 - DNA, 20 bp, Human herpesvirus 5
ccactgactttctgacgcac

SEQ ID NO: 41780 - DNA, 20 bp, Human herpesvirus 5
ctgggacccgtggccgtacc

SEQ ID NO: 41781 - DNA, 20 bp, Human herpesvirus 5
ttgcgacggtgaagtggagg

SEQ ID NO: 41782 - DNA, 20 bp, Human herpesvirus 5
tgcgacggtgaagtggaggg

SEQ ID NO: 41783 - DNA, 20 bp, Human herpesvirus 5
gcgacggtgaagtggagggc

SEQ ID NO: 41784 - DNA, 20 bp, Human herpesvirus 5
cgacggtgaagtggagggcc

SEQ ID NO: 41785 - DNA, 20 bp, Human herpesvirus 5
tcgaaaaccacgtggccacg

SEQ ID NO: 41786 - DNA, 20 bp, Human herpesvirus 5
ctctcgctgacggaatggaa

SEQ ID NO: 41787 - DNA, 20 bp, Human herpesvirus 5
cattccgtcagcgagagcaa

SEQ ID NO: 41788 - DNA, 20 bp, Human herpesvirus 5
cgtcagcgagagcaatccgc

SEQ ID NO: 41789 - DNA, 20 bp, Human herpesvirus 5
tcgagaacgtggtaggacag

SEQ ID NO: 41790 - DNA, 20 bp, Human herpesvirus 5
cggcgaacggacacgcgctg

SEQ ID NO: 41791 - DNA, 20 bp, Human herpesvirus 5
ggcgaacggacacgcgctgt

SEQ ID NO: 41792 - DNA, 20 bp, Human herpesvirus 5
caccgcgctcccgacgacga

SEQ ID NO: 41793 - DNA, 20 bp, Human herpesvirus 5
tgacccgcgctcgtcgtcgg

SEQ ID NO: 41794 - DNA, 20 bp, Human herpesvirus 5
gactttacggggcagcagct

SEQ ID NO: 41795 - DNA, 20 bp, Human herpesvirus 5
actttacggggcagcagctg

SEQ ID NO: 41796 - DNA, 20 bp, Human herpesvirus 5
acggggcagcagctgcgccg

SEQ ID NO: 41797 - DNA, 20 bp, Human herpesvirus 5
cggggcagcagctgcgccgg

SEQ ID NO: 41798 - DNA, 20 bp, Human herpesvirus 5
cagcgtctcttcctcctcct

SEQ ID NO: 41799 - DNA, 20 bp, Human herpesvirus 5
tggtcgggcgtgtggtagaa

SEQ ID NO: 41800 - DNA, 20 bp, Human herpesvirus 5
taccacacgcccgaccagaa

SEQ ID NO: 41801 - DNA, 20 bp, Human herpesvirus 5
tgcagtcggtagcaaggaca

SEQ ID NO: 41802 - DNA, 20 bp, Human herpesvirus 5
tccgtgaagctgtgcaggtg

SEQ ID NO: 41803 - DNA, 20 bp, Human herpesvirus 5
acggagaagggcgacgccac

SEQ ID NO: 41804 - DNA, 20 bp, Human herpesvirus 5
ctaccgactgcacaagccca

SEQ ID NO: 41805 - DNA, 20 bp, Human herpesvirus 5
cttgtctccacgacgttcac

SEQ ID NO: 41806 - DNA, 20 bp, Human herpesvirus 5
tctccacgacgttcacgtcc

SEQ ID NO: 41807 - DNA, 20 bp, Human herpesvirus 5
acgtccgggtggctgcaggc

SEQ ID NO: 41808 - DNA, 20 bp, Human herpesvirus 5
acgtcgtccagtgcggcctc

SEQ ID NO: 41809 - DNA, 20 bp, Human herpesvirus 5
cacgagtgggccagcccgag

SEQ ID NO: 41810 - DNA, 20 bp, Human herpesvirus 5
ggggtgcatcatctggtagc

SEQ ID NO: 41811 - DNA, 20 bp, Human herpesvirus 5
cggcacagcgccgccacatt

SEQ ID NO: 41812 - DNA, 20 bp, Human herpesvirus 5
accaatgtggcggcgctgtg

SEQ ID NO: 41813 - DNA, 20 bp, Human herpesvirus 5
ggcggcagcggcgagaggag

SEQ ID NO: 41814 - DNA, 20 bp, Human herpesvirus 5
ttcctctcctctcgccgctg

SEQ ID NO: 41815 - DNA, 20 bp, Human herpesvirus 5
tcctctcctctcgccgctgc

SEQ ID NO: 41816 - DNA, 20 bp, Human herpesvirus 5
cctctcctctcgccgctgcc

SEQ ID NO: 41817 - DNA, 20 bp, Human herpesvirus 5
ctctcctctcgccgctgccg

SEQ ID NO: 41818 - DNA, 20 bp, Human herpesvirus 5
ctcggcgtcaggctcagacg

SEQ ID NO: 41819 - DNA, 20 bp, Human herpesvirus 5
ctccgcctctcctctcagtt

SEQ ID NO: 41820 - DNA, 20 bp, Human herpesvirus 5
ccccgtctcctctccctcaa

SEQ ID NO: 41821 - DNA, 20 bp, Human herpesvirus 5
cccgtctcctctccctcaac

SEQ ID NO: 41822 - DNA, 20 bp, Human herpesvirus 5
agggagaggagacggggaaa

SEQ ID NO: 41823 - DNA, 20 bp, Human herpesvirus 5
ggacaaggagaaccagcgtc

SEQ ID NO: 41824 - DNA, 20 bp, Human herpesvirus 5
tccttgtccgaagccgcgtc

SEQ ID NO: 41825 - DNA, 20 bp, Human herpesvirus 5
tccgaagccgcgtcctcttt

SEQ ID NO: 41826 - DNA, 20 bp, Human herpesvirus 5
ccgacccatgccgctgcaga

SEQ ID NO: 41827 - DNA, 20 bp, Human herpesvirus 5
cgacccatgccgctgcagaa

SEQ ID NO: 41828 - DNA, 20 bp, Human herpesvirus 5
ccccgtagccggcctacggc

SEQ ID NO: 41829 - DNA, 20 bp, Human herpesvirus 5
cccgtagccggcctacggcg

SEQ ID NO: 41830 - DNA, 20 bp, Human herpesvirus 5
tgcagcggcatgggtcggaa

SEQ ID NO: 41831 - DNA, 20 bp, Human herpesvirus 5
ctctttaagcacgccggcgc

SEQ ID NO: 41832 - DNA, 20 bp, Human herpesvirus 5
aagcacgccggcgcggcctg

SEQ ID NO: 41833 - DNA, 20 bp, Human herpesvirus 5
agcacgccggcgcggcctgc

SEQ ID NO: 41834 - DNA, 20 bp, Human herpesvirus 5
gagaacggcaagctcacgca

SEQ ID NO: 41835 - DNA, 20 bp, Human herpesvirus 5
ccgttctccaacgcgcggca

SEQ ID NO: 41836 - DNA, 20 bp, Human herpesvirus 5
acggtgactgccgtcaactg

SEQ ID NO: 41837 - DNA, 20 bp, Human herpesvirus 5
cccgagtaacctggacgcgg

SEQ ID NO: 41838 - DNA, 20 bp, Human herpesvirus 5
ccgaggggaaaggcgacaga

SEQ ID NO: 41839 - DNA, 20 bp, Human herpesvirus 5
gtaccttctctgtcgccttt

SEQ ID NO: 41840 - DNA, 20 bp, Human herpesvirus 5
taccttctctgtcgcctttc

SEQ ID NO: 41841 - DNA, 20 bp, Human herpesvirus 5
ctcctcggacgaaggggagg

SEQ ID NO: 41842 - DNA, 20 bp, Human herpesvirus 5
tgttgccgctcctcgttatc

SEQ ID NO: 41843 - DNA, 20 bp, Human herpesvirus 5
ccgctcctcgttatcgtcat

SEQ ID NO: 41844 - DNA, 20 bp, Human herpesvirus 5
tcgtcatcctccccgtcgtc

SEQ ID NO: 41845 - DNA, 20 bp, Human herpesvirus 5
gtccgaggaggaagtcggag

SEQ ID NO: 41846 - DNA, 20 bp, Human herpesvirus 5
gtcttttccacgtagccaag

SEQ ID NO: 41847 - DNA, 20 bp, Human herpesvirus 5
tccacgtagccaagctagtg

SEQ ID NO: 41848 - DNA, 20 bp, Human herpesvirus 5
ccacgtagccaagctagtgg

SEQ ID NO: 41849 - DNA, 20 bp, Human herpesvirus 5
cacgtagccaagctagtggt

SEQ ID NO: 41850 - DNA, 20 bp, Human herpesvirus 5
gggatacgagccgatgacca

SEQ ID NO: 41851 - DNA, 20 bp, Human herpesvirus 5
cgcgtcggcactcacaagta

SEQ ID NO: 41852 - DNA, 20 bp, Human herpesvirus 5
gcgtcggcactcacaagtat

SEQ ID NO: 41853 - DNA, 20 bp, Human herpesvirus 5
gaggtgcgcgaggtgtgttt

SEQ ID NO: 41854 - DNA, 20 bp, Human herpesvirus 5
aggtgcgcgaggtgtgtttt

SEQ ID NO: 41855 - DNA, 20 bp, Human herpesvirus 5
tgagtgccgacgcgaaacga

SEQ ID NO: 41856 - DNA, 20 bp, Human herpesvirus 5
aagagagcgcgcccggcgtg

SEQ ID NO: 41857 - DNA, 20 bp, Human herpesvirus 5
gtctggggcgacgagcggtt

SEQ ID NO: 41858 - DNA, 20 bp, Human herpesvirus 5
aagggacccaccaaccgctc

SEQ ID NO: 41859 - DNA, 20 bp, Human herpesvirus 5
aacacgacaggtgggacccg

SEQ ID NO: 41860 - DNA, 20 bp, Human herpesvirus 5
tcggccttgacgatgccgca

SEQ ID NO: 41861 - DNA, 20 bp, Human herpesvirus 5
acgatgccgcagcggtgttt

SEQ ID NO: 41862 - DNA, 20 bp, Human herpesvirus 5
gagccgcagatccgagagcc

SEQ ID NO: 41863 - DNA, 20 bp, Human herpesvirus 5
agccgcagatccgagagcct

SEQ ID NO: 41864 - DNA, 20 bp, Human herpesvirus 5
ggtctcgagcaaaaacacgg

SEQ ID NO: 41865 - DNA, 20 bp, Human herpesvirus 5
tcgccgcgcaccgtaaagtc

SEQ ID NO: 41866 - DNA, 20 bp, Human herpesvirus 5
cggctccatgatcatcacat

SEQ ID NO: 41867 - DNA, 20 bp, Human herpesvirus 5
cactagacagaatgtgatga

SEQ ID NO: 41868 - DNA, 20 bp, Human herpesvirus 5
actagacagaatgtgatgat

SEQ ID NO: 41869 - DNA, 20 bp, Human herpesvirus 5
acggtgcgcggcgacaagct

SEQ ID NO: 41870 - DNA, 20 bp, Human herpesvirus 5
acaggaaaggtattgagcaa

SEQ ID NO: 41871 - DNA, 20 bp, Human herpesvirus 5
agcaactggcagatcttttg

SEQ ID NO: 41872 - DNA, 20 bp, Human herpesvirus 5
tggtggcggcagagcccgtc

SEQ ID NO: 41873 - DNA, 20 bp, Human herpesvirus 5
ggtggcggcagagcccgtcg

SEQ ID NO: 41874 - DNA, 20 bp, Human herpesvirus 5
gtggcggcagagcccgtcgt

SEQ ID NO: 41875 - DNA, 20 bp, Human herpesvirus 5
gtccagcgcgcggtagggaa

SEQ ID NO: 41876 - DNA, 20 bp, Human herpesvirus 5
cactcctcggccacgcgccg

SEQ ID NO: 41877 - DNA, 20 bp, Human herpesvirus 5
cacgcggcgttgtttcccta

SEQ ID NO: 41878 - DNA, 20 bp, Human herpesvirus 5
tttccctaccgcgcgctgga

SEQ ID NO: 41879 - DNA, 20 bp, Human herpesvirus 5
ccctaccgcgcgctggacga

SEQ ID NO: 41880 - DNA, 20 bp, Human herpesvirus 5
aatatgtgggagcgcaaggc

SEQ ID NO: 41881 - DNA, 20 bp, Human herpesvirus 5
ggcctccgccgcggccgcgg

SEQ ID NO: 41882 - DNA, 20 bp, Human herpesvirus 5
cgctcccacatatttaagca

SEQ ID NO: 41883 - DNA, 20 bp, Human herpesvirus 5
aagcatttgtccacgatgtc

SEQ ID NO: 41884 - DNA, 20 bp, Human herpesvirus 5
agcatttgtccacgatgtcg

SEQ ID NO: 41885 - DNA, 20 bp, Human herpesvirus 5
ttttactacttttacaacgc

SEQ ID NO: 41886 - DNA, 20 bp, Human herpesvirus 5
tttactacttttacaacgcc

SEQ ID NO: 41887 - DNA, 20 bp, Human herpesvirus 5
ttactacttttacaacgccc

SEQ ID NO: 41888 - DNA, 20 bp, Human herpesvirus 5
tactacttttacaacgccct

SEQ ID NO: 41889 - DNA, 20 bp, Human herpesvirus 5
actacttttacaacgccctg

SEQ ID NO: 41890 - DNA, 20 bp, Human herpesvirus 5
gacaggcaggggatgtcgtg

SEQ ID NO: 41891 - DNA, 20 bp, Human herpesvirus 5
gccatgttccatccgttgag

SEQ ID NO: 41892 - DNA, 20 bp, Human herpesvirus 5
cgcgacatttttctcaagcg

SEQ ID NO: 41893 - DNA, 20 bp, Human herpesvirus 5
ttctcaagcgctaccagctc

SEQ ID NO: 41894 - DNA, 20 bp, Human herpesvirus 5
tctcaagcgctaccagctca

SEQ ID NO: 41895 - DNA, 20 bp, Human herpesvirus 5
ctcaagcgctaccagctcat

SEQ ID NO: 41896 - DNA, 20 bp, Human herpesvirus 5
tcaagcgctaccagctcatg

SEQ ID NO: 41897 - DNA, 20 bp, Human herpesvirus 5
cgcatgtgtcgccggcgcag

SEQ ID NO: 41898 - DNA, 20 bp, Human herpesvirus 5
gcatgtgtcgccggcgcaga

SEQ ID NO: 41899 - DNA, 20 bp, Human herpesvirus 5
tcgctggtgtagccctcgag

SEQ ID NO: 41900 - DNA, 20 bp, Human herpesvirus 5
gtcgagtcggcgcagggcaa

SEQ ID NO: 41901 - DNA, 20 bp, Human herpesvirus 5
ccctgcgccgactcgacgaa

SEQ ID NO: 41902 - DNA, 20 bp, Human herpesvirus 5
ctcagcgtctgccagcctaa

SEQ ID NO: 41903 - DNA, 20 bp, Human herpesvirus 5
agcagcagcacgccgcgtcg

SEQ ID NO: 41904 - DNA, 20 bp, Human herpesvirus 5
accgtggtgcacggacagcc

SEQ ID NO: 41905 - DNA, 20 bp, Human herpesvirus 5
ggctggcagacgctgagtaa

SEQ ID NO: 41906 - DNA, 20 bp, Human herpesvirus 5
cgggccctgctgacgctgtt

SEQ ID NO: 41907 - DNA, 20 bp, Human herpesvirus 5
agctcggacacagcgccgcg

SEQ ID NO: 41908 - DNA, 20 bp, Human herpesvirus 5
atgtgccgccgcccggattg

SEQ ID NO: 41909 - DNA, 20 bp, Human herpesvirus 5
cggcttctctttctcacctg

SEQ ID NO: 41910 - DNA, 20 bp, Human herpesvirus 5
tctttctcacctggaccggt

SEQ ID NO: 41911 - DNA, 20 bp, Human herpesvirus 5
ctcacctggaccggtgatac

SEQ ID NO: 41912 - DNA, 20 bp, Human herpesvirus 5
tcacctggaccggtgatact

SEQ ID NO: 41913 - DNA, 20 bp, Human herpesvirus 5
gtcgtggcggcggcagcggt

SEQ ID NO: 41914 - DNA, 20 bp, Human herpesvirus 5
tcgtggcggcggcagcggtg

SEQ ID NO: 41915 - DNA, 20 bp, Human herpesvirus 5
ccagtaccaccgctgccgcc

SEQ ID NO: 41916 - DNA, 20 bp, Human herpesvirus 5
ggatcctggtgaaagaattt

SEQ ID NO: 41917 - DNA, 20 bp, Human herpesvirus 5
aaattctttcaccaggatcc

SEQ ID NO: 41918 - DNA, 20 bp, Human herpesvirus 5
tttcaccaggatcccaaccg

SEQ ID NO: 41919 - DNA, 20 bp, Human herpesvirus 5
caccaggatcccaaccgcgt

SEQ ID NO: 41920 - DNA, 20 bp, Human herpesvirus 5
accaggatcccaaccgcgtt

SEQ ID NO: 41921 - DNA, 20 bp, Human herpesvirus 5
ccgtgtgacgagacggcgtg

SEQ ID NO: 41922 - DNA, 20 bp, Human herpesvirus 5
cgtgctggcgatcgcgctcg

SEQ ID NO: 41923 - DNA, 20 bp, Human herpesvirus 5
cgctcttgggcgacatgcac

SEQ ID NO: 41924 - DNA, 20 bp, Human herpesvirus 5
ctccccccgcccgtacatcc

SEQ ID NO: 41925 - DNA, 20 bp, Human herpesvirus 5
tccccccgcccgtacatccc

SEQ ID NO: 41926 - DNA, 20 bp, Human herpesvirus 5
tgcatcgcccatctacccac

SEQ ID NO: 41927 - DNA, 20 bp, Human herpesvirus 5
tcagacacataccctaccgc

SEQ ID NO: 41928 - DNA, 20 bp, Human herpesvirus 5
cagacacataccctaccgcc

SEQ ID NO: 41929 - DNA, 20 bp, Human herpesvirus 5
agacacataccctaccgcca

SEQ ID NO: 41930 - DNA, 20 bp, Human herpesvirus 5
tgcggcacactggtggtggt

SEQ ID NO: 41931 - DNA, 20 bp, Human herpesvirus 5
ctcctaacagtggaggccag

SEQ ID NO: 41932 - DNA, 20 bp, Human herpesvirus 5
aagaccagggggtcgcctcg

SEQ ID NO: 41933 - DNA, 20 bp, Human herpesvirus 5
gactactgagctaccgaggc

SEQ ID NO: 41934 - DNA, 20 bp, Human herpesvirus 5
aagcacactttctcgggtgt

SEQ ID NO: 41935 - DNA, 20 bp, Human herpesvirus 5
ctcgggtgtgcgtcgaccct

SEQ ID NO: 41936 - DNA, 20 bp, Human herpesvirus 5
tcgggtgtgcgtcgaccctt

SEQ ID NO: 41937 - DNA, 20 bp, Human herpesvirus 5
tgccgattgagcaacactgt

SEQ ID NO: 41938 - DNA, 20 bp, Human herpesvirus 5
gccgattgagcaacactgtt

SEQ ID NO: 41939 - DNA, 20 bp, Human herpesvirus 5
ccgattgagcaacactgttg

SEQ ID NO: 41940 - DNA, 20 bp, Human herpesvirus 5
agcaacactgttggcatctc

SEQ ID NO: 41941 - DNA, 20 bp, Human herpesvirus 5
gcatctctcactccgatagg

SEQ ID NO: 41942 - DNA, 20 bp, Human herpesvirus 5
ctgtcgttgcttgtgatgtt

SEQ ID NO: 41943 - DNA, 20 bp, Human herpesvirus 5
cttgtgatgttggacgcctg

SEQ ID NO: 41944 - DNA, 20 bp, Human herpesvirus 5
tgatgttggacgcctggagt

SEQ ID NO: 41945 - DNA, 20 bp, Human herpesvirus 5
gacgcctggagtggaaaagt

SEQ ID NO: 41946 - DNA, 20 bp, Human herpesvirus 5
ttaggcgcgcatacggtatt

SEQ ID NO: 41947 - DNA, 20 bp, Human herpesvirus 5
gtcgggccggctgagcgtct

SEQ ID NO: 41948 - DNA, 20 bp, Human herpesvirus 5
ctgcacgccggcgttaggtc

SEQ ID NO: 41949 - DNA, 20 bp, Human herpesvirus 5
ggtcgctactcgctgggaga

SEQ ID NO: 41950 - DNA, 20 bp, Human herpesvirus 5
ctctccctcggcgaccaaca

SEQ ID NO: 41951 - DNA, 20 bp, Human herpesvirus 5
gtcgccgagggagagcaagt

SEQ ID NO: 41952 - DNA, 20 bp, Human herpesvirus 5
ccatcccctgcacggtcatg

SEQ ID NO: 41953 - DNA, 20 bp, Human herpesvirus 5
tgtacagcactcgcgcggga

SEQ ID NO: 41954 - DNA, 20 bp, Human herpesvirus 5
gtacagcactcgcgcgggaa

SEQ ID NO: 41955 - DNA, 20 bp, Human herpesvirus 5
tacagcactcgcgcgggaac

SEQ ID NO: 41956 - DNA, 20 bp, Human herpesvirus 5
cgtagcgggagatacggcgt

SEQ ID NO: 41957 - DNA, 20 bp, Human herpesvirus 5
tcccgcgggccacttacttg

SEQ ID NO: 41958 - DNA, 20 bp, Human herpesvirus 5
ccccgccagcacctccgccg

SEQ ID NO: 41959 - DNA, 20 bp, Human herpesvirus 5
ctatcgtcgccggtttcggg

SEQ ID NO: 41960 - DNA, 20 bp, Human herpesvirus 5
cgggcgatgacagcgccggc

SEQ ID NO: 41961 - DNA, 20 bp, Human herpesvirus 5
gggcgatgacagcgccggcg

SEQ ID NO: 41962 - DNA, 20 bp, Human herpesvirus 5
ccggcggaggtgctggcggg

SEQ ID NO: 41963 - DNA, 20 bp, Human herpesvirus 5
cgcggtggcttttgtggcgt

SEQ ID NO: 41964 - DNA, 20 bp, Human herpesvirus 5
tgtggcgtcggcgttttcgg

SEQ ID NO: 41965 - DNA, 20 bp, Human herpesvirus 5
gtggcgtcggcgttttcggg

SEQ ID NO: 41966 - DNA, 20 bp, Human herpesvirus 5
tggcgtcggcgttttcggga

SEQ ID NO: 41967 - DNA, 20 bp, Human herpesvirus 5
tcgggaagggcctgggcgtc

SEQ ID NO: 41968 - DNA, 20 bp, Human herpesvirus 5
ccgtgatcgcgtcgtgcgcg

SEQ ID NO: 41969 - DNA, 20 bp, Human herpesvirus 5
tattattgcgatgagaggga

SEQ ID NO: 41970 - DNA, 20 bp, Human herpesvirus 5
attattgcgatgagagggag

SEQ ID NO: 41971 - DNA, 20 bp, Human herpesvirus 5
ttattgcgatgagagggagg

SEQ ID NO: 41972 - DNA, 20 bp, Human herpesvirus 5
ttgcgatgagagggaggatg

SEQ ID NO: 41973 - DNA, 20 bp, Human herpesvirus 5
gcctgatggtggaagtcggc

SEQ ID NO: 41974 - DNA, 20 bp, Human herpesvirus 5
gaccttcgtgcgttgtctcg

SEQ ID NO: 41975 - DNA, 20 bp, Human herpesvirus 5
gtgcgttgtctcgcctatca

SEQ ID NO: 41976 - DNA, 20 bp, Human herpesvirus 5
tctcgcctatcagcgttcct

SEQ ID NO: 41977 - DNA, 20 bp, Human herpesvirus 5
cttccccgtgcttacagcct

SEQ ID NO: 41978 - DNA, 20 bp, Human herpesvirus 5
ggcaccgcgtggcgtacctc

SEQ ID NO: 41979 - DNA, 20 bp, Human herpesvirus 5
gatggtccacgacgtcgcga

SEQ ID NO: 41980 - DNA, 20 bp, Human herpesvirus 5
agtccgggtttcgcgtccag

SEQ ID NO: 41981 - DNA, 20 bp, Human herpesvirus 5
cgcgtccagtcggacgtgtg

SEQ ID NO: 41982 - DNA, 20 bp, Human herpesvirus 5
gcgtccagtcggacgtgtga

SEQ ID NO: 41983 - DNA, 20 bp, Human herpesvirus 5
ggcaacggaacggcgtttca

SEQ ID NO: 41984 - DNA, 20 bp, Human herpesvirus 5
cactgccaaaattgtatcgg

SEQ ID NO: 41985 - DNA, 20 bp, Human herpesvirus 5
aaggaagccctctgggatgt

SEQ ID NO: 41986 - DNA, 20 bp, Human herpesvirus 5
gaagtgccgcgttgggcgtg

SEQ ID NO: 41987 - DNA, 20 bp, Human herpesvirus 5
ggcgtggcagggctggaaga

SEQ ID NO: 41988 - DNA, 20 bp, Human herpesvirus 5
cgccacctcttccagccctg

SEQ ID NO: 41989 - DNA, 20 bp, Human herpesvirus 5
cagccctgccacgcccaacg

SEQ ID NO: 41990 - DNA, 20 bp, Human herpesvirus 5
aacgtctgtggttggcagcc

SEQ ID NO: 41991 - DNA, 20 bp, Human herpesvirus 5
gcagccaggggctgggtgtg

SEQ ID NO: 41992 - DNA, 20 bp, Human herpesvirus 5
cacaccggtttcgcacaccc

SEQ ID NO: 41993 - DNA, 20 bp, Human herpesvirus 5
cgcacacccagcccctggct

SEQ ID NO: 41994 - DNA, 20 bp, Human herpesvirus 5
gcacacccagcccctggctg

SEQ ID NO: 41995 - DNA, 20 bp, Human herpesvirus 5
tgagcagacgacgttggatg

SEQ ID NO: 41996 - DNA, 20 bp, Human herpesvirus 5
gatgcgggacgtcggagcac

SEQ ID NO: 41997 - DNA, 20 bp, Human herpesvirus 5
cgcgtgttcctccgggttcc

SEQ ID NO: 41998 - DNA, 20 bp, Human herpesvirus 5
ctccgggttcctgccttttc

SEQ ID NO: 41999 - DNA, 20 bp, Human herpesvirus 5
ctgccttttccagtcgagtg

SEQ ID NO: 42000 - DNA, 20 bp, Human herpesvirus 5
tccagtcgagtgcgtcgtcg

SEQ ID NO: 42001 - DNA, 20 bp, Human herpesvirus 5
ccagtcgagtgcgtcgtcgg

SEQ ID NO: 42002 - DNA, 20 bp, Human herpesvirus 5
ggtcctcggggacagccgac

SEQ ID NO: 42003 - DNA, 20 bp, Human herpesvirus 5
cggcgcctcgtcgttgagtg

SEQ ID NO: 42004 - DNA, 20 bp, Human herpesvirus 5
ggcgcctcgtcgttgagtgg

SEQ ID NO: 42005 - DNA, 20 bp, Human herpesvirus 5
agtggccttcagcagtctgc

SEQ ID NO: 42006 - DNA, 20 bp, Human herpesvirus 5
agcagtctgcgttgttttat

SEQ ID NO: 42007 - DNA, 20 bp, Human herpesvirus 5
tccccgactccgcggtccgc

SEQ ID NO: 42008 - DNA, 20 bp, Human herpesvirus 5
gtgacggcgatcagcagccg

SEQ ID NO: 42009 - DNA, 20 bp, Human herpesvirus 5
gttctcctccacccgaaagt

SEQ ID NO: 42010 - DNA, 20 bp, Human herpesvirus 5
tcctccacccgaaagtgggc

SEQ ID NO: 42011 - DNA, 20 bp, Human herpesvirus 5
gatctccgataccaccacat

SEQ ID NO: 42012 - DNA, 20 bp, Human herpesvirus 5
atctccgataccaccacatt

SEQ ID NO: 42013 - DNA, 20 bp, Human herpesvirus 5
aggggccggggcaccgagtc

SEQ ID NO: 42014 - DNA, 20 bp, Human herpesvirus 5
caacaccgggacttttcaca

SEQ ID NO: 42015 - DNA, 20 bp, Human herpesvirus 5
aacaccgggacttttcacac

SEQ ID NO: 42016 - DNA, 20 bp, Human herpesvirus 5
tcacacggtgatttcggcac

SEQ ID NO: 42017 - DNA, 20 bp, Human herpesvirus 5
cacacggtgatttcggcacc

SEQ ID NO: 42018 - DNA, 20 bp, Human herpesvirus 5
acacggtgatttcggcaccg

SEQ ID NO: 42019 - DNA, 20 bp, Human herpesvirus 5
gtggtcgtgtcgcgacatgg

SEQ ID NO: 42020 - DNA, 20 bp, Human herpesvirus 5
cgaaacggcgattatatatg

SEQ ID NO: 42021 - DNA, 20 bp, Human herpesvirus 5
tatatgttctcaacaatacc

SEQ ID NO: 42022 - DNA, 20 bp, Human herpesvirus 5
tcaacaataccgccctacgt

SEQ ID NO: 42023 - DNA, 20 bp, Human herpesvirus 5
tatgatgtaacgtgtgacgt

SEQ ID NO: 42024 - DNA, 20 bp, Human herpesvirus 5
catcatacaacgtagggcgg

SEQ ID NO: 42025 - DNA, 20 bp, Human herpesvirus 5
ccacgcacaagccaggcggc

SEQ ID NO: 42026 - DNA, 20 bp, Human herpesvirus 5
ggacacggaactggagacac

SEQ ID NO: 42027 - DNA, 20 bp, Human herpesvirus 5
cgtgtccgaatgttacgtcc

SEQ ID NO: 42028 - DNA, 20 bp, Human herpesvirus 5
cgtccagcacggggtactcg

SEQ ID NO: 42029 - DNA, 20 bp, Human herpesvirus 5
tgcgtggcaacttctccgat

SEQ ID NO: 42030 - DNA, 20 bp, Human herpesvirus 5
gggtagcagagtagtttcgg

SEQ ID NO: 42031 - DNA, 20 bp, Human herpesvirus 5
cggggtcggtttccttccgg

SEQ ID NO: 42032 - DNA, 20 bp, Human herpesvirus 5
ggggtcggtttccttccggc

SEQ ID NO: 42033 - DNA, 20 bp, Human herpesvirus 5
ccttccggcgacgacagttc

SEQ ID NO: 42034 - DNA, 20 bp, Human herpesvirus 5
cttccggcgacgacagttcc

SEQ ID NO: 42035 - DNA, 20 bp, Human herpesvirus 5
ggatgaggctggaaacgccg

SEQ ID NO: 42036 - DNA, 20 bp, Human herpesvirus 5
agcccggcggtggtgaacga

SEQ ID NO: 42037 - DNA, 20 bp, Human herpesvirus 5
gcactgtatgtggcgcttct

SEQ ID NO: 42038 - DNA, 20 bp, Human herpesvirus 5
cactgtatgtggcgcttctc

SEQ ID NO: 42039 - DNA, 20 bp, Human herpesvirus 5
tctcgttcaccaccgccggg

SEQ ID NO: 42040 - DNA, 20 bp, Human herpesvirus 5
cagcgtactcattagcgcgc

SEQ ID NO: 42041 - DNA, 20 bp, Human herpesvirus 5
agcgtactcattagcgcgct

SEQ ID NO: 42042 - DNA, 20 bp, Human herpesvirus 5
gcgcgctggtttggctgggt

SEQ ID NO: 42043 - DNA, 20 bp, Human herpesvirus 5
ggctgggttacccctcactg

SEQ ID NO: 42044 - DNA, 20 bp, Human herpesvirus 5
gctgggttacccctcactgg

SEQ ID NO: 42045 - DNA, 20 bp, Human herpesvirus 5
gatcccggggggcacgtaga

SEQ ID NO: 42046 - DNA, 20 bp, Human herpesvirus 5
aaaccctttttctcttctca

SEQ ID NO: 42047 - DNA, 20 bp, Human herpesvirus 5
caagtacccaccgatggcac

SEQ ID NO: 42048 - DNA, 20 bp, Human herpesvirus 5
aagtacccaccgatggcacg

SEQ ID NO: 42049 - DNA, 20 bp, Human herpesvirus 5
cgctgagcgagaaccggtcg

SEQ ID NO: 42050 - DNA, 20 bp, Human herpesvirus 5
gctgagcgagaaccggtcgc

SEQ ID NO: 42051 - DNA, 20 bp, Human herpesvirus 5
gtgtatttccgctatgagcg

SEQ ID NO: 42052 - DNA, 20 bp, Human herpesvirus 5
ccgctatgagcgaccggttc

SEQ ID NO: 42053 - DNA, 20 bp, Human herpesvirus 5
cgctatgagcgaccggttct

SEQ ID NO: 42054 - DNA, 20 bp, Human herpesvirus 5
gacgcgcggtcatatagcct

SEQ ID NO: 42055 - DNA, 20 bp, Human herpesvirus 5
cccaccgcgacccagcgaca

SEQ ID NO: 42056 - DNA, 20 bp, Human herpesvirus 5
ccaccgcgacccagcgacag

SEQ ID NO: 42057 - DNA, 20 bp, Human herpesvirus 5
atcgcgtttgccgtgcagca

SEQ ID NO: 42058 - DNA, 20 bp, Human herpesvirus 5
gccgtgcagcagggccaaac

SEQ ID NO: 42059 - DNA, 20 bp, Human herpesvirus 5
ccgtgcagcagggccaaaca

SEQ ID NO: 42060 - DNA, 20 bp, Human herpesvirus 5
ggccctgctgcacggcaaac

SEQ ID NO: 42061 - DNA, 20 bp, Human herpesvirus 5
gccctgctgcacggcaaacg

SEQ ID NO: 42062 - DNA, 20 bp, Human herpesvirus 5
tagcgggacgacatgaagca

SEQ ID NO: 42063 - DNA, 20 bp, Human herpesvirus 5
tataggcattaggacttccc

SEQ ID NO: 42064 - DNA, 20 bp, Human herpesvirus 5
ataggcattaggacttcccc

SEQ ID NO: 42065 - DNA, 20 bp, Human herpesvirus 5
taggcattaggacttccccg

SEQ ID NO: 42066 - DNA, 20 bp, Human herpesvirus 5
ggacttccccgtcgtactgg

SEQ ID NO: 42067 - DNA, 20 bp, Human herpesvirus 5
gcagagcgagcgtgaggaac

SEQ ID NO: 42068 - DNA, 20 bp, Human herpesvirus 5
ccagcgacgtcggtcacggc

SEQ ID NO: 42069 - DNA, 20 bp, Human herpesvirus 5
cagcgacgtcggtcacggcc

SEQ ID NO: 42070 - DNA, 20 bp, Human herpesvirus 5
ctaggtggccgtgaccgacg

SEQ ID NO: 42071 - DNA, 20 bp, Human herpesvirus 5
taggtggccgtgaccgacgt

SEQ ID NO: 42072 - DNA, 20 bp, Human herpesvirus 5
tgctcgccggccgcgctgta

SEQ ID NO: 42073 - DNA, 20 bp, Human herpesvirus 5
gctcgccggccgcgctgtaa

SEQ ID NO: 42074 - DNA, 20 bp, Human herpesvirus 5
ctcgccggccgcgctgtaac

SEQ ID NO: 42075 - DNA, 20 bp, Human herpesvirus 5
ctctgtggtcggcgagtctt

SEQ ID NO: 42076 - DNA, 20 bp, Human herpesvirus 5
tctgtggtcggcgagtcttc

SEQ ID NO: 42077 - DNA, 20 bp, Human herpesvirus 5
gcgcatcactaggaaccagt

SEQ ID NO: 42078 - DNA, 20 bp, Human herpesvirus 5
gcggggttgcgcagtgctac

SEQ ID NO: 42079 - DNA, 20 bp, Human herpesvirus 5
cgcagtgctacggtggttcc

SEQ ID NO: 42080 - DNA, 20 bp, Human herpesvirus 5
cctggtggcgctgcacgtag

SEQ ID NO: 42081 - DNA, 20 bp, Human herpesvirus 5
ctagtgatgcgcgaacaggc

SEQ ID NO: 42082 - DNA, 20 bp, Human herpesvirus 5
actttaccatgttcgacagc

SEQ ID NO: 42083 - DNA, 20 bp, Human herpesvirus 5
accatgttcgacagcggcgt

SEQ ID NO: 42084 - DNA, 20 bp, Human herpesvirus 5
ccatgttcgacagcggcgta

SEQ ID NO: 42085 - DNA, 20 bp, Human herpesvirus 5
gacagcggcgtagaccgcga

SEQ ID NO: 42086 - DNA, 20 bp, Human herpesvirus 5
gccaacgcaggcggccaacg

SEQ ID NO: 42087 - DNA, 20 bp, Human herpesvirus 5
gccgcctgcgttggcgaaca

SEQ ID NO: 42088 - DNA, 20 bp, Human herpesvirus 5
tgcggaatgccgagcgacaa

SEQ ID NO: 42089 - DNA, 20 bp, Human herpesvirus 5
cggacccagtcgcgaagcac

SEQ ID NO: 42090 - DNA, 20 bp, Human herpesvirus 5
gcgactgggtccgtaaccac

SEQ ID NO: 42091 - DNA, 20 bp, Human herpesvirus 5
tcgctcggcattccgcacaa

SEQ ID NO: 42092 - DNA, 20 bp, Human herpesvirus 5
cgcacaactggttcctgcag

SEQ ID NO: 42093 - DNA, 20 bp, Human herpesvirus 5
cgcgacactctcagccggac

SEQ ID NO: 42094 - DNA, 20 bp, Human herpesvirus 5
tggccctgacggcgctgcag

SEQ ID NO: 42095 - DNA, 20 bp, Human herpesvirus 5
tgccgccggagctccccgcg

SEQ ID NO: 42096 - DNA, 20 bp, Human herpesvirus 5
cctgctgttggctacctctc

SEQ ID NO: 42097 - DNA, 20 bp, Human herpesvirus 5
gctacctctcggatttcaaa

SEQ ID NO: 42098 - DNA, 20 bp, Human herpesvirus 5
caaaaaagagcacgtgccga

SEQ ID NO: 42099 - DNA, 20 bp, Human herpesvirus 5
aaaaaagagcacgtgccgat

SEQ ID NO: 42100 - DNA, 20 bp, Human herpesvirus 5
tttgaaatccgagaggtagc

SEQ ID NO: 42101 - DNA, 20 bp, Human herpesvirus 5
cgtggttagcagcggcgtgc

SEQ ID NO: 42102 - DNA, 20 bp, Human herpesvirus 5
gcagcggcgtgcgcatctgc

SEQ ID NO: 42103 - DNA, 20 bp, Human herpesvirus 5
cactgcgaggccatctacgg

SEQ ID NO: 42104 - DNA, 20 bp, Human herpesvirus 5
ccgggatacgagcacgcttc

SEQ ID NO: 42105 - DNA, 20 bp, Human herpesvirus 5
cgagggctggcggttttgca

SEQ ID NO: 42106 - DNA, 20 bp, Human herpesvirus 5
ccgtcgattgcaaaaccgcc

SEQ ID NO: 42107 - DNA, 20 bp, Human herpesvirus 5
caaaaccgccagccctcgga

SEQ ID NO: 42108 - DNA, 20 bp, Human herpesvirus 5
cgcggtgggggcgtgccccg

SEQ ID NO: 42109 - DNA, 20 bp, Human herpesvirus 5
gttcggcgttcaggccttaa

SEQ ID NO: 42110 - DNA, 20 bp, Human herpesvirus 5
ggcgttcaggccttaatact

SEQ ID NO: 42111 - DNA, 20 bp, Human herpesvirus 5
aggcctgaacgccgaacgaa

SEQ ID NO: 42112 - DNA, 20 bp, Human herpesvirus 5
ctggcgccgccttggggccg

SEQ ID NO: 42113 - DNA, 20 bp, Human herpesvirus 5
gggccgtgcagtctggaagg

SEQ ID NO: 42114 - DNA, 20 bp, Human herpesvirus 5
tccagtcgagtgcgtcgtcg

SEQ ID NO: 42115 - DNA, 20 bp, Human herpesvirus 5
ccagtcgagtgcgtcgtcgg

SEQ ID NO: 42116 - DNA, 20 bp, Human herpesvirus 5
cagtcgagtgcgtcgtcggc

SEQ ID NO: 42117 - DNA, 20 bp, Human herpesvirus 5
cgggccgtgtgctgggtccc

SEQ ID NO: 42118 - DNA, 20 bp, Human herpesvirus 5
tctgcgggggggtgaaattt

SEQ ID NO: 42119 - DNA, 20 bp, Human herpesvirus 5
ctgcgggggggtgaaatttg

SEQ ID NO: 42120 - DNA, 20 bp, Human herpesvirus 5
tgcgggggggtgaaatttgg

SEQ ID NO: 42121 - DNA, 20 bp, Human herpesvirus 5
ggagttgcgtgtgtggacgg

SEQ ID NO: 42122 - DNA, 20 bp, Influenza A virus
aatccaatgattgtcgagct

SEQ ID NO: 42123 - DNA, 20 bp, Influenza A virus
tcgagcttgcggaaaagaca

SEQ ID NO: 42124 - DNA, 20 bp, Influenza A virus
cggaaaagacaatgaaggaa

SEQ ID NO: 42125 - DNA, 20 bp, Influenza A virus
aaacaaataagttcgctgca

SEQ ID NO: 42126 - DNA, 20 bp, Influenza A virus
gctgcaatatgcacacactt

SEQ ID NO: 42127 - DNA, 20 bp, Influenza A virus
cttccggatctatacgacta

SEQ ID NO: 42128 - DNA, 20 bp, Influenza A virus
ttccggatctatacgactac

SEQ ID NO: 42129 - DNA, 20 bp, Influenza A virus
cggatctatacgactacaag

SEQ ID NO: 42130 - DNA, 20 bp, Influenza A virus
actgaaattggtgtgacacg

SEQ ID NO: 42131 - DNA, 20 bp, Influenza A virus
gtgtgacacggagggaagtt

SEQ ID NO: 42132 - DNA, 20 bp, Influenza A virus
ctttcgtcagtccgagagag

SEQ ID NO: 42133 - DNA, 20 bp, Influenza A virus
cgtcagtccgagagaggcga

SEQ ID NO: 42134 - DNA, 20 bp, Influenza A virus
gtcagtccgagagaggcgaa

SEQ ID NO: 42135 - DNA, 20 bp, Influenza A virus
aagaaagatttgaaatcaca

SEQ ID NO: 42136 - DNA, 20 bp, Influenza A virus
gaaatcacagggaccatgcg

SEQ ID NO: 42137 - DNA, 20 bp, Influenza A virus
gactttgaggactgcaaaga

SEQ ID NO: 42138 - DNA, 20 bp, Influenza A virus
gaggactgcaaagatattgg

SEQ ID NO: 42139 - DNA, 20 bp, Influenza A virus
aggactgcaaagatattggc

SEQ ID NO: 42140 - DNA, 20 bp, Influenza A virus
gcgatctgaaacagtatcaa

SEQ ID NO: 42141 - DNA, 20 bp, Influenza A virus
gatactgtttcagatcgcca

SEQ ID NO: 42142 - DNA, 20 bp, Influenza A virus
ccccaattgagcacattgca

SEQ ID NO: 42143 - DNA, 20 bp, Influenza A virus
agcacattgcaagcatgaga

SEQ ID NO: 42144 - DNA, 20 bp, Influenza A virus
caagcatgagaaggaactac

SEQ ID NO: 42145 - DNA, 20 bp, Influenza A virus
acagcggaagtgtctcattg

SEQ ID NO: 42146 - DNA, 20 bp, Influenza A virus
cagggccactgagtacataa

SEQ ID NO: 42147 - DNA, 20 bp, Influenza A virus
gagaaatgatactgacgtgg

SEQ ID NO: 42148 - DNA, 20 bp, Influenza A virus
agaaatgatactgacgtggt

SEQ ID NO: 42149 - DNA, 20 bp, Influenza A virus
gtgagtatggaattctccct

SEQ ID NO: 42150 - DNA, 20 bp, Influenza A virus
tgagtatggaattctccctt

SEQ ID NO: 42151 - DNA, 20 bp, Influenza A virus
tcccttactgacccaaggct

SEQ ID NO: 42152 - DNA, 20 bp, Influenza A virus
aacagattgagagcatgatc

SEQ ID NO: 42153 - DNA, 20 bp, Influenza A virus
agagcatgatcgaggctgag

SEQ ID NO: 42154 - DNA, 20 bp, Influenza A virus
tatcaaagagaaagacatga

SEQ ID NO: 42155 - DNA, 20 bp, Influenza A virus
tttgaaaacagatcggagac

SEQ ID NO: 42156 - DNA, 20 bp, Influenza A virus
gaaaacagatcggagacatg

SEQ ID NO: 42157 - DNA, 20 bp, Influenza A virus
gaagaatggttagcggcatt

SEQ ID NO: 42158 - DNA, 20 bp, Influenza A virus
gcggcattgggagattctac

SEQ ID NO: 42159 - DNA, 20 bp, Influenza A virus
ggagattctacatacagatg

SEQ ID NO: 42160 - DNA, 20 bp, Influenza A virus
tacatacagatgtgtacaga

SEQ ID NO: 42161 - DNA, 20 bp, Influenza A virus
tcactgagtttgagttctgt

SEQ ID NO: 42162 - DNA, 20 bp, Influenza A virus
ggcgacaagcgaacaatgga

SEQ ID NO: 42163 - DNA, 20 bp, Influenza A virus
gcgacaagcgaacaatggag

SEQ ID NO: 42164 - DNA, 20 bp, Influenza A virus
catcctctccattgttcgct

SEQ ID NO: 42165 - DNA, 20 bp, Influenza A virus
ttcgcttgtcgccaaattct

SEQ ID NO: 42166 - DNA, 20 bp, Influenza A virus
gcttgtcgccaaattctcct

SEQ ID NO: 42167 - DNA, 20 bp, Influenza A virus
ctggagaggcgaaaatggaa

SEQ ID NO: 42168 - DNA, 20 bp, Influenza A virus
tggagaggcgaaaatggaag

SEQ ID NO: 42169 - DNA, 20 bp, Influenza A virus
catatgagagaatgtgcaac

SEQ ID NO: 42170 - DNA, 20 bp, Influenza A virus
ccctttgaggatgttgcaca

SEQ ID NO: 42171 - DNA, 20 bp, Influenza A virus
cctttgaggatgttgcacat

SEQ ID NO: 42172 - DNA, 20 bp, Influenza A virus
aaattgcttcaaatgagaac

SEQ ID NO: 42173 - DNA, 20 bp, Influenza A virus
cttcaaatgagaacatggaa

SEQ ID NO: 42174 - DNA, 20 bp, Influenza A virus
aaatgagaacatggaagcaa

SEQ ID NO: 42175 - DNA, 20 bp, Influenza A virus
tcagttcaagagtattggag

SEQ ID NO: 42176 - DNA, 20 bp, Influenza A virus
aagagtattggagtccattg

SEQ ID NO: 42177 - DNA, 20 bp, Human adenovirus
tttgtgcaaattttgtgttt

SEQ ID NO: 42178 - DNA, 20 bp, Human adenovirus
gtgcaaattttgtgttttag

SEQ ID NO: 42179 - DNA, 20 bp, Human adenovirus
tgcaaattttgtgttttagg

SEQ ID NO: 42180 - DNA, 20 bp, Human adenovirus
tgtgttttaggcgcgaaaac

SEQ ID NO: 42181 - DNA, 20 bp, Human adenovirus
gtgttttaggcgcgaaaact

SEQ ID NO: 42182 - DNA, 20 bp, Human adenovirus
gtcctgtcgtatcaggaagc

SEQ ID NO: 42183 - DNA, 20 bp, Human adenovirus
gagcatttggtggacaactt

SEQ ID NO: 42184 - DNA, 20 bp, Human adenovirus
ggtggacaacttttttaacg

SEQ ID NO: 42185 - DNA, 20 bp, Human adenovirus
gtggacaacttttttaacga

SEQ ID NO: 42186 - DNA, 20 bp, Human adenovirus
tttaacgaggtacccagtga

SEQ ID NO: 42187 - DNA, 20 bp, Human adenovirus
attgtgctacgagatgggct

SEQ ID NO: 42188 - DNA, 20 bp, Human adenovirus
ttgtgctacgagatgggctt

SEQ ID NO: 42189 - DNA, 20 bp, Human adenovirus
tgctacgagatgggctttcc

SEQ ID NO: 42190 - DNA, 20 bp, Human adenovirus
ccctgtagcgattcggaaga

SEQ ID NO: 42191 - DNA, 20 bp, Human adenovirus
cctgtagcgattcggaagac

SEQ ID NO: 42192 - DNA, 20 bp, Human adenovirus
tggatttgattcaagaggaa

SEQ ID NO: 42193 - DNA, 20 bp, Human adenovirus
ggatttgattcaagaggaag

SEQ ID NO: 42194 - DNA, 20 bp, Human adenovirus
gatttgattcaagaggaaga

SEQ ID NO: 42195 - DNA, 20 bp, Human adenovirus
gattcaagaggaagaaagag

SEQ ID NO: 42196 - DNA, 20 bp, Human adenovirus
attcaagaggaagaaagaga

SEQ ID NO: 42197 - DNA, 20 bp, Human adenovirus
tcagagcgttcgccagctct

SEQ ID NO: 42198 - DNA, 20 bp, Human adenovirus
cagagcgttcgccagctctt

SEQ ID NO: 42199 - DNA, 20 bp, Human adenovirus
agagcgttcgccagctcttg

SEQ ID NO: 42200 - DNA, 20 bp, Human adenovirus
gccagctcttgcagtatacc

SEQ ID NO: 42201 - DNA, 20 bp, Human adenovirus
cagtatacctctaaaaacac

SEQ ID NO: 42202 - DNA, 20 bp, Human adenovirus
gcatttactcgctggcgcgg

SEQ ID NO: 42203 - DNA, 20 bp, Human adenovirus
catttactcgctggcgcggc

SEQ ID NO: 42204 - DNA, 20 bp, Human adenovirus
actcgctggcgcggcctttg

SEQ ID NO: 42205 - DNA, 20 bp, Human adenovirus
ctcgctggcgcggcctttga

SEQ ID NO: 42206 - DNA, 20 bp, Human adenovirus
gaccatgccgccgctgccga

SEQ ID NO: 42207 - DNA, 20 bp, Human adenovirus
cgtcctgattgtagctacag

SEQ ID NO: 42208 - DNA, 20 bp, Human adenovirus
tagctacagaattactaaaa

SEQ ID NO: 42209 - DNA, 20 bp, Human adenovirus
ctaaaacagtaaccattact

SEQ ID NO: 42210 - DNA, 20 bp, Human adenovirus
cttcatgcgcctatattata

SEQ ID NO: 42211 - DNA, 20 bp, Human adenovirus
atgcgcctatattataggta

SEQ ID NO: 42212 - DNA, 20 bp, Human adenovirus
ggcataatgcagcttcagaa

SEQ ID NO: 42213 - DNA, 20 bp, Human adenovirus
agaaaatgcctgttttgtat

SEQ ID NO: 42214 - DNA, 20 bp, Human adenovirus
tgtattattgaagggaatgg

SEQ ID NO: 42215 - DNA, 20 bp, Human adenovirus
gtattattgaagggaatggc

SEQ ID NO: 42216 - DNA, 20 bp, Human adenovirus
tattattgaagggaatggct

SEQ ID NO: 42217 - DNA, 20 bp, Human adenovirus
tgctggaacctgaagtgttt

SEQ ID NO: 42218 - DNA, 20 bp, Human adenovirus
tctagagtgtgtttaaatgg

SEQ ID NO: 42219 - DNA, 20 bp, Human adenovirus
ctagagtgtgtttaaatggg

SEQ ID NO: 42220 - DNA, 20 bp, Human adenovirus
tagagtgtgtttaaatgggg

SEQ ID NO: 42221 - DNA, 20 bp, Human adenovirus
aaatggggtatttgatttat

SEQ ID NO: 42222 - DNA, 20 bp, Human adenovirus
atcaacattaacctatgcaa

SEQ ID NO: 42223 - DNA, 20 bp, Human adenovirus
acctatgcaactattggacc

SEQ ID NO: 42224 - DNA, 20 bp, Human adenovirus
gaccctcgcctttggatacc

SEQ ID NO: 42225 - DNA, 20 bp, Human adenovirus
ggataccgccgccgccgctg

SEQ ID NO: 42226 - DNA, 20 bp, Human adenovirus
gataccgccgccgccgctgc

SEQ ID NO: 42227 - DNA, 20 bp, Human adenovirus
cctatcattaagaacacggt

SEQ ID NO: 42228 - DNA, 20 bp, Human adenovirus
agaacacggtgaatgtgttc

SEQ ID NO: 42229 - DNA, 20 bp, Human adenovirus
cagtattttgtaaagatgag

SEQ ID NO: 42230 - DNA, 20 bp, Human adenovirus
tgtaaagatgagcctgtata

SEQ ID NO: 42231 - DNA, 20 bp, Human adenovirus
gtaaagatgagcctgtatat

SEQ ID NO: 42232 - DNA, 20 bp, Human adenovirus
cctgccaaatctcttcttgg

SEQ ID NO: 42233 - DNA, 20 bp, Human adenovirus
ttggattcatattgtggaga

SEQ ID NO: 42234 - DNA, 20 bp, Human adenovirus
gattcatattgtggagaacc

SEQ ID NO: 42235 - DNA, 20 bp, Human adenovirus
atattgtggagaaccacgaa

SEQ ID NO: 42236 - DNA, 20 bp, Human adenovirus
tggagaaccacgaaaacggt

SEQ ID NO: 42237 - DNA, 20 bp, Human adenovirus
cgcaacaactgagacttccc

SEQ ID NO: 42238 - DNA, 20 bp, Human adenovirus
ccacagccagtgggtccata

SEQ ID NO: 42239 - DNA, 20 bp, Human adenovirus
ccccaattacaggttgcaag

SEQ ID NO: 42240 - DNA, 20 bp, Human adenovirus
caggttgcaagtgatagttt

SEQ ID NO: 42241 - DNA, 20 bp, Human adenovirus
caagtgatagtttaacgagg

SEQ ID NO: 42242 - DNA, 20 bp, Human adenovirus
tattttctatgccatctcga

SEQ ID NO: 42243 - DNA, 20 bp, Human adenovirus
tctatgccatctcgatccag

SEQ ID NO: 42244 - DNA, 20 bp, Human adenovirus
ctatgccatctcgatccagc

SEQ ID NO: 42245 - DNA, 20 bp, Human adenovirus
tatgccatctcgatccagca

SEQ ID NO: 42246 - DNA, 20 bp, Human adenovirus
ctcgttgcgggggtttggct

SEQ ID NO: 42247 - DNA, 20 bp, Human adenovirus
agcccgtatttttcctttgg

SEQ ID NO: 42248 - DNA, 20 bp, Human adenovirus
gcccgtatttttcctttgga

SEQ ID NO: 42249 - DNA, 20 bp, Human adenovirus
ttcctttggaggtgctcccg

SEQ ID NO: 42250 - DNA, 20 bp, Human adenovirus
tcctttggaggtgctcccgc

SEQ ID NO: 42251 - DNA, 20 bp, Human adenovirus
cctttggaggtgctcccgca

SEQ ID NO: 42252 - DNA, 20 bp, Human adenovirus
agtggtattccgcggtcctc

SEQ ID NO: 42253 - DNA, 20 bp, Human adenovirus
cgcggtcctcctcgtacagg

SEQ ID NO: 42254 - DNA, 20 bp, Human adenovirus
tgaccactctgacacaaaag

SEQ ID NO: 42255 - DNA, 20 bp, Human adenovirus
ccatgtggcttcctttgtac

SEQ ID NO: 42256 - DNA, 20 bp, Human adenovirus
ctttgtacttgcttggacta

SEQ ID NO: 42257 - DNA, 20 bp, Human adenovirus
cttctgcttcgctgtttacg

SEQ ID NO: 42258 - DNA, 20 bp, Human adenovirus
ttctgcttcgctgtttacga

SEQ ID NO: 42259 - DNA, 20 bp, Human adenovirus
tgcttcgctgtttacgagcg

SEQ ID NO: 42260 - DNA, 20 bp, Human adenovirus
gctgtttacgagcgccaact

SEQ ID NO: 42261 - DNA, 20 bp, Human adenovirus
acgagcgccaactggttggg

SEQ ID NO: 42262 - DNA, 20 bp, Human adenovirus
cacatattcgcgtgccaggc

SEQ ID NO: 42263 - DNA, 20 bp, Human adenovirus
gcgtgccaggcatttccagg

SEQ ID NO: 42264 - DNA, 20 bp, Human adenovirus
ccaggtggggaaaatggtgg

SEQ ID NO: 42265 - DNA, 20 bp, Human adenovirus
caggtggggaaaatggtggt

SEQ ID NO: 42266 - DNA, 20 bp, Human adenovirus
tgcagtgtaaccagatctac

SEQ ID NO: 42267 - DNA, 20 bp, Human adenovirus
aggggaggaccccaaggcat

SEQ ID NO: 42268 - DNA, 20 bp, Human adenovirus
tagtactcctatgtaagtag

SEQ ID NO: 42269 - DNA, 20 bp, Human adenovirus
agtactcctatgtaagtagg

SEQ ID NO: 42270 - DNA, 20 bp, Human adenovirus
gtactcctatgtaagtagga

SEQ ID NO: 42271 - DNA, 20 bp, Human adenovirus
gcgccagcattcgtggcggc

SEQ ID NO: 42272 - DNA, 20 bp, Human adenovirus
cagtactcctccaggggaaa

SEQ ID NO: 42273 - DNA, 20 bp, Human adenovirus
gcatctgcacggtaagaacc

SEQ ID NO: 42274 - DNA, 20 bp, Human adenovirus
catctgcacggtaagaacca

SEQ ID NO: 42275 - DNA, 20 bp, Human adenovirus
accgccttgtacggacaaca

SEQ ID NO: 42276 - DNA, 20 bp, Human adenovirus
ccgccttgtacggacaacat

SEQ ID NO: 42277 - DNA, 20 bp, Human adenovirus
gaataaaatttctagaaatt

SEQ ID NO: 42278 - DNA, 20 bp, Human adenovirus
ctagaaattttaaagggtcc

SEQ ID NO: 42279 - DNA, 20 bp, Human adenovirus
tagaaattttaaagggtcca

SEQ ID NO: 42280 - DNA, 20 bp, Human adenovirus
taaagggtccagggacgtcc

SEQ ID NO: 42281 - DNA, 20 bp, Human adenovirus
aaagggtccagggacgtcca

SEQ ID NO: 42282 - DNA, 20 bp, Human adenovirus
accgaccttcattttttctg

SEQ ID NO: 42283 - DNA, 20 bp, Human adenovirus
attttttctggggttaagca

SEQ ID NO: 42284 - DNA, 20 bp, Human adenovirus
tttctggggttaagcagtag

SEQ ID NO: 42285 - DNA, 20 bp, Human adenovirus
ttctggggttaagcagtaga

SEQ ID NO: 42286 - DNA, 20 bp, Human adenovirus
tctggggttaagcagtagaa

SEQ ID NO: 42287 - DNA, 20 bp, Human adenovirus
atgctgatgtttgtaaaagc

SEQ ID NO: 42288 - DNA, 20 bp, Human adenovirus
gtaaaagcgtgcgcagtgtt

SEQ ID NO: 42289 - DNA, 20 bp, Human adenovirus
taaaagcgtgcgcagtgttc

SEQ ID NO: 42290 - DNA, 20 bp, Human adenovirus
gcatcgttgcacgggctgta

SEQ ID NO: 42291 - DNA, 20 bp, Human adenovirus
cacgggctgtatctgttgaa

SEQ ID NO: 42292 - DNA, 20 bp, Human adenovirus
ggatcctcgaaagcgagaac

SEQ ID NO: 42293 - DNA, 20 bp, Human adenovirus
gatcctcgaaagcgagaacg

SEQ ID NO: 42294 - DNA, 20 bp, Human adenovirus
cagcacgagaggggcggaaa

SEQ ID NO: 42295 - DNA, 20 bp, Human adenovirus
agcacgagaggggcggaaac

SEQ ID NO: 42296 - DNA, 20 bp, Human adenovirus
cccgtttccgcccctctcgt

SEQ ID NO: 42297 - DNA, 20 bp, Human adenovirus
tccaatgcgcctgcttaaaa

SEQ ID NO: 42298 - DNA, 20 bp, Human adenovirus
ccaatgcgcctgcttaaaat

SEQ ID NO: 42299 - DNA, 20 bp, Human adenovirus
caatgcgcctgcttaaaatc

SEQ ID NO: 42300 - DNA, 20 bp, Human adenovirus
aaatcggcggcgcggacgag

SEQ ID NO: 42301 - DNA, 20 bp, Human adenovirus
gggtcctgcgggaagcgggg

SEQ ID NO: 42302 - DNA, 20 bp, Human adenovirus
attgatcaatttcttcctcc

SEQ ID NO: 42303 - DNA, 20 bp, Human adenovirus
atcaatttcttcctcctgga

SEQ ID NO: 42304 - DNA, 20 bp, Human adenovirus
cttcctcctggaggtctcca

SEQ ID NO: 42305 - DNA, 20 bp, Human adenovirus
ttcctcctggaggtctccat

SEQ ID NO: 42306 - DNA, 20 bp, Human adenovirus
ctcctggaggtctccatgtc

SEQ ID NO: 42307 - DNA, 20 bp, Human adenovirus
gacgccggcgaacgggcagc

SEQ ID NO: 42308 - DNA, 20 bp, Human adenovirus
caatcatttcgccgcgacgg

SEQ ID NO: 42309 - DNA, 20 bp, Human adenovirus
aatcatttcgccgcgacggc

SEQ ID NO: 42310 - DNA, 20 bp, Human adenovirus
cgccgcgacggcggcgcata

SEQ ID NO: 42311 - DNA, 20 bp, Human adenovirus
gccgcgacggcggcgcatag

SEQ ID NO: 42312 - DNA, 20 bp, Human adenovirus
tgtttcttctaaagtaccag

SEQ ID NO: 42313 - DNA, 20 bp, Human adenovirus
gtttcttctaaagtaccagg

SEQ ID NO: 42314 - DNA, 20 bp, Human adenovirus
tttcttctaaagtaccagga

SEQ ID NO: 42315 - DNA, 20 bp, Human adenovirus
cttctaaagtaccaggaagc

SEQ ID NO: 42316 - DNA, 20 bp, Human adenovirus
ttctaaagtaccaggaagct

SEQ ID NO: 42317 - DNA, 20 bp, Human adenovirus
gggtaagggtggttgcaaag

SEQ ID NO: 42318 - DNA, 20 bp, Human adenovirus
ggtaagggtggttgcaaagt

SEQ ID NO: 42319 - DNA, 20 bp, Human adenovirus
caaagtcatccacatctaca

SEQ ID NO: 42320 - DNA, 20 bp, Human adenovirus
atggtgtagctgcagtttgt

SEQ ID NO: 42321 - DNA, 20 bp, Human adenovirus
gtcattactgaccaattaac

SEQ ID NO: 42322 - DNA, 20 bp, Human adenovirus
atatatgtatctggacatcc

SEQ ID NO: 42323 - DNA, 20 bp, Human adenovirus
ttgctcgcataaattcgcgg

SEQ ID NO: 42324 - DNA, 20 bp, Human adenovirus
ctcgcataaattcgcgggct

SEQ ID NO: 42325 - DNA, 20 bp, Human adenovirus
gcgggctcggttccaaatat

SEQ ID NO: 42326 - DNA, 20 bp, Human adenovirus
caaatattgcgcaggggtaa

SEQ ID NO: 42327 - DNA, 20 bp, Human adenovirus
gaaaccggcaggatccgcta

SEQ ID NO: 42328 - DNA, 20 bp, Human adenovirus
cgcgttgaacccggccaagg

SEQ ID NO: 42329 - DNA, 20 bp, Human adenovirus
aacccggccaaggaccccca

SEQ ID NO: 42330 - DNA, 20 bp, Human adenovirus
gccgggttcaacgcgcaagc

SEQ ID NO: 42331 - DNA, 20 bp, Human adenovirus
aacgcgcaagcgcctcactt

SEQ ID NO: 42332 - DNA, 20 bp, Human adenovirus
gtgcctcgtcagaacatgtt

SEQ ID NO: 42333 - DNA, 20 bp, Human adenovirus
tgcctcgtcagaacatgttt

SEQ ID NO: 42334 - DNA, 20 bp, Human adenovirus
cgcgacaacagcggggagga

SEQ ID NO: 42335 - DNA, 20 bp, Human adenovirus
gcgacaacagcggggaggaa

SEQ ID NO: 42336 - DNA, 20 bp, Human adenovirus
cctcagcttcctccccgctg

SEQ ID NO: 42337 - DNA, 20 bp, Human adenovirus
gtttaatgcatctttgggac

SEQ ID NO: 42338 - DNA, 20 bp, Human adenovirus
aatgcatctttgggactttg

SEQ ID NO: 42339 - DNA, 20 bp, Human adenovirus
atgcatctttgggactttgt

SEQ ID NO: 42340 - DNA, 20 bp, Human adenovirus
gggactttgtagaagcttat

SEQ ID NO: 42341 - DNA, 20 bp, Human adenovirus
ggactttgtagaagcttatg

SEQ ID NO: 42342 - DNA, 20 bp, Human adenovirus
tttgatatgggcgcagacct

SEQ ID NO: 42343 - DNA, 20 bp, Human adenovirus
gatatgggcgcagacctacg

SEQ ID NO: 42344 - DNA, 20 bp, Human adenovirus
atatgggcgcagacctacgg

SEQ ID NO: 42345 - DNA, 20 bp, Human adenovirus
ggaggcagctggagtggcgt

SEQ ID NO: 42346 - DNA, 20 bp, Human adenovirus
gaggcagctggagtggcgtc

SEQ ID NO: 42347 - DNA, 20 bp, Human adenovirus
accattgtaaatgctttgtt

SEQ ID NO: 42348 - DNA, 20 bp, Human adenovirus
taaatgctttgttggatagc

SEQ ID NO: 42349 - DNA, 20 bp, Human adenovirus
gttggatagcaaagccatcc

SEQ ID NO: 42350 - DNA, 20 bp, Human adenovirus
ttggatagcaaagccatccg

SEQ ID NO: 42351 - DNA, 20 bp, Human adenovirus
gatagcaaagccatccgcaa

SEQ ID NO: 42352 - DNA, 20 bp, Human adenovirus
ctgaagtgcctcaaagtgaa

SEQ ID NO: 42353 - DNA, 20 bp, Human adenovirus
cttttttcaaacgtccaggc

SEQ ID NO: 42354 - DNA, 20 bp, Human adenovirus
tttcaaacgtccaggcaggg

SEQ ID NO: 42355 - DNA, 20 bp, Human adenovirus
ttcaaacgtccaggcagggt

SEQ ID NO: 42356 - DNA, 20 bp, Human adenovirus
tcaaacgtccaggcagggtt

SEQ ID NO: 42357 - DNA, 20 bp, Human adenovirus
atggattaccttcaccgcgc

SEQ ID NO: 42358 - DNA, 20 bp, Human adenovirus
ccttcaccgcgctgcggcca

SEQ ID NO: 42359 - DNA, 20 bp, Human adenovirus
accgcgctgcggccatgaac

SEQ ID NO: 42360 - DNA, 20 bp, Human adenovirus
acaaatgcaattctaaatcc

SEQ ID NO: 42361 - DNA, 20 bp, Human adenovirus
caaatgcaattctaaatccg

SEQ ID NO: 42362 - DNA, 20 bp, Human adenovirus
gccctcctaggcaacgttgg

SEQ ID NO: 42363 - DNA, 20 bp, Human adenovirus
gcagcgacgcaaaaaagggg

SEQ ID NO: 42364 - DNA, 20 bp, Human adenovirus
cttcatcccccgcatgtgcc

SEQ ID NO: 42365 - DNA, 20 bp, Human adenovirus
atcccccgcatgtgcccctt

SEQ ID NO: 42366 - DNA, 20 bp, Human adenovirus
tttgcgtcgctgccaacgtt

SEQ ID NO: 42367 - DNA, 20 bp, Human adenovirus
gatgaaaggtctagatgggg

SEQ ID NO: 42368 - DNA, 20 bp, Human adenovirus
atgaaaggtctagatggggt

SEQ ID NO: 42369 - DNA, 20 bp, Human adenovirus
aaaaaccatcttacatacca

SEQ ID NO: 42370 - DNA, 20 bp, Human adenovirus
aaaaccatcttacataccaa

SEQ ID NO: 42371 - DNA, 20 bp, Human adenovirus
cataccaacatgccaaacgt

SEQ ID NO: 42372 - DNA, 20 bp, Human adenovirus
gagttaagtttgacaccaga

SEQ ID NO: 42373 - DNA, 20 bp, Human adenovirus
agtttgacaccagaaacttt

SEQ ID NO: 42374 - DNA, 20 bp, Human adenovirus
gacaccagaaactttcgtct

SEQ ID NO: 42375 - DNA, 20 bp, Human adenovirus
acaccagaaactttcgtctg

SEQ ID NO: 42376 - DNA, 20 bp, Human adenovirus
cgtctgggttgggaccccga

SEQ ID NO: 42377 - DNA, 20 bp, Human adenovirus
aaccggttgaaacagacccc

SEQ ID NO: 42378 - DNA, 20 bp, Human adenovirus
aaacagaccccaaaggacgc

SEQ ID NO: 42379 - DNA, 20 bp, Human adenovirus
caacttgcttccagacaaaa

SEQ ID NO: 42380 - DNA, 20 bp, Human adenovirus
cttccagacaaaaaaaatac

SEQ ID NO: 42381 - DNA, 20 bp, Human adenovirus
cagacaaaaaaaatactaaa

SEQ ID NO: 42382 - DNA, 20 bp, Human adenovirus
ccgagctccatggggcgcgc

SEQ ID NO: 42383 - DNA, 20 bp, Human adenovirus
gctagaccttgttttagctc

SEQ ID NO: 42384 - DNA, 20 bp, Human adenovirus
ttttagctcctccatacatg

SEQ ID NO: 42385 - DNA, 20 bp, Human adenovirus
tagctcctccatacatgcgg

SEQ ID NO: 42386 - DNA, 20 bp, Human adenovirus
agctcctccatacatgcggg

SEQ ID NO: 42387 - DNA, 20 bp, Human adenovirus
gacgggccaggcgcattggg

SEQ ID NO: 42388 - DNA, 20 bp, Human adenovirus
ggcggcgagctatgatgcgg

SEQ ID NO: 42389 - DNA, 20 bp, Human adenovirus
caaacctagctgctccgcga

SEQ ID NO: 42390 - DNA, 20 bp, Human adenovirus
cctcgtcgcggagcagctag

SEQ ID NO: 42391 - DNA, 20 bp, Human adenovirus
ctcgtcgcggagcagctagg

SEQ ID NO: 42392 - DNA, 20 bp, Human adenovirus
aaaaacgggaaaaaaaagag

SEQ ID NO: 42393 - DNA, 20 bp, Human adenovirus
gtgcgctcatttgcgcccag

SEQ ID NO: 42394 - DNA, 20 bp, Human adenovirus
tgcgctcatttgcgcccaga

SEQ ID NO: 42395 - DNA, 20 bp, Human adenovirus
gcgcccagacgtagggtaca

SEQ ID NO: 42396 - DNA, 20 bp, Human adenovirus
cgcccagacgtagggtacag

SEQ ID NO: 42397 - DNA, 20 bp, Human adenovirus
cagcctacaatgcaactgat

SEQ ID NO: 42398 - DNA, 20 bp, Human adenovirus
gaggacgtactagagcacat

SEQ ID NO: 42399 - DNA, 20 bp, Human adenovirus
catctggctgtacgctagga

SEQ ID NO: 42400 - DNA, 20 bp, Human adenovirus
atgtgctctagtacgtcctc

SEQ ID NO: 42401 - DNA, 20 bp, Human adenovirus
tgccgcttaggcaccatcag

SEQ ID NO: 42402 - DNA, 20 bp, Human adenovirus
tcagcgccgagccacagccc

SEQ ID NO: 42403 - DNA, 20 bp, Human adenovirus
cagcgccgagccacagcccc

SEQ ID NO: 42404 - DNA, 20 bp, Human adenovirus
agcgccgagccacagcccct

SEQ ID NO: 42405 - DNA, 20 bp, Human adenovirus
gcgtcgacgtctacggcgtg

SEQ ID NO: 42406 - DNA, 20 bp, Human adenovirus
cgtcgacgtctacggcgtga

SEQ ID NO: 42407 - DNA, 20 bp, Human adenovirus
caaccaaaggagaaaagcgg

SEQ ID NO: 42408 - DNA, 20 bp, Human adenovirus
ctaaggtttcctctgcatcc

SEQ ID NO: 42409 - DNA, 20 bp, Human adenovirus
cctctgcatccggccgtggc

SEQ ID NO: 42410 - DNA, 20 bp, Human adenovirus
ctctgcatccggccgtggcc

SEQ ID NO: 42411 - DNA, 20 bp, Human adenovirus
tctcctttggttggaacgga

SEQ ID NO: 42412 - DNA, 20 bp, Human adenovirus
caagatggccactccctcga

SEQ ID NO: 42413 - DNA, 20 bp, Human adenovirus
aagatggccactccctcgat

SEQ ID NO: 42414 - DNA, 20 bp, Human adenovirus
aaagcgctggtggtgactgc

SEQ ID NO: 42415 - DNA, 20 bp, Human adenovirus
gacatggctagttcttactt

SEQ ID NO: 42416 - DNA, 20 bp, Human adenovirus
ttactttgacattcgagggg

SEQ ID NO: 42417 - DNA, 20 bp, Human adenovirus
ctttgacattcgaggggtac

SEQ ID NO: 42418 - DNA, 20 bp, Human adenovirus
gacattcgaggggtactgga

SEQ ID NO: 42419 - DNA, 20 bp, Human adenovirus
acattcgaggggtactggat

SEQ ID NO: 42420 - DNA, 20 bp, Human adenovirus
aacttaagttctttgattca

SEQ ID NO: 42421 - DNA, 20 bp, Human adenovirus
agttctttgattcagctaac

SEQ ID NO: 42422 - DNA, 20 bp, Human adenovirus
tttgattcagctaacaatgc

SEQ ID NO: 42423 - DNA, 20 bp, Human adenovirus
gattcagctaacaatgcagc

SEQ ID NO: 42424 - DNA, 20 bp, Human adenovirus
attcagctaacaatgcagca

SEQ ID NO: 42425 - DNA, 20 bp, Human adenovirus
gggagacagaacacggtact

SEQ ID NO: 42426 - DNA, 20 bp, Human adenovirus
ggagacagaacacggtactt

SEQ ID NO: 42427 - DNA, 20 bp, Human adenovirus
tccttgtggaattccgcagt

SEQ ID NO: 42428 - DNA, 20 bp, Human adenovirus
ccttgtggaattccgcagtg

SEQ ID NO: 42429 - DNA, 20 bp, Human adenovirus
cttgtggaattccgcagtgg

SEQ ID NO: 42430 - DNA, 20 bp, Human adenovirus
tacctaccagacgacttaaa

SEQ ID NO: 42431 - DNA, 20 bp, Human adenovirus
aaatacactccaggaaacat

SEQ ID NO: 42432 - DNA, 20 bp, Human adenovirus
atgtactcgtaggtgttctt

SEQ ID NO: 42433 - DNA, 20 bp, Human adenovirus
ttgttatcaggtagttttat

SEQ ID NO: 42434 - DNA, 20 bp, Human adenovirus
ttatcaggtagttttatgtt

SEQ ID NO: 42435 - DNA, 20 bp, Human adenovirus
cgaatggaactttagaaagg

SEQ ID NO: 42436 - DNA, 20 bp, Human adenovirus
agaaaggatgtaaacatgat

SEQ ID NO: 42437 - DNA, 20 bp, Human adenovirus
gaaaggatgtaaacatgatt

SEQ ID NO: 42438 - DNA, 20 bp, Human adenovirus
ttcagagcacactgggaaat

SEQ ID NO: 42439 - DNA, 20 bp, Human adenovirus
agagcacactgggaaatgat

SEQ ID NO: 42440 - DNA, 20 bp, Human adenovirus
gtatactctggaaccattcc

SEQ ID NO: 42441 - DNA, 20 bp, Human adenovirus
tatactctggaaccattccc

SEQ ID NO: 42442 - DNA, 20 bp, Human adenovirus
cctatttagacggcaccttt

SEQ ID NO: 42443 - DNA, 20 bp, Human adenovirus
agacggcaccttttacctaa

SEQ ID NO: 42444 - DNA, 20 bp, Human adenovirus
gacggcaccttttacctaaa

SEQ ID NO: 42445 - DNA, 20 bp, Human adenovirus
caacataacaactcaggatt

SEQ ID NO: 42446 - DNA, 20 bp, Human adenovirus
aacataacaactcaggattc

SEQ ID NO: 42447 - DNA, 20 bp, Human adenovirus
gtgggatacctgggccccac

SEQ ID NO: 42448 - DNA, 20 bp, Human adenovirus
ccccgccaactatccctacc

SEQ ID NO: 42449 - DNA, 20 bp, Human adenovirus
gcggggtaagcttgtccctc

SEQ ID NO: 42450 - DNA, 20 bp, Human adenovirus
aagcgaacaggagctgacgg

SEQ ID NO: 42451 - DNA, 20 bp, Human adenovirus
ttcgagatctaggctgtgga

SEQ ID NO: 42452 - DNA, 20 bp, Human adenovirus
gagatctaggctgtggaccc

SEQ ID NO: 42453 - DNA, 20 bp, Human adenovirus
tttgggaacctttgacaaac

SEQ ID NO: 42454 - DNA, 20 bp, Human adenovirus
ttgggaacctttgacaaacg

SEQ ID NO: 42455 - DNA, 20 bp, Human adenovirus
tctgcagcgtgcggcctgtt

SEQ ID NO: 42456 - DNA, 20 bp, Human adenovirus
ctgcagcgtgcggcctgttt

SEQ ID NO: 42457 - DNA, 20 bp, Human adenovirus
tgcagcgtgcggcctgtttt

SEQ ID NO: 42458 - DNA, 20 bp, Human adenovirus
tgttgtatgttcttacacgc

SEQ ID NO: 42459 - DNA, 20 bp, Human adenovirus
gttgtatgttcttacacgct

SEQ ID NO: 42460 - DNA, 20 bp, Human adenovirus
ctgtactgcaaacgctgatg

SEQ ID NO: 42461 - DNA, 20 bp, Human adenovirus
tgtactgcaaacgctgatgc

SEQ ID NO: 42462 - DNA, 20 bp, Human adenovirus
aattctggaataacaagcct

SEQ ID NO: 42463 - DNA, 20 bp, Human adenovirus
tggaataacaagcctagggg

SEQ ID NO: 42464 - DNA, 20 bp, Human adenovirus
tctccccacagctggcgcac

SEQ ID NO: 42465 - DNA, 20 bp, Human adenovirus
ttgcccatgtcgcatgtgag

SEQ ID NO: 42466 - DNA, 20 bp, Human adenovirus
tgcccatgtcgcatgtgagg

SEQ ID NO: 42467 - DNA, 20 bp, Human adenovirus
gcccatgtcgcatgtgaggg

SEQ ID NO: 42468 - DNA, 20 bp, Human adenovirus
cccatgtcgcatgtgagggt

SEQ ID NO: 42469 - DNA, 20 bp, Human adenovirus
aatttgcctaaaagctattt

SEQ ID NO: 42470 - DNA, 20 bp, Human adenovirus
gcgctcggtacacttatgct

SEQ ID NO: 42471 - DNA, 20 bp, Human adenovirus
tgctcccacacgcagcaacc

SEQ ID NO: 42472 - DNA, 20 bp, Human adenovirus
ccaggaattctgttggacac

SEQ ID NO: 42473 - DNA, 20 bp, Human adenovirus
tgttggacaccggcataagc

SEQ ID NO: 42474 - DNA, 20 bp, Human adenovirus
gacaccggcataagcttgca

SEQ ID NO: 42475 - DNA, 20 bp, Human adenovirus
ccaagctgaaactaggggct

SEQ ID NO: 42476 - DNA, 20 bp, Human adenovirus
ccggattgcgaacaacaaca

SEQ ID NO: 42477 - DNA, 20 bp, Human adenovirus
cgaacaacaacaacattctt

SEQ ID NO: 42478 - DNA, 20 bp, Human adenovirus
ttttcattttcgtcgctgtt

SEQ ID NO: 42479 - DNA, 20 bp, Human adenovirus
tcattttcgtcgctgttttg

SEQ ID NO: 42480 - DNA, 20 bp, Human adenovirus
agcagaacttgggctacgag

SEQ ID NO: 42481 - DNA, 20 bp, Human adenovirus
ggctacgagactccccccga

SEQ ID NO: 42482 - DNA, 20 bp, Human adenovirus
gaaggctttcttcaaatcca

SEQ ID NO: 42483 - DNA, 20 bp, Human adenovirus
aaggctttcttcaaatccaa

SEQ ID NO: 42484 - DNA, 20 bp, Human adenovirus
cttcaaatccaaaagcaacc

SEQ ID NO: 42485 - DNA, 20 bp, Human adenovirus
tctttaaaaatcacaaaata

SEQ ID NO: 42486 - DNA, 20 bp, Human adenovirus
ctttaaaaatcacaaaatac

SEQ ID NO: 42487 - DNA, 20 bp, Human adenovirus
tttaaaaatcacaaaatacc

SEQ ID NO: 42488 - DNA, 20 bp, Human adenovirus
aaaaatcacaaaatacccct

SEQ ID NO: 42489 - DNA, 20 bp, Human adenovirus
aaaatcacaaaataccccta

SEQ ID NO: 42490 - DNA, 20 bp, Human adenovirus
agcgagcccaacccattgac

SEQ ID NO: 42491 - DNA, 20 bp, Human adenovirus
acaaagatgcaaacttgcaa

SEQ ID NO: 42492 - DNA, 20 bp, Human adenovirus
caagacccggaggcaacaga

SEQ ID NO: 42493 - DNA, 20 bp, Human adenovirus
taagcgacgagcaattaact

SEQ ID NO: 42494 - DNA, 20 bp, Human adenovirus
actaagtggttgggaacaga

SEQ ID NO: 42495 - DNA, 20 bp, Human adenovirus
catacctggcaaactgggat

SEQ ID NO: 42496 - DNA, 20 bp, Human adenovirus
ggcagcaatgcttggaagaa

SEQ ID NO: 42497 - DNA, 20 bp, Human adenovirus
gcagcaatgcttggaagaaa

SEQ ID NO: 42498 - DNA, 20 bp, Human adenovirus
gaagaaaaaaaccttcgaga

SEQ ID NO: 42499 - DNA, 20 bp, Human adenovirus
gagaactaaacaaactgtta

SEQ ID NO: 42500 - DNA, 20 bp, Human adenovirus
gtaccttcgaaatgcaggga

SEQ ID NO: 42501 - DNA, 20 bp, Human adenovirus
gaaatgcagggaccgcagtc

SEQ ID NO: 42502 - DNA, 20 bp, Human adenovirus
cacgacgaacctaagactta

SEQ ID NO: 42503 - DNA, 20 bp, Human adenovirus
acgacgaacctaagacttac

SEQ ID NO: 42504 - DNA, 20 bp, Human adenovirus
cccctgggctttggacttct

SEQ ID NO: 42505 - DNA, 20 bp, Human adenovirus
gcagcatgtccccgaaagcc

SEQ ID NO: 42506 - DNA, 20 bp, Human adenovirus
cgcagcaacgctcaaagaaa

SEQ ID NO: 42507 - DNA, 20 bp, Human adenovirus
ttcctcccagatttcctgcc

SEQ ID NO: 42508 - DNA, 20 bp, Human adenovirus
ctcccagatttcctgccgtt

SEQ ID NO: 42509 - DNA, 20 bp, Human adenovirus
cctgccgttgctgctgtttc

SEQ ID NO: 42510 - DNA, 20 bp, Human adenovirus
ggtaagaatcgcaagcaggc

SEQ ID NO: 42511 - DNA, 20 bp, Human adenovirus
tagcctgctttcagcactgc

SEQ ID NO: 42512 - DNA, 20 bp, Human adenovirus
cagcactgcggggggaatat

SEQ ID NO: 42513 - DNA, 20 bp, Human adenovirus
agcactgcggggggaatatc

SEQ ID NO: 42514 - DNA, 20 bp, Human adenovirus
gcaaggcggtatttgctata

SEQ ID NO: 42515 - DNA, 20 bp, Human adenovirus
atatgctatttttcagcaga

SEQ ID NO: 42516 - DNA, 20 bp, Human adenovirus
tatgctatttttcagcagag

SEQ ID NO: 42517 - DNA, 20 bp, Human adenovirus
ttcagcagagtcgaggtcaa

SEQ ID NO: 42518 - DNA, 20 bp, Human adenovirus
tcagcagagtcgaggtcaag

SEQ ID NO: 42519 - DNA, 20 bp, Human adenovirus
cagcagagtcgaggtcaaga

SEQ ID NO: 42520 - DNA, 20 bp, Human adenovirus
accctccctcttggccagct

SEQ ID NO: 42521 - DNA, 20 bp, Human adenovirus
gccagctgccctgatatatc

SEQ ID NO: 42522 - DNA, 20 bp, Human adenovirus
tcctgatatatcagggcagc

SEQ ID NO: 42523 - DNA, 20 bp, Human adenovirus
cctgatatatcagggcagct

SEQ ID NO: 42524 - DNA, 20 bp, Human adenovirus
ctgatatatcagggcagctg

SEQ ID NO: 42525 - DNA, 20 bp, Human adenovirus
actttatattgcatttgtcc

SEQ ID NO: 42526 - DNA, 20 bp, Human adenovirus
atattgcatttgtcctgttc

SEQ ID NO: 42527 - DNA, 20 bp, Human adenovirus
tattgcatttgtcctgttcc

SEQ ID NO: 42528 - DNA, 20 bp, Human adenovirus
catttgtcctgttcccggat

SEQ ID NO: 42529 - DNA, 20 bp, Human adenovirus
gtcctgttcccggattacat

SEQ ID NO: 42530 - DNA, 20 bp, Human adenovirus
tttgttgctccagttattga

SEQ ID NO: 42531 - DNA, 20 bp, Human adenovirus
ttgttgctccagttattgac

SEQ ID NO: 42532 - DNA, 20 bp, Human adenovirus
tgttgctccagttattgaca

SEQ ID NO: 42533 - DNA, 20 bp, Human adenovirus
gttgctccagttattgacaa

SEQ ID NO: 42534 - DNA, 20 bp, Human adenovirus
ttgctccagttattgacaaa

SEQ ID NO: 42535 - DNA, 20 bp, Human adenovirus
gtattcatactaacaatgct

SEQ ID NO: 42536 - DNA, 20 bp, Human adenovirus
tattcatactaacaatgctt

SEQ ID NO: 42537 - DNA, 20 bp, Human adenovirus
atactaacaatgctttccat

SEQ ID NO: 42538 - DNA, 20 bp, Human adenovirus
ccatttttcttttatttctc

SEQ ID NO: 42539 - DNA, 20 bp, Human adenovirus
catttttcttttatttctct

SEQ ID NO: 42540 - DNA, 20 bp, Human adenovirus
ccccaataaggttgtgttta

SEQ ID NO: 42541 - DNA, 20 bp, Human adenovirus
tgtttaataatgtcagtcga

SEQ ID NO: 42542 - DNA, 20 bp, Human adenovirus
aataatgtcagtcgatggta

SEQ ID NO: 42543 - DNA, 20 bp, Human adenovirus
ataatgtcagtcgatggtac

SEQ ID NO: 42544 - DNA, 20 bp, Human adenovirus
ccaactactttataactaac

SEQ ID NO: 42545 - DNA, 20 bp, Human adenovirus
cttactagttttcttttttc

SEQ ID NO: 42546 - DNA, 20 bp, Human adenovirus
ctagttttcttttttcttac

SEQ ID NO: 42547 - DNA, 20 bp, Human adenovirus
tcttttttcttacagtatgg

SEQ ID NO: 42548 - DNA, 20 bp, Human adenovirus
cttttttcttacagtatggt

SEQ ID NO: 42549 - DNA, 20 bp, Human adenovirus
ttttttcttacagtatggtg

SEQ ID NO: 42550 - DNA, 20 bp, Human adenovirus
attttagttggaataagtat

SEQ ID NO: 42551 - DNA, 20 bp, Human adenovirus
tagttggaataagtatactg

SEQ ID NO: 42552 - DNA, 20 bp, Human adenovirus
agttggaataagtatactga

SEQ ID NO: 42553 - DNA, 20 bp, Human adenovirus
gttggaataagtatactgat

SEQ ID NO: 42554 - DNA, 20 bp, Human adenovirus
gaataagtatactgatgatc

SEQ ID NO: 42555 - DNA, 20 bp, Human adenovirus
gctatgaatctttaccaggc

SEQ ID NO: 42556 - DNA, 20 bp, Human adenovirus
accaggcaaagaacatcaac

SEQ ID NO: 42557 - DNA, 20 bp, Human adenovirus
ccaggcaaagaacatcaact

SEQ ID NO: 42558 - DNA, 20 bp, Human adenovirus
cagtaaaggtttgtcgctga

SEQ ID NO: 42559 - DNA, 20 bp, Human adenovirus
gtcgctgagtgggcagcgtg

SEQ ID NO: 42560 - DNA, 20 bp, Human adenovirus
taaaatttccctcttcccaa

SEQ ID NO: 42561 - DNA, 20 bp, Human adenovirus
ccctcttcccaactgtcaaa

SEQ ID NO: 42562 - DNA, 20 bp, Human adenovirus
cctcttcccaactgtcaaac

SEQ ID NO: 42563 - DNA, 20 bp, Human adenovirus
ccaactgtcaaacctgacag

SEQ ID NO: 42564 - DNA, 20 bp, Human adenovirus
caaacagcaaactttctcca

SEQ ID NO: 42565 - DNA, 20 bp, Human adenovirus
cagctagtaataatatcaat

SEQ ID NO: 42566 - DNA, 20 bp, Human adenovirus
tggagccccttaccaacacc

SEQ ID NO: 42567 - DNA, 20 bp, Human adenovirus
ggagccccttaccaacacct

SEQ ID NO: 42568 - DNA, 20 bp, Human adenovirus
gagccccttaccaacacctc

SEQ ID NO: 42569 - DNA, 20 bp, Human adenovirus
ccaacacctcacaaggtctt

SEQ ID NO: 42570 - DNA, 20 bp, Human adenovirus
ctactgcagaccccataagt

SEQ ID NO: 42571 - DNA, 20 bp, Human adenovirus
gcaacaacgctcttacccta

SEQ ID NO: 42572 - DNA, 20 bp, Human adenovirus
ccctacctacggcagatccg

SEQ ID NO: 42573 - DNA, 20 bp, Human adenovirus
atggtgagctccgatgggtt

SEQ ID NO: 42574 - DNA, 20 bp, Human adenovirus
ggaataagtgtcactagtcc

SEQ ID NO: 42575 - DNA, 20 bp, Human adenovirus
ccgggggaatgagaacttct

SEQ ID NO: 42576 - DNA, 20 bp, Human adenovirus
tggcggtagaataattttag

SEQ ID NO: 42577 - DNA, 20 bp, Human adenovirus
tagatgttaattatcccttt

SEQ ID NO: 42578 - DNA, 20 bp, Human adenovirus
agatgttaattatccctttg

SEQ ID NO: 42579 - DNA, 20 bp, Human adenovirus
gatgttaattatccctttga

SEQ ID NO: 42580 - DNA, 20 bp, Human adenovirus
agtgtttgatgaacagggaa

SEQ ID NO: 42581 - DNA, 20 bp, Human adenovirus
gtgtttgatgaacagggaag

SEQ ID NO: 42582 - DNA, 20 bp, Human adenovirus
gatgaacagggaagattaat

SEQ ID NO: 42583 - DNA, 20 bp, Human adenovirus
atgaacagggaagattaatc

SEQ ID NO: 42584 - DNA, 20 bp, Human adenovirus
atcacatcaacccctactgc

SEQ ID NO: 42585 - DNA, 20 bp, Human adenovirus
tcttacattacccaagaata

SEQ ID NO: 42586 - DNA, 20 bp, Human adenovirus
cttacattacccaagaataa

SEQ ID NO: 42587 - DNA, 20 bp, Human adenovirus
ttacattacccaagaataaa

SEQ ID NO: 42588 - DNA, 20 bp, Human adenovirus
cattacccaagaataaaaac

SEQ ID NO: 42589 - DNA, 20 bp, Human adenovirus
cccaagaataaaaacacaca

SEQ ID NO: 42590 - DNA, 20 bp, Human adenovirus
cccatccaaaaccaggtcca

SEQ ID NO: 42591 - DNA, 20 bp, Human adenovirus
tatcctacaaaaagtaacaa

SEQ ID NO: 42592 - DNA, 20 bp, Human adenovirus
atcctacaaaaagtaacaac

SEQ ID NO: 42593 - DNA, 20 bp, Human adenovirus
tcctacaaaaagtaacaaca

SEQ ID NO: 42594 - DNA, 20 bp, Human adenovirus
tctcgttgattataatctcc

SEQ ID NO: 42595 - DNA, 20 bp, Human adenovirus
tgaaccagcgtcccaaaagc

SEQ ID NO: 42596 - DNA, 20 bp, Human adenovirus
gaaccagcgtcccaaaagca

SEQ ID NO: 42597 - DNA, 20 bp, Human adenovirus
aaccagcgtcccaaaagcat

SEQ ID NO: 42598 - DNA, 20 bp, Human adenovirus
ttcattgtcattgccagcgt

SEQ ID NO: 42599 - DNA, 20 bp, Human adenovirus
attgtcattgccagcgtccg

SEQ ID NO: 42600 - DNA, 20 bp, Human adenovirus
tccgaagtactcaacgtagc

SEQ ID NO: 42601 - DNA, 20 bp, Human adenovirus
ccgaagtactcaacgtagct

SEQ ID NO: 42602 - DNA, 20 bp, Human adenovirus
cgaagtactcaacgtagctt

SEQ ID NO: 42603 - DNA, 20 bp, Human adenovirus
tgactgttcctcacagggcg

SEQ ID NO: 42604 - DNA, 20 bp, Human adenovirus
gactgttcctcacagggcgg

SEQ ID NO: 42605 - DNA, 20 bp, Human adenovirus
gaatgcgtaaatctcgcagg

SEQ ID NO: 42606 - DNA, 20 bp, Human adenovirus
aatgcgtaaatctcgcaggt

SEQ ID NO: 42607 - DNA, 20 bp, Human adenovirus
caatttgatctggctgtgat

SEQ ID NO: 42608 - DNA, 20 bp, Human adenovirus
gatctggctgtgatctttca

SEQ ID NO: 42609 - DNA, 20 bp, Human adenovirus
atctggctgtgatctttcac

SEQ ID NO: 42610 - DNA, 20 bp, Human adenovirus
gtctcgcagctgacatctta

SEQ ID NO: 42611 - DNA, 20 bp, Human adenovirus
atgccagttgtataaaatca

SEQ ID NO: 42612 - DNA, 20 bp, Human adenovirus
tataaaatcatacaaatcag

SEQ ID NO: 42613 - DNA, 20 bp, Human adenovirus
acctccaggtacaagttccg

SEQ ID NO: 42614 - DNA, 20 bp, Human adenovirus
tacctggaggtgaactttct

SEQ ID NO: 42615 - DNA, 20 bp, Human adenovirus
aggttagcctgaaaaataaa

SEQ ID NO: 42616 - DNA, 20 bp, Human adenovirus
ggttagcctgaaaaataaaa

SEQ ID NO: 42617 - DNA, 20 bp, Human adenovirus
gcctgaaaaataaaaatatg

SEQ ID NO: 42618 - DNA, 20 bp, Human adenovirus
aattaaagatgcctggcaaa

SEQ ID NO: 42619 - DNA, 20 bp, Human adenovirus
aagatgcctggcaaacgggt

SEQ ID NO: 42620 - DNA, 20 bp, Human adenovirus
gcaggagaaaataacacata

SEQ ID NO: 42621 - DNA, 20 bp, Human adenovirus
gagtcgccctcttgtttagg

SEQ ID NO: 42622 - DNA, 20 bp, Human adenovirus
tttaggcaacatagccccag

SEQ ID NO: 42623 - DNA, 20 bp, Human adenovirus
aggcaacatagccccaggtc

SEQ ID NO: 42624 - DNA, 20 bp, Human adenovirus
ggcaacatagccccaggtcc

SEQ ID NO: 42625 - DNA, 20 bp, Human rhinovirus
acccgaggcgaaaagtgagg

SEQ ID NO: 42626 - DNA, 20 bp, Human rhinovirus
tcgttatccgcaaagtgcct

SEQ ID NO: 42627 - DNA, 20 bp, Human rhinovirus
tccgcaaagtgcctacgaga

SEQ ID NO: 42628 - DNA, 20 bp, Human rhinovirus
tgaagcctatggctggtcgc

SEQ ID NO: 42629 - DNA, 20 bp, Human rhinovirus
gaagcctatggctggtcgct

SEQ ID NO: 42630 - DNA, 20 bp, Human rhinovirus
actcaacccgtggctgatgt

SEQ ID NO: 42631 - DNA, 20 bp, Human rhinovirus
atgtctccctcagttgaggc

SEQ ID NO: 42632 - DNA, 20 bp, Human rhinovirus
aggcttgtgggttttccgat

SEQ ID NO: 42633 - DNA, 20 bp, Human rhinovirus
tgggttttccgataggctca

SEQ ID NO: 42634 - DNA, 20 bp, Human rhinovirus
tccgataggctcaagcaaat

SEQ ID NO: 42635 - DNA, 20 bp, Human rhinovirus
ttcacactcaatgcaacgcc

SEQ ID NO: 42636 - DNA, 20 bp, Human rhinovirus
acactcaatgcaacgccacc

SEQ ID NO: 42637 - DNA, 20 bp, Human rhinovirus
cacagtggatgtttgttggt

SEQ ID NO: 42638 - DNA, 20 bp, Human rhinovirus
acagtggatgtttgttggtg

SEQ ID NO: 42639 - DNA, 20 bp, Human rhinovirus
gttggtggcagtggtgcctg

SEQ ID NO: 42640 - DNA, 20 bp, Human rhinovirus
tcaggagctagacaggccat

SEQ ID NO: 42641 - DNA, 20 bp, Human rhinovirus
caggagctagacaggccatt

SEQ ID NO: 42642 - DNA, 20 bp, Human rhinovirus
aggagctagacaggccatta

SEQ ID NO: 42643 - DNA, 20 bp, Human rhinovirus
aagctaccgcacagggtcta

SEQ ID NO: 42644 - DNA, 20 bp, Human rhinovirus
atgacaacagaagatgaaca

SEQ ID NO: 42645 - DNA, 20 bp, Human rhinovirus
ttgtcccctggattagctcc

SEQ ID NO: 42646 - DNA, 20 bp, Human rhinovirus
tcccctggattagctcccat

SEQ ID NO: 42647 - DNA, 20 bp, Human rhinovirus
gctcccatttcttcagaaga

SEQ ID NO: 42648 - DNA, 20 bp, Human rhinovirus
cttcagaagaacaaagaaag

SEQ ID NO: 42649 - DNA, 20 bp, Human rhinovirus
ttcagaagaacaaagaaaga

SEQ ID NO: 42650 - DNA, 20 bp, Human rhinovirus
ctgggtaggtctgccctatg

SEQ ID NO: 42651 - DNA, 20 bp, Human rhinovirus
tgggtaggtctgccctatgg

SEQ ID NO: 42652 - DNA, 20 bp, Human rhinovirus
cacactagataggagcttca

SEQ ID NO: 42653 - DNA, 20 bp, Human rhinovirus
acactagataggagcttcaa

SEQ ID NO: 42654 - DNA, 20 bp, Human rhinovirus
aagagctggaaaataaactt

SEQ ID NO: 42655 - DNA, 20 bp, Human rhinovirus
gattcctcgaccacccagag

SEQ ID NO: 42656 - DNA, 20 bp, Human rhinovirus
ctcgaccacccagagccacc

SEQ ID NO: 42657 - DNA, 20 bp, Human rhinovirus
agtaccaattacaacaagca

SEQ ID NO: 42658 - DNA, 20 bp, Human rhinovirus
gtaccaattacaacaagcaa

SEQ ID NO: 42659 - DNA, 20 bp, Human rhinovirus
caacaagcaaaagccagata

SEQ ID NO: 42660 - DNA, 20 bp, Human rhinovirus
tggtggcaaattgttgtgtg

SEQ ID NO: 42661 - DNA, 20 bp, Human rhinovirus
ttgtgtgtacatggaaccat

SEQ ID NO: 42662 - DNA, 20 bp, Human rhinovirus
tgtgtacatggaaccatagg

SEQ ID NO: 42663 - DNA, 20 bp, Human rhinovirus
tctccacctgcagtcaccat

SEQ ID NO: 42664 - DNA, 20 bp, Human rhinovirus
ctccacctgcagtcaccatc

SEQ ID NO: 42665 - DNA, 20 bp, Human rhinovirus
tgcaatgcagctcgtggctt

SEQ ID NO: 42666 - DNA, 20 bp, Human rhinovirus
gcaatgcagctcgtggcttg

SEQ ID NO: 42667 - DNA, 20 bp, Human rhinovirus
caatgcagctcgtggcttgg

SEQ ID NO: 42668 - DNA, 20 bp, Human rhinovirus
gaatggattggtgacaagtt

SEQ ID NO: 42669 - DNA, 20 bp, Human rhinovirus
gtgacaagttatccaagttc

SEQ ID NO: 42670 - DNA, 20 bp, Human rhinovirus
gtcaaaatccagatggaaga

SEQ ID NO: 42671 - DNA, 20 bp, Human rhinovirus
tgtcagatggtttcaagcac

SEQ ID NO: 42672 - DNA, 20 bp, Human rhinovirus
gtcagatggtttcaagcact

SEQ ID NO: 42673 - DNA, 20 bp, Human rhinovirus
tcagatggtttcaagcactg

SEQ ID NO: 42674 - DNA, 20 bp, Human rhinovirus
caagcactgaattcataaca

SEQ ID NO: 42675 - DNA, 20 bp, Human rhinovirus
cagggtctgggagatgattc

SEQ ID NO: 42676 - DNA, 20 bp, Human rhinovirus
aactccggggttcattgtag

SEQ ID NO: 42677 - DNA, 20 bp, Human rhinovirus
attgtagatcttcttagtgc

SEQ ID NO: 42678 - DNA, 20 bp, Human rhinovirus
tagatcttcttagtgcctcc

SEQ ID NO: 42679 - DNA, 20 bp, Human rhinovirus
ttagtgcctccaaagaccca

SEQ ID NO: 42680 - DNA, 20 bp, Human rhinovirus
atggtgttgaaaccaaagtt

SEQ ID NO: 42681 - DNA, 20 bp, Human rhinovirus
aaaccaaagttctaaaacaa

SEQ ID NO: 42682 - DNA, 20 bp, Human rhinovirus
taaaacaaacaattgtcaca

SEQ ID NO: 42683 - DNA, 20 bp, Human rhinovirus
tcacagatgaaaatgatgtg

SEQ ID NO: 42684 - DNA, 20 bp, Human rhinovirus
tgtggctagatcgaaatgaa

SEQ ID NO: 42685 - DNA, 20 bp, Human rhinovirus
tatgatatattccccggtga

SEQ ID NO: 42686 - DNA, 20 bp, Human rhinovirus
atgatatattccccggtgaa

SEQ ID NO: 42687 - DNA, 20 bp, Human rhinovirus
tgatatattccccggtgaaa

SEQ ID NO: 42688 - DNA, 20 bp, Human rhinovirus
cccggtgaaaaagaacccgc

SEQ ID NO: 42689 - DNA, 20 bp, Human rhinovirus
acccagaaagatcctagact

SEQ ID NO: 42690 - DNA, 20 bp, Human rhinovirus
agaagggtgtttggtaatct

SEQ ID NO: 42691 - DNA, 20 bp, Human rhinovirus
ggtaatctctatgctggctt

SEQ ID NO: 42692 - DNA, 20 bp, Human rhinovirus
gtaatctctatgctggcttc

SEQ ID NO: 42693 - DNA, 20 bp, Human rhinovirus
catgcaaacccaggaatcct

SEQ ID NO: 42694 - DNA, 20 bp, Human rhinovirus
ctgggtttgcatggaagcca

SEQ ID NO: 42695 - DNA, 20 bp, Human rhinovirus
acccagcacagatagccgtt

SEQ ID NO: 42696 - DNA, 20 bp, Human rhinovirus
ctggcctcaaatatggattg

SEQ ID NO: 42697 - DNA, 20 bp, Human rhinovirus
tggcctcaaatatggattga

SEQ ID NO: 42698 - DNA, 20 bp, Human rhinovirus
acaataacacctgctgacaa

SEQ ID NO: 42699 - DNA, 20 bp, Human rhinovirus
cacaaattgatcagacttgt

SEQ ID NO: 42700 - DNA, 20 bp, Human papillomavirus type 4
gacgacttctgcagacgatt

SEQ ID NO: 42701 - DNA, 20 bp, Human papillomavirus type 4
tgcagacgattcgacatttc

SEQ ID NO: 42702 - DNA, 20 bp, Human papillomavirus type 4
gacatttccttttttgattt

SEQ ID NO: 42703 - DNA, 20 bp, Human papillomavirus type 4
ccttttttgatttgcgcctt

SEQ ID NO: 42704 - DNA, 20 bp, Human papillomavirus type 4
cttttttgatttgcgcctta

SEQ ID NO: 42705 - DNA, 20 bp, Human papillomavirus type 4
caatcttcagatgatgagta

SEQ ID NO: 42706 - DNA, 20 bp, Human papillomavirus type 4
agatgatgagtatgagatta

SEQ ID NO: 42707 - DNA, 20 bp, Human papillomavirus type 4
cagaggaggagtcggtggtt

SEQ ID NO: 42708 - DNA, 20 bp, Human papillomavirus type 4
catttagaatagacacctgt

SEQ ID NO: 42709 - DNA, 20 bp, Human papillomavirus type 4
agaatagacacctgttgcta

SEQ ID NO: 42710 - DNA, 20 bp, Human papillomavirus type 4
tgacttagaagggaataatt

SEQ ID NO: 42711 - DNA, 20 bp, Human papillomavirus type 4
gacttagaagggaataattg

SEQ ID NO: 42712 - DNA, 20 bp, Human papillomavirus type 4
acttagaagggaataattgg

SEQ ID NO: 42713 - DNA, 20 bp, Human papillomavirus type 4
gaagggaataattggtatat

SEQ ID NO: 42714 - DNA, 20 bp, Human papillomavirus type 4
gtatattgtccatgaagcag

SEQ ID NO: 42715 - DNA, 20 bp, Human papillomavirus type 4
agtccgcagttgcaggctgt

SEQ ID NO: 42716 - DNA, 20 bp, Human papillomavirus type 4
caggctgtgaaaataactcc

SEQ ID NO: 42717 - DNA, 20 bp, Human papillomavirus type 4
tttcaggacagtgggatttt

SEQ ID NO: 42718 - DNA, 20 bp, Human papillomavirus type 4
caggacagtgggattttcga

SEQ ID NO: 42719 - DNA, 20 bp, Human papillomavirus type 4
tgctgtgtctttcaggagtt

SEQ ID NO: 42720 - DNA, 20 bp, Human papillomavirus type 4
cgaagtgtacccacagcatt

SEQ ID NO: 42721 - DNA, 20 bp, Human papillomavirus type 4
tacttttataagcatgctat

SEQ ID NO: 42722 - DNA, 20 bp, Human papillomavirus type 4
tataagcatgctatgttaac

SEQ ID NO: 42723 - DNA, 20 bp, Human papillomavirus type 4
ataagcatgctatgttaaca

SEQ ID NO: 42724 - DNA, 20 bp, Human papillomavirus type 4
taagcatgctatgttaacag

SEQ ID NO: 42725 - DNA, 20 bp, Human papillomavirus type 4
cgatgcacttcaagaagcaa

SEQ ID NO: 42726 - DNA, 20 bp, Human papillomavirus type 4
gatgcacttcaagaagcaat

SEQ ID NO: 42727 - DNA, 20 bp, Human papillomavirus type 4
aagaagcaattctgactcat

SEQ ID NO: 42728 - DNA, 20 bp, Human papillomavirus type 4
tgactcatattgagtcacag

SEQ ID NO: 42729 - DNA, 20 bp, Human papillomavirus type 4
agtcacaggagagcactttg

SEQ ID NO: 42730 - DNA, 20 bp, Human papillomavirus type 4
cattatttagctctgatgct

SEQ ID NO: 42731 - DNA, 20 bp, Human papillomavirus type 4
tttagctctgatgctcaaag

SEQ ID NO: 42732 - DNA, 20 bp, Human papillomavirus type 4
agctctgatgctcaaagatt

SEQ ID NO: 42733 - DNA, 20 bp, Human papillomavirus type 4
gctctgatgctcaaagattt

SEQ ID NO: 42734 - DNA, 20 bp, Human papillomavirus type 4
agcagaactggactgtggac

SEQ ID NO: 42735 - DNA, 20 bp, Human papillomavirus type 4
ctcctcctcttcttcttttg

SEQ ID NO: 42736 - DNA, 20 bp, Human papillomavirus type 4
ttcttttgcggggggtttct

SEQ ID NO: 42737 - DNA, 20 bp, Human papillomavirus type 4
ttttgcggggggtttctcct

SEQ ID NO: 42738 - DNA, 20 bp, Human papillomavirus type 4
tgcggggggtttctcctgac

SEQ ID NO: 42739 - DNA, 20 bp, Human papillomavirus type 4
gcggggggtttctcctgacc

SEQ ID NO: 42740 - DNA, 20 bp, Human papillomavirus type 4
tttgaaatgttggagatata

SEQ ID NO: 42741 - DNA, 20 bp, Human papillomavirus type 4
gaaatgttggagatatagaa

SEQ ID NO: 42742 - DNA, 20 bp, Human papillomavirus type 4
aaatgttggagatatagaaa

SEQ ID NO: 42743 - DNA, 20 bp, Human papillomavirus type 4
gagatatagaaaagttaact

SEQ ID NO: 42744 - DNA, 20 bp, Human papillomavirus type 4
actcaaattgctgcaacttc

SEQ ID NO: 42745 - DNA, 20 bp, Human papillomavirus type 4
ctgatcgtttgctgagatgg

SEQ ID NO: 42746 - DNA, 20 bp, Human papillomavirus type 4
gctgagatggttgggaagtg

SEQ ID NO: 42747 - DNA, 20 bp, Human papillomavirus type 4
ctgagatggttgggaagtgt

SEQ ID NO: 42748 - DNA, 20 bp, Human papillomavirus type 4
ggaagtgtaatatacctagg

SEQ ID NO: 42749 - DNA, 20 bp, Human papillomavirus type 4
ggtattggtactgggagagg

SEQ ID NO: 42750 - DNA, 20 bp, Human papillomavirus type 4
gggaccctcagaaataatcc

SEQ ID NO: 42751 - DNA, 20 bp, Human papillomavirus type 4
ggaccctcagaaataatccc

SEQ ID NO: 42752 - DNA, 20 bp, Human papillomavirus type 4
tgttgtgccattagaggatc

SEQ ID NO: 42753 - DNA, 20 bp, Human papillomavirus type 4
tgccattagaggatctgacc

SEQ ID NO: 42754 - DNA, 20 bp, Human papillomavirus type 4
gaggatctgaccatcccaga

SEQ ID NO: 42755 - DNA, 20 bp, Human papillomavirus type 4
gatgtgtcccctatagaacc

SEQ ID NO: 42756 - DNA, 20 bp, Human papillomavirus type 4
gcaactaggggagcctcagc

SEQ ID NO: 42757 - DNA, 20 bp, Human papillomavirus type 4
ggttgtgccagatatgacac

SEQ ID NO: 42758 - DNA, 20 bp, Human papillomavirus type 4
tgccagatatgacacttaca

SEQ ID NO: 42759 - DNA, 20 bp, Human papillomavirus type 4
catgtggagttgctgaggct

SEQ ID NO: 42760 - DNA, 20 bp, Human papillomavirus type 4
atataatagaagggttcagc

SEQ ID NO: 42761 - DNA, 20 bp, Human papillomavirus type 4
tataatagaagggttcagca

SEQ ID NO: 42762 - DNA, 20 bp, Human papillomavirus type 4
agcaaatacctactaggaac

SEQ ID NO: 42763 - DNA, 20 bp, Human papillomavirus type 4
actgacacagccttcccgcg

SEQ ID NO: 42764 - DNA, 20 bp, Human papillomavirus type 4
ctgacacagccttcccgcgc

SEQ ID NO: 42765 - DNA, 20 bp, Human papillomavirus type 4
gagttagcaggcttggacgc

SEQ ID NO: 42766 - DNA, 20 bp, Human papillomavirus type 4
gcaggcttggacgccgaggc

SEQ ID NO: 42767 - DNA, 20 bp, Human papillomavirus type 4
gacgccgaggcacaataaaa

SEQ ID NO: 42768 - DNA, 20 bp, Human papillomavirus type 4
ggcaggcggttcatttttat

SEQ ID NO: 42769 - DNA, 20 bp, Human papillomavirus type 4
atttttattacgacctaagt

SEQ ID NO: 42770 - DNA, 20 bp, Human papillomavirus type 4
caggaagtcaatttagagtg

SEQ ID NO: 42771 - DNA, 20 bp, Human papillomavirus type 4
aggaagtcaatttagagtgt

SEQ ID NO: 42772 - DNA, 20 bp, Human papillomavirus type 4
agagtgtttagattcaattt

SEQ ID NO: 42773 - DNA, 20 bp, Human papillomavirus type 4
gagtgtttagattcaatttg

SEQ ID NO: 42774 - DNA, 20 bp, Human papillomavirus type 4
agattcaatttgccagaccc

SEQ ID NO: 42775 - DNA, 20 bp, Human papillomavirus type 4
tttaaaaatggggaaagata

SEQ ID NO: 42776 - DNA, 20 bp, Human papillomavirus type 4
ttaaaaatggggaaagatat

SEQ ID NO: 42777 - DNA, 20 bp, Human papillomavirus type 4
taaaaatggggaaagatatc

SEQ ID NO: 42778 - DNA, 20 bp, Human papillomavirus type 4
aaaaatggggaaagatatct

SEQ ID NO: 42779 - DNA, 20 bp, Human papillomavirus type 4
aaaatggggaaagatatcta

SEQ ID NO: 42780 - DNA, 20 bp, Human papillomavirus type 4
aattttgttccaccacctcc

SEQ ID NO: 42781 - DNA, 20 bp, Human papillomavirus type 4
tgttccaccacctccctctg

SEQ ID NO: 42782 - DNA, 20 bp, Human papillomavirus type 4
gttccaccacctccctctgg

SEQ ID NO: 42783 - DNA, 20 bp, Human papillomavirus type 4
ttccaccacctccctctgga

SEQ ID NO: 42784 - DNA, 20 bp, Human papillomavirus type 4
caccacctccctctggaatt

SEQ ID NO: 42785 - DNA, 20 bp, Human papillomavirus type 4
ccagtgtccagtctctctga

SEQ ID NO: 42786 - DNA, 20 bp, Human papillomavirus type 4
ggtcaacatgcgtccgcacc

SEQ ID NO: 42787 - DNA, 20 bp, Human papillomavirus type 4
gtcaacatgcgtccgcaccc

SEQ ID NO: 42788 - DNA, 20 bp, Human papillomavirus type 4
tttgcatacacagatcagta

SEQ ID NO: 42789 - DNA, 20 bp, Human papillomavirus type 4
gcatacacagatcagtagga

SEQ ID NO: 42790 - DNA, 20 bp, Human herpesvirus 7
gcagctgacgccggtgtgag

SEQ ID NO: 42791 - DNA, 20 bp, Human herpesvirus 7
tgccaattgttgttctgagt

SEQ ID NO: 42792 - DNA, 20 bp, Human herpesvirus 7
ttgttctgagtaaccagcaa

SEQ ID NO: 42793 - DNA, 20 bp, Human herpesvirus 7
ttctgagtaaccagcaacgt

SEQ ID NO: 42794 - DNA, 20 bp, Human herpesvirus 7
tgagtaaccagcaacgtcaa

SEQ ID NO: 42795 - DNA, 20 bp, Human herpesvirus 7
accacaaattctttggccaa

SEQ ID NO: 42796 - DNA, 20 bp, Human herpesvirus 7
aaaaaccgggcttttttata

SEQ ID NO: 42797 - DNA, 20 bp, Human herpesvirus 7
tttataacggatggatgcca

SEQ ID NO: 42798 - DNA, 20 bp, Human herpesvirus 7
ttataacggatggatgccag

SEQ ID NO: 42799 - DNA, 20 bp, Human herpesvirus 7
tataacggatggatgccagc

SEQ ID NO: 42800 - DNA, 20 bp, Human herpesvirus 7
ataacggatggatgccagcc

SEQ ID NO: 42801 - DNA, 20 bp, Human herpesvirus 7
cgcgtcctcctcatagccag

SEQ ID NO: 42802 - DNA, 20 bp, Human herpesvirus 7
tcatgtgatgcacatacatt

SEQ ID NO: 42803 - DNA, 20 bp, Human herpesvirus 7
ctccgtccctggctatgagg

SEQ ID NO: 42804 - DNA, 20 bp, Influenza C virus
taaacaacgacgtcacatcg

SEQ ID NO: 42805 - DNA, 20 bp, Influenza C virus
taatagtttccaaagtgtat

SEQ ID NO: 42806 - DNA, 20 bp, Influenza C virus
aatagtttccaaagtgtatt

SEQ ID NO: 42807 - DNA, 20 bp, Influenza C virus
atagtttccaaagtgtattt

SEQ ID NO: 42808 - DNA, 20 bp, Influenza C virus
ccaaagtgtatttggttgat

SEQ ID NO: 42809 - DNA, 20 bp, Influenza C virus
ggccttgcagagatgatgga

SEQ ID NO: 42810 - DNA, 20 bp, Influenza C virus
cagagatgatggagaaaaga

SEQ ID NO: 42811 - DNA, 20 bp, Influenza C virus
tttaagcattgtgtaatgga

SEQ ID NO: 42812 - DNA, 20 bp, Influenza C virus
ttaagcattgtgtaatggag

SEQ ID NO: 42813 - DNA, 20 bp, Influenza C virus
taagcattgtgtaatggagg

SEQ ID NO: 42814 - DNA, 20 bp, Influenza C virus
gtggtaatgagaagaaagca

SEQ ID NO: 42815 - DNA, 20 bp, Influenza C virus
agactactgttacttctctc

SEQ ID NO: 42816 - DNA, 20 bp, Influenza C virus
cttctctcaatgccaggatg

SEQ ID NO: 42817 - DNA, 20 bp, Influenza C virus
tctcaatgccaggatgaaca

SEQ ID NO: 42818 - DNA, 20 bp, Influenza C virus
gcagttaatataactggaga

SEQ ID NO: 42819 - DNA, 20 bp, Influenza C virus
ccagctttcactactgcagg

SEQ ID NO: 42820 - DNA, 20 bp, Influenza C virus
cactactgcaggagttaatg

SEQ ID NO: 42821 - DNA, 20 bp, Influenza C virus
actactgcaggagttaatga

SEQ ID NO: 42822 - DNA, 20 bp, Influenza C virus
atgaaggagttgattttaca

SEQ ID NO: 42823 - DNA, 20 bp, Influenza C virus
attttacagctgcaatgtca

SEQ ID NO: 42824 - DNA, 20 bp, Influenza C virus
gcgacatgtttaaaagcgtg

SEQ ID NO: 42825 - DNA, 20 bp, Influenza C virus
cgacatgtttaaaagcgtgt

SEQ ID NO: 42826 - DNA, 20 bp, Influenza C virus
aaaagcgtgtttgaatcagc

SEQ ID NO: 42827 - DNA, 20 bp, Influenza C virus
aaagcgtgtttgaatcagcg

SEQ ID NO: 42828 - DNA, 20 bp, Influenza C virus
gaatcagcggacataaatcc

SEQ ID NO: 42829 - DNA, 20 bp, Human papillomavirus type 6b
tggaaagtgcaaatgcctcc

SEQ ID NO: 42830 - DNA, 20 bp, Human papillomavirus type 6b
tgcaagacgtttaatctatc

SEQ ID NO: 42831 - DNA, 20 bp, Human papillomavirus type 6b
aatctatctatgcatacgtt

SEQ ID NO: 42832 - DNA, 20 bp, Human papillomavirus type 6b
atctatctatgcatacgttg

SEQ ID NO: 42833 - DNA, 20 bp, Human papillomavirus type 6b
caacgtatgcatagatagat

SEQ ID NO: 42834 - DNA, 20 bp, Human papillomavirus type 6b
gattatgctggatatgcaac

SEQ ID NO: 42835 - DNA, 20 bp, Human papillomavirus type 6b
attatgctggatatgcaaca

SEQ ID NO: 42836 - DNA, 20 bp, Human papillomavirus type 6b
tgctggatatgcaacaacag

SEQ ID NO: 42837 - DNA, 20 bp, Human papillomavirus type 6b
aagaagaaactaaacaagac

SEQ ID NO: 42838 - DNA, 20 bp, Human papillomavirus type 6b
gacgtgctaattcggtgcta

SEQ ID NO: 42839 - DNA, 20 bp, Human papillomavirus type 6b
cattgctatgagcaattagt

SEQ ID NO: 42840 - DNA, 20 bp, Human papillomavirus type 6b
ctatgagcaattagtagaca

SEQ ID NO: 42841 - DNA, 20 bp, Human papillomavirus type 6b
gtagacagctcagaagatga

SEQ ID NO: 42842 - DNA, 20 bp, Human papillomavirus type 6b
ttttaaaggttgtgaatctt

SEQ ID NO: 42843 - DNA, 20 bp, Human papillomavirus type 6b
taaaggttgtgaatcttgtc

SEQ ID NO: 42844 - DNA, 20 bp, Human papillomavirus type 6b
atggtagaagctatagtgca

SEQ ID NO: 42845 - DNA, 20 bp, Human papillomavirus type 6b
tggtagaagctatagtgcaa

SEQ ID NO: 42846 - DNA, 20 bp, Human papillomavirus type 6b
gtgtacctgttgggtgttgc

SEQ ID NO: 42847 - DNA, 20 bp, Human papillomavirus type 6b
tgtacctgttgggtgttgca

SEQ ID NO: 42848 - DNA, 20 bp, Human papillomavirus type 6b
ggtgttgcactatagcttct

SEQ ID NO: 42849 - DNA, 20 bp, Human papillomavirus type 6b
gtcctataaacactatagcc

SEQ ID NO: 42850 - DNA, 20 bp, Human papillomavirus type 6b
gacgccattaaacttacaag

SEQ ID NO: 42851 - DNA, 20 bp, Human papillomavirus type 6b
aacttacaagacagccaaaa

SEQ ID NO: 42852 - DNA, 20 bp, Human papillomavirus type 6b
caagacagccaaaaaaggta

SEQ ID NO: 42853 - DNA, 20 bp, Human papillomavirus type 6b
accttttttggctgtcttgt

SEQ ID NO: 42854 - DNA, 20 bp, Human papillomavirus type 6b
gaattgttaaaatgtaaaga

SEQ ID NO: 42855 - DNA, 20 bp, Human papillomavirus type 6b
ttaaaatgtaaagatttacg

SEQ ID NO: 42856 - DNA, 20 bp, Human papillomavirus type 6b
aaatgtaaagatttacgggc

SEQ ID NO: 42857 - DNA, 20 bp, Human papillomavirus type 6b
acattttaacaattccaata

SEQ ID NO: 42858 - DNA, 20 bp, Human papillomavirus type 6b
cattttaacaattccaatat

SEQ ID NO: 42859 - DNA, 20 bp, Human papillomavirus type 6b
acagaaatggtgcagtgggc

SEQ ID NO: 42860 - DNA, 20 bp, Human papillomavirus type 6b
catttgaatatgcacaaagg

SEQ ID NO: 42861 - DNA, 20 bp, Human papillomavirus type 6b
gaatatgcacaaaggggaga

SEQ ID NO: 42862 - DNA, 20 bp, Human papillomavirus type 6b
aatatgcacaaaggggagat

SEQ ID NO: 42863 - DNA, 20 bp, Human papillomavirus type 6b
gaatcaaaatctcccctttg

SEQ ID NO: 42864 - DNA, 20 bp, Human papillomavirus type 6b
aggattctgaggacgaggaa

SEQ ID NO: 42865 - DNA, 20 bp, Human papillomavirus type 6b
tgaggacgaggaagatggaa

SEQ ID NO: 42866 - DNA, 20 bp, Human papillomavirus type 6b
agatgcgtgccaggaacagt

SEQ ID NO: 42867 - DNA, 20 bp, Human papillomavirus type 6b
gatgcgtgccaggaacagtt

SEQ ID NO: 42868 - DNA, 20 bp, Human papillomavirus type 6b
taacaactgttcctggcacg

SEQ ID NO: 42869 - DNA, 20 bp, Human papillomavirus type 6b
aaatgcaaatgcatttagaa

SEQ ID NO: 42870 - DNA, 20 bp, Human papillomavirus type 6b
agaatcattattaaggactg

SEQ ID NO: 42871 - DNA, 20 bp, Human papillomavirus type 6b
gaatcattattaaggactga

SEQ ID NO: 42872 - DNA, 20 bp, Human papillomavirus type 6b
ttaaggactgagtatagtat

SEQ ID NO: 42873 - DNA, 20 bp, Human papillomavirus type 6b
aggactgagtatagtatgga

SEQ ID NO: 42874 - DNA, 20 bp, Human papillomavirus type 6b
caacgccttgtgtgtggccc

SEQ ID NO: 42875 - DNA, 20 bp, Human papillomavirus type 6b
tgtgtggcccacattggacc

SEQ ID NO: 42876 - DNA, 20 bp, Human papillomavirus type 6b
gacccgtggacagtggaaac

SEQ ID NO: 42877 - DNA, 20 bp, Human papillomavirus type 6b
agctacgcctatagtgcaat

SEQ ID NO: 42878 - DNA, 20 bp, Human papillomavirus type 6b
aaattgcactataggcgtag

SEQ ID NO: 42879 - DNA, 20 bp, Human papillomavirus type 6b
ttagatgttgtaaaaatacc

SEQ ID NO: 42880 - DNA, 20 bp, Human papillomavirus type 6b
tagatgttgtaaaaataccc

SEQ ID NO: 42881 - DNA, 20 bp, Human papillomavirus type 6b
agatgttgtaaaaatacccc

SEQ ID NO: 42882 - DNA, 20 bp, Human papillomavirus type 6b
gatgttgtaaaaataccccc

SEQ ID NO: 42883 - DNA, 20 bp, Human papillomavirus type 6b
taaaaataccccctaccatt

SEQ ID NO: 42884 - DNA, 20 bp, Human papillomavirus type 6b
tatatttactattgtggctg

SEQ ID NO: 42885 - DNA, 20 bp, Human papillomavirus type 6b
atatttactattgtggctgc

SEQ ID NO: 42886 - DNA, 20 bp, Human papillomavirus type 6b
tatttactattgtggctgct

SEQ ID NO: 42887 - DNA, 20 bp, Human papillomavirus type 6b
actattgtggctgctattaa

SEQ ID NO: 42888 - DNA, 20 bp, Human papillomavirus type 6b
ctattgtggctgctattaac

SEQ ID NO: 42889 - DNA, 20 bp, Human papillomavirus type 6b
ctggtactgcacctcggcct

SEQ ID NO: 42890 - DNA, 20 bp, Human papillomavirus type 6b
caccaggtgcaggttacaga

SEQ ID NO: 42891 - DNA, 20 bp, Human papillomavirus type 6b
cagaccctgcatttctttcc

SEQ ID NO: 42892 - DNA, 20 bp, Human papillomavirus type 6b
ctttccactcctcaacgctt

SEQ ID NO: 42893 - DNA, 20 bp, Human papillomavirus type 6b
tttccactcctcaacgctta

SEQ ID NO: 42894 - DNA, 20 bp, Human papillomavirus type 6b
cattgtcacttcctaatgac

SEQ ID NO: 42895 - DNA, 20 bp, Human papillomavirus type 6b
tcacttcctaatgacctgtt

SEQ ID NO: 42896 - DNA, 20 bp, Human papillomavirus type 6b
ctaatgacctgtttttacaa

SEQ ID NO: 42897 - DNA, 20 bp, Human papillomavirus type 6b
ttacaatctggccctgatat

SEQ ID NO: 42898 - DNA, 20 bp, Human papillomavirus type 6b
tacaatctggccctgatata

SEQ ID NO: 42899 - DNA, 20 bp, Human papillomavirus type 6b
ttgccacggatgcttatgtt

SEQ ID NO: 42900 - DNA, 20 bp, Human papillomavirus type 6b
ccacggatgcttatgttact

SEQ ID NO: 42901 - DNA, 20 bp, Human papillomavirus type 6b
tgttactcgcaccaacatat

SEQ ID NO: 42902 - DNA, 20 bp, Human papillomavirus type 6b
ctcgcaccaacatattttat

SEQ ID NO: 42903 - DNA, 20 bp, Human papillomavirus type 6b
tatcatgccagcagttctag

SEQ ID NO: 42904 - DNA, 20 bp, Human papillomavirus type 6b
acacaggctttggtgctatg

SEQ ID NO: 42905 - DNA, 20 bp, Human papillomavirus type 6b
ggtgctatgaattttgctga

SEQ ID NO: 42906 - DNA, 20 bp, Human papillomavirus type 6b
gtgctatgaattttgctgat

SEQ ID NO: 42907 - DNA, 20 bp, Human papillomavirus type 6b
tgctgatttgcagaccaata

SEQ ID NO: 42908 - DNA, 20 bp, Human papillomavirus type 6b
gctgatttgcagaccaataa

SEQ ID NO: 42909 - DNA, 20 bp, Human papillomavirus type 6b
tttaataagccatattggct

SEQ ID NO: 42910 - DNA, 20 bp, Human papillomavirus type 6b
aataagccatattggctaca

SEQ ID NO: 42911 - DNA, 20 bp, Human papillomavirus type 6b
ataagccatattggctacaa

SEQ ID NO: 42912 - DNA, 20 bp, Human papillomavirus type 6b
gctacaaaaagcccagggac

SEQ ID NO: 42913 - DNA, 20 bp, Human papillomavirus type 6b
gttggggtaatcaactgttt

SEQ ID NO: 42914 - DNA, 20 bp, Human papillomavirus type 6b
ccttactcataaacctgtct

SEQ ID NO: 42915 - DNA, 20 bp, Human papillomavirus type 6b
ctcataaacctgtctttgtg

SEQ ID NO: 42916 - DNA, 20 bp, Human papillomavirus type 6b
gtgttatacttttatgcact

SEQ ID NO: 42917 - DNA, 20 bp, Human papillomavirus type 6b
tgttatacttttatgcactg

SEQ ID NO: 42918 - DNA, 20 bp, Human papillomavirus type 6b
tacttttatgcactgtagcc

SEQ ID NO: 42919 - DNA, 20 bp, Hepatitis C virus
ggaaccggtgagtacaccgg

SEQ ID NO: 42920 - DNA, 20 bp, Hepatitis C virus
cttggattaacccgctcaat

SEQ ID NO: 42921 - DNA, 20 bp, Hepatitis C virus
ttggattaacccgctcaatg

SEQ ID NO: 42922 - DNA, 20 bp, Hepatitis C virus
gattaacccgctcaatgccc

SEQ ID NO: 42923 - DNA, 20 bp, Hepatitis C virus
acccgctcaatgcccggaaa

SEQ ID NO: 42924 - DNA, 20 bp, Hepatitis C virus
gcggagtttacttgttgccg

SEQ ID NO: 42925 - DNA, 20 bp, Hepatitis C virus
acttgttgccgcgcaggggc

SEQ ID NO: 42926 - DNA, 20 bp, Hepatitis C virus
cttgttgccgcgcaggggcc

SEQ ID NO: 42927 - DNA, 20 bp, Hepatitis C virus
ttgccgcgcaggggccccag

SEQ ID NO: 42928 - DNA, 20 bp, Hepatitis C virus
ccgcgcaggggccccagatt

SEQ ID NO: 42929 - DNA, 20 bp, Hepatitis C virus
ggaggacgggatcaattatg

SEQ ID NO: 42930 - DNA, 20 bp, Hepatitis C virus
gaggacgggatcaattatgc

SEQ ID NO: 42931 - DNA, 20 bp, Hepatitis C virus
tgcaacagggaatctccccg

SEQ ID NO: 42932 - DNA, 20 bp, Hepatitis C virus
cctgttgcataattgatccc

SEQ ID NO: 42933 - DNA, 20 bp, Hepatitis C virus
cataattgatcccgtcctcc

SEQ ID NO: 42934 - DNA, 20 bp, Hepatitis C virus
ctcctaccgtcgcagcgcca

SEQ ID NO: 42935 - DNA, 20 bp, Hepatitis C virus
ctctctggaggccactgggg

SEQ ID NO: 42936 - DNA, 20 bp, Hepatitis C virus
cagcatgcaggccaattggg

SEQ ID NO: 42937 - DNA, 20 bp, Hepatitis C virus
agcatgcaggccaattgggc

SEQ ID NO: 42938 - DNA, 20 bp, Hepatitis C virus
ggccaaagtcatcttggtcc

SEQ ID NO: 42939 - DNA, 20 bp, Hepatitis C virus
ggcccaattggcctgcatgc

SEQ ID NO: 42940 - DNA, 20 bp, Hepatitis C virus
acagctacggccaaggctgg

SEQ ID NO: 42941 - DNA, 20 bp, Hepatitis C virus
ttgctggcactacgcgcctc

SEQ ID NO: 42942 - DNA, 20 bp, Hepatitis C virus
gcgaccccgagtgggcccca

SEQ ID NO: 42943 - DNA, 20 bp, Hepatitis C virus
gccgtagctgtcaaggctct

SEQ ID NO: 42944 - DNA, 20 bp, Hepatitis C virus
ggatgcgtgtggatgaacag

SEQ ID NO: 42945 - DNA, 20 bp, Hepatitis C virus
gatgcgtgtggatgaacagt

SEQ ID NO: 42946 - DNA, 20 bp, Hepatitis C virus
accaaaacctgtggcgcccc

SEQ ID NO: 42947 - DNA, 20 bp, Hepatitis C virus
acaccaataatgggacctgg

SEQ ID NO: 42948 - DNA, 20 bp, Hepatitis C virus
ttggtgttaacctcgcatgg

SEQ ID NO: 42949 - DNA, 20 bp, Hepatitis C virus
gagcacagggatcgggtaga

SEQ ID NO: 42950 - DNA, 20 bp, Hepatitis C virus
ccactacagcgtggcagatc

SEQ ID NO: 42951 - DNA, 20 bp, Hepatitis C virus
ccagctgctgctgcctacgc

SEQ ID NO: 42952 - DNA, 20 bp, Hepatitis C virus
tctcctgcttctgatgctgc

SEQ ID NO: 42953 - DNA, 20 bp, Hepatitis C virus
ctcctgcttctgatgctgcc

SEQ ID NO: 42954 - DNA, 20 bp, Hepatitis C virus
tcctgcttctgatgctgcct

SEQ ID NO: 42955 - DNA, 20 bp, Hepatitis C virus
tgatgctgcctgagagggct

SEQ ID NO: 42956 - DNA, 20 bp, Hepatitis C virus
catccttcaacgtgcgcggg

SEQ ID NO: 42957 - DNA, 20 bp, Hepatitis C virus
aacgtgcgcgggcctcgcga

SEQ ID NO: 42958 - DNA, 20 bp, Hepatitis C virus
ttcttgcagtcctggtctgt

SEQ ID NO: 42959 - DNA, 20 bp, Hepatitis C virus
ttgcagtcctggtctgtcca

SEQ ID NO: 42960 - DNA, 20 bp, Hepatitis C virus
cagtcctggtctgtccagac

SEQ ID NO: 42961 - DNA, 20 bp, Hepatitis C virus
cctgtttcggccaggttggg

SEQ ID NO: 42962 - DNA, 20 bp, Hepatitis C virus
cggccaggttgggcaatgag

SEQ ID NO: 42963 - DNA, 20 bp, Hepatitis C virus
ggccaggttgggcaatgaga

SEQ ID NO: 42964 - DNA, 20 bp, Hepatitis C virus
ggcaatgagatcttgctcgg

SEQ ID NO: 42965 - DNA, 20 bp, Hepatitis C virus
ctcggaccagccgatacaga

SEQ ID NO: 42966 - DNA, 20 bp, Hepatitis C virus
tccaccgctacgcagtcctt

SEQ ID NO: 42967 - DNA, 20 bp, Hepatitis C virus
ctgggtactgcggttaacgg

SEQ ID NO: 42968 - DNA, 20 bp, Hepatitis C virus
acggcgtgatgtggaccgtc

SEQ ID NO: 42969 - DNA, 20 bp, Hepatitis C virus
gcacccgccccgtggtagac

SEQ ID NO: 42970 - DNA, 20 bp, Hepatitis C virus
accgcagtacccaggaagga

SEQ ID NO: 42971 - DNA, 20 bp, Hepatitis C virus
gtcccggttgaatctcttga

SEQ ID NO: 42972 - DNA, 20 bp, Hepatitis C virus
aatctcttgagactaccatg

SEQ ID NO: 42973 - DNA, 20 bp, Hepatitis C virus
agactaccatgagatcacca

SEQ ID NO: 42974 - DNA, 20 bp, Hepatitis C virus
actgacaactcaacaccccc

SEQ ID NO: 42975 - DNA, 20 bp, Hepatitis C virus
agttgtcagtgaacactggt

SEQ ID NO: 42976 - DNA, 20 bp, Hepatitis C virus
ctggctgatggaggttgcag

SEQ ID NO: 42977 - DNA, 20 bp, Hepatitis C virus
ccatacgttgagtacgtgat

SEQ ID NO: 42978 - DNA, 20 bp, Hepatitis C virus
agtacgtgattggcgcaccc

SEQ ID NO: 42979 - DNA, 20 bp, Hepatitis C virus
gcgcacccgtggtgatggtc

SEQ ID NO: 42980 - DNA, 20 bp, Hepatitis C virus
tacggcaaggcgatccctct

SEQ ID NO: 42981 - DNA, 20 bp, Hepatitis C virus
acggcaaggcgatccctctg

SEQ ID NO: 42982 - DNA, 20 bp, Hepatitis C virus
cggcaaggcgatccctctgg

SEQ ID NO: 42983 - DNA, 20 bp, Hepatitis C virus
tgccattcaaagaaaaagtg

SEQ ID NO: 42984 - DNA, 20 bp, Hepatitis C virus
aaagaaaaagtgcgatgaac

SEQ ID NO: 42985 - DNA, 20 bp, Hepatitis C virus
ggcacataccggtatgtcac

SEQ ID NO: 42986 - DNA, 20 bp, Hepatitis C virus
ttgcttaccaagcgacggtg

SEQ ID NO: 42987 - DNA, 20 bp, Hepatitis C virus
cttaccaagcgacggtgtcg

SEQ ID NO: 42988 - DNA, 20 bp, Hepatitis C virus
ccaagcgacggtgtcggcca

SEQ ID NO: 42989 - DNA, 20 bp, Hepatitis C virus
gccttaagcccaccctgcac

SEQ ID NO: 42990 - DNA, 20 bp, Hepatitis C virus
agcccaccctgcacgggccc

SEQ ID NO: 42991 - DNA, 20 bp, Hepatitis C virus
ctgatcgcgaagtgctctac

SEQ ID NO: 42992 - DNA, 20 bp, Hepatitis C virus
gacgaaatggaggagtgttc

SEQ ID NO: 42993 - DNA, 20 bp, Hepatitis C virus
caaacacctcccactagtcg

SEQ ID NO: 42994 - DNA, 20 bp, Hepatitis C virus
taacccgtgctcgactagtg

SEQ ID NO: 42995 - DNA, 20 bp, Hepatitis C virus
ggaacactcctccatttcgt

SEQ ID NO: 42996 - DNA, 20 bp, Hepatitis C virus
actgctgccgttacaagccc

SEQ ID NO: 42997 - DNA, 20 bp, Hepatitis C virus
ctgctgccgttacaagccct

SEQ ID NO: 42998 - DNA, 20 bp, Hepatitis C virus
caagccctctgaccacccaa

SEQ ID NO: 42999 - DNA, 20 bp, Hepatitis C virus
ttaacatcttggggggatgg

SEQ ID NO: 43000 - DNA, 20 bp, Hepatitis C virus
taacatcttggggggatggg

SEQ ID NO: 43001 - DNA, 20 bp, Hepatitis C virus
gtggtggaggtggtatgccc

SEQ ID NO: 43002 - DNA, 20 bp, Hepatitis C virus
tgcgccgccacgtgggcccg

SEQ ID NO: 43003 - DNA, 20 bp, Hepatitis C virus
gcgccgccacgtgggcccgg

SEQ ID NO: 43004 - DNA, 20 bp, Hepatitis C virus
cgccgccacgtgggcccggg

SEQ ID NO: 43005 - DNA, 20 bp, Hepatitis C virus
gacggttcatccactgcacg

SEQ ID NO: 43006 - DNA, 20 bp, Hepatitis C virus
aaagcaaagttcgtgccctt

SEQ ID NO: 43007 - DNA, 20 bp, Hepatitis C virus
gtgcccttaatgccaggcat

SEQ ID NO: 43008 - DNA, 20 bp, Hepatitis C virus
atgccaggcatccccctcct

SEQ ID NO: 43009 - DNA, 20 bp, Hepatitis C virus
tagcctcttggccatgagag

SEQ ID NO: 43010 - DNA, 20 bp, Hepatitis C virus
gccatgagaggagggggatg

SEQ ID NO: 43011 - DNA, 20 bp, Hepatitis C virus
cggccccagagctcttcacg

SEQ ID NO: 43012 - DNA, 20 bp, Hepatitis C virus
acggaagtggacggcatcag

SEQ ID NO: 43013 - DNA, 20 bp, Hepatitis C virus
ctgcgggacgaagtgtcgtt

SEQ ID NO: 43014 - DNA, 20 bp, Hepatitis C virus
tcagtaggactcaattcgtt

SEQ ID NO: 43015 - DNA, 20 bp, Hepatitis C virus
agtcctactgagaacgacac

SEQ ID NO: 43016 - DNA, 20 bp, Hepatitis C virus
ctcggcgagtcagctttcgc

SEQ ID NO: 43017 - DNA, 20 bp, Hepatitis C virus
cgccccgtcttcttcaggcc

SEQ ID NO: 43018 - DNA, 20 bp, Hepatitis C virus
gccccgtcttcttcaggcca

SEQ ID NO: 43019 - DNA, 20 bp, Hepatitis C virus
ttcaggccacgtgtaccgct

SEQ ID NO: 43020 - DNA, 20 bp, Hepatitis C virus
aggccacgtgtaccgctccc

SEQ ID NO: 43021 - DNA, 20 bp, Hepatitis C virus
cgctctgcctccggcaaagc

SEQ ID NO: 43022 - DNA, 20 bp, Hepatitis C virus
cctctcccaggaggaaacgg

SEQ ID NO: 43023 - DNA, 20 bp, Hepatitis C virus
cctcctgggagagggaacag

SEQ ID NO: 43024 - DNA, 20 bp, Hepatitis C virus
ctcctgggagagggaacagg

SEQ ID NO: 43025 - DNA, 20 bp, Hepatitis C virus
gccggaggcagagcgcaacc

SEQ ID NO: 43026 - DNA, 20 bp, Hepatitis C virus
gcggatcggaggacgtcgtg

SEQ ID NO: 43027 - DNA, 20 bp, Hepatitis C virus
gatgtcatactcgtggactg

SEQ ID NO: 43028 - DNA, 20 bp, Hepatitis C virus
taacaccttgcgcggctgaa

SEQ ID NO: 43029 - DNA, 20 bp, Hepatitis C virus
cgcggctgaagaatcaaagc

SEQ ID NO: 43030 - DNA, 20 bp, Hepatitis C virus
gcagctttgattcttcagcc

SEQ ID NO: 43031 - DNA, 20 bp, Hepatitis C virus
ggctacgggaaaaaggatgt

SEQ ID NO: 43032 - DNA, 20 bp, Hepatitis C virus
ggagccattcccgcaaggcc

SEQ ID NO: 43033 - DNA, 20 bp, Hepatitis C virus
ccgcaaggccattaaccaca

SEQ ID NO: 43034 - DNA, 20 bp, Hepatitis C virus
accacatcagctccgtgtgg

SEQ ID NO: 43035 - DNA, 20 bp, Hepatitis C virus
ctggacgacaacaatacccc

SEQ ID NO: 43036 - DNA, 20 bp, Hepatitis C virus
gaagtcgaagaacgacccaa

SEQ ID NO: 43037 - DNA, 20 bp, Hepatitis C virus
tcttatgatacccgctgctt

SEQ ID NO: 43038 - DNA, 20 bp, Hepatitis C virus
tgatacccgctgctttgact

SEQ ID NO: 43039 - DNA, 20 bp, Hepatitis C virus
gactccactgtaaccgaaaa

SEQ ID NO: 43040 - DNA, 20 bp, Hepatitis C virus
actccactgtaaccgaaaag

SEQ ID NO: 43041 - DNA, 20 bp, Hepatitis C virus
gtttgcggtgatgacttagt

SEQ ID NO: 43042 - DNA, 20 bp, Hepatitis C virus
gcggtgatgacttagtcgtc

SEQ ID NO: 43043 - DNA, 20 bp, Hepatitis C virus
cggtgatgacttagtcgtca

SEQ ID NO: 43044 - DNA, 20 bp, Hepatitis C virus
gtcgtcatcgctgagagcga

SEQ ID NO: 43045 - DNA, 20 bp, Hepatitis C virus
acggaggctatgacgagata

SEQ ID NO: 43046 - DNA, 20 bp, Hepatitis C virus
cctgccgctgccaaactcga

SEQ ID NO: 43047 - DNA, 20 bp, Hepatitis C virus
atcgggttggtttacggtag

SEQ ID NO: 43048 - DNA, 20 bp, Hepatitis C virus
tcgggttggtttacggtagg

SEQ ID NO: 43049 - DNA, 20 bp, Hepatitis C virus
gtttacggtaggcgccggcg

SEQ ID NO: 43050 - DNA, 20 bp, Hepatitis C virus
acggtaggcgccggcggggg

SEQ ID NO: 43051 - DNA, 20 bp, Human rhinovirus 14
gggtgtccgtgtttctcatt

SEQ ID NO: 43052 - DNA, 20 bp, Human rhinovirus 14
ggtgtccgtgtttctcattt

SEQ ID NO: 43053 - DNA, 20 bp, Human rhinovirus 14
ctcatttttcttcatattgt

SEQ ID NO: 43054 - DNA, 20 bp, Human rhinovirus 14
tcatttttcttcatattgtc

SEQ ID NO: 43055 - DNA, 20 bp, Human rhinovirus 14
ttcttcatattgtcttatgg

SEQ ID NO: 43056 - DNA, 20 bp, Human rhinovirus 14
agggtgcaccagcattgaat

SEQ ID NO: 43057 - DNA, 20 bp, Human rhinovirus 14
aattcacccaatgttgaggc

SEQ ID NO: 43058 - DNA, 20 bp, Human rhinovirus 14
acccaatgttgaggcctgtg

SEQ ID NO: 43059 - DNA, 20 bp, Human rhinovirus 14
aggcctgtggttatagtgat

SEQ ID NO: 43060 - DNA, 20 bp, Human rhinovirus 14
tagtgatagagtacaacaaa

SEQ ID NO: 43061 - DNA, 20 bp, Human rhinovirus 14
taaaggctggtgctggaaat

SEQ ID NO: 43062 - DNA, 20 bp, Human rhinovirus 14
ccagatgcactcaaggatat

SEQ ID NO: 43063 - DNA, 20 bp, Human rhinovirus 14
gggcaaaacatgtttttcca

SEQ ID NO: 43064 - DNA, 20 bp, Human rhinovirus 14
tgcccgaacacacccatatc

SEQ ID NO: 43065 - DNA, 20 bp, Human rhinovirus 14
gcccgaacacacccatatcc

SEQ ID NO: 43066 - DNA, 20 bp, Human rhinovirus 14
ttgggacaaacctgtttatt

SEQ ID NO: 43067 - DNA, 20 bp, Human rhinovirus 14
tgggacaaacctgtttattg

SEQ ID NO: 43068 - DNA, 20 bp, Human rhinovirus 14
gggacaaacctgtttattgg

SEQ ID NO: 43069 - DNA, 20 bp, Human rhinovirus 14
ggacaaacctgtttattggt

SEQ ID NO: 43070 - DNA, 20 bp, Human rhinovirus 14
attggtgatggggtcttcaa

SEQ ID NO: 43071 - DNA, 20 bp, Human rhinovirus 14
tctgggatattggtctgcaa

SEQ ID NO: 43072 - DNA, 20 bp, Human rhinovirus 14
gtctgcaatccaccatagta

SEQ ID NO: 43073 - DNA, 20 bp, Human rhinovirus 14
agatatactgatccagatac

SEQ ID NO: 43074 - DNA, 20 bp, Human rhinovirus 14
gatatactgatccagataca

SEQ ID NO: 43075 - DNA, 20 bp, Human rhinovirus 14
tcattactatggtggattgc

SEQ ID NO: 43076 - DNA, 20 bp, Human rhinovirus 14
cactcactgaaggcttaggt

SEQ ID NO: 43077 - DNA, 20 bp, Human rhinovirus 14
ggtgatgaattagaagaagt

SEQ ID NO: 43078 - DNA, 20 bp, Human rhinovirus 14
gaagaagtcatcgttgagaa

SEQ ID NO: 43079 - DNA, 20 bp, Human rhinovirus 14
agaaaacgaaacagacggtg

SEQ ID NO: 43080 - DNA, 20 bp, Human rhinovirus 14
tggaccagatgagattgagg

SEQ ID NO: 43081 - DNA, 20 bp, Human rhinovirus 14
cacatggcaaagtgcttcaa

SEQ ID NO: 43082 - DNA, 20 bp, Human rhinovirus 14
aaaccccagtgtattcttca

SEQ ID NO: 43083 - DNA, 20 bp, Human rhinovirus 14
ttcaaggtgggggatacatc

SEQ ID NO: 43084 - DNA, 20 bp, Human rhinovirus 14
aagaatacactggggtttga

SEQ ID NO: 43085 - DNA, 20 bp, Human rhinovirus 14
gaagcactttgccatgtgta

SEQ ID NO: 43086 - DNA, 20 bp, Human rhinovirus 14
aagcatggattccaagagca

SEQ ID NO: 43087 - DNA, 20 bp, Human rhinovirus 14
caagagcacccagagcacta

SEQ ID NO: 43088 - DNA, 20 bp, Human rhinovirus 14
tcctaagaatacagaaccag

SEQ ID NO: 43089 - DNA, 20 bp, Human rhinovirus 14
tgtattcttaggataatttg

SEQ ID NO: 43090 - DNA, 20 bp, Human rhinovirus 14
ttaggataatttgtgcgccc

SEQ ID NO: 43091 - DNA, 20 bp, Human rhinovirus 14
actattccacatattacaga

SEQ ID NO: 43092 - DNA, 20 bp, Human rhinovirus 14
ctattccacatattacagaa

SEQ ID NO: 43093 - DNA, 20 bp, Human rhinovirus 14
cacatattacagaaagtatt

SEQ ID NO: 43094 - DNA, 20 bp, Human rhinovirus 14
cagaaagtattaccccataa

SEQ ID NO: 43095 - DNA, 20 bp, Human rhinovirus 14
ccccataatttgcgaaaagc

SEQ ID NO: 43096 - DNA, 20 bp, Human rhinovirus 14
gattgttaacagctgaaggt

SEQ ID NO: 43097 - DNA, 20 bp, Human rhinovirus 14
ttaacagctgaaggtagtgg

SEQ ID NO: 43098 - DNA, 20 bp, Human rhinovirus 14
acagctgaaggtagtggata

SEQ ID NO: 43099 - DNA, 20 bp, Human rhinovirus 14
gttttgctgacatacgacag

SEQ ID NO: 43100 - DNA, 20 bp, Human rhinovirus 14
ttttgctgacatacgacagt

SEQ ID NO: 43101 - DNA, 20 bp, Human rhinovirus 14
cggccactctagcactactt

SEQ ID NO: 43102 - DNA, 20 bp, Human rhinovirus 14
gatgtgatggatctccttgg

SEQ ID NO: 43103 - DNA, 20 bp, Human rhinovirus 14
gagatttctgaagatgtaca

SEQ ID NO: 43104 - DNA, 20 bp, Human rhinovirus 14
ctgaagatgtacatttccaa

SEQ ID NO: 43105 - DNA, 20 bp, Human rhinovirus 14
tgaagatgtacatttccaaa

SEQ ID NO: 43106 - DNA, 20 bp, Human rhinovirus 14
tggtaaatcattaacaacat

SEQ ID NO: 43107 - DNA, 20 bp, Human rhinovirus 14
acaacatccattgtgggacg

SEQ ID NO: 43108 - DNA, 20 bp, Human rhinovirus 14
tgggacgtgcaattgcagaa

SEQ ID NO: 43109 - DNA, 20 bp, Human rhinovirus 14
cagaacacttcaattcagca

SEQ ID NO: 43110 - DNA, 20 bp, Human rhinovirus 14
aattcagcagtatattcact

SEQ ID NO: 43111 - DNA, 20 bp, Human rhinovirus 14
ttcaccagtaattttgttct

SEQ ID NO: 43112 - DNA, 20 bp, Human rhinovirus 14
accagtaattttgttctagc

SEQ ID NO: 43113 - DNA, 20 bp, Human rhinovirus 14
tgttctagcctccacaaatt

SEQ ID NO: 43114 - DNA, 20 bp, Human rhinovirus 14
gttctagcctccacaaattc

SEQ ID NO: 43115 - DNA, 20 bp, Human rhinovirus 14
ttctagcctccacaaattct

SEQ ID NO: 43116 - DNA, 20 bp, Human rhinovirus 14
gccctgtaacaatggcagga

SEQ ID NO: 43117 - DNA, 20 bp, Human rhinovirus 14
ttaatttgagtagcaccccc

SEQ ID NO: 43118 - DNA, 20 bp, Human rhinovirus 14
atttgagtagcacccccact

SEQ ID NO: 43119 - DNA, 20 bp, Human rhinovirus 14
gagtagcacccccactaaca

SEQ ID NO: 43120 - DNA, 20 bp, Human rhinovirus 14
agtagcacccccactaacag

SEQ ID NO: 43121 - DNA, 20 bp, Human rhinovirus 14
catcccagtgtattttatga

SEQ ID NO: 43122 - DNA, 20 bp, Human rhinovirus 14
tatgatgtttttccaggtga

SEQ ID NO: 43123 - DNA, 20 bp, Human rhinovirus 14
atgatgtttttccaggtgac

SEQ ID NO: 43124 - DNA, 20 bp, Human rhinovirus 14
tgatgtttttccaggtgaca

SEQ ID NO: 43125 - DNA, 20 bp, Human rhinovirus 14
ttccaggtgacaaggaacct

SEQ ID NO: 43126 - DNA, 20 bp, Human rhinovirus 14
attgaagcctccagtttgaa

SEQ ID NO: 43127 - DNA, 20 bp, Human rhinovirus 14
aagcctccagtttgaatgat

SEQ ID NO: 43128 - DNA, 20 bp, Human rhinovirus 14
gaatgattctgttaacatga

SEQ ID NO: 43129 - DNA, 20 bp, Human rhinovirus 14
aatgattctgttaacatgag

SEQ ID NO: 43130 - DNA, 20 bp, Human rhinovirus 14
tgttaacatgagaatgaaac

SEQ ID NO: 43131 - DNA, 20 bp, Human rhinovirus 14
gcaactcttggtaaaaatta

SEQ ID NO: 43132 - DNA, 20 bp, Human rhinovirus 14
gtaaaaattatggactaacc

SEQ ID NO: 43133 - DNA, 20 bp, Human rhinovirus 14
tggactaaccatcacacccc

SEQ ID NO: 43134 - DNA, 20 bp, Human rhinovirus 14
tacaaaaatgacatgggaaa

SEQ ID NO: 43135 - DNA, 20 bp, Human rhinovirus 14
acaaaaatgacatgggaaaa

SEQ ID NO: 43136 - DNA, 20 bp, Human genital-associated circular DNA virus-1
cgctcaatgcggagagctgg

SEQ ID NO: 43137 - DNA, 20 bp, Human genital-associated circular DNA virus-1
acgactctattacttcatac

SEQ ID NO: 43138 - DNA, 20 bp, Human genital-associated circular DNA virus-1
cttcatacccagctgagtgt

SEQ ID NO: 43139 - DNA, 20 bp, Human genital-associated circular DNA virus-1
atacccagctgagtgtctca

SEQ ID NO: 43140 - DNA, 20 bp, Human genital-associated circular DNA virus-1
gtcgagagaaccacgctgat

SEQ ID NO: 43141 - DNA, 20 bp, Human genital-associated circular DNA virus-1
tcgcaggagggctcagtacc

SEQ ID NO: 43142 - DNA, 20 bp, Human genital-associated circular DNA virus-1
agggaactgacaacgtctgg

SEQ ID NO: 43143 - DNA, 20 bp, Human genital-associated circular DNA virus-1
cagatgcagcaagtgtggag

SEQ ID NO: 43144 - DNA, 20 bp, Human genital-associated circular DNA virus-1
tgggagcttgttcgagagct

SEQ ID NO: 43145 - DNA, 20 bp, Human genital-associated circular DNA virus-1
gggagcttgttcgagagctg

SEQ ID NO: 43146 - DNA, 20 bp, Human genital-associated circular DNA virus-1
gcgtcttccagccctgactt

SEQ ID NO: 43147 - DNA, 20 bp, Human genital-associated circular DNA virus-1
cagccctgacttgaggtcgt

SEQ ID NO: 43148 - DNA, 20 bp, Human genital-associated circular DNA virus-1
aggtcgtccacgttccactg

SEQ ID NO: 43149 - DNA, 20 bp, Human genital-associated circular DNA virus-1
cactgcaggcagcagtggat

SEQ ID NO: 43150 - DNA, 20 bp, Human genital-associated circular DNA virus-1
gcggaatgtgcgggacattc

SEQ ID NO: 43151 - DNA, 20 bp, Human genital-associated circular DNA virus-1
cgctctcatcgccggggttg

SEQ ID NO: 43152 - DNA, 20 bp, Human genital-associated circular DNA virus-1
agtgtgactgttcggtcata

SEQ ID NO: 43153 - DNA, 20 bp, Human genital-associated circular DNA virus-1
ggtcatacatcggtgtgatg

SEQ ID NO: 43154 - DNA, 20 bp, Human genital-associated circular DNA virus-1
gatccaccactttgttgtaa

SEQ ID NO: 43155 - DNA, 20 bp, Human genital-associated circular DNA virus-1
gttgtaatagggtacaatcc

SEQ ID NO: 43156 - DNA, 20 bp, Human genital-associated circular DNA virus-1
ttgtaatagggtacaatcca

SEQ ID NO: 43157 - DNA, 20 bp, Human genital-associated circular DNA virus-1
taatagggtacaatccacgg

SEQ ID NO: 43158 - DNA, 20 bp, Human genital-associated circular DNA virus-1
taagtgaaaacaacgcggcg

SEQ ID NO: 43159 - DNA, 20 bp, Human papillomavirus type 140
gcttttttaaactgcaattg

SEQ ID NO: 43160 - DNA, 20 bp, Human papillomavirus type 140
tttaaactgcaattgaaatg

SEQ ID NO: 43161 - DNA, 20 bp, Human papillomavirus type 140
ttaaactgcaattgaaatgt

SEQ ID NO: 43162 - DNA, 20 bp, Human papillomavirus type 140
taaactgcaattgaaatgta

SEQ ID NO: 43163 - DNA, 20 bp, Human papillomavirus type 140
aaactgcaattgaaatgtat

SEQ ID NO: 43164 - DNA, 20 bp, Human papillomavirus type 140
cagagttgacagtttgtgta

SEQ ID NO: 43165 - DNA, 20 bp, Human papillomavirus type 140
acagtttgtgtaattcttgt

SEQ ID NO: 43166 - DNA, 20 bp, Human papillomavirus type 140
gtgtaattcttgtacagcca

SEQ ID NO: 43167 - DNA, 20 bp, Human papillomavirus type 140
tgtaattcttgtacagccag

SEQ ID NO: 43168 - DNA, 20 bp, Human papillomavirus type 140
ttgtacagccagagtcaggc

SEQ ID NO: 43169 - DNA, 20 bp, Human papillomavirus type 140
aaaggagactgtttgaggac

SEQ ID NO: 43170 - DNA, 20 bp, Human papillomavirus type 140
gaggacagtggaatagcaga

SEQ ID NO: 43171 - DNA, 20 bp, Human papillomavirus type 140
aggacagtggaatagcagaa

SEQ ID NO: 43172 - DNA, 20 bp, Human papillomavirus type 140
gtcatacgaaaatggcggga

SEQ ID NO: 43173 - DNA, 20 bp, Human papillomavirus type 140
tcatacgaaaatggcgggac

SEQ ID NO: 43174 - DNA, 20 bp, Human papillomavirus type 140
caaacaaaaaattaccgaga

SEQ ID NO: 43175 - DNA, 20 bp, Human papillomavirus type 140
ccgagaaagcatattcattt

SEQ ID NO: 43176 - DNA, 20 bp, Human papillomavirus type 140
atttggaatattaccagatt

SEQ ID NO: 43177 - DNA, 20 bp, Human papillomavirus type 140
ggaatattaccagattgggt

SEQ ID NO: 43178 - DNA, 20 bp, Human papillomavirus type 140
gaatattaccagattgggtt

SEQ ID NO: 43179 - DNA, 20 bp, Human papillomavirus type 140
tggattcagccattactaga

SEQ ID NO: 43180 - DNA, 20 bp, Human papillomavirus type 140
ggattcagccattactagat

SEQ ID NO: 43181 - DNA, 20 bp, Human papillomavirus type 140
gattcagccattactagatt

SEQ ID NO: 43182 - DNA, 20 bp, Human papillomavirus type 140
agccattactagattgtaaa

SEQ ID NO: 43183 - DNA, 20 bp, Human papillomavirus type 140
ctagattgtaaagtaggatt

SEQ ID NO: 43184 - DNA, 20 bp, Human papillomavirus type 140
ctccgtctttctgcggggtc

SEQ ID NO: 43185 - DNA, 20 bp, Human papillomavirus type 140
ctgcggggtcttggtgtagg

SEQ ID NO: 43186 - DNA, 20 bp, Human papillomavirus type 140
tgcggggtcttggtgtaggt

SEQ ID NO: 43187 - DNA, 20 bp, Human papillomavirus type 140
gtgtaggtggtggggctgct

SEQ ID NO: 43188 - DNA, 20 bp, Human papillomavirus type 140
atctcctgtctgtgtccccg

SEQ ID NO: 43189 - DNA, 20 bp, Human papillomavirus type 140
gaagtagccatcgatctgtt

SEQ ID NO: 43190 - DNA, 20 bp, Human papillomavirus type 140
cacgatcaggtctctcaaga

SEQ ID NO: 43191 - DNA, 20 bp, Human papillomavirus type 140
aaagacttgaagaggaagct

SEQ ID NO: 43192 - DNA, 20 bp, Human papillomavirus type 140
aagaggaagctagggatcca

SEQ ID NO: 43193 - DNA, 20 bp, Human papillomavirus type 140
accacgaggattggtggatc

SEQ ID NO: 43194 - DNA, 20 bp, Human papillomavirus type 140
attgacactgttccacttcc

SEQ ID NO: 43195 - DNA, 20 bp, Human papillomavirus type 140
ttgacactgttccacttcct

SEQ ID NO: 43196 - DNA, 20 bp, Human papillomavirus type 140
acactgttccacttcctaag

SEQ ID NO: 43197 - DNA, 20 bp, Human papillomavirus type 140
cacttcctaagggtacctcc

SEQ ID NO: 43198 - DNA, 20 bp, Human papillomavirus type 140
ctaagggtacctccatgtgt

SEQ ID NO: 43199 - DNA, 20 bp, Human papillomavirus type 140
gggtatagaccatttaatgc

SEQ ID NO: 43200 - DNA, 20 bp, Human papillomavirus type 140
ggtatagaccatttaatgct

SEQ ID NO: 43201 - DNA, 20 bp, Human papillomavirus type 140
aatgctcaaacacctaggga

SEQ ID NO: 43202 - DNA, 20 bp, Human papillomavirus type 140
atgctcaaacacctagggag

SEQ ID NO: 43203 - DNA, 20 bp, Human papillomavirus type 140
ggccacgtcctaccataccc

SEQ ID NO: 43204 - DNA, 20 bp, Human papillomavirus type 140
aattagaacaaattaatact

SEQ ID NO: 43205 - DNA, 20 bp, Human papillomavirus type 140
gaacaaattaatactatggc

SEQ ID NO: 43206 - DNA, 20 bp, Human papillomavirus type 140
atactatggcgcagtttgaa

SEQ ID NO: 43207 - DNA, 20 bp, Human papillomavirus type 140
gaaatagatgagggaccttt

SEQ ID NO: 43208 - DNA, 20 bp, Human papillomavirus type 140
aaatagatgagggaccttta

SEQ ID NO: 43209 - DNA, 20 bp, Human papillomavirus type 140
agcagaattagctgacaact

SEQ ID NO: 43210 - DNA, 20 bp, Human papillomavirus type 140
gcagaattagctgacaactc

SEQ ID NO: 43211 - DNA, 20 bp, Human papillomavirus type 140
gctgacaactcctctagaca

SEQ ID NO: 43212 - DNA, 20 bp, Human papillomavirus type 140
catttacagaacagccacga

SEQ ID NO: 43213 - DNA, 20 bp, Human papillomavirus type 140
acagaacagccacgactttt

SEQ ID NO: 43214 - DNA, 20 bp, Human papillomavirus type 140
ccaagtgcaatagataatag

SEQ ID NO: 43215 - DNA, 20 bp, Human papillomavirus type 140
cgaccctaaacagaatcaga

SEQ ID NO: 43216 - DNA, 20 bp, Human papillomavirus type 140
gaccctaaacagaatcagat

SEQ ID NO: 43217 - DNA, 20 bp, Human papillomavirus type 140
attgttggttgtgcacctgc

SEQ ID NO: 43218 - DNA, 20 bp, Human papillomavirus type 140
ttggttgtgcacctgccatt

SEQ ID NO: 43219 - DNA, 20 bp, Human papillomavirus type 140
ttaattccatttgcaaatgg

SEQ ID NO: 43220 - DNA, 20 bp, Human papillomavirus type 140
attccatttgcaaatggccg

SEQ ID NO: 43221 - DNA, 20 bp, Human papillomavirus type 140
catttgcaaatggccggatt

SEQ ID NO: 43222 - DNA, 20 bp, Human papillomavirus type 140
gcaaatggccggattttata

SEQ ID NO: 43223 - DNA, 20 bp, Human papillomavirus type 140
caaatggccggattttatac

SEQ ID NO: 43224 - DNA, 20 bp, Human papillomavirus type 140
ctttcctacacccagtggtt

SEQ ID NO: 43225 - DNA, 20 bp, Human papillomavirus type 140
cctacacccagtggttctct

SEQ ID NO: 43226 - DNA, 20 bp, Human papillomavirus type 140
ctacacccagtggttctcta

SEQ ID NO: 43227 - DNA, 20 bp, Human papillomavirus type 140
tctagttactagtgaggccc

SEQ ID NO: 43228 - DNA, 20 bp, Human papillomavirus type 140
ctagtgaggcccagttattt

SEQ ID NO: 43229 - DNA, 20 bp, Human papillomavirus type 140
ggacattgatttgcaggatc

SEQ ID NO: 43230 - DNA, 20 bp, Human papillomavirus type 140
atttgcaggatcgctttact

SEQ ID NO: 43231 - DNA, 20 bp, Human papillomavirus type 140
gcaggatcgctttacttctg

SEQ ID NO: 43232 - DNA, 20 bp, Human papillomavirus type 140
caggatcgctttacttctga

SEQ ID NO: 43233 - DNA, 20 bp, Human papillomavirus type 140
acttctgatttggatcagac

SEQ ID NO: 43234 - DNA, 20 bp, Human papillomavirus type 140
tcggtgggttagagaccgat

SEQ ID NO: 43235 - DNA, 20 bp, Human papillomavirus type 140
cggtgggttagagaccgatt

SEQ ID NO: 43236 - DNA, 20 bp, Human papillomavirus type 140
ggtgggttagagaccgattt

SEQ ID NO: 43237 - DNA, 20 bp, Human papillomavirus type 140
gagaccgatttcggtgttct

SEQ ID NO: 43238 - DNA, 20 bp, Human papillomavirus type 140
cggtgttctatcactttaac

SEQ ID NO: 43239 - DNA, 20 bp, Hepatitis E virus
cgaatgctgtggtagttagg

SEQ ID NO: 43240 - DNA, 20 bp, Hepatitis E virus
ggccttttctctctcaccag

SEQ ID NO: 43241 - DNA, 20 bp, Hepatitis E virus
tctctctcaccagcagattg

SEQ ID NO: 43242 - DNA, 20 bp, Hepatitis E virus
ctctctcaccagcagattga

SEQ ID NO: 43243 - DNA, 20 bp, Hepatitis E virus
tctctcaccagcagattgag

SEQ ID NO: 43244 - DNA, 20 bp, Hepatitis E virus
ctccgccctgccgggcgtga

SEQ ID NO: 43245 - DNA, 20 bp, Hepatitis E virus
agcgttggtatactgcccct

SEQ ID NO: 43246 - DNA, 20 bp, Hepatitis E virus
gtatactgcccctacccgcg

SEQ ID NO: 43247 - DNA, 20 bp, Hepatitis E virus
ccggcgttccgcactgcgcg

SEQ ID NO: 43248 - DNA, 20 bp, Hepatitis E virus
cgcactgcgcgggctccccg

SEQ ID NO: 43249 - DNA, 20 bp, Hepatitis E virus
acgctgccctccacctcccg

SEQ ID NO: 43250 - DNA, 20 bp, Hepatitis E virus
cgctgccctccacctcccgc

SEQ ID NO: 43251 - DNA, 20 bp, Hepatitis E virus
ccccctggcacataccgcac

SEQ ID NO: 43252 - DNA, 20 bp, Hepatitis E virus
gtcctcttactcacggcagc

SEQ ID NO: 43253 - DNA, 20 bp, Hepatitis E virus
tcctcttactcacggcagcc

SEQ ID NO: 43254 - DNA, 20 bp, Hepatitis E virus
ctcacggcagccccggagcc

SEQ ID NO: 43255 - DNA, 20 bp, Hepatitis E virus
cttacccccggtctaccgag

SEQ ID NO: 43256 - DNA, 20 bp, Hepatitis E virus
cccccggtctaccgaggtct

SEQ ID NO: 43257 - DNA, 20 bp, Hepatitis E virus
ttgccaatgaaggctggaac

SEQ ID NO: 43258 - DNA, 20 bp, Hepatitis E virus
ccaatgaaggctggaacgcc

SEQ ID NO: 43259 - DNA, 20 bp, Hepatitis E virus
cagctgtcatcactgccgcc

SEQ ID NO: 43260 - DNA, 20 bp, Hepatitis E virus
ccatctgccaccagcggtac

SEQ ID NO: 43261 - DNA, 20 bp, Hepatitis E virus
gatatagcctgagtgcggag

SEQ ID NO: 43262 - DNA, 20 bp, Hepatitis E virus
catcttgacccacgggtgtt

SEQ ID NO: 43263 - DNA, 20 bp, Hepatitis E virus
atcttgacccacgggtgttg

SEQ ID NO: 43264 - DNA, 20 bp, Hepatitis E virus
acccacgggtgttggttttt

SEQ ID NO: 43265 - DNA, 20 bp, Hepatitis E virus
gtttttgatgagtcggcccc

SEQ ID NO: 43266 - DNA, 20 bp, Hepatitis E virus
ttgatgagtcggccccctgc

SEQ ID NO: 43267 - DNA, 20 bp, Hepatitis E virus
gtgacatatctgggtcctac

SEQ ID NO: 43268 - DNA, 20 bp, Hepatitis E virus
accaagcccttgacctcccc

SEQ ID NO: 43269 - DNA, 20 bp, Hepatitis E virus
ccaagcccttgacctccccg

SEQ ID NO: 43270 - DNA, 20 bp, Hepatitis E virus
acctccccgctgagattgtg

SEQ ID NO: 43271 - DNA, 20 bp, Hepatitis E virus
tggctcgtgcaggccggctg

SEQ ID NO: 43272 - DNA, 20 bp, Hepatitis E virus
cagtctcacctatgccgcct

SEQ ID NO: 43273 - DNA, 20 bp, Hepatitis E virus
agtctcacctatgccgcctc

SEQ ID NO: 43274 - DNA, 20 bp, Hepatitis E virus
acctacccggatggctctaa

SEQ ID NO: 43275 - DNA, 20 bp, Hepatitis E virus
cctacccggatggctctaag

SEQ ID NO: 43276 - DNA, 20 bp, Hepatitis E virus
gccggctcgctgtttgagtc

SEQ ID NO: 43277 - DNA, 20 bp, Hepatitis E virus
gagtcgacatgtacctggct

SEQ ID NO: 43278 - DNA, 20 bp, Hepatitis E virus
agtcgacatgtacctggctc

SEQ ID NO: 43279 - DNA, 20 bp, Hepatitis E virus
acgccgtcgctcctgattat

SEQ ID NO: 43280 - DNA, 20 bp, Hepatitis E virus
taggttggaacataacccaa

SEQ ID NO: 43281 - DNA, 20 bp, Hepatitis E virus
gaacataacccaaagatgct

SEQ ID NO: 43282 - DNA, 20 bp, Hepatitis E virus
aggctgcctaccgggagact

SEQ ID NO: 43283 - DNA, 20 bp, Hepatitis E virus
ctcccgcctcggtaccgctg

SEQ ID NO: 43284 - DNA, 20 bp, Hepatitis E virus
cacggacagcaaatctggct

SEQ ID NO: 43285 - DNA, 20 bp, Hepatitis E virus
actcagccacagacgtcggc

SEQ ID NO: 43286 - DNA, 20 bp, Hepatitis E virus
gatagccagatttgctgtcc

SEQ ID NO: 43287 - DNA, 20 bp, Hepatitis E virus
gctgtccgtgcaacatcctc

SEQ ID NO: 43288 - DNA, 20 bp, Hepatitis E virus
ctgtccgtgcaacatcctca

SEQ ID NO: 43289 - DNA, 20 bp, Hepatitis E virus
accccgcacactgccgccag

SEQ ID NO: 43290 - DNA, 20 bp, Hepatitis E virus
tcattgatgaggccccgtcc

SEQ ID NO: 43291 - DNA, 20 bp, Hepatitis E virus
atgaggccccgtcccttccc

SEQ ID NO: 43292 - DNA, 20 bp, Hepatitis E virus
cccctcacttgctgctgctc

SEQ ID NO: 43293 - DNA, 20 bp, Hepatitis E virus
ctgctgctccacatgcagcg

SEQ ID NO: 43294 - DNA, 20 bp, Hepatitis E virus
agaccactagtcgggtcctc

SEQ ID NO: 43295 - DNA, 20 bp, Hepatitis E virus
ttctggggtgagcctgctgt

SEQ ID NO: 43296 - DNA, 20 bp, Hepatitis E virus
tggggtgagcctgctgttgg

SEQ ID NO: 43297 - DNA, 20 bp, Hepatitis E virus
ggcagaaactagtgttcacc

SEQ ID NO: 43298 - DNA, 20 bp, Hepatitis E virus
ctgcccaacagcaggctcac

SEQ ID NO: 43299 - DNA, 20 bp, Hepatitis E virus
acgcaccaggcctgcttcgc

SEQ ID NO: 43300 - DNA, 20 bp, Hepatitis E virus
gcgaggtgggcatctccgat

SEQ ID NO: 43301 - DNA, 20 bp, Hepatitis E virus
ataactttttccttgctggt

SEQ ID NO: 43302 - DNA, 20 bp, Hepatitis E virus
ttccttgctggtggcgaaat

SEQ ID NO: 43303 - DNA, 20 bp, Hepatitis E virus
tccttgctggtggcgaaatt

SEQ ID NO: 43304 - DNA, 20 bp, Hepatitis E virus
agctcgacctttgtaaccgc

SEQ ID NO: 43305 - DNA, 20 bp, Hepatitis E virus
gtaaccgcgacgtgtccagg

SEQ ID NO: 43306 - DNA, 20 bp, Hepatitis E virus
taaccgcgacgtgtccagga

SEQ ID NO: 43307 - DNA, 20 bp, Hepatitis E virus
ttccagaaagattgtaataa

SEQ ID NO: 43308 - DNA, 20 bp, Hepatitis E virus
cagaaagattgtaataaatt

SEQ ID NO: 43309 - DNA, 20 bp, Hepatitis E virus
gccggccggcttactgagaa

SEQ ID NO: 43310 - DNA, 20 bp, Hepatitis E virus
ctgagaagaattggggccct

SEQ ID NO: 43311 - DNA, 20 bp, Hepatitis E virus
gggccctggccccgagcggg

SEQ ID NO: 43312 - DNA, 20 bp, Hepatitis E virus
tctccgcaagctcacgaatg

SEQ ID NO: 43313 - DNA, 20 bp, Hepatitis E virus
ctccgcaagctcacgaatgt

SEQ ID NO: 43314 - DNA, 20 bp, Hepatitis E virus
gccaacccgcccgaccactc

SEQ ID NO: 43315 - DNA, 20 bp, Hepatitis E virus
gcgtgaccaggcccagcgcc

SEQ ID NO: 43316 - DNA, 20 bp, Hepatitis E virus
cgcaacctcacccccggtaa

SEQ ID NO: 43317 - DNA, 20 bp, Hepatitis E virus
ctccagcactgcccgtcacc

SEQ ID NO: 43318 - DNA, 20 bp, Hepatitis E virus
gtcgcggtgcagatgggact

SEQ ID NO: 43319 - DNA, 20 bp, Hepatitis E virus
gtattaccgggggtgaggtt

SEQ ID NO: 43320 - DNA, 20 bp, Hepatitis E virus
ccgggggtgaggttgcggaa

SEQ ID NO: 43321 - DNA, 20 bp, Hepatitis E virus
cggctcttcgaccggcccag

SEQ ID NO: 43322 - DNA, 20 bp, Hepatitis E virus
gaccggcccagtctatgtct

SEQ ID NO: 43323 - DNA, 20 bp, Hepatitis E virus
gttaatgtagcgaccggcgc

SEQ ID NO: 43324 - DNA, 20 bp, Hepatitis E virus
atgtagcgaccggcgcgcag

SEQ ID NO: 43325 - DNA, 20 bp, Hepatitis E virus
accaaggtcacagagtcaga

SEQ ID NO: 43326 - DNA, 20 bp, Hepatitis E virus
agaatgccgctgggcatcgg

SEQ ID NO: 43327 - DNA, 20 bp, Hepatitis E virus
ctatttccacttacaccact

SEQ ID NO: 43328 - DNA, 20 bp, Hepatitis E virus
ccacttacaccactagcctg

SEQ ID NO: 43329 - DNA, 20 bp, Hepatitis E virus
cacttacaccactagcctgg

SEQ ID NO: 43330 - DNA, 20 bp, Hepatitis E virus
caccactagcctgggtgctg

SEQ ID NO: 43331 - DNA, 20 bp, Human herpesvirus 3
acgttcgtaatgggcatata

SEQ ID NO: 43332 - DNA, 20 bp, Human herpesvirus 3
gtaatgggcatataatgatg

SEQ ID NO: 43333 - DNA, 20 bp, Human herpesvirus 3
tatgcccattacgaacgtca

SEQ ID NO: 43334 - DNA, 20 bp, Human herpesvirus 3
cgaacgtcaagtattggctg

SEQ ID NO: 43335 - DNA, 20 bp, Human herpesvirus 3
gctgcatatcgacgactcta

SEQ ID NO: 43336 - DNA, 20 bp, Human herpesvirus 3
tgcttggattacaccataat

SEQ ID NO: 43337 - DNA, 20 bp, Human herpesvirus 3
gattacaccataataatgtt

SEQ ID NO: 43338 - DNA, 20 bp, Human herpesvirus 3
caccataataatgttcctga

SEQ ID NO: 43339 - DNA, 20 bp, Human herpesvirus 3
ctgaatcgttggtggtctcg

SEQ ID NO: 43340 - DNA, 20 bp, Human herpesvirus 3
gtggtctcgtgtatgtctaa

SEQ ID NO: 43341 - DNA, 20 bp, Human herpesvirus 3
ctatataacataaccggtaa

SEQ ID NO: 43342 - DNA, 20 bp, Human herpesvirus 3
acgcattgcccagttgacgg

SEQ ID NO: 43343 - DNA, 20 bp, Human herpesvirus 3
cccagttgacggtgcggatc

SEQ ID NO: 43344 - DNA, 20 bp, Human herpesvirus 3
acggtgcggatctataaggt

SEQ ID NO: 43345 - DNA, 20 bp, Human herpesvirus 3
tagatccgcaccgtcaactg

SEQ ID NO: 43346 - DNA, 20 bp, Human herpesvirus 3
caactttcgatcataaacga

SEQ ID NO: 43347 - DNA, 20 bp, Human herpesvirus 3
cgatcataaacgatttatag

SEQ ID NO: 43348 - DNA, 20 bp, Human herpesvirus 3
gatcataaacgatttatagg

SEQ ID NO: 43349 - DNA, 20 bp, Human herpesvirus 3
ataggaacggcatatgaaag

SEQ ID NO: 43350 - DNA, 20 bp, Human herpesvirus 3
taggaacggcatatgaaaga

SEQ ID NO: 43351 - DNA, 20 bp, Human herpesvirus 3
gatgttgtgttgcaaaaaca

SEQ ID NO: 43352 - DNA, 20 bp, Human herpesvirus 3
tgttgcaaaaacaaagacag

SEQ ID NO: 43353 - DNA, 20 bp, Human herpesvirus 3
caaaaacaaagacagtttga

SEQ ID NO: 43354 - DNA, 20 bp, Human herpesvirus 3
gaagagaccgcgtctcgctt

SEQ ID NO: 43355 - DNA, 20 bp, Human herpesvirus 3
aagagaccgcgtctcgctta

SEQ ID NO: 43356 - DNA, 20 bp, Human herpesvirus 3
tgttttatgggaacgaaaag

SEQ ID NO: 43357 - DNA, 20 bp, Human herpesvirus 3
tatgggaacgaaaagactcg

SEQ ID NO: 43358 - DNA, 20 bp, Human herpesvirus 3
atgggaacgaaaagactcga

SEQ ID NO: 43359 - DNA, 20 bp, Human herpesvirus 3
tgggaacgaaaagactcgat

SEQ ID NO: 43360 - DNA, 20 bp, Human herpesvirus 3
cagctccggattatgtggtc

SEQ ID NO: 43361 - DNA, 20 bp, Human herpesvirus 3
cacataaattttttgagttg

SEQ ID NO: 43362 - DNA, 20 bp, Human herpesvirus 3
tttgagttggtcaacggccc

SEQ ID NO: 43363 - DNA, 20 bp, Human herpesvirus 3
ttgagttggtcaacggccca

SEQ ID NO: 43364 - DNA, 20 bp, Human herpesvirus 3
tgagttggtcaacggcccat

SEQ ID NO: 43365 - DNA, 20 bp, Human herpesvirus 3
gagttggtcaacggcccatt

SEQ ID NO: 43366 - DNA, 20 bp, Human herpesvirus 3
taattccactataaaacaaa

SEQ ID NO: 43367 - DNA, 20 bp, Human herpesvirus 3
aattccactataaaacaaac

SEQ ID NO: 43368 - DNA, 20 bp, Human herpesvirus 3
attccactataaaacaaacg

SEQ ID NO: 43369 - DNA, 20 bp, Human herpesvirus 3
cactataaaacaaacggtct

SEQ ID NO: 43370 - DNA, 20 bp, Human herpesvirus 3
ccggcaccactggattccgt

SEQ ID NO: 43371 - DNA, 20 bp, Human herpesvirus 3
cgttaagcgcgtctcgtatc

SEQ ID NO: 43372 - DNA, 20 bp, Human herpesvirus 3
agcgcgtctcgtatctcggg

SEQ ID NO: 43373 - DNA, 20 bp, Human herpesvirus 3
ctggtaactccaacatacgc

SEQ ID NO: 43374 - DNA, 20 bp, Human herpesvirus 3
tggtaactccaacatacgca

SEQ ID NO: 43375 - DNA, 20 bp, Human herpesvirus 3
gagttaccagaaagtttgca

SEQ ID NO: 43376 - DNA, 20 bp, Human herpesvirus 3
caactggaaatgtgctgtca

SEQ ID NO: 43377 - DNA, 20 bp, Human herpesvirus 3
catttttgatttttttaaac

SEQ ID NO: 43378 - DNA, 20 bp, Human herpesvirus 3
ttgatttttttaaacaaata

SEQ ID NO: 43379 - DNA, 20 bp, Human herpesvirus 3
tgatttttttaaacaaatac

SEQ ID NO: 43380 - DNA, 20 bp, Human herpesvirus 3
gatttttttaaacaaatacg

SEQ ID NO: 43381 - DNA, 20 bp, Human herpesvirus 3
ataacaccgctatacgcatt

SEQ ID NO: 43382 - DNA, 20 bp, Human herpesvirus 3
cgatgaggtgctgcttcttc

SEQ ID NO: 43383 - DNA, 20 bp, Human herpesvirus 3
gatgaggtgctgcttcttcc

SEQ ID NO: 43384 - DNA, 20 bp, Human herpesvirus 3
ttccggtgaatattcataaa

SEQ ID NO: 43385 - DNA, 20 bp, Human herpesvirus 3
cggtgaatattcataaaact

SEQ ID NO: 43386 - DNA, 20 bp, Human herpesvirus 3
gcattttaaacgggtccggc

SEQ ID NO: 43387 - DNA, 20 bp, Human herpesvirus 3
taaacgggtccggctgccta

SEQ ID NO: 43388 - DNA, 20 bp, Human herpesvirus 3
aaacgggtccggctgcctaa

SEQ ID NO: 43389 - DNA, 20 bp, Human herpesvirus 3
aacgggtccggctgcctaaa

SEQ ID NO: 43390 - DNA, 20 bp, Human herpesvirus 3
cctttactgtaagtacaaaa

SEQ ID NO: 43391 - DNA, 20 bp, Human herpesvirus 3
ctctgggaatcggggggagg

SEQ ID NO: 43392 - DNA, 20 bp, Human herpesvirus 3
cgagcctcgtccgccgacgc

SEQ ID NO: 43393 - DNA, 20 bp, Human herpesvirus 3
ccagagtaatgtggccgccc

SEQ ID NO: 43394 - DNA, 20 bp, Human herpesvirus 3
tggggccgcggagacggtgt

SEQ ID NO: 43395 - DNA, 20 bp, Human herpesvirus 3
ggggccgcggagacggtgtt

SEQ ID NO: 43396 - DNA, 20 bp, Human herpesvirus 3
caaccgtcaaaacccggcag

SEQ ID NO: 43397 - DNA, 20 bp, Human herpesvirus 3
acggggcgacagggggacgc

SEQ ID NO: 43398 - DNA, 20 bp, Human herpesvirus 3
tgacggttgcaaggacctcg

SEQ ID NO: 43399 - DNA, 20 bp, Human herpesvirus 3
gacggttgcaaggacctcgc

SEQ ID NO: 43400 - DNA, 20 bp, Human herpesvirus 3
acggttgcaaggacctcgcg

SEQ ID NO: 43401 - DNA, 20 bp, Human herpesvirus 3
gatgggaggggtgccgatcc

SEQ ID NO: 43402 - DNA, 20 bp, Human herpesvirus 3
cgtcgggcatcatgagcggc

SEQ ID NO: 43403 - DNA, 20 bp, Human herpesvirus 3
gcccggatcggcacccctcc

SEQ ID NO: 43404 - DNA, 20 bp, Human herpesvirus 3
ggaccgtccggggagaccag

SEQ ID NO: 43405 - DNA, 20 bp, Human herpesvirus 3
gaccgtccggggagaccaga

SEQ ID NO: 43406 - DNA, 20 bp, Human herpesvirus 3
taccccgggcatcatgtttc

SEQ ID NO: 43407 - DNA, 20 bp, Human herpesvirus 3
ccttgggcgggtatcatcgg

SEQ ID NO: 43408 - DNA, 20 bp, Human herpesvirus 3
cttgggcgggtatcatcggt

SEQ ID NO: 43409 - DNA, 20 bp, Human herpesvirus 3
ggcgggtatcatcggtctca

SEQ ID NO: 43410 - DNA, 20 bp, Human herpesvirus 3
gagaccgatgatacccgccc

SEQ ID NO: 43411 - DNA, 20 bp, Human immunodeficiency virus 1
ggttaaggccagggggaaag

SEQ ID NO: 43412 - DNA, 20 bp, Human immunodeficiency virus 1
aggccagggggaaagaaaaa

SEQ ID NO: 43413 - DNA, 20 bp, Human immunodeficiency virus 1
aaacatatagtatgggcaag

SEQ ID NO: 43414 - DNA, 20 bp, Human immunodeficiency virus 1
gcagttaatcctggcctgtt

SEQ ID NO: 43415 - DNA, 20 bp, Human immunodeficiency virus 1
atcctggcctgttagaaaca

SEQ ID NO: 43416 - DNA, 20 bp, Human immunodeficiency virus 1
ccctatagtgcagaacatcc

SEQ ID NO: 43417 - DNA, 20 bp, Human immunodeficiency virus 1
cccctggatgttctgcacta

SEQ ID NO: 43418 - DNA, 20 bp, Human immunodeficiency virus 1
tgcactatagggtaattttg

SEQ ID NO: 43419 - DNA, 20 bp, Human immunodeficiency virus 1
tggctgacctgattgctgtg

SEQ ID NO: 43420 - DNA, 20 bp, Human immunodeficiency virus 1
ggctgacctgattgctgtgt

SEQ ID NO: 43421 - DNA, 20 bp, Human immunodeficiency virus 1
caccaggccagatgagagaa

SEQ ID NO: 43422 - DNA, 20 bp, Human immunodeficiency virus 1
ctgctatgtcacttcccctt

SEQ ID NO: 43423 - DNA, 20 bp, Human immunodeficiency virus 1
cccttggttctctcatctgg

SEQ ID NO: 43424 - DNA, 20 bp, Human immunodeficiency virus 1
gttctctcatctggcctggt

SEQ ID NO: 43425 - DNA, 20 bp, Human immunodeficiency virus 1
tctcatctggcctggtgcaa

SEQ ID NO: 43426 - DNA, 20 bp, Human immunodeficiency virus 1
gatgacagaaaccttgttgg

SEQ ID NO: 43427 - DNA, 20 bp, Human immunodeficiency virus 1
ttggtccaaaatgcgaaccc

SEQ ID NO: 43428 - DNA, 20 bp, Human immunodeficiency virus 1
gtccaaaatgcgaacccaga

SEQ ID NO: 43429 - DNA, 20 bp, Human immunodeficiency virus 1
taagactattttaaaagcat

SEQ ID NO: 43430 - DNA, 20 bp, Human immunodeficiency virus 1
taaaagcattgggaccagcg

SEQ ID NO: 43431 - DNA, 20 bp, Human immunodeficiency virus 1
cacagggatggaaaggatca

SEQ ID NO: 43432 - DNA, 20 bp, Human immunodeficiency virus 1
caaagtagcatgacaaaaat

SEQ ID NO: 43433 - DNA, 20 bp, Human immunodeficiency virus 1
gagccttttagaaaacaaaa

SEQ ID NO: 43434 - DNA, 20 bp, Human immunodeficiency virus 1
tgttttctaaaaggctctaa

SEQ ID NO: 43435 - DNA, 20 bp, Human immunodeficiency virus 1
gttttctaaaaggctctaag

SEQ ID NO: 43436 - DNA, 20 bp, Human immunodeficiency virus 1
gtggggaaattgaattgggc

SEQ ID NO: 43437 - DNA, 20 bp, Human immunodeficiency virus 1
aattgggcaagtcagattta

SEQ ID NO: 43438 - DNA, 20 bp, Human immunodeficiency virus 1
ggcaagtcagatttacccag

SEQ ID NO: 43439 - DNA, 20 bp, Human immunodeficiency virus 1
ctttaatccctgggtaaatc

SEQ ID NO: 43440 - DNA, 20 bp, Human immunodeficiency virus 1
aatccctgggtaaatctgac

SEQ ID NO: 43441 - DNA, 20 bp, Human immunodeficiency virus 1
acagaggcagtgcaaaaaat

SEQ ID NO: 43442 - DNA, 20 bp, Human immunodeficiency virus 1
aaactgcccatacaaaagga

SEQ ID NO: 43443 - DNA, 20 bp, Human immunodeficiency virus 1
aactgcccatacaaaaggaa

SEQ ID NO: 43444 - DNA, 20 bp, Human immunodeficiency virus 1
ccaatactctgtccaccatg

SEQ ID NO: 43445 - DNA, 20 bp, Human immunodeficiency virus 1
cccatgtttccttttgtatg

SEQ ID NO: 43446 - DNA, 20 bp, Human immunodeficiency virus 1
gagagcaatggctagtgatt

SEQ ID NO: 43447 - DNA, 20 bp, Human immunodeficiency virus 1
taacctgccacctgtagtag

SEQ ID NO: 43448 - DNA, 20 bp, Human immunodeficiency virus 1
aacctgccacctgtagtagc

SEQ ID NO: 43449 - DNA, 20 bp, Human immunodeficiency virus 1
acctgccacctgtagtagca

SEQ ID NO: 43450 - DNA, 20 bp, Human immunodeficiency virus 1
cttttgctactacaggtggc

SEQ ID NO: 43451 - DNA, 20 bp, Human immunodeficiency virus 1
tcttttaaaattagcaggaa

SEQ ID NO: 43452 - DNA, 20 bp, Human immunodeficiency virus 1
cttttaaaattagcaggaag

SEQ ID NO: 43453 - DNA, 20 bp, Human immunodeficiency virus 1
ttttaaaattagcaggaaga

SEQ ID NO: 43454 - DNA, 20 bp, Human immunodeficiency virus 1
taaaattagcaggaagatgg

SEQ ID NO: 43455 - DNA, 20 bp, Human immunodeficiency virus 1
aaaattagcaggaagatggc

SEQ ID NO: 43456 - DNA, 20 bp, Human immunodeficiency virus 1
tatagacatcactatgaaag

SEQ ID NO: 43457 - DNA, 20 bp, Human immunodeficiency virus 1
atagacatcactatgaaagc

SEQ ID NO: 43458 - DNA, 20 bp, Human immunodeficiency virus 1
tagacatcactatgaaagcc

SEQ ID NO: 43459 - DNA, 20 bp, Human immunodeficiency virus 1
agaagtacacatcccactag

SEQ ID NO: 43460 - DNA, 20 bp, Human immunodeficiency virus 1
gtaataacaacatattgggg

SEQ ID NO: 43461 - DNA, 20 bp, Human immunodeficiency virus 1
gcactagcagcattaataac

SEQ ID NO: 43462 - DNA, 20 bp, Human immunodeficiency virus 1
ataacaccaaaaaagataaa

SEQ ID NO: 43463 - DNA, 20 bp, Human immunodeficiency virus 1
gcctagtgttacgaaactga

SEQ ID NO: 43464 - DNA, 20 bp, Human immunodeficiency virus 1
cctagtgttacgaaactgac

SEQ ID NO: 43465 - DNA, 20 bp, Human immunodeficiency virus 1
cgaaactgacagaggataga

SEQ ID NO: 43466 - DNA, 20 bp, Human immunodeficiency virus 1
tggggatacttgggcaggag

SEQ ID NO: 43467 - DNA, 20 bp, Human immunodeficiency virus 1
ggcaggagtggaagccataa

SEQ ID NO: 43468 - DNA, 20 bp, Human immunodeficiency virus 1
tgcaacaactgctgtttatc

SEQ ID NO: 43469 - DNA, 20 bp, Human immunodeficiency virus 1
atccattttcagaattgggt

SEQ ID NO: 43470 - DNA, 20 bp, Human immunodeficiency virus 1
tccattttcagaattgggtg

SEQ ID NO: 43471 - DNA, 20 bp, Human immunodeficiency virus 1
tgggtcacagtctattatgg

SEQ ID NO: 43472 - DNA, 20 bp, Human immunodeficiency virus 1
tggggtacctgtgtggaagg

SEQ ID NO: 43473 - DNA, 20 bp, Human immunodeficiency virus 1
tgtgcatcagatgctaaagc

SEQ ID NO: 43474 - DNA, 20 bp, Human immunodeficiency virus 1
gtgcatcagatgctaaagca

SEQ ID NO: 43475 - DNA, 20 bp, Human immunodeficiency virus 1
tgcatcagatgctaaagcat

SEQ ID NO: 43476 - DNA, 20 bp, Human immunodeficiency virus 1
ggccagtagtatcaactcaa

SEQ ID NO: 43477 - DNA, 20 bp, Human immunodeficiency virus 1
aatggcagtctagcagaaga

SEQ ID NO: 43478 - DNA, 20 bp, Human immunodeficiency virus 1
ctacctcttcttctgctaga

SEQ ID NO: 43479 - DNA, 20 bp, Human immunodeficiency virus 1
ttctgctagactgccattta

SEQ ID NO: 43480 - DNA, 20 bp, Human immunodeficiency virus 1
tgctagactgccatttaaca

SEQ ID NO: 43481 - DNA, 20 bp, Human immunodeficiency virus 1
gatgttcatcaaatattaca

SEQ ID NO: 43482 - DNA, 20 bp, Human immunodeficiency virus 1
atcaaatattacagggctgc

SEQ ID NO: 43483 - DNA, 20 bp, Human immunodeficiency virus 1
cagggctgctattaacaaga

SEQ ID NO: 43484 - DNA, 20 bp, Human immunodeficiency virus 1
acaagagatggtggtaatag

SEQ ID NO: 43485 - DNA, 20 bp, Human immunodeficiency virus 1
agacctggaggaggagatat

SEQ ID NO: 43486 - DNA, 20 bp, Human immunodeficiency virus 1
ttgtctggtatagtgcagca

SEQ ID NO: 43487 - DNA, 20 bp, Human immunodeficiency virus 1
tctggtatagtgcagcagca

SEQ ID NO: 43488 - DNA, 20 bp, Human immunodeficiency virus 1
gctgagggctattgaggcgc

SEQ ID NO: 43489 - DNA, 20 bp, Human immunodeficiency virus 1
ctgagggctattgaggcgca

SEQ ID NO: 43490 - DNA, 20 bp, Human immunodeficiency virus 1
aggcgcaacagcatctgttg

SEQ ID NO: 43491 - DNA, 20 bp, Human immunodeficiency virus 1
tgcctggctagaagcacaag

SEQ ID NO: 43492 - DNA, 20 bp, Human immunodeficiency virus 1
tgcttctagccaggcacaag

SEQ ID NO: 43493 - DNA, 20 bp, Human immunodeficiency virus 1
tagccaggcacaagcagcat

SEQ ID NO: 43494 - DNA, 20 bp, Human immunodeficiency virus 1
gtagctgctgtattgctact

SEQ ID NO: 43495 - DNA, 20 bp, Human immunodeficiency virus 1
ctacttgtgattgctccatg

SEQ ID NO: 43496 - DNA, 20 bp, Human immunodeficiency virus 1
aagaactgctgacatcgagc

SEQ ID NO: 43497 - DNA, 20 bp, Human immunodeficiency virus 1
ctacaagggactttccgctg

SEQ ID NO: 43498 - DNA, 20 bp, Human immunodeficiency virus 1
ccgctggggactttccaggg

SEQ ID NO: 43499 - DNA, 20 bp, Human immunodeficiency virus 1
cgctggggactttccaggga

SEQ ID NO: 43500 - DNA, 20 bp, Human immunodeficiency virus 1
ccagggaggcgtggcctggg

SEQ ID NO: 43501 - DNA, 20 bp, Human herpesvirus 2
accgcgactccacctccgag

SEQ ID NO: 43502 - DNA, 20 bp, Human herpesvirus 2
ccacctcggtctcctcctcc

SEQ ID NO: 43503 - DNA, 20 bp, Human herpesvirus 2
tccagactgagcccctggga

SEQ ID NO: 43504 - DNA, 20 bp, Human herpesvirus 2
ggagctgatgccgtagtcgg

SEQ ID NO: 43505 - DNA, 20 bp, Human herpesvirus 2
gagctgatgccgtagtcggc

SEQ ID NO: 43506 - DNA, 20 bp, Human herpesvirus 2
tccacgtaggtgctgaaggg

SEQ ID NO: 43507 - DNA, 20 bp, Human herpesvirus 2
tcctacgggagctcttcggg

SEQ ID NO: 43508 - DNA, 20 bp, Human herpesvirus 2
ggggaggtgtttgagagcgc

SEQ ID NO: 43509 - DNA, 20 bp, Human herpesvirus 2
gagagcgcccccttcagcac

SEQ ID NO: 43510 - DNA, 20 bp, Human herpesvirus 2
agagcgcccccttcagcacc

SEQ ID NO: 43511 - DNA, 20 bp, Human herpesvirus 2
gtccagcccggcgaagataa

SEQ ID NO: 43512 - DNA, 20 bp, Human herpesvirus 2
cccgacgacgaccttgacgt

SEQ ID NO: 43513 - DNA, 20 bp, Human herpesvirus 2
acgttatcttcgccgggctg

SEQ ID NO: 43514 - DNA, 20 bp, Human herpesvirus 2
tcttcgccgggctggacgaa

SEQ ID NO: 43515 - DNA, 20 bp, Human herpesvirus 2
gccgggctggacgaacagca

SEQ ID NO: 43516 - DNA, 20 bp, Human herpesvirus 2
acgaagctgtcgtcgcgcag

SEQ ID NO: 43517 - DNA, 20 bp, Human herpesvirus 2
cggaggcgcgcggtcaccgc

SEQ ID NO: 43518 - DNA, 20 bp, Human herpesvirus 2
gggttcgacgggacgtttcg

SEQ ID NO: 43519 - DNA, 20 bp, Human herpesvirus 2
ggttcgacgggacgtttcgg

SEQ ID NO: 43520 - DNA, 20 bp, Human herpesvirus 2
gacgggacgtttcggacctt

SEQ ID NO: 43521 - DNA, 20 bp, Human herpesvirus 2
aggtaggcgtggagcttggc

SEQ ID NO: 43522 - DNA, 20 bp, Human herpesvirus 2
ggtaggcgtggagcttggcc

SEQ ID NO: 43523 - DNA, 20 bp, Human herpesvirus 2
gccatgtacgcgctgacctc

SEQ ID NO: 43524 - DNA, 20 bp, Human herpesvirus 2
tgggacgagaacagccgcgt

SEQ ID NO: 43525 - DNA, 20 bp, Human herpesvirus 2
cggggtggacgcggctgttc

SEQ ID NO: 43526 - DNA, 20 bp, Human herpesvirus 2
gcgtggcgcccgtgaccacg

SEQ ID NO: 43527 - DNA, 20 bp, Human herpesvirus 2
agggtctgcacgcacgtact

SEQ ID NO: 43528 - DNA, 20 bp, Human herpesvirus 2
ccggatccggcgttgccggt

SEQ ID NO: 43529 - DNA, 20 bp, Human herpesvirus 2
aagattctgcgccaccgcaa

SEQ ID NO: 43530 - DNA, 20 bp, Human herpesvirus 2
tgcgccaccgcaacaaccag

SEQ ID NO: 43531 - DNA, 20 bp, Human herpesvirus 2
cctggccctggttgttgcgg

SEQ ID NO: 43532 - DNA, 20 bp, Human herpesvirus 2
ctggccctggttgttgcggt

SEQ ID NO: 43533 - DNA, 20 bp, Human herpesvirus 2
ttgcggtggcgcagaatctt

SEQ ID NO: 43534 - DNA, 20 bp, Human herpesvirus 2
gtcaaggtgtcggcgtggtt

SEQ ID NO: 43535 - DNA, 20 bp, Human herpesvirus 2
acgaacagcgagggcgtggc

SEQ ID NO: 43536 - DNA, 20 bp, Human herpesvirus 2
tccaggtacatcagcaggca

SEQ ID NO: 43537 - DNA, 20 bp, Human herpesvirus 2
gacgacgagctagtcctgcc

SEQ ID NO: 43538 - DNA, 20 bp, Human herpesvirus 2
ttggccagcaggtagtgggc

SEQ ID NO: 43539 - DNA, 20 bp, Human herpesvirus 2
gccagcaggtagtgggccat

SEQ ID NO: 43540 - DNA, 20 bp, Human herpesvirus 2
catgccacgacgcccggggg

SEQ ID NO: 43541 - DNA, 20 bp, Human herpesvirus 2
ccgtgtatcgaacgagcgcg

SEQ ID NO: 43542 - DNA, 20 bp, Human herpesvirus 2
tagggtgctaaagttcaccg

SEQ ID NO: 43543 - DNA, 20 bp, Human herpesvirus 2
agcaccctataagtctgggg

SEQ ID NO: 43544 - DNA, 20 bp, Human herpesvirus 2
gcaccctataagtctggggc

SEQ ID NO: 43545 - DNA, 20 bp, Human herpesvirus 2
cagtggcccagttcgaacac

SEQ ID NO: 43546 - DNA, 20 bp, Human herpesvirus 2
gaacaccagctgcatgtagc

SEQ ID NO: 43547 - DNA, 20 bp, Human herpesvirus 2
agcagctccagcacgtcctc

SEQ ID NO: 43548 - DNA, 20 bp, Human herpesvirus 2
gaactgggccactgtaacgt

SEQ ID NO: 43549 - DNA, 20 bp, Human herpesvirus 2
agggtggggtgtagggccac

SEQ ID NO: 43550 - DNA, 20 bp, Human herpesvirus 2
gggtggggtgtagggccaca

SEQ ID NO: 43551 - DNA, 20 bp, Human herpesvirus 2
atcgtggggatgacgcccgt

SEQ ID NO: 43552 - DNA, 20 bp, Human herpesvirus 2
tggccctacaccccacccta

SEQ ID NO: 43553 - DNA, 20 bp, Human herpesvirus 2
cggagagtccgtacccgccc

SEQ ID NO: 43554 - DNA, 20 bp, Human herpesvirus 2
tgtagatgaccacccggtac

SEQ ID NO: 43555 - DNA, 20 bp, Human herpesvirus 2
acggaccgcgtgctgctgct

SEQ ID NO: 43556 - DNA, 20 bp, Human herpesvirus 2
cggaccgcgtgctgctgctc

SEQ ID NO: 43557 - DNA, 20 bp, Human herpesvirus 2
tgtcggcagcagcagggccg

SEQ ID NO: 43558 - DNA, 20 bp, Human herpesvirus 2
gcgagcgtatcgtcgaaggc

SEQ ID NO: 43559 - DNA, 20 bp, Human herpesvirus 2
gacgatacgctcgccaagtt

SEQ ID NO: 43560 - DNA, 20 bp, Human herpesvirus 2
tgggcctcgcgttctccggg

SEQ ID NO: 43561 - DNA, 20 bp, Human herpesvirus 2
tccggggcgcggccctgctg

SEQ ID NO: 43562 - DNA, 20 bp, Human herpesvirus 2
agggggcggttgttaaactc

SEQ ID NO: 43563 - DNA, 20 bp, Human herpesvirus 2
ttaaactcggcccgctcgtt

SEQ ID NO: 43564 - DNA, 20 bp, Human herpesvirus 2
aactcggcccgctcgttgtt

SEQ ID NO: 43565 - DNA, 20 bp, Human herpesvirus 2
aacaaccgccccctgaagca

SEQ ID NO: 43566 - DNA, 20 bp, Human herpesvirus 2
acaaccgccccctgaagcac

SEQ ID NO: 43567 - DNA, 20 bp, Human herpesvirus 2
gcggcggccgcacccacgac

SEQ ID NO: 43568 - DNA, 20 bp, Human herpesvirus 2
atcaccccgctcgggttctc

SEQ ID NO: 43569 - DNA, 20 bp, Human herpesvirus 2
tcaccccgctcgggttctcg

SEQ ID NO: 43570 - DNA, 20 bp, Human herpesvirus 2
agccgcgcctccaattccaa

SEQ ID NO: 43571 - DNA, 20 bp, Human herpesvirus 2
gccgcgcctccaattccaag

SEQ ID NO: 43572 - DNA, 20 bp, Human herpesvirus 2
caagtgggccgccttggcgg

SEQ ID NO: 43573 - DNA, 20 bp, Human herpesvirus 2
gcggccataaaggcgccaac

SEQ ID NO: 43574 - DNA, 20 bp, Human herpesvirus 2
tgtactcacgccctcccggt

SEQ ID NO: 43575 - DNA, 20 bp, Human herpesvirus 2
caggccctgcaccgctccga

SEQ ID NO: 43576 - DNA, 20 bp, Human herpesvirus 2
aggccctgcaccgctccgaa

SEQ ID NO: 43577 - DNA, 20 bp, Human herpesvirus 2
cggcagttggttcacttcgt

SEQ ID NO: 43578 - DNA, 20 bp, Human herpesvirus 2
ggcagttggttcacttcgtg

SEQ ID NO: 43579 - DNA, 20 bp, Human herpesvirus 2
gttcacttcgtgcgggactt

SEQ ID NO: 43580 - DNA, 20 bp, Human herpesvirus 2
tcgttcccggacggctcgcg

SEQ ID NO: 43581 - DNA, 20 bp, Human herpesvirus 2
ccggacggctcgcgcagcac

SEQ ID NO: 43582 - DNA, 20 bp, Human herpesvirus 2
gcctccagccacaacacgaa

SEQ ID NO: 43583 - DNA, 20 bp, Human herpesvirus 2
cctccagccacaacacgaac

SEQ ID NO: 43584 - DNA, 20 bp, Human herpesvirus 2
cgttcgtgttgtggctggag

SEQ ID NO: 43585 - DNA, 20 bp, Human herpesvirus 2
gggggggggtgggtgagcgg

SEQ ID NO: 43586 - DNA, 20 bp, Human herpesvirus 2
tgtcgcggggcggctacggg

SEQ ID NO: 43587 - DNA, 20 bp, Human herpesvirus 2
tccgctgacgcgtgcttttg

SEQ ID NO: 43588 - DNA, 20 bp, Human herpesvirus 2
tgttccaccgctcacccacc

SEQ ID NO: 43589 - DNA, 20 bp, Human herpesvirus 2
gttccaccgctcacccaccc

SEQ ID NO: 43590 - DNA, 20 bp, Human herpesvirus 2
aacccaaggcagaggtacgc

SEQ ID NO: 43591 - DNA, 20 bp, Human herpesvirus 2
ctcgcagaccctgtgtgggg

SEQ ID NO: 43592 - DNA, 20 bp, Human herpesvirus 2
cgggagagagctacgcgtac

SEQ ID NO: 43593 - DNA, 20 bp, Human herpesvirus 2
ggttcaatcgccgcctctgc

SEQ ID NO: 43594 - DNA, 20 bp, Human herpesvirus 2
gtggcggcgtagatgcgctt

SEQ ID NO: 43595 - DNA, 20 bp, Human herpesvirus 2
tccagggcctccaggaagac

SEQ ID NO: 43596 - DNA, 20 bp, Human herpesvirus 2
ctggaggccctggagaagcg

SEQ ID NO: 43597 - DNA, 20 bp, Human herpesvirus 2
gggttttggcggcccgtggg

SEQ ID NO: 43598 - DNA, 20 bp, Human herpesvirus 2
tggcggcccgtgggttgtta

SEQ ID NO: 43599 - DNA, 20 bp, Human herpesvirus 2
ggcggcccgtgggttgttag

SEQ ID NO: 43600 - DNA, 20 bp, Human herpesvirus 2
gcggcccgtgggttgttagt

SEQ ID NO: 43601 - DNA, 20 bp, Human herpesvirus 2
ttagtcgcgtccgccggcgg

SEQ ID NO: 43602 - DNA, 20 bp, Human herpesvirus 2
tatccgatcccgcggggcaa

SEQ ID NO: 43603 - DNA, 20 bp, Human herpesvirus 2
ccccgcgggatcggatacaa

SEQ ID NO: 43604 - DNA, 20 bp, Human herpesvirus 2
cgggcgttgacgtccgccgc

SEQ ID NO: 43605 - DNA, 20 bp, Human herpesvirus 2
tgccatgacgtccgccggga

SEQ ID NO: 43606 - DNA, 20 bp, Human herpesvirus 2
ccggagcgccgtcgtcgccc

SEQ ID NO: 43607 - DNA, 20 bp, Human herpesvirus 2
cgacgcgctggacgtttggg

SEQ ID NO: 43608 - DNA, 20 bp, Human herpesvirus 2
gacgcgctggacgtttggga

SEQ ID NO: 43609 - DNA, 20 bp, Human herpesvirus 2
gggaacacaggcgcttcatc

SEQ ID NO: 43610 - DNA, 20 bp, Human herpesvirus 2
ggaacacaggcgcttcatcg

SEQ ID NO: 43611 - DNA, 20 bp, Human herpesvirus 2
cgccttcgagtgcgccgtgc

SEQ ID NO: 43612 - DNA, 20 bp, Human herpesvirus 2
gagtgcgccgtgctgtgtct

SEQ ID NO: 43613 - DNA, 20 bp, Human herpesvirus 2
ggtacagcagatacagacac

SEQ ID NO: 43614 - DNA, 20 bp, Human herpesvirus 2
tcgaggcggtccgcgtacac

SEQ ID NO: 43615 - DNA, 20 bp, Human herpesvirus 2
aggtcgatgaaggtgctgac

SEQ ID NO: 43616 - DNA, 20 bp, Human herpesvirus 2
atcgacctgaacatcaccat

SEQ ID NO: 43617 - DNA, 20 bp, Human herpesvirus 2
ctccttgaggtgcggcagga

SEQ ID NO: 43618 - DNA, 20 bp, Human herpesvirus 2
aggtgcggcaggagccccac

SEQ ID NO: 43619 - DNA, 20 bp, Human herpesvirus 2
tcgacgctgtagtacagcgc

SEQ ID NO: 43620 - DNA, 20 bp, Human herpesvirus 2
atcatgggcgcggggggttc

SEQ ID NO: 43621 - DNA, 20 bp, Human herpesvirus 2
cgctggagggcggtccagaa

SEQ ID NO: 43622 - DNA, 20 bp, Human herpesvirus 2
ggctggttcgaccccggggg

SEQ ID NO: 43623 - DNA, 20 bp, Human herpesvirus 2
tggaccgccctccagcgcaa

SEQ ID NO: 43624 - DNA, 20 bp, Human herpesvirus 2
ccgccggcagaacttctaca

SEQ ID NO: 43625 - DNA, 20 bp, Human herpesvirus 2
tacaacccccacctcgctca

SEQ ID NO: 43626 - DNA, 20 bp, Human herpesvirus 2
ggctgcgttccggtctgagc

SEQ ID NO: 43627 - DNA, 20 bp, Human herpesvirus 2
gctgcgttccggtctgagcg

SEQ ID NO: 43628 - DNA, 20 bp, Human herpesvirus 2
cggtctgagcgaggtggggg

SEQ ID NO: 43629 - DNA, 20 bp, Human herpesvirus 2
ggaacctcgagcgacgtcga

SEQ ID NO: 43630 - DNA, 20 bp, Human herpesvirus 2
aactgcacggcggacaacct

SEQ ID NO: 43631 - DNA, 20 bp, Human herpesvirus 2
actgcacggcggacaacctg

SEQ ID NO: 43632 - DNA, 20 bp, Human herpesvirus 2
tccgccgtgcagttaaactc

SEQ ID NO: 43633 - DNA, 20 bp, Human herpesvirus 2
aactcgacgtcgctcgaggt

SEQ ID NO: 43634 - DNA, 20 bp, Human herpesvirus 2
gcgcagaggaacgcgtaatc

SEQ ID NO: 43635 - DNA, 20 bp, Human herpesvirus 2
cgcgttcctctgcgccaagt

SEQ ID NO: 43636 - DNA, 20 bp, Human herpesvirus 2
ctctgcgccaagtgcctggg

SEQ ID NO: 43637 - DNA, 20 bp, Human herpesvirus 2
cggtgctgtttcaggggttt

SEQ ID NO: 43638 - DNA, 20 bp, Human herpesvirus 2
ggtgctgtttcaggggtttt

SEQ ID NO: 43639 - DNA, 20 bp, Human herpesvirus 2
caggggttttttaaccggcc

SEQ ID NO: 43640 - DNA, 20 bp, Human herpesvirus 2
aggggttttttaaccggccc

SEQ ID NO: 43641 - DNA, 20 bp, Human herpesvirus 2
tttaaccggccccacggcgc

SEQ ID NO: 43642 - DNA, 20 bp, Human herpesvirus 2
gtgcgcatgccccgggtgca

SEQ ID NO: 43643 - DNA, 20 bp, Human herpesvirus 2
tgcgcatgccccgggtgcag

SEQ ID NO: 43644 - DNA, 20 bp, Human herpesvirus 2
ggggacttgacggtcgccac

SEQ ID NO: 43645 - DNA, 20 bp, Human herpesvirus 2
acggtcgccactctcctgcg

SEQ ID NO: 43646 - DNA, 20 bp, Human herpesvirus 2
gcccaccgattcctgttgcg

SEQ ID NO: 43647 - DNA, 20 bp, Human herpesvirus 2
ctgttgcgttcctgtcggcc

SEQ ID NO: 43648 - DNA, 20 bp, Human herpesvirus 2
cgttcctgtcggccggtgct

SEQ ID NO: 43649 - DNA, 20 bp, Human herpesvirus 2
ccccggtcccccccaacgca

SEQ ID NO: 43650 - DNA, 20 bp, Human herpesvirus 2
acgggttcaaacccctggtg

SEQ ID NO: 43651 - DNA, 20 bp, Human herpesvirus 2
aaacccctggtgcggcggtc

SEQ ID NO: 43652 - DNA, 20 bp, Human herpesvirus 2
gaacccgttaaccagccgcg

SEQ ID NO: 43653 - DNA, 20 bp, Human herpesvirus 2
aacccgttaaccagccgcgt

SEQ ID NO: 43654 - DNA, 20 bp, Human herpesvirus 2
gttgtgcgccgccaccaggg

SEQ ID NO: 43655 - DNA, 20 bp, Human herpesvirus 2
ttgtgcgccgccaccaggga

SEQ ID NO: 43656 - DNA, 20 bp, Human herpesvirus 2
tgcgccgccaccagggagtc

SEQ ID NO: 43657 - DNA, 20 bp, Human herpesvirus 2
agggccggcatgatgctggc

SEQ ID NO: 43658 - DNA, 20 bp, Human herpesvirus 2
gcatgcagggcctgcacacg

SEQ ID NO: 43659 - DNA, 20 bp, Human herpesvirus 2
aggcacgccgtgtgcaggcc

SEQ ID NO: 43660 - DNA, 20 bp, Human herpesvirus 2
gtgggggacgaggaggacgt

SEQ ID NO: 43661 - DNA, 20 bp, Human herpesvirus 2
gagacgtcctcctcgtcccc

SEQ ID NO: 43662 - DNA, 20 bp, Human herpesvirus 2
tggccgggaccgcggtagtg

SEQ ID NO: 43663 - DNA, 20 bp, Human herpesvirus 2
ccgcagccgacgatagcgca

SEQ ID NO: 43664 - DNA, 20 bp, Human herpesvirus 2
ttgcccgccgatccgtcagg

SEQ ID NO: 43665 - DNA, 20 bp, Human herpesvirus 2
tgcccgccgatccgtcaggt

SEQ ID NO: 43666 - DNA, 20 bp, Human herpesvirus 2
gcccgccgatccgtcaggtc

SEQ ID NO: 43667 - DNA, 20 bp, Human herpesvirus 2
cccgccgatccgtcaggtcg

SEQ ID NO: 43668 - DNA, 20 bp, Human herpesvirus 2
gcgggggcggagtcgttcaa

SEQ ID NO: 43669 - DNA, 20 bp, Human herpesvirus 2
aactgaacatggtcaacaaa

SEQ ID NO: 43670 - DNA, 20 bp, Human herpesvirus 2
gttgaccatgttcagttgaa

SEQ ID NO: 43671 - DNA, 20 bp, Human herpesvirus 2
ttgaccatgttcagttgaac

SEQ ID NO: 43672 - DNA, 20 bp, Human herpesvirus 2
accatgttcagttgaacgac

SEQ ID NO: 43673 - DNA, 20 bp, Human herpesvirus 2
cggctcccgtggaggttacg

SEQ ID NO: 43674 - DNA, 20 bp, Human herpesvirus 2
cggcgctgtatgcgaccgac

SEQ ID NO: 43675 - DNA, 20 bp, Human herpesvirus 2
tcacctcctcgctcgccctc

SEQ ID NO: 43676 - DNA, 20 bp, Human herpesvirus 2
gtgaggagggcgagcgagga

SEQ ID NO: 43677 - DNA, 20 bp, Human herpesvirus 2
tgaggagggcgagcgaggag

SEQ ID NO: 43678 - DNA, 20 bp, Human herpesvirus 2
tgcacggctccctgacgatg

SEQ ID NO: 43679 - DNA, 20 bp, Human herpesvirus 2
ttcgagaagaaggcgtcgcg

SEQ ID NO: 43680 - DNA, 20 bp, Human herpesvirus 2
tcgagaagaaggcgtcgcgc

SEQ ID NO: 43681 - DNA, 20 bp, Human herpesvirus 2
cgagaagaaggcgtcgcgca

SEQ ID NO: 43682 - DNA, 20 bp, Human herpesvirus 2
gagaagaaggcgtcgcgcaa

SEQ ID NO: 43683 - DNA, 20 bp, Human herpesvirus 2
cgcgacgccttcttctcgaa

SEQ ID NO: 43684 - DNA, 20 bp, Human herpesvirus 2
ctcgcgctgagcgtcgggac

SEQ ID NO: 43685 - DNA, 20 bp, Human herpesvirus 2
tcgcgctgagcgtcgggacc

SEQ ID NO: 43686 - DNA, 20 bp, Human herpesvirus 2
agtggcaaagcactgctgac

SEQ ID NO: 43687 - DNA, 20 bp, Human herpesvirus 2
gtggcaaagcactgctgaca

SEQ ID NO: 43688 - DNA, 20 bp, Human herpesvirus 2
ttggtcccgacgctcagcgc

SEQ ID NO: 43689 - DNA, 20 bp, Human herpesvirus 2
gtttctgtatctagcgttcg

SEQ ID NO: 43690 - DNA, 20 bp, Human herpesvirus 2
ctgtatctagcgttcgtcgc

SEQ ID NO: 43691 - DNA, 20 bp, Human herpesvirus 2
tgtatctagcgttcgtcgcc

SEQ ID NO: 43692 - DNA, 20 bp, Human herpesvirus 2
gtcgcccttcaccaacgacg

SEQ ID NO: 43693 - DNA, 20 bp, Human herpesvirus 2
accaacgacgatgcatgttc

SEQ ID NO: 43694 - DNA, 20 bp, Human herpesvirus 2
aacgccagaccctggtgcag

SEQ ID NO: 43695 - DNA, 20 bp, Human herpesvirus 2
gaggcggatccggtcacctt

SEQ ID NO: 43696 - DNA, 20 bp, Human herpesvirus 2
ttgtaccaccgcccggccgt

SEQ ID NO: 43697 - DNA, 20 bp, Human herpesvirus 2
taccaccgcccggccgttgg

SEQ ID NO: 43698 - DNA, 20 bp, Human herpesvirus 2
aacggatagctcgcagagga

SEQ ID NO: 43699 - DNA, 20 bp, Human herpesvirus 2
tggtcgtgtgcagggcgttt

SEQ ID NO: 43700 - DNA, 20 bp, Human herpesvirus 2
ggtcgtgtgcagggcgtttt

SEQ ID NO: 43701 - DNA, 20 bp, Human herpesvirus 2
gtcgtgtgcagggcgttttc

SEQ ID NO: 43702 - DNA, 20 bp, Human herpesvirus 2
tcggcctgccacgtggcatt

SEQ ID NO: 43703 - DNA, 20 bp, Human herpesvirus 2
cggcctgccacgtggcattc

SEQ ID NO: 43704 - DNA, 20 bp, Human herpesvirus 2
gcggctcagaagcctgcatg

SEQ ID NO: 43705 - DNA, 20 bp, Human herpesvirus 2
gactacgaccgaccacacga

SEQ ID NO: 43706 - DNA, 20 bp, Human herpesvirus 2
tgagccgcgaatccccacca

SEQ ID NO: 43707 - DNA, 20 bp, Human herpesvirus 2
catgccccgcaaaacgcgtc

SEQ ID NO: 43708 - DNA, 20 bp, Human herpesvirus 2
tgcggggcatgcaagtcgac

SEQ ID NO: 43709 - DNA, 20 bp, Human herpesvirus 2
gcggggcatgcaagtcgaca

SEQ ID NO: 43710 - DNA, 20 bp, Human herpesvirus 2
cggggcatgcaagtcgacac

SEQ ID NO: 43711 - DNA, 20 bp, Human herpesvirus 2
ccctagcggccccggccccc

SEQ ID NO: 43712 - DNA, 20 bp, Human herpesvirus 2
cgcaacggaatccaggtctt

SEQ ID NO: 43713 - DNA, 20 bp, Human herpesvirus 2
atgcacgggatgcagaaggg

SEQ ID NO: 43714 - DNA, 20 bp, Human herpesvirus 2
tccctgcctgcaccccttct

SEQ ID NO: 43715 - DNA, 20 bp, Human herpesvirus 2
ccctgcctgcaccccttctg

SEQ ID NO: 43716 - DNA, 20 bp, Human herpesvirus 2
cctgcctgcaccccttctgc

SEQ ID NO: 43717 - DNA, 20 bp, Human herpesvirus 2
gttgtgaggagccacgaggg

SEQ ID NO: 43718 - DNA, 20 bp, Human herpesvirus 2
ttgtgaggagccacgaggga

SEQ ID NO: 43719 - DNA, 20 bp, Human herpesvirus 2
tgaggagccacgagggaccg

SEQ ID NO: 43720 - DNA, 20 bp, Human herpesvirus 2
tgctccccagagcctgctgg

SEQ ID NO: 43721 - DNA, 20 bp, Human herpesvirus 2
gctccccagagcctgctggt

SEQ ID NO: 43722 - DNA, 20 bp, Human herpesvirus 2
ctccccagagcctgctggtg

SEQ ID NO: 43723 - DNA, 20 bp, Human herpesvirus 2
cgggccgcacgtttattcgg

SEQ ID NO: 43724 - DNA, 20 bp, Human herpesvirus 2
gcagacccctcgcttaagat

SEQ ID NO: 43725 - DNA, 20 bp, Human herpesvirus 2
agatggccgatcccaatcga

SEQ ID NO: 43726 - DNA, 20 bp, Human herpesvirus 2
cgcgggaagaaccttccggt

SEQ ID NO: 43727 - DNA, 20 bp, Human herpesvirus 2
gcgggaagaaccttccggtt

SEQ ID NO: 43728 - DNA, 20 bp, Human herpesvirus 2
cggttttggaccagctgacc

SEQ ID NO: 43729 - DNA, 20 bp, Human herpesvirus 2
gttttgggggtggcgctctc

SEQ ID NO: 43730 - DNA, 20 bp, Human herpesvirus 2
ttttgggggtggcgctctct

SEQ ID NO: 43731 - DNA, 20 bp, Human herpesvirus 2
tgggggtggcgctctctgcc

SEQ ID NO: 43732 - DNA, 20 bp, Human herpesvirus 2
gggggtggcgctctctgcca

SEQ ID NO: 43733 - DNA, 20 bp, Human herpesvirus 2
ggggtggcgctctctgccaa

SEQ ID NO: 43734 - DNA, 20 bp, Human herpesvirus 2
gatctagcacacccacgggt

SEQ ID NO: 43735 - DNA, 20 bp, Human herpesvirus 2
atacgatctcgtcgaccggg

SEQ ID NO: 43736 - DNA, 20 bp, Human papillomavirus type 41
gttctcagtgtactagagtg

SEQ ID NO: 43737 - DNA, 20 bp, Human papillomavirus type 41
ttctcagtgtactagagtgc

SEQ ID NO: 43738 - DNA, 20 bp, Human papillomavirus type 41
tcagtgtactagagtgcttg

SEQ ID NO: 43739 - DNA, 20 bp, Human papillomavirus type 41
caaggctggagttcactgca

SEQ ID NO: 43740 - DNA, 20 bp, Human papillomavirus type 41
actgcacggcacgaagtgtc

SEQ ID NO: 43741 - DNA, 20 bp, Human papillomavirus type 41
tgttcgatgtatggtaggac

SEQ ID NO: 43742 - DNA, 20 bp, Human papillomavirus type 41
gatgtatggtaggactgtat

SEQ ID NO: 43743 - DNA, 20 bp, Human papillomavirus type 41
gctgtgagactaatatactg

SEQ ID NO: 43744 - DNA, 20 bp, Human papillomavirus type 41
gctgtattgtattgctgtaa

SEQ ID NO: 43745 - DNA, 20 bp, Human papillomavirus type 41
ctgtattgtattgctgtaat

SEQ ID NO: 43746 - DNA, 20 bp, Human papillomavirus type 41
gtatgcgtagcaagcaacac

SEQ ID NO: 43747 - DNA, 20 bp, Human papillomavirus type 41
tatgcgtagcaagcaacact

SEQ ID NO: 43748 - DNA, 20 bp, Human papillomavirus type 41
acctcgcttgtcacgcctgt

SEQ ID NO: 43749 - DNA, 20 bp, Human papillomavirus type 41
accaggagtgcctgtagatt

SEQ ID NO: 43750 - DNA, 20 bp, Human papillomavirus type 41
cgtatcccagtgttgcttgc

SEQ ID NO: 43751 - DNA, 20 bp, Human papillomavirus type 41
ggttgtggccgcctactatt

SEQ ID NO: 43752 - DNA, 20 bp, Human papillomavirus type 41
tggccgcctactatttagct

SEQ ID NO: 43753 - DNA, 20 bp, Human papillomavirus type 41
agcttttgatagtgagataa

SEQ ID NO: 43754 - DNA, 20 bp, Human papillomavirus type 41
gcttttgatagtgagataag

SEQ ID NO: 43755 - DNA, 20 bp, Human papillomavirus type 41
tgatagtgagataagtgcta

SEQ ID NO: 43756 - DNA, 20 bp, Human papillomavirus type 41
atgggtacagggggtataaa

SEQ ID NO: 43757 - DNA, 20 bp, Human papillomavirus type 41
tgggtacagggggtataaaa

SEQ ID NO: 43758 - DNA, 20 bp, Human papillomavirus type 41
taaaccagtgcgtggtgtct

SEQ ID NO: 43759 - DNA, 20 bp, Human papillomavirus type 41
gaattatcacgtatggtaca

SEQ ID NO: 43760 - DNA, 20 bp, Human papillomavirus type 41
aattatcacgtatggtacag

SEQ ID NO: 43761 - DNA, 20 bp, Human papillomavirus type 41
cacagtatgtgaataagcgg

SEQ ID NO: 43762 - DNA, 20 bp, Human papillomavirus type 41
acagtatgtgaataagcggt

SEQ ID NO: 43763 - DNA, 20 bp, Human papillomavirus type 41
cccgccagctgttttcatca

SEQ ID NO: 43764 - DNA, 20 bp, Human papillomavirus type 41
tcatcagcttccccatggtc

SEQ ID NO: 43765 - DNA, 20 bp, Human papillomavirus type 41
catcagcttccccatggtcc

SEQ ID NO: 43766 - DNA, 20 bp, Human papillomavirus type 41
gtcagcaatgggtcacattt

SEQ ID NO: 43767 - DNA, 20 bp, Human papillomavirus type 41
tcagcaatgggtcacatttt

SEQ ID NO: 43768 - DNA, 20 bp, Human papillomavirus type 41
ttggttatcaccattacgtg

SEQ ID NO: 43769 - DNA, 20 bp, Human papillomavirus type 41
tggttatcaccattacgtgg

SEQ ID NO: 43770 - DNA, 20 bp, Human papillomavirus type 41
ggttatcaccattacgtggg

SEQ ID NO: 43771 - DNA, 20 bp, Human papillomavirus type 41
gacaatgatcccgaaaacct

SEQ ID NO: 43772 - DNA, 20 bp, Human papillomavirus type 41
acaatgatcccgaaaacctt

SEQ ID NO: 43773 - DNA, 20 bp, Human papillomavirus type 41
cagaagttgtattgtggaaa

SEQ ID NO: 43774 - DNA, 20 bp, Human papillomavirus type 41
tattgtggaaatgggtttat

SEQ ID NO: 43775 - DNA, 20 bp, Human papillomavirus type 41
tggaaatgggtttattatat

SEQ ID NO: 43776 - DNA, 20 bp, Human papillomavirus type 41
ccgacagctcctccacgagg

SEQ ID NO: 43777 - DNA, 20 bp, Human papillomavirus type 41
cctcgtttctgcgtcgtctc

SEQ ID NO: 43778 - DNA, 20 bp, Human papillomavirus type 41
ctcgtttctgcgtcgtctcg

SEQ ID NO: 43779 - DNA, 20 bp, Human papillomavirus type 41
ctgcgtcgtctcgacccctg

SEQ ID NO: 43780 - DNA, 20 bp, Human papillomavirus type 41
tgcgtcgtctcgacccctgc

SEQ ID NO: 43781 - DNA, 20 bp, Human papillomavirus type 41
cgcgcacacgcagaaaagct

SEQ ID NO: 43782 - DNA, 20 bp, Human papillomavirus type 41
gcgcacacgcagaaaagctg

SEQ ID NO: 43783 - DNA, 20 bp, Human papillomavirus type 41
aacaatgcttgctaggcaaa

SEQ ID NO: 43784 - DNA, 20 bp, Human papillomavirus type 41
ctaggcaaagggttaaacgc

SEQ ID NO: 43785 - DNA, 20 bp, Human papillomavirus type 41
aacgcgctaatcctgaacaa

SEQ ID NO: 43786 - DNA, 20 bp, Human papillomavirus type 41
gggctggggcagttggggga

SEQ ID NO: 43787 - DNA, 20 bp, Human papillomavirus type 41
ggggacgcccgtccatatcc

SEQ ID NO: 43788 - DNA, 20 bp, Human papillomavirus type 41
gtccccgggatattttgcca

SEQ ID NO: 43789 - DNA, 20 bp, Human papillomavirus type 41
tgccaattgaatcagggggg

SEQ ID NO: 43790 - DNA, 20 bp, Human papillomavirus type 41
gccaattgaatcaggggggc

SEQ ID NO: 43791 - DNA, 20 bp, Human papillomavirus type 41
gctagatatatcccgggggg

SEQ ID NO: 43792 - DNA, 20 bp, Human papillomavirus type 41
ctagatatatcccgggggga

SEQ ID NO: 43793 - DNA, 20 bp, Human papillomavirus type 41
acacaacaatacttgcccct

SEQ ID NO: 43794 - DNA, 20 bp, Human papillomavirus type 41
cccctggcgaggaggagact

SEQ ID NO: 43795 - DNA, 20 bp, Human papillomavirus type 41
gtgaccagcactcctgaacg

SEQ ID NO: 43796 - DNA, 20 bp, Human papillomavirus type 41
ttaccagaggcgcactactg

SEQ ID NO: 43797 - DNA, 20 bp, Human papillomavirus type 41
ccagaggcgcactactggcc

SEQ ID NO: 43798 - DNA, 20 bp, Human papillomavirus type 41
gtgttagtcgcctggggcaa

SEQ ID NO: 43799 - DNA, 20 bp, Human papillomavirus type 41
gtcgcctggggcaacgtcgg

SEQ ID NO: 43800 - DNA, 20 bp, Human papillomavirus type 41
ccccaggcgactaacacgaa

SEQ ID NO: 43801 - DNA, 20 bp, Human papillomavirus type 41
tgagaggagaccctacgcct

SEQ ID NO: 43802 - DNA, 20 bp, Human papillomavirus type 41
tattgagcaagacataggac

SEQ ID NO: 43803 - DNA, 20 bp, Human papillomavirus type 41
agcaagacataggactaacc

SEQ ID NO: 43804 - DNA, 20 bp, Human papillomavirus type 41
gggggacaacattgaaaatg

SEQ ID NO: 43805 - DNA, 20 bp, Human papillomavirus type 41
ggggacaacattgaaaatga

SEQ ID NO: 43806 - DNA, 20 bp, Human papillomavirus type 41
cctccatgctgccactgacc

SEQ ID NO: 43807 - DNA, 20 bp, Human papillomavirus type 41
ctccatgctgccactgaccg

SEQ ID NO: 43808 - DNA, 20 bp, Human papillomavirus type 41
gcttactgttggacatccat

SEQ ID NO: 43809 - DNA, 20 bp, Human papillomavirus type 41
cttactgttggacatccatt

SEQ ID NO: 43810 - DNA, 20 bp, Human papillomavirus type 41
ctgttggacatccattttac

SEQ ID NO: 43811 - DNA, 20 bp, Human papillomavirus type 41
ggtattggtgtaacagggaa

SEQ ID NO: 43812 - DNA, 20 bp, Human papillomavirus type 41
gtgtaacagggaaccctttt

SEQ ID NO: 43813 - DNA, 20 bp, Human papillomavirus type 41
ttttaataagtttgatgatg

SEQ ID NO: 43814 - DNA, 20 bp, Human papillomavirus type 41
tttaataagtttgatgatgc

SEQ ID NO: 43815 - DNA, 20 bp, Human papillomavirus type 41
ttaataagtttgatgatgct

SEQ ID NO: 43816 - DNA, 20 bp, Human papillomavirus type 41
agtcctcatacattgaggat

SEQ ID NO: 43817 - DNA, 20 bp, Human papillomavirus type 41
aggatgcagacatgagtgac

SEQ ID NO: 43818 - DNA, 20 bp, Human papillomavirus type 41
aatttttctacactgcagag

SEQ ID NO: 43819 - DNA, 20 bp, Human papillomavirus type 41
ttctacactgcagagaaaca

SEQ ID NO: 43820 - DNA, 20 bp, Human papillomavirus type 41
tctacactgcagagaaacaa

SEQ ID NO: 43821 - DNA, 20 bp, Human papillomavirus type 41
ctgagggggatgcttcttca

SEQ ID NO: 43822 - DNA, 20 bp, Human papillomavirus type 41
ttcatataacaattctaagt

SEQ ID NO: 43823 - DNA, 20 bp, Human papillomavirus type 41
atataacaattctaagtttt

SEQ ID NO: 43824 - DNA, 20 bp, Human papillomavirus type 41
taagttttttgagtttttaa

SEQ ID NO: 43825 - DNA, 20 bp, Human papillomavirus type 41
tttgagtttttaaggcacac

SEQ ID NO: 43826 - DNA, 20 bp, Human papillomavirus type 41
agttttgggaggttgatcta

SEQ ID NO: 43827 - DNA, 20 bp, Human papillomavirus type 41
tgggaggttgatctacggga

SEQ ID NO: 43828 - DNA, 20 bp, Human papillomavirus type 41
gggaggttgatctacgggat

SEQ ID NO: 43829 - DNA, 20 bp, Human papillomavirus type 41
ggaggttgatctacgggatc

SEQ ID NO: 43830 - DNA, 20 bp, Human papillomavirus type 41
atctacgggatcgtatgaca

SEQ ID NO: 43831 - DNA, 20 bp, Human papillomavirus type 41
ccaatagccccatctggcgg

SEQ ID NO: 43832 - DNA, 20 bp, Human papillomavirus type 41
aactgaaacggtgtgtactg

SEQ ID NO: 43833 - DNA, 20 bp, Human papillomavirus type 41
ttgttattggaacgcctccg

SEQ ID NO: 43834 - DNA, 20 bp, Human papillomavirus type 41
tgttattggaacgcctccgg

SEQ ID NO: 43835 - DNA, 20 bp, Human papillomavirus type 41
gttattggaacgcctccggt

SEQ ID NO: 43836 - DNA, 20 bp, Human papillomavirus type 167
agagtcactgtcatccgatt

SEQ ID NO: 43837 - DNA, 20 bp, Human papillomavirus type 167
tgaaggagaggaggagcaat

SEQ ID NO: 43838 - DNA, 20 bp, Human papillomavirus type 167
gaaccttatagaatagaatg

SEQ ID NO: 43839 - DNA, 20 bp, Human papillomavirus type 167
tagaatagaatgcacctgtt

SEQ ID NO: 43840 - DNA, 20 bp, Human papillomavirus type 167
taattgtggtataagaatta

SEQ ID NO: 43841 - DNA, 20 bp, Human papillomavirus type 167
tgtagcagatctgagtccaa

SEQ ID NO: 43842 - DNA, 20 bp, Human papillomavirus type 167
acatatcacctcgaaaaaac

SEQ ID NO: 43843 - DNA, 20 bp, Human papillomavirus type 167
tttcgggacagtggaataga

SEQ ID NO: 43844 - DNA, 20 bp, Human papillomavirus type 167
cactgtcccgaaataagcgt

SEQ ID NO: 43845 - DNA, 20 bp, Human papillomavirus type 167
tgatgttttttcgaggtgat

SEQ ID NO: 43846 - DNA, 20 bp, Human papillomavirus type 167
cgatgcactgcaagaagctc

SEQ ID NO: 43847 - DNA, 20 bp, Human papillomavirus type 167
gatgcactgcaagaagctct

SEQ ID NO: 43848 - DNA, 20 bp, Human papillomavirus type 167
gctttctcaaattgaacatt

SEQ ID NO: 43849 - DNA, 20 bp, Human papillomavirus type 167
ctttctcaaattgaacattg

SEQ ID NO: 43850 - DNA, 20 bp, Human papillomavirus type 167
ctcaaattgaacattggaat

SEQ ID NO: 43851 - DNA, 20 bp, Human papillomavirus type 167
aaaataaaatagaaggtgaa

SEQ ID NO: 43852 - DNA, 20 bp, Human papillomavirus type 167
ctgatcgtttgttaaaatgg

SEQ ID NO: 43853 - DNA, 20 bp, Human papillomavirus type 167
gttaaaatggttcggaagtt

SEQ ID NO: 43854 - DNA, 20 bp, Human papillomavirus type 167
ttaaaatggttcggaagttt

SEQ ID NO: 43855 - DNA, 20 bp, Human papillomavirus type 167
aaatggttcggaagttttat

SEQ ID NO: 43856 - DNA, 20 bp, Human papillomavirus type 167
ttaggtcaagtttcccgcgc

SEQ ID NO: 43857 - DNA, 20 bp, Human papillomavirus type 167
taggtcaagtttcccgcgca

SEQ ID NO: 43858 - DNA, 20 bp, Human papillomavirus type 167
aggtcaagtttcccgcgcag

SEQ ID NO: 43859 - DNA, 20 bp, Human papillomavirus type 167
ggtcaagtttcccgcgcagt

SEQ ID NO: 43860 - DNA, 20 bp, Human papillomavirus type 167
cccgcgcagttcaatttgaa

SEQ ID NO: 43861 - DNA, 20 bp, Human papillomavirus type 167
ttttatggatttatcagcaa

SEQ ID NO: 43862 - DNA, 20 bp, Human papillomavirus type 167
tttatggatttatcagcaat

SEQ ID NO: 43863 - DNA, 20 bp, Human papillomavirus type 167
ttatggatttatcagcaatt

SEQ ID NO: 43864 - DNA, 20 bp, Human papillomavirus type 167
tatggatttatcagcaattc

SEQ ID NO: 43865 - DNA, 20 bp, Human papillomavirus type 167
atggatttatcagcaattcc

SEQ ID NO: 43866 - DNA, 20 bp, Human papillomavirus type 167
agtacggatgaatatgtgaa

SEQ ID NO: 43867 - DNA, 20 bp, Human papillomavirus type 167
tttcatactggaactgacag

SEQ ID NO: 43868 - DNA, 20 bp, Human papillomavirus type 167
ttcatactggaactgacaga

SEQ ID NO: 43869 - DNA, 20 bp, Human papillomavirus type 167
tcatactggaactgacagat

SEQ ID NO: 43870 - DNA, 20 bp, Human papillomavirus type 167
catactggaactgacagatt

SEQ ID NO: 43871 - DNA, 20 bp, Human papillomavirus type 167
aaggcagtacaaatggatag

SEQ ID NO: 43872 - DNA, 20 bp, Human papillomavirus type 167
gagttggtgtttctgggcac

SEQ ID NO: 43873 - DNA, 20 bp, Human papillomavirus type 167
gtgtttctgggcacccatta

SEQ ID NO: 43874 - DNA, 20 bp, Human papillomavirus type 167
ctgggcacccattatttaat

SEQ ID NO: 43875 - DNA, 20 bp, Human papillomavirus type 167
tgggcacccattatttaata

SEQ ID NO: 43876 - DNA, 20 bp, Human papillomavirus type 187
atacttgacactcaacagct

SEQ ID NO: 43877 - DNA, 20 bp, Human papillomavirus type 187
tacttgacactcaacagctt

SEQ ID NO: 43878 - DNA, 20 bp, Human papillomavirus type 187
acactcaacagcttgctgat

SEQ ID NO: 43879 - DNA, 20 bp, Human papillomavirus type 187
ctgatttttacagaaagggt

SEQ ID NO: 43880 - DNA, 20 bp, Human papillomavirus type 187
ttacagaaagggtcttagcc

SEQ ID NO: 43881 - DNA, 20 bp, Human papillomavirus type 187
aaaagtatgacactgtttgc

SEQ ID NO: 43882 - DNA, 20 bp, Human papillomavirus type 187
gcagaaacgagcacttctat

SEQ ID NO: 43883 - DNA, 20 bp, Human papillomavirus type 187
cagaaacgagcacttctatt

SEQ ID NO: 43884 - DNA, 20 bp, Human papillomavirus type 187
tatttagtgcgcaacggctg

SEQ ID NO: 43885 - DNA, 20 bp, Human papillomavirus type 187
agtgcgcaacggctggaaag

SEQ ID NO: 43886 - DNA, 20 bp, Human papillomavirus type 187
taaagcaggtgtaagattat

SEQ ID NO: 43887 - DNA, 20 bp, Human papillomavirus type 187
tcaattgtagctacagctac

SEQ ID NO: 43888 - DNA, 20 bp, Human papillomavirus type 187
tagctacagctactgctgtt

SEQ ID NO: 43889 - DNA, 20 bp, Human papillomavirus type 187
gtactcttcaagtgttgctg

SEQ ID NO: 43890 - DNA, 20 bp, Human papillomavirus type 187
aagtgttgctgtttgcagaa

SEQ ID NO: 43891 - DNA, 20 bp, Human papillomavirus type 187
gaagacagtacagacggttc

SEQ ID NO: 43892 - DNA, 20 bp, Human papillomavirus type 187
aagacagtacagacggttca

SEQ ID NO: 43893 - DNA, 20 bp, Human papillomavirus type 187
atgtatctctcagctgattg

SEQ ID NO: 43894 - DNA, 20 bp, Human papillomavirus type 187
atgatgccgatgaactggac

SEQ ID NO: 43895 - DNA, 20 bp, Human papillomavirus type 187
aacagtgccagggaatttcc

SEQ ID NO: 43896 - DNA, 20 bp, Human papillomavirus type 187
tcaggtagtcgctatagaaa

SEQ ID NO: 43897 - DNA, 20 bp, Human papillomavirus type 187
tatcggcgccattaggcttt

SEQ ID NO: 43898 - DNA, 20 bp, Human papillomavirus type 187
ggcttttccaccacagatgt

SEQ ID NO: 43899 - DNA, 20 bp, Human papillomavirus type 187
tccaccacagatgtttctat

SEQ ID NO: 43900 - DNA, 20 bp, Human papillomavirus type 187
ccaccacagatgtttctata

SEQ ID NO: 43901 - DNA, 20 bp, Human papillomavirus type 187
gctaacctaatactgttaga

SEQ ID NO: 43902 - DNA, 20 bp, Human papillomavirus type 187
gatcatcgaacagcttcagc

SEQ ID NO: 43903 - DNA, 20 bp, Human papillomavirus type 187
agcagataattttgatttat

SEQ ID NO: 43904 - DNA, 20 bp, Human papillomavirus type 187
tgatttatcaaaaatgatac

SEQ ID NO: 43905 - DNA, 20 bp, Human papillomavirus type 187
gatttatcaaaaatgataca

SEQ ID NO: 43906 - DNA, 20 bp, Human papillomavirus type 187
gacatttgaaataaccaatg

SEQ ID NO: 43907 - DNA, 20 bp, Human papillomavirus type 187
acatttgaaataaccaatga

SEQ ID NO: 43908 - DNA, 20 bp, Human papillomavirus type 187
gaaataaccaatgatacttg

SEQ ID NO: 43909 - DNA, 20 bp, Human papillomavirus type 187
aaataaccaatgatacttgg

SEQ ID NO: 43910 - DNA, 20 bp, Human papillomavirus type 187
ggcatgtttttttagaaaat

SEQ ID NO: 43911 - DNA, 20 bp, Human papillomavirus type 187
ctggaggttgtagaggagtc

SEQ ID NO: 43912 - DNA, 20 bp, Human papillomavirus type 187
tagaggagtcgtcccgtttc

SEQ ID NO: 43913 - DNA, 20 bp, Human papillomavirus type 187
acaagttggagcacgacatc

SEQ ID NO: 43914 - DNA, 20 bp, Human papillomavirus type 187
gagcacgacatcgatcaact

SEQ ID NO: 43915 - DNA, 20 bp, Human papillomavirus type 187
cgcgacttcaacgacttcaa

SEQ ID NO: 43916 - DNA, 20 bp, Human papillomavirus type 187
aacgacttcaagctgaggct

SEQ ID NO: 43917 - DNA, 20 bp, Human papillomavirus type 187
aagctgaggcttgggatccc

SEQ ID NO: 43918 - DNA, 20 bp, Human papillomavirus type 187
ttctttaggctccttcgata

SEQ ID NO: 43919 - DNA, 20 bp, Human papillomavirus type 187
tctttaggctccttcgatag

SEQ ID NO: 43920 - DNA, 20 bp, Human papillomavirus type 187
ctttaggctccttcgatagt

SEQ ID NO: 43921 - DNA, 20 bp, Human papillomavirus type 187
tttaggctccttcgatagtt

SEQ ID NO: 43922 - DNA, 20 bp, Human papillomavirus type 187
aggctccttcgatagtttat

SEQ ID NO: 43923 - DNA, 20 bp, Human papillomavirus type 187
ccactggtattcgtccatta

SEQ ID NO: 43924 - DNA, 20 bp, Human papillomavirus type 187
gtccattacctgaaaatata

SEQ ID NO: 43925 - DNA, 20 bp, Human papillomavirus type 187
cctgaaaatatacctttacc

SEQ ID NO: 43926 - DNA, 20 bp, Human papillomavirus type 187
accggagactgtaccagaac

SEQ ID NO: 43927 - DNA, 20 bp, Human papillomavirus type 187
ccggagactgtaccagaacc

SEQ ID NO: 43928 - DNA, 20 bp, Human papillomavirus type 187
tggatgttaatgctggtaca

SEQ ID NO: 43929 - DNA, 20 bp, Human papillomavirus type 187
atgctggtacaggggaggga

SEQ ID NO: 43930 - DNA, 20 bp, Human papillomavirus type 187
ggtatgaaatatatacagat

SEQ ID NO: 43931 - DNA, 20 bp, Human papillomavirus type 187
tctgtttcaccactggttac

SEQ ID NO: 43932 - DNA, 20 bp, Human papillomavirus type 187
ctgtttcaccactggttact

SEQ ID NO: 43933 - DNA, 20 bp, Human papillomavirus type 187
caacccttgaataggatcag

SEQ ID NO: 43934 - DNA, 20 bp, Human papillomavirus type 187
aataggatcagtgatataga

SEQ ID NO: 43935 - DNA, 20 bp, Human papillomavirus type 187
gattctttgcaaagaactag

SEQ ID NO: 43936 - DNA, 20 bp, Human papillomavirus type 187
tttgcaaagaactagcacac

SEQ ID NO: 43937 - DNA, 20 bp, Human papillomavirus type 187
gcaaagaactagcacaccat

SEQ ID NO: 43938 - DNA, 20 bp, Human papillomavirus type 187
caggatgatataagtctaga

SEQ ID NO: 43939 - DNA, 20 bp, Human papillomavirus type 187
aggatgatataagtctagag

SEQ ID NO: 43940 - DNA, 20 bp, Human papillomavirus type 187
gagcgggatcttagagagtt

SEQ ID NO: 43941 - DNA, 20 bp, Human papillomavirus type 187
agcgggatcttagagagttg

SEQ ID NO: 43942 - DNA, 20 bp, Human papillomavirus type 187
gagagttggcagctgctcca

SEQ ID NO: 43943 - DNA, 20 bp, Human papillomavirus type 187
cgttggaaacattgggagaa

SEQ ID NO: 43944 - DNA, 20 bp, Human papillomavirus type 187
gaaacattgggagaatctcc

SEQ ID NO: 43945 - DNA, 20 bp, Human papillomavirus type 187
ggagaatctccagatcaatt

SEQ ID NO: 43946 - DNA, 20 bp, Human papillomavirus type 187
actatagtagatggattagg

SEQ ID NO: 43947 - DNA, 20 bp, Human papillomavirus type 187
gggggaggtacattaattga

SEQ ID NO: 43948 - DNA, 20 bp, Human papillomavirus type 187
gaaggggaggacctttggga

SEQ ID NO: 43949 - DNA, 20 bp, Human papillomavirus type 187
gggattgggaacatcgggtc

SEQ ID NO: 43950 - DNA, 20 bp, Human papillomavirus type 187
ggattgggaacatcgggtca

SEQ ID NO: 43951 - DNA, 20 bp, Human papillomavirus type 187
ggaacatcgggtcatccttt

SEQ ID NO: 43952 - DNA, 20 bp, Human papillomavirus type 187
atttaacaaattaggtgaca

SEQ ID NO: 43953 - DNA, 20 bp, Human papillomavirus type 187
aattcagtaatacaggatgg

SEQ ID NO: 43954 - DNA, 20 bp, Human papillomavirus type 187
agtaatacaggatggggata

SEQ ID NO: 43955 - DNA, 20 bp, Human papillomavirus type 187
gctttggggctgcaaacttc

SEQ ID NO: 43956 - DNA, 20 bp, Human papillomavirus type 187
ggggctgcaaacttcaaaac

SEQ ID NO: 43957 - DNA, 20 bp, Human papillomavirus type 187
gggctgcaaacttcaaaacg

SEQ ID NO: 43958 - DNA, 20 bp, Human papillomavirus type 187
tcctttacttgattaatgta

SEQ ID NO: 43959 - DNA, 20 bp, Human papillomavirus type 187
cctttacttgattaatgtac

SEQ ID NO: 43960 - DNA, 20 bp, Human papillomavirus type 187
ctttacttgattaatgtact

SEQ ID NO: 43961 - DNA, 20 bp, Human papillomavirus type 187
acttgattaatgtactgtga

SEQ ID NO: 43962 - DNA, 20 bp, Human papillomavirus type 187
cttgattaatgtactgtgaa

SEQ ID NO: 43963 - DNA, 20 bp, Human papillomavirus type 187
gtaaaggtaagtgcaagttc

SEQ ID NO: 43964 - DNA, 20 bp, Human papillomavirus type 187
taaaggtaagtgcaagttca

SEQ ID NO: 43965 - DNA, 20 bp, Human papillomavirus type 187
agacgaatatagactgactc

SEQ ID NO: 43966 - DNA, 20 bp, Human papillomavirus type 187
ggtcgctgccagatttgagt

SEQ ID NO: 43967 - DNA, 20 bp, Human papillomavirus type 187
gagtcagtctatattcgtct

SEQ ID NO: 43968 - DNA, 20 bp, Influenza C virus
aagaaatggactacatcaag

SEQ ID NO: 43969 - DNA, 20 bp, Influenza C virus
ttagtgaaggattcttttcc

SEQ ID NO: 43970 - DNA, 20 bp, Influenza C virus
gtgaaggattcttttccttc

SEQ ID NO: 43971 - DNA, 20 bp, Influenza C virus
ttttccttccttgatgtagt

SEQ ID NO: 43972 - DNA, 20 bp, Influenza C virus
tccttccttgatgtagtcca

SEQ ID NO: 43973 - DNA, 20 bp, Influenza C virus
ctggttccggagtaaaagtt

SEQ ID NO: 43974 - DNA, 20 bp, Influenza C virus
tggttccggagtaaaagtta

SEQ ID NO: 43975 - DNA, 20 bp, Influenza C virus
cggagtaaaagttaaagata

SEQ ID NO: 43976 - DNA, 20 bp, Influenza C virus
aagatacagtatatatccaa

SEQ ID NO: 43977 - DNA, 20 bp, Influenza C virus
gaatactggagtgagcaaga

SEQ ID NO: 43978 - DNA, 20 bp, Influenza C virus
gattcatcaggaagaattgt

SEQ ID NO: 43979 - DNA, 20 bp, Influenza C virus
attcatcaggaagaattgtt

SEQ ID NO: 43980 - DNA, 20 bp, Influenza C virus
atcaggaagaattgttgcaa

SEQ ID NO: 43981 - DNA, 20 bp, Influenza C virus
ttgcaacaattttagacctt

SEQ ID NO: 43982 - DNA, 20 bp, Influenza C virus
caacaattttagaccttcct

SEQ ID NO: 43983 - DNA, 20 bp, Influenza C virus
agttgttggagatgaacaca

SEQ ID NO: 43984 - DNA, 20 bp, Influenza C virus
gttgttggagatgaacacat

SEQ ID NO: 43985 - DNA, 20 bp, Influenza C virus
ttggagatgaacacatggac

SEQ ID NO: 43986 - DNA, 20 bp, Influenza C virus
gagatgaacacatggacact

SEQ ID NO: 43987 - DNA, 20 bp, Influenza C virus
gttagcactattagaagggt

SEQ ID NO: 43988 - DNA, 20 bp, Human papillomavirus type 88
taccgctgctctgtaaaggg

SEQ ID NO: 43989 - DNA, 20 bp, Human papillomavirus type 88
accgctgctctgtaaaggga

SEQ ID NO: 43990 - DNA, 20 bp, Human papillomavirus type 88
ccgctgctctgtaaagggaa

SEQ ID NO: 43991 - DNA, 20 bp, Human papillomavirus type 88
attttgaggatttcctaaga

SEQ ID NO: 43992 - DNA, 20 bp, Human papillomavirus type 88
tgaggatttcctaagaaaga

SEQ ID NO: 43993 - DNA, 20 bp, Human papillomavirus type 88
cctgctaaccttttaagcaa

SEQ ID NO: 43994 - DNA, 20 bp, Human papillomavirus type 88
taagcaacgaggttttgtca

SEQ ID NO: 43995 - DNA, 20 bp, Human papillomavirus type 88
aagcaacgaggttttgtcat

SEQ ID NO: 43996 - DNA, 20 bp, Human papillomavirus type 88
agcaacgaggttttgtcatc

SEQ ID NO: 43997 - DNA, 20 bp, Human papillomavirus type 88
tgtcatctgatgaggagacc

SEQ ID NO: 43998 - DNA, 20 bp, Human papillomavirus type 88
atcaaaagtccgcagctgca

SEQ ID NO: 43999 - DNA, 20 bp, Human papillomavirus type 88
ctgagttgagtccaaggctt

SEQ ID NO: 44000 - DNA, 20 bp, Human papillomavirus type 88
agtccaaggcttcaagcagt

SEQ ID NO: 44001 - DNA, 20 bp, Human papillomavirus type 88
aagcagtttcaatttcaccc

SEQ ID NO: 44002 - DNA, 20 bp, Human papillomavirus type 88
caatttcacccaaaaaacaa

SEQ ID NO: 44003 - DNA, 20 bp, Human papillomavirus type 88
tctggtgtttgttgggcccc

SEQ ID NO: 44004 - DNA, 20 bp, Human papillomavirus type 88
gttgggccccctgacactgg

SEQ ID NO: 44005 - DNA, 20 bp, Human papillomavirus type 88
ttgggccccctgacactggg

SEQ ID NO: 44006 - DNA, 20 bp, Human papillomavirus type 88
ggccccctgacactgggaaa

SEQ ID NO: 44007 - DNA, 20 bp, Human papillomavirus type 88
ctgcttctcattaatacgtt

SEQ ID NO: 44008 - DNA, 20 bp, Human papillomavirus type 88
cgttgcactgcaagatgcca

SEQ ID NO: 44009 - DNA, 20 bp, Human papillomavirus type 88
gttgcactgcaagatgccat

SEQ ID NO: 44010 - DNA, 20 bp, Human papillomavirus type 88
cactgcaagatgccatattg

SEQ ID NO: 44011 - DNA, 20 bp, Human papillomavirus type 88
aatctaattgaaaggggaga

SEQ ID NO: 44012 - DNA, 20 bp, Human papillomavirus type 88
aaaggggagaaactgattta

SEQ ID NO: 44013 - DNA, 20 bp, Human papillomavirus type 88
tccgagagtgtttccgtcgg

SEQ ID NO: 44014 - DNA, 20 bp, Human papillomavirus type 88
ccgtcggtggctgttcttct

SEQ ID NO: 44015 - DNA, 20 bp, Human papillomavirus type 88
cgtcggtggctgttcttctt

SEQ ID NO: 44016 - DNA, 20 bp, Human papillomavirus type 88
ttcttctctttgctccggag

SEQ ID NO: 44017 - DNA, 20 bp, Human papillomavirus type 88
ttctctttgctccggaggtt

SEQ ID NO: 44018 - DNA, 20 bp, Human papillomavirus type 88
gcagatcgattgctgcgcat

SEQ ID NO: 44019 - DNA, 20 bp, Human papillomavirus type 88
ctgcgcatttttggtagtgt

SEQ ID NO: 44020 - DNA, 20 bp, Human papillomavirus type 88
ttggtagtgttatatacctg

SEQ ID NO: 44021 - DNA, 20 bp, Human papillomavirus type 88
tggtagtgttatatacctgg

SEQ ID NO: 44022 - DNA, 20 bp, Human papillomavirus type 88
ggtagtgttatatacctggg

SEQ ID NO: 44023 - DNA, 20 bp, Human papillomavirus type 88
tgcacttgccccaagtgtgc

SEQ ID NO: 44024 - DNA, 20 bp, Human papillomavirus type 88
gcacttgccccaagtgtgca

SEQ ID NO: 44025 - DNA, 20 bp, Human papillomavirus type 88
cacttgccccaagtgtgcat

SEQ ID NO: 44026 - DNA, 20 bp, Human papillomavirus type 88
ccccaagtgtgcatgcagaa

SEQ ID NO: 44027 - DNA, 20 bp, Human papillomavirus type 88
ctattatagagagctcacta

SEQ ID NO: 44028 - DNA, 20 bp, Human papillomavirus type 88
actttttaacccggccttca

SEQ ID NO: 44029 - DNA, 20 bp, Human papillomavirus type 88
ttaacccggccttcacgcgc

SEQ ID NO: 44030 - DNA, 20 bp, Human papillomavirus type 88
taacccggccttcacgcgcg

SEQ ID NO: 44031 - DNA, 20 bp, Human papillomavirus type 88
aacccggccttcacgcgcgg

SEQ ID NO: 44032 - DNA, 20 bp, Human papillomavirus type 88
acccggccttcacgcgcggt

SEQ ID NO: 44033 - DNA, 20 bp, Human papillomavirus type 88
gatcttagtgcaattgaacc

SEQ ID NO: 44034 - DNA, 20 bp, Human papillomavirus type 88
atcttagtgcaattgaacct

SEQ ID NO: 44035 - DNA, 20 bp, Human papillomavirus type 88
gtgcaattgaacctatagag

SEQ ID NO: 44036 - DNA, 20 bp, Human papillomavirus type 88
aacctatagagcctgatgtt

SEQ ID NO: 44037 - DNA, 20 bp, Human papillomavirus type 88
ttgagctttctaatttaggg

SEQ ID NO: 44038 - DNA, 20 bp, Human papillomavirus type 88
tggcaacaacaaactgggaa

SEQ ID NO: 44039 - DNA, 20 bp, Human papillomavirus type 88
cttccgccggctaaacctgt

SEQ ID NO: 44040 - DNA, 20 bp, Human papillomavirus type 88
cgccggctaaacctgtggca

SEQ ID NO: 44041 - DNA, 20 bp, Human papillomavirus type 88
tctacagatgattatgttat

SEQ ID NO: 44042 - DNA, 20 bp, Human papillomavirus type 88
tgttattggaactcagttac

SEQ ID NO: 44043 - DNA, 20 bp, Human papillomavirus type 88
cctgatccaaataaatttgc

SEQ ID NO: 44044 - DNA, 20 bp, Human papillomavirus type 88
gccttaatagatcagtcaat

SEQ ID NO: 44045 - DNA, 20 bp, Human papillomavirus type 88
ccttaatagatcagtcaatt

SEQ ID NO: 44046 - DNA, 20 bp, Human papillomavirus type 88
atagatcagtcaattttcaa

SEQ ID NO: 44047 - DNA, 20 bp, Human papillomavirus type 88
tcaatcctgaacgtgaacgt

SEQ ID NO: 44048 - DNA, 20 bp, Human papillomavirus type 88
gagatcaggcgaatgcagga

SEQ ID NO: 44049 - DNA, 20 bp, Human papillomavirus type 88
gttaatgctgttattcagga

SEQ ID NO: 44050 - DNA, 20 bp, Human papillomavirus type 88
atgctgttattcaggacgga

SEQ ID NO: 44051 - DNA, 20 bp, Human papillomavirus type 88
ttcaggacggaacaatgggt

SEQ ID NO: 44052 - DNA, 20 bp, Human papillomavirus type 88
aggacggaacaatgggtgac

SEQ ID NO: 44053 - DNA, 20 bp, Human papillomavirus type 88
cttttttggaaaacgtgagc

SEQ ID NO: 44054 - DNA, 20 bp, Human papillomavirus type 88
ttttttggaaaacgtgagca

SEQ ID NO: 44055 - DNA, 20 bp, Human papillomavirus type 88
tttggaaaacgtgagcagtc

SEQ ID NO: 44056 - DNA, 20 bp, Human papillomavirus type 88
ttggaaaacgtgagcagtcg

SEQ ID NO: 44057 - DNA, 20 bp, Human papillomavirus type 88
tggaaaacgtgagcagtcgt

SEQ ID NO: 44058 - DNA, 20 bp, Human papillomavirus type 88
tagatatataacatctttgg

SEQ ID NO: 44059 - DNA, 20 bp, Human papillomavirus type 88
ggcaacaagatgtcctactg

SEQ ID NO: 44060 - DNA, 20 bp, Human papillomavirus type 88
gcaacaagatgtcctactga

SEQ ID NO: 44061 - DNA, 20 bp, Human papillomavirus type 88
taatctttataagggtcagg

SEQ ID NO: 44062 - DNA, 20 bp, Human papillomavirus type 88
ataagggtcaggtatttctg

SEQ ID NO: 44063 - DNA, 20 bp, Human papillomavirus type 88
aaggtaagttgtttggaaca

SEQ ID NO: 44064 - DNA, 20 bp, Human papillomavirus type 88
tttggaacatagccgtctct

SEQ ID NO: 44065 - DNA, 20 bp, Human papillomavirus type 88
ggaacatagccgtctctcga

SEQ ID NO: 44066 - DNA, 20 bp, Human papillomavirus type 88
gaacatagccgtctctcgaa

SEQ ID NO: 44067 - DNA, 20 bp, Human papillomavirus type 88
ttaaaaggcctttagggcac

SEQ ID NO: 44068 - DNA, 20 bp, Human papillomavirus type 179
tgttgataaggggtaattgg

SEQ ID NO: 44069 - DNA, 20 bp, Human papillomavirus type 179
gttgataaggggtaattggc

SEQ ID NO: 44070 - DNA, 20 bp, Human papillomavirus type 179
ttgataaggggtaattggcg

SEQ ID NO: 44071 - DNA, 20 bp, Human papillomavirus type 179
ataaggggtaattggcgtac

SEQ ID NO: 44072 - DNA, 20 bp, Human papillomavirus type 179
gcgtacagagtgcagaaatt

SEQ ID NO: 44073 - DNA, 20 bp, Human papillomavirus type 179
tagagttgacacctcgtgtg

SEQ ID NO: 44074 - DNA, 20 bp, Human papillomavirus type 179
acacctcgtgtggcaattgt

SEQ ID NO: 44075 - DNA, 20 bp, Human papillomavirus type 179
taagagaggtgtaaggcttt

SEQ ID NO: 44076 - DNA, 20 bp, Human papillomavirus type 179
tttttgttgcaacttctgct

SEQ ID NO: 44077 - DNA, 20 bp, Human papillomavirus type 179
ttttgttgcaacttctgctt

SEQ ID NO: 44078 - DNA, 20 bp, Human papillomavirus type 179
tttgaagaaagcacaaacgg

SEQ ID NO: 44079 - DNA, 20 bp, Human papillomavirus type 179
gaagaaagcacaaacgggtc

SEQ ID NO: 44080 - DNA, 20 bp, Human papillomavirus type 179
aagaaagcacaaacgggtca

SEQ ID NO: 44081 - DNA, 20 bp, Human papillomavirus type 179
caaatttactagacgatgaa

SEQ ID NO: 44082 - DNA, 20 bp, Human papillomavirus type 179
aaatttactagacgatgaac

SEQ ID NO: 44083 - DNA, 20 bp, Human papillomavirus type 179
aaattctaatgaacttttgc

SEQ ID NO: 44084 - DNA, 20 bp, Human papillomavirus type 179
taatgaacttttgcaggtag

SEQ ID NO: 44085 - DNA, 20 bp, Human papillomavirus type 179
tgcaggtagaggcggagcat

SEQ ID NO: 44086 - DNA, 20 bp, Human papillomavirus type 179
gcaggtagaggcggagcatg

SEQ ID NO: 44087 - DNA, 20 bp, Human papillomavirus type 179
caggtagaggcggagcatgg

SEQ ID NO: 44088 - DNA, 20 bp, Human papillomavirus type 179
cgaaacaccatcttggaaga

SEQ ID NO: 44089 - DNA, 20 bp, Human papillomavirus type 179
gaagacttagaagacttcaa

SEQ ID NO: 44090 - DNA, 20 bp, Human papillomavirus type 179
gaagacttcaagaggaagct

SEQ ID NO: 44091 - DNA, 20 bp, Human papillomavirus type 179
aagaggaagctagggatcca

SEQ ID NO: 44092 - DNA, 20 bp, Human papillomavirus type 179
tgtgtataaaaggtccagca

SEQ ID NO: 44093 - DNA, 20 bp, Human papillomavirus type 179
ggtggttataaaccaattgg

SEQ ID NO: 44094 - DNA, 20 bp, Human papillomavirus type 179
gtggttataaaccaattggt

SEQ ID NO: 44095 - DNA, 20 bp, Human papillomavirus type 179
taaaccaattggtggaacag

SEQ ID NO: 44096 - DNA, 20 bp, Human papillomavirus type 179
gtggaacagcaagcaaaggt

SEQ ID NO: 44097 - DNA, 20 bp, Human papillomavirus type 179
ggtctgctcacagttatttc

SEQ ID NO: 44098 - DNA, 20 bp, Human papillomavirus type 179
aaatgaagttgctgaatttg

SEQ ID NO: 44099 - DNA, 20 bp, Human papillomavirus type 179
aatgaagttgctgaatttgc

SEQ ID NO: 44100 - DNA, 20 bp, Human papillomavirus type 179
ctgaatttgcaattgaggag

SEQ ID NO: 44101 - DNA, 20 bp, Human papillomavirus type 179
gcaattgaggagggggcggg

SEQ ID NO: 44102 - DNA, 20 bp, Human papillomavirus type 179
caattgaggagggggcgggt

SEQ ID NO: 44103 - DNA, 20 bp, Human papillomavirus type 179
cctattcacaattctgcaga

SEQ ID NO: 44104 - DNA, 20 bp, Human papillomavirus type 179
ctattcacaattctgcagat

SEQ ID NO: 44105 - DNA, 20 bp, Human papillomavirus type 179
acaattctgcagatccttct

SEQ ID NO: 44106 - DNA, 20 bp, Human papillomavirus type 179
tgcagatccttctaaagtag

SEQ ID NO: 44107 - DNA, 20 bp, Human papillomavirus type 179
taaagtagaagtaccaaaag

SEQ ID NO: 44108 - DNA, 20 bp, Human papillomavirus type 179
aatatccagcggcacaagca

SEQ ID NO: 44109 - DNA, 20 bp, Human papillomavirus type 179
gatatggccatggagcctaa

SEQ ID NO: 44110 - DNA, 20 bp, Human papillomavirus type 179
attattgtgggttgtgtacc

SEQ ID NO: 44111 - DNA, 20 bp, Human papillomavirus type 179
ttgtgggttgtgtacccaca

SEQ ID NO: 44112 - DNA, 20 bp, Human papillomavirus type 179
attttgcttaggctccatgg

SEQ ID NO: 44113 - DNA, 20 bp, Human papillomavirus type 179
ggatgttgatatgtcagaaa

SEQ ID NO: 44114 - DNA, 20 bp, Human papillomavirus type 179
atatgtcagaaaagttttcc

SEQ ID NO: 44115 - DNA, 20 bp, Human papillomavirus type 179
tcctcagatttaagtcagtc

SEQ ID NO: 44116 - DNA, 20 bp, Human papillomavirus type 179
cctcagatttaagtcagtct

SEQ ID NO: 44117 - DNA, 20 bp, Human papillomavirus type 179
ctcagatttaagtcagtctt

SEQ ID NO: 44118 - DNA, 20 bp, Human papillomavirus type 179
ccttaccgcacccaacaatt

SEQ ID NO: 44119 - DNA, 20 bp, Human papillomavirus type 179
cttaccgcacccaacaatta

SEQ ID NO: 44120 - DNA, 20 bp, Human papillomavirus type 179
ccgcacccaacaattatttg

SEQ ID NO: 44121 - DNA, 20 bp, Human papillomavirus type 179
tttggccagtattaataccc

SEQ ID NO: 44122 - DNA, 20 bp, Human papillomavirus type 179
ggccagtattaatacccaca

SEQ ID NO: 44123 - DNA, 20 bp, Influenza C virus
aatggcatttgtagccacaa

SEQ ID NO: 44124 - DNA, 20 bp, Influenza C virus
atggcatttgtagccacaaa

SEQ ID NO: 44125 - DNA, 20 bp, Influenza C virus
gtagccacaaaaatgttaga

SEQ ID NO: 44126 - DNA, 20 bp, Influenza C virus
tagccacaaaaatgttagag

SEQ ID NO: 44127 - DNA, 20 bp, Influenza C virus
gagagacaagaagatttaga

SEQ ID NO: 44128 - DNA, 20 bp, Influenza C virus
cctattgattttgctccaag

SEQ ID NO: 44129 - DNA, 20 bp, Influenza C virus
ctattgattttgctccaaga

SEQ ID NO: 44130 - DNA, 20 bp, Influenza C virus
attttgctccaagaaacata

SEQ ID NO: 44131 - DNA, 20 bp, Influenza C virus
tgctccaagaaacatagcac

SEQ ID NO: 44132 - DNA, 20 bp, Influenza C virus
gctccaagaaacatagcacc

SEQ ID NO: 44133 - DNA, 20 bp, Influenza C virus
aaacaggaattagaaaatgt

SEQ ID NO: 44134 - DNA, 20 bp, Influenza C virus
gaaaatgtttcagatgcatt

SEQ ID NO: 44135 - DNA, 20 bp, Influenza C virus
cagatgcattaaaagcggat

SEQ ID NO: 44136 - DNA, 20 bp, Influenza C virus
agatgcattaaaagcggatt

SEQ ID NO: 44137 - DNA, 20 bp, Influenza C virus
aaagcggattcgttatggct

SEQ ID NO: 44138 - DNA, 20 bp, Human rhinovirus 3
cccacgggtgaccgtgtcct

SEQ ID NO: 44139 - DNA, 20 bp, Human rhinovirus 3
tgctgggacgcctttttata

SEQ ID NO: 44140 - DNA, 20 bp, Human rhinovirus 3
gccgccacgcaggctaggac

SEQ ID NO: 44141 - DNA, 20 bp, Human rhinovirus 3
aatgttgaagggggcaccag

SEQ ID NO: 44142 - DNA, 20 bp, Human rhinovirus 3
atgttgaagggggcaccagc

SEQ ID NO: 44143 - DNA, 20 bp, Human rhinovirus 3
aagggggcaccagcactgaa

SEQ ID NO: 44144 - DNA, 20 bp, Human rhinovirus 3
accgaatgttgaagcatgtg

SEQ ID NO: 44145 - DNA, 20 bp, Human rhinovirus 3
aagcatgtggttacagtgat

SEQ ID NO: 44146 - DNA, 20 bp, Human rhinovirus 3
gaagttgcccgatgctctta

SEQ ID NO: 44147 - DNA, 20 bp, Human rhinovirus 3
cccgatgctcttaaggacat

SEQ ID NO: 44148 - DNA, 20 bp, Human rhinovirus 3
aggacatgggagtatttggc

SEQ ID NO: 44149 - DNA, 20 bp, Human rhinovirus 3
ggccagaatatgttttacca

SEQ ID NO: 44150 - DNA, 20 bp, Human rhinovirus 3
gccagaatatgttttaccat

SEQ ID NO: 44151 - DNA, 20 bp, Human rhinovirus 3
atctagacactgttgaagtt

SEQ ID NO: 44152 - DNA, 20 bp, Human rhinovirus 3
aagttgcaggtggccctacc

SEQ ID NO: 44153 - DNA, 20 bp, Human rhinovirus 3
caggtggccctaccagcgac

SEQ ID NO: 44154 - DNA, 20 bp, Human rhinovirus 3
taggcaatcttttgattttc

SEQ ID NO: 44155 - DNA, 20 bp, Human rhinovirus 3
cctagaagagttccgtccat

SEQ ID NO: 44156 - DNA, 20 bp, Human rhinovirus 3
cctgtgactgttacaattgc

SEQ ID NO: 44157 - DNA, 20 bp, Human rhinovirus 3
caattgcaccaatgtgcaca

SEQ ID NO: 44158 - DNA, 20 bp, Human rhinovirus 3
caccaatgtgcacagaattt

SEQ ID NO: 44159 - DNA, 20 bp, Human rhinovirus 3
actggtattagatctagatc

SEQ ID NO: 44160 - DNA, 20 bp, Human rhinovirus 3
ctggtattagatctagatcc

SEQ ID NO: 44161 - DNA, 20 bp, Human rhinovirus 3
ggcacaaaactctacattgg

SEQ ID NO: 44162 - DNA, 20 bp, Human rhinovirus 3
gcacaaaactctacattggt

SEQ ID NO: 44163 - DNA, 20 bp, Human rhinovirus 3
gtgatggtgttttcaagact

SEQ ID NO: 44164 - DNA, 20 bp, Human rhinovirus 3
tcaagactactttattgggt

SEQ ID NO: 44165 - DNA, 20 bp, Human rhinovirus 3
caagactactttattgggtg

SEQ ID NO: 44166 - DNA, 20 bp, Human rhinovirus 3
ggaacacatgttgtatggga

SEQ ID NO: 44167 - DNA, 20 bp, Human rhinovirus 3
tatgggatattggcttacaa

SEQ ID NO: 44168 - DNA, 20 bp, Human rhinovirus 3
gcttacaatccaccatagtt

SEQ ID NO: 44169 - DNA, 20 bp, Human rhinovirus 3
caatccaccatagttatgac

SEQ ID NO: 44170 - DNA, 20 bp, Human rhinovirus 3
tgaccattccatggacatca

SEQ ID NO: 44171 - DNA, 20 bp, Human rhinovirus 3
tgtgcatgtgacagaaatca

SEQ ID NO: 44172 - DNA, 20 bp, Human rhinovirus 3
gataatcacaggaaggaggg

SEQ ID NO: 44173 - DNA, 20 bp, Human rhinovirus 3
aacaacccctccttcctgtg

SEQ ID NO: 44174 - DNA, 20 bp, Human rhinovirus 3
ctgtgattatccaagccagc

SEQ ID NO: 44175 - DNA, 20 bp, Human rhinovirus 3
tccaagccagctgcgttctt

SEQ ID NO: 44176 - DNA, 20 bp, Human rhinovirus 3
cacatggcaaagtgcttcta

SEQ ID NO: 44177 - DNA, 20 bp, Human rhinovirus 3
taaccccagtgtgtttttca

SEQ ID NO: 44178 - DNA, 20 bp, Human rhinovirus 3
ttcaaagttggtgagacatc

SEQ ID NO: 44179 - DNA, 20 bp, Human rhinovirus 3
tcaaagttggtgagacatcc

SEQ ID NO: 44180 - DNA, 20 bp, Human rhinovirus 3
caaagttggtgagacatcca

SEQ ID NO: 44181 - DNA, 20 bp, Human rhinovirus 3
tgaaaattagagtttaccac

SEQ ID NO: 44182 - DNA, 20 bp, Human rhinovirus 3
gagtttaccacagagccaaa

SEQ ID NO: 44183 - DNA, 20 bp, Human rhinovirus 3
accacagagccaaacatgtg

SEQ ID NO: 44184 - DNA, 20 bp, Human rhinovirus 3
ccacagagccaaacatgtgg

SEQ ID NO: 44185 - DNA, 20 bp, Human rhinovirus 3
caagagcacctagagccttg

SEQ ID NO: 44186 - DNA, 20 bp, Human rhinovirus 3
actactccagatattacagg

SEQ ID NO: 44187 - DNA, 20 bp, Human rhinovirus 3
ctactccagatattacagga

SEQ ID NO: 44188 - DNA, 20 bp, Human rhinovirus 3
caggaagttctatcccatca

SEQ ID NO: 44189 - DNA, 20 bp, Human rhinovirus 3
tatcccatcatttgtgagag

SEQ ID NO: 44190 - DNA, 20 bp, Human rhinovirus 3
gtgagagacccactaacatc

SEQ ID NO: 44191 - DNA, 20 bp, Human rhinovirus 3
ttaacagctggtggaggcgg

SEQ ID NO: 44192 - DNA, 20 bp, Human rhinovirus 3
acagctggtggaggcggtta

SEQ ID NO: 44193 - DNA, 20 bp, Human rhinovirus 3
tgtctgttttgcagacataa

SEQ ID NO: 44194 - DNA, 20 bp, Human rhinovirus 3
tgcagacataagacaattgg

SEQ ID NO: 44195 - DNA, 20 bp, Human rhinovirus 3
gcagacataagacaattgga

SEQ ID NO: 44196 - DNA, 20 bp, Human rhinovirus 3
agttttgtagcaaactaaag

SEQ ID NO: 44197 - DNA, 20 bp, Human rhinovirus 3
tgtagcaaactaaagcaact

SEQ ID NO: 44198 - DNA, 20 bp, Human rhinovirus 3
gtagcaaactaaagcaacta

SEQ ID NO: 44199 - DNA, 20 bp, Human rhinovirus 3
tagcaaactaaagcaactag

SEQ ID NO: 44200 - DNA, 20 bp, Human rhinovirus 3
gagagacaaatagcatccat

SEQ ID NO: 44201 - DNA, 20 bp, Human rhinovirus 3
taatacacggcacaccaggt

SEQ ID NO: 44202 - DNA, 20 bp, Human rhinovirus 3
aatacacggcacaccaggtt

SEQ ID NO: 44203 - DNA, 20 bp, Human rhinovirus 3
atacacggcacaccaggttc

SEQ ID NO: 44204 - DNA, 20 bp, Human rhinovirus 3
tggcaaatcactaactacat

SEQ ID NO: 44205 - DNA, 20 bp, Human rhinovirus 3
tgggccgcgcattggcagaa

SEQ ID NO: 44206 - DNA, 20 bp, Human rhinovirus 3
gcctcaaccaattcaaacac

SEQ ID NO: 44207 - DNA, 20 bp, Human rhinovirus 3
aaacactctaagtcccccca

SEQ ID NO: 44208 - DNA, 20 bp, Human rhinovirus 3
aacccagaagctctgattag

SEQ ID NO: 44209 - DNA, 20 bp, Human rhinovirus 3
gacggtttggatttgatttg

SEQ ID NO: 44210 - DNA, 20 bp, Human rhinovirus 3
tgggttcaagatagtggggg

SEQ ID NO: 44211 - DNA, 20 bp, Human rhinovirus 3
actagtttgggtattcatga

SEQ ID NO: 44212 - DNA, 20 bp, Human rhinovirus 3
gggtattcatgatcgtatct

SEQ ID NO: 44213 - DNA, 20 bp, Human rhinovirus 3
ggtattcatgatcgtatctg

SEQ ID NO: 44214 - DNA, 20 bp, Human rhinovirus 3
atgatcgtatctgtgtctta

SEQ ID NO: 44215 - DNA, 20 bp, Human rhinovirus 3
ccaacacatgcccaaccagg

SEQ ID NO: 44216 - DNA, 20 bp, Human rhinovirus 3
actaatactatattagatgt

SEQ ID NO: 44217 - DNA, 20 bp, Human rhinovirus 3
ctaatactatattagatgta

SEQ ID NO: 44218 - DNA, 20 bp, Human rhinovirus 3
gatgtaggaccaataaccat

SEQ ID NO: 44219 - DNA, 20 bp, Human rhinovirus 3
taaatttaagtaatacacca

SEQ ID NO: 44220 - DNA, 20 bp, Human rhinovirus 3
aagtaatacaccaacaacca

SEQ ID NO: 44221 - DNA, 20 bp, Human rhinovirus 3
gtctaaacccaataaacaca

SEQ ID NO: 44222 - DNA, 20 bp, Human rhinovirus 3
atcctagtgtgttttacaat

SEQ ID NO: 44223 - DNA, 20 bp, Human rhinovirus 3
tacaatgtgttccctggaag

SEQ ID NO: 44224 - DNA, 20 bp, Human rhinovirus 3
acaatgtgttccctggaagc

SEQ ID NO: 44225 - DNA, 20 bp, Human rhinovirus 3
caatgtgttccctggaagca

SEQ ID NO: 44226 - DNA, 20 bp, Influenza A virus
aatccgatgattgtcgagct

SEQ ID NO: 44227 - DNA, 20 bp, Influenza A virus
tcgagcttgcggaaaaaaca

SEQ ID NO: 44228 - DNA, 20 bp, Influenza A virus
cggaaaaaacaatgaaagag

SEQ ID NO: 44229 - DNA, 20 bp, Influenza A virus
gcagcaatatgcactcactt

SEQ ID NO: 44230 - DNA, 20 bp, Influenza A virus
cagcaatatgcactcacttg

SEQ ID NO: 44231 - DNA, 20 bp, Influenza A virus
tttgaaaacaacaccacgac

SEQ ID NO: 44232 - DNA, 20 bp, Influenza A virus
ttgaaaacaacaccacgacc

SEQ ID NO: 44233 - DNA, 20 bp, Influenza A virus
tgaaaacaacaccacgacca

SEQ ID NO: 44234 - DNA, 20 bp, Influenza A virus
gaaaacaacaccacgaccac

SEQ ID NO: 44235 - DNA, 20 bp, Influenza A virus
aaaacaacaccacgaccact

SEQ ID NO: 44236 - DNA, 20 bp, Influenza A virus
gagaagatgtggctccaatt

SEQ ID NO: 44237 - DNA, 20 bp, Influenza A virus
aacacattgcaagcatgaga

SEQ ID NO: 44238 - DNA, 20 bp, Influenza A virus
caagcatgagaaggaattat

SEQ ID NO: 44239 - DNA, 20 bp, Influenza A virus
tttcacatcagaggtgtctc

SEQ ID NO: 44240 - DNA, 20 bp, Influenza A virus
cacatcagaggtgtctcact

SEQ ID NO: 44241 - DNA, 20 bp, Influenza A virus
gtgagcatggagttttctct

SEQ ID NO: 44242 - DNA, 20 bp, Influenza A virus
tgagcatggagttttctctc

SEQ ID NO: 44243 - DNA, 20 bp, Influenza A virus
tctctcactgacccaagact

SEQ ID NO: 44244 - DNA, 20 bp, Influenza A virus
ctctcactgacccaagactt

SEQ ID NO: 44245 - DNA, 20 bp, Influenza A virus
tctcactgacccaagacttg

SEQ ID NO: 44246 - DNA, 20 bp, Influenza A virus
aacaaattgagagtatgatt

SEQ ID NO: 44247 - DNA, 20 bp, Influenza A virus
agagtatgattgaagctgag

SEQ ID NO: 44248 - DNA, 20 bp, Influenza A virus
aagctgagtcctctgtcaaa

SEQ ID NO: 44249 - DNA, 20 bp, Influenza A virus
tttgagaacaaatcagaaac

SEQ ID NO: 44250 - DNA, 20 bp, Influenza A virus
gagaacaaatcagaaacatg

SEQ ID NO: 44251 - DNA, 20 bp, Influenza A virus
ggatgaagtggatgatggca

SEQ ID NO: 44252 - DNA, 20 bp, Influenza A virus
gatatttcattgccatcatc

SEQ ID NO: 44253 - DNA, 20 bp, Influenza A virus
cattgccatcatccacttca

SEQ ID NO: 44254 - DNA, 20 bp, Influenza A virus
attgccatcatccacttcat

SEQ ID NO: 44255 - DNA, 20 bp, Influenza A virus
ccatcatccacttcatccta

SEQ ID NO: 44256 - DNA, 20 bp, Influenza A virus
tgaaaaggtcgaaaggctaa

SEQ ID NO: 44257 - DNA, 20 bp, Influenza A virus
gaaaaggtcgaaaggctaaa

SEQ ID NO: 44258 - DNA, 20 bp, Influenza A virus
aaaaggtcgaaaggctaaaa

SEQ ID NO: 44259 - DNA, 20 bp, Influenza A virus
ggccccgttcacttcagaaa

SEQ ID NO: 44260 - DNA, 20 bp, Influenza A virus
acttcagaaaccaggttaaa

SEQ ID NO: 44261 - DNA, 20 bp, Influenza A virus
ccaaggaaaagaagaaggag

SEQ ID NO: 44262 - DNA, 20 bp, Influenza A virus
aggactgcaaaattgcccct

SEQ ID NO: 44263 - DNA, 20 bp, Influenza A virus
cccctttaatggtggcttac

SEQ ID NO: 44264 - DNA, 20 bp, Influenza A virus
aatggtggcttacatgttgg

SEQ ID NO: 44265 - DNA, 20 bp, Influenza A virus
atggtggcttacatgttgga

SEQ ID NO: 44266 - DNA, 20 bp, Influenza A virus
gcttcgcttttggagatgtg

SEQ ID NO: 44267 - DNA, 20 bp, Influenza A virus
gcttttggagatgtgccata

SEQ ID NO: 44268 - DNA, 20 bp, Influenza A virus
tggagatgtgccatagtaca

SEQ ID NO: 44269 - DNA, 20 bp, Influenza A virus
ggagatgtgccatagtacac

SEQ ID NO: 44270 - DNA, 20 bp, Influenza A virus
gagatgtgccatagtacaca

SEQ ID NO: 44271 - DNA, 20 bp, Influenza A virus
aaaataagagtacatgaagg

SEQ ID NO: 44272 - DNA, 20 bp, Influenza A virus
acaatggtcgggcgaagagc

SEQ ID NO: 44273 - DNA, 20 bp, Influenza A virus
taaggaaagcaaccagaaga

SEQ ID NO: 44274 - DNA, 20 bp, Influenza A virus
gatcagtcttctggttgctt

SEQ ID NO: 44275 - DNA, 20 bp, Influenza A virus
tggttgctttccttagaatg

SEQ ID NO: 44276 - DNA, 20 bp, Influenza A virus
ccaaaaggatgcaaaggtcc

SEQ ID NO: 44277 - DNA, 20 bp, Influenza A virus
caaaaggatgcaaaggtcct

SEQ ID NO: 44278 - DNA, 20 bp, Influenza A virus
caaaactggggaattgaacc

SEQ ID NO: 44279 - DNA, 20 bp, Influenza A virus
aaaactggggaattgaaccc

SEQ ID NO: 44280 - DNA, 20 bp, Influenza A virus
aacccattgacaatgtaatg

SEQ ID NO: 44281 - DNA, 20 bp, Influenza A virus
gtgaaacacagggaacagaa

SEQ ID NO: 44282 - DNA, 20 bp, Influenza A virus
atcgtccatgatgtgggaga

SEQ ID NO: 44283 - DNA, 20 bp, Influenza A virus
cggaccattgatctcccaca

SEQ ID NO: 44284 - DNA, 20 bp, Influenza A virus
atctcccacatcatggacga

SEQ ID NO: 44285 - DNA, 20 bp, Influenza A virus
tagtcagcttttctgttccc

SEQ ID NO: 44286 - DNA, 20 bp, Influenza A virus
ccatttgcagcagccccgcc

SEQ ID NO: 44287 - DNA, 20 bp, Influenza A virus
gcagcagccccgccgaagca

SEQ ID NO: 44288 - DNA, 20 bp, Influenza A virus
cagcagccccgccgaagcag

SEQ ID NO: 44289 - DNA, 20 bp, Influenza A virus
tcttctctaactgtgaatgt

SEQ ID NO: 44290 - DNA, 20 bp, Influenza A virus
tctaactgtgaatgtgaggg

SEQ ID NO: 44291 - DNA, 20 bp, Human papillomavirus type 116
tttaagtgggttagatttgc

SEQ ID NO: 44292 - DNA, 20 bp, Human papillomavirus type 116
aagtgggttagatttgcaag

SEQ ID NO: 44293 - DNA, 20 bp, Human papillomavirus type 116
agtgggttagatttgcaaga

SEQ ID NO: 44294 - DNA, 20 bp, Human papillomavirus type 116
gatttgcaagagaaatttga

SEQ ID NO: 44295 - DNA, 20 bp, Human papillomavirus type 116
gcaagagaaatttgatttgg

SEQ ID NO: 44296 - DNA, 20 bp, Human papillomavirus type 116
agatacattgtttgatgaaa

SEQ ID NO: 44297 - DNA, 20 bp, Human papillomavirus type 116
gatacattgtttgatgaaag

SEQ ID NO: 44298 - DNA, 20 bp, Human papillomavirus type 116
tttgatgaaagtgattgtga

SEQ ID NO: 44299 - DNA, 20 bp, Human papillomavirus type 116
gatgaaagtgattgtgattc

SEQ ID NO: 44300 - DNA, 20 bp, Human papillomavirus type 116
atgaaagtgattgtgattct

SEQ ID NO: 44301 - DNA, 20 bp, Human papillomavirus type 116
tttcaggacagtggattagg

SEQ ID NO: 44302 - DNA, 20 bp, Human papillomavirus type 116
caggacagtggattaggcga

SEQ ID NO: 44303 - DNA, 20 bp, Human papillomavirus type 116
aggacagtggattaggcgaa

SEQ ID NO: 44304 - DNA, 20 bp, Human papillomavirus type 116
ggcgaagatgaagctgaact

SEQ ID NO: 44305 - DNA, 20 bp, Human papillomavirus type 116
tttctgaacaggtagaagtg

SEQ ID NO: 44306 - DNA, 20 bp, Human papillomavirus type 116
gtctgggaccccaactcact

SEQ ID NO: 44307 - DNA, 20 bp, Human papillomavirus type 116
tggcgttcttcgtccgtcgg

SEQ ID NO: 44308 - DNA, 20 bp, Human papillomavirus type 116
ttcgtccgtcggcctcctcg

SEQ ID NO: 44309 - DNA, 20 bp, Human papillomavirus type 116
gtccgtcggcctcctcggtg

SEQ ID NO: 44310 - DNA, 20 bp, Human papillomavirus type 116
gtggtagagtgagttggggt

SEQ ID NO: 44311 - DNA, 20 bp, Human papillomavirus type 116
cacgatcaggtctatcgaga

SEQ ID NO: 44312 - DNA, 20 bp, Human papillomavirus type 116
aacgacttcaaaaggaggct

SEQ ID NO: 44313 - DNA, 20 bp, Human papillomavirus type 116
aaaaggaggctcgggatccg

SEQ ID NO: 44314 - DNA, 20 bp, Human papillomavirus type 116
tatacggatcccgagcctcc

SEQ ID NO: 44315 - DNA, 20 bp, Human papillomavirus type 116
tgaagtcgttcaagtctcga

SEQ ID NO: 44316 - DNA, 20 bp, Human papillomavirus type 116
ggcattggaactggtaaggg

SEQ ID NO: 44317 - DNA, 20 bp, Human papillomavirus type 116
gaactggtaagggtggtgga

SEQ ID NO: 44318 - DNA, 20 bp, Human papillomavirus type 116
tggaggcacaaggcctagca

SEQ ID NO: 44319 - DNA, 20 bp, Human papillomavirus type 116
ggaggcacaaggcctagcat

SEQ ID NO: 44320 - DNA, 20 bp, Human papillomavirus type 116
gaggcacaaggcctagcata

SEQ ID NO: 44321 - DNA, 20 bp, Human papillomavirus type 116
gatcttgtttctgaagtaac

SEQ ID NO: 44322 - DNA, 20 bp, Human papillomavirus type 116
tttctgaagtaactggtgtt

SEQ ID NO: 44323 - DNA, 20 bp, Human papillomavirus type 116
ctgaagtaactggtgttggt

SEQ ID NO: 44324 - DNA, 20 bp, Human papillomavirus type 116
tgaagtaactggtgttggtg

SEQ ID NO: 44325 - DNA, 20 bp, Human papillomavirus type 116
gtgaacatccttccgttaca

SEQ ID NO: 44326 - DNA, 20 bp, Human papillomavirus type 116
agtattgatgttaattactc

SEQ ID NO: 44327 - DNA, 20 bp, Human papillomavirus type 116
gtattgatgttaattactcc

SEQ ID NO: 44328 - DNA, 20 bp, Human papillomavirus type 116
atgttaattactccgattat

SEQ ID NO: 44329 - DNA, 20 bp, Human papillomavirus type 116
attactccgattataatata

SEQ ID NO: 44330 - DNA, 20 bp, Human papillomavirus type 116
ctccgattataatatacatc

SEQ ID NO: 44331 - DNA, 20 bp, Human papillomavirus type 116
ggacagactgttgactgttg

SEQ ID NO: 44332 - DNA, 20 bp, Human papillomavirus type 116
actgttggccatccttactt

SEQ ID NO: 44333 - DNA, 20 bp, Human papillomavirus type 116
gccatccttactttgacgtt

SEQ ID NO: 44334 - DNA, 20 bp, Human papillomavirus type 116
ctttgacgttttgaatgacg

SEQ ID NO: 44335 - DNA, 20 bp, Human papillomavirus type 116
gacgttttgaatgacgctac

SEQ ID NO: 44336 - DNA, 20 bp, Human papillomavirus type 116
tttgacagattggcagatac

SEQ ID NO: 44337 - DNA, 20 bp, Human papillomavirus type 116
gacagattggcagatacgga

SEQ ID NO: 44338 - DNA, 20 bp, Human papillomavirus type 116
acagattggcagatacggaa

SEQ ID NO: 44339 - DNA, 20 bp, Human papillomavirus type 116
gcagatacggaaaatcctaa

SEQ ID NO: 44340 - DNA, 20 bp, Human papillomavirus type 116
atgcccctgcagaggtagat

SEQ ID NO: 44341 - DNA, 20 bp, Hepatitis C virus
acgcagaaagcgtctagcca

SEQ ID NO: 44342 - DNA, 20 bp, Hepatitis C virus
gtatgagtgtcgtgcagcct

SEQ ID NO: 44343 - DNA, 20 bp, Hepatitis C virus
cgcagactactatggctctc

SEQ ID NO: 44344 - DNA, 20 bp, Hepatitis C virus
ctgcgtgaagacagtagttc

SEQ ID NO: 44345 - DNA, 20 bp, Hepatitis C virus
ccgggcggcggccagatcgt

SEQ ID NO: 44346 - DNA, 20 bp, Hepatitis C virus
gtggagtttacttgctgccg

SEQ ID NO: 44347 - DNA, 20 bp, Hepatitis C virus
acttgctgccgcgcaggggc

SEQ ID NO: 44348 - DNA, 20 bp, Hepatitis C virus
cttgctgccgcgcaggggcc

SEQ ID NO: 44349 - DNA, 20 bp, Hepatitis C virus
ctgccgcgcaggggcccacg

SEQ ID NO: 44350 - DNA, 20 bp, Hepatitis C virus
tgtgccttgcgtgagagccg

SEQ ID NO: 44351 - DNA, 20 bp, Hepatitis C virus
cgtgagagccggaaacattt

SEQ ID NO: 44352 - DNA, 20 bp, Hepatitis C virus
cacgctgctggcatcctgtt

SEQ ID NO: 44353 - DNA, 20 bp, Hepatitis C virus
acgctgctggcatcctgttt

SEQ ID NO: 44354 - DNA, 20 bp, Hepatitis C virus
cacccaccctggctgtaccg

SEQ ID NO: 44355 - DNA, 20 bp, Hepatitis C virus
tgagagtgcccgaaatagtg

SEQ ID NO: 44356 - DNA, 20 bp, Hepatitis C virus
gccggcggtcactggggtgt

SEQ ID NO: 44357 - DNA, 20 bp, Hepatitis C virus
cgggcactctcagaatgctc

SEQ ID NO: 44358 - DNA, 20 bp, Hepatitis C virus
gggcactctcagaatgctcg

SEQ ID NO: 44359 - DNA, 20 bp, Hepatitis C virus
ctcagaacggcttggcgcat

SEQ ID NO: 44360 - DNA, 20 bp, Hepatitis C virus
gcgcatgcaagcccttggaa

SEQ ID NO: 44361 - DNA, 20 bp, Hepatitis C virus
gaacacttccagcagggatg

SEQ ID NO: 44362 - DNA, 20 bp, Hepatitis C virus
cagcagggatggggccctat

SEQ ID NO: 44363 - DNA, 20 bp, Hepatitis C virus
gacttgtgggttatagggcc

SEQ ID NO: 44364 - DNA, 20 bp, Hepatitis C virus
gttcgggtgcacgtggatga

SEQ ID NO: 44365 - DNA, 20 bp, Hepatitis C virus
gggtgcacgtggatgaactc

SEQ ID NO: 44366 - DNA, 20 bp, Hepatitis C virus
accaagacctgcggagcccc

SEQ ID NO: 44367 - DNA, 20 bp, Hepatitis C virus
ccagttaatcccaggagact

SEQ ID NO: 44368 - DNA, 20 bp, Hepatitis C virus
atcccaggagactataatag

SEQ ID NO: 44369 - DNA, 20 bp, Hepatitis C virus
ctatcttgccttgcagcttt

SEQ ID NO: 44370 - DNA, 20 bp, Hepatitis C virus
ccttgcagctttaccaccat

SEQ ID NO: 44371 - DNA, 20 bp, Hepatitis C virus
cagctttaccaccatgcccg

SEQ ID NO: 44372 - DNA, 20 bp, Hepatitis C virus
accaccatgcccgccttgtc

SEQ ID NO: 44373 - DNA, 20 bp, Hepatitis C virus
ccaccatgcccgccttgtca

SEQ ID NO: 44374 - DNA, 20 bp, Hepatitis C virus
gagcggctcgtcgtcctcaa

SEQ ID NO: 44375 - DNA, 20 bp, Hepatitis C virus
gtgttggaccctcatcttcc

SEQ ID NO: 44376 - DNA, 20 bp, Hepatitis C virus
gaccctcatcttcctgtgct

SEQ ID NO: 44377 - DNA, 20 bp, Hepatitis C virus
ctgtgctgcgtgtggcacgt

SEQ ID NO: 44378 - DNA, 20 bp, Hepatitis C virus
acgtgccacacgcagcacag

SEQ ID NO: 44379 - DNA, 20 bp, Hepatitis C virus
tcccccatggagaaaaagat

SEQ ID NO: 44380 - DNA, 20 bp, Hepatitis C virus
cccccatggagaaaaagatc

SEQ ID NO: 44381 - DNA, 20 bp, Hepatitis C virus
ccccatggagaaaaagatca

SEQ ID NO: 44382 - DNA, 20 bp, Hepatitis C virus
cgtggggtgcagacaccgct

SEQ ID NO: 44383 - DNA, 20 bp, Hepatitis C virus
aggggtctccctgtgtccgc

SEQ ID NO: 44384 - DNA, 20 bp, Hepatitis C virus
ctggcgaccactatcaacgg

SEQ ID NO: 44385 - DNA, 20 bp, Hepatitis C virus
atcacggtgctggctcgaaa

SEQ ID NO: 44386 - DNA, 20 bp, Hepatitis C virus
tcacggtgctggctcgaaaa

SEQ ID NO: 44387 - DNA, 20 bp, Hepatitis C virus
ccggaccaaaagggcccgta

SEQ ID NO: 44388 - DNA, 20 bp, Hepatitis C virus
accaagacctggtgggctgg

SEQ ID NO: 44389 - DNA, 20 bp, Hepatitis C virus
agggcggccgtgtgtacgag

SEQ ID NO: 44390 - DNA, 20 bp, Hepatitis C virus
atccctgtggagaatatgga

SEQ ID NO: 44391 - DNA, 20 bp, Hepatitis C virus
tgtccatattctccacaggg

SEQ ID NO: 44392 - DNA, 20 bp, Hepatitis C virus
tccacagggatgaagtccag

SEQ ID NO: 44393 - DNA, 20 bp, Hepatitis C virus
gccacgcccctcgtacacac

SEQ ID NO: 44394 - DNA, 20 bp, Hepatitis C virus
aggaggagcatatgatatca

SEQ ID NO: 44395 - DNA, 20 bp, Hepatitis C virus
gcatcggcactgtcctagac

SEQ ID NO: 44396 - DNA, 20 bp, Hepatitis C virus
ctgcctggtctaggacagtg

SEQ ID NO: 44397 - DNA, 20 bp, Hepatitis C virus
tgcctggtctaggacagtgc

SEQ ID NO: 44398 - DNA, 20 bp, Hepatitis C virus
ggtctgtggagtggcactcg

SEQ ID NO: 44399 - DNA, 20 bp, Hepatitis C virus
tatagaggtgtcgatgtggc

SEQ ID NO: 44400 - DNA, 20 bp, Hepatitis C virus
tgaccggctacacgggcgac

SEQ ID NO: 44401 - DNA, 20 bp, Hepatitis C virus
gactctgtcattgattgtaa

SEQ ID NO: 44402 - DNA, 20 bp, Hepatitis C virus
actctgtcattgattgtaac

SEQ ID NO: 44403 - DNA, 20 bp, Hepatitis C virus
caatcaatgacagagtcaaa

SEQ ID NO: 44404 - DNA, 20 bp, Hepatitis C virus
gtctcgcagggggaaagacc

SEQ ID NO: 44405 - DNA, 20 bp, Hepatitis C virus
tctcgcagggggaaagacct

SEQ ID NO: 44406 - DNA, 20 bp, Hepatitis C virus
aggtatgtttgatagcgtcg

SEQ ID NO: 44407 - DNA, 20 bp, Hepatitis C virus
gatagcgtcgtgctctgtga

SEQ ID NO: 44408 - DNA, 20 bp, Hepatitis C virus
atagcgtcgtgctctgtgaa

SEQ ID NO: 44409 - DNA, 20 bp, Hepatitis C virus
agccgaccctcacaggtcct

SEQ ID NO: 44410 - DNA, 20 bp, Hepatitis C virus
gtgattggatgtgttgttac

SEQ ID NO: 44411 - DNA, 20 bp, Hepatitis C virus
tgattggatgtgttgttact

SEQ ID NO: 44412 - DNA, 20 bp, Hepatitis C virus
gatgtgttgttactatctca

SEQ ID NO: 44413 - DNA, 20 bp, Hepatitis C virus
ttactatctcattttggaca

SEQ ID NO: 44414 - DNA, 20 bp, Hepatitis C virus
agggtcagcagattgctgag

SEQ ID NO: 44415 - DNA, 20 bp, Hepatitis C virus
ctgagcagttcaagcaaaag

SEQ ID NO: 44416 - DNA, 20 bp, Hepatitis C virus
aagcaaaaggtccttgggct

SEQ ID NO: 44417 - DNA, 20 bp, Hepatitis C virus
ggctgctccaggccggcacc

SEQ ID NO: 44418 - DNA, 20 bp, Hepatitis C virus
cacgtggcccagggtggagg

SEQ ID NO: 44419 - DNA, 20 bp, Hepatitis C virus
ccaagtagctcccccctccg

SEQ ID NO: 44420 - DNA, 20 bp, Hepatitis C virus
cgtcgtgagcggcttagcag

SEQ ID NO: 44421 - DNA, 20 bp, Hepatitis C virus
gtcgtgagcggcttagcagg

SEQ ID NO: 44422 - DNA, 20 bp, Hepatitis C virus
gcaggcgccacggtggccag

SEQ ID NO: 44423 - DNA, 20 bp, Hepatitis C virus
acttaccatcactagcctgt

SEQ ID NO: 44424 - DNA, 20 bp, Hepatitis C virus
ccatcactagcctgttacgc

SEQ ID NO: 44425 - DNA, 20 bp, Hepatitis C virus
cgcaggctacaccagtggat

SEQ ID NO: 44426 - DNA, 20 bp, Hepatitis C virus
acgaggatacgtccacgcct

SEQ ID NO: 44427 - DNA, 20 bp, Hepatitis C virus
gggtgactttgtttgatgcg

SEQ ID NO: 44428 - DNA, 20 bp, Hepatitis C virus
ctggacacgtgaagaacggg

SEQ ID NO: 44429 - DNA, 20 bp, Hepatitis C virus
gcatggaacgtttccgatca

SEQ ID NO: 44430 - DNA, 20 bp, Hepatitis C virus
tggcgttgatcggaaacgtt

SEQ ID NO: 44431 - DNA, 20 bp, Hepatitis C virus
atcggaaacgttccatgcca

SEQ ID NO: 44432 - DNA, 20 bp, Hepatitis C virus
catgccaagtgttgctgcac

SEQ ID NO: 44433 - DNA, 20 bp, Hepatitis C virus
gagatgaggtgagcttctct

SEQ ID NO: 44434 - DNA, 20 bp, Hepatitis C virus
tctgtgggcctcctagagtt

SEQ ID NO: 44435 - DNA, 20 bp, Hepatitis C virus
gttgtggggtctcagctccc

SEQ ID NO: 44436 - DNA, 20 bp, Hepatitis C virus
ttgtggggtctcagctccct

SEQ ID NO: 44437 - DNA, 20 bp, Hepatitis C virus
tggggtctcagctcccttgt

SEQ ID NO: 44438 - DNA, 20 bp, Hepatitis C virus
cagagtatgacgacagggag

SEQ ID NO: 44439 - DNA, 20 bp, Hepatitis C virus
cctcctgctctcccgatttg

SEQ ID NO: 44440 - DNA, 20 bp, Hepatitis C virus
gggccagacctgactacaat

SEQ ID NO: 44441 - DNA, 20 bp, Hepatitis C virus
ggccagacctgactacaatc

SEQ ID NO: 44442 - DNA, 20 bp, Hepatitis C virus
ccatttctgtaggagaggtg

SEQ ID NO: 44443 - DNA, 20 bp, Hepatitis C virus
gtggaggacactagcacctc

SEQ ID NO: 44444 - DNA, 20 bp, Hepatitis C virus
tggaggacactagcacctca

SEQ ID NO: 44445 - DNA, 20 bp, Hepatitis C virus
tcgggtcaggagatgatggg

SEQ ID NO: 44446 - DNA, 20 bp, Hepatitis C virus
accctccgaggccggagctc

SEQ ID NO: 44447 - DNA, 20 bp, Hepatitis C virus
attgtttatccagacttatc

SEQ ID NO: 44448 - DNA, 20 bp, Hepatitis C virus
tttatccagacttatccgtg

SEQ ID NO: 44449 - DNA, 20 bp, Hepatitis C virus
atccagacttatccgtgcgg

SEQ ID NO: 44450 - DNA, 20 bp, Hepatitis C virus
tccagacttatccgtgcggg

SEQ ID NO: 44451 - DNA, 20 bp, Hepatitis C virus
tccgtgcgggtttgcgagaa

SEQ ID NO: 44452 - DNA, 20 bp, Hepatitis C virus
tggtggcccgatgtttaact

SEQ ID NO: 44453 - DNA, 20 bp, Hepatitis C virus
aactccaaaggggaatcatg

SEQ ID NO: 44454 - DNA, 20 bp, Hepatitis C virus
actccaaaggggaatcatgt

SEQ ID NO: 44455 - DNA, 20 bp, Hepatitis C virus
ggggaacaccctcacttgtt

SEQ ID NO: 44456 - DNA, 20 bp, Hepatitis C virus
gggaacaccctcacttgtta

SEQ ID NO: 44457 - DNA, 20 bp, Hepatitis C virus
ctacctcacccgtgactgta

SEQ ID NO: 44458 - DNA, 20 bp, Hepatitis C virus
cgcgagctgcttgggagaca

SEQ ID NO: 44459 - DNA, 20 bp, Hepatitis C virus
ggagacagctcgccataccc

SEQ ID NO: 44460 - DNA, 20 bp, Hepatitis C virus
acaggggtatggcgagctgt

SEQ ID NO: 44461 - DNA, 20 bp, Hepatitis C virus
gggcgccacccttaagagct

SEQ ID NO: 44462 - DNA, 20 bp, Hepatitis C virus
agagcttggagacatcgagc

SEQ ID NO: 44463 - DNA, 20 bp, Hepatitis C virus
gagacatcgagccagagctg

SEQ ID NO: 44464 - DNA, 20 bp, Hepatitis C virus
gctctgacagctctggctcg

SEQ ID NO: 44465 - DNA, 20 bp, Hepatitis C virus
agggtggcgccccaagcttc

SEQ ID NO: 44466 - DNA, 20 bp, Influenza C virus
aagcctacattgccatttgt

SEQ ID NO: 44467 - DNA, 20 bp, Influenza C virus
ccatttgtaaggaagtgggc

SEQ ID NO: 44468 - DNA, 20 bp, Influenza C virus
gtaaggaagtgggccttaat

SEQ ID NO: 44469 - DNA, 20 bp, Influenza C virus
taaggaagtgggccttaatg

SEQ ID NO: 44470 - DNA, 20 bp, Influenza C virus
atggcgatgaaatgttgatc

SEQ ID NO: 44471 - DNA, 20 bp, Influenza C virus
aaagagctggttcaggcacc

SEQ ID NO: 44472 - DNA, 20 bp, Influenza C virus
aggcaccaatataacctacc

SEQ ID NO: 44473 - DNA, 20 bp, Influenza C virus
ttgaattgacaagccgctca

SEQ ID NO: 44474 - DNA, 20 bp, Influenza C virus
aattgacaagccgctcaaga

SEQ ID NO: 44475 - DNA, 20 bp, Influenza C virus
acaagccgctcaagaattgt

SEQ ID NO: 44476 - DNA, 20 bp, Influenza C virus
gagttcttatagctgacgca

SEQ ID NO: 44477 - DNA, 20 bp, Influenza C virus
ttatagctgacgcaaaaggt

SEQ ID NO: 44478 - DNA, 20 bp, Influenza C virus
tagctgacgcaaaaggttta

SEQ ID NO: 44479 - DNA, 20 bp, Influenza C virus
ccatttattaaaccttttgc

SEQ ID NO: 44480 - DNA, 20 bp, Influenza C virus
catttattaaaccttttgcg

SEQ ID NO: 44481 - DNA, 20 bp, Influenza C virus
aagcctcagataaccaacaa

SEQ ID NO: 44482 - DNA, 20 bp, Influenza C virus
tcatcttgttggttatctga

SEQ ID NO: 44483 - DNA, 20 bp, Influenza C virus
ttggttatctgaggctttaa

SEQ ID NO: 44484 - DNA, 20 bp, Influenza C virus
gttatctgaggctttaacag

SEQ ID NO: 44485 - DNA, 20 bp, Influenza C virus
tctgaggctttaacaggagt

SEQ ID NO: 44486 - DNA, 20 bp, Influenza C virus
ggacttgcttatgaagactt

SEQ ID NO: 44487 - DNA, 20 bp, Influenza C virus
gacttgcttatgaagacttc

SEQ ID NO: 44488 - DNA, 20 bp, Influenza C virus
cttatgaagacttcagtttg

SEQ ID NO: 44489 - DNA, 20 bp, Influenza C virus
tgaagacttcagtttggtct

SEQ ID NO: 44490 - DNA, 20 bp, Influenza C virus
agtttggtctctgctatggt

SEQ ID NO: 44491 - DNA, 20 bp, Influenza C virus
gacccagactacaaccccat

SEQ ID NO: 44492 - DNA, 20 bp, Influenza C virus
aaatatcagcagattggaag

SEQ ID NO: 44493 - DNA, 20 bp, Influenza C virus
gaagaagaaggaatggatga

SEQ ID NO: 44494 - DNA, 20 bp, Influenza C virus
tcatccattccttcttcttc

SEQ ID NO: 44495 - DNA, 20 bp, Influenza C virus
catccattccttcttcttcc

SEQ ID NO: 44496 - DNA, 20 bp, Human papillomavirus type 201
tttgatttagaattgaattg

SEQ ID NO: 44497 - DNA, 20 bp, Human papillomavirus type 201
ttgatttagaattgaattgt

SEQ ID NO: 44498 - DNA, 20 bp, Human papillomavirus type 201
tgatttagaattgaattgta

SEQ ID NO: 44499 - DNA, 20 bp, Human papillomavirus type 201
gatttagaattgaattgtat

SEQ ID NO: 44500 - DNA, 20 bp, Human papillomavirus type 201
atttagaattgaattgtatc

SEQ ID NO: 44501 - DNA, 20 bp, Human papillomavirus type 201
taggattgacactcgttgtc

SEQ ID NO: 44502 - DNA, 20 bp, Human papillomavirus type 201
acactcgttgtcacacttgt

SEQ ID NO: 44503 - DNA, 20 bp, Human papillomavirus type 201
tcacacttgtggaacaggtg

SEQ ID NO: 44504 - DNA, 20 bp, Human papillomavirus type 201
tggaacaggtgtcagatgct

SEQ ID NO: 44505 - DNA, 20 bp, Human papillomavirus type 201
ggtattagacaattagagtt

SEQ ID NO: 44506 - DNA, 20 bp, Human papillomavirus type 201
tttgatgacagtggaatcct

SEQ ID NO: 44507 - DNA, 20 bp, Human papillomavirus type 201
gatgacagtggaatcctaga

SEQ ID NO: 44508 - DNA, 20 bp, Human papillomavirus type 201
atgacagtggaatcctagaa

SEQ ID NO: 44509 - DNA, 20 bp, Human papillomavirus type 201
agaaaatggcgcgaaaaaca

SEQ ID NO: 44510 - DNA, 20 bp, Human papillomavirus type 201
gacatctgcaaaactgacat

SEQ ID NO: 44511 - DNA, 20 bp, Human papillomavirus type 201
cattatttttttataaatca

SEQ ID NO: 44512 - DNA, 20 bp, Human papillomavirus type 201
tttttttataaatcatcttt

SEQ ID NO: 44513 - DNA, 20 bp, Human papillomavirus type 201
ttttataaatcatcttttgg

SEQ ID NO: 44514 - DNA, 20 bp, Human papillomavirus type 201
tttataaatcatcttttgga
